United States Patent Application Publication US 2021/0199660 A1 - sequence listing, part 6

SEQ ID NO: 71789 - DNA, 120 bp, Artificial Sequence
  ENSG00000077454_22 (sequence is synthesized)
gacagctttcttgcgtctcatttgtcgccgagccccgagcgcacggtgatgctcgggtctgcccccgaccccctgccacaggccggaagccgcagggggcaccgtggggaagctaacccg

SEQ ID NO: 71790 - DNA, 120 bp, Artificial Sequence
  ENSG00000077454_23 (sequence is synthesized)
gccccttcccccaggagtcactgtgccagccccaccacatcctggaagaggagggggccccgggaaggggcctcccctacatcgctgctgtcgtccacgccctgctggaccggccttagg

SEQ ID NO: 71791 - DNA, 120 bp, Artificial Sequence
  ENSG00000077454_24 (sequence is synthesized)
ggtgaaggtgggggcacagggcccaccccgcccgggaccccgggagcagaagacgcgcctgggctccgcgctctcagagaagcacgtggtgagggtggcctgggcctgggcacccttggc

SEQ ID NO: 71792 - DNA, 120 bp, Artificial Sequence
  ENSG00000077454_25 (sequence is synthesized)
ctgccggcctggctgcctctggggtcgagggtctgggtggaaggaccgcgggtgtcgcaggtgtcgtgtcagccgcaataaacagaagccagaagccctctgggtggccctcaggtgtaa

SEQ ID NO: 71793 - DNA, 120 bp, Artificial Sequence
  ENSG00000077454_26 (sequence is synthesized)
aaatcttatctcctagctgggagtgctggccagctagagactgtccttccacgcctccacccgcaggatctgtccaaccatgcaccctccaccctggtgtctgtggatggtagggggtgg

SEQ ID NO: 71794 - DNA, 120 bp, Artificial Sequence
  ENSG00000077454_27 (sequence is synthesized)
tcacctacctcaacctcaggtagggaggccgagccagggccacgtgggagcgtgtgcttctcagtctcaagtactactgagtgacccacccagtgaccccgagaggatggcagtgctggg

SEQ ID NO: 71795 - DNA, 120 bp, Artificial Sequence
  ENSG00000077454_28 (sequence is synthesized)
gagaggaggtgtttgtatgtgcgtcccagttggctcaggctgcggtaacgaaaacactgcagaccgggtagcttatacatggcaggcattcatttttcacagttctggaagctgaagttc

SEQ ID NO: 71796 - DNA, 120 bp, Artificial Sequence
  ENSG00000077454_29 (sequence is synthesized)
ccatgcacaagtaggtttcctgccagcatcccctccccactcctcttcctatgaccatcatccctctaattcccttctgtctctcctcagcggctcgcctaagtccagtgcctcccaagc

SEQ ID NO: 71797 - DNA, 120 bp, Artificial Sequence
  ENSG00000077454_30 (sequence is synthesized)
ctgaatgccccttcccggccccaggcaccccctgctttctggcaggaggatggggggctgttgtccagcatcaggctgaccagatccgcctggctggccccagccctgcagaggatctat

SEQ ID NO: 71798 - DNA, 120 bp, Artificial Sequence
  ENSG00000077454_31 (sequence is synthesized)
gcttccacagcgttgatagtggcagcaagaggtggtctggaaatgaggtaagggcgtcctgtccatgggtgattgagggtgtcagccctgggagagcacctctgaactggggacctccaa

SEQ ID NO: 71799 - DNA, 120 bp, Artificial Sequence
  ENSG00000077454_32 (sequence is synthesized)
attgcagggtgccaggcagaggctggagctgtcctcttccttccctctgcccagcatcccagggaagggctggctcagcagagaccctgagcttagtcccacacaggaccccccaggtcc

SEQ ID NO: 71800 - DNA, 120 bp, Artificial Sequence
  ENSG00000077454_33 (sequence is synthesized)
tgagggctggttgggagagagggacacagaggggatgcctgtctcacctgcccctgtcgctgtgtccctggttccggccccagcgacagcacctgctccacggccacttggctccattca

SEQ ID NO: 71801 - DNA, 120 bp, Artificial Sequence
  ENSG00000077454_34 (sequence is synthesized)
gagaccaaacagcttcctcttccgttcctcctctcagagtggctcaggtgggtgtcctgccctccccagtgctgacccagtgcttgccagcaccaacggctacatcacccttctgccctg

SEQ ID NO: 71802 - DNA, 120 bp, Artificial Sequence
  ENSG00000077454_35 (sequence is synthesized)
tgccagcaccaacggctacatcacccttctgccctgggagccctctgggtctgttgtaccttttgtacctttgcgttgaaaatcccacaagcaagccgggtgtggtggctcacacctgta

SEQ ID NO: 71803 - DNA, 120 bp, Artificial Sequence
  ENSG00000077454_36 (sequence is synthesized)
gcctgggcaacatagcgagaccccatctccatgaaataaaaaaaaatcccacaagcagagaggcaggaggtgtaggtgccaggccactgggacccagctacagagtcagtggtgagcagt

SEQ ID NO: 71804 - DNA, 120 bp, Artificial Sequence
  ENSG00000077454_37 (sequence is synthesized)
aagagcgaggcactgtggaggtgagagcccagctatgcctctcccaagggaggggagctggaggaggggacagggcaggcgtgggcacaggcctgccctcagctgctctgctgttctctc

SEQ ID NO: 71805 - DNA, 120 bp, Artificial Sequence
  ENSG00000077454_38 (sequence is synthesized)
cttaggagcagcgaccacccgaattaagccctggggcaggggacagggagagggcaccaagcagcaggtaccccaagcccccaaactgacgccactgcccgatcctcccaccccccaacc

SEQ ID NO: 71806 - DNA, 120 bp, Artificial Sequence
  ENSG00000077454_39 (sequence is synthesized)
ccactcaagccatgcacaagtaggtttcctgccagcatcccctccccactcctcttcctatgaccatcatccctctaattcccttctgtctctcctcagcggctcgcctaagtccagtgc

SEQ ID NO: 71807 - DNA, 120 bp, Artificial Sequence
  ENSG00000077454_40 (sequence is synthesized)
gtgtttgtgtatgtgtgtgttgtgtctgtgcatgtgtctgtgtgtctgtgcatgtgtgtctatgtgcatgtgtatgtgtgtctgtgtctgttcgtgtgttgtgtttatgtctgtgttatt

SEQ ID NO: 71808 - DNA, 120 bp, Artificial Sequence
  ENSG00000077454_41 (sequence is synthesized)
tatgtcgtgtgtgtgcgtgtgtatgtttgtgtgtctgtgtttgtgtgtgtgttgtgtttatgtctgtgttatgtcgtgtgtgtctgtgcatgtgtatgtgtgtttgtgtctgtgtgtgtc

SEQ ID NO: 71809 - DNA, 120 bp, Artificial Sequence
  ENSG00000077454_42 (sequence is synthesized)
tttgtgtgtgtgtttgtgtttatgtctgttgtgtgtgtttaggtctgtgttgtgtgtgttgtatgtgttgtgtgtgtttgggtgtgtgttgtgtgggttgtgtgtatgtgttgtgtatgt

SEQ ID NO: 71810 - DNA, 120 bp, Artificial Sequence
  ENSG00000077454_43 (sequence is synthesized)
ttgtgtgggttgtgtgtatgtgttgtgtatgtttatgtgtgtgttgtgcatgttgtttgtgtctgtgtgtatgtatgttgtttgcgtgtgtgtgggttttgtgtgtgtgtgtgtgtgtgt

SEQ ID NO: 71811 - DNA, 120 bp, Artificial Sequence
  ENSG00000077454_44 (sequence is synthesized)
attcctgtgttgggatcaggtagatgcgggtgatgtgactaagatctggggccatctcttagggatttaatggcttcttgaggagagacagtcatagggaagttccgtcagggggttccc

SEQ ID NO: 71812 - DNA, 120 bp, Artificial Sequence
  ENSG00000077454_45 (sequence is synthesized)
cagacgggggctagagggaggtggcactggactctgcgtgggggtcctggggaagacttcaccggaggcgcaggcgcagtgggagccgaacattgaaggagaattccccagccttctgca

SEQ ID NO: 71813 - DNA, 120 bp, Artificial Sequence
  ENSG00000077454_46 (sequence is synthesized)
tccaggcagaggacccagcatgtgcaaagcatggggttaggaaggtgagccaggcatggcaggaaggcctgtgccatgctcaagtgtgaacttggttttgaagaacaaggagggagtgag

SEQ ID NO: 71814 - DNA, 120 bp, Artificial Sequence
  ENSG00000077454_47 (sequence is synthesized)
gtggtcatccactttccctgtctccctactccctgaccctttctgcacctgccctcttccttcccagtcaaaaggggtaggaagggctctctctgggccataaaaagaaatccaagcaag

SEQ ID NO: 71815 - DNA, 120 bp, Artificial Sequence
  ENSG00000077454_48 (sequence is synthesized)
atgtcctggggacagaggcaagagcaatgagttccatccaatctgggatgtctggaacgatccaccgaggaggtggtgatgcttgagctgaaccttgaaagatgcatggatggggaaaat

SEQ ID NO: 71816 - DNA, 120 bp, Artificial Sequence
  ENSG00000077454_49 (sequence is synthesized)
ggagttctcccagctgagcaaacagcacctgggaaggctcagaagctgagggcccggaggggtgggcagtgaggtgggaaacgcgggtggagccaggttgtggaagccttcctcatgctg

SEQ ID NO: 71817 - DNA, 120 bp, Artificial Sequence
  ENSG00000077454_50 (sequence is synthesized)
gggtggagccaggttgtggaagccttcctcatgctgggttagggagctgtgggttttattctgtgcttagggccgccatgaatccagactgtgccttttttttttttttttttgagacag

SEQ ID NO: 71818 - DNA, 120 bp, Artificial Sequence
  ENSG00000077454_51 (sequence is synthesized)
gactgtgcctttttaagatgagcaaaaggcacctttccctgtgggcaggcagcatttcatgcagggtgcagtgctgggcccgtgctggggaaaggggactcccgggcggccacaatccgc

SEQ ID NO: 71819 - DNA, 120 bp, Artificial Sequence
  ENSG00000077454_52 (sequence is synthesized)
tcaacatctgcagccctggttgcatgtcacaggaggtgtttgaacagggtttgtgccttgtgctgatcatttgaaaatggagggtgggttcgagtgtggagtgggcaggcgaggagatga

SEQ ID NO: 71820 - DNA, 120 bp, Artificial Sequence
  ENSG00000077454_53 (sequence is synthesized)
ggaggacagacagggctgggcgggacctgacgtccggatgggccttcccggggaagctgagctgacgtccagatgggccctctcagggaggctcgcttagaccgtggaccagaatcatgt

SEQ ID NO: 71821 - DNA, 120 bp, Artificial Sequence
  ENSG00000077454_54 (sequence is synthesized)
ggagagaggagcagggaggtttctcccggggaatgacttgagccacccaggggagaggctgtgctgggcccagggtgactggccagctggagccaagggtgagggagtgagcacgaggcc

SEQ ID NO: 71822 - DNA, 120 bp, Artificial Sequence
  ENSG00000077458_0 (sequence is synthesized)
ggatccacggccgcacagctaaacagcaaccccctacccgcttcgtctccctccgccgctatcggggcctaagcgggagcggctggcacggcgtcactgggtgggctggggcggaagtgg

SEQ ID NO: 71823 - DNA, 120 bp, Artificial Sequence
  ENSG00000077458_1 (sequence is synthesized)
ctgggtgggctggggcggaagtggaggcggagggagacggtggcgtcgtccgcggggccctgggctctcgcggcgaggccctggtgggcgcgaggcagggggagggggaggaggaggagc

SEQ ID NO: 71824 - DNA, 120 bp, Artificial Sequence
  ENSG00000077458_2 (sequence is synthesized)
tcgggttctccgtagggccccgcctcggagcgggcggcggcggaggaggagactgaggagcaggatggcggcctcggccctgtacgcctgcaccaagtgtacccagcgttatcctttcga

SEQ ID NO: 71825 - DNA, 120 bp, Artificial Sequence
  ENSG00000077458_3 (sequence is synthesized)
ggagctctcccagggccagcagctctgcaaggaatgtcggattgcacatcctattgtaaaatgtacttactgcagatcagaatttcaacaagagagcaaaactaacacaatttgtaagaa

SEQ ID NO: 71826 - DNA, 120 bp, Artificial Sequence
  ENSG00000077458_4 (sequence is synthesized)
gtgtgctcaaaatgtgaagcaatttgggacgcccaagccttgtcagtactgtaacataattgcagcatttattggtaccaagtgtcagcgttgcacaaattcagaaaaaaagtatggacc

SEQ ID NO: 71827 - DNA, 120 bp, Artificial Sequence
  ENSG00000077458_5 (sequence is synthesized)
acctcagacctgtgaacagtgcaaacagcaatgtgcttttgatcggaaggaggaaggaagaagaaaggttgatggaaagttattatgctggctctgtactttatcgtacaaaagagtttt

SEQ ID NO: 71828 - DNA, 120 bp, Artificial Sequence
  ENSG00000077458_6 (sequence is synthesized)
acagaagacgaaagaacaaaggaagagcctgggatcttcacattcaaattcatcttcttcatctcttactgagaaagaccagcatcatccaaaacatcatcaccaccatcatcaccatca

SEQ ID NO: 71829 - DNA, 120 bp, Artificial Sequence
  ENSG00000077458_7 (sequence is synthesized)
ccatcgtcacagcagtagccatcacaaaatcagcaatctaagtccagaagaagagcagggactgtggaaacagagccataaatcctctgcaacaattcagaatgaaactccaaagaaaaa

SEQ ID NO: 71830 - DNA, 120 bp, Artificial Sequence
  ENSG00000077458_8 (sequence is synthesized)
gcccaaattggaatctaagccatctaatggagatagtagctctataaatcagtcagcagatagtgggggaacagacaattttgtccttataagtcaattgaaagaagaagtgatgtcact

SEQ ID NO: 71831 - DNA, 120 bp, Artificial Sequence
  ENSG00000077458_9 (sequence is synthesized)
taagcgtctcttacagcagagagaccagaccattttagaaaaagataaaaagttaactgaactaaaggcagactttcagtaccaagagtcaaatttgagaacaaaaatgaacagtatgga

SEQ ID NO: 71832 - DNA, 120 bp, Artificial Sequence
  ENSG00000077458_10 (sequence is synthesized)
aaaagcccacaaagaaactgtggaacaacttcaggccaaaaacagagaactactcaaacaggtcgcagcattatcaaagggtaaaaaatttgacaaaagtggaagcatactaacatctcc

SEQ ID NO: 71833 - DNA, 120 bp, Artificial Sequence
  ENSG00000077458_11 (sequence is synthesized)
ttgagaaagtcatttgtttagcatttcttcttacaatgtaaatttggggaaaaaaaattctgtgaagcccttaaattctgtgtagtagaaaaatatttttgcacaccaaatgaattggtg

SEQ ID NO: 71834 - DNA, 120 bp, Artificial Sequence
  ENSG00000077458_12 (sequence is synthesized)
tgtttcctgttcacttttgtaattgatatacagcattttttaagttgtaaaacattcaaataaaacttcaactggtttgaagtaactttttaattatttgatatccaggaacttttttgc

SEQ ID NO: 71835 - DNA, 120 bp, Artificial Sequence
  ENSG00000077458_13 (sequence is synthesized)
cagcaatagtattaaacagttgtaaaggagtgcatgagtagtgctctttatgaaacgcaacatgcaataatagagtaggtatggtttcagaagtcagagcagcagggtttttttgttttg

SEQ ID NO: 71836 - DNA, 120 bp, Artificial Sequence
  ENSG00000077458_14 (sequence is synthesized)
tttttgttttacactatgctaatttcagacaaacagttttcaatttagaaatacaaaaacttttaaactcgaaaaatggcgaacactggttttttgggaattgtgtttttactttgcatc

SEQ ID NO: 71837 - DNA, 120 bp, Artificial Sequence
  ENSG00000077458_15 (sequence is synthesized)
aagatgaatttaggagaaaatcacggtgcttttattaaatgaacttcagatatatgtaaatttgttttttaaagttacatcattaacattagtaacctagcattttcattattggtatag

SEQ ID NO: 71838 - DNA, 120 bp, Artificial Sequence
  ENSG00000077458_16 (sequence is synthesized)
acctaatgtttttatttataggaatgctgatcttttgtacatacattttgttttaaaatcatgtttaataaatgtttgtatataaatgcatatgtacagaagcctatttcaaaaggaaat

SEQ ID NO: 71839 - DNA, 120 bp, Artificial Sequence
  ENSG00000077458_17 (sequence is synthesized)
caaagttgctagtaaaatgtttgagattacatttagaactaactgataatgcatatagattgtagaaaattttgtgatttgtttctgtgtgataagggaagctgttggtctttgaattca

SEQ ID NO: 71840 - DNA, 120 bp, Artificial Sequence
  ENSG00000077458_18 (sequence is synthesized)
tttaattatgtcaaaatagttccccaaagatttaattttaagttgcttcttaaagagtaattttattttttatgtcatgtggcttcatattagtattgtgtgagttacatgttttgcttt

SEQ ID NO: 71841 - DNA, 120 bp, Artificial Sequence
  ENSG00000077458_19 (sequence is synthesized)
atattttataaaattttttaaaaattttaatgtttctgcaatgatccatgtatctgctttccctatgtgtggttatctaagttaatatttatgtacaatgtaatttgtaaatttaaagca

SEQ ID NO: 71842 - DNA, 120 bp, Artificial Sequence
  ENSG00000077458_20 (sequence is synthesized)
aatctgaaaaaaattaaatgatctttttaatccaatctgtgataatctttgaataaattggaatctactataagattcaggcattataagtaaattgtcctaaagtctttaaaattgtct

SEQ ID NO: 71843 - DNA, 120 bp, Artificial Sequence
  ENSG00000077458_21 (sequence is synthesized)
ataaaaggttaaggtagggtgggataggttatatgaagttattgactatattctgatccagcggttttcagcctgaaatagaatttatctcctagttattatcagttcagagttttagtt

SEQ ID NO: 71844 - DNA, 120 bp, Artificial Sequence
  ENSG00000077458_22 (sequence is synthesized)
tgattttaaagtattgctagatacactgtatagagtgagttgcttctcttaataatttatgggcaaagataaatttgcttcatgtaaaactgttactaaatttataagttttaaaggttt

SEQ ID NO: 71845 - DNA, 120 bp, Artificial Sequence
  ENSG00000077458_23 (sequence is synthesized)
tgttttatacaagcattgattgtgaatgtcatatcaaagattggctttcttaagaacacatgattgaaacaatttttttttaacatgacgtgtttcaatagactgttctcatagttcatt

SEQ ID NO: 71846 - DNA, 120 bp, Artificial Sequence
  ENSG00000077458_24 (sequence is synthesized)
ataaagtgaataccaaataattctttgtccattttgaaagcataatatagggtaattttcaagtgatacaaaaagattcagttagaatcttgtaaactaaaccagtttatttttatggga

SEQ ID NO: 71847 - DNA, 120 bp, Artificial Sequence
  ENSG00000077458_25 (sequence is synthesized)
tcttcatgtaataattttcttaaatttagtactctcaaccatgatagataatgccttaacatggattttaacgtttgcaggatttgctaaattcataagatagttattacctttctttga

SEQ ID NO: 71848 - DNA, 120 bp, Artificial Sequence
  ENSG00000077458_26 (sequence is synthesized)
aatttgtaatgttttatattcttgtttcatagccatttgtcagtccacagtggtcattatggttttactttttgatagttcttacaccttgttggagaaactacaaaagaaagttgtcct

SEQ ID NO: 71849 - DNA, 120 bp, Artificial Sequence
  ENSG00000077458_27 (sequence is synthesized)
cgtccttccccttagctaacatcaaaattaaaaagttgaatattaatattagctaacattaaaatggaaggtaattcagttttagtgttagctaacattaacagtctaataatttagctt

SEQ ID NO: 71850 - DNA, 120 bp, Artificial Sequence
  ENSG00000077458_28 (sequence is synthesized)
tgtaaattccaaggctaaaaccctttcatgggcttcacagtatttagtcctaattaaatacccttctttattccatgaccttattttataacttaaatttttttgcaattgtataaatta

SEQ ID NO: 71851 - DNA, 120 bp, Artificial Sequence
  ENSG00000077458_29 (sequence is synthesized)
gtaattcagtcccagtcctggatctctgtagtgttttgacataataaactgatattctttaaatgtggacctgtaaggagatactatggtgtggtgtattgtgcttttagcctgttttcc

SEQ ID NO: 71852 - DNA, 120 bp, Artificial Sequence
  ENSG00000077458_30 (sequence is synthesized)
actattaattagcatttaccagtaagggtcattttgactcaagttatttatgtattaatagcctgtgaatattgcagtcctttttagattatattggtctaaatatgcattctgcagtga

SEQ ID NO: 71853 - DNA, 120 bp, Artificial Sequence
  ENSG00000077458_31 (sequence is synthesized)
acctgttaagctgttcacatgtatagactattgaaatactgtacttgtacacatctgactgttgacattttgtacttttttctagatccaatatttcacaataaaaaacttgtcaaaggc

SEQ ID NO: 71854 - DNA, 120 bp, Artificial Sequence
  ENSG00000077458_32 (sequence is synthesized)
atcaaagaaaatcaaggtatgtttttatagtttatgttgaatatgcttgttctcattttttcaaagttgaaaactcacagtatatattccttatatgatttgtacctatatgtgatgaaa

SEQ ID NO: 71855 - DNA, 120 bp, Artificial Sequence
  ENSG00000077458_33 (sequence is synthesized)
agttaacattttctaaataaatgatatggtcattaaggtaactaggatattagtagaaggacgtttcctcaaattcttgattcatgagacttctctacatatgtacctttattttcgttc

SEQ ID NO: 71856 - DNA, 120 bp, Artificial Sequence
  ENSG00000077458_34 (sequence is synthesized)
tttaaaaccttttttatgtgtagtttttgtattatctaacagactatgcaaatcacaaatctatttctcacgatcttagagtaatagttacatgactagaaataaatactagttgaatgc

SEQ ID NO: 71857 - DNA, 120 bp, Artificial Sequence
  ENSG00000077458_35 (sequence is synthesized)
agggcaacaaacttgacagaaaacaaattttttacctgagttttcttaattccagaaatatgtctacaacactgggtatatgctatgccgcaaatatttaatgtttttaaaagtctcaaa

SEQ ID NO: 71858 - DNA, 120 bp, Artificial Sequence
  ENSG00000077458_36 (sequence is synthesized)
tgttactgtacaaattggctgcctattgctttacactagaagtattgacccccttaaagctaatactgaattatatttctgcaggtgtatgtaatgtgtgccattagtaaggtaatttgc

SEQ ID NO: 71859 - DNA, 120 bp, Artificial Sequence
  ENSG00000077458_37 (sequence is synthesized)
cagttgcatccatttctgtcaggtacatatttttttgcattagccttaaggatgtttgtggaattgtctaatttatgcaatttgaacacctgctaattttccttctacttcatttaactg

SEQ ID NO: 71860 - DNA, 120 bp, Artificial Sequence
  ENSG00000077458_38 (sequence is synthesized)
ggagctctcccagggccagcagctctgcaaggtccgtgggctccgggaggcgggcgggatgggtgtcctcggccgtagccggagggggccgggtagccgctgcactgcagcccctcttcg

SEQ ID NO: 71861 - DNA, 120 bp, Artificial Sequence
  ENSG00000077458_39 (sequence is synthesized)
ccggcgcctcaggggtttgggagtctggagccctcgcctccccactcggggacccctttttctgggggcttgaacattagctgggaacggaccctgaaagggaggcagaatcgtgccctt

SEQ ID NO: 71862 - DNA, 120 bp, Artificial Sequence
  ENSG00000077458_40 (sequence is synthesized)
ttccaggcggcccaggagggtgccgggccccgtcagcgtctgggggtctcaggagtggggttgagtgaggcagccacctgtctatgccgcagagacccaggggtggagatgttttcatct

SEQ ID NO: 71863 - DNA, 120 bp, Artificial Sequence
  ENSG00000077458_41 (sequence is synthesized)
cggttttctgcctggtctgtcctcttcttccaccaggaggcaggggacggtttttgcactttcttgctaggaacccgaagccgcaaagctgatggcatccttcttccctgtccaggaaag

SEQ ID NO: 71864 - DNA, 120 bp, Artificial Sequence
  ENSG00000077458_42 (sequence is synthesized)
cgaagcgactggtttgggaacagaatgctctgatttggagctcctcccatcccattaaagcctggatgctgtctgtgagcaacggtgcaaaataataagtagtttcacatttaaccaatc

SEQ ID NO: 71865 - DNA, 120 bp, Artificial Sequence
  ENSG00000077458_43 (sequence is synthesized)
ccctaaggaattatattgtgattggccacttatatgataaagcatccagttctttacgttggggccaggttttataaatgttttagactttcactaggttgggtaaacagttttctacca

SEQ ID NO: 71866 - DNA, 120 bp, Artificial Sequence
  ENSG00000077458_44 (sequence is synthesized)
aggtaaaaatgaattcttttagtgttatgaaaattcaacttagttgaatagttatggttgaatgccagttattactagataaaaaaatagaaacatgtattttctacattgacttgagtc

SEQ ID NO: 71867 - DNA, 120 bp, Artificial Sequence
  ENSG00000077458_45 (sequence is synthesized)
gacgtcacaaggtagcgcgtaacggggcccgctggggcagacaacgccggggttacaggccggctctgcggggattctacggagggtcgggcctcctccagtaagaagcgtgggcgagta

SEQ ID NO: 71868 - DNA, 120 bp, Artificial Sequence
  ENSG00000077458_46 (sequence is synthesized)
gtggtgtcgccagtggcaactgaagggagtaatggagataaaacaaaagcgaaggcgaagttaaagcactccacgagttccctcggattaaacgccggagagagcgtgaatttgcctcgg

SEQ ID NO: 71869 - DNA, 120 bp, Artificial Sequence
  ENSG00000077458_47 (sequence is synthesized)
atcagggatgggaaagggaggccgagaaggaagcggatccacggccgcacagctaaacagcaaccccctacccgcttcgtctccctccgccgctatcggggcctaagcgggagcggctgg

SEQ ID NO: 71870 - DNA, 120 bp, Artificial Sequence
  ENSG00000077463_0 (sequence is synthesized)
attgttcccgtggggcagtcgaggatgtcggtgaattacgcggcggggctgtcgccgtacgcggacaagggcaagtgcggcctcccggagatcttcgaccccccggaggagctggagcgg

SEQ ID NO: 71871 - DNA, 120 bp, Artificial Sequence
  ENSG00000077463_1 (sequence is synthesized)
aaggtgtgggaactggcgaggctggtctggcagtcttccagtgtggtgttccacacgggtgccggcatcagcactgcctctggcatccccgacttcaggggtccccacggagtctggacc

SEQ ID NO: 71872 - DNA, 120 bp, Artificial Sequence
  ENSG00000077463_2 (sequence is synthesized)
atggaggagcgaggtctggcccccaagttcgacaccacctttgagagcgcgcggcccacgcagacccacatggcgctggtgcagctggagcgcgtgggcctcctccgcttcctggtcagc

SEQ ID NO: 71873 - DNA, 120 bp, Artificial Sequence
  ENSG00000077463_3 (sequence is synthesized)
cagaacgtggacgggctccatgtgcgctcaggcttccccagggacaaactggcagagctccacgggaacatgtttgtggaagaatgtgccaagtgtaagacgcagtacgtccgagacaca

SEQ ID NO: 71874 - DNA, 120 bp, Artificial Sequence
  ENSG00000077463_4 (sequence is synthesized)
gtcgtgggcaccatgggcctgaaggccacgggccggctctgcaccgtggctaaggcaagggggctgcgagcctgcaggggagagctgagggacaccatcctagactgggaggactccctg

SEQ ID NO: 71875 - DNA, 120 bp, Artificial Sequence
  ENSG00000077463_5 (sequence is synthesized)
cccgaccgggacctggcactcgccgatgaggccagcaggaacgccgacctgtccatcacgctgggtacatcgctgcagatccggcccagcgggaacctgccgctggctaccaagcgccgg

SEQ ID NO: 71876 - DNA, 120 bp, Artificial Sequence
  ENSG00000077463_6 (sequence is synthesized)
acgaccgccatgctgacctccgcatccatggctacgttgacgaggtcatgacccggctcatgaagcacctggggctggagatccccgcctgggacggcccccgtgtgctggagagggcgc

SEQ ID NO: 71877 - DNA, 120 bp, Artificial Sequence
  ENSG00000077463_7 (sequence is synthesized)
tgccacccctgccccgcccgcccacccccaagctggagcccaaggaggaatctcccacccggatcaacggctctatccccgccggccccaagcaggagccctgcgcccagcacaacggct

SEQ ID NO: 71878 - DNA, 120 bp, Artificial Sequence
  ENSG00000077463_8 (sequence is synthesized)
cagagcccgccagccccaaacgggagcggcccaccagccctgccccccacagaccccccaaaagggtgaaggccaaggcggtccccagctgaccagggtgcttggggagggtggggcttt

SEQ ID NO: 71879 - DNA, 120 bp, Artificial Sequence
  ENSG00000077463_9 (sequence is synthesized)
ttgtagaaactgtggattctttttctctcgtggtctcactttgttacttgtttctgtccccgggagcctcagggctctgagagctgtgctccaggccaggggttacacctgccctccgtg

SEQ ID NO: 71880 - DNA, 120 bp, Artificial Sequence
  ENSG00000077463_10 (sequence is synthesized)
gtccctccctgggctccaggggcctctggtgcggttccgggaagaagccacaccccagaggtgacaggtgagcccctgccacaccccagcctctgacttgctgtgttgtccagaggtgag

SEQ ID NO: 71881 - DNA, 120 bp, Artificial Sequence
  ENSG00000077463_11 (sequence is synthesized)
gctgggccctccctggtctccagcttaaacaggagtgaactccctctgtccccagggcctcccttctgggccccctacagcccaccctacccctcctccatgggccctgcaggaggggag

SEQ ID NO: 71882 - DNA, 120 bp, Artificial Sequence
  ENSG00000077463_12 (sequence is synthesized)
acccaccttgaagtgggggatcagtagaggcttgcactgcctttggggctggagggagacgtgggtccaccaggcttctggaaaagtcctcaatgcaataaaaacaatttctttcttgca

SEQ ID NO: 71883 - DNA, 120 bp, Artificial Sequence
  ENSG00000077463_13 (sequence is synthesized)
tcccccacgcctgacccgtcccgcccctcggcaggaccgccatgctgacctccgcatccatggctacgttgacgaggtcatgacccggctcatgaagcacctggggctggagatccccgc

SEQ ID NO: 71884 - DNA, 120 bp, Artificial Sequence
  ENSG00000077463_14 (sequence is synthesized)
cgggacctggcactcgccgatgaggccagcaggtctgaccccccacccccagggagcccatggtggggcggggcgggacgacagcagaaacacagccagctccagcatgggacagtggct

SEQ ID NO: 71885 - DNA, 120 bp, Artificial Sequence
  ENSG00000077463_15 (sequence is synthesized)
tcatggctctgggtgggtgctacacaaggaaaccaaggcttccgccaggtgtctcctctatccagtgctgcccagccgggaggtgaccgagccagggtcccaccctaggtgtccaagctc

SEQ ID NO: 71886 - DNA, 120 bp, Artificial Sequence
  ENSG00000077463_16 (sequence is synthesized)
ttaccacactgtgatactccccggaagtgtctaagggcccgcccagatcaatgaccccgccaacggaccgcagaggagggcagggcgggatcccaaaggctgactcgggagtggggctgg

SEQ ID NO: 71887 - DNA, 120 bp, Artificial Sequence
  ENSG00000077463_17 (sequence is synthesized)
ccttgaccgccccggtgagcacagatggcctaggtgtgaaccggcccccagggctggctcgggatgttggcaggagcagggcatcaggctcagcccacgctccccggccccaggaacgcc

SEQ ID NO: 71888 - DNA, 120 bp, Artificial Sequence
  ENSG00000077463_18 (sequence is synthesized)
gggctgcgagcctgcaggtgagccacccccacccatgccctgggctccaggggaggctgcgaggcccctgaggactctcctcagcttcctcattgcaggggagagctgagggacaccatc

SEQ ID NO: 71889 - DNA, 120 bp, Artificial Sequence
  ENSG00000077463_19 (sequence is synthesized)
ggcttccctgcgagccacacacatctgggaatgagaacacatccatctgctttcctcctggatgtgtcctgggtactccctttaagatgtgtcccttggctgggcatggtggatcacaag

SEQ ID NO: 71890 - DNA, 120 bp, Artificial Sequence
  ENSG00000077463_20 (sequence is synthesized)
tttatctctctgtctgtgtcttgttctatccccctctccctgttcttgcaactcaccctctatttctgtttctgattccctctctctgtctccctgtctctctctgtctcctgattttct

SEQ ID NO: 71891 - DNA, 120 bp, Artificial Sequence
  ENSG00000077498_0 (sequence is synthesized)
actgtagtagtagctggaaagagaaatctgtgactccaattagccagttcctgcagaccttgtgaggactagaggaagaatgctcctggctgttttgtactgcctgctgtggagtttcca

SEQ ID NO: 71892 - DNA, 120 bp, Artificial Sequence
  ENSG00000077498_1 (sequence is synthesized)
gacctccgctggccatttccctagagcctgtgtctcctctaagaacctgatggagaaggaatgctgtccaccgtggagcggggacaggagtccctgtggccagctttcaggcagaggttc

SEQ ID NO: 71893 - DNA, 120 bp, Artificial Sequence
  ENSG00000077498_2 (sequence is synthesized)
ctgtcagaatatccttctgtccaatgcaccacttgggcctcaatttcccttcacaggggtggatgaccgggagtcgtggccttccgtcttttataataggacctgccagtgctctggcaa

SEQ ID NO: 71894 - DNA, 120 bp, Artificial Sequence
  ENSG00000077498_3 (sequence is synthesized)
cttcatgggattcaactgtggaaactgcaagtttggcttttggggaccaaactgcacagagagacgactcttggtgagaagaaacatcttcgatttgagtgccccagagaaggacaaatt

SEQ ID NO: 71895 - DNA, 120 bp, Artificial Sequence
  ENSG00000077498_4 (sequence is synthesized)
ttttgcctacctcactttagcaaagcataccatcagctcagactatgtcatccccatagggacctatggccaaatgaaaaatggatcaacacccatgtttaacgacatcaatatttatga

SEQ ID NO: 71896 - DNA, 120 bp, Artificial Sequence
  ENSG00000077498_5 (sequence is synthesized)
cctctttgtctggatgcattattatgtgtcaatggatgcactgcttgggggatctgaaatctggagagacattgattttgcccatgaagcaccagcttttctgccttggcatagactctt

SEQ ID NO: 71897 - DNA, 120 bp, Artificial Sequence
  ENSG00000077498_6 (sequence is synthesized)
cttgttgcggtgggaacaagaaatccagaagctgacaggagatgaaaacttcactattccatattgggactggcgggatgcagaaaagtgtgacatttgcacagatgagtacatgggagg

SEQ ID NO: 71898 - DNA, 120 bp, Artificial Sequence
  ENSG00000077498_7 (sequence is synthesized)
tcagcaccccacaaatcctaacttactcagcccagcatcattcttctcctcttggcagattgtctgtagccgattggaggagtacaacagccatcagtctttatgcaatggaacgcccga

SEQ ID NO: 71899 - DNA, 120 bp, Artificial Sequence
  ENSG00000077498_8 (sequence is synthesized)
ggaaaccatgacaaatccagaaccccaaggctcccctcttcagctgatgtagaattttgcctgagtttgacccaatatgaatctggttccatggataaagctgccaatttcagctttaga

SEQ ID NO: 71900 - DNA, 120 bp, Artificial Sequence
  ENSG00000077498_9 (sequence is synthesized)
aatacactggaaggatttgctagtccacttactgggatagcggatgcctctcaaagcagcatgcacaatgccttgcacatctatatgaatggaacaatgtcccaggtacagggatctgcc

SEQ ID NO: 71901 - DNA, 120 bp, Artificial Sequence
  ENSG00000077498_10 (sequence is synthesized)
aacgatcctatcttccttcttcaccatgcatttgttgacagtatttttgagcagtggctccgaaggcaccgtcctcttcaagaagtttatccagaagccaatgcacccattggacataac

SEQ ID NO: 71902 - DNA, 120 bp, Artificial Sequence
  ENSG00000077498_11 (sequence is synthesized)
cgggaatcctacatggttccttttataccactgtacagaaatggtgatttctttatttcatccaaagatctgggctatgactatagctatctacaagattcagacccagactcttttcaa

SEQ ID NO: 71903 - DNA, 120 bp, Artificial Sequence
  ENSG00000077498_12 (sequence is synthesized)
gactacattaagtcctatttggaacaagcgagtcggatctggtcatggctccttggggcggcgatggtaggggccgtcctcactgccctgctggcagggcttgtgagcttgctgtgtcgt

SEQ ID NO: 71904 - DNA, 120 bp, Artificial Sequence
  ENSG00000077498_13 (sequence is synthesized)
cacaagagaaagcagcttcctgaagaaaagcagccactcctcatggagaaagaggattaccacagcttgtatcagagccatttataaaaggcttaggcaatagagtagggccaaaaagcc

SEQ ID NO: 71905 - DNA, 120 bp, Artificial Sequence
  ENSG00000077498_14 (sequence is synthesized)
tgacctcactctaactcaaagtaatgtccaggttcccagagaatatctgctggtatttttctgtaaagaccatttgcaaaattgtaacctaatacaaagtgtagccttcttccaactcag

SEQ ID NO: 71906 - DNA, 120 bp, Artificial Sequence
  ENSG00000077498_15 (sequence is synthesized)
gtagaacacacctgtctttgtcttgctgttttcactcagcccttttaacattttcccctaagcccatatgtctaaggaaaggatgctatttggtaatgaggaactgttatttgtatgtga

SEQ ID NO: 71907 - DNA, 120 bp, Artificial Sequence
  ENSG00000077498_16 (sequence is synthesized)
attaaagtgctcttattttaaaaaattgaaataattttgatttttgccttctgattatttaaagatctatatatgttttattggccccttctttattttaataaaacagtgagaaatcta

SEQ ID NO: 71908 - DNA, 120 bp, Artificial Sequence
  ENSG00000077498_17 (sequence is synthesized)
ttgagtttctactccattcttactggacttttttcaatcctttaattttttagtttttttccagtcaaagtttttagttgcatgaaatagaaactaactctgcctgatttaagtaggaaa

SEQ ID NO: 71909 - DNA, 79 bp, Artificial Sequence
  ENSG00000077498_18 (sequence is synthesized)
ctggttccatggataaagctgccaatttcagctttagaaatacactggaagagatgggatttctccataccaccttagc

SEQ ID NO: 71910 - DNA, 120 bp, Artificial Sequence
  ENSG00000077498_19 (sequence is synthesized)
tggcctaacttcaaggtatcaaagacaaattaacaatgtctgatgcatacataggactgctttgtaatcttctacactaatgatttgtactattttggtttcagaatccatttataactc

SEQ ID NO: 71911 - DNA, 120 bp, Artificial Sequence
  ENSG00000077498_20 (sequence is synthesized)
ttacaatatatgaaaaatttctgccagcttttatttatgtgggttatatttatgactacttctcatttgtaaaactgaaataaaaagatcttgcatatttgtattaatttatttaaaaaa

SEQ ID NO: 71912 - DNA, 120 bp, Artificial Sequence
  ENSG00000077514_0 (sequence is synthesized)
aaagacgtttcccgccggcgggagctgtggctgtgattgagagaggggttagaggcgggtcccagcgctgccgcaccatggcggaccagctttatctggaaaatatagacgagttcgtca

SEQ ID NO: 71913 - DNA, 120 bp, Artificial Sequence
  ENSG00000077514_1 (sequence is synthesized)
cggaccaaaacaagatcgtgacatacaaatggctgagctatacactaggggttcatgttaaccaggccaaacagatgctgtatgattatgttgaaaggaaacgaaaagaaaattcaggag

SEQ ID NO: 71914 - DNA, 120 bp, Artificial Sequence
  ENSG00000077514_2 (sequence is synthesized)
cccaactgcatgttacctacttggtgtctggcagtctcattcagaatggacattcctgccacaaggttgcagtagtgagagaagataaattggaagcagtgaagtccaagctagctgtga

SEQ ID NO: 71915 - DNA, 120 bp, Artificial Sequence
  ENSG00000077514_3 (sequence is synthesized)
ctgccagcatccatgtgtacagcatccagaaagccatgctaaaggacagtgggcctctgttcaatactgactatgacatccttaaaagcaacttgcagaactgcagcaaatttagtgcta

SEQ ID NO: 71916 - DNA, 120 bp, Artificial Sequence
  ENSG00000077514_4 (sequence is synthesized)
tacaatgtgcagctgccgtccctagagctcctgctgaatcctcttcgtcttccaaaaagtttgagcagtcacatcttcacatgtcaagtgagacacaagccaacaatgagctgaccacca

SEQ ID NO: 71917 - DNA, 120 bp, Artificial Sequence
  ENSG00000077514_5 (sequence is synthesized)
atggtcatggcccacctgcatccaagcaggtttcccagcagcccaaaggaattatgggaatgtttgcctccaaagctgctgctaaaacccaagaaaccaacaaggaaacgaaaacagagg

SEQ ID NO: 71918 - DNA, 120 bp, Artificial Sequence
  ENSG00000077514_6 (sequence is synthesized)
ctaaagaagtaacaaatgcatctgcagcaggcaacaaggcaccagggaaagggaatatgatgagcaacttttttggaaaagctgctatgaataaatttaaagtcaatttggactcagaac

SEQ ID NO: 71919 - DNA, 120 bp, Artificial Sequence
  ENSG00000077514_7 (sequence is synthesized)
aagcagtgaaagaagaaaaaatagtggagcagcctacagtgtctgtcacggaaccaaagctggcaactcctgcaggcctgaaaaaatccagcaaaaaagcagagcctgttaaggtgctgc

SEQ ID NO: 71920 - DNA, 120 bp, Artificial Sequence
  ENSG00000077514_8 (sequence is synthesized)
agaaggaaaaaaaaagggggaagcgagtagcattatctgatgatgagacaaaggaaactgaaaacatgaggaaaaagaggagaagaatcaaacttcctgaatctgatagcagtgaagatg

SEQ ID NO: 71921 - DNA, 120 bp, Artificial Sequence
  ENSG00000077514_9 (sequence is synthesized)
aagtctttccagactctcctggggcttatgaagctgagtcaccatccccacctcctcctccgtctccacctcttgaaccagtgccaaagactgagcctgaacctccttctgtcaagagct

SEQ ID NO: 71922 - DNA, 120 bp, Artificial Sequence
  ENSG00000077514_10 (sequence is synthesized)
caagtggagaaaacaaaagaaaacgaaaacgcgtactaaaatctaaaacttacctggatggggaaggctgcatagtgactgaaaaagtctacgagagtgaatcctgcacagatagtgaag

SEQ ID NO: 71923 - DNA, 120 bp, Artificial Sequence
  ENSG00000077514_11 (sequence is synthesized)
aggagcttaacatgaagacatcctcagtacacagaccccctgccatgactgtgaaaaaagaacccagagaggaacgaaagggccccaagaaagggactgctgctctgggcaaagccaaca

SEQ ID NO: 71924 - DNA, 120 bp, Artificial Sequence
  ENSG00000077514_12 (sequence is synthesized)
gacaggtgtccattactggcttcttccagaggaaataaactgccatctctggtagatcagagacttggagtggtcaagggagaagaccaagaaatgtactcctcacttactatgtaagtt

SEQ ID NO: 71925 - DNA, 120 bp, Artificial Sequence
  ENSG00000077514_13 (sequence is synthesized)
catctagatctccacctcacctgtatcaaaagactgttctttcatcctgtgaggtttatactatttctggtttttaaccaaaaggaaatcatctggaagcaggaggcaaaaagctgttac

SEQ ID NO: 71926 - DNA, 120 bp, Artificial Sequence
  ENSG00000077514_14 (sequence is synthesized)
cttctaatgacatttaaaaagcacagtctttgacctgtccaggagaaggatttactccaaaattatactggaacagttttcagaattctcactgaagccatttagtggctaacccactgt

SEQ ID NO: 71927 - DNA, 120 bp, Artificial Sequence
  ENSG00000077514_15 (sequence is synthesized)
taagaattcatgtgggtgtttcttatccttacattctgctggatacgtttacccctcttgtcttcctgcagtaccacacttctgtcccctaacctcctgaggctgttctctgtaagtctt

SEQ ID NO: 71928 - DNA, 120 bp, Artificial Sequence
  ENSG00000077514_16 (sequence is synthesized)
ttaagttttggttggactaaaggctgaagtgaaaatctccctgtaatcctcttcctccattatgcagtacacggacacctggctacagaccaggacgtggcttgtgttctgttcctttca

SEQ ID NO: 71929 - DNA, 120 bp, Artificial Sequence
  ENSG00000077514_17 (sequence is synthesized)
caaaagctctctgggaccttcacttgcaattagtggttagggaaaagcctcaggcagaacacaaatagaaatttaatgatgtgttcaactccaccagaaattacctcgagtcagcattga

SEQ ID NO: 71930 - DNA, 120 bp, Artificial Sequence
  ENSG00000077514_18 (sequence is synthesized)
cgatattggaggagctgccgtgctgctgatacggggtgtgctttatgctgctctttgcggtttgttgatcccctcctcccccactctcaatacctagagagtgaaacccgtacaatgaga

SEQ ID NO: 71931 - DNA, 120 bp, Artificial Sequence
  ENSG00000077514_19 (sequence is synthesized)
taaagactaaaaagagaaatcccttcctatatacagtgtgctacatttacaaaaaatttctccttaagaaaacagaatattcaaaaacagcacttttccaggaagttagtgaggaagata

SEQ ID NO: 71932 - DNA, 120 bp, Artificial Sequence
  ENSG00000077514_20 (sequence is synthesized)
aggcacacatttatttataaatggatgttgctcctttgtatttttagcttccctatttgcttaaaagtacaggctccctaagagaggatggagagggagagactgaattgttagtaggtc

SEQ ID NO: 71933 - DNA, 120 bp, Artificial Sequence
  ENSG00000077514_21 (sequence is synthesized)
taaacatcaaagaaaacatttttattagttacttatggaaaatcatctattacaatgataaccttcaagtgacttccattatggctggacaggcggtgagctcagtggattgcagtggtg

SEQ ID NO: 71934 - DNA, 120 bp, Artificial Sequence
  ENSG00000077514_22 (sequence is synthesized)
tgctggtgattttgcacagtgagctctgcggaaggggtcaggctcaactgctgatgtgtctcacacgtagcagacaaggggtgtctgactggcttcttttgcctcaagatggtgtatgtc

SEQ ID NO: 71935 - DNA, 120 bp, Artificial Sequence
  ENSG00000077514_23 (sequence is synthesized)
gtaagtgatgcaatcagctgtctgctttttaaggttgggattgtgctgactttgggattaacatgagcttctttagcaaccaagcatgaacttgattaagaccagaagtttgggagatga

SEQ ID NO: 71936 - DNA, 120 bp, Artificial Sequence
  ENSG00000077514_24 (sequence is synthesized)
gtcctggcattatgtctaggactaaagcagtggctttgtatagcaagctgagtaaaggttgacatattccaaaacccttctttttaaaaggaaaaaggatggagagaaggatggaaagcc

SEQ ID NO: 71937 - DNA, 120 bp, Artificial Sequence
  ENSG00000077514_25 (sequence is synthesized)
tggacttaaacctttagaaaaaacttctggagagaaatcccttttaaacagttacttttgtcattgcctctggtcatttgtctaaataggaatggaaaattaaaagaaaagcaacaatcc

SEQ ID NO: 71938 - DNA, 120 bp, Artificial Sequence
  ENSG00000077514_26 (sequence is synthesized)
aatcttttttctaaaaattatgctggggtctcgactaaaactgaatttgaattggaaaattctggtgttggttggagttccatcttgcaagggataatacaaatcctatgatctctatgc

SEQ ID NO: 71939 - DNA, 120 bp, Artificial Sequence
  ENSG00000077514_27 (sequence is synthesized)
ccaatatgctgcctcaactctgagctgtctgcaaggcttagtaagtattgagtggtgttttttttttctttttatacaataccatgttaaccacatgagttaaataaatttgagaagttg

SEQ ID NO: 71940 - DNA, 120 bp, Artificial Sequence
  ENSG00000077514_28 (sequence is synthesized)
ttttaaaacagtgcttcaaactgagtatctgatgagtctcttatttgatggatggtaacagtgttgcaattatttaagctctgaatgggaagaaggctggttttcagttgatattgttaa

SEQ ID NO: 71941 - DNA, 120 bp, Artificial Sequence
  ENSG00000077514_29 (sequence is synthesized)
aactgcatacccacagtctgagatgaacaagttatttgctgccttcatcgtttttttcagcactggggaaatgttagtttcagccaacctcattttttagttcatctagaagaaaatcta

SEQ ID NO: 71942 - DNA, 120 bp, Artificial Sequence
  ENSG00000077514_30 (sequence is synthesized)
gcacattgtattagtttggcttcatcacttgctagctgtatgactgtgggcaagtttcacagcctcaagttctttatcaaaataaaactaaaatgagttaccaagggtgtcaagactaaa

SEQ ID NO: 71943 - DNA, 120 bp, Artificial Sequence
  ENSG00000077514_31 (sequence is synthesized)
gctgtggctgtgattgagagaggggttagaggcgggtcccagcgctgccgcaccatggcggaccagctttatctggaaaatatagacgagttcgtcacggaccaaaacaagatcgtgagc

SEQ ID NO: 71944 - DNA, 120 bp, Artificial Sequence
  ENSG00000077514_32 (sequence is synthesized)
agctactactggggaacgcgggcgtgcgaccggggtcctgggcccggctagggcggcgggagccttgaccctctgtctgcttgtggcttcgtggggaccaggggagacaggtccccacga

SEQ ID NO: 71945 - DNA, 120 bp, Artificial Sequence
  ENSG00000077514_33 (sequence is synthesized)
ggggacctgggcgagctctgtgccccagagcgagcgaggactcgtcgggaaggtcctccagcacacacggaagtccgcgtcccttgggtgggcgtgctgggaacagagcctggggctgga

SEQ ID NO: 71946 - DNA, 120 bp, Artificial Sequence
  ENSG00000077514_34 (sequence is synthesized)
gatggggaaggctgcatagtggtgctggacatgcagtcccactcactagacattttggagcattacgtggaaatgcccatccagcggttggagaggtagggtaggatctgaagatctcaa

SEQ ID NO: 71947 - DNA, 120 bp, Artificial Sequence
  ENSG00000077514_35 (sequence is synthesized)
gcctcggaagcacagatttaggagtcactgacttagaggtggtagtttcaagtgacgtgatggttaagttcaccaagagaaaaagtttagaaagaaaaagagctgagccttctgccctat

SEQ ID NO: 71948 - DNA, 120 bp, Artificial Sequence
  ENSG00000077514_36 (sequence is synthesized)
tttttagaagagggtttctgagagcctgggtattcaaatgataagatgggtgtgtggtgcagggacaagacttcagtcagaggacccagggtctctgctttagcaccatcttgctgtgtg

SEQ ID NO: 71949 - DNA, 120 bp, Artificial Sequence
  ENSG00000077514_37 (sequence is synthesized)
aaagcgcggggccagactcatcggttcattcaacaaccagtatttagtgcctgctgtgttctgcaggccctgccataggcgcttgatacagcggtgcatagcgtatgagaaagatctgtc

SEQ ID NO: 71950 - DNA, 120 bp, Artificial Sequence
  ENSG00000077514_38 (sequence is synthesized)
aaaaatgctactgttcagaaaatttgatggactaccagatttcatttatcttttaagtcattaattaagagttgatcatgtaaaaactcttactgatgtcttacttgtgccttcttttct

SEQ ID NO: 71951 - DNA, 120 bp, Artificial Sequence
  ENSG00000077514_39 (sequence is synthesized)
agcaaagagccttgtatgtatgtagtagctgcttatttaatgcttgttggataattgaaaggccaatcagggaagtaagaaggaatttggaaagattcttgataacctggttgtagcttc

SEQ ID NO: 71952 - DNA, 120 bp, Artificial Sequence
  ENSG00000077514_40 (sequence is synthesized)
cagcagtctctagagaactctagaacttttttattcaagtcacctcatgaagtgacttagttgtggtcagttagcagagtatccttaacaagagtccttcttggactatttggccgtcct

SEQ ID NO: 71953 - DNA, 120 bp, Artificial Sequence
  ENSG00000077514_41 (sequence is synthesized)
tttctaccctctggaattaagaccacgagttataaagcaaaacccataagagcatgtgaatacttacatttttgttctgtgtaacacgcttaatttatttctggatggcaacagggggaa

SEQ ID NO: 71954 - DNA, 120 bp, Artificial Sequence
  ENSG00000077514_42 (sequence is synthesized)
ctctacaggtgtacatcaccacacctggcaaaaactttttattatgtcttattttaaccatcctagtggatgtgaagtggtatctcataaattatgttgattggcattttcctaatgact

SEQ ID NO: 71955 - DNA, 120 bp, Artificial Sequence
  ENSG00000077514_43 (sequence is synthesized)
aatgttgctgaatatcttttcatatgctgcttggccatatctttggagaaatagatattcaaaattatgcccatttttgtcattgggtatttttggttgttgttgagttttaagagttct

SEQ ID NO: 71956 - DNA, 120 bp, Artificial Sequence
  ENSG00000077522_0 (sequence is synthesized)
ggagctggtgcttcgcccgagacccagcgcccaggcgtgtcgccccgagaggagccgcgcgaaggtcaccccgcgcccgccgcccgccgcccgccgcctccgtgggtccgtttgccagtc

SEQ ID NO: 71957 - DNA, 120 bp, Artificial Sequence
  ENSG00000077522_1 (sequence is synthesized)
agcccgtgcgtccgagcccctcgcgccccgccgcagccccggccaaccgagcgccatgaaccagatagagcccggcgtgcagtacaactacgtgtacgacgaggatgagtacatgatcca

SEQ ID NO: 71958 - DNA, 120 bp, Artificial Sequence
  ENSG00000077522_2 (sequence is synthesized)
ggaggaggagtgggaccgcgacctgctcctggacccagcctgggagaagcagcagaggaagaccttcactgcctggtgtaactcccacctaaggaaagccggcacccagattgagaacat

SEQ ID NO: 71959 - DNA, 120 bp, Artificial Sequence
  ENSG00000077522_3 (sequence is synthesized)
cgaggaagacttcaggaatggccttaagctcatgctgcttttggaagtcatctcaggggaaaggctgcccaaacctgaccggggaaaaatgcggttccacaaaattgctaatgtcaacaa

SEQ ID NO: 71960 - DNA, 120 bp, Artificial Sequence
  ENSG00000077522_4 (sequence is synthesized)
agctttggattacatagccagcaaaggggtgaaactggtgtccattggcgctgaagaaattgttgatggcaacgtgaaaatgaccctgggtatgatctggaccatcatccttcgctttgc

SEQ ID NO: 71961 - DNA, 120 bp, Artificial Sequence
  ENSG00000077522_5 (sequence is synthesized)
tattcaggatatttcggttgaagaaacatctgccaaagaaggtctgctgctttggtgtcagaggaaaactgctccttatagaaatgtgaacattcagaacttccatactagctggaaaga

SEQ ID NO: 71962 - DNA, 120 bp, Artificial Sequence
  ENSG00000077522_6 (sequence is synthesized)
tggccttggactctgtgccctcatccaccgacaccggcctgacctcattgactactcaaagcttaacaaggatgaccccataggaaatattaacctggccatggaaatcgctgagaagca

SEQ ID NO: 71963 - DNA, 120 bp, Artificial Sequence
  ENSG00000077522_7 (sequence is synthesized)
cctggatattcctaaaatgttggatgctgaagacatcgtgaacacccctaaacccgatgaaagagccatcatgacgtacgtctcttgcttctaccacgcttttgcgggcgcggagcaggc

SEQ ID NO: 71964 - DNA, 120 bp, Artificial Sequence
  ENSG00000077522_8 (sequence is synthesized)
cgagacagcggctaacaggatatgtaaggttcttgctgtgaatcaagagaatgagaggctgatggaagaatatgagaggctagcgagtgagcttttggaatggattcgtcgcacgatccc

SEQ ID NO: 71965 - DNA, 120 bp, Artificial Sequence
  ENSG00000077522_9 (sequence is synthesized)
ctggctggagaaccggactcccgagaagaccatgcaagccatgcagaagaagctggaggacttccgggattaccgccggaagcacaagccacccaaggtgcaggagaaatgccagctgga

SEQ ID NO: 71966 - DNA, 120 bp, Artificial Sequence
  ENSG00000077522_10 (sequence is synthesized)
gatcaacttcaacacgctgcagaccaagctgcggatcagcaaccgtcctgccttcatgccctccgagggcaagatggtgtcggatattgctggtgcctggcagaggctggagcaggctga

SEQ ID NO: 71967 - DNA, 120 bp, Artificial Sequence
  ENSG00000077522_11 (sequence is synthesized)
gaagggttacgaggagtggttgctcaatgagattcggagactggagcgcttggaacacctggctgagaagttcaggcagaaggcctcaacgcacgagacttgggcttatggcaaagagca

SEQ ID NO: 71968 - DNA, 120 bp, Artificial Sequence
  ENSG00000077522_12 (sequence is synthesized)
gatcttgctgcagaaggattacgagtcggcgtcgctgacagaggtgcgggctctgctgcggaagcacgaggcgttcgagagcgacctggcagcgcaccaggaccgcgtggagcagatcgc

SEQ ID NO: 71969 - DNA, 120 bp, Artificial Sequence
  ENSG00000077522_13 (sequence is synthesized)
agccatcgcgcaggagctcaatgaactggactatcacgacgctgtgaatgtcaatgatcggtgccagaaaatttgtgaccagtgggaccgactgggaacgcttactcagaagaggagaga

SEQ ID NO: 71970 - DNA, 120 bp, Artificial Sequence
  ENSG00000077522_14 (sequence is synthesized)
agccctagagagaatggagaaattgctagaaaccattgatcagcttcacctggagtttgccaagagggctgctcctttcaacaattggatggagggcgctatggaggatctgcaagatat

SEQ ID NO: 71971 - DNA, 120 bp, Artificial Sequence
  ENSG00000077522_15 (sequence is synthesized)
gttcattgtccacagcattgaggagatccagagtctgatcactgcgcatgagcagttcaaggccacgctgcccgaggcggacggagagcggcagtccatcatggccatccagaacgaggt

SEQ ID NO: 71972 - DNA, 120 bp, Artificial Sequence
  ENSG00000077522_16 (sequence is synthesized)
ggagaaggtgattcagagctacaacatcagaatcagctcaagcaacccgtacagcactgtcaccatggatgagctccggaccaagtgggacaaggtgaagcaactcgtgcccatccgcga

SEQ ID NO: 71973 - DNA, 120 bp, Artificial Sequence
  ENSG00000077522_17 (sequence is synthesized)
tcaatccctgcaggaggagctggctcgccagcatgctaacgagcgtctgaggcgccagtttgctgcccaagccaatgccattgggccctggatccagaacaagatggaggagattgcccg

SEQ ID NO: 71974 - DNA, 120 bp, Artificial Sequence
  ENSG00000077522_18 (sequence is synthesized)
gagctccatccagatcacaggagccctggaagaccagatgaaccagctgaagcagtatgagcacaacatcatcaactataagaacaacatcgacaagctggagggagaccatcagctcat

SEQ ID NO: 71975 - DNA, 120 bp, Artificial Sequence
  ENSG00000077522_19 (sequence is synthesized)
ccaggaggcccttgtctttgacaacaagcacacgaactacacgatggagcacattcgtgttggatgggagctgctgctgacaaccatcgccagaaccatcaatgaggtggagactcagat

SEQ ID NO: 71976 - DNA, 120 bp, Artificial Sequence
  ENSG00000077522_20 (sequence is synthesized)
caggaggaagaatggcctgatggatcatgaggatttcagagcctgcctgatttccatgggttatgacctgggtgaagccgaatttgcccgcattatgaccctggtagatcccaacgggca

SEQ ID NO: 71977 - DNA, 120 bp, Artificial Sequence
  ENSG00000077522_21 (sequence is synthesized)
aggcaccgtcaccttccaatccttcatcgacttcatgactagagagacggctgacaccgacactgccgagcaggtcatcgcctccttccggatcctggcttctgataagccatacatcct

SEQ ID NO: 71978 - DNA, 120 bp, Artificial Sequence
  ENSG00000077522_22 (sequence is synthesized)
ggcggaggagctgcgtcgggagctgcccccggatcaggcccagtactgcatcaagaggatgcccgcctactcgggcccaggcagtgtgcctggtgcactggattacgctgcgttctcttc

SEQ ID NO: 71979 - DNA, 120 bp, Artificial Sequence
  ENSG00000077522_23 (sequence is synthesized)
cgcactctacggggagagcgatctgtgatgctgagcttctgtaatcactcatcccatcagaatgcaataaaagcggaagtcacagtttgtttcctggaaactttgacaagctttattaag

SEQ ID NO: 71980 - DNA, 120 bp, Artificial Sequence
  ENSG00000077522_24 (sequence is synthesized)
ttgagagagagagaggggaaaaaaaaaagcctttcgtagttcagtaattgccagcaatataacacggctaaaatgaagtttttacagtatatgacatagtgcgcttcataaataggttta

SEQ ID NO: 71981 - DNA, 120 bp, Artificial Sequence
  ENSG00000077522_25 (sequence is synthesized)
tttctgagtttttagcaaaatgtaatgaaatatcaggttgatttctttgattaaacagaacaaattacttgagtaataggaaattaggaggatctagggacagaaggaaagtgaaaaatg

SEQ ID NO: 71982 - DNA, 120 bp, Artificial Sequence
  ENSG00000077522_26 (sequence is synthesized)
tgaaaatacaaaatacccaagatttaagaccggggggaaaaaaccacaaattggtaaataaaggtttgctatttgtaaaaaatttcatttatctctaatatgcttatgtgattgccccta

SEQ ID NO: 71983 - DNA, 120 bp, Artificial Sequence
  ENSG00000077522_27 (sequence is synthesized)
ggggagtatatttgggattctaatgttttattttcatgcttatccaaagattactattgtatcttcaaatgaatttaatattgtgagatggaactgccggggattaaaaagactacccaa

SEQ ID NO: 71984 - DNA, 120 bp, Artificial Sequence
  ENSG00000077522_28 (sequence is synthesized)
aagatttttggcacttacaatttttaaaatagtttatgtcatctcttcattatttagggctggatggtcaactcagtcagtgattttttgatgcttctcttatcctccagaatagagacc

SEQ ID NO: 71985 - DNA, 120 bp, Artificial Sequence
  ENSG00000077522_29 (sequence is synthesized)
taaggacacgtggaagtcagtttaattgccagagagaaggatgcaatcactaggtaaaatgaggtttttaggattatttattgattccaggttcccatgctttttgttagagcttattag

SEQ ID NO: 71986 - DNA, 120 bp, Artificial Sequence
  ENSG00000077522_30 (sequence is synthesized)
tacaggttctcaagagatgaccacataaaagtgctctgtttataaataagcaggtttctgtagtactgactggttcatcacaaggcaagtcagaaaccagtatccttctagctctccagt

SEQ ID NO: 71987 - DNA, 120 bp, Artificial Sequence
  ENSG00000077522_31 (sequence is synthesized)
caggacttccttatgcctctagttttatgaccggttaaggagaagccagagttagagtaggagaggactaattctcagcagcagtggaggtgagttctttcttttgcggaagctttacat

SEQ ID NO: 71988 - DNA, 120 bp, Artificial Sequence
  ENSG00000077522_32 (sequence is synthesized)
atgttttgtgtagtaggaataactagatattttagctagtgtgcggtgtgtgttcacccctgggattggacagtgtatcctaacaagtcccatgtctggttctgtgtctaaaggcctgct

SEQ ID NO: 71989 - DNA, 120 bp, Artificial Sequence
  ENSG00000077522_33 (sequence is synthesized)
ccatgacacaggatgctacatgcactcctgctagcacatcttgatctgttgaatgttcattctttctttttgctcatactgctgtaggctataattcccccctgtttttccatcttgttg

SEQ ID NO: 71990 - DNA, 120 bp, Artificial Sequence
  ENSG00000077522_34 (sequence is synthesized)
acagcttgtagagaataaagcaggaattctttttatatctgagtccttaatgatcaggaaatggattacaaacaaacaaaaacagttgcaaacagcaattaaagcattactagagaagca

SEQ ID NO: 71991 - DNA, 120 bp, Artificial Sequence
  ENSG00000077522_35 (sequence is synthesized)
gtaacatgtctgttacctacagtctgtttgctcagatttttatagatttccaccaacagctggaaatgtaatatttccattccaagctgtctgacagcttgactcttcttcctacactgg

SEQ ID NO: 71992 - DNA, 120 bp, Artificial Sequence
  ENSG00000077522_36 (sequence is synthesized)
gccatttagaaccttcaacctttatgaatttcacttaatttgcttcattattaagtaattggtagtttccagattcctgaaatatttgaatccttgagtttaatgccaaacacttttggg

SEQ ID NO: 71993 - DNA, 120 bp, Artificial Sequence
  ENSG00000077522_37 (sequence is synthesized)
gtggtttagatgaactctgactctattttatttcaagtaggtgctatatcccggccataaacccctatagaaaagccagaaagttgtgcttcctttgaggctattagggggctctgtggt

SEQ ID NO: 71994 - DNA, 120 bp, Artificial Sequence
  ENSG00000077522_38 (sequence is synthesized)
gttttaggatgggtgtgggtaactcatctacctaaacttttaatttctttacaacattcagcaagagagggggtcagtagtctctatctgctaataaatgaagaaaggaagtaaactctg

SEQ ID NO: 71995 - DNA, 120 bp, Artificial Sequence
  ENSG00000077522_39 (sequence is synthesized)
aaggaagtaaactctgaaaaataataaacatgtttatactctcattttaggtattatttttatttctgaagctggatgctcaaaaattaaaacgtttataagtttctaaattaaacttaa

SEQ ID NO: 71996 - DNA, 120 bp, Artificial Sequence
  ENSG00000077522_40 (sequence is synthesized)
ttatgtttcctgttactatcatgcttttgctggtgcacagaagacatcgtgaacacccctaaacccgatgaaagagccatcatgacgtacgtctcttgcttctaccacgcttttgcgggc

SEQ ID NO: 71997 - DNA, 120 bp, Artificial Sequence
  ENSG00000077522_41 (sequence is synthesized)
gcggagcaggttagacaaagtcttaaagcacactcagctctgtggaaggatccccctccagaaagttctacatgttcatatcaggagatgaggaggtcttcagtgaattcaagtgcaatg

SEQ ID NO: 71998 - DNA, 120 bp, Artificial Sequence
  ENSG00000077522_42 (sequence is synthesized)
atatttctgcatggtcctaccatctggaaagaggcttctaggaaaccaggcacaattgtaaaggggcagctgtgcagattactgagatgatttatgatgaccacaatgtttcccacacag

SEQ ID NO: 71999 - DNA, 120 bp, Artificial Sequence
  ENSG00000077522_43 (sequence is synthesized)
agagctcttaatagatgctactatggtgaagaacctggagaacaagtatcgtgagataataccaaagaacttgtgtgtactgttgattgccttaaaatgtttgaatcagattagacatct

SEQ ID NO: 72000 - DNA, 120 bp, Artificial Sequence
  ENSG00000077522_44 (sequence is synthesized)
actttcaccagcatttcttagaatgttcaaatggtggtggtcatggggcctcggaaaatgcttgagttgtttgtgagctttcctaccctttaatttgagatcattagatatacaatggca

SEQ ID NO: 72001 - DNA, 120 bp, Artificial Sequence
  ENSG00000077522_45 (sequence is synthesized)
ttgggtagaaagagactctgaatcctgcatccaggcagagtttgttgggggagaatcaacagaacagaaggctgcctctctttctcttaccttgtctttggaccttcactgcctggtgta

SEQ ID NO: 72002 - DNA, 120 bp, Artificial Sequence
  ENSG00000077522_46 (sequence is synthesized)
tgatcggtgccagaaaatttgtgaccagtgggaccgactgggaacgcttactcagaagaggagagaagccctagaggttgcctagtgaaaggaacctctaaagaaaacatgaaaagtgga

SEQ ID NO: 72003 - DNA, 120 bp, Artificial Sequence
  ENSG00000077522_47 (sequence is synthesized)
acggcataaatctactttgtatctggtagtaacagtacgtttccaaaagtccttctacctgagtaaattgagctgtgagtgagtcgggaaatcagagatgtgcaaagggaagatggaacc

SEQ ID NO: 72004 - DNA, 120 bp, Artificial Sequence
  ENSG00000077549_0 (sequence is synthesized)
atgttcactcctgggcacccggggaagtggaagcgccgggccctgctgcgggggggagagccactgacgccgggaccgggaccgccgccgccgccgccaccatgagtgatcagcagctgg

SEQ ID NO: 72005 - DNA, 120 bp, Artificial Sequence
  ENSG00000077549_1 (sequence is synthesized)
actgtgccttggacctaatgaggcgcctgcctccccagcaaatcgagaaaaacctcagcgacctgatcgacctggtccccagtctatgtgaggatctcctgtcttctgttgaccagccac

SEQ ID NO: 72006 - DNA, 120 bp, Artificial Sequence
  ENSG00000077549_2 (sequence is synthesized)
tgaaaattgccagagacaaggtggtgggaaaggattaccttttgtgtgactacaacagagatggggactcctataggtcaccatggagtaacaagtatgaccctcccttggaggatgggg

SEQ ID NO: 72007 - DNA, 120 bp, Artificial Sequence
  ENSG00000077549_3 (sequence is synthesized)
ccatgccgtcagctcggctgagaaagctggaggtggaagccaacaatgcctttgaccagtatcgagacctgtattttgaaggtggcgtctcatctgtctacctctgggatctggatcatg

SEQ ID NO: 72008 - DNA, 120 bp, Artificial Sequence
  ENSG00000077549_4 (sequence is synthesized)
gctttgctggagtgatcctcataaagaaggctggagatggatcaaagaagatcaaaggctgctgggattccatccacgtggtagaagtgcaggagaaatccagcggtcgcaccgcccatt

SEQ ID NO: 72009 - DNA, 120 bp, Artificial Sequence
  ENSG00000077549_5 (sequence is synthesized)
acaagttgacctccacggtgatgctgtggctgcagaccaacaaatctggctctggcaccatgaacctcggaggcagccttaccagacagatggagaaggatgaaactgtgagtgactgct

SEQ ID NO: 72010 - DNA, 120 bp, Artificial Sequence
  ENSG00000077549_6 (sequence is synthesized)
tgtgcagacttttgcagacaaatcaaaacaagaagctctgaagaatgacctggtggaggctttgaagagaaagcagcaatgctaaacctctgtttcatgctaaccagacacgccgtgcac

SEQ ID NO: 72011 - DNA, 120 bp, Artificial Sequence
  ENSG00000077549_7 (sequence is synthesized)
tcgttagattcctttcttagaaaactcgttttctgctcccttccctcgtcccttccctccccgacaggtcacataacagctgcatcattgaccgcacagcgccatctctccctgagaata

SEQ ID NO: 72012 - DNA, 120 bp, Artificial Sequence
  ENSG00000077549_8 (sequence is synthesized)
aagccgatagccaccctcctccggctccgagcctgcttctgccacacctcgctctcagttctctccacatttccatagagaccgtgtggtttttgttcacccgggccccccgtcttcctc

SEQ ID NO: 72013 - DNA, 120 bp, Artificial Sequence
  ENSG00000077549_9 (sequence is synthesized)
cctgtccccccatttataggcataaaatccactgtctgccagcctcccttccctcccacctttttggtacattggtgtaaaaaatgtaaaacaaaaaaattttatgaactaactgtggtg

SEQ ID NO: 72014 - DNA, 120 bp, Artificial Sequence
  ENSG00000077549_10 (sequence is synthesized)
tgtgaaagagagaagaaaaactggaaatcttattccgtgtgtgtttgggagttgcttggggttgggggtcgtggggacaggggacagctctgggagcagaggtggccctcggtgccgtcc

SEQ ID NO: 72015 - DNA, 120 bp, Artificial Sequence
  ENSG00000077549_11 (sequence is synthesized)
tgcgcagactctcccgtcccacggaggccgcggggtgggggctggggggggtgccgccgaccgttccgctcttccggccaggtgcttttctgtcaatttctatggaatgcaaaaggaggt

SEQ ID NO: 72016 - DNA, 120 bp, Artificial Sequence
  ENSG00000077549_12 (sequence is synthesized)
ttttgttttattttgtttttttgtaaagcttaagaaaaaaatctacatcttatacttgagcctccatacttaaaaaaagaaaagaaaagaaatcaataaaaagaaactggggcgcagtta

SEQ ID NO: 72017 - DNA, 120 bp, Artificial Sequence
  ENSG00000077549_13 (sequence is synthesized)
gaagtacgctgaacgagatctactttggaaaaacaaaggatatcgtcaatgggctgagatctattgatgctatccctgacaaccaaaagtttaagcagttgcagagggagctctctcaag

SEQ ID NO: 72018 - DNA, 120 bp, Artificial Sequence
  ENSG00000077549_14 (sequence is synthesized)
tccctgtacctggggcgcgccttctttgcagcctttggggagcgaggggagctctccatcagggatggggtggtcccggtgctgtgccttctcagttgccgcttctagggaggccgccta

SEQ ID NO: 72019 - DNA, 120 bp, Artificial Sequence
  ENSG00000077549_15 (sequence is synthesized)
ggagccagcgagggaagggcgggcatcggtgtgcccagaaggcagcgcgctgctctgcgggcccttctcgaggctgccgccgtgggtgctgtgcgtgcgaagcattctgcagggcaggcc

SEQ ID NO: 72020 - DNA, 120 bp, Artificial Sequence
  ENSG00000077549_16 (sequence is synthesized)
ggggtccacggcgcccgggcctgagtgggagccgaggggcgaggatgggtggcccacaggacaaggatgaacgcacaatcgcccttgtgaggccgtggccttggggggccaccaggccct

SEQ ID NO: 72021 - DNA, 120 bp, Artificial Sequence
  ENSG00000077549_17 (sequence is synthesized)
ggatccagcatatggcctggacacgatgcacccaagcaggcgcagcctccccttccctctgaactgtcagcttgcaagggttggaactgctgattatggaagtccctcggatcagagtga

SEQ ID NO: 72022 - DNA, 120 bp, Artificial Sequence
  ENSG00000077549_18 (sequence is synthesized)
ctatgtttggcttgagctccagcctcatgaccaccaaccccatcgaatgactgagagctgccaggctcctgccacgttggagctcagaatcctcccgtggggacactgtgctgcagccag

SEQ ID NO: 72023 - DNA, 120 bp, Artificial Sequence
  ENSG00000077549_19 (sequence is synthesized)
cctccagggagccgcttgttttatggcctaaaaagtctctttatgctgagaaggtcacactggactttgctcacacagagatttgacccaagaaaaggaataaagaggccttggataccc

SEQ ID NO: 72024 - DNA, 120 bp, Artificial Sequence
  ENSG00000077549_20 (sequence is synthesized)
gttggtgtcagacacatgtggaaaagaaaagaacaggcccataattttgtctcagtgcccagggccagatgttaaaggtccccagtctatgtgaggatctcctgtcttctgttgaccagc

SEQ ID NO: 72025 - DNA, 120 bp, Artificial Sequence
  ENSG00000077549_21 (sequence is synthesized)
gtggaagcgccgggccctgctgcgggggggagagccactgacgccgggaccgggaccgccgccgccgccgccaccatgctccatgcctgaccgtgactcgcatctcgccaggccagtgca

SEQ ID NO: 72026 - DNA, 120 bp, Artificial Sequence
  ENSG00000077549_22 (sequence is synthesized)
tttcctcttctggctgtcatcggaattttcaagtgtcaagaccccactttgttcctgttgtcctggttccggctttgggaagcatgacctttcaggcctgctcagagacaccgcagtgca

SEQ ID NO: 72027 - DNA, 120 bp, Artificial Sequence
  ENSG00000077549_23 (sequence is synthesized)
ctttgtgcgttatcagccttacagagactctacggtcaggagtttttgtggcaatggaactgctggggtttcatctgcaaatgaaaaccatctggccagctgcttgggtcagatggaaac

SEQ ID NO: 72028 - DNA, 120 bp, Artificial Sequence
  ENSG00000077549_24 (sequence is synthesized)
cagatgggagaagtcaggagcgggcagcgagcagcctggggcagcgtccctagtcacgtcatgtttccacttcctcttgccccctcgcctcccctgcctgcaaaacgattgttattaacc

SEQ ID NO: 72029 - DNA, 120 bp, Artificial Sequence
  ENSG00000077549_25 (sequence is synthesized)
atgttcactcctgggcacccggggaagtggaagcgccgggccctgctgcgggggggagagccactgacgccgggaccgggaccgccgccgccgccgccaccatggtccccagtctatgtg

SEQ ID NO: 72030 - DNA, 120 bp, Artificial Sequence
  ENSG00000077549_26 (sequence is synthesized)
cacccaggttacaacaaagggcaaaagtaatccgctactggagtgtgttcaccatggaaccaactggggggcacgacatctgcagccaccagggcctgttgagcaggagcaggggagccg

SEQ ID NO: 72031 - DNA, 120 bp, Artificial Sequence
  ENSG00000077585_0 (sequence is synthesized)
gttttctttcctccagtctcggggctgcaggctgagcgcgatgcgcggagacccccgcgggggcggcggcggccgtgagccccgatgaggcccgagcgtccccggccgcgcggcagcgcc

SEQ ID NO: 72032 - DNA, 120 bp, Artificial Sequence
  ENSG00000077585_1 (sequence is synthesized)
cccggcccgatggagaccccgccgtgggacccagcccgcaacgactcgctgccgcccacgctgaccccggccgtgcccccctacgtgaagcttggcctcaccgtcgtctacaccgtgttc

SEQ ID NO: 72033 - DNA, 120 bp, Artificial Sequence
  ENSG00000077585_2 (sequence is synthesized)
tacgcgctgctcttcgtgttcatctacgtgcagctctggctggtgctgcgttaccgccacaagcggctcagctaccagagcgtcttcctctttctctgcctcttctgggcctccctgcgg

SEQ ID NO: 72034 - DNA, 120 bp, Artificial Sequence
  ENSG00000077585_3 (sequence is synthesized)
accgtcctcttctccttctacttcaaagacttcgtggcggccaattcgctcagccccttcgtcttctggctgctctactgcttccctgtgtgcctgcagtttttcaccctcacgctgatg

SEQ ID NO: 72035 - DNA, 120 bp, Artificial Sequence
  ENSG00000077585_4 (sequence is synthesized)
aacttgtacttcacgcaggtgattttcaaagccaagtcaaaatattctccagaattactcaaataccggttgcccctctacctggcctccctcttcatcagccttgttttcctgttggtg

SEQ ID NO: 72036 - DNA, 120 bp, Artificial Sequence
  ENSG00000077585_5 (sequence is synthesized)
aatttaacctgtgctgtgctggtaaagacgggaaattgggagaggaaggttatcgtctctgtgcgagtggccattaatgacacgctcttcgtgctgtgtgccgtctctctctccatctgt

SEQ ID NO: 72037 - DNA, 120 bp, Artificial Sequence
  ENSG00000077585_6 (sequence is synthesized)
ctctacaaaatctctaagatgtccttagccaacatttacttggagtccaagggctcctccgtgtgtcaagtgactgccatcggtgtcaccgtgatactgctttacacctctcgggcctgc

SEQ ID NO: 72038 - DNA, 120 bp, Artificial Sequence
  ENSG00000077585_7 (sequence is synthesized)
tacaacctgttcatcctgtcattttctcagaacaagagcgtccattcctttgattatgactggtacaatgtatcagaccaggcagatttgaagaatcagctgggagatgctggatacgta

SEQ ID NO: 72039 - DNA, 120 bp, Artificial Sequence
  ENSG00000077585_8 (sequence is synthesized)
ccatggattcagtcccagatcttatttctttgacaaccctcgaagatatgacagtgatgatgaccttgcctggaacattgcccctcagggacttcagggaggttttgctccagattacta

SEQ ID NO: 72040 - DNA, 120 bp, Artificial Sequence
  ENSG00000077585_9 (sequence is synthesized)
tgattggggacaacaaactaacagcttcctggcacaagcaggaactttgcaagactcaactttggatcctgacaaaccaagccttgggtagcatcagttaacagttttatggacgattcc

SEQ ID NO: 72041 - DNA, 120 bp, Artificial Sequence
  ENSG00000077585_10 (sequence is synthesized)
tcagatgaaaagcttcagaaaagcatagtgacagctgaatttttagggcacttttccttaagaaatagaacttgatttttatttgttacaggtttccaatggccccataggaataagcaa

SEQ ID NO: 72042 - DNA, 120 bp, Artificial Sequence
  ENSG00000077585_11 (sequence is synthesized)
taatgtagactgataaacccttattttagtactaaagagggagccttgctatttcagtgggtataatttaaactttttaaagaaaatctgtacttttataaagatgtattttgtataact

SEQ ID NO: 72043 - DNA, 120 bp, Artificial Sequence
  ENSG00000077585_12 (sequence is synthesized)
taaataataatgctaaagtatactagggtttttttttcttgagaatgttactgcaatcatgttgtagtttgcacagacttttatgcataattcactttaaaaatatagaatatatggtct

SEQ ID NO: 72044 - DNA, 120 bp, Artificial Sequence
  ENSG00000077585_13 (sequence is synthesized)
aatagttttttaaagcttttggactaaagtattccacaaatcttacctctttaggtcactgatggtcactccgattctgagtgccacattggtagactcctaaaatacagttgacaactt

SEQ ID NO: 72045 - DNA, 120 bp, Artificial Sequence
  ENSG00000077585_14 (sequence is synthesized)
agccaattgcaactccagtgttgataattaaaatgaaatggtaaagcagcagactgtaaggtctttagagattttttttttaaggttcaggccgtaggttcctcaaggaatctcttaagt

SEQ ID NO: 72046 - DNA, 120 bp, Artificial Sequence
  ENSG00000077585_15 (sequence is synthesized)
tttgcccaaagactggtacttcctttcagtagggcgctaatgtatacacattaatgataagttgataacattaaaaatgtagctgacttatcctattaaacctcctctgctatgttcaca

SEQ ID NO: 72047 - DNA, 120 bp, Artificial Sequence
  ENSG00000077585_16 (sequence is synthesized)
tcttggtatcctcgaggcattggttccaggaccccagaaaataccaaaatctggatgctcaagtccctgatataaaatggtgtagtatctgcatataacctacacgcatccttctgtata

SEQ ID NO: 72048 - DNA, 120 bp, Artificial Sequence
  ENSG00000077616_0 (sequence is synthesized)
agagctcacagcctcctgccagcgcgctctctgtttctctgcagccccgaagctcgcgaatgtagcaggcgccccaagctcggtcctcaagaagccatggcggaatccaggggccgtctg

SEQ ID NO: 72049 - DNA, 120 bp, Artificial Sequence
  ENSG00000077616_1 (sequence is synthesized)
tacctttggatgtgcttggctgctgcgctggcatctttcctgatgggatttatggtgggctggtttattaagcctctcaaagaaacgaccacttctgtgcgctatcatcaaagtatacgg

SEQ ID NO: 72050 - DNA, 120 bp, Artificial Sequence
  ENSG00000077616_2 (sequence is synthesized)
tggaaactggtatccgaaatgaaagctgaaaacatcaaatcatttcttcgttcttttacaaagcttcctcatctggcaggaacagaacaaaatttcttgcttgccaagaaaatccaaacc

SEQ ID NO: 72051 - DNA, 120 bp, Artificial Sequence
  ENSG00000077616_3 (sequence is synthesized)
cagtggaagaaatttggactagattcagccaagttggttcattatgatgtcctcttatcttaccccaatgagacaaatgccaactatatatcgattgtggatgaacatgaaactgagatt

SEQ ID NO: 72052 - DNA, 120 bp, Artificial Sequence
  ENSG00000077616_4 (sequence is synthesized)
tatatatcgattgtggatgaacatgaaactgagattttcaaaacatcataccttgaaccaccaccagatggctatgagaatgttacaaatattgtgccaccatataatgctttctcagcc

SEQ ID NO: 72053 - DNA, 120 bp, Artificial Sequence
  ENSG00000077616_5 (sequence is synthesized)
tatgctcgcactgaagactttttcaaactagaaagagagatgggcatcaactgtactgggaagattgttattgcaagatatggaaaaatcttcagaggaaataaagttaaaaatgccatg

SEQ ID NO: 72054 - DNA, 120 bp, Artificial Sequence
  ENSG00000077616_6 (sequence is synthesized)
ttagcaggagccataggaatcatcttgtactcagatccagctgactactttgctcctgaggtacagccatatcccaaaggatggaatcttcctggaactgcagcccagagaggaaatgtg

SEQ ID NO: 72055 - DNA, 120 bp, Artificial Sequence
  ENSG00000077616_7 (sequence is synthesized)
ttaaatttgaatggtgctggtgacccactcactccaggctatccagcaaaagaatacactttcagacttgatgttgaagaaggagtgggaatcccccgaatacctgtacatcccattgga

SEQ ID NO: 72056 - DNA, 120 bp, Artificial Sequence
  ENSG00000077616_8 (sequence is synthesized)
tataatgatgcagaaatattattacgctacttgggaggaattgctccaccagataagagttggaagggagcccttaatgtgagttatagtatcggacctggctttacagggagtgattct

SEQ ID NO: 72057 - DNA, 120 bp, Artificial Sequence
  ENSG00000077616_9 (sequence is synthesized)
ttcaggaaggttagaatgcatgtttataacatcaataaaattacaaggatttacaatgtagttggaactatcagaggatctgtggaacctgacaggtatgttattctgggaggtcaccgg

SEQ ID NO: 72058 - DNA, 120 bp, Artificial Sequence
  ENSG00000077616_10 (sequence is synthesized)
gactcctgggtatttggagctattgacccaaccagtggggttgctgttttgcaagaaattgcccggagttttggaaaactgatgagtaaaggctggagacctagaagaactatcattttt

SEQ ID NO: 72059 - DNA, 120 bp, Artificial Sequence
  ENSG00000077616_11 (sequence is synthesized)
gccagctgggatgcagaagaatttggacttctgggttccacagaatgggctgaggagaatgtcaaaatactccaggagagaagcattgcttatatcaactcggattcatctatagaaggc

SEQ ID NO: 72060 - DNA, 120 bp, Artificial Sequence
  ENSG00000077616_12 (sequence is synthesized)
aattatactctcagagttgactgtactccccttctttaccaattagtgtataaactgacaaaagagatccccagccctgatgatgggtttgagagtaaatcactgtatgaaagctggttg

SEQ ID NO: 72061 - DNA, 120 bp, Artificial Sequence
  ENSG00000077616_13 (sequence is synthesized)
gaaaaagacccttcacctgaaaataaaaatttgcctagaatcaataagctgggatctggaagtgactttgaagcttattttcagagacttggaattgcttcaggcagagcccgttacact

SEQ ID NO: 72062 - DNA, 120 bp, Artificial Sequence
  ENSG00000077616_14 (sequence is synthesized)
tttctgtggctcaattacgaggagcactggtatatgagcttgtggattctaaaatcattccttttaatattcaagactatgcagaagctttgaaaaactatgcagcaagtatctataatc

SEQ ID NO: 72063 - DNA, 120 bp, Artificial Sequence
  ENSG00000077616_15 (sequence is synthesized)
tatctaagaaacatgatcaacaattgacagaccatggagtatcatttgactccttattttctgctgtgaaaaacttctcagaggctgcttcagattttcataaacgacttatacaagttg

SEQ ID NO: 72064 - DNA, 120 bp, Artificial Sequence
  ENSG00000077616_16 (sequence is synthesized)
atcttaacaatcccattgcagtgagaatgatgaatgaccaactgatgctcctggaaagagcattcatcgatcctcttggtttaccaggaaagctgttctataggcacatcatatttgctc

SEQ ID NO: 72065 - DNA, 120 bp, Artificial Sequence
  ENSG00000077616_17 (sequence is synthesized)
caagtagccacaacaaatatgctggagaatcatttcctggaatctatgatgctatctttgatattgaaaataaagccaactctcgtttggcctggaaagaagtaaagaaacatatttcta

SEQ ID NO: 72066 - DNA, 120 bp, Artificial Sequence
  ENSG00000077616_18 (sequence is synthesized)
ttgcagcttttacaattcaagcagcagcaggaactctgaaagaagtattatagaaggtctcaagtggctagccattaaaggtgttgctaaaagtctgaggataaaattcacctttctgat

SEQ ID NO: 72067 - DNA, 120 bp, Artificial Sequence
  ENSG00000077616_19 (sequence is synthesized)
aacttatgaagccagggtgttctaaactcttttcatgtcatgttttgattataggctttggtcttttcatctgcaaagccttttttttttgctctttaaaagttaataattatattagca

SEQ ID NO: 72068 - DNA, 120 bp, Artificial Sequence
  ENSG00000077616_20 (sequence is synthesized)
aagtgttaatctaatgaagtaaaaaactcctgtgtggcagaaagtaaaagaaaattccctaaattatagcaaggaacatgaattctcagacattgtgagtgtgggaatgtaaaatggtaa

SEQ ID NO: 72069 - DNA, 120 bp, Artificial Sequence
  ENSG00000077616_21 (sequence is synthesized)
aatcacttttgaaaacagtttggcagtttcctataaagttaaacatacacttttactttaggactccagaattccacttctagttatttattcaagagaaggaaaaacaatgatcacagc

SEQ ID NO: 72070 - DNA, 120 bp, Artificial Sequence
  ENSG00000077616_22 (sequence is synthesized)
aatacttgtatgcatgttcattgcaacttaaaagcgtaaaaaccccaaatgtccatccacagacgaatgtataaactgtggtatccattacacaatagactacttactactcagcaataa

SEQ ID NO: 72071 - DNA, 120 bp, Artificial Sequence
  ENSG00000077616_23 (sequence is synthesized)
aaatgaagtaactttcaataaatgcaatattattggcagacattgttgaaggaaaaaagccagacaaacaactacataaaatatgtttctatttagatgaagtggcaaactaatctgtag

SEQ ID NO: 72072 - DNA, 120 bp, Artificial Sequence
  ENSG00000077616_24 (sequence is synthesized)
tgttaaaaattagattagtgattgcctgggccaagtggcaggttggggaggatggctgcaaagaagtatgaggaaactttctccaatagatgagaattttccgtatcttgatctgagtgg

SEQ ID NO: 72073 - DNA, 120 bp, Artificial Sequence
  ENSG00000077616_25 (sequence is synthesized)
caaattgtaaacttaaaatatatataaaatttattgtatgaaaattaagcctcaataaacgtgattataaaaaacaagtctgcaaggaaaccagaatcatataccttctcttgtgaaatc

SEQ ID NO: 72074 - DNA, 120 bp, Artificial Sequence
  ENSG00000077616_26 (sequence is synthesized)
accatgaagtgtgaatggtcaggaaaaagccagtaatattcatacatttaataatttcagctctactgaataaacatataagtctgatgggtgatgaaaatagctactacaatcttcata

SEQ ID NO: 72075 - DNA, 120 bp, Artificial Sequence
  ENSG00000077616_27 (sequence is synthesized)
ttctaactcctataaagactgtatatcagaatctgcaaacttttatgcagatcccagtgactcaattacatgttcaactatgattaaagcttcaataaacttggttgttcatctacttca

SEQ ID NO: 72076 - DNA, 120 bp, Artificial Sequence
  ENSG00000077616_28 (sequence is synthesized)
cacagaatgggctgaggtaaataagacaaagaaggttcttattatttttttggtcaacagggaacaaatatgtatgtgtctcaggatgatcaaaaatatattccattacctaatatggtt

SEQ ID NO: 72077 - DNA, 120 bp, Artificial Sequence
  ENSG00000077616_29 (sequence is synthesized)
ttgttttggagaatgactcaagacaatttaagaaatagtttatttttactttcacatcagtttggcaataaccttttagtactagactgcagacagagttattgcctcttgtcaaaatat

SEQ ID NO: 72078 - DNA, 120 bp, Artificial Sequence
  ENSG00000077616_30 (sequence is synthesized)
tttcgttgccatttgcatttgttttataaaaaataagaaaaatcagtaagctcagaaaataatcaaaattaatgagatatttttgatgataatttacttatctaaaaactgatacagatg

SEQ ID NO: 72079 - DNA, 120 bp, Artificial Sequence
  ENSG00000077616_31 (sequence is synthesized)
cttagagctaattttcaagtttttgaagtttctttagagttcttccatctgagaaaatataagatgttctattaagatggccatatattgactatattttcacattgacagattccattt

SEQ ID NO: 72080 - DNA, 120 bp, Artificial Sequence
  ENSG00000077616_32 (sequence is synthesized)
aaaatggcaaccataagtatactttagcatttacaacagatatgtgcttcattgttaagtataaagtgataattctgtgaattgaattactttaataaattgacctgctttacaatttca

SEQ ID NO: 72081 - DNA, 120 bp, Artificial Sequence
  ENSG00000077616_33 (sequence is synthesized)
aatagatacatttaaataatatgcttatacttttttctttattacataatgggctgtcttcttcgttttcataattaactggggtatatttttacattttagaataaatatgacattttg

SEQ ID NO: 72082 - DNA, 120 bp, Artificial Sequence
  ENSG00000077616_34 (sequence is synthesized)
taaatatgacattttgaataatagaatattttgaattttaaataaataacaatttagctatgagaaaataatataaaatagacagcttttaaaatttgacttcaaggtgcatgcttaggt

SEQ ID NO: 72083 - DNA, 120 bp, Artificial Sequence
  ENSG00000077616_35 (sequence is synthesized)
gcttagaagtaaattggcataatgtctgtaccttacttgcaaatgcttcaacagtgttaacaattattgaatttaggtggtagagatatgagaatccattatgctattgcacagcttttc

SEQ ID NO: 72084 - DNA, 120 bp, Artificial Sequence
  ENSG00000077616_36 (sequence is synthesized)
tttcataataaaacactattatgaaaatagttttttataataaaacactgtaaaaaacataatttgctgtactaagtaatttattccttttaaaattctaggaaggttagaatgcatgtt

SEQ ID NO: 72085 - DNA, 120 bp, Artificial Sequence
  ENSG00000077616_37 (sequence is synthesized)
acatcaataaaattacaaggatttacaatgtagttggaactatcagaggatctgtggaacctggtgagtcacataattttttaaaacattttgtttttacaaaaattaaagggtaagtaa

SEQ ID NO: 72086 - DNA, 120 bp, Artificial Sequence
  ENSG00000077616_38 (sequence is synthesized)
agataaattgtagtcaacaattgaagtggggttttttggctgatttgaaactactaaattttgaggaaaactgtacaaatctaaaagaagattttactttatagtgttgtcttctataga

SEQ ID NO: 72087 - DNA, 120 bp, Artificial Sequence
  ENSG00000077616_39 (sequence is synthesized)
ggaaactcaagcaagaggatgtttattttaaaaacataaattacaaatatttataatgtattcaaagttgtaggtttcttgaacgtattattttccagacaggtatgttattctgggagg

SEQ ID NO: 72088 - DNA, 120 bp, Artificial Sequence
  ENSG00000077616_40 (sequence is synthesized)
tataaattctagcttattaagcacctcagatatccccttcctttgagatgcctcagtaatacctttatttttcattttgccacagagaaaataattaggattcatatgaattgatatgat

SEQ ID NO: 72089 - DNA, 120 bp, Artificial Sequence
  ENSG00000077616_41 (sequence is synthesized)
aagctattgcttttaatttctttgatatatttactatttgtttatattactacttaaaactctagtattaaccacatattttctcgataaagatattaatggaatttggctaaaacagtt

SEQ ID NO: 72090 - DNA, 120 bp, Artificial Sequence
  ENSG00000077616_42 (sequence is synthesized)
aaacagttcagaagaaaggttttgcagactattctgtgtagaaatatttcctgtatttgttgtaacaaatttgaagtaagtgtactcacttactcactccttttgaactacaaactccta

SEQ ID NO: 72091 - DNA, 120 bp, Artificial Sequence
  ENSG00000077616_43 (sequence is synthesized)
ctcacttactcactccttttgaactacaaactcctattgaatctagctcaggatcacctgagcccaggagtgtaagccatagagagaccctgactctcaaaaaaaaaaaaagaaaaagaa

SEQ ID NO: 72092 - DNA, 120 bp, Artificial Sequence
  ENSG00000077616_44 (sequence is synthesized)
ggacttgatttctgattagcactactatggagacagtatgattcagaaaatgaagagattcgtgtctctaggctttcattgcattgtgattatttctaaataaatgttagaacctaataa

SEQ ID NO: 72093 - DNA, 120 bp, Artificial Sequence
  ENSG00000077616_45 (sequence is synthesized)
cactagttgtctattttctcattgaaaaccaatatggcattcttatgttaaacacaaagttttataactaaataactcctgaaataggaataacagagtatactatctttttatttcata

SEQ ID NO: 72094 - DNA, 120 bp, Artificial Sequence
  ENSG00000077616_46 (sequence is synthesized)
aaagtagtcattttagtgactaagaaatcaaaataaaatatcgctctgttcgctacaaatgaaattctcaaatacaaagctatgtcctaagataattctgatttgagatttttcaagcaa

SEQ ID NO: 72095 - DNA, 120 bp, Artificial Sequence
  ENSG00000077616_47 (sequence is synthesized)
ttgaattttcataggtattcattagatatttatattcaacgtctagtataagaatatgacaatgccccccacttactagaggtatgaccttggatcagttgcttaaactttctccagctc

SEQ ID NO: 72096 - DNA, 120 bp, Artificial Sequence
  ENSG00000077616_48 (sequence is synthesized)
agtttctttatttgtaagatgaggctagtaactgtttctccttgatagggttattataagatcatatgagtaaaatacatagcaccgtatttagaatatagtaaacaaacaattattgta

SEQ ID NO: 72097 - DNA, 120 bp, Artificial Sequence
  ENSG00000077616_49 (sequence is synthesized)
atttctttacatatcccccaactcccatttttaaatgcctgtatgtgtattacaacttaataattgtttgggtgcctactgtgtaatcagcagcttttttacaaatacatttcttctcct

SEQ ID NO: 72098 - DNA, 120 bp, Artificial Sequence
  ENSG00000077616_50 (sequence is synthesized)
taatgcagtcattaatttcctgtatttaggatatcttggattcagtgagtccccacataaataattaaggtcaaaaataaggagatagccttcccatttgccatgactactttatttttt

SEQ ID NO: 72099 - DNA, 120 bp, Artificial Sequence
  ENSG00000077616_51 (sequence is synthesized)
ctctttgctctcatcactaacatattacgtattttacttactgatttcagtatggctctcttgctagaaaataagctccacaaagggcgggctttttgacagtacctggcacttagtaaa

SEQ ID NO: 72100 - DNA, 120 bp, Artificial Sequence
  ENSG00000077616_52 (sequence is synthesized)
tgacaaatatttgttatatatatgaatgaaatattgtcatcaaactttaaaatttctccttagaaattgtggtagcctttttctgtcactttcattttattttgtcagctacttgggagg

SEQ ID NO: 72101 - DNA, 120 bp, Artificial Sequence
  ENSG00000077616_53 (sequence is synthesized)
ttgtcatttgtcactgactcttaattatttatatttaagtgtctctcctagggcccttttcttccaacttcttcctttagtctctctgtcaagtaatctctaagttcttaaatgtagaag

SEQ ID NO: 72102 - DNA, 120 bp, Artificial Sequence
  ENSG00000077616_54 (sequence is synthesized)
ttcactgagttcactaaagacaacctacagctgtcactgtctgcagggatgaaaaaaaatcgttttatttccaagcaacattagctggtttattaagcctctcaaagaaacgaccacttc

SEQ ID NO: 72103 - DNA, 120 bp, Artificial Sequence
  ENSG00000077616_55 (sequence is synthesized)
aaaacctgaaattttgtggcacagcacctggtgagactgtgggtttgacaaatatctcaccactttatcatcaagttaaacattattcttttttattaaagcttaataattaaagcttaa

SEQ ID NO: 72104 - DNA, 120 bp, Artificial Sequence
  ENSG00000077616_56 (sequence is synthesized)
ttctgcaagtgaaatttatatatactgctttattagtacatatatgacactttgttttcaaacattgccataacctgtttgaaggaacttgagcttcagggttacaaaactgcttctgct

SEQ ID NO: 72105 - DNA, 120 bp, Artificial Sequence
  ENSG00000077616_57 (sequence is synthesized)
atgatggagaagaggaggaaaaaatgcttagataagagcaatttaacttaaatggaggaagtgtgtctatattgacaaaagtccaaagacttgttgagccagctaactgggctttttaca

SEQ ID NO: 72106 - DNA, 120 bp, Artificial Sequence
  ENSG00000077684_0 (sequence is synthesized)
ctccataacaagccaaacgccagaccgagagtgcctccgtgcgcgagtgcccggtgtgtgcgcgccggcgagagcaggggcccgcccggctccccgcccgccgcggcccgaactcatgca

SEQ ID NO: 72107 - DNA, 120 bp, Artificial Sequence
  ENSG00000077684_1 (sequence is synthesized)
gctccgagcgagcgagcggcgcccagcccagcgcctcggccgaacccctccgcagcaggctgcctgctgtttcccggggagatcatgaaacgaggtcgccttcccagcagcagtgaggat

SEQ ID NO: 72108 - DNA, 120 bp, Artificial Sequence
  ENSG00000077684_2 (sequence is synthesized)
tctgacgacaatggcagcctgtcaactacttggtcccagaattcccgatcccagcataggagaagctcctgctccagacatgaagatcgaaagccttcagaggtgtttaggacagacctg

SEQ ID NO: 72109 - DNA, 120 bp, Artificial Sequence
  ENSG00000077684_3 (sequence is synthesized)
atcactgccatgaagttgcatgactcctaccagctgaatccggatgagtactatgtgttggcagatccctggagacaggaatgggagaaaggggtccaggtgcctgtgagcccggggacc

SEQ ID NO: 72110 - DNA, 120 bp, Artificial Sequence
  ENSG00000077684_4 (sequence is synthesized)
atccctcagcctgtggccagggttgtgtctgaagagaaatccctcatgttcatcaggcccaagaagtacatcgtgtcatcaggctctgagcctcccgagttgggctatgtggacatccgg

SEQ ID NO: 72111 - DNA, 120 bp, Artificial Sequence
  ENSG00000077684_5 (sequence is synthesized)
acgctggctgacagcgtgtgtcgctatgacctcaatgacatggatgctgcatggctggaactgaccaatgaagaatttaaggagatgggaatgcctgaactagatgaatacaccatggag

SEQ ID NO: 72112 - DNA, 120 bp, Artificial Sequence
  ENSG00000077684_6 (sequence is synthesized)
agggtcctagaggaatttgagcagcgatgctacgacaatatgaatcatgccatagagactgaggaaggcctggggatcgaatatgatgaagatgttgtctgtgatgtctgccagtctcct

SEQ ID NO: 72113 - DNA, 120 bp, Artificial Sequence
  ENSG00000077684_7 (sequence is synthesized)
gatggtgaggacggcaatgagatggtgttctgtgacaaatgcaacatctgtgtgcaccaggcctgttatggaatcctcaaggtaccagagggcagctggctgtgccggacatgtgccctg

SEQ ID NO: 72114 - DNA, 120 bp, Artificial Sequence
  ENSG00000077684_8 (sequence is synthesized)
ggggttcagccaaaatgtctgctgtgtccgaagaagggtggagctatgaagcccacccgtagcggaaccaagtgggtccacgttagctgtgctctgtggatccctgaggtgagcattggc

SEQ ID NO: 72115 - DNA, 120 bp, Artificial Sequence
  ENSG00000077684_9 (sequence is synthesized)
agcccagagaagatggagcccatcaccaaggtgtcacacattcccagcagccggtgggcgctagtgtgcagcctctgcaatgagaagtttggggcctctatacagtgctctgtgaagaac

SEQ ID NO: 72116 - DNA, 120 bp, Artificial Sequence
  ENSG00000077684_10 (sequence is synthesized)
tgccgcacagccttccatgtgacctgtgcttttgaccggggcctggagatgaagaccatcttagcagagaatgatgaagtcaagttcaagtcctattgcccaaagcacagctcacatagg

SEQ ID NO: 72117 - DNA, 120 bp, Artificial Sequence
  ENSG00000077684_11 (sequence is synthesized)
aaacccgaggagagtcttggcaagggggctgcacaggagaatggggcccctgagtgttccccccggaatccgctggagccctttgccagccttgagcagaaccgggaggaggcccaccgg

SEQ ID NO: 72118 - DNA, 120 bp, Artificial Sequence
  ENSG00000077684_12 (sequence is synthesized)
gtgagtgtccgtaagcagaagctgcagcagttggaggatgagttctacaccttcgtcaacctgctggatgttgccagggctctgcggctgcctgaggaagtagtggatttcctgtaccag

SEQ ID NO: 72119 - DNA, 120 bp, Artificial Sequence
  ENSG00000077684_13 (sequence is synthesized)
tactggaagttgaagaggaaggtcaacttcaacaagcccctgatcaccccaaagaaagatgaagaggacaatctagccaagcgggagcaggatgtcttatttaggaggctgcagctgttc

SEQ ID NO: 72120 - DNA, 120 bp, Artificial Sequence
  ENSG00000077684_14 (sequence is synthesized)
acgcacctgcggcaggacctggagagggttcggaacctcacttacatggtgacccgcagggaaaagattaaacggtctgtgtgcaaagtccaggaacagatattcaatctttacactaag

SEQ ID NO: 72121 - DNA, 120 bp, Artificial Sequence
  ENSG00000077684_15 (sequence is synthesized)
cttttggagcaagaaagagtttcaggtgtgccttcttcctgctcctcctcctcactggaaaacatgcttttgtttaacagtccttctgttggccctgatgctcccaagatagaggacttg

SEQ ID NO: 72122 - DNA, 120 bp, Artificial Sequence
  ENSG00000077684_16 (sequence is synthesized)
aagtggcattctgcattcttcagaaaacaaatgggtacttccttggttcattcgctgaaaaagccccataagcgagatcctttgcagaatagccctggaagtgaaggcaaaaccctgctg

SEQ ID NO: 72123 - DNA, 120 bp, Artificial Sequence
  ENSG00000077684_17 (sequence is synthesized)
aagcagccagacctgtgtggtagaagggaggggatggtggtcccagagagctttttgggtttagaaaagacctttgcagaagcacgtctcatatcagcacaacagaaaaatggtgtggtg

SEQ ID NO: 72124 - DNA, 120 bp, Artificial Sequence
  ENSG00000077684_18 (sequence is synthesized)
atgccagaccatgggaaaagaagagacaatcgttttcattgtgatctcattaaaggagacttaaaggacaaatcttttaaacagagtcacaagcctctcaggtccacagatgtgtcccag

SEQ ID NO: 72125 - DNA, 120 bp, Artificial Sequence
  ENSG00000077684_19 (sequence is synthesized)
aggcatctggacaacacaagagctgccacctcccctggagtggggcagtcagcacctggcacaaggaaggagatagtgcccaagtgcaatggctccctaatcaaagtaaactataatcag

SEQ ID NO: 72126 - DNA, 120 bp, Artificial Sequence
  ENSG00000077684_20 (sequence is synthesized)
actgcagtcaaagtgcctacaacacctgccagcccagtgaaaaactggggaggattccggattccaaagaagggggaacggcagcagcagggagaggcccacgatggggcctgccaccag

SEQ ID NO: 72127 - DNA, 120 bp, Artificial Sequence
  ENSG00000077684_21 (sequence is synthesized)
cactcagactacccatatttgggcttaggccgagttccagccaaggaaagggcaaaaagcaaattaaaatccgacaatgagaatgacgggtatgtccccgatgtggaaatgagtgactca

SEQ ID NO: 72128 - DNA, 120 bp, Artificial Sequence
  ENSG00000077684_22 (sequence is synthesized)
gagagtgaggcatcagaaaagaaatgtatacacaccagcagcactatcagcagaaggacagacattatcaggagaagcatcttggcttcttgatgcaacagagatgatgcggaagccctt

SEQ ID NO: 72129 - DNA, 120 bp, Artificial Sequence
  ENSG00000077684_23 (sequence is synthesized)
acccattaatcctgagctacacaaacacatttacttgcaattcagattaatttttttccagagtcatttttaaatcatttttgtgagaagtttgtgttatttgcaacttgttgaggaaac

SEQ ID NO: 72130 - DNA, 120 bp, Artificial Sequence
  ENSG00000077684_24 (sequence is synthesized)
agaagagtagattgtaaccataagacactgctaagactagaacccgaactgaacactaaaataaaaatgaaatgttttaaagaaggcaaggcttaaataagcctcatgaatttttatagc

SEQ ID NO: 72131 - DNA, 120 bp, Artificial Sequence
  ENSG00000077684_25 (sequence is synthesized)
cctctgcattcttcccaaagcacaaactcatggttacctgaatatagggaaccagatatggttcttgagaaaccctcatggtaccattcacagcccataaagtttattttctaggactgt

SEQ ID NO: 72132 - DNA, 120 bp, Artificial Sequence
  ENSG00000077684_26 (sequence is synthesized)
ggtagatcttgaaatcatatttatatttggccctcaaggctatttttgttgcattatagcatataggcagcagctctgaagcttcagtaacactaagaaatttatgtgtaaatatagcag

SEQ ID NO: 72133 - DNA, 120 bp, Artificial Sequence
  ENSG00000077684_27 (sequence is synthesized)
tcagggaagagaattttaaaaaaggtcattattgaagaagctgaggggacagggtagagctgctgcaatatggagatttagggtaatatggcaaggtcctgctgcttgaagcctgtgagt

SEQ ID NO: 72134 - DNA, 120 bp, Artificial Sequence
  ENSG00000077684_28 (sequence is synthesized)
gggttgtggatatgggactggtggagagtgagactgttaggaaagttgtatctatgaataagggcagttgaagtagaatttttaccagtccacttgaccttcttcttccctaaccactgg

SEQ ID NO: 72135 - DNA, 120 bp, Artificial Sequence
  ENSG00000077684_29 (sequence is synthesized)
ctcttgagccagcttgggatttccctggccattgccaatacctggccatctggcttccaatagtacagtggctactcaagttcaagcgaagaacttccagactctggtgactgttacttc

SEQ ID NO: 72136 - DNA, 120 bp, Artificial Sequence
  ENSG00000077684_30 (sequence is synthesized)
aagaacttccagactctggtgactgttacttcccagagccaaccactagtgcatatgttagggaatctgggcttccaacatgaatggattccttaagaaaaaggaaaaaaaaaaaaaaaa

SEQ ID NO: 72137 - DNA, 120 bp, Artificial Sequence
  ENSG00000077684_31 (sequence is synthesized)
aagagaaaaaagcgaaataggttatattttaaaaacaatagaaaggcaataagttgcgataagctcttactattgaccaaggttatacaggaaagagactgaagtgtacccttgaatagg

SEQ ID NO: 72138 - DNA, 120 bp, Artificial Sequence
  ENSG00000077684_32 (sequence is synthesized)
ttttctgtagtcagagttctaaactctaatttgtaacttggactttctaattgcaaatggcaataactattaagttatcagcaataataaatttagcattaaatttgagtacaatgtttt

SEQ ID NO: 72139 - DNA, 120 bp, Artificial Sequence
  ENSG00000077684_33 (sequence is synthesized)
gtttttgcactccccatagtgcgtatgtattaagacagtggatagtgtttaggtcctgttaattttctttggaattcaatgtggttgtgaatcaaacttaaggaaggaacgtttaaatag

SEQ ID NO: 72140 - DNA, 120 bp, Artificial Sequence
  ENSG00000077684_34 (sequence is synthesized)
caatgagatacagaattatgggcctttggaacaagcccgacttcccctaaattctccttagtttgttaataccagtattcagattcctgattcatttatacatctgtttccatatggcag

SEQ ID NO: 72141 - DNA, 120 bp, Artificial Sequence
  ENSG00000077684_35 (sequence is synthesized)
ggacattatgatacttaatgaataatgctttgaggagttctgcagttaactttcaagtcttccagatgattgtcaacaacaaaaaaggcttattgaatcccatcttgctatgcaagtttt

SEQ ID NO: 72142 - DNA, 120 bp, Artificial Sequence
  ENSG00000077684_36 (sequence is synthesized)
atcagatgatcaaatagtagatctgatacatccccattgtatgtacgacattttcaaaccaagtcttaacttttcaaggacattttagtagctaattcaggggagggggaagaatgatgc

SEQ ID NO: 72143 - DNA, 120 bp, Artificial Sequence
  ENSG00000077684_37 (sequence is synthesized)
aggtttttagattgactgactatttttgagttatggggctcattttgaaagactgctgtccagatcagcttgttgctgcagataatagaaggttcttatgaatccaagttgtatattcac

SEQ ID NO: 72144 - DNA, 120 bp, Artificial Sequence
  ENSG00000077684_38 (sequence is synthesized)
ttgtaggataatttaaaaattagattttttttgcatatgagcaaaaaccttttgctggatacaggagaaggttggactttatctacagttatcttttgattacagcaacagctctgggtg

SEQ ID NO: 72145 - DNA, 120 bp, Artificial Sequence
  ENSG00000077684_39 (sequence is synthesized)
agagtagaatttatagagggataatttgtcaagccatagaaagaaaatctaaattaatctagtaagtgtatgacctctcaccattttaagaggtatcagattcatttgcactattaggaa

SEQ ID NO: 72146 - DNA, 120 bp, Artificial Sequence
  ENSG00000077684_40 (sequence is synthesized)
ggaatgctagttttgtgcaaaaataatgccttacctgttttttccccacatttaggttgaaaagctttcaaatgttccaagttatgctgaaccaaaaaaaacaaaacaaaaacaaaacaa

SEQ ID NO: 72147 - DNA, 120 bp, Artificial Sequence
  ENSG00000077684_41 (sequence is synthesized)
tattaaaaaaaacccacacaaaaacaaaacacacaaaaataaaaagcccacactttttattcctgcttcgaaatgcaaatggatagagcacggtttctctgacagtataatgatagcttt

SEQ ID NO: 72148 - DNA, 120 bp, Artificial Sequence
  ENSG00000077684_42 (sequence is synthesized)
gtgagttagtttcatgtcatgctgggaactctctatgaggtggccataagcagcaaccagcccaaacacccacttgcgttctattagtatggaaccatttgcatttgttttttttaagct

SEQ ID NO: 72149 - DNA, 120 bp, Artificial Sequence
  ENSG00000077684_43 (sequence is synthesized)
ttatctttccttgtgcatcctgaccaagaaatatctttgattatgattaatgtattatgtcaaaatgtaggctagttaaacttttgtaaagttgcctggaatgtcatttgttaggttata

SEQ ID NO: 72150 - DNA, 120 bp, Artificial Sequence
  ENSG00000077684_44 (sequence is synthesized)
aacacaagatctaaatgaagggttttatgtgttgtgtacaaatcttattttgaaatggacaaacttgtcattacatttgtaaccttgtacagaggatttttcactatgtgcctagcttgg

SEQ ID NO: 72151 - DNA, 120 bp, Artificial Sequence
  ENSG00000077684_45 (sequence is synthesized)
tgtccattcagctaaaattgaaaaaaaaaaaaaggtgcatgaagagttaaaaatcaaattaaagtatatgtagagatgactattttatattacatgacccaatcctgtatttatttctac

SEQ ID NO: 72152 - DNA, 120 bp, Artificial Sequence
  ENSG00000077684_46 (sequence is synthesized)
cccctttttgaaagtatttataaaactagttgaggacagctgtatttttttgttgaactatttagtagaattgtgcctttttgtctgtatgtgaataaatgctgtacattttgcaataca

SEQ ID NO: 72153 - DNA, 120 bp, Artificial Sequence
  ENSG00000077684_47 (sequence is synthesized)
cgcgcgtgtgtccgcgcgtgtccgcgtgtgggtccgtgtgcgcgtcccggtcccgcggcggcgacggcggcggcggcggcggcggctgcaggacgagccgagaggctcagccatatttga

SEQ ID NO: 72154 - DNA, 120 bp, Artificial Sequence
  ENSG00000077684_48 (sequence is synthesized)
tggttttgttgctttgctcgggagttctcgggagtaatttaatgccgaaggtcgctgcctagtggaaataatataatacgtcattaatatggcgccaaaagattgggttctcgatctgta

SEQ ID NO: 72155 - DNA, 120 bp, Artificial Sequence
  ENSG00000077684_49 (sequence is synthesized)
gcgaggagggagggaggcagccgctgagcgcagcgttactatcccaccagtaacttgggcattgccggggcgggggccggaggaggaggagaggatgatttttggatcctgagaattgat

SEQ ID NO: 72156 - DNA, 120 bp, Artificial Sequence
  ENSG00000077684_50 (sequence is synthesized)
gctgaggacgcggctgctgctcaaagtggcggagcgcggcggcgggaggcaggtgcacggcacccgccagtgggggtgcctcaacttccgcgggcgtttaaatagcagcctctctcccct

SEQ ID NO: 72157 - DNA, 120 bp, Artificial Sequence
  ENSG00000077684_51 (sequence is synthesized)
gatacacagtttccagaactgtctgggggcgggagcgggagcgggagccgagcccgctcggagctcctcgccgccgctgccgctcccatcttaaaaccgtttctcgccggcgcgcccgcc

SEQ ID NO: 72158 - DNA, 120 bp, Artificial Sequence
  ENSG00000077684_52 (sequence is synthesized)
acggcacccgccagtgggggtgcctcaacttccgcgggcgtttaaatagcagcctctctcccctcccaccggtaataggctgcctgctgtttcccggggagatcatgaaacgaggtcgcc

SEQ ID NO: 72159 - DNA, 120 bp, Artificial Sequence
  ENSG00000077684_53 (sequence is synthesized)
agaaatgatagccagtcatatactctcagacccttgtacacaccacagcatgaggttgtgttggttaaaaatatttatgggctggtaaactcattgtacatatgtgcaaaactgctactg

SEQ ID NO: 72160 - DNA, 120 bp, Artificial Sequence
  ENSG00000077684_54 (sequence is synthesized)
agtggggagcttctttgtggtttttttttttttaaaaacactttcccattaatctttactgttttgtaagatcaaatggggtgtgtcttccccacccccattccttcattctagagctag

SEQ ID NO: 72161 - DNA, 120 bp, Artificial Sequence
  ENSG00000077684_55 (sequence is synthesized)
agactgatttagaaaaccagaacggatttcatttctaatggagggggccagagatgggaaaatttcttgttcagtccggggaaacacacctaggtgctggtgatgggcttatgaaggaag

SEQ ID NO: 72162 - DNA, 120 bp, Artificial Sequence
  ENSG00000077684_56 (sequence is synthesized)
ctaagcacggctgctcactggcccccactttgtttcttgggtaattcacaggggaattcccagtactgtcatggagcagagcaggcagtgggtgctgatgtgtgtgcatgagctgtatgt

SEQ ID NO: 72163 - DNA, 120 bp, Artificial Sequence
  ENSG00000077684_57 (sequence is synthesized)
acacatgcatatatctgttacagaagatactcctggcagtgaggtgctaagtcatcactgaggctgtgtgtgtgtgtgtgtgtgcgcgtgcccgtgtccatccatgtctctgttgtgtgt

SEQ ID NO: 72164 - DNA, 120 bp, Artificial Sequence
  ENSG00000077684_58 (sequence is synthesized)
ctgtgtgcgggtatgggtgggattcctggtggacaggggtgtcagatctgtctgaggagccccagtcatgctcagcacgctacagatgtgttgtttgtcacactgagattgctgaatgtc

SEQ ID NO: 72165 - DNA, 120 bp, Artificial Sequence
  ENSG00000077684_59 (sequence is synthesized)
gtggctgttggctgccgagcctcagctgctggcatttccttctgctgtttgctgcttttgtgcctcccccactttccatcacctctggagtcccgtctggacgtcccttcctgctacagg

SEQ ID NO: 72166 - DNA, 120 bp, Artificial Sequence
  ENSG00000077684_60 (sequence is synthesized)
aataatgaggcgtgggctgcctcccgctagggcctcctgctccctgtaggtagtttctggctgaggcttgctaattggggatgcttcttagagcatcttccacatcaactcccctggctg

SEQ ID NO: 72167 - DNA, 120 bp, Artificial Sequence
  ENSG00000077684_61 (sequence is synthesized)
ctggctaccgattaaattcattagtgtgaaagaggtgggagtgaggttttctggcctgaagcagtctgcactgaaaggtacccaagtggcctgaaacagtgtagggaaagacctgggaaa

SEQ ID NO: 72168 - DNA, 120 bp, Artificial Sequence
  ENSG00000077684_62 (sequence is synthesized)
cactggaccaaaaaagcctgatctcatggagacctgcatggccctgttagagatggcgtagaagtgaaagtcttaaagggagcattagagatccttttaatacacgactgagtgccagct

SEQ ID NO: 72169 - DNA, 120 bp, Artificial Sequence
  ENSG00000077684_63 (sequence is synthesized)
tatttgtgatgccccttcccagaccaggttaggattcctgggaaggccgcggattccggccctggaagaggcaggatcctggagcagttttgtgaggcttttgtgctcccatacgccccc

SEQ ID NO: 72170 - DNA, 120 bp, Artificial Sequence
  ENSG00000077684_64 (sequence is synthesized)
tggtggtgagtgtaaagaagactttgcctctcacaactacatgtatgtgtggcatttttgttagagatgagaaaaggattgagaaggataaactggaatcctggtaagaagcctttatgc

SEQ ID NO: 72171 - DNA, 120 bp, Artificial Sequence
  ENSG00000077684_65 (sequence is synthesized)
cagcccgacacctgctgtaattggggtgcatgagctatggagtcagatagttgttgggagggggaggacaagaagtctattgtttggactgtgtttgtctcacaatcaccacaaaataaa

SEQ ID NO: 72172 - DNA, 120 bp, Artificial Sequence
  ENSG00000077684_66 (sequence is synthesized)
agtgtagaaaatgcttgtggtgtactaactcttttctgtacttaagttactcagattaacatgcacttctaattctaaacattttttttggagtcatcactgtcgctgtttaagtagaac

SEQ ID NO: 72173 - DNA, 120 bp, Artificial Sequence
  ENSG00000077684_67 (sequence is synthesized)
aatgccaacgatgtatgagaaacagggaataaatcaggatttgtgtgtgtatgtgtgtggcattacttacatttactttattaaaaagcctaaggaactttaaagaatttgtattcagtt

SEQ ID NO: 72174 - DNA, 120 bp, Artificial Sequence
  ENSG00000077684_68 (sequence is synthesized)
ctgtcttggcctcccagagtgttgggattacgccactgtacccagccttagactcagtttaaaatgggcttattgtaatgaaaaaaaatacgctacccaaaatttgccatgatgcctgtg

SEQ ID NO: 72175 - DNA, 120 bp, Artificial Sequence
  ENSG00000077684_69 (sequence is synthesized)
atggtgaaggcattaaacaattgaaatctttgccttgcccagagagttgcagttatttgtaattataaacagtaagtgtatcagggcaggggtgacaataaaaaaccaatcattactacc

SEQ ID NO: 72176 - DNA, 120 bp, Artificial Sequence
  ENSG00000077684_70 (sequence is synthesized)
agcccagcgcctcggccgaacccctccgcagcagttcatagccctgatgaagcaagttactctgctctcctaataaatgcaagaaaatgaccttggagggcctttttaattacacataga

SEQ ID NO: 72177 - DNA, 120 bp, Artificial Sequence
  ENSG00000077684_71 (sequence is synthesized)
gctaaagattcctggagtagttatagtaataatgtcacaggaatatagaaagaaacctggcatctttgggagacctactgatatgtgacttctccacccctccccctccttttttaacct

SEQ ID NO: 72178 - DNA, 120 bp, Artificial Sequence
  ENSG00000077713_0 (sequence is synthesized)
acctccgcccgtggccggagagccccaggcccgagccacgcggtcttccgggcccgggtcggggctcgatggctacgtggaggcgggacggccgactgacaggcggccaaaggctgctgt

SEQ ID NO: 72179 - DNA, 120 bp, Artificial Sequence
  ENSG00000077713_1 (sequence is synthesized)
gcgctgggctggcggggacgctcagcctcagcctcaccgcgcccctggagctcgccaccgtgctggcccaggttggcgtcgtgcgaggccacgcccggggaccgtgggccacagggcacc

SEQ ID NO: 72180 - DNA, 120 bp, Artificial Sequence
  ENSG00000077713_2 (sequence is synthesized)
gggtgtggcgggcagaggggctccgggccctgtggaaggggaacgcggtggcgtgcctgcgcctcttcccctgcagcgccgtgcagctcgccgcctaccgcaaatttgttgtgctgttca

SEQ ID NO: 72181 - DNA, 120 bp, Artificial Sequence
  ENSG00000077713_3 (sequence is synthesized)
cagatgacctgggccacatttcccagtggagctccatcatggctgggagtctcgcaggcatggtttccaccattgtaacatatcctacagacctcatcaaaacccggttgatcatgcaga

SEQ ID NO: 72182 - DNA, 120 bp, Artificial Sequence
  ENSG00000077713_4 (sequence is synthesized)
acatactggaaccatcgtacagggggctcctccatgctttttctactatttaccaacaggaagggttccttgccctttatcgaggggtttccctcactgttgtaggtgctctcccgttct

SEQ ID NO: 72183 - DNA, 120 bp, Artificial Sequence
  ENSG00000077713_5 (sequence is synthesized)
ctgctggctcccttcttgtttacatgaacctggagaaaatctggaacggaccccgagatcagttctctctcccacagaactttgctaatgtctgtctggctgctgcagtgacccagaccc

SEQ ID NO: 72184 - DNA, 120 bp, Artificial Sequence
  ENSG00000077713_6 (sequence is synthesized)
tctcctttccctttgagaccgtgaagagaaagatgcaggctcagagcccctacctcccacacagtggaggagtagatgtccatttctcaggagcagtggactgcttccggcagatagtga

SEQ ID NO: 72185 - DNA, 120 bp, Artificial Sequence
  ENSG00000077713_7 (sequence is synthesized)
aggcccagggggtcctggggctctggaatggattgacagccaatttactgaagatagttccatattttggaattatgtttagcacctttgagttctgcaagagaatctgtctttatcaaa

SEQ ID NO: 72186 - DNA, 120 bp, Artificial Sequence
  ENSG00000077713_8 (sequence is synthesized)
atggttacattctgtctccactgagctataaattgaccccaggagtcgatcagagtttgcagccccaggaattacgagaattaaagaagttcttcaaaacgagaaaaccgaagcctaaaa

SEQ ID NO: 72187 - DNA, 120 bp, Artificial Sequence
  ENSG00000077713_9 (sequence is synthesized)
aaccaactctataaaatggaatggaactagaagtgcactgactgacagcatgttgcaatcacagataaatgtagcctcataactgtgcacctgaggagggatgagaagctactgctatct

SEQ ID NO: 72188 - DNA, 120 bp, Artificial Sequence
  ENSG00000077713_10 (sequence is synthesized)
atgatggcattccacgagattttataaccagagtctagcagtgataaaatgtacaatttacgctctgaatagaaacatgacaccaaagaaagggcattgccatgacatctcaaagcaaca

SEQ ID NO: 72189 - DNA, 120 bp, Artificial Sequence
  ENSG00000077713_11 (sequence is synthesized)
ggtaattgaagtggctgagtggataccacgttgtgaggtcagccactgggtcacttgtagtcaatgcaaagcttgcacaaaccaacgtcagcctagtttcactcagtttgacctgagact

SEQ ID NO: 72190 - DNA, 120 bp, Artificial Sequence
  ENSG00000077713_12 (sequence is synthesized)
gggtcttgctctgtcacccagactggagtacaatgacacaatcatagctcactgcagcctttaactactgggctcaagacatcctcctgcttcagcctccagagagttgggaccataggt

SEQ ID NO: 72191 - DNA, 120 bp, Artificial Sequence
  ENSG00000077713_13 (sequence is synthesized)
gcctttaactactgggctcaagacatcctcctgcttcagcctccagagagttgggaccataggtgcacaccaccacacctagctaattttttggggaggtcttgctatgttgcccaggct

SEQ ID NO: 72192 - DNA, 120 bp, Artificial Sequence
  ENSG00000077713_14 (sequence is synthesized)
aatcctcctgccttggcctcccaaagcgctaggattagaggtgtgagccgctgcaccctgccccagtacaatcttttttgaactcaaatttttgctgacatctgagtgcacacaccacag

SEQ ID NO: 72193 - DNA, 120 bp, Artificial Sequence
  ENSG00000077713_15 (sequence is synthesized)
tgtaaattatgccttatcagaatctaaatgaaaatagcgaacatttaaaagctatcaccattgtagtagaatcatccttcttttttgaaatttgaagcatcccaggcttaaaatcttgtg

SEQ ID NO: 72194 - DNA, 120 bp, Artificial Sequence
  ENSG00000077713_16 (sequence is synthesized)
tttcagaaagacagtttataccatgactgcttaattatccccccaaagaccttctgattgaagtcatgtacagttcagtggcctaaattctctgcctttttaacttgctttgcaagccta

SEQ ID NO: 72195 - DNA, 120 bp, Artificial Sequence
  ENSG00000077713_17 (sequence is synthesized)
ctctgaaaataagttatttagtcaagttattctcaaagatgtcccagttgcctagaaaggatcaaatggaacatttgacacacatactcaaaaaaatgtaactgactataaacactttaa

SEQ ID NO: 72196 - DNA, 120 bp, Artificial Sequence
  ENSG00000077713_18 (sequence is synthesized)
cctaatcatctgtatcaaactttctaaaaatcaaatctcaggattgttccactttagagattctatgtaaagtttatataactatacttgtcaaatagcacctatctatgcatttaaaaa

SEQ ID NO: 72197 - DNA, 120 bp, Artificial Sequence
  ENSG00000077713_19 (sequence is synthesized)
tgcattaatatctaacataaaattgttaatttatacacacacatacactcatacatagagagagattttcggtatgttgcaagtattttttccgattaaatttattttccaaagaaaaaa

SEQ ID NO: 72198 - DNA, 120 bp, Artificial Sequence
  ENSG00000077713_20 (sequence is synthesized)
tgcttatttgcctacgacggctgtgttcctcttgaggctgtaatgggcagactagctcagtgggtaacagtgtgagctttggatcccagccttgccacttactcccgcgtgaacttgtgt

SEQ ID NO: 72199 - DNA, 120 bp, Artificial Sequence
  ENSG00000077713_21 (sequence is synthesized)
acaccacataacccatctgagcctcatcttcctcatctgttttgaggcccacagaacaagaagaaccccacagcagccattctttgccatcatcttggccaggaacccagcatccagaat

SEQ ID NO: 72200 - DNA, 120 bp, Artificial Sequence
  ENSG00000077721_0 (sequence is synthesized)
agaccgaccctcgacttcggagaggcagcgcggttcctctgggtgcttccgcctccccttctcctgcttctccagcctcttcggcctcctcgcccgccgcgggaacccgagaccccagtg

SEQ ID NO: 72201 - DNA, 120 bp, Artificial Sequence
  ENSG00000077721_1 (sequence is synthesized)
tatgccccacccctgaccccgctcgcgacatgtccaccccggctcggcggcgcctcatgcgggacttcaagaggttgcaggaggatcctccagccggagtcagcggggctccgtccgaga

SEQ ID NO: 72202 - DNA, 120 bp, Artificial Sequence
  ENSG00000077721_2 (sequence is synthesized)
acaacataatggtgtggaacgcggtcattttcgggcctgaagggaccccgtttgaggatggaacatttaaacttacaatagaattcactgaagaatatccaaataaaccacctacagtta

SEQ ID NO: 72203 - DNA, 120 bp, Artificial Sequence
  ENSG00000077721_3 (sequence is synthesized)
gatttgtctctaagatgttccatccaaatgtctatgcagatggtagtatatgtctggacatacttcagaaccgttggagtccaacctatgatgtgtcttccattctaacatccatacagt

SEQ ID NO: 72204 - DNA, 120 bp, Artificial Sequence
  ENSG00000077721_4 (sequence is synthesized)
ctctgttggatgaacccaatcccaatagtccagcaaacagccaggctgctcagctgtaccaggagaacaaacgggaatatgaaaagcgtgtttctgcaatagtagaacaaagctggcgtg

SEQ ID NO: 72205 - DNA, 120 bp, Artificial Sequence
  ENSG00000077721_5 (sequence is synthesized)
attgttgaccccgggtacagtttaaagaagctggccataagaaaaatatatattgatgtgtttgtcacctccctactcctgtcattacatttactttattaaaagcaaaataactgttgt

SEQ ID NO: 72206 - DNA, 120 bp, Artificial Sequence
  ENSG00000077721_6 (sequence is synthesized)
gctgtttccatcttccttgccaagttttcctaccccttctaccctctccttaaacatcagaaaacaccctctatgaaatcaaatgtactgtacctgggttacttgcaaaaattactaatg

SEQ ID NO: 72207 - DNA, 120 bp, Artificial Sequence
  ENSG00000077721_7 (sequence is synthesized)
cttatgcttagcttgatgaccaggatgttatttttaacaaaatgattgctgaagtgtttcatcctggctggtccttcacttgtgttggatttagaagtgaatgtgtttggaatatggcct

SEQ ID NO: 72208 - DNA, 120 bp, Artificial Sequence
  ENSG00000077721_8 (sequence is synthesized)
acagagaatagaaacaaatccatgtaaacaattttgaaggaggcatgggagctaaaaatcctgtgatactaagatctcagtcatatgaattacaacgtagtatttactggcaagaaggag

SEQ ID NO: 72209 - DNA, 120 bp, Artificial Sequence
  ENSG00000077721_9 (sequence is synthesized)
aaagttgaaggactcagctaaaggagtacagcaattgtagtaactgacacatcctctctttgcaagctgctgactgggcacactcatgccaagtttcagaattattggtcttctgggttt

SEQ ID NO: 72210 - DNA, 120 bp, Artificial Sequence
  ENSG00000077721_10 (sequence is synthesized)
ttgctttttaaaagaggtgtgggagcagaggaatggaaacaatcgtgagtttttgagctagggaaagttggagctcctttaatctttttaaaggatcagtgctgccctaagtgaataaac

SEQ ID NO: 72211 - DNA, 120 bp, Artificial Sequence
  ENSG00000077721_11 (sequence is synthesized)
tcaattgtccatctttattttagagttttaatgaattcaaggaagggagcatagcatatctgtggcaaactattttccactcaaatcctgagttattgctgcatgctttaatttcttccc

SEQ ID NO: 72212 - DNA, 120 bp, Artificial Sequence
  ENSG00000077721_12 (sequence is synthesized)
tttcagcatctgagaaccttaaagccaatgtctgcgatctttttttggatatttatacttttagatatatagtacctttaagtagcagtatgggacaaggcttgtaaatgttttgtctaa

SEQ ID NO: 72213 - DNA, 120 bp, Artificial Sequence
  ENSG00000077721_13 (sequence is synthesized)
tgttctattgtcaccttttatgcatttatcacttccaaatctaactttgcacaagtaacccatgtaaaaaaaaatgtacatttttcaaaagttgtaaataaaaataaccttaaaatttca

SEQ ID NO: 72214 - DNA, 120 bp, Artificial Sequence
  ENSG00000077721_14 (sequence is synthesized)
tcctctgggtgaagagcctgtatggcattgtgaacttttgacagatggataagtgggctgtgttttttgaagaattttcaaagcctcgtcggcagctgcatgtttacttgttttcttggt

SEQ ID NO: 72215 - DNA, 120 bp, Artificial Sequence
  ENSG00000077721_15 (sequence is synthesized)
ttaaggataccaattgcatcatttgcattttctgtaatgacaaaattggtccagtgtttggcagaagcattaaaaattggctgcccggaagcatctttacccagcaccaccaggtcttct

SEQ ID NO: 72216 - DNA, 120 bp, Artificial Sequence
  ENSG00000077721_16 (sequence is synthesized)
ggtggcttcagagctggaggaaattcataggaggacatgccaatctgacacaccacgaggtcctctccaaatgtatgcttgaatttccgccggacaactctaacttcaatacgtttctgc

SEQ ID NO: 72217 - DNA, 120 bp, Artificial Sequence
  ENSG00000077721_17 (sequence is synthesized)
aagagttttacagctagctctgtagctcgatccctggacccattcttgctgccagcataacctgtagttaagtagatattttggcatctaacttcacaagcatagccatcagttagaagt

SEQ ID NO: 72218 - DNA, 120 bp, Artificial Sequence
  ENSG00000077721_18 (sequence is synthesized)
tttttatttttggggatgtcggcaggaggaatttcctttaaaggagcatatatatactcaggatttgtcttacacgcctgaatacaacgagttaacatatatgtataattaattttatca

SEQ ID NO: 72219 - DNA, 120 bp, Artificial Sequence
  ENSG00000077721_19 (sequence is synthesized)
gatccagaagtcatttctggattagaaaggttcttccagattgtcgccgttaatttttcaataaaatactgcttctcggctaccacagactcgggaaatgtctgtgatggtgaaggctca

SEQ ID NO: 72220 - DNA, 120 bp, Artificial Sequence
  ENSG00000077721_20 (sequence is synthesized)
ggagttgactgagagtttgcctgctgtgatgtggtgcttggggcagggttcccactgtcaaaatacatgttggctgttacaggctggtcttttgtgagaatgaatcctgatgaatcacaa

SEQ ID NO: 72221 - DNA, 120 bp, Artificial Sequence
  ENSG00000077721_21 (sequence is synthesized)
tagtcttctctctttcttaagcagtgataaaccttttaatgagaacaaaaaggaaataaattgctaactctgaaggaaccagtaagaaatacactgaagtatggtctgttgttttagaat

SEQ ID NO: 72222 - DNA, 120 bp, Artificial Sequence
  ENSG00000077721_22 (sequence is synthesized)
aatttgttaaatggaccagagtaatatagtggaacatgcatcaccttataccatatagtaactgattcttctaagtttacttgaacagatttcagtcaggaaaaaacattgctcaattgt

SEQ ID NO: 72223 - DNA, 120 bp, Artificial Sequence
  ENSG00000077721_23 (sequence is synthesized)
gttcttcaatttattcaacaaacaattgaaaataatattttaaaggacataatctcttcatatcacatcttaacaattcttgaatgagatccagtttgtccatgccttgtaagtaagttt

SEQ ID NO: 72224 - DNA, 120 bp, Artificial Sequence
  ENSG00000077721_24 (sequence is synthesized)
ataacctactatgctttagggcctcctgctaccttaggttgacatatatttaagaaaaataatttcatttcaatagtagcataaacattagaaaaataaatttgctggaaacatgaatgc

SEQ ID NO: 72225 - DNA, 120 bp, Artificial Sequence
  ENSG00000077721_25 (sequence is synthesized)
aatctaaaccaaatgtgattttaaaattatttctgccattaattccctccatatgtgtgaataattgagttgattttatagtgaagtaccttatgagccatacttaagggtttctgagag

SEQ ID NO: 72226 - DNA, 120 bp, Artificial Sequence
  ENSG00000077721_26 (sequence is synthesized)
ggactatgaagtttttcctggcttaaattcaattaagttttcattatagggtcactatgacatgaaaaggaaccagtatgaacacttttatacttattcccttctattttaaaaataact

SEQ ID NO: 72227 - DNA, 120 bp, Artificial Sequence
  ENSG00000077721_27 (sequence is synthesized)
tgattatggatttgtattctggcattggtttttgaaccattgtgctttcattctttctagtctgtctaaaaatcactggagcgtttaagatggcagctgactaacataggcctttgaggt

SEQ ID NO: 72228 - DNA, 120 bp, Artificial Sequence
  ENSG00000077721_28 (sequence is synthesized)
cttttggtcttctaaaggaagaaggccaaattttgggcccagtttcttaaggatgttttcaaaatgtacagtggctaaaatcttgtaagcagtaattttgtgtttatgatggctgtctcc

SEQ ID NO: 72229 - DNA, 120 bp, Artificial Sequence
  ENSG00000077721_29 (sequence is synthesized)
aagtttgggggaaaataatggcaaaacaaaaaatcacatttgagtagttcttagagcaattcctagagatgtatttcttacctggcctttcctctctaccctgtatctttgcattattta

SEQ ID NO: 72230 - DNA, 120 bp, Artificial Sequence
  ENSG00000077721_30 (sequence is synthesized)
atacttggaaaaacccacatagcattaaaaacaaagtactactgaacaaagtgataaatacattttcttaaatctttcttttctaaccacaggaacatttaaacttacaatagaattcac

SEQ ID NO: 72231 - DNA, 80 bp, Artificial Sequence
  ENSG00000077721_31 (sequence is synthesized)
ttcaagaggtaaaccgaggggacggccgaggccgggggttgcgagctggggcacagggcgggtcccgaggcgcgccgggc

SEQ ID NO: 72232 - DNA, 65 bp, Artificial Sequence
  ENSG00000077721_32 (sequence is synthesized)
tttaaacttacaatagaattcactgaagaatatccaaataaaccacctacagttagatttgtctc

SEQ ID NO: 72233 - DNA, 120 bp, Artificial Sequence
  ENSG00000077721_33 (sequence is synthesized)
cctggtcatctggggaaagggttcccagtcatcctggaagtgtctcctgcttaggaacctgcctctgcctagcctctgtctgctaaaggcttgagtggaatgcagtgtgtggctggtggt

SEQ ID NO: 72234 - DNA, 120 bp, Artificial Sequence
  ENSG00000077721_34 (sequence is synthesized)
tctggatattgtatgcttgactagaactgcacctttcttcttgctttcttaaaaaaaaaatctgtgtaaggcagtcactttttaaaaggagcaatcatagcactggtattaaggattttt

SEQ ID NO: 72235 - DNA, 120 bp, Artificial Sequence
  ENSG00000077721_35 (sequence is synthesized)
gaggcttgggctgtaattctgctaaattcagccctccatcactgaattagtataaacccaaccagttgctgataggcagcagagaccccagagaccatctggttcagaattctaccccaa

SEQ ID NO: 72236 - DNA, 120 bp, Artificial Sequence
  ENSG00000077721_36 (sequence is synthesized)
tgcgctccggggcgggccccccgcggaggccgagcgggtaggggaaaatgtttgggtctggctgggcctaggcgcctccccggagcctgtgcctcgattagctcagttcccgctgccagg

SEQ ID NO: 72237 - DNA, 120 bp, Artificial Sequence
  ENSG00000077721_37 (sequence is synthesized)
gggaaccgcttggggttctaggggggcggggcggggagtggtggcggttaggcgcggcggcttgccctgtgtctctgagcccgggacatccatttgtagtggcttccgaccccggtagcg

SEQ ID NO: 72238 - DNA, 120 bp, Artificial Sequence
  ENSG00000077721_38 (sequence is synthesized)
gtgctggagatggcagagctcgggatagccatctcagatgaagcagggagaagggggccccttaagtgggaactgaccatttttctctgtgttgcaggcctgaagggaccccgtttgagg

SEQ ID NO: 72239 - DNA, 120 bp, Artificial Sequence
  ENSG00000077721_39 (sequence is synthesized)
atcttccagttttatactgatcacatctgacattctctgatcatcctgattatttcactagtggtggttatgacttatctttttaggcagttaactgggaagcaacataggaatctttaa

SEQ ID NO: 72240 - DNA, 120 bp, Artificial Sequence
  ENSG00000077721_40 (sequence is synthesized)
acttcaaaagcaaagtattcttgactatttttgttttgtctataatgttaaaaccttagtggtcttgttacgtttaatgtacctacttctttgttcttagtctatgcagatggtagtata

SEQ ID NO: 72241 - DNA, 120 bp, Artificial Sequence
  ENSG00000077782_0 (sequence is synthesized)
agatgcaggggcgcaaacgccaaaggagaccaggctgtaggaagagaagggcagagcgccggacagctcggcccgctccccgtcctttggggccgcggctggggaactacaaggcccagc

SEQ ID NO: 72242 - DNA, 120 bp, Artificial Sequence
  ENSG00000077782_1 (sequence is synthesized)
aggcagctgcagggggcggaggcggaggagggaccagcgcgggtgggagtgagagagcgagccctcgcgccccgccggcgcatagcgctcggagcgctcttgcggccacaggcgcggcgt

SEQ ID NO: 72243 - DNA, 120 bp, Artificial Sequence
  ENSG00000077782_2 (sequence is synthesized)
gcgggcggcagctagcgggagccgggacgccggtgcagccgcagcgcgcggaggaacccgggtgtgccgggagctgggcggccacgtccggacgggaccgagacccctcgtagcgcattg

SEQ ID NO: 72244 - DNA, 120 bp, Artificial Sequence
  ENSG00000077782_3 (sequence is synthesized)
gcgcattgcggcgacctcgccttccccggccgcgagcgcgccgctgcttgaaaagccgcggaacccaaggacttttctccggtccgagctcggggcgccccgcagggcgcacggtacccg

SEQ ID NO: 72245 - DNA, 120 bp, Artificial Sequence
  ENSG00000077782_4 (sequence is synthesized)
tgctgcagtcgggcacgccgcggcgccggggcctccgcagggcgatggagcccggtctgcaaggaaagtgaggcgccgccgctgcgttctggaggaggggggcacaaggtctggagaccc

SEQ ID NO: 72246 - DNA, 120 bp, Artificial Sequence
  ENSG00000077782_5 (sequence is synthesized)
ctggaggaggggggcacaaggtctggagaccccgggtggcggacgggagccctccccccgccccgcctccggggcaccagctccggctccattgttcccgcccgggctggaggcgccgag

SEQ ID NO: 72247 - DNA, 120 bp, Artificial Sequence
  ENSG00000077782_6 (sequence is synthesized)
gcggagctcttgcgaccccgccaggacccgaacagagcccgggggcggcgggccggagccggggacgcgggcacacgcccgctcgcacaagccacggcggactctcccgaggcggaacct

SEQ ID NO: 72248 - DNA, 120 bp, Artificial Sequence
  ENSG00000077782_7 (sequence is synthesized)
ccacgccgagcgagggtcagtttgaaaaggaggatcgagctcactgtggagtatccatggagatgtggagccttgtcaccaacctctaactgcagaactgggatgtggagctggaagtgc

SEQ ID NO: 72249 - DNA, 120 bp, Artificial Sequence
  ENSG00000077782_8 (sequence is synthesized)
ctcctcttctgggctgtgctggtcacagccacactctgcaccgctaggccgtccccgaccttgcctgaacaagcccagccctggggagcccctgtggaagtggagtccttcctggtccac

SEQ ID NO: 72250 - DNA, 120 bp, Artificial Sequence
  ENSG00000077782_9 (sequence is synthesized)
cccggtgacctgctgcagcttcgctgtcggctgcgggacgatgtgcagagcatcaactggctgcgggacggggtgcagctggcggaaagcaaccgcacccgcatcacaggggaggaggtg

SEQ ID NO: 72251 - DNA, 120 bp, Artificial Sequence
  ENSG00000077782_10 (sequence is synthesized)
gaggtgcaggactccgtgcccgcagactccggcctctatgcttgcgtaaccagcagcccctcgggcagtgacaccacctacttctccgtcaatgtttcagatgctctcccctcctcggag

SEQ ID NO: 72252 - DNA, 120 bp, Artificial Sequence
  ENSG00000077782_11 (sequence is synthesized)
gatgatgatgatgatgatgactcctcttcagaggagaaagaaacagataacaccaaaccaaaccgtatgcccgtagctccatattggacatccccagaaaagatggaaaagaaattgcat

SEQ ID NO: 72253 - DNA, 120 bp, Artificial Sequence
  ENSG00000077782_12 (sequence is synthesized)
gcagtgccggctgccaagacagtgaagttcaaatgcccttccagtgggaccccaaaccccacactgcgctggttgaaaaatggcaaagaattcaaacctgaccacagaattggaggctac

SEQ ID NO: 72254 - DNA, 120 bp, Artificial Sequence
  ENSG00000077782_13 (sequence is synthesized)
aaggtccgttatgccacctggagcatcataatggactctgtggtgccctctgacaagggcaactacacctgcattgtggagaatgagtacggcagcatcaaccacacataccagctggat

SEQ ID NO: 72255 - DNA, 120 bp, Artificial Sequence
  ENSG00000077782_14 (sequence is synthesized)
gtcgtggagcggtcccctcaccggcccatcctgcaagcagggttgcccgccaacaaaacagtggccctgggtagcaacgtggagttcatgtgtaaggtgtacagtgacccgcagccgcac

SEQ ID NO: 72256 - DNA, 120 bp, Artificial Sequence
  ENSG00000077782_15 (sequence is synthesized)
atccagtggctaaagcacatcgaggtgaatgggagcaagattggcccagacaacctgccttatgtccagatcttgaagactgctggagttaataccaccgacaaagagatggaggtgctt

SEQ ID NO: 72257 - DNA, 120 bp, Artificial Sequence
  ENSG00000077782_16 (sequence is synthesized)
cacttaagaaatgtctcctttgaggacgcaggggagtatacgtgcttggcgggtaactctatcggactctcccatcactctgcatggttgaccgttctggaagccctggaagagaggccg

SEQ ID NO: 72258 - DNA, 120 bp, Artificial Sequence
  ENSG00000077782_17 (sequence is synthesized)
gcagtgatgacctcgcccctgtacctggagatcatcatctattgcacaggggccttcctcatctcctgcatggtggggtcggtcatcgtctacaagatgaagagtggtaccaagaagagt

SEQ ID NO: 72259 - DNA, 120 bp, Artificial Sequence
  ENSG00000077782_18 (sequence is synthesized)
gacttccacagccagatggctgtgcacaagctggccaagagcatccctctgcgcagacaggtaacagtgtctgctgactccagtgcatccatgaactctggggttcttctggttcggcca

SEQ ID NO: 72260 - DNA, 120 bp, Artificial Sequence
  ENSG00000077782_19 (sequence is synthesized)
tcacggctctcctccagtgggactcccatgctagcaggggtctctgagtatgagcttcccgaagaccctcgctgggagctgcctcgggacagactggtcttaggcaaacccctgggagag

SEQ ID NO: 72261 - DNA, 120 bp, Artificial Sequence
  ENSG00000077782_20 (sequence is synthesized)
ggctgctttgggcaggtggtgttggcagaggctatcgggctggacaaggacaaacccaaccgtgtgaccaaagtggctgtgaagatgttgaagtcggacgcaacagagaaagacttgtca

SEQ ID NO: 72262 - DNA, 120 bp, Artificial Sequence
  ENSG00000077782_21 (sequence is synthesized)
gacctgatctcagaaatggagatgatgaagatgatcgggaagcataagaatatcatcaacctgctgggggcctgcacgcaggatggtcccttgtatgtcatcgtggagtatgcctccaag

SEQ ID NO: 72263 - DNA, 120 bp, Artificial Sequence
  ENSG00000077782_22 (sequence is synthesized)
ggcaacctgcgggagtacctgcaggcccggaggcccccagggctggaatactgctacaaccccagccacaacccagaggagcagctctcctccaaggacctggtgtcctgcgcctaccag

SEQ ID NO: 72264 - DNA, 120 bp, Artificial Sequence
  ENSG00000077782_23 (sequence is synthesized)
gtggcccgaggcatggagtatctggcctccaagaagtgcatacaccgagacctggcagccaggaatgtcctggtgacagaggacaatgtgatgaagatagcagactttggcctcgcacgg

SEQ ID NO: 72265 - DNA, 120 bp, Artificial Sequence
  ENSG00000077782_24 (sequence is synthesized)
ctataaaaagacaaccaacggccgactgcctgtgaagtggatggcacccgaggcattatttgaccggatctacacccaccagagtgatgtgtggtctttcggggtgctcctgtgggagat

SEQ ID NO: 72266 - DNA, 120 bp, Artificial Sequence
  ENSG00000077782_25 (sequence is synthesized)
cttcactctgggcggctccccataccccggtgtgcctgtggaggaacttttcaagctgctgaaggagggtcaccgcatggacaagcccagtaactgcaccaacgagctgtacatgatgat

SEQ ID NO: 72267 - DNA, 120 bp, Artificial Sequence
  ENSG00000077782_26 (sequence is synthesized)
gcgggactgctggcatgcagtgccctcacagagacccaccttcaagcagctggtggaagacctggaccgcatcgtggccttgacctccaaccaggagtacctggacctgtccatgcccct

SEQ ID NO: 72268 - DNA, 120 bp, Artificial Sequence
  ENSG00000077782_27 (sequence is synthesized)
ggaccagtactcccccagctttcccgacacccggagctctacgtgctcctcaggggaggattccgtcttctctcatgagccgctgcccgaggagccctgcctgccccgacacccagccca

SEQ ID NO: 72269 - DNA, 120 bp, Artificial Sequence
  ENSG00000077782_28 (sequence is synthesized)
gcttgccaatggcggactcaaacgccgctgactgccacccacacgccctccccagactccaccgtcagctgtaaccctcacccacagcccctgctgggcccaccacctgtccgtccctgt

SEQ ID NO: 72270 - DNA, 120 bp, Artificial Sequence
  ENSG00000077782_29 (sequence is synthesized)
cccctttcctgctggcaggagccggctgcctaccaggggccttcctgtgtggcctgccttcaccccactcagctcacctctccctccacctcctctccacctgctggtgagaggtgcaaa

SEQ ID NO: 72271 - DNA, 120 bp, Artificial Sequence
  ENSG00000077782_30 (sequence is synthesized)
gaggcagatctttgctgccagccacttcatcccctcccagatgttggaccaacacccctccctgccaccaggcactgcctggagggcagggagtgggagccaatgaacaggcatgcaagt

SEQ ID NO: 72272 - DNA, 120 bp, Artificial Sequence
  ENSG00000077782_31 (sequence is synthesized)
gagagcttcctgagctttctcctgtcggtttggtctgttttgccttcacccataagcccctcgcactctggtggcaggtgccttgtcctcagggctacagcagtagggaggtcagtgctt

SEQ ID NO: 72273 - DNA, 120 bp, Artificial Sequence
  ENSG00000077782_32 (sequence is synthesized)
cgtgcctcgattgaaggtgacctctgccccagataggtggtgccagtggcttattaattccgatactagtttgctttgctgaccaaatgcctggtaccagaggatggtgaggcgaaggcc

SEQ ID NO: 72274 - DNA, 120 bp, Artificial Sequence
  ENSG00000077782_33 (sequence is synthesized)
aggttgggggcagtgttgtggccctggggcccagccccaaactgggggctctgtatatagctatgaagaaaacacaaagtgtataaatctgagtatatatttacatgtctttttaaaagg

SEQ ID NO: 72275 - DNA, 120 bp, Artificial Sequence
  ENSG00000077782_34 (sequence is synthesized)
gtcgttaccagagatttacccatcgggtaagatgctcctggtggctgggaggcatcagttgctatatattaaaaacaaaaaagaaaaaaaaggaaaatgtttttaaaaaggtcatatatt

SEQ ID NO: 72276 - DNA, 120 bp, Artificial Sequence
  ENSG00000077782_35 (sequence is synthesized)
ttttgctacttttgctgttttatttttttaaattatgttctaaacctattttcagtttaggtccctcaataaaaattgctgctgcttcatttatctatgggctgtatgaaaagggtggga

SEQ ID NO: 72277 - DNA, 120 bp, Artificial Sequence
  ENSG00000077782_36 (sequence is synthesized)
atgtccactggaaagaagggacacccacgggccctggggctaggtctgtcccgagggcaccgcatgctcccggcgcaggttccttgtaacctcttcttcctaggtcctgcacccagacct

SEQ ID NO: 72278 - DNA, 120 bp, Artificial Sequence
  ENSG00000077782_37 (sequence is synthesized)
cacgacgcacctcctgcctctccgctgcttttggaaagtcagaaaaagaagatgtctgcttcgagggcaggaaccccatccatgcagtagaggcgctgggcagagagtcaaggcccagca

SEQ ID NO: 72279 - DNA, 120 bp, Artificial Sequence
  ENSG00000077782_38 (sequence is synthesized)
gccatcgaccatggatggtttcctccaaggaaaccggtggggttgggctggggagggggcacctacctaggaatagccacggggtagagctacagtgattaagaggaaagcaagggcgcg

SEQ ID NO: 72280 - DNA, 120 bp, Artificial Sequence
  ENSG00000077782_39 (sequence is synthesized)
cctgggcaacagagaaaacaaaaaggaaaacaaatgatgaaggtctgcagaaactgaaacccagacatgtgtctgccccctctatgtgggcatggttttgccagtgcttctaagtgcagg

SEQ ID NO: 72281 - DNA, 120 bp, Artificial Sequence
  ENSG00000077782_40 (sequence is synthesized)
agaacatgtcacctgaggctagttttgcattcaggtccctggcttcgtttcttgttggtatgcctccccagatcgtccttcctgtatccatgtgaccagactgtatttgttgggactgtc

SEQ ID NO: 72282 - DNA, 120 bp, Artificial Sequence
  ENSG00000077782_41 (sequence is synthesized)
gcagatcttggcttcttacagttcttcctgtccaaactccatcctgtccctcaggaacggggggaaaattctccgaatgtttttggttttttggctgcttggaatttacttctgccacct

SEQ ID NO: 72283 - DNA, 120 bp, Artificial Sequence
  ENSG00000077782_42 (sequence is synthesized)
gctggtcatcactgtcctcactaagtggattctggctcccccgtacctcatggctcaaactaccactcctcagtcgctatattaaagcttatattttgctggattactgctaaatacaaa

SEQ ID NO: 72284 - DNA, 120 bp, Artificial Sequence
  ENSG00000077782_43 (sequence is synthesized)
agaaagttcaatatgttttcatttctgtagggaaaatgggattgctgctttaaatttctgagctagggattttttggcagctgcagtgttggcgactattgtaaaattctctttgtttct

SEQ ID NO: 72285 - DNA, 120 bp, Artificial Sequence
  ENSG00000077782_44 (sequence is synthesized)
ctctgtaaatagcacctgctaacattacaatttgtatttatgtttaaagaaggcatcatttggtgaacagaactaggaaatgaatttttagctcttaaaagcatttgctttgagaccgca

SEQ ID NO: 72286 - DNA, 120 bp, Artificial Sequence
  ENSG00000077782_45 (sequence is synthesized)
caggagtgtctttccttgtaaaacagtgatgataatttctgccttggccctaccttgaagcaatgttgtgtgaagggatgaagaatctaaaagtcttcataagtccttgggagaggtgct

SEQ ID NO: 72287 - DNA, 120 bp, Artificial Sequence
  ENSG00000077782_46 (sequence is synthesized)
agaaaaatataaggcactatcataattacagtgatgtccttgctgttactactcaaatcacccacaaatttccccaaagactgcgctagctgtcaaataaaagacagtgaaattgacctg

SEQ ID NO: 72288 - DNA, 120 bp, Artificial Sequence
  ENSG00000077782_47 (sequence is synthesized)
aacttttcctccaactcgcgctcgggagctggcgaggcggcggcggctcctcaaagtgggagagcttcaaggtcacgtggtccgtccagcccctgctatctcaccagacactgtccaccc

SEQ ID NO: 72289 - DNA, 120 bp, Artificial Sequence
  ENSG00000077782_48 (sequence is synthesized)
cccagccggggccggcgcctccctccgctcgccgcccgcccctttcacctcctggctccctcccgggcgatccgcgccccttgggtctcccctcccttccctccgtccgcgtctcctgcg

SEQ ID NO: 72290 - DNA, 120 bp, Artificial Sequence
  ENSG00000077782_49 (sequence is synthesized)
ccccgaccttgcctgaacaagactgctggagttaataccaccgacaaagagatggaggtgcttcacttaagaaatgtctcctttgaggacgcaggggagtatacgtgcttggcgggtaac

SEQ ID NO: 72291 - DNA, 120 bp, Artificial Sequence
  ENSG00000077782_50 (sequence is synthesized)
cattcggggattaatagctcggatgcggaggtgctgaccctgttcaatgtgacagaggcccagagcggggagtatgtgtgtaaggtttccaattatattggtgaagctaaccagtctgcg

SEQ ID NO: 72292 - DNA, 120 bp, Artificial Sequence
  ENSG00000077782_51 (sequence is synthesized)
gtaggccccaagctgctggggcaggcggggaagccagtactggactgtccttgccaccctactgtatttctagtgcccagagccatggaaaaatacccggcctgggaggctggtttggtt

SEQ ID NO: 72293 - DNA, 120 bp, Artificial Sequence
  ENSG00000077782_52 (sequence is synthesized)
tggtattgtgttggtgtctgtgggttccctctctgccttctgtgtgttccttggctttgtgtggatccatgtgaggactcacggggacacggttttgctgtgttacaaatggtacttcag

SEQ ID NO: 72294 - DNA, 120 bp, Artificial Sequence
  ENSG00000077782_53 (sequence is synthesized)
cagggaaaagcagcccctcgacacataccccactcccttagcctttatcctgccctcctcccttcccaagtaaatgagtctcaacgtgttctttaaagcggacgcaacagagaaagactt

SEQ ID NO: 72295 - DNA, 120 bp, Artificial Sequence
  ENSG00000077782_54 (sequence is synthesized)
aaattaaaactcagattcttcagcctgtcttgaccacctccctccttaacatttctggagacttggagatgcggcgttgagattcgggggagaaaagaaagttcccttggatcccgagtt

SEQ ID NO: 72296 - DNA, 120 bp, Artificial Sequence
  ENSG00000077782_55 (sequence is synthesized)
atttaagatctcaccaagttattcgccgccgctgtgggacctcccaggcccccttgccccccgcaacttctggactcatatccgtcagacatcacttgtcaccttccagcatcagggaga

SEQ ID NO: 72297 - DNA, 120 bp, Artificial Sequence
  ENSG00000077782_56 (sequence is synthesized)
cccctccagccctctctgccagtttcagaggaaggtgaacctcctccccctccgtgatctgcccccactctgcttcagaaactgctgcccactaacattgctccctgcctgccgcgtggc

SEQ ID NO: 72298 - DNA, 120 bp, Artificial Sequence
  ENSG00000077782_57 (sequence is synthesized)
gtggtggtatccctgctctgctggagaggaacccagatgctctcccctcctcggaggatgatgatgatgatgatgactcctcttcagaggagaaagaaacagataacaccaaaccaaacc

SEQ ID NO: 72299 - DNA, 120 bp, Artificial Sequence
  ENSG00000077782_58 (sequence is synthesized)
caaatttggaggaatgaaattctccagctagaaggcccaagaaagtcttatggaagaaacagcttcttaaggtggggttcagagaaaagggaagggctggcctgttgcagaacaaggaat

SEQ ID NO: 72300 - DNA, 87 bp, Artificial Sequence
  ENSG00000077782_59 (sequence is synthesized)
gaacaaggaatggcatgaagaaagtcttgcacagaggcatggatgttgcttcgagctgtggcgccctatagaaatagaacatgagca

SEQ ID NO: 72301 - DNA, 120 bp, Artificial Sequence
  ENSG00000077782_60 (sequence is synthesized)
gagatggagatgagcctggacaacatgggtcagtttgaaaaggaggatcgagctcactgtggagtatccatggagatgtggagccttgtcaccaacctctaactgcagaactgggatgtg

SEQ ID NO: 72302 - DNA, 120 bp, Artificial Sequence
  ENSG00000077782_61 (sequence is synthesized)
cagagctttgtcaggaatctactgagctgctgtttccttcccagcaggtcctaactgctttagatgagtcccagctaagacatccaaattactaactgcttatgatggccttctcaagaa

SEQ ID NO: 72303 - DNA, 120 bp, Artificial Sequence
  ENSG00000077782_62 (sequence is synthesized)
gacatcaaagcatttatgggactctgtctgacatctggaaatcggcttcgtggtataaagaaaagatatccatctgaagtcaaactacatcagctgaaaaatcaggagtttggaagtttg

SEQ ID NO: 72304 - DNA, 120 bp, Artificial Sequence
  ENSG00000077782_63 (sequence is synthesized)
actctaaatctactgttctctccaagaagttatcaatgtcttcaaaacgttgattactttaagacaggcttttctgcaaactactatcaatgtttataatattaaatgtttacaatatta

SEQ ID NO: 72305 - DNA, 120 bp, Artificial Sequence
  ENSG00000077782_64 (sequence is synthesized)
tgatgtgccctaccctttgcacctccggaccagcgctttttttggaatactatctagccttgagactgtttagcagaaagtggccattttcctcccttggcccgggctcccggtttcctc

SEQ ID NO: 72306 - DNA, 120 bp, Artificial Sequence
  ENSG00000077782_65 (sequence is synthesized)
ggttcagcagcctctgctattgccggccgtctttgccgatggcctgcctccctaatgacttgtttacatatcctacccccagtgggttaggagaagctccggggctgccccgaccctccg

SEQ ID NO: 72307 - DNA, 120 bp, Artificial Sequence
  ENSG00000077782_66 (sequence is synthesized)
agtgcagggtgtttggggaccgggaggctgctggggcctgactccagctgggagggttatgaactgcatcagtgacgagctgcttgaaatatctgttgcatttactcttagtcatagctg

SEQ ID NO: 72308 - DNA, 120 bp, Artificial Sequence
  ENSG00000077782_67 (sequence is synthesized)
tcttcctctagtcccccttctttctgtctccttcccttgctctgcgtctcttagaggtctcatgtcctgtgcttgtccattttgcttccgttgtctcttctagactgctggagttaatac

SEQ ID NO: 72309 - DNA, 120 bp, Artificial Sequence
  ENSG00000077782_68 (sequence is synthesized)
atgtggagctggaagtgcctcctcttctgggctgtgctggtcacagccacactctgcaccgctaggccgtccccgaccttgcctgaacaagcttgcccagatctccaggaggctaagtgg

SEQ ID NO: 72310 - DNA, 120 bp, Artificial Sequence
  ENSG00000077782_69 (sequence is synthesized)
tgcagacaccccggtgggtccagtgctcccacccagggacagagaaggatggggcacggggagggagagtggatggtggggggcctgagggtgtgcccagtcagagggctgaggagaaag

SEQ ID NO: 72311 - DNA, 120 bp, Artificial Sequence
  ENSG00000077782_70 (sequence is synthesized)
gacctttgtgtgcgacagctcctgctgccagagcaagtgtgggttttatggcagctgtggcctcccgtcctaatatagtcaacagctccaaatcccctgccctgacacctgttagcgaga

SEQ ID NO: 72312 - DNA, 120 bp, Artificial Sequence
  ENSG00000077782_71 (sequence is synthesized)
ggttccctgagctgacctctccttgggctgcccccccagcatgtgcatctgacgcgtcgagggccagacccccaccctctccgaatcacacgcatcctggtcagcccccagttgacaaat

SEQ ID NO: 72313 - DNA, 120 bp, Artificial Sequence
  ENSG00000077782_72 (sequence is synthesized)
tgccttctctcgacttgggcaggggctgctggggttttgaggggcggggtttgttcagctgttgctagggaagggtgaggctgagctatcccaaaggaaatggggtgttcctctggcaag

SEQ ID NO: 72314 - DNA, 120 bp, Artificial Sequence
  ENSG00000077782_73 (sequence is synthesized)
tggcaatcttggcaaagaactgagcatctggggagggggcaactccggacacaaagaagtcctggggagggccgacctttccccttaggatgggggaaatgaaatgcgcttaatgctgct

SEQ ID NO: 72315 - DNA, 120 bp, Artificial Sequence
  ENSG00000077782_74 (sequence is synthesized)
acagctgcttcctaactttgcctctttcttcctttgacttttggaggagtggggtggaaaagagatgggggttcccaggcagccagctgttttccccactgacccatgctccaattccca

SEQ ID NO: 72316 - DNA, 120 bp, Artificial Sequence
  ENSG00000077782_75 (sequence is synthesized)
ctgccctggctcagtagcctccagtaagtgatgcccaggatggtgcggctccgtgtggccagcgtaattccctttgtctctcccctcctcccctctccctgtcttcctctctcgcccctt

SEQ ID NO: 72317 - DNA, 120 bp, Artificial Sequence
  ENSG00000077782_76 (sequence is synthesized)
taggtggggtgggccccagggccggagatctggggcttccaggacacacctcggaggtgattgccagggctcttgggatgttaagaccctgtgatttttttccaccacagcttgcccaga

SEQ ID NO: 72318 - DNA, 120 bp, Artificial Sequence
  ENSG00000077782_77 (sequence is synthesized)
ggagaggaacccaggtgcaccgcaagggagctgtgcgagggcagccagggagccctggagctctgtgaacttgggaacttgccactcttagaatgtgactttcacaaaactaggagttga

SEQ ID NO: 72319 - DNA, 120 bp, Artificial Sequence
  ENSG00000077782_78 (sequence is synthesized)
ggaagtggagctgaaattttctttatgccatttatgcacctcagggtgtggacttggcagcagatccccaaaggtgataggaaggactggagaaagatctggcatgaaccctgatgggtg

SEQ ID NO: 72320 - DNA, 120 bp, Artificial Sequence
  ENSG00000077782_79 (sequence is synthesized)
accacatgtgtatcaagcgtgttcttacaagaaataaatacttattggggagaggtgttggcagctgctggggtggtgggtgccctatctgctctgattaaggagggcagcccccaaacc

SEQ ID NO: 72321 - DNA, 120 bp, Artificial Sequence
  ENSG00000077782_80 (sequence is synthesized)
ttagtagacacatgctagaaaaattctgactgtggggtgtttagcccatcctttggaaatagcatctagccacagtgtgtctagacctgcctgggtttccctatagtcagccgtccaaag

SEQ ID NO: 72322 - DNA, 120 bp, Artificial Sequence
  ENSG00000077782_81 (sequence is synthesized)
aagaatacaggttgcctggctccagcacacccaggtggcaccacaagttgagaaagcgcctttgaatgtaggacggaattaagttaaataggaacagctgaccctgatggaaccacccag

SEQ ID NO: 72323 - DNA, 120 bp, Artificial Sequence
  ENSG00000077782_82 (sequence is synthesized)
tgtgaaggcttccaggcagtgggggcagtgcttcggggaaggaagcaaacacgcacaggaactgttcttaaacagtttccatcccaccaagagatcatcactaagggagcagtgggactg

SEQ ID NO: 72324 - DNA, 120 bp, Artificial Sequence
  ENSG00000077782_83 (sequence is synthesized)
ggatccccatggggagggtgtccgtgttcatctggaactgcactagccttggtgaaatctaggggtccctaggaggaacctcagtgccccttcttcttcccatagatgctctcccctcct

SEQ ID NO: 72325 - DNA, 120 bp, Artificial Sequence
  ENSG00000077782_84 (sequence is synthesized)
gggtttaagaggggaggggaaggctgaaaggggaggaagaggagggcacatggggtcacggtgcctgttctgctaagtgccaggcactgctcacaggtgttgggcagatgggcaagacac

SEQ ID NO: 72326 - DNA, 120 bp, Artificial Sequence
  ENSG00000077782_85 (sequence is synthesized)
ctccaggtcctggcctgggccctgctcctgagcctgaccagctgctcctctccaccctgcctgtctctcttggctttccccgggcagccgtagctccatattggacatccccagaaaaga

SEQ ID NO: 72327 - DNA, 120 bp, Artificial Sequence
  ENSG00000077782_86 (sequence is synthesized)
ggagaacagagttgttactgcaatgatcagttataaaatgtcaagctggaagaggtgcatttggtctgcttattttaaaggtgagtgaagtccagaaaggccagcttgtggcagaaatag

SEQ ID NO: 72328 - DNA, 120 bp, Artificial Sequence
  ENSG00000077782_87 (sequence is synthesized)
gtcagtcctagaagttgggcctcctggcctaccatggtctttggaccactctgtgttgaggaaagaacatcagatacacagacatgtgcctctgccattgttgggaagccctgactaaga

SEQ ID NO: 72329 - DNA, 120 bp, Artificial Sequence
  ENSG00000077782_88 (sequence is synthesized)
gttttacttagaggaccaaattgggtctcctgaggaaaggaatccagtttatctaatgaagatgttgtgccatgaaggcactgagtctgtctggtttcctgagggttaaaagattagggc

SEQ ID NO: 72330 - DNA, 120 bp, Artificial Sequence
  ENSG00000077782_89 (sequence is synthesized)
tgggatcaccacagcattaatcaatactgcctttccgtctcttctaattgccataggctggagatcatcggtcccttggccctgctaatgtaatgtattgatctcagatgaaggaggcca

SEQ ID NO: 72331 - DNA, 120 bp, Artificial Sequence
  ENSG00000077782_90 (sequence is synthesized)
agaggcaaggaatacaggtggccactagatgctgagagtagcccggggctcacagccagctgggaaacaaagacctcagtccgacagctgcaaggaactaagttcagccaacaaactgaa

SEQ ID NO: 72332 - DNA, 120 bp, Artificial Sequence
  ENSG00000077782_91 (sequence is synthesized)
acgcccagccccgaagttgttcggcattacataaaagatggacacctgcttcacgtaggatgagagctgtgtagaggcatcgcccatcttggctctgttcctccttgccatttctgtcat

SEQ ID NO: 72333 - DNA, 120 bp, Artificial Sequence
  ENSG00000077782_92 (sequence is synthesized)
ggtttcttgaagaaattttgctagttccaactttacagccattttctttttctgtttttcttccttaatggtagaagaataaaagttactcaatccttcgtgattgtaaattggtagata

SEQ ID NO: 72334 - DNA, 120 bp, Artificial Sequence
  ENSG00000077782_93 (sequence is synthesized)
ccagtcttcgtgggccagtctactgggaaggagaccactgtctcgggggctcaagttcctgtgggcaggctcagttgcccccgaatgggatcattcctcacgcttcaggcacacacactc

SEQ ID NO: 72335 - DNA, 120 bp, Artificial Sequence
  ENSG00000077782_94 (sequence is synthesized)
catctcagtagggatctagccacatcccccaggactagtaacagaggtcacaaagtggaggtgagctgggaacagagggctgcagggatgggtggtgctggtctgtaataagctttgaga

SEQ ID NO: 72336 - DNA, 120 bp, Artificial Sequence
  ENSG00000077782_95 (sequence is synthesized)
gcaacgtcactggggctttggggtcagctacacaaggaaggcatttggacccctgccttttcattgcccgaaaccagagcctttccaccaagcgtttcccagtcttagccctgtgtcctg

SEQ ID NO: 72337 - DNA, 120 bp, Artificial Sequence
  ENSG00000077782_96 (sequence is synthesized)
agttacgtacgatctttctggcaaatggggtgcatgataagagcatctcttacgaagagttggaaaaacaaatgccatatataaattctaagccatatgaggacgaggagtaatggcatt

SEQ ID NO: 72338 - DNA, 120 bp, Artificial Sequence
  ENSG00000077782_97 (sequence is synthesized)
gaaccagaagctgggaaagttgtttacctctttgtcccagagttagacctcatcctcccctagcttagctgtctcagagatatactggccctcccttctcttctctttgctgctggtgct

SEQ ID NO: 72339 - DNA, 120 bp, Artificial Sequence
  ENSG00000077782_98 (sequence is synthesized)
aaaactgctctgtaggtcattggccactgtctccactcacaacccctgctccagtcctggagggagtgggttaaacacaaatagaacattccatttgaagcagtgattcttttttttttt

SEQ ID NO: 72340 - DNA, 90 bp, Artificial Sequence
  ENSG00000077782_99 (sequence is synthesized)
ttccatttgaagcagcaaatgctttggacttttgaagtccacttgttctgtacttgtaaaagggaaagaaggccgggcgcagtggctcac

SEQ ID NO: 72341 - DNA, 120 bp, Artificial Sequence
  ENSG00000077782_100 (sequence is synthesized)
gggtgcctgtacctctccagtccagctgagcaaggaggctcaggaattaatgaagatggggcttgtgtagcacgatggttctaggccatcccttttccatggctcaagtccattgaaggc

SEQ ID NO: 72342 - DNA, 120 bp, Artificial Sequence
  ENSG00000077782_101 (sequence is synthesized)
agcctccaaaatcagggggttgcctgatcctcctagtgccacaatcccagtcctagctagaacttgccatggttcttctccctaaaagttcccaggggacaggagacaggtgttgctttt

SEQ ID NO: 72343 - DNA, 120 bp, Artificial Sequence
  ENSG00000077782_102 (sequence is synthesized)
cacagacccaaagtgggacattgagcaaggcacaggctggttcccctcctgtcctctgtcctcattctgtgagtgccaccatcaccaggtactgtggcctgcagaaataaacgaggcacc

SEQ ID NO: 72344 - DNA, 120 bp, Artificial Sequence
  ENSG00000077782_103 (sequence is synthesized)
aaccctgccctcagggaccccgtgtcttcttagggacagaggactcagaaacatctgtgtccccgcatgttaagtgcatgcacacagtgctgaggctttgcagagaagggccatggctcc

SEQ ID NO: 72345 - DNA, 120 bp, Artificial Sequence
  ENSG00000077800_0 (sequence is synthesized)
atcatgtttcgtgcgctcccattacggatcatacctcgcacctcaccgcgtggcctctgtagttccagagctcgcgagggccagggccgttggcggcggttggaacgaaacgatgagtgc

SEQ ID NO: 72346 - DNA, 120 bp, Artificial Sequence
  ENSG00000077800_1 (sequence is synthesized)
ctcctcgtggccccagaatggaatgccgccgtcggtaggggtctgccgggcataaaggggccttcggaaccccaccagagtcacagccagggagggcagcggggcgcaccaggccgaagg

SEQ ID NO: 72347 - DNA, 120 bp, Artificial Sequence
  ENSG00000077800_2 (sequence is synthesized)
ctcacgccacagggagggcagctaggacatggggggaagcgcgttaaaccagggagtcctggaaggggacgacgcccccggccagtccctgtacgagcggttaagtcagaggatgctgga

SEQ ID NO: 72348 - DNA, 120 bp, Artificial Sequence
  ENSG00000077800_3 (sequence is synthesized)
catctcgggggaccggggcgtgctgaaggacgtcatccgagaaggagctggagacctagtggcgcctgatgcttcggtgctagtgaaatactcgggatacctggaacacatggacagacc

SEQ ID NO: 72349 - DNA, 120 bp, Artificial Sequence
  ENSG00000077800_4 (sequence is synthesized)
cttcgattctaattactttaggaaaactcctcggctaatgaaacttggagaggatattacactgtggggcatggagctgggccttctgagcatgcggagaggagagctggccaggtttct

SEQ ID NO: 72350 - DNA, 120 bp, Artificial Sequence
  ENSG00000077800_5 (sequence is synthesized)
gttcaaaccgaactacgcctatggaacgctgggctgccctcccttgatccccccaaacaccactgtcctgtttgagattgagctgcttgacttcctggactgtgctgagtcagacaagtt

SEQ ID NO: 72351 - DNA, 120 bp, Artificial Sequence
  ENSG00000077800_6 (sequence is synthesized)
ttgtgctctctcagctgagcagcaagaccaatttccacttcagaaggtcctgaaagtggcagctacggaacgggagtttggcaactaccttttccgccagaatcgtttctatgatgccaa

SEQ ID NO: 72352 - DNA, 120 bp, Artificial Sequence
  ENSG00000077800_7 (sequence is synthesized)
ctattgcttctgcgccggcgatcagcaccccctgaagagcagcacctggtggaggccgccaagcttcctgttctcctgaacctgtcctttacatacctgaagctagaccgacccaccata

SEQ ID NO: 72353 - DNA, 120 bp, Artificial Sequence
  ENSG00000077800_8 (sequence is synthesized)
gccctgtgctatggagagcaggctttgatcattgaccaaaagaatgccaaggccctcttcaggtgtggacaggcttgtcttctcctgactgagtatcaaaaggcccgggattttctagtt

SEQ ID NO: 72354 - DNA, 120 bp, Artificial Sequence
  ENSG00000077800_9 (sequence is synthesized)
cgagcccagaaggagcaacccttcaatcatgacatcaataatgagctgaagaaactggctagctgttacagggactatgtggataaagagaaagaaatgtggcaccgcatgttcgcgccc

SEQ ID NO: 72355 - DNA, 120 bp, Artificial Sequence
  ENSG00000077800_10 (sequence is synthesized)
tgtggcgatggttctacagcaggagaaagttgaaggttcttcacctaccaacgaggggagagagctgtggttctccatcattgggggagtggaagggagctcccagcgcagccgtggcag

SEQ ID NO: 72356 - DNA, 120 bp, Artificial Sequence
  ENSG00000077800_11 (sequence is synthesized)
ccaccttccaggagcaggggctggaatgtcctgtggccgcatctctcatggacgcggctgaaacgtgttttcacaggtgctgttttctgttttccgtgttcgtaacagaagggaggggaa

SEQ ID NO: 72357 - DNA, 120 bp, Artificial Sequence
  ENSG00000077800_12 (sequence is synthesized)
agcgcagctactgacaagtagaacactgctactttttttaaggcagtttcttgtttttttagacggaattagtccttggcttccctcccagtcccagccctgcttccggctgcgaatgtc

SEQ ID NO: 72358 - DNA, 120 bp, Artificial Sequence
  ENSG00000077800_13 (sequence is synthesized)
cctgagtcaacaccaatagagattgctttgtgtattttgtagggttctctgttttgaagacagaattatgttacaaatgtttttgttgtaaataaataaaacacttccttgtccttgcaa

SEQ ID NO: 72359 - DNA, 120 bp, Artificial Sequence
  ENSG00000077800_14 (sequence is synthesized)
gggacgacgcccccggccaggtgagggcccagacgtttcgggggcgtagacgctgaggggtggccgggtgggtctgcggctctgaggcctggctttcattctccatcagtccctgtacga

SEQ ID NO: 72360 - DNA, 120 bp, Artificial Sequence
  ENSG00000077800_15 (sequence is synthesized)
ggagaagaaggaattgtttaggggctagatgaggcacgatgcctcaggctgggaagactgctcagagcgcaggttctttgagttggctttgctgaggctgggttttggtaacacagccat

SEQ ID NO: 72361 - DNA, 120 bp, Artificial Sequence
  ENSG00000077800_16 (sequence is synthesized)
accactgggaatgtttctttgttcatttattaagtaaaactcaatcgaatacttacttcccacaatacatggtgaaaagagaggatgtactcagaagattagaacatctccacccttaag

SEQ ID NO: 72362 - DNA, 120 bp, Artificial Sequence
  ENSG00000077800_17 (sequence is synthesized)
acctgttaacagggtccaggaatgtgttaaagcagctgtgagttgtgcaaatagaagaaaaagctctggaagtacttccacaaaatggatggttagacttgatgacgttgtatatgatga

SEQ ID NO: 72363 - DNA, 120 bp, Artificial Sequence
  ENSG00000077800_18 (sequence is synthesized)
agttgtatatataagagatcaaggaaacagaagaagggaatgacttgaaacttcctggtctgagaaaaaaatttaaaccaaggaataactgggaaagaaatgtgttactttcaattttga

SEQ ID NO: 72364 - DNA, 73 bp, Artificial Sequence
  ENSG00000077800_19 (sequence is synthesized)
acagtggcgcgatctcagctcactgcaacgttcgccacagacatgcgctaccactcccagctaaattttgtag

SEQ ID NO: 72365 - DNA, 120 bp, Artificial Sequence
  ENSG00000077800_20 (sequence is synthesized)
caggcgtgagccaccgcacctggcaatttttgtaattaatttttctgactttccttccctatgcctctacttttttttttcccctcctctaaatggcgttgcatcttctgccgggcatct

SEQ ID NO: 72366 - DNA, 120 bp, Artificial Sequence
  ENSG00000077800_21 (sequence is synthesized)
tgccgggcatctgggccaggaaggcattctcttattgtcagatgaaggccatgccctgttccaggcaaactgtgtgacctgggctcttaatcttccacgtacctgtgaagtgccttttct

SEQ ID NO: 72367 - DNA, 120 bp, Artificial Sequence
  ENSG00000077800_22 (sequence is synthesized)
cccagctctggaggtgtccctgaagtcatccctttgttgtgtggctataaatacctcaacttcggtggctgccttttcatcataccccttcctgggaaggcatttcctctggaagggttg

SEQ ID NO: 72368 - DNA, 120 bp, Artificial Sequence
  ENSG00000077800_23 (sequence is synthesized)
atcctctcttggcagccgtaataggcctcaaccctgcttcctgctaagatttactgttgtggattctgtgttctttgcggatgaggtacgaatgacagctactaagttcaatcctggaga

SEQ ID NO: 72369 - DNA, 120 bp, Artificial Sequence
  ENSG00000077800_24 (sequence is synthesized)
taactgggttccttttgctgatcgtccacaatcatggaagtgccctttatgattcatgatggggttgaaagacagaacatttggatcctcagtttcatctcttgctatgacattagccaa

SEQ ID NO: 72370 - DNA, 120 bp, Artificial Sequence
  ENSG00000077800_25 (sequence is synthesized)
gtcatttcacctctctgggccttggttgcattgtctgcagggtgaagctgaatcacttttttattttaaaagagaaacaaggtctcctatgttactcaggctagagtgcagtggtgcagt

SEQ ID NO: 72371 - DNA, 120 bp, Artificial Sequence
  ENSG00000077800_26 (sequence is synthesized)
tcctgcctcagcttcttgagtagctgggactacaagtgtgtgccagcatgccctgctgattttttttattttgtaagatggggtctcattatatttcctaggctgatctcgatctcctgg

SEQ ID NO: 72372 - DNA, 77 bp, Artificial Sequence
  ENSG00000077800_27 (sequence is synthesized)
agcatgccctgctgattttttttattttgtaagatggggtctcattatatttcctaggctgatctcgatctcctggc

SEQ ID NO: 72373 - DNA, 120 bp, Artificial Sequence
  ENSG00000077800_28 (sequence is synthesized)
tctttaagatcactgtggagttgtttatgcttcatgaagaccgtcagatatcggcttagtctgtttttaatttcttgcgttcattaggtgcataagccctgcctccaagcatacataatc

SEQ ID NO: 72374 - DNA, 120 bp, Artificial Sequence
  ENSG00000077800_29 (sequence is synthesized)
ccaaacaccaacctggataattaagtgtacaggtagtgagtgaaagaagtgagcctaagcaataaggaattgacatcaagccagtgccttgtaccttctagggagagcatgagtccccgc

SEQ ID NO: 72375 - DNA, 120 bp, Artificial Sequence
  ENSG00000077800_30 (sequence is synthesized)
cagctttgctggctgacccccattctgcaggtgctgatcctgttctcaagacctttggttgtagctgttattgactgtcatacttttgatgctcccctacgctcccaagcagccaccgac

SEQ ID NO: 72376 - DNA, 120 bp, Artificial Sequence
  ENSG00000077800_31 (sequence is synthesized)
ccagggtgaagctgagatgaactggggtgagcctcagaggttcaagaatccagagaagggttttcaaatctaatagataagtgaagagctatgagcaaaagttctctctagctcagaggt

SEQ ID NO: 72377 - DNA, 120 bp, Artificial Sequence
  ENSG00000077800_32 (sequence is synthesized)
cactcagacattcacaaggtgagaaggatgtggtctgccgtcactgtgagggcacccacagcagtcattgtcagcatcagtccaaacagaaaaggcagcaagaggcagacagaggggcat

SEQ ID NO: 72378 - DNA, 120 bp, Artificial Sequence
  ENSG00000077800_33 (sequence is synthesized)
ctccaggatgtttggcatcctgaggtcatacagcttcatttttttggtgagctgaatatcatggccatgaatgcgagcaaatctgcactaacttccttttgcttctccaagaaatggcct

SEQ ID NO: 72379 - DNA, 120 bp, Artificial Sequence
  ENSG00000077800_34 (sequence is synthesized)
agagaggctgcctgcatttcttggctagtggccccttcctcttcttcaaagacagcggcatgatatcttccaatatttctccctctctccctttctgtctctccctctctctcaccctct

SEQ ID NO: 72380 - DNA, 120 bp, Artificial Sequence
  ENSG00000077800_35 (sequence is synthesized)
ctgtgaatctctcattcagcccctctctcccctctgcttctgtcattttgtctcctcctttttctgaccctcctgcctcccttttacgaggatctgattacattgggctgaccaagataa

SEQ ID NO: 72381 - DNA, 120 bp, Artificial Sequence
  ENSG00000077800_36 (sequence is synthesized)
tcgcccagctcaagatccttcatttaaccacagaatcccttctgccatgtatggtaatgtattcgtgggttccgggaattggaacaaggatatcttggggggcattttcccatctctcat

SEQ ID NO: 72382 - DNA, 120 bp, Artificial Sequence
  ENSG00000077935_0 (sequence is synthesized)
gataacgcgggtgaggcgtggagggcggcgccatggcccacctggagctgctgcttgtggaaaatttcaagtcgtggcggggccgccaggtcattggccccttccggaggttcacctgca

SEQ ID NO: 72383 - DNA, 120 bp, Artificial Sequence
  ENSG00000077935_1 (sequence is synthesized)
tcatcggccccaacggctctggaaaatctaatgtaatggatgcacttagttttgtaatgggagagaaaatagctaatttaagagtgaaaaatattcaagaactcattcatggagcacata

SEQ ID NO: 72384 - DNA, 120 bp, Artificial Sequence
  ENSG00000077935_2 (sequence is synthesized)
ttggaaaacctatttcttcttctgcaagtgtaaaaattatatatgtggaggaaagtggcgaagagaaaacatttgcaaggattatccgagggggatgctcagaatttcgctttaatgata

SEQ ID NO: 72385 - DNA, 120 bp, Artificial Sequence
  ENSG00000077935_3 (sequence is synthesized)
atcttgtgagtcgttctgtttacattgcagagttggaaaagataggcataatagtcaaagcacaaaattgtttggtttttcagggaactgtagagtcaatttcagtgaagaaacccaaag

SEQ ID NO: 72386 - DNA, 120 bp, Artificial Sequence
  ENSG00000077935_4 (sequence is synthesized)
aaaggacccagttttttgaggaaatcagcacttcaggagagcttataggagaatatgaagaaaagaaaagaaagttacaaaaagccgaagaggatgcacagtttaactttaataagaaaa

SEQ ID NO: 72387 - DNA, 120 bp, Artificial Sequence
  ENSG00000077935_5 (sequence is synthesized)
aaaatatagcggcagagcgcagacaagcaaaattagagaaggaagaggcagaacgttaccagagtctccttgaagaactgaaaatgaacaagatacaactgcagctttttcaactatacc

SEQ ID NO: 72388 - DNA, 120 bp, Artificial Sequence
  ENSG00000077935_6 (sequence is synthesized)
ataatgagaaaaagattcatctcctgaacaccaagttagagcatgtgaatagggatttgagtgtcaaaagagagtctttgtctcatcatgaaaacatagttaaagccaggaaaaaggaac

SEQ ID NO: 72389 - DNA, 120 bp, Artificial Sequence
  ENSG00000077935_7 (sequence is synthesized)
atggaatgctaactagacaactacaacaaacagaaaaagaattaaaatcggttgaaacccttttaaatcagaagaggcctcagtacattaaagccaaagaaaacacttctcaccacctta

SEQ ID NO: 72390 - DNA, 120 bp, Artificial Sequence
  ENSG00000077935_8 (sequence is synthesized)
agaaattagatgtggctaagaaatcaataaaggacagcgaaaaacaatgttctaaacaggaagatgatataaaagccctggagacagagctggctgatttagatgctgcatggagaagtt

SEQ ID NO: 72391 - DNA, 120 bp, Artificial Sequence
  ENSG00000077935_9 (sequence is synthesized)
ttgaaaagcagattgaggaagaaattttacataaaaagcgagacattgaactggaagccagtcagctggatcgttataaagaacttaaggaacaagtaagaaagaaagtagctacaatga

SEQ ID NO: 72392 - DNA, 120 bp, Artificial Sequence
  ENSG00000077935_10 (sequence is synthesized)
ctcaacaactggaaaaactgcagtgggaacagaagacagatgaagaaagactggcatttgaaaagaggaggcatggagaagttcagggaaatctaaaacaaataaaagaacaaatagaag

SEQ ID NO: 72393 - DNA, 120 bp, Artificial Sequence
  ENSG00000077935_11 (sequence is synthesized)
atcataaaaaacgaatagagaagttagaggagtatacaaagacatgcatggattgcttgaaagagaaaaaacagcaagaggaaaccctagtggatgaaattgaaaaaacaaaatcaagaa

SEQ ID NO: 72394 - DNA, 120 bp, Artificial Sequence
  ENSG00000077935_12 (sequence is synthesized)
tgtctgaagttaatgaagaattgaatcttattagaagtgaattgcagaatgctgggattgatacccatgagggaaaacgtcagcaaaagagagcagaggttctggaacaccttaaaagac

SEQ ID NO: 72395 - DNA, 120 bp, Artificial Sequence
  ENSG00000077935_13 (sequence is synthesized)
tgtacccagattctgtgtttggaagactatttgacctgtgtcatcctattcataagaaataccagctggctgttactaaggtttttggccggttcatcactgccattgttgtagcctctg

SEQ ID NO: 72396 - DNA, 120 bp, Artificial Sequence
  ENSG00000077935_14 (sequence is synthesized)
aaaaggtagcaaaagattgtattcgatttctgaaggaggaaagagctgaacctgagacattcctcgctctagattaccttgatatcaagccaatcaatgaaagactaagggagcttaaag

SEQ ID NO: 72397 - DNA, 120 bp, Artificial Sequence
  ENSG00000077935_15 (sequence is synthesized)
gctgtaaaatggtgattgatgtcataaagactcagtttcctcagctgaagaaagtgattcagtttgtgtgtggaaatggtcttgtttgtgagactatggaagaagcaaggcatattgcac

SEQ ID NO: 72398 - DNA, 120 bp, Artificial Sequence
  ENSG00000077935_16 (sequence is synthesized)
tcagtggacctgaaagacagaaaacagtagctcttgatggaacattatttttaaaatctggagtgatctctggagggtcaagtgacttaaaatacaaggctagatgctgggatgagaaag

SEQ ID NO: 72399 - DNA, 120 bp, Artificial Sequence
  ENSG00000077935_17 (sequence is synthesized)
aaatccaagagctaaagggtttaatgaagacactccgcaaagaaacagatttgaaacaaatacagaccctgatacagggaactcaaacacgactcaaatattcacaaaatgaactagaga

SEQ ID NO: 72400 - DNA, 120 bp, Artificial Sequence
  ENSG00000077935_18 (sequence is synthesized)
tgattaagaagaagcaccttgttgctttttaccaggaacaatctcagttacaaagtgaactactaaatattgagtctcaatgtattatgttgagtgaaggaatcaaggaacgacaacgaa

SEQ ID NO: 72401 - DNA, 120 bp, Artificial Sequence
  ENSG00000077935_19 (sequence is synthesized)
gaattaaagaatttcaagaaaagatagataaggtagaagacgatatcttccaacacttctgtgaagaaattggcgtggaaaatattcgtgaatttgagaacaaacatgttaaacggcaac

SEQ ID NO: 72402 - DNA, 120 bp, Artificial Sequence
  ENSG00000077935_20 (sequence is synthesized)
aagaaattgatcaaaaaagattagaatttgaaaaacaaaaaactcggcttaatgttcaacttgagtatagtcgcagtcaccttaagaagaaactgaataagatcaacacattaaaagaaa

SEQ ID NO: 72403 - DNA, 120 bp, Artificial Sequence
  ENSG00000077935_21 (sequence is synthesized)
ctatccagaaaggtagtgaagatattgatcacctaaagaaggctgaagaaaactgtctgcagacagtgaatgaactcatggcaaagcagcagcaacttaaggacatacgtgtcactcaga

SEQ ID NO: 72404 - DNA, 120 bp, Artificial Sequence
  ENSG00000077935_22 (sequence is synthesized)
actccagtgccgagaaagttcaaactcaaattgaagaggaacggaagaagtttctggctgttgatagggaagtggggaaattgcaaaaagaagttgtaagtattcaaacttctctggaac

SEQ ID NO: 72405 - DNA, 120 bp, Artificial Sequence
  ENSG00000077935_23 (sequence is synthesized)
agaaacgattagagaagcataacttgctgcttgattgcaaagtgcaagacattgagataatccttttgtcggggtcactggatgacatcattgaagtggagatgggaactgaagcagaaa

SEQ ID NO: 72406 - DNA, 120 bp, Artificial Sequence
  ENSG00000077935_24 (sequence is synthesized)
gtacccaggcaacaattgatatctatgaaaaagaagaagcctttgaaatagactacagctctctaaaagaggatttgaaggctctacagtctgatcaagaaatcgaggcccaccttaggc

SEQ ID NO: 72407 - DNA, 120 bp, Artificial Sequence
  ENSG00000077935_25 (sequence is synthesized)
tcttattgcagcaagtagcatcccaggaagatatcttactgaaaacagcagccccaaacctacgagcactggagaacttaaagactgtcagagacaagtttcaagagtccacagatgctt

SEQ ID NO: 72408 - DNA, 120 bp, Artificial Sequence
  ENSG00000077935_26 (sequence is synthesized)
ttgaggccagcagaaaggaagccagactgtgtaggcaagagttcgagcaagtgaaaaaaaggagatacgatcttttcacccagtgttttgagcatgtctcaatctcaattgatcaaatct

SEQ ID NO: 72409 - DNA, 120 bp, Artificial Sequence
  ENSG00000077935_27 (sequence is synthesized)
acaagaagctctgcagaaacaacagcgcccaagcatttcttagcccagagaaccctgaagaaccttacttggagggaattagctataactgtgtggccccaggcaaacggtttatgccaa

SEQ ID NO: 72410 - DNA, 120 bp, Artificial Sequence
  ENSG00000077935_28 (sequence is synthesized)
tggacaatttgtcagggggagaaaagtgtgtggcagccttggctctcctgtttgctgtgcacagttttcgtcctgccccattctttgttttagatgaagtggatgcagccctagacaata

SEQ ID NO: 72411 - DNA, 120 bp, Artificial Sequence
  ENSG00000077935_29 (sequence is synthesized)
ctaacataggcaaagtgtcaagttacatcaaagagcaaactcaagaccagtttcagatgatagtcatctccctaaaagaagagttctattccagagccgacgcgctgatcggcatctatc

SEQ ID NO: 72412 - DNA, 120 bp, Artificial Sequence
  ENSG00000077935_30 (sequence is synthesized)
ctgagtacgatgactgcatgttcagccgagttttgaccctagatctttctcagtatccagacactgaaggccaagaaagcagcaagagacacggagagtcccgctaggggcagtcctgca

SEQ ID NO: 72413 - DNA, 120 bp, Artificial Sequence
  ENSG00000077935_31 (sequence is synthesized)
gcagtcacctgatcactgttcagttcccactctaatactcacacagctcctccacaggagacttctggagcaagcaggaccagcctggtgcaccctttaagagaaaccttagtcgttcta

SEQ ID NO: 72414 - DNA, 120 bp, Artificial Sequence
  ENSG00000077935_32 (sequence is synthesized)
gccaaagaggctgtggctcactttagttgagtgttcagacctcattctagtagggaaagttttcagtgagagctggtgtcaaatgagtttttaaaaaacaaacaaaaggtacaattttgt

SEQ ID NO: 72415 - DNA, 120 bp, Artificial Sequence
  ENSG00000077935_33 (sequence is synthesized)
actataattctaacttctattttgaaataagctagtttggttggaaaaattttgaattcagcttcatcttcactctgatcttgccttgcacccaagtaatcttgaagggaacttctcttg

SEQ ID NO: 72416 - DNA, 120 bp, Artificial Sequence
  ENSG00000077935_34 (sequence is synthesized)
gtttttaaacatactagttataagattgttaataaactgttgaacctggcttttgggaaattgtttcagagaaactatgttagtattgaaaatatcaataaaaaatgttctaatttcaaa

SEQ ID NO: 72417 - DNA, 80 bp, Artificial Sequence
  ENSG00000077942_0 (sequence is synthesized)
gttggctgccgaggctcggccggagcgtggagcccgcgccgctgccccaggaccgcgcccgcgcctttgtccgccgccgc

SEQ ID NO: 72418 - DNA, 120 bp, Artificial Sequence
  ENSG00000077942_1 (sequence is synthesized)
gtcgcgccgggtcccgcttccgctgctgctgctcggcggccttgcgctgctggcggccggagtggacgcggatgtcctcctggaggcctgctgtgcggacggacaccggatggccactca

SEQ ID NO: 72419 - DNA, 120 bp, Artificial Sequence
  ENSG00000077942_2 (sequence is synthesized)
tcagaaggactgctcgctgccatatgctacggaatccaaagaatgcaggatggtgcaggagcagtgctgccacagccagctggaggagctgcactgtgccacgggcatcagcctggccaa

SEQ ID NO: 72420 - DNA, 120 bp, Artificial Sequence
  ENSG00000077942_3 (sequence is synthesized)
cgagcaggaccgctgtgccacgccccacggtgacaacgccagcctggaggccacatttgtgaagaggtgctgccattgctgtctgctggggagggcggcccaggcccagggccagagctg

SEQ ID NO: 72421 - DNA, 120 bp, Artificial Sequence
  ENSG00000077942_4 (sequence is synthesized)
cgagtacagcctcatggttggctaccagtgtggacaggtcttccaggcatgctgtgtcaagagccaggagaccggagatttggatgtcgggggcctccaagaaacggataagatcattga

SEQ ID NO: 72422 - DNA, 120 bp, Artificial Sequence
  ENSG00000077942_5 (sequence is synthesized)
ggttgaggaggaacaagaggacccatatctgaatgaccgctgccgaggaggcgggccctgcaagcagcagtgccgagacacgggtgacgaggtggtctgctcctgcttcgtgggctacca

SEQ ID NO: 72423 - DNA, 120 bp, Artificial Sequence
  ENSG00000077942_6 (sequence is synthesized)
gctgctgtctgatggtgtctcctgtgaagatgtcaatgaatgcatcacgggcagccacagctgccggcttggagaatcctgcatcaacacagtgggctctttccgctgccagcgggacag

SEQ ID NO: 72424 - DNA, 120 bp, Artificial Sequence
  ENSG00000077942_7 (sequence is synthesized)
cagctgcgggactggctatgagctcacagaggacaatagctgcaaagatattgacgagtgtgagagtggtattcataactgcctccccgattttatctgtcagaatactctgggatcctt

SEQ ID NO: 72425 - DNA, 120 bp, Artificial Sequence
  ENSG00000077942_8 (sequence is synthesized)
ccgctgccgacccaagctacagtgcaagagtggctttatacaagatgctctaggcaactgtattgatatcaatgagtgtttgagtatcagtgccccgtgccctatcgggcatacatgcat

SEQ ID NO: 72426 - DNA, 120 bp, Artificial Sequence
  ENSG00000077942_9 (sequence is synthesized)
caacacagagggctcctacacgtgccagaagaacgtgcccaactgtggccgtggctaccatctcaacgaggagggaacgcgctgtgttgatgtggacgagtgcgcgccacctgctgagcc

SEQ ID NO: 72427 - DNA, 120 bp, Artificial Sequence
  ENSG00000077942_10 (sequence is synthesized)
ctgtgggaagggacatcgctgcgtgaactctcccggcagtttccgctgcgaatgcaagacgggttactattttgacggcatcagcaggatgtgtgtcgatgtcaacgagtgccagcgcta

SEQ ID NO: 72428 - DNA, 120 bp, Artificial Sequence
  ENSG00000077942_11 (sequence is synthesized)
ccccgggcgcctgtgtggccacaagtgcgagaacacgctgggctcctacctctgcagctgttccgtgggcttccggctctctgtggatggcaggtcatgtgaagacatcaatgagtgcag

SEQ ID NO: 72429 - DNA, 120 bp, Artificial Sequence
  ENSG00000077942_12 (sequence is synthesized)
tgccaacgtctacggctcctaccagtgttactgccggcgaggctaccagctcagcgatgtggatggagtcacctgtgaagacatcgacgagtgcgccctgcccaccgggggccacatctg

SEQ ID NO: 72430 - DNA, 120 bp, Artificial Sequence
  ENSG00000077942_13 (sequence is synthesized)
ctcctaccgctgcatcaacatccctggaagcttccagtgcagctgcccctcgtctggctacaggctggcccccaatggccgcaactgccaagacattgatgagtgtgtgactggcatcca

SEQ ID NO: 72431 - DNA, 120 bp, Artificial Sequence
  ENSG00000077942_14 (sequence is synthesized)
caactgctccatcaacgagacctgcttcaacatccagggcggcttccgctgcctggccttcgagtgccctgagaactaccgccgctccgcagccacgctccagcaggagaagacagacac

SEQ ID NO: 72432 - DNA, 120 bp, Artificial Sequence
  ENSG00000077942_15 (sequence is synthesized)
ggtccgctgcatcaagtcctgccgccccaacgatgtcacatgcgtgttcgaccccgtgcacaccatctcccacaccgtcatctcgctgcctaccttccgcgagttcacccgccctgaaga

SEQ ID NO: 72433 - DNA, 120 bp, Artificial Sequence
  ENSG00000077942_16 (sequence is synthesized)
gatcatcttcctccgggccatcacgccaccgcatcctgccagccaggctaacatcatcttcgacatcacggaagggaacctgcgggactcttttgacatcatcaagcgttacatggacgg

SEQ ID NO: 72434 - DNA, 120 bp, Artificial Sequence
  ENSG00000077942_17 (sequence is synthesized)
catgaccgtgggtgtcgtgcgccaggtgcggcccatcgtgggcccatttcatgccgtcctgaagctggagatgaactatgtggtcgggggcgtggtctcccaccgaaatgttgtcaacgt

SEQ ID NO: 72435 - DNA, 120 bp, Artificial Sequence
  ENSG00000077942_18 (sequence is synthesized)
ccacatcttcgtctctgagtactggttctgagggctggtctgccgcacagccgcaggtgcacctccaggccaaatcattgctgccagtgactgtggtctgtacttgtttataccctcaga

SEQ ID NO: 72436 - DNA, 120 bp, Artificial Sequence
  ENSG00000077942_19 (sequence is synthesized)
cttttttaatgttaggtatttgtagcattaggccaacatgtattaagctgagccagatgaataagtccatctgatgtattttcggtgtttaaaaaatgagcccagttgctcaactgtttg

SEQ ID NO: 72437 - DNA, 120 bp, Artificial Sequence
  ENSG00000077942_20 (sequence is synthesized)
gttgaaaaccttgctcattttttaatgcgaaggctaagtgtcaccccctttctctgcctctggctgggccttgctaagggccaaggaaagaaagacattttttagggggcagccagtcca

SEQ ID NO: 72438 - DNA, 120 bp, Artificial Sequence
  ENSG00000077942_21 (sequence is synthesized)
aatgccaaaagaagaccagttcttgccctgattgtatgaaatttgacattttggcactttttttttttttttggccaatcagattttctatgttctaaggacatggctgctgtagaatag

SEQ ID NO: 72439 - DNA, 120 bp, Artificial Sequence
  ENSG00000077942_22 (sequence is synthesized)
cacagacgtggatgataaattatccccagaagcagcatgacagaatgcctcggggagcacttggaagggaaattgcagttctgttgaaatagaggaaaatcccttggtaaagacacagcc

SEQ ID NO: 72440 - DNA, 120 bp, Artificial Sequence
  ENSG00000077942_23 (sequence is synthesized)
tgttaggctcgtgtgggcctccagtatgttcaccaggggaatggctgggatttctcggcactctgcatcatccatcttttcttataggtgggaaaataaacaactttgtgatcctcctga

SEQ ID NO: 72441 - DNA, 120 bp, Artificial Sequence
  ENSG00000077942_24 (sequence is synthesized)
atccaagcgcccgcggtggttttccgcatgggcccctccagtgctgtccccggggacagcatgcagctggccatcaccggcggcaatgaggagggctttttcaccacccggaaggtgagc

SEQ ID NO: 72442 - DNA, 120 bp, Artificial Sequence
  ENSG00000077942_25 (sequence is synthesized)
ccccacagtggggtggtggccctcaccaagcctgtccccgagcccagggacttgctcctgaccgtcaagatggatctctctcgccacggcaccgtcagctcctttgtggccaagcttttc

SEQ ID NO: 72443 - DNA, 120 bp, Artificial Sequence
  ENSG00000077942_26 (sequence is synthesized)
atctttgtgtctgcagagctctgagcactcgcttcgcgtcgcggggtctccctcctgttgctttcctaaccctgccctccggggcgttaataaagtcttagcaagcgtcccacacagtga

SEQ ID NO: 72444 - DNA, 120 bp, Artificial Sequence
  ENSG00000077942_27 (sequence is synthesized)
tccgcagccacggtggaagccttgggcaagctctctgggcctcagtttcctcatctgtaacatgcagatgtcagaacgtgctctgactgagatgcataggtagcaatgtctccatgtcag

SEQ ID NO: 72445 - DNA, 120 bp, Artificial Sequence
  ENSG00000077942_28 (sequence is synthesized)
cccaaagccagggagccgatgtgacctgttggacgttgttgttaggtgcccacctgaaagccagaattcgtccagcctggtgaccgtgtgggaacggcatcaaagattccagatcctaaa

SEQ ID NO: 72446 - DNA, 120 bp, Artificial Sequence
  ENSG00000077942_29 (sequence is synthesized)
ctatgagctcacagaggacaatagctgcaaagaatactctgggatccttccgctgccgacccaagctacagtgcaagagtggctttatacaagatgctctaggcaactgtattggtaaga

SEQ ID NO: 72447 - DNA, 120 bp, Artificial Sequence
  ENSG00000077942_30 (sequence is synthesized)
gtgtgccgccaggattagcgggttattccaggaggggccagcgacctagccttggggcaggcctctagaatctgcggggccgcatggtatacagaacaggggttggcaaactttttgtgt

SEQ ID NO: 72448 - DNA, 120 bp, Artificial Sequence
  ENSG00000077942_31 (sequence is synthesized)
aaagggctggacagcaaatagagcaaatactttagccgttgtgggccatatggtctctgtcataatagtcaactctgctgttatagtctaaagcggccaagggccatctgtaaacaaatg

SEQ ID NO: 72449 - DNA, 120 bp, Artificial Sequence
  ENSG00000077942_32 (sequence is synthesized)
ggagaagagaaggcaagttggcaggagtggagaccacgggcatttgagccacttcctcatgtaacttaacttgtgccttcaggacctgctcaagcccgatcacgtatataccacttccat

SEQ ID NO: 72450 - DNA, 63 bp, Artificial Sequence
  ENSG00000077942_33 (sequence is synthesized)
tgctgctgttcatgacctatggtgacttgatgacccagagtcaaacattcagtttccaccaaa

SEQ ID NO: 72451 - DNA, 90 bp, Artificial Sequence
  ENSG00000077942_34 (sequence is synthesized)
cgaaagcctagagaccgccactggcagccagcatccttatctgccactgacacctcaagcaacattggatctgctgggtcatatggccca

SEQ ID NO: 72452 - DNA, 69 bp, Artificial Sequence
  ENSG00000077942_35 (sequence is synthesized)
catagagcataaatgtgctggagtaacactcaaacgaggaatgtgttgcctccaaaatccaataggccc

SEQ ID NO: 72453 - DNA, 120 bp, Artificial Sequence
  ENSG00000077942_36 (sequence is synthesized)
gcgctgctggcggccggaggtaggggcgtcccgggtccgccgccccagcttagggtcccgaccccctcggcctcgcgctccctgcgagtttcggaaccacggggactcggagtccgtgcg

SEQ ID NO: 72454 - DNA, 120 bp, Artificial Sequence
  ENSG00000077942_37 (sequence is synthesized)
ttgccctgcgcggcgcccccggactgtcagcgccgaggcctcggcgacgcccccctcccccacggccagctccggtcctcatctcctccccggcctggggacttgtttcaaaaccggatt

SEQ ID NO: 72455 - DNA, 120 bp, Artificial Sequence
  ENSG00000077942_38 (sequence is synthesized)
ctagctgggctgggggacgctggctgggggttaccgagcccagggcgccttgcacttgacgctggaagcgccctcggctatctttcctcaccgcttcccgcctccacccccagtggacgc

SEQ ID NO: 72456 - DNA, 120 bp, Artificial Sequence
  ENSG00000077942_39 (sequence is synthesized)
gacatcacggaagggaacctgcgggactcttttgacatcatcaagcgttacatggacggcatgaccgtggcccctctcctgaactgtcacattttaaaagatttacagtcatgggaaatg

SEQ ID NO: 72457 - DNA, 120 bp, Artificial Sequence
  ENSG00000077942_40 (sequence is synthesized)
aaaacggtggcatctgccattttggactcggatttatactctgaacactttcaaagcagctgagcaacggacggacagtccctgacctcccctgggcctcagtttccccattgtgaactg

SEQ ID NO: 72458 - DNA, 120 bp, Artificial Sequence
  ENSG00000077942_41 (sequence is synthesized)
ttggaccttggacgctcagtctttgcgcctcaaacccgacggttgttaaaactggcagctggagaaagggaatcgttattcccgtcttgccaaagagccatttatagcacctttacaagc

SEQ ID NO: 72459 - DNA, 120 bp, Artificial Sequence
  ENSG00000077942_42 (sequence is synthesized)
ttttaaatgggtttgcatgttgtaaacatgactgagtcactggggggctccccaccccagcctcctcctgcgctagctggcagcaggaataattagttaattacaattaatggtgcatta

SEQ ID NO: 72460 - DNA, 120 bp, Artificial Sequence
  ENSG00000077942_43 (sequence is synthesized)
ttgatgcctagtgaggaagatggacctggacagacagtcagctccacaccttgcgctgagcagctgtgattgtgccacgggagcatgagcccttttccccacggcccttgccactgtctc

SEQ ID NO: 72461 - DNA, 120 bp, Artificial Sequence
  ENSG00000077942_44 (sequence is synthesized)
ctggccctctctctgatcatgccaggtttgcaccagcctcgagtctcccatgttgtagtacattctccaagatgcagcccaggagcctctctgaaggaccagtctggttacgatggtctg

SEQ ID NO: 72462 - DNA, 120 bp, Artificial Sequence
  ENSG00000077942_45 (sequence is synthesized)
agcttccttagaaccttccatggttgtcttttcccagcagatgaagcatagcctccttggaatggcatgggaggcctggcctgatctggcctctgcccaccctttgagctgcacctgccc

SEQ ID NO: 72463 - DNA, 120 bp, Artificial Sequence
  ENSG00000077942_46 (sequence is synthesized)
caccccagctcatccatgtgcttgtaccctggccccacggggaggcttgcccttccctgaatctgccttcttgtggctttagcatgtgccatgctgtccccctgcagactgccattctcc

SEQ ID NO: 72464 - DNA, 120 bp, Artificial Sequence
  ENSG00000077942_47 (sequence is synthesized)
ttgcagacttggctcagaagtcacctcctcagtgcagttagcctgagctcccctggccccaggtgcctccatcagagcatttaccccattgtgttgtggctgttccttaacgtccccact

SEQ ID NO: 72465 - DNA, 120 bp, Artificial Sequence
  ENSG00000077942_48 (sequence is synthesized)
agccaggctctttgagggcagggattgtgtctggttaatttctgtattctctgcaactttgcaatgtttggcttgaagaaggagctcagtaaacatctgaataaacatgcaggttgatgg

SEQ ID NO: 72466 - DNA, 120 bp, Artificial Sequence
  ENSG00000077942_49 (sequence is synthesized)
tcagaaggactgctcgctgccatatgctacggaatccaaagaatgcagagccgtggggttggcctcactgtgccaggacctgaatggggcgtgggcagtatggaaagtgggaagagcatc

SEQ ID NO: 72467 - DNA, 120 bp, Artificial Sequence
  ENSG00000077942_50 (sequence is synthesized)
aaagctgcctcccctgcagcctcggtgacttcccgggtctctccctccggccctggtgtcccgggtgagcccagcacacgttgggattttggttgtttgttggcctggcccgactgtccc

SEQ ID NO: 72468 - DNA, 120 bp, Artificial Sequence
  ENSG00000077942_51 (sequence is synthesized)
tgtctctgagggcagagtcgggtcccatcccgggacacgcctggggttagccaccgacctgcagcctcccggccgagggtgcggggttggcgtcctgtcctcaccagacttctcacaggt

SEQ ID NO: 72469 - DNA, 120 bp, Artificial Sequence
  ENSG00000077942_52 (sequence is synthesized)
atgaattcctatacaagaggctcccgcaggcccagcgccaaagctgcctcccctgcagcctcggtgacttcccgggtctctccctccggccctggtgtcccggtggacgcggatgtcctc

SEQ ID NO: 72470 - DNA, 120 bp, Artificial Sequence
  ENSG00000077942_53 (sequence is synthesized)
agagcctgggggtctcccagtagggcagcaggtgggctccagccaggtcagcctgccttcctgggttcgtctgcccagagggcgttttctatgacccagcctgaacggagctagaaacca

SEQ ID NO: 72471 - DNA, 120 bp, Artificial Sequence
  ENSG00000077942_54 (sequence is synthesized)
agaatgaggtccaagtatgtgggcacctggcacccggccgctcctcccttggggcacaatggggtcttctcccttccgtgagctgaggggctgggagggtgcccactggggctgtagcct

SEQ ID NO: 72472 - DNA, 120 bp, Artificial Sequence
  ENSG00000077942_55 (sequence is synthesized)
atctgccctttttgcgagtgggagataagatggccaggctgcggttactcctgaacctgtgctctctgctttgccagtcctgtcctcaccagacttctcacaggtccccgtttctgtgga

SEQ ID NO: 72473 - DNA, 120 bp, Artificial Sequence
  ENSG00000077942_56 (sequence is synthesized)
tcaagacagaaggacgtgcgtgtcctggtggtgcatctgggagggccctccacccgctgagtggtgagccacctctcagcttgttctcttccctgcacagtggacgcggatgtcctcctg

SEQ ID NO: 72474 - DNA, 120 bp, Artificial Sequence
  ENSG00000077943_0 (sequence is synthesized)
agacgccgggcactgtcaccacgggtgcgccgagcgcaccgacccgggacacgggcagctggggaccgccagattccaccagccccccttgccccgcaggggtcctcggctcgcgctcct

SEQ ID NO: 72475 - DNA, 120 bp, Artificial Sequence
  ENSG00000077943_1 (sequence is synthesized)
caggggtcctcggctcgcgctcctgggtagcagccacccaccggggcggagggagatgtcgcccggggccagccgcggtccccggggaagccaggcgccgctgatcgcgcccctctgctg

SEQ ID NO: 72476 - DNA, 120 bp, Artificial Sequence
  ENSG00000077943_2 (sequence is synthesized)
gctgtggtcccccgcctgtcaggcgttcaacctggacgtggaaaagctcacagtgtacagcggccccaagggcagctacttcggctacgccgtggacttccacatacccgacgcccgcac

SEQ ID NO: 72477 - DNA, 120 bp, Artificial Sequence
  ENSG00000077943_3 (sequence is synthesized)
agcgagtgtcttggtgggggcgcccaaagccaacaccagccagcccgatatcgtggaagggggagccgtctattactgtccttggcccgcggaggggtctgcgcagtgcaggcagatacc

SEQ ID NO: 72478 - DNA, 120 bp, Artificial Sequence
  ENSG00000077943_4 (sequence is synthesized)
gtttgacaccaccaacaacagaaagatcagagttaatggaaccaaagaacctatcgagttcaaatccaatcagtggtttggagcaacagtgaaagctcacaaaggaaaagttgtggcctg

SEQ ID NO: 72479 - DNA, 120 bp, Artificial Sequence
  ENSG00000077943_5 (sequence is synthesized)
tgctcctttatatcactggagaactcttaaaccgacaccagaaaaggacccagttggcacctgctatgtagcaattcagaacttcagcgcctatgccgagttctctccttgccggaacag

SEQ ID NO: 72480 - DNA, 120 bp, Artificial Sequence
  ENSG00000077943_6 (sequence is synthesized)
caatgctgatccggaaggccagggttactgccaagcaggatttagtctggatttttataagaatggagaccttattgtgggaggacctgggagtttctactggcaaggacaagtgatcac

SEQ ID NO: 72481 - DNA, 120 bp, Artificial Sequence
  ENSG00000077943_7 (sequence is synthesized)
tgccagtgttgcagatatcattgcaaattactcattcaaggatatcctcaggaaactggcaggagaaaagcagacggaagtggctccagcttcctatgatgacagttaccttggatactc

SEQ ID NO: 72482 - DNA, 120 bp, Artificial Sequence
  ENSG00000077943_8 (sequence is synthesized)
agttgctgctggggagtttactggggattctcagcaagaattggttgctggaattccaagaggagcacagaattttggatatgtttccatcattaactctacggatatgacgtttattca

SEQ ID NO: 72483 - DNA, 120 bp, Artificial Sequence
  ENSG00000077943_9 (sequence is synthesized)
gaatttcacgggagaacagatggcatcttattttggatataccgttgtcgtatcagatgttaacagtgatggactggatgatgtcctggttggggcacctctctttatggaacgtgaatt

SEQ ID NO: 72484 - DNA, 120 bp, Artificial Sequence
  ENSG00000077943_10 (sequence is synthesized)
tgagagcaaccccagagaagtagggcaaatctacctgtatttgcaagtgagctctctcctcttcagagacccccagatcctcactggcaccgagacgtttgggagattcggtagtgctat

SEQ ID NO: 72485 - DNA, 120 bp, Artificial Sequence
  ENSG00000077943_11 (sequence is synthesized)
ggcacacttaggagacctgaaccaagatggatacaatgacattgccatcggagtgccttttgcaggcaaggatcaaagaggcaaagtgctcatttataatgggaacaaagatggcttaaa

SEQ ID NO: 72486 - DNA, 120 bp, Artificial Sequence
  ENSG00000077943_12 (sequence is synthesized)
caccaagccttcccaagttctgcaaggagtgtgggcctcacatgctgtcccttccggatttggctttactttaagaggagattcagacatagacaagaatgattacccagatttgattgt

SEQ ID NO: 72487 - DNA, 120 bp, Artificial Sequence
  ENSG00000077943_13 (sequence is synthesized)
gggtgcatttggaacaggaaaagtcgctgtttacagagcaagaccggttgtgactgtagatgcccagcttctgctgcacccaatgattatcaatcttgaaaataaaacttgccaggttcc

SEQ ID NO: 72488 - DNA, 120 bp, Artificial Sequence
  ENSG00000077943_14 (sequence is synthesized)
agactctatgacatctgctgcctgcttttctttaagagtatgtgcatctgtcacaggccagagcattgcaaacacaatagtcttgatggcagaggtgcaattagattccctgaaacagaa

SEQ ID NO: 72489 - DNA, 120 bp, Artificial Sequence
  ENSG00000077943_15 (sequence is synthesized)
aggagctattaaacggacgctcttccttgataaccatcaggctcatcgcgtcttccctcttgtgataaaaaggcagaaatcccaccagtgccaggatttcatcgtttaccttcgagatga

SEQ ID NO: 72490 - DNA, 120 bp, Artificial Sequence
  ENSG00000077943_16 (sequence is synthesized)
aactgaattccgagataaattatctccaatcaacattagtttgaattacagtttggacgaatccacctttaaagaaggcctggaagtgaaaccaatattgaactactacagagaaaacat

SEQ ID NO: 72491 - DNA, 120 bp, Artificial Sequence
  ENSG00000077943_17 (sequence is synthesized)
tgttagtgaacaggctcacattctggtggactgtggagaagacaatctgtgtgttcctgacttgaagctgtcggctagaccagataagcatcaggtaatcattggagatgaaaatcacct

SEQ ID NO: 72492 - DNA, 120 bp, Artificial Sequence
  ENSG00000077943_18 (sequence is synthesized)
tatgctcataataaatgcaagaaatgaaggggaaggagcatatgaagctgaactctttgtaatgataccagaagaggcagattatgttggaatcgaacgcaacaacaagggatttcgacc

SEQ ID NO: 72493 - DNA, 120 bp, Artificial Sequence
  ENSG00000077943_19 (sequence is synthesized)
actgagctgtgagtacaagatggaaaatgtaaccaggatggtggtgtgtgaccttgggaaccctatggtgtctggaacaaattattccctgggcctccgatttgcagttccacgtcttga

SEQ ID NO: 72494 - DNA, 120 bp, Artificial Sequence
  ENSG00000077943_20 (sequence is synthesized)
gaaaacaaacatgagcattaacttcgatctccaaatcagaagttccaacaaggacaatccagacagcaattttgtgagcctgcaaatcaacatcactgctgtagcgcaggtggaaataag

SEQ ID NO: 72495 - DNA, 120 bp, Artificial Sequence
  ENSG00000077943_21 (sequence is synthesized)
aggagtgtcacaccctccgcagattgttctgcccattcataactgggaaccagaagaggagccccacaaagaggaggaggttggaccattggtggaacatatttatgagctgcacaatat

SEQ ID NO: 72496 - DNA, 120 bp, Artificial Sequence
  ENSG00000077943_22 (sequence is synthesized)
tggaccaagtaccatcagtgacaccatcctggaggtgggctggcctttctctgcccgggatgaatttcttctctatattttccatattcaaactctgggacctctgcagtgccaaccaaa

SEQ ID NO: 72497 - DNA, 120 bp, Artificial Sequence
  ENSG00000077943_23 (sequence is synthesized)
tcctaatatcaatccacaggatataaagcctgctgcctccccagaggacacccctgagctcagcgcctttttgcgaaactctactattcctcatcttgtcaggaagagggatgtacatgt

SEQ ID NO: 72498 - DNA, 120 bp, Artificial Sequence
  ENSG00000077943_24 (sequence is synthesized)
ggtcgaattccacagacagagccctgcaaaaatactgaattgtacaaatatcgagtgtttacaaatctcctgtgcagtgggacgactcgaaggaggagaaagcgcagtcctgaaagtcag

SEQ ID NO: 72499 - DNA, 120 bp, Artificial Sequence
  ENSG00000077943_25 (sequence is synthesized)
gtcacgattatgggcccacaccttcctccagagaaaaaatgatccctatgctcttgcatccctggtgtcctttgaagttaagaagatgccttatacagatcagccagcaaaactcccaga

SEQ ID NO: 72500 - DNA, 120 bp, Artificial Sequence
  ENSG00000077943_26 (sequence is synthesized)
aggaagcatagtaattaagacatcagttatttgggcaactccgaatgtttccttctcaatcccattatgggtaataatactagcaatacttcttggattgttggttctcgccattttaac

SEQ ID NO: 72501 - DNA, 120 bp, Artificial Sequence
  ENSG00000077943_27 (sequence is synthesized)
gaacagctgacaaatgacaagacccctgaggcatgacaagaaaaaaaaagaagaccaaagacctcaaacactggtcctgttcaaagaaaaagaaagaacatgagggttaaaaatcaaagc

SEQ ID NO: 72502 - DNA, 120 bp, Artificial Sequence
  ENSG00000077943_28 (sequence is synthesized)
tttctgatacctgacagtgacccaggaaatggaggggaccctggaaacatcacctcatctacaccgcactttggagaaattgtcctgggtgcccagtgagccctgttggaaaaggaaaca

SEQ ID NO: 72503 - DNA, 120 bp, Artificial Sequence
  ENSG00000077943_29 (sequence is synthesized)
ccaaagctggagaagccatcagcaattgtggaagattttcttttgctttaatcgttctgtacttggcagacactttgaaatgcgtatgggaacgtaagttgcagtccagatcaatccagc

SEQ ID NO: 72504 - DNA, 120 bp, Artificial Sequence
  ENSG00000077943_30 (sequence is synthesized)
ataagttgcagagatgaaatgtctgaatcactatagaatttacaaggtgaactaaggtgaaatgactgatttactatagaacttagaactaagaccacaccatccaacactactgtatcc

SEQ ID NO: 72505 - DNA, 120 bp, Artificial Sequence
  ENSG00000077943_31 (sequence is synthesized)
aatggaacatttgacacctccctatggaaaagaaacatttctaaggacattatggctcagggagacaagcaatatgttgttggtactgtgaaagtacttttgaaaggacaaaaataatct

SEQ ID NO: 72506 - DNA, 120 bp, Artificial Sequence
  ENSG00000077943_32 (sequence is synthesized)
tgtgagtgagggtgagagtttatttatttattttccatgtctctaggttgagaatctgtcatctagagaatttggaaattaagatttggttagctagttttcaaaatcactcactcagtt

SEQ ID NO: 72507 - DNA, 120 bp, Artificial Sequence
  ENSG00000077943_33 (sequence is synthesized)
tcctcctaagaaccactgtgtgcagataactcatttagcagagcttcttcagaatttagacagtgctaaggaaaggaagattggcattaggaatcagttctatttaataccttgctgcct

SEQ ID NO: 72508 - DNA, 120 bp, Artificial Sequence
  ENSG00000077943_34 (sequence is synthesized)
tccatctgaaattcctttcactcacattatccagggactcacatctgcttaatttagctttgcaagatgttgcatttatatttccttgtatatctttccattgacttagttaatacatga

SEQ ID NO: 72509 - DNA, 120 bp, Artificial Sequence
  ENSG00000077943_35 (sequence is synthesized)
atttcgaggtactctctacctttggagtgtttaaaagtcatggtaaaatgtctagagttcattaattaaaaagcaatttaacattatgggtaaacattatttttaatatctataagaagc

SEQ ID NO: 72510 - DNA, 120 bp, Artificial Sequence
  ENSG00000077943_36 (sequence is synthesized)
aacacttcttatagatatttagcttgggattaaatacccgtttttcctgctatgccttgtacttgtatacacagagaaaacatgttgaatataacttagacaaaaacataaaattataca

SEQ ID NO: 72511 - DNA, 120 bp, Artificial Sequence
  ENSG00000077943_37 (sequence is synthesized)
ggcatgagccaaactgggaaaactgattcctaaagatttttatttaaaattgcttattccaactttattacttatttttactgctaatctttataatatgtaactttggagaataatctt

SEQ ID NO: 72512 - DNA, 120 bp, Artificial Sequence
  ENSG00000077943_38 (sequence is synthesized)
ttatttaagctattttcccatcatcttgaatttaaccatcacaaattttttatgtttaaaactcttgtaaataattcataatcttgtaatattatcatttttgaagtaaaattgaccagc

SEQ ID NO: 72513 - DNA, 120 bp, Artificial Sequence
  ENSG00000077943_39 (sequence is synthesized)
caaatttataggtagtctgcacaattttgtatccttttttaataatgaaaaattactatgaagaaatactgaacaaatttttatgtgcaatattttatagacctatgtatctgaagcatg

SEQ ID NO: 72514 - DNA, 120 bp, Artificial Sequence
  ENSG00000077943_40 (sequence is synthesized)
tttacactggcgtttttttttttaattaatttcctaaatgttaagtatgatagaacaagctgacccaaatccttaagtttacaaagctgttggaaaactttgtgtcctgatttcaacaat

SEQ ID NO: 72515 - DNA, 120 bp, Artificial Sequence
  ENSG00000077943_41 (sequence is synthesized)
cacgctttgtttgaaagatgagccaagctcacagacactaaattttatgtcatgccataagctggagaggagccatttggctacagctgcggaacttcattgaggagcaaatgaaaggca

SEQ ID NO: 72516 - DNA, 120 bp, Artificial Sequence
  ENSG00000077943_42 (sequence is synthesized)
catggacgagcacgctggtgcagttcatgttcttcctgcctgtgaattgaatactgtcctggtagcagtttcgggtcggtcaggagctcaaggctggtttgtgtggctgactacggatga

SEQ ID NO: 72517 - DNA, 120 bp, Artificial Sequence
  ENSG00000077943_43 (sequence is synthesized)
gcactgaagttgcctcaaagaattaaggggtgtccacaccagcctctgggggtctttggtgttagtcttccaggtagagctggttttacaagtaggtggccatctacaggatgtgatgtg

SEQ ID NO: 72518 - DNA, 120 bp, Artificial Sequence
  ENSG00000077943_44 (sequence is synthesized)
agcgatgccagacagctctctctgaccccaggtaatgccctgaatctggtgatcctggctgatctgtgaccaatagagattagctccttgggatttggggtcctaaaaggtccctgaaaa

SEQ ID NO: 72519 - DNA, 120 bp, Artificial Sequence
  ENSG00000077943_45 (sequence is synthesized)
aatgcaccccttgtctttaagccaacattggtgaaggaactgagaactcttagggttacataaaaaaagacccctgttgagatagtttatgcagatacctggaaggaactagagatgcca

SEQ ID NO: 72520 - DNA, 120 bp, Artificial Sequence
  ENSG00000077943_46 (sequence is synthesized)
ggaggaagactgagacccagaatgaagcaaggcatgagggctccaaagtgaactgcaccatcccagagtctcagccaagatggccctttcctagagggacgggcaccttccacctgccca

SEQ ID NO: 72521 - DNA, 120 bp, Artificial Sequence
  ENSG00000077943_47 (sequence is synthesized)
caggcactgctacctatgggaattgcagaaggccgttgtacacacgcgcatgcacgcagtggccctctgccctttagaatatggaagcaaagtctgggtgcagtgactcacacttgtaat

SEQ ID NO: 72522 - DNA, 68 bp, Artificial Sequence
  ENSG00000077943_48 (sequence is synthesized)
gaggactgcactccagcctgggcgacagagggaaactctgtctcaacaaaaaaataaataaaataaaa

SEQ ID NO: 72523 - DNA, 120 bp, Artificial Sequence
  ENSG00000077943_49 (sequence is synthesized)
aataaataaaataaaaaataaaaaaagaatatggaagcaaatggagaaagggaggaaactgaggtcaggcaaaccttccagcaatccgttctgcccagagaacatactgacgacagagaa

SEQ ID NO: 72524 - DNA, 120 bp, Artificial Sequence
  ENSG00000077943_50 (sequence is synthesized)
agagaacatactgacgacagagaacacactgagcgttatctgcttctagttagagcattgccgattgccttcataattcataatgtgctgtgctcctctgagggtctatctgtatttctc

SEQ ID NO: 72525 - DNA, 120 bp, Artificial Sequence
  ENSG00000077943_51 (sequence is synthesized)
ttcaaagaattccctttttaaattcttgcagctgggttttaagacacaataatggggcaaattaagttttataaacttggagatttttatacagtaaataaaaaaataatatgtactagt

SEQ ID NO: 72526 - DNA, 120 bp, Artificial Sequence
  ENSG00000077943_52 (sequence is synthesized)
cacccctgaaactgcattcttagaactcgactcttgttttatttaaatacgtgcgtagatatctgtgaagattttcatgtacctatttaccttgtcactaataaaattaaaactgaaaga

SEQ ID NO: 72527 - DNA, 120 bp, Artificial Sequence
  ENSG00000077943_53 (sequence is synthesized)
tgtgaccttgggaaccctatggtgtctggaacaaatgtaagagagaaccagaaatactgactgatttccttctaactggacttcacagggaacaaatggaaagctctccagttaccactc

SEQ ID NO: 72528 - DNA, 120 bp, Artificial Sequence
  ENSG00000077943_54 (sequence is synthesized)
agcaactcagcacctagcagcaacaacaaattaggcaggaaattgccagagtagtgggatttcacattataacctacacagagtgaatcgtctcaagctaaaaacacagaaagatgcatg

SEQ ID NO: 72529 - DNA, 120 bp, Artificial Sequence
  ENSG00000077943_55 (sequence is synthesized)
ctttctctttatacattactcttgcctgtcttttagttacaacaattttatacagactttgtttttactatagatattttctttaaatactttttctttgaattcaaaaagaaatgcaat

SEQ ID NO: 72530 - DNA, 120 bp, Artificial Sequence
  ENSG00000077943_56 (sequence is synthesized)
gtaagttaaagactctaaaaataaccaaattaggacaaagattttagcaatggcaattaaaggaaggacatgacattcaacagtgaccatagaattcccttttcaagggagattcaggta

SEQ ID NO: 72531 - DNA, 120 bp, Artificial Sequence
  ENSG00000077943_57 (sequence is synthesized)
cgtatttgcattttaaagatgctgataagtctttcagttaataaaccttttagcctgatgtttcatacttttgcttgagcatttgaaacttttctcaagttagaatattatgctagaatg

SEQ ID NO: 72532 - DNA, 120 bp, Artificial Sequence
  ENSG00000077943_58 (sequence is synthesized)
atatttttgctcttttatgctataatgttgcgttgatcttgggtattcaaaaatgtgctgaaactacagtaagctcacttcttggggcaaaaataaataaatatttcaatggcaagtaca

SEQ ID NO: 72533 - DNA, 120 bp, Artificial Sequence
  ENSG00000077984_0 (sequence is synthesized)
actgttccatgctgcccaagaaggctcagcacaggcacaaaccattgcccggcactggcccgtgctgcctgagaaggattggcacgggcacagaccactgcccccacctgccctgcgcca

SEQ ID NO: 72534 - DNA, 120 bp, Artificial Sequence
  ENSG00000077984_1 (sequence is synthesized)
tctacccaagaaggctcggcacgggcaccaaccactgcctccaactgccccatgctgcctgagaaggcactgcacggccacccccaactgccccgcactgtccctacccgggcagccatg

SEQ ID NO: 72535 - DNA, 120 bp, Artificial Sequence
  ENSG00000077984_2 (sequence is synthesized)
cgagcggctggaactctgctggccttctgctgcctggtcttgagcaccactgggggcccttccccagatacttgttcccaggaccttaactcacgtgtgaagccaggatttcctaaaaca

SEQ ID NO: 72536 - DNA, 120 bp, Artificial Sequence
  ENSG00000077984_3 (sequence is synthesized)
aagttcaacaactgcacgaacgacatgttcttgttcaaggagtcccgcatcacaagggccctagttcagatagtgaaaggcctgaaatatatgctggaggtggaaattggcagaactacc

SEQ ID NO: 72537 - DNA, 120 bp, Artificial Sequence
  ENSG00000077984_4 (sequence is synthesized)
tgcaagaaaaaccagcacctgcgtctggatgactgtgacttccaaaccaaccacaccttgaagcagactctgagctgctactctgaagtctgggtcgtgccctggctccagcacttcgag

SEQ ID NO: 72538 - DNA, 120 bp, Artificial Sequence
  ENSG00000077984_5 (sequence is synthesized)
gtgcctgttctccgttgtcactgacccccgcctcttcagcaagaccacagccatgacaaacaccaggatgcatgctccttgtcccctcccacccgcctcatgacccagcctcacagaccc

SEQ ID NO: 72539 - DNA, 120 bp, Artificial Sequence
  ENSG00000077984_6 (sequence is synthesized)
tctcaggcctctgacgagtgagcgggtgaagtgccactgggtcaccgcagggcagctggaatggcagcatggtagcacctcctaacagattaaatagatcacatttgcttctaaaattaa

SEQ ID NO: 72540 - DNA, 120 bp, Artificial Sequence
  ENSG00000078018_0 (sequence is synthesized)
atggcaaaccgctaaatcgtaagtgagggctgcatcctattgtcagtgaatgatggcggagctgagtggcttgtcatcattctcgaaaattctgagactagtgagctctctccctctctc

SEQ ID NO: 72541 - DNA, 120 bp, Artificial Sequence
  ENSG00000078018_1 (sequence is synthesized)
ccactcgccttattttcctgttcgccactgcggggacttctaatttgcagcttccctttccccggcacacacagacacgagctggtggcttgcagactgcgtctgtctggagctagagag

SEQ ID NO: 72542 - DNA, 120 bp, Artificial Sequence
  ENSG00000078018_2 (sequence is synthesized)
ccagagagccagcctgtggggataatgctcccggagaaggattctgcagcagttctcaaaggctagacttgagtggtattgctgcatatgcgctgattcttcagcttgtctctaaccgag

SEQ ID NO: 72543 - DNA, 120 bp, Artificial Sequence
  ENSG00000078018_3 (sequence is synthesized)
gaagcattgattgggagctactcattcagaaaattaaaagaaagaagccagaaaatattatcaaccctttgagaacacgacacaacgaactttatattttaccacttccttgaatagttg

SEQ ID NO: 72544 - DNA, 120 bp, Artificial Sequence
  ENSG00000078018_4 (sequence is synthesized)
caggagaaataacaaggcattgaagaatggcagatgaacggaaagatgaagcaaaggcacctcactggacctcagcaccgctaacagaggcatctgcacactcacatccacctgagatta

SEQ ID NO: 72545 - DNA, 120 bp, Artificial Sequence
  ENSG00000078018_5 (sequence is synthesized)
aggatcaaggcggagcaggggaaggacttgtccgaagcgccaatggattcccatacagggaggatgaagagggtgcctttggagagcatgggtcacagggcacctattcaaataccaaag

SEQ ID NO: 72546 - DNA, 120 bp, Artificial Sequence
  ENSG00000078018_6 (sequence is synthesized)
agaatgggatcaacggagagctgacctcagctgacagagaaacagcagaggaggtgtctgcaaggatagttcaagtagtcactgctgaggctgtagcagtcctgaaaggtgaacaagaga

SEQ ID NO: 72547 - DNA, 120 bp, Artificial Sequence
  ENSG00000078018_7 (sequence is synthesized)
aagaagctcaacataaagaccagactgcagctctgcctttagcagctgaagaaacagctaatctgcctccttctccacccccatcacctgcctcagaacagactgtcacagtggaggaag

SEQ ID NO: 72548 - DNA, 120 bp, Artificial Sequence
  ENSG00000078018_8 (sequence is synthesized)
atttacttacagcctcgaagatggagttccacgatcaacaggaattgactccctctacagctgagccttcagaccagaaggaaaaggagtcagagaagcaaagtaagcctggtgaagacc

SEQ ID NO: 72549 - DNA, 120 bp, Artificial Sequence
  ENSG00000078018_9 (sequence is synthesized)
ttaaacatgctgccttagtttctcagccagagacaactaaaacttaccctgataaaaaggacatgcaaggcacggaagaagaaaaagcacccctagctttgtttgggcacactcttgttg

SEQ ID NO: 72550 - DNA, 120 bp, Artificial Sequence
  ENSG00000078018_10 (sequence is synthesized)
ccagcctggaagacatgaaacagaagacagaaccaagccttgtagtacctggcattgacctccctaaagagcctccaactccaaaagaacaaaaggactggttcatcgaaatgccaacgg

SEQ ID NO: 72551 - DNA, 120 bp, Artificial Sequence
  ENSG00000078018_11 (sequence is synthesized)
aagcaaaaaaggatgagtggggtttagttgcccccatatctcctggccctctgactcccatgagggaaaaagatgtatttgatgatatcccaaaatgggaagggaaacagtttgattctc

SEQ ID NO: 72552 - DNA, 120 bp, Artificial Sequence
  ENSG00000078018_12 (sequence is synthesized)
ccatgccaagtccctttcaagggggaagcttcactcttcctttagatgtcatgaagaatgaaatagttacagaaacatcgccctttgcccctgcctttttacagccagatgacaaaaaat

SEQ ID NO: 72553 - DNA, 120 bp, Artificial Sequence
  ENSG00000078018_13 (sequence is synthesized)
ctctgcaacaaaccagtggcccagctactgccaaagatagttttaaaattgaagagccccatgaggctaaacctgacaaaatggcagaagcaccaccctcagaggcaatgaccttaccca

SEQ ID NO: 72554 - DNA, 120 bp, Artificial Sequence
  ENSG00000078018_14 (sequence is synthesized)
aagatgctcacattccagttgtagaagaacatgttatggggaaagttttagaggaagaaaaggaggccataaatcaagagactgtgcagcaaagggatactttcacccccagtggacagg

SEQ ID NO: 72555 - DNA, 120 bp, Artificial Sequence
  ENSG00000078018_15 (sequence is synthesized)
aacctatacttactgaaaaggaaactgagctgaagcttgaagaaaaaaccaccatttctgacaaagaagctgtgccaaaagagagtaaacccccaaaacctgcagatgaagaaataggca

SEQ ID NO: 72556 - DNA, 120 bp, Artificial Sequence
  ENSG00000078018_16 (sequence is synthesized)
taattcagacctccacagagcacactttctcagaacagaaagaccaagagcctaccacagatatgttgaaacaggactcgttccctgtaagtttggagcaagcagttacagattcagcca

SEQ ID NO: 72557 - DNA, 120 bp, Artificial Sequence
  ENSG00000078018_17 (sequence is synthesized)
tgacctctaaaacactggagaaagccatgaccgaaccatctgcattaattgaaaagagctcaattcaggaactttttgaaatgagagttgatgacaaagataagattgaaggagttggag

SEQ ID NO: 72558 - DNA, 120 bp, Artificial Sequence
  ENSG00000078018_18 (sequence is synthesized)
ctgcaacatcagctgagcttgatatgccattttatgaagataaatcaggaatgtccaagtactttgaaacatctgccttgaaagaagaagcaacaaaaagcattgagccaggcagtgatt

SEQ ID NO: 72559 - DNA, 120 bp, Artificial Sequence
  ENSG00000078018_19 (sequence is synthesized)
actatgaactgagtgacactagagaaagtgtccatgagtctattgataccatgtctcccatgcataaaaatggtgacaaggagtttcaaacaggaaaagaatcccagcccagtcctccag

SEQ ID NO: 72560 - DNA, 120 bp, Artificial Sequence
  ENSG00000078018_20 (sequence is synthesized)
cacaagaagcagggtacagcactctcgcacagagttatccatcagatttacctgaagaacccagttctcctcaagaaagaatgttcactattgatccaaaagtgtatggagagaaaaggg

SEQ ID NO: 72561 - DNA, 120 bp, Artificial Sequence
  ENSG00000078018_21 (sequence is synthesized)
acctccacagtaagaataaggatgatttgacccttagcaggagtttaggacttggtggtaggtctgcaatagaacaaagaagcatgtcaatcaatttgccgatgtcttgcctagattcca

SEQ ID NO: 72562 - DNA, 120 bp, Artificial Sequence
  ENSG00000078018_22 (sequence is synthesized)
tagcccttggatttaactttggtcggggacatgatctttctcctctggcttccgatattctaaccaacactagtggaagtatggatgaaggggatgattaccttccagccaccacacctg

SEQ ID NO: 72563 - DNA, 120 bp, Artificial Sequence
  ENSG00000078018_23 (sequence is synthesized)
cactggagaaagccccttgcttccctgtagaaagcaaagaggaagaacagatagagaaagtaaaagctactggagaagaaagtactcaagcggagatatcatgtgagtctcctttcctag

SEQ ID NO: 72564 - DNA, 120 bp, Artificial Sequence
  ENSG00000078018_24 (sequence is synthesized)
ccaaagatttttacaaaaatggtactgtcatggcacctgaccttcctgaaatgctagatctggcaggcacaaggtcaagattggcttctgtgagtgcagatgctgaggttgccaggagga

SEQ ID NO: 72565 - DNA, 120 bp, Artificial Sequence
  ENSG00000078018_25 (sequence is synthesized)
aatcagtcccatcagagactgtggttgaggatagtcgtactggcttgcccccggtaactgatgaaaaccatgtcattgtaaaaacggacagtcagctcgaagacctgggctactgtgtgt

SEQ ID NO: 72566 - DNA, 120 bp, Artificial Sequence
  ENSG00000078018_26 (sequence is synthesized)
tcaataagtacacagtcccattgccatcacctgttcaagacagtgagaatttatcaggggagagtggtaccttttacgaaggcactgatgataaagttcgaagagatttggccacagacc

SEQ ID NO: 72567 - DNA, 120 bp, Artificial Sequence
  ENSG00000078018_27 (sequence is synthesized)
tttcactgattgaagtgaaactggcagcagccggaagagtcaaagatgagttcagtgttgacaaagaagcatccgcgcatatctctggtgacaaatcaggactgagtaaggagtttgacc

SEQ ID NO: 72568 - DNA, 120 bp, Artificial Sequence
  ENSG00000078018_28 (sequence is synthesized)
aagagaagaaagctaatgataggttggatactgtactagaaaagagtgaagaacatgctgattcaaaagaacatgccaagaaaactgaagaggctggtgatgaaatagaaacattcggat

SEQ ID NO: 72569 - DNA, 120 bp, Artificial Sequence
  ENSG00000078018_29 (sequence is synthesized)
taggagtaacctatgagcaagctttggccaaagatttgtcaataccaacagatgcatcctctgagaaagcagagaagggtcttagttcagtgccagagatagctgaggtagaaccatcca

SEQ ID NO: 72570 - DNA, 120 bp, Artificial Sequence
  ENSG00000078018_30 (sequence is synthesized)
aaaaggtggaacaaggtctggattttgctgtccagggtcaactagatgttaaaattagtgactttggacagatggcttcagggctaaacatagatgatagaagggcaacagagctaaaac

SEQ ID NO: 72571 - DNA, 120 bp, Artificial Sequence
  ENSG00000078018_31 (sequence is synthesized)
ttgaggctacacaggacatgaccccctcatccaaagcaccgcaggaggcagatgcatttatgggtgttgagtctggccacatgaaagaaggcactaaagttagtgagacagaagtcaaag

SEQ ID NO: 72572 - DNA, 120 bp, Artificial Sequence
  ENSG00000078018_32 (sequence is synthesized)
agaaggtggccaagcctgacttggtgcaccaggaggctgtagacaaggaggagtcctatgaatctagtggtgagcatgaaagtctcaccatggagtccttgaaagctgatgagggcaaga

SEQ ID NO: 72573 - DNA, 120 bp, Artificial Sequence
  ENSG00000078018_33 (sequence is synthesized)
aggaaacatctccagaatcatctctaattcaagatgagattgccgtcaaattgtcagtggaaataccttgcccacctgctgtttcagaggctgatttagccacagatgagagagctgatg

SEQ ID NO: 72574 - DNA, 120 bp, Artificial Sequence
  ENSG00000078018_34 (sequence is synthesized)
tccagatggaatttattcaggggccaaaagaagaaagcaaagagaccccagatatatccatcacgccttctgatgttgcagagccattgcatgaaacgatcgtatctgaaccagcagaga

SEQ ID NO: 72575 - DNA, 120 bp, Artificial Sequence
  ENSG00000078018_35 (sequence is synthesized)
ttcagagtgaggaagaagagatagaagcccagggagaatatgataaactgctcttccgctcagacacccttcagataactgacctgggtgtctcaggtgccagggaggaatttgtggaga

SEQ ID NO: 72576 - DNA, 120 bp, Artificial Sequence
  ENSG00000078018_36 (sequence is synthesized)
cctgcccaagtgaacacaaaggagtgattgagtctgttgtgaccatcgaggatgatttcatcactgtagtgcaaaccacaactgatgaaggggagtcagggtcccacagcgtgcgttttg

SEQ ID NO: 72577 - DNA, 120 bp, Artificial Sequence
  ENSG00000078018_37 (sequence is synthesized)
cagccctagagcagcctgaggtggaaaggagaccatctcctcatgatgaagaagagtttgaagtagaagaggcagctgaagcccaggcagaacccaaagatggttccccagaggctccag

SEQ ID NO: 72578 - DNA, 120 bp, Artificial Sequence
  ENSG00000078018_38 (sequence is synthesized)
cttcccctgagagagaagaggttgcactttctgaatataagacagaaacctatgacgattacaaagatgagaccaccattgacgactccatcatggacgctgacagcctctgggtggaca

SEQ ID NO: 72579 - DNA, 120 bp, Artificial Sequence
  ENSG00000078018_39 (sequence is synthesized)
ctcaagatgatgataggagcatcatgacagaacagttagaaactattcctaaagaggagaaagctgaaaaggaagctcggagatcatctcttgagaaacatagaaaagaaaagcctttta

SEQ ID NO: 72580 - DNA, 120 bp, Artificial Sequence
  ENSG00000078018_40 (sequence is synthesized)
aacttgctaaaaaaacagaagttcaggcccactctccctccaggaaattcattttaaaacctgctatcaaatatactagaccaactcatctctcctgtgttaagcggaaaaccacagcag

SEQ ID NO: 72581 - DNA, 120 bp, Artificial Sequence
  ENSG00000078018_41 (sequence is synthesized)
caggtggggaatcagctctggctcccagtgtatttaaacaggcaaaggacaaagtctctgacggagtaaccaagagcccagaaaagcgctcttctctcccaagaccttcctccattctcc

SEQ ID NO: 72582 - DNA, 120 bp, Artificial Sequence
  ENSG00000078018_42 (sequence is synthesized)
ctcctcggcgaggtgtgtcaggagacagagatgagaattccttctctctcaacagttctatctcttcttcagcacggcggaccaccaggtcagagccaattcgcagagcagggaagagtg

SEQ ID NO: 72583 - DNA, 120 bp, Artificial Sequence
  ENSG00000078018_43 (sequence is synthesized)
gtacctcaacacccactacccctgggtctactgccatcactcctggcaccccaccaagttattcttcacgcacaccaggcactcctggaacccctagctatcccaggacccctcacacac

SEQ ID NO: 72584 - DNA, 120 bp, Artificial Sequence
  ENSG00000078018_44 (sequence is synthesized)
caggaacccccaagtctgccatcttggtgccgagtgagaagaaggtcgccatcatacgtactcctccaaaatctcctgcgactcccaagcagcttcggcttattaaccaaccactgccag

SEQ ID NO: 72585 - DNA, 120 bp, Artificial Sequence
  ENSG00000078018_45 (sequence is synthesized)
acctgaagaatgtcaaatccaaaatcggatcaacagacaacatcaaataccagcctaaaggggggcaggtacaaattgttaccaagaaaatagacctaagccatgtgacatccaaatgtg

SEQ ID NO: 72586 - DNA, 120 bp, Artificial Sequence
  ENSG00000078018_46 (sequence is synthesized)
gctctctgaagaacatccgccacaggccaggtggcggacgtgtgaaaattgagagtgtaaaactagatttcaaagaaaaggcccaagctaaagttggttctcttgataatgctcatcatg

SEQ ID NO: 72587 - DNA, 120 bp, Artificial Sequence
  ENSG00000078018_47 (sequence is synthesized)
tacctggaggtggtaatgtcaagattgacagccaaaagttgaacttcagagagcatgctaaagcccgtgtggaccatggggctgagatcattacacagtccccaggcagatccagcgtgg

SEQ ID NO: 72588 - DNA, 120 bp, Artificial Sequence
  ENSG00000078018_48 (sequence is synthesized)
catcaccccgacgactcagcaatgtctcctcgtctggaagcatcaacctgctcgaatctcctcagcttgccactttggctgaggatgtcactgctgcactcgctaagcagggcttgtgaa

SEQ ID NO: 72589 - DNA, 120 bp, Artificial Sequence
  ENSG00000078018_49 (sequence is synthesized)
tatttctcatttagcattgaaataataatatttaggcatgagctcttggcaggagtgggctctgagcagttgttatattcattctttataaaccataaaataaataatctcatccccaaa

SEQ ID NO: 72590 - DNA, 120 bp, Artificial Sequence
  ENSG00000078018_50 (sequence is synthesized)
ctgtagtaattgttacaattttctatttaaaaaatgaatagtacatgcagaaattgacctgatttccatttgcaacaggaagacactggctttacatgggttcaattggacaattatttt

SEQ ID NO: 72591 - DNA, 120 bp, Artificial Sequence
  ENSG00000078018_51 (sequence is synthesized)
tgctctgctctgttttgcatggagtattattattttaaaaattgcatttttacctttcatgtgcctgaaggctatccactacattctgaaggccttgttaaaatccaagctgctcatttc

SEQ ID NO: 72592 - DNA, 120 bp, Artificial Sequence
  ENSG00000078018_52 (sequence is synthesized)
actattctgtttctgagtgagaagataaaaactgcccattgtaacttatttcaggttaaattaaaccaaggagtctgattgcaggaagggaagagcatgtaagaaataagtttttttaaa

SEQ ID NO: 72593 - DNA, 120 bp, Artificial Sequence
  ENSG00000078018_53 (sequence is synthesized)
gtgttattttgtataaatgggaagaaagattcaattaagttattaacatttgggacctggataattatatcagagtatgtcagtccaataaattatttaactaattaaaaaatagttgca

SEQ ID NO: 72594 - DNA, 120 bp, Artificial Sequence
  ENSG00000078018_54 (sequence is synthesized)
aagcatttgagctgtggttgaggaagtggtgtaaaagtgcatccattaggaatgatgcactttcattaggatggactcgtgtctgattagaatgtcagttgatcagctagatttgtgtcc

SEQ ID NO: 72595 - DNA, 120 bp, Artificial Sequence
  ENSG00000078018_55 (sequence is synthesized)
acactaccagtttcacaccccctttccatctgtttgatacagtattatagatataaatatatatatatttctctgtggccatttgtgatacttcctcatatacttgaatattatacttct

SEQ ID NO: 72596 - DNA, 120 bp, Artificial Sequence
  ENSG00000078018_56 (sequence is synthesized)
ttattcacagtatctgtgtctcctgcaccctttggtgttgcaattttagatatgtgaaagtagatgttagcagggttctctccctatttaaaaaaaatacattaaaaaagacaaaaaatt

SEQ ID NO: 72597 - DNA, 120 bp, Artificial Sequence
  ENSG00000078018_57 (sequence is synthesized)
ttagcatgaagttgctttctgtaacaactcaaagccgtaaccctgttttagtgccagatacaagtctctcccgtgatgctagacaaaaaattatttttctttgctttcaccaacatggag

SEQ ID NO: 72598 - DNA, 120 bp, Artificial Sequence
  ENSG00000078018_58 (sequence is synthesized)
tttgtgggggtgggtccagttatacatgaaagggtttacagattgttggtttaagattatggatttatctcatttttaatcacaggatagtttggggtttattcctattattattcatga

SEQ ID NO: 72599 - DNA, 120 bp, Artificial Sequence
  ENSG00000078018_59 (sequence is synthesized)
aaccgacttaagattttttctttatttttctttttttttccatttgctaaagttgaaagttgaaactaactataatagtttgaaacatgttttctcatttttccaaatagtatctgttta

SEQ ID NO: 72600 - DNA, 120 bp, Artificial Sequence
  ENSG00000078018_60 (sequence is synthesized)
ttaaattctctaatagaagatgtttgtctttcttacccaaagtaaagatcccctgatcagaaagaaaaaatacaatactttgggaagctatagctataaaacacttgagacacagatatc

SEQ ID NO: 72601 - DNA, 120 bp, Artificial Sequence
  ENSG00000078018_61 (sequence is synthesized)
taaatcagtttttttccaagactccaacattgcactctgtaaagtaacacactgtgatctagtattatttatcagtagataatactgttctgactgtatatacagtctagaactcacaaa

SEQ ID NO: 72602 - DNA, 120 bp, Artificial Sequence
  ENSG00000078018_62 (sequence is synthesized)
tcaattagttcctctcacaaatcattcatcttagacttacaaataaggaatgaaatagtcaatggcctgattaaggcaaagagctaccaggctagatggacactttttaaaaattttatc

SEQ ID NO: 72603 - DNA, 120 bp, Artificial Sequence
  ENSG00000078018_63 (sequence is synthesized)
tgttctttttcttgctcagggctggtaggttggatctgaaccattaaaatcaaatggtccactaggcgtatgatctctttgagccaaatcagttcctgaatataaaggaggaaatgatga

SEQ ID NO: 72604 - DNA, 120 bp, Artificial Sequence
  ENSG00000078018_64 (sequence is synthesized)
ggatgtactgaggcaacggggaagtatagaaacatccaagacaaaagccaagggatgcaaaggcagagacacaggtgctttttggtgacccagtggatatggcaaccagtgtaactgcca

SEQ ID NO: 72605 - DNA, 120 bp, Artificial Sequence
  ENSG00000078018_65 (sequence is synthesized)
tacaagaaaccctaggagcaaacccacaccactcattctcagctaagagattttacacaggcaaacgtgtcttaaaccatctataaatcagttattttatatgacagtcaaaaccttaga

SEQ ID NO: 72606 - DNA, 120 bp, Artificial Sequence
  ENSG00000078018_66 (sequence is synthesized)
aaccttaggatcattatatctattttctgcctattaattgctgtgaggtttgatttgaccaatctgggcaatttattcatcagcttcccttgaagtgcaccagaaaatagaagaaaggtg

SEQ ID NO: 72607 - DNA, 120 bp, Artificial Sequence
  ENSG00000078018_67 (sequence is synthesized)
tgtggagacttagggtattttattacatgttttcatagtcttaaatagtgattaaatttctctagaaagaagttaacagctcattagaaaagttttaacctgtgaaataagtatttttct

SEQ ID NO: 72608 - DNA, 120 bp, Artificial Sequence
  ENSG00000078018_68 (sequence is synthesized)
caacattctttaaagtttttatataagttaacactaggtaaacattctgcatactagaagtcagtttattacaaatacatgtcaaaaataaagattatacaaggcaccaaactactagat

SEQ ID NO: 72609 - DNA, 120 bp, Artificial Sequence
  ENSG00000078018_69 (sequence is synthesized)
ttggcattaaaacaaatgtttatttctaatcacaacaaaattataatgaataaatgttcttgctttgtatggaaatacaattctttattaaagttaacagaaaggaactgatcgtttgta

SEQ ID NO: 72610 - DNA, 120 bp, Artificial Sequence
  ENSG00000078018_70 (sequence is synthesized)
ccagtaaaagagagaaacacacaggttaaatatcttcttgtggggttaaggggtagaacctatcttgccttcactctcaagataacgactcaaattaagctttttgagcaccactcttgt

SEQ ID NO: 72611 - DNA, 120 bp, Artificial Sequence
  ENSG00000078018_71 (sequence is synthesized)
ggggacacacatacgctgatctaggaatgaaatcttcgtggtctcaattctagatctactatgccagtttctctctggctttagcctttgagaacctgtataagaatacgtaagtaatcc

SEQ ID NO: 72612 - DNA, 120 bp, Artificial Sequence
  ENSG00000078018_72 (sequence is synthesized)
agagctgtgaagagtttaaaggccaacttctccagtgaactcaacctctgggtcacttgcaaccagaaattggatacctcataatgatgcaggaaagacccgagttcatgatgagtttca

SEQ ID NO: 72613 - DNA, 120 bp, Artificial Sequence
  ENSG00000078018_73 (sequence is synthesized)
aaggccacgttcatttaggaaccaactctctctggatttacctgctgagttccagcagcgtgatgggctgacatcccacctacaagtatgacacctgtgtaacaccagctaggtacggct

SEQ ID NO: 72614 - DNA, 120 bp, Artificial Sequence
  ENSG00000078018_74 (sequence is synthesized)
agtatgacacctgtgtaacaccagctaggtacggctggagaaggctgaagagagaatgccattaaatggaagaatgtactgattgtagtgaccttctccacacacacacacacacacaca

SEQ ID NO: 72615 - DNA, 120 bp, Artificial Sequence
  ENSG00000078018_75 (sequence is synthesized)
taatcagccaatatataacattccatcagtattttattaaggaaataacctgaatgtggttgattttgacatagctgcaattacagttttcttctatttttcaagccacaataaggaaaa

SEQ ID NO: 72616 - DNA, 120 bp, Artificial Sequence
  ENSG00000078018_76 (sequence is synthesized)
taaactactcatggtctaaatactagagataaagtagattcatggcttggtaaggaaattttaagcattccttcaaagattgacgtgctaaaataagcattgatgttttgagttttttta

SEQ ID NO: 72617 - DNA, 120 bp, Artificial Sequence
  ENSG00000078018_77 (sequence is synthesized)
cacctaggatttttagcttgggtgtgtaggtgaaggccaagactctctgcaggaaaaagcttattttcaaactcagaaaataaaatgtcaatcataaaaatctacttcaactttagcaaa

SEQ ID NO: 72618 - DNA, 120 bp, Artificial Sequence
  ENSG00000078018_78 (sequence is synthesized)
aagaaaaaaaaatcaacaaaaagtatactctgtatgctgggattccgaggttccaacacactgttacaaatctgtggggggtttctttcttctgataattctagagcctgttaccataga

SEQ ID NO: 72619 - DNA, 120 bp, Artificial Sequence
  ENSG00000078018_79 (sequence is synthesized)
aaggcatttcttcaatggctggttgtagttagttcatgtttttcaatcaaatttgcaaatgtatttgttgctgtatagtgattgttttgcaaaataaaattgcttgtcacctaactgcta

SEQ ID NO: 72620 - DNA, 120 bp, Artificial Sequence
  ENSG00000078018_80 (sequence is synthesized)
ggcgctcgggctgcgcgggctctgggcagcagcagcagcagcagcagcatcctctcttcctttacttcccttccgcttctttctcttccttctccttctttttcccccccctccccttct

SEQ ID NO: 72621 - DNA, 120 bp, Artificial Sequence
  ENSG00000078018_81 (sequence is synthesized)
tcccctaacccttctacccctctcctttttctccggagggcgctaagtccgtgagcggtggcagtcgcgaccgcgggtgcatccagtttctgcgcccagattttattgatctaatccaaa

SEQ ID NO: 72622 - DNA, 120 bp, Artificial Sequence
  ENSG00000078018_82 (sequence is synthesized)
ctaccttgtcaaagattcctgctttacagggtagcacaaagtccccaagatacagctcagcctgccctagcacgactaaaagggctacattttctgacagtttattaatacagcccacct

SEQ ID NO: 72623 - DNA, 120 bp, Artificial Sequence
  ENSG00000078018_83 (sequence is synthesized)
attttagcaaagttcagtccagatgtggttccaaggataacatcaaacattcggctgggggcggaaatgtacaaattgttaccaagaaaatagacctaagccatgtgacatccaaatgtg

SEQ ID NO: 72624 - DNA, 120 bp, Artificial Sequence
  ENSG00000078018_84 (sequence is synthesized)
gcagaaaatcacacagcctcactgcgaagcatctgggcctggtggcaccgatggatgaggacagaaaatggggatcttttcagtgttttccttctaaaggttaggcatccggggctagaa

SEQ ID NO: 72625 - DNA, 120 bp, Artificial Sequence
  ENSG00000078018_85 (sequence is synthesized)
cagacaacatcaaataccagcctaaaggggggcaggtaagaattgcatgaacacatatttgctgccagaaataattattacattgccttcttcatattgaaaactaacagttcttaaaag

SEQ ID NO: 72626 - DNA, 120 bp, Artificial Sequence
  ENSG00000078018_86 (sequence is synthesized)
ggaagcagaggtgttaaagagcttggttacaatttattgctaagagtttggactttacattaggaagatagcctctgaaatacaacgaaaatcacatgacatgcccattccttctgtttg

SEQ ID NO: 72627 - DNA, 120 bp, Artificial Sequence
  ENSG00000078018_87 (sequence is synthesized)
ttactgggtaaaaatttttaccaacttttagttgattgactaactttttttttttctgaatgtatctctattgctttgtgttttttaacttgagattaaagttatatttctgatataaaa

SEQ ID NO: 72628 - DNA, 120 bp, Artificial Sequence
  ENSG00000078018_88 (sequence is synthesized)
atttttacaaaacatctaggcaaatatgcactctttctaagttataaagtagaaatgtttataaatatatgaaatccagtagtttgtattaaaagaaattcatttattagcacaggagga

SEQ ID NO: 72629 - DNA, 120 bp, Artificial Sequence
  ENSG00000078018_89 (sequence is synthesized)
aaatagcaaaatcaatatcacttcgtataaattaaagagttacaagaacccaatgttctttttgttttctccaatcaggacggagtaaccaagagcccagaaaagcgctcttctctccca

SEQ ID NO: 72630 - DNA, 120 bp, Artificial Sequence
  ENSG00000078018_90 (sequence is synthesized)
tcatgtttactccaaaataaggatgtttcaccgagtttcaattctggctactattgcctaaatgttgcaaaggggaggtattcgtgttgataataaaagacacatggttctgatgaataa

SEQ ID NO: 72631 - DNA, 120 bp, Artificial Sequence
  ENSG00000078018_91 (sequence is synthesized)
ggggctgctaagtcctcagaccaacccaagggcctcagtaagggccaaatggagtctagtgcggaggcccaaatagttcccgaagagagtgccccagcaggggccccacatgagaaaagt

SEQ ID NO: 72632 - DNA, 120 bp, Artificial Sequence
  ENSG00000078018_92 (sequence is synthesized)
ggagaccagatgatgacattcataggctgatagactcgactcctggggacacacttggatggaggcaattaaaatgcctgtcaggcatttggtaccagaagcccctatggcaaaccgcta

SEQ ID NO: 72633 - DNA, 80 bp, Artificial Sequence
  ENSG00000078043_0 (sequence is synthesized)
acgtgacgggcccggctgtagcggcggcggccgcggcgtcttaagcggcgcccagtgcaggatggtgctggaggcggcgg

SEQ ID NO: 72634 - DNA, 120 bp, Artificial Sequence
  ENSG00000078043_1 (sequence is synthesized)
gggtgcggcggcagcggcggcggcgcccgcgggtggtataaaatggcggatttcgaagagttgaggaatatggtttctagttttagggtttctgaactacaagtattactaggctttgct

SEQ ID NO: 72635 - DNA, 120 bp, Artificial Sequence
  ENSG00000078043_2 (sequence is synthesized)
ggacggaataaaagtggacgcaagcatgacctcctgatgagggcgctgcatttattgaagagcggctgcagccctgcggttcagattaaaatccgagaattgtatagacgccgatatcca

SEQ ID NO: 72636 - DNA, 120 bp, Artificial Sequence
  ENSG00000078043_3 (sequence is synthesized)
cgaactcttgaaggactttctgatttatccacaatcaaatcatcggttttcagtttggatggtggctcatcacctgtagaacctgacttggccgtggctggaatccactcgttgccttcc

SEQ ID NO: 72637 - DNA, 120 bp, Artificial Sequence
  ENSG00000078043_4 (sequence is synthesized)
acttcagttacacctcactcaccatcctctcctgttggttctgtgctgcttcaagatactaagcccacatttgagatgcagcagccatctcccccaattcctcctgtccatcctgatgtg

SEQ ID NO: 72638 - DNA, 120 bp, Artificial Sequence
  ENSG00000078043_5 (sequence is synthesized)
cagttaaaaaatctgcccttttatgatgtccttgatgttctcatcaagcccacgagtttagttcaaagcagtattcagcgatttcaagagaagttttttatttttgctttgacacctcaa

SEQ ID NO: 72639 - DNA, 120 bp, Artificial Sequence
  ENSG00000078043_6 (sequence is synthesized)
caagttagagagatatgcatatccagggattttttgccaggtggtaggagagattatacagtccaagttcagttgagactttgcctggcagagacaagttgccctcaagaagataactat

SEQ ID NO: 72640 - DNA, 120 bp, Artificial Sequence
  ENSG00000078043_7 (sequence is synthesized)
ccaaatagtctatgtataaaagtaaatgggaagctatttcctttgcctggctatgcaccaccgcctaaaaatgggattgaacagaagcgccctggacgccccttgaatattacatcttta

SEQ ID NO: 72641 - DNA, 120 bp, Artificial Sequence
  ENSG00000078043_8 (sequence is synthesized)
gttaggttatcttcagctgtgccaaaccaaatttccatttcttgggcatcagaaattgggaagaattactctatgtctgtatatcttgtacggcagcttacatcagccatgttattacag

SEQ ID NO: 72642 - DNA, 120 bp, Artificial Sequence
  ENSG00000078043_9 (sequence is synthesized)
agattaaaaatgaaaggtattagaaaccctgatcattccagagcactaattaaagaaaaacttactgcagatcctgatagtgaaattgctacaactagccttcgggtatccttgatgtgc

SEQ ID NO: 72643 - DNA, 120 bp, Artificial Sequence
  ENSG00000078043_10 (sequence is synthesized)
cctttaggaaaaatgaggctgacaatcccatgccgtgcagtgacttgtacacatctgcagtgttttgatgctgccctctatctacaaatgaatgagaaaaagcccacctggatttgtcct

SEQ ID NO: 72644 - DNA, 120 bp, Artificial Sequence
  ENSG00000078043_11 (sequence is synthesized)
gtgtgtgacaaaaaagctgcctatgaaagtctaatattagatgggctttttatggaaattctcaatgactgttctgatgtagatgagatcaaattccaagaagatggttcttggtgtcca

SEQ ID NO: 72645 - DNA, 120 bp, Artificial Sequence
  ENSG00000078043_12 (sequence is synthesized)
atgagaccgaagaaagaagctatgaaagtatccagccaaccgtgtacaaaaatagaaagttcaagcgtcctcagtaagccttgttcagtgactgtagccagtgaggcaagcaagaagaaa

SEQ ID NO: 72646 - DNA, 120 bp, Artificial Sequence
  ENSG00000078043_13 (sequence is synthesized)
gtagatgttattgatcttacaatagaaagctcttctgacgaagaggaagaccctcctgccaaaaggaaatgcatctttatgtcagaaacacaaagcagcccaaccaaaggggttctcatg

SEQ ID NO: 72647 - DNA, 120 bp, Artificial Sequence
  ENSG00000078043_14 (sequence is synthesized)
tatcagccatcttctgtaagggtgcccagtgtgacttcggttgatcctgctgctattccgccttcattaacagactactcagtaccattccaccatacgccaatatcaagcatgtcatca

SEQ ID NO: 72648 - DNA, 120 bp, Artificial Sequence
  ENSG00000078043_15 (sequence is synthesized)
gatttgccaggtttggattttctttcccttattccagttgatccccagtactgtcctcctatgtttttggatagtctcacctcacccttaacagcaagcagtacgtctgtcaccaccacc

SEQ ID NO: 72649 - DNA, 120 bp, Artificial Sequence
  ENSG00000078043_16 (sequence is synthesized)
agctcccatgaaagcagtactcatgttagttcatccagcagcaggagtgagacaggggtcataaccagcagtggaagtaacattcctgacatcatctcattggactaaaggaggactcac

SEQ ID NO: 72650 - DNA, 120 bp, Artificial Sequence
  ENSG00000078043_17 (sequence is synthesized)
ttgattctgggaatcattcatcagaactgctttttcttggatctctagtctgtggaaacgttcttttttttttttttttaataatttggtatttattgaaagtcagatggattcttttgc

SEQ ID NO: 72651 - DNA, 120 bp, Artificial Sequence
  ENSG00000078043_18 (sequence is synthesized)
tttctgaggggtgaacacagaagactgcaacaagaaccaaatgacatgcaaggatttttcttaattatgctgtactctcagcatcagatacattcaaccataactgtatcttcctgagag

SEQ ID NO: 72652 - DNA, 120 bp, Artificial Sequence
  ENSG00000078043_19 (sequence is synthesized)
atggatttcactttcatacgttaatggatggagtctacaaatcagtgaaaaaagtttttgttaaaataaagagcaataaaattatgtaaatattcaagtaaccttttttctaattaaaaa

SEQ ID NO: 72653 - DNA, 120 bp, Artificial Sequence
  ENSG00000078043_20 (sequence is synthesized)
aaaaattgtaatcactgattctagaatgacagcaacttctgtttaaccttacgtgaaggaaaaaaaatatatggaaagaacttaatgtttgctgaatgagtcctttccatggagatttgc

SEQ ID NO: 72654 - DNA, 120 bp, Artificial Sequence
  ENSG00000078043_21 (sequence is synthesized)
tctgtttcattgaagtaatgaagtttcagtacgtggccaaagcttggattccacttttcgtcctgcatttccacttttcttcgtgattgcatcaaagaaaaatggcattcgtgttacttg

SEQ ID NO: 72655 - DNA, 120 bp, Artificial Sequence
  ENSG00000078043_22 (sequence is synthesized)
gtttttttcctgcttatcatttacactttgacgttgtttgctaatgagtgctgtgtgaagttctgggatttggctactcttcattggtgattatgtttaaaagcactatgcagattctgc

SEQ ID NO: 72656 - DNA, 120 bp, Artificial Sequence
  ENSG00000078043_23 (sequence is synthesized)
cctgacataaagtgtgttattatgtttttagtaattgtacatttttcattctagagttttctataaatttgaggcttgccttctcaaaaaagaaactatgcagccattgaatgaaatgtc

SEQ ID NO: 72657 - DNA, 120 bp, Artificial Sequence
  ENSG00000078043_24 (sequence is synthesized)
tttggggtacggtgtgactggaatgtttgttagaaatttgttcacactatcaaatattgatatcttggagccagcagaagagcagattttgggaggtggtaataacaaaatttaatttct

SEQ ID NO: 72658 - DNA, 120 bp, Artificial Sequence
  ENSG00000078043_25 (sequence is synthesized)
tcccaacaacttaattttctcatttattttacagaatagtagtgaaatatttgatgaaactttgtattttggtagcactacatagaaaatgtgttttagatttatgatgatcatatttct

SEQ ID NO: 72659 - DNA, 120 bp, Artificial Sequence
  ENSG00000078043_26 (sequence is synthesized)
caccaatgtaatttcagtctcagcagtgattttcaaacttagggaaagggacagcattagattttttttttttttcatttttttaaaatgatatcttacctgaaactacaaacgacaaaa

SEQ ID NO: 72660 - DNA, 120 bp, Artificial Sequence
  ENSG00000078043_27 (sequence is synthesized)
gagaattagaaatgtttgaattaaagtgaagaagggttgggggagatgggcctgaacccacttcctgtctcaatccatgctaccccaaacactccagggaacctctgaggttttattggg

SEQ ID NO: 72661 - DNA, 120 bp, Artificial Sequence
  ENSG00000078043_28 (sequence is synthesized)
tgcactttgaaaatttctcttctatagtgtgtttgtttgattttaaatcacagagaaaactgggttttactcttagagaaacattttcatccagttttttagtttgcttcatttgacttc

SEQ ID NO: 72662 - DNA, 120 bp, Artificial Sequence
  ENSG00000078043_29 (sequence is synthesized)
ctaaatcatttttgagttcacaaggatttggtacttttctgtttagctttctctctctaagctttatctaccttaaaaacaaagtcctttttttaatggccagtccaaccaattgatttc

SEQ ID NO: 72663 - DNA, 120 bp, Artificial Sequence
  ENSG00000078043_30 (sequence is synthesized)
tcaaactgaagtgcccaggtgtggactcatcaatttccgttagaatagggacatcctacttaagagttggtgcagctccaaggagctgacttgtccttgcttggggtttttttttttttt

SEQ ID NO: 72664 - DNA, 120 bp, Artificial Sequence
  ENSG00000078043_31 (sequence is synthesized)
ctttcaccttctcaagtttccatggcctttgtgtgttctttttatgttgatttaaattcatatggttttccacaaatcccttctttggctacattgtctccttattcaatggattatccc

SEQ ID NO: 72665 - DNA, 120 bp, Artificial Sequence
  ENSG00000078043_32 (sequence is synthesized)
tttgtgggggctgcttattttaaagatgttgggggggaaacaaacccaaatctacgagcagtagttgcacatagttgccagttttaccttcttagtcattagatttccaaaccatgttgc

SEQ ID NO: 72666 - DNA, 120 bp, Artificial Sequence
  ENSG00000078043_33 (sequence is synthesized)
agttttttggtccagatatagtatttctttctaataaagttttatgttgctgctctaaatacagatgcaatatttattgactctgtaatcagatagaaaaaacttaacttggtttgtgtg

SEQ ID NO: 72667 - DNA, 120 bp, Artificial Sequence
  ENSG00000078043_34 (sequence is synthesized)
gtatgacttataaagaaatgatgtatatttgttattttgttaccctttagattgtcagagactcccccaatttaatcaacaaagttttataaagtaaatgaaaatattaatagaaattag

SEQ ID NO: 72668 - DNA, 90 bp, Artificial Sequence
  ENSG00000078043_35 (sequence is synthesized)
tataattgtgagtgaacagttttaatgttcggttttggtgttttacactgaaattacatataaatttttaatttatttcatacaggcaac

SEQ ID NO: 72669 - DNA, 120 bp, Artificial Sequence
  ENSG00000078043_36 (sequence is synthesized)
aaattacatataaatttttaatttatttcatacaggcaacttgcattttaaaaaatacactttgaagtttatcatcttgaaattggggcttacgttgtttatctgtcttgagcattagta

SEQ ID NO: 72670 - DNA, 120 bp, Artificial Sequence
  ENSG00000078043_37 (sequence is synthesized)
ctttatgactttggccttatggcaacatcatgattattaatccgtcagcctttaatgtggtcactgtttcttatccagaccctgactttctagtagtttattttgctagcccagatttct

SEQ ID NO: 72671 - DNA, 120 bp, Artificial Sequence
  ENSG00000078043_38 (sequence is synthesized)
gcttaaccaaatataagggagtttcagaggggtgatcttagctgtcacctagattctgtcagccaaccagtgattgtctggaatatcttaggaaatgaactgtaattgtcagcctcctaa

SEQ ID NO: 72672 - DNA, 120 bp, Artificial Sequence
  ENSG00000078043_39 (sequence is synthesized)
gaatatcttaggaaatgaactgtaattgtcagcctcctaaaatcaatttttttttttttttttttgaggctgagtcttgctcttgttgcccgggatggagtgcaatggtgcgatcttggc

SEQ ID NO: 72673 - DNA, 86 bp, Artificial Sequence
  ENSG00000078043_40 (sequence is synthesized)
aaatgtttttatctttcttcacttagaactatgaaggccttttcttgttctggtaaccccccacagtgtaattggtgctgaaaata

SEQ ID NO: 72674 - DNA, 120 bp, Artificial Sequence
  ENSG00000078043_41 (sequence is synthesized)
gttctggtaaccccccacagtgtaattggtgctgaaaatagtttcgtgcctgaggtctgttgtcactcactcactttctgacaattaggtgagccacttgaggattttctggcctgaagt

SEQ ID NO: 72675 - DNA, 120 bp, Artificial Sequence
  ENSG00000078043_42 (sequence is synthesized)
tataaaaacttggcatctgtcctaaggtaattgtaaaggcaaaatgaaagcattgaggtgaatttaggttatatggcatttatctggtaatgtgtttcagaaaagctagaatgaaaatgt

SEQ ID NO: 72676 - DNA, 120 bp, Artificial Sequence
  ENSG00000078043_43 (sequence is synthesized)
gatgtaagggatagcaagtgtaggttgattcataattcttggtataaaaccaagttttccttagtcttgaggaatttgaagaaaggtaaaatgttggattttaagcaaagtaggattgac

SEQ ID NO: 72677 - DNA, 120 bp, Artificial Sequence
  ENSG00000078043_44 (sequence is synthesized)
cagagactgttctgactttgacattcagacctttcagatgttcttccttcagaccagtccaagacactcagcatttccagccaagttgtcttttttttctgccaataaagtattcattag

SEQ ID NO: 72678 - DNA, 120 bp, Artificial Sequence
  ENSG00000078043_45 (sequence is synthesized)
ccttcagttggtttaaaaaaaaaaaaaaaaaaaaaagcacttagccggaccattctttctttagtaaacatttttattttcttaatttttcctgaaagattttcttcattttcatggaat

SEQ ID NO: 72679 - DNA, 120 bp, Artificial Sequence
  ENSG00000078043_46 (sequence is synthesized)
gtcataatgacactaccattattttctagctctttgcataatagaaaaatgtagagcagtgcaccatttaaacacgtctgacattggatttagtggtcctaggttcatgtgatttgggag

SEQ ID NO: 72680 - DNA, 120 bp, Artificial Sequence
  ENSG00000078043_47 (sequence is synthesized)
ccttaagttgttatttagattgattcagcctgattcaccatcttttttactacagttctacatgaatgtggtgaaacaggtagaagaaaattaagcatttctctgcttttggagtctaat

SEQ ID NO: 72681 - DNA, 120 bp, Artificial Sequence
  ENSG00000078043_48 (sequence is synthesized)
gttcctgcctagtgactggtttgtaacacccccctcacccctactttgttaggaacctgcaattcctaaaagaaataaataaagctgtacccaatgtccattctttaatgcttgcctggt

SEQ ID NO: 72682 - DNA, 120 bp, Artificial Sequence
  ENSG00000078043_49 (sequence is synthesized)
tgaataatgtttgttttttctgtttatgtcagtagtacatgcttattgtggaaaatttagacaatacagaaaagtataacaattaattgcctatgattctgtcaccagaaaaaatcactt

SEQ ID NO: 72683 - DNA, 120 bp, Artificial Sequence
  ENSG00000078043_50 (sequence is synthesized)
gatatttttgcatcttccttgccattgtctttgctacttctgcatatttttacttagtttcatcattctcagtgtaatttatatcttggggtttttccccgcaacctacaggcattattc

SEQ ID NO: 72684 - DNA, 120 bp, Artificial Sequence
  ENSG00000078043_51 (sequence is synthesized)
catgtcattaaaactgtgtcaactattattaattttatggtactccattgttatggatgtgccatgtttcatataacctttacttattttgaacagtttagattatatctcataatgcca

SEQ ID NO: 72685 - DNA, 120 bp, Artificial Sequence
  ENSG00000078043_52 (sequence is synthesized)
caatgaatgtctttgtgtataaattattttcttaggataaaatactggaggtggaatttctagtcaagggtatatgaacacttttgtagttcttgattcataccacttttccacatgggt

SEQ ID NO: 72686 - DNA, 120 bp, Artificial Sequence
  ENSG00000078043_53 (sequence is synthesized)
atgttaatttatactgcagctagatggtatgggaagggtggtctagccatattttccaagaacatgcaacgttttatctttatgcaggcatctgcactaagaccctctgcctttctgact

SEQ ID NO: 72687 - DNA, 120 bp, Artificial Sequence
  ENSG00000078043_54 (sequence is synthesized)
gactctatggaacggggttaactgatatggagatcattggcagagattttcccaagctttcttagttttaaatatatctgacatgggccgggtatggaggctcacgcctgtaatcccagc

SEQ ID NO: 72688 - DNA, 82 bp, Artificial Sequence
  ENSG00000078043_55 (sequence is synthesized)
gcagataataacatggtgaaaccccatctctagcaaaaacataaattaggtgggtgtgatggcaggcgcctgtagtcccagc

SEQ ID NO: 72689 - DNA, 120 bp, Artificial Sequence
  ENSG00000078043_56 (sequence is synthesized)
tatatatatatatatatatataaaatctgacatgtttcagaaacacctacgtatggctatccaagcttttcccatgattttactggcactgtaaagttgcacaaatattctttgtcagac

SEQ ID NO: 72690 - DNA, 120 bp, Artificial Sequence
  ENSG00000078043_57 (sequence is synthesized)
tactggcactgtaaagttgcacaaatattctttgtcagactacgttttccatctttagttcaaaagttttgtcactttttaaaaaaagcctcttgtacctaaggcctgcccttaagaggt

SEQ ID NO: 72691 - DNA, 120 bp, Artificial Sequence
  ENSG00000078043_58 (sequence is synthesized)
cagctctctttttcctcttcctgtaggccccattatggcctttctgagctccccaaagccagtagaatctactgagccaaaggcattccatccccaaactgaaaagtggtaaggctaaaa

SEQ ID NO: 72692 - DNA, 120 bp, Artificial Sequence
  ENSG00000078043_59 (sequence is synthesized)
gctataaaaacaggcaaacattgcctgttttcactttatattcccttatgtttccaataagggtagctgcagggaaagaaaaaaacagattgctaccttcagatgtttgaggtacaacat

SEQ ID NO: 72693 - DNA, 120 bp, Artificial Sequence
  ENSG00000078043_60 (sequence is synthesized)
tttcttgattggcgtagcacaatcatttcccaaactgcttcctatttctgaatggcttttttaaaaagctttattttgtgttctcaaagcttaattattttaagtgacgaagagtgttac

SEQ ID NO: 72694 - DNA, 120 bp, Artificial Sequence
  ENSG00000078043_61 (sequence is synthesized)
cgtgttgtagaatagcatatgcctcttattttggccttcatcaaactgtttaataaatgtttagagtgttttgtaagtacacgtggaatagagtgttacagaagttttggttccagacat

SEQ ID NO: 72695 - DNA, 79 bp, Artificial Sequence
  ENSG00000078043_62 (sequence is synthesized)
acgtggaatagagtgttacagaagttttggttccagacatcaggcagcttataatcaaggttccaaaaatcaagaattc

SEQ ID NO: 72696 - DNA, 120 bp, Artificial Sequence
  ENSG00000078043_63 (sequence is synthesized)
aaagaattttccaagaatgtctcattcttgcaatggcttctcagaggaaagtggtgttattccccattttacaaatgaaacaggtttaggtaagtttcccaaggtcacagtgaatgagta

SEQ ID NO: 72697 - DNA, 120 bp, Artificial Sequence
  ENSG00000078043_64 (sequence is synthesized)
gtggacttgggagtctgacctagacttaccccaaaagctctctgcgtaaactgaagtgacgttaattagctgtgctatctaggagactgatatgggaatctagacttaaaattatgagaa

SEQ ID NO: 72698 - DNA, 120 bp, Artificial Sequence
  ENSG00000078043_65 (sequence is synthesized)
ctggtttcagatgatggccagagtaataaggaaggagtggatgctgaagccatttcaaaggaagactcaagattcagtgactgaatataggagtaagggttgagtgcatttttcatccat

SEQ ID NO: 72699 - DNA, 120 bp, Artificial Sequence
  ENSG00000078043_66 (sequence is synthesized)
ttttcaagcctgggtaacttggatgttaatggcactatctacagagacaggaggcagtttagagtgaagacgaatcatgtatgggagacagtgatgaatgttaagcatgggatttcagaa

SEQ ID NO: 72700 - DNA, 120 bp, Artificial Sequence
  ENSG00000078043_67 (sequence is synthesized)
atgaagcatccatgaggctcattcctggtttttctgcagtcttttaaataaaagtacaaacctcccttgtcatccatttttgccttcacttatctccattctgtattatgttctagtcac

SEQ ID NO: 72701 - DNA, 120 bp, Artificial Sequence
  ENSG00000078043_68 (sequence is synthesized)
gccccagtcactgatcccttcctaggccatacttggctacatcttagccttttcttttgatttttctcttcactgccttgcccattacaaatttggctgccacctgaggccctgccatac

SEQ ID NO: 72702 - DNA, 120 bp, Artificial Sequence
  ENSG00000078043_69 (sequence is synthesized)
cctacagctcacaccagcgtgggctgtgttcacattctacatatctcaagatacagtggttgctgtccttcccccctactgcatcgttacacgtctctaaaaaatctctgcctctgaagc

SEQ ID NO: 72703 - DNA, 120 bp, Artificial Sequence
  ENSG00000078043_70 (sequence is synthesized)
tcatgccaagaggttatactatcagctacctctagtcttataactgcctgatcattccctttgatttgctggaagctttgactcacagtgttccttgccttccttgattctggtcattat

SEQ ID NO: 72704 - DNA, 120 bp, Artificial Sequence
  ENSG00000078043_71 (sequence is synthesized)
tattaatatcttgaacattctatagatgatttatccaagttggtctgtgaggtattggttactttacctccagcattttcgtctactgaaccacgctttctgttttcctctttgctactt

SEQ ID NO: 72705 - DNA, 120 bp, Artificial Sequence
  ENSG00000078043_72 (sequence is synthesized)
gtccagactgttctttcattattgcagccttgaagaaatcctcagtaacctatccatcctccgacatgacgtagcatagttcctttgcccattctcatcagttataacaaatgttattgc

SEQ ID NO: 72706 - DNA, 120 bp, Artificial Sequence
  ENSG00000078043_73 (sequence is synthesized)
cctcttttcaggccacttccttctcagaagatgactttgctgcttaattcaaacagaagggacagtccgaaagcatgatttcttccccacctatgaccacctccatccttttttgtttcc

SEQ ID NO: 72707 - DNA, 120 bp, Artificial Sequence
  ENSG00000078043_74 (sequence is synthesized)
agtttcagagaatgaggtaggcctttaaggccaactgactctggtctcctcctgtcatcttcaggaccttcctctgtcagacttcccctctcttatctccatgtctctcacctctctact

SEQ ID NO: 72708 - DNA, 120 bp, Artificial Sequence
  ENSG00000078043_75 (sequence is synthesized)
gctgcttttcttggcttacaaatggtctcagtcatccagtatttgagattatattaggtgccaggcattgtatcaggcacttggaacacaaggcaggatcctgcccccaccaaagttgtg

SEQ ID NO: 72709 - DNA, 120 bp, Artificial Sequence
  ENSG00000078043_76 (sequence is synthesized)
ctccaatagcgtcaacagaggtgtgaaatagggagattacaatgttaatggtaaaagacaaagtatagggtgctacaagagcatgtaaatgaggcacctcaatgatttaatagaagtaat

SEQ ID NO: 72710 - DNA, 120 bp, Artificial Sequence
  ENSG00000078043_77 (sequence is synthesized)
gtggagaaatgtgaggattgatgaaaagcttgtccaaaaagggccagaaatgtttagaattgctggaagtttgctaaggaatattgagaaatatgcatagatagatcgtgaagggccttg

SEQ ID NO: 72711 - DNA, 120 bp, Artificial Sequence
  ENSG00000078043_78 (sequence is synthesized)
taaaacagtgatgagacattgaagagttttcatgatcattagtagtaatgagaatttgttgagtttggcatgattatctccatattacaaatgtggaaacagattctgacaggataagcg

SEQ ID NO: 72712 - DNA, 120 bp, Artificial Sequence
  ENSG00000078043_79 (sequence is synthesized)
acttacttgcccagggtcatgcagcttgtaattgaggagtcaggtttcaaatccagttttaactactttctcagaggcctttcttgatcattctatctaaaaagcaagtgttccctaact

SEQ ID NO: 72713 - DNA, 120 bp, Artificial Sequence
  ENSG00000078043_80 (sequence is synthesized)
attatcccagtaccctggtttatatactcttaatacataaaataatccctgcatattgtgtgtttcccctactagattgtaagctccatgagggcagaggtgataacttttttcacttgc

SEQ ID NO: 72714 - DNA, 120 bp, Artificial Sequence
  ENSG00000078043_81 (sequence is synthesized)
atcccagagcctaacatgatatgggctacatagaaggtgcccagtaaatattggtggatgaagaaatggtggataaccatttgcatttgacttatgctgactggaaattcaatacctttg

SEQ ID NO: 72715 - DNA, 120 bp, Artificial Sequence
  ENSG00000078043_82 (sequence is synthesized)
gaatatataatacctcagcagtaagcattcaccaagagaggaaaacagaaggaggtgcatgtttagggtaggtggtacgggagatggatgctgaggtgttgaaaggcagcatactcacct

SEQ ID NO: 72716 - DNA, 120 bp, Artificial Sequence
  ENSG00000078043_83 (sequence is synthesized)
tctgaactccaaaacttacaggggcaagggccattaatgaggggtgggtagagcagtgcacagtggggataatatgggagtaggtgtattaaacctggaagtgtaagcaactccttgtag

SEQ ID NO: 72717 - DNA, 120 bp, Artificial Sequence
  ENSG00000078043_84 (sequence is synthesized)
acccaccctactgtgtataaaaggctggagaaattcttcatatgatctactctaggttatgtactgaggaccaccttatctgggtcaggtacactacacagagtgctacaatataattgt

SEQ ID NO: 72718 - DNA, 120 bp, Artificial Sequence
  ENSG00000078043_85 (sequence is synthesized)
aaacataatttatcctcactgtgatggctagccacctgacccaaatcattattagactcaatactttggaactggaacaaaaatcagttgacctgatgtctgaaagacatgcccacctgc

SEQ ID NO: 72719 - DNA, 120 bp, Artificial Sequence
  ENSG00000078043_86 (sequence is synthesized)
tatttgacaagctatagacatatcctaccaattgatgggtagtagcactgaaactatgaaagtggatgaactcatccagaggagttgatgagtgagaaaagaagactggaaaaggaacac

SEQ ID NO: 72720 - DNA, 120 bp, Artificial Sequence
  ENSG00000078043_87 (sequence is synthesized)
aaggaaatcaagaagcagcagctgagactgaaggaaaataacgtggtattacagaggccaaaaaatagagtatttcaagaagcaagtggttagtggagttaaaagctgctgatacaacct

SEQ ID NO: 72721 - DNA, 120 bp, Artificial Sequence
  ENSG00000078043_88 (sequence is synthesized)
aaaaaagtaagtatccattttttaaaaaactttcatttaaaataccaccatattttattgaatctaagtacctgattgtaagacattaaagaaaaattaaacctgctaattaaactatga

SEQ ID NO: 72722 - DNA, 120 bp, Artificial Sequence
  ENSG00000078043_89 (sequence is synthesized)
tgccaggagaacaaagaagaaatgatattaataatgaactgaagcttggaacatcttctgatactgtgcaacagtgaatacaaaataaaacaaataatttgtatttatggagtggaaaac

SEQ ID NO: 72723 - DNA, 120 bp, Artificial Sequence
  ENSG00000078043_90 (sequence is synthesized)
agcttatttcaaggaaaaatatgactgccttattattgctagtgccatattgtcaggtgcgaatggtgctcaaaagttgtatcattaaaatttgaaagtgctaaacatttacatatttaa

SEQ ID NO: 72724 - DNA, 120 bp, Artificial Sequence
  ENSG00000078043_91 (sequence is synthesized)
tcatgtagcagttatgttttgttaaaagtttatgactcaaataaggaaaatgtgttgtcatcaatgagaaaaaatctaatgagtcaatttcacagtgaagcacttaaaatttttaaatta

SEQ ID NO: 72725 - DNA, 120 bp, Artificial Sequence
  ENSG00000078043_92 (sequence is synthesized)
tatcagtatgacacgctgcagttgaaacttatggtgaaataagaaacagcattttgctaaacttacgaaacaaggcagtaaaattttaatcactactgatgaaacttgattttatataag

SEQ ID NO: 72726 - DNA, 120 bp, Artificial Sequence
  ENSG00000078043_93 (sequence is synthesized)
agttttaatattctgcttaaaatgtaaaatgcaagaagactttgatggtttcgttttttgttagaaagaataacatctaaaataccatatcaaacttcactgttagtacttgagaaaaaa

SEQ ID NO: 72727 - DNA, 120 bp, Artificial Sequence
  ENSG00000078043_94 (sequence is synthesized)
atggtttcagtgagagaaatatttacattaaacaggttttatatagacagcacccttgtaatgcttggtaaacaatctagaattccaaccaatattttagaaaaatttctaggtatttta

SEQ ID NO: 72728 - DNA, 120 bp, Artificial Sequence
  ENSG00000078043_95 (sequence is synthesized)
ttatggtgttgtataagtcaccacattcaattttccgtggatgaggtatcaatatacagataagtaaatctcttaattgttttctaaataaactttatatttaccacacacatgaaatca

SEQ ID NO: 72729 - DNA, 120 bp, Artificial Sequence
  ENSG00000078043_96 (sequence is synthesized)
tcaaagagaattacagtacatctgaagaactggaattgaaataacaaaaataggatcctcagtgggtattctctggtgatagagcttcaatttttaatttcaattaaaataaataggctt

SEQ ID NO: 72730 - DNA, 120 bp, Artificial Sequence
  ENSG00000078043_97 (sequence is synthesized)
gatataattttcaaactgttttatatcaagcttgcgtattttaattgaaattctgaaattgaaatagttgaacatttagaaaatgagcatttttgagtggcttggcttcagtacacaata

SEQ ID NO: 72731 - DNA, 120 bp, Artificial Sequence
  ENSG00000078043_98 (sequence is synthesized)
ttccaacaccattgtcaatacttagcgttataaaaaggtttcagttactaacatgaactgagagatacagcaaatattaaagatgattgaacatatgaaactgaaaaactataaaaaggt

SEQ ID NO: 72732 - DNA, 120 bp, Artificial Sequence
  ENSG00000078043_99 (sequence is synthesized)
agaagctattgtaaaaatgaagaaaactgaaaaactgaaaagataagaagttactgtaaaaagaaaacggttataccatttgaagcagaacaaaatgttccaataaactttttttactta

SEQ ID NO: 72733 - DNA, 120 bp, Artificial Sequence
  ENSG00000078043_100 (sequence is synthesized)
ataatagaaatattgaaaatgcaaaactctgaaggtattacaagggctagacaaattttgaattgtttggcataagaagggagaggatttattgaatattattaatatgaagacaaaatc

SEQ ID NO: 72734 - DNA, 120 bp, Artificial Sequence
  ENSG00000078043_101 (sequence is synthesized)
tgcttattgagatatctcacctattatcattttaatagagaagtcattggaaaagtttgttgtaattctctttggtttagtattggctcaaaccactgtgtcatatagctagtgacagac

SEQ ID NO: 72735 - DNA, 70 bp, Artificial Sequence
  ENSG00000078043_102 (sequence is synthesized)
tattggctcaaaccactgtgtcatatagctagtgacagacatatgaaatgaaaaattacagcaagctggg

SEQ ID NO: 72736 - DNA, 120 bp, Artificial Sequence
  ENSG00000078043_103 (sequence is synthesized)
catagcgagaccctctctctacaaaaaaaaaataataataataattagctgggcatagtgacacacacctgtagctcctgcttcttgcgaagctgaggccagaaggtaaaggctacagtt

SEQ ID NO: 72737 - DNA, 120 bp, Artificial Sequence
  ENSG00000078043_104 (sequence is synthesized)
ctgcactccagcctgggcaacagagcagactcagtgtctcccaaaaaaaggaaaaaaaaaaaatctgtagcaacaattttcaaaaaggctttagaaatcgttggaatgatttctttcaaa

SEQ ID NO: 72738 - DNA, 120 bp, Artificial Sequence
  ENSG00000078043_105 (sequence is synthesized)
aatgatttctttcaaatgattggtgctatagcttgtatcacttgataagcatttttgtaatacccttatttggagattataagagaataaatatacttaaattttttgagttataaattc

SEQ ID NO: 72739 - DNA, 120 bp, Artificial Sequence
  ENSG00000078043_106 (sequence is synthesized)
atactggttagtagatattttaaatgtacccactgatattctctattttgcataaaagcataatgtcagactttctctgtgtggtggttatattcggggtgtctctgaatgccagcataa

SEQ ID NO: 72740 - DNA, 120 bp, Artificial Sequence
  ENSG00000078043_107 (sequence is synthesized)
aaattcacggaattgaatagaaattggcctgtcttaatgacctatggtttcttttttaatgttttgaaataattaaagagagtttagtcacacagggaggtctaggtgaactgatgttga

SEQ ID NO: 72741 - DNA, 120 bp, Artificial Sequence
  ENSG00000078043_108 (sequence is synthesized)
agtttattactagacttttcagacctaaaaattttatttattgttattacttgaatatgtcaaaagtatattactggacaaccttttacacattcctctttctaaaatcgaattggacaa

SEQ ID NO: 72742 - DNA, 120 bp, Artificial Sequence
  ENSG00000078043_109 (sequence is synthesized)
ttacagttctctggttcagaaaattacattagctcagaacccagtaacccttgataaccctgttagcgcagcaattcccgagtgtgtgctttgtgcagagcgttggactatgtactgctc

SEQ ID NO: 72743 - DNA, 120 bp, Artificial Sequence
  ENSG00000078043_110 (sequence is synthesized)
ttgatgtggggacagcggggacagagagctgtcattgaaatagacatctgtttaagaagcgatacttagatgaacctctgtatttctgaaaaataaatgtgaaatatcttaagagcttaa

SEQ ID NO: 72744 - DNA, 120 bp, Artificial Sequence
  ENSG00000078043_111 (sequence is synthesized)
aaatggcataactgtagaaggctattttaatttgcctttgttgagttgaaatattttcgagtaagcacattgtttataggaagcaaattttgatggagaaaatatttacatctttggaaa

SEQ ID NO: 72745 - DNA, 120 bp, Artificial Sequence
  ENSG00000078043_112 (sequence is synthesized)
aaagctctccgttttgggtagcaggacagtgaccccactgagggttgactttctgtgttttttcttaagctgttggcttcagctctttctgtttttggattgtaatctctaaaaagcagt

SEQ ID NO: 72746 - DNA, 120 bp, Artificial Sequence
  ENSG00000078043_113 (sequence is synthesized)
aattttcagtttagaggtggcagtgtggagattcttaaagttaaaaactttaactctgagctttcctgaatatcatctctttattttcctggaaaggaaatatgcatatttatatttctt

SEQ ID NO: 72747 - DNA, 120 bp, Artificial Sequence
  ENSG00000078043_114 (sequence is synthesized)
agaactctttgcagtcaaacctacccaacccatccaggagctgctacacattgaggaaggggcagaatgaatgctgggaagcaactacaaagaacactgcacaatatggtttctagtttt

SEQ ID NO: 72748 - DNA, 120 bp, Artificial Sequence
  ENSG00000078043_115 (sequence is synthesized)
agatgggtaagtatatcccttttaacagctgatatggactaatacaacagctgttggcaatgcctttgttcactacaacttactgaactaaattctaaataaattctactctagcataaa

SEQ ID NO: 72749 - DNA, 120 bp, Artificial Sequence
  ENSG00000078043_116 (sequence is synthesized)
cccctccccagtggctaacctcacctcattcttccaaaagcgacctactatcctaactttaacagattagtattgcctgtttttgaactttatataaatggaacctgtgtagtatatata

SEQ ID NO: 72750 - DNA, 120 bp, Artificial Sequence
  ENSG00000078043_117 (sequence is synthesized)
cctcccaacaggaaaatcatgtgtactcaagtcctgaagttggccctgcagaacccatgtataggaaaagttggccctctgtatatgtgggtttcacgtcctgcaaataccatatttttg

SEQ ID NO: 72751 - DNA, 120 bp, Artificial Sequence
  ENSG00000078043_118 (sequence is synthesized)
atctgcatttggttgaaaaaaaaatatgcgtataagtggacctgcacagttcaaaccagtcaactgtattctgtttctgtatatgtattctgttgtttctgcctttttttctgtttcgtt

SEQ ID NO: 72752 - DNA, 120 bp, Artificial Sequence
  ENSG00000078043_119 (sequence is synthesized)
aacctacccaacccatccaggagctgctacacattgaggaaggggcagaatgaatgctgggaagcaactacaaagaacactgcactggctgtaccattttacatccctaccagcaatgta

SEQ ID NO: 72753 - DNA, 120 bp, Artificial Sequence
  ENSG00000078043_120 (sequence is synthesized)
tggagtgatccagtttctcagcatcctcgccagcatttggtgttatcagtgtttttcattttagccattctgaatatggtttctagttttagggtttctgaactacaagtattactaggc

SEQ ID NO: 72754 - DNA, 120 bp, Artificial Sequence
  ENSG00000078043_121 (sequence is synthesized)
gtggtccgcacacctggcgcggggggtcggggcgccctccaggaggggcacatggggacccgacatcccggttcgcagtgagggccgatgtgggaagcaacgtttgatcttgcaccttca

SEQ ID NO: 72755 - DNA, 120 bp, Artificial Sequence
  ENSG00000078043_122 (sequence is synthesized)
ccggggtgtacgtgtctgtggctattcacaagtctgcatgctactcacttggtggaggactgttttctgaaagctgaagttgcgtttaggaatctctcctcttcttatggctgatgctac

SEQ ID NO: 72756 - DNA, 120 bp, Artificial Sequence
  ENSG00000078043_123 (sequence is synthesized)
ggtggcggcagcgtcgttggcggcagcgggagtgggtgcggcggcagcggcggcggcgcccgcgggtggtataaaatggcggatttcgaagagttgaggagtggctgtaccattttacat

SEQ ID NO: 72757 - DNA, 120 bp, Artificial Sequence
  ENSG00000078043_124 (sequence is synthesized)
tagagccagttgcattaacatcctttgccaaataatgttatcactggaaatatgagatatgagacctcctagaaattcctctgagagtcaagcttagaatatggtttctagttttagggt

SEQ ID NO: 72758 - DNA, 120 bp, Artificial Sequence
  ENSG00000078043_125 (sequence is synthesized)
tgattgaccattccatggaagttattttgaatgttatttttagaaaccagagtttcttaaataagtatttcatgtaaacaaagagaatattatctctcatctttaatgcaggtttttttt

SEQ ID NO: 72759 - DNA, 120 bp, Artificial Sequence
  ENSG00000078043_126 (sequence is synthesized)
tgatatattatgaagaatgctgaacttttgtcttttcccattaaggaatcttcatgattaagtcacaattctttgtattatttgggcatgcaaagaatacaaagaagagggaagatagct

SEQ ID NO: 72760 - DNA, 120 bp, Artificial Sequence
  ENSG00000078043_127 (sequence is synthesized)
agtcaaacctacccaacccatccaggagctgctacacattgaggaaggggcagaatgaatgctgggaagcaactacaaagaacactgcacgatctccagtacaatgttgaatagaagctg

SEQ ID NO: 72761 - DNA, 120 bp, Artificial Sequence
  ENSG00000078043_128 (sequence is synthesized)
ctttttgttattttcttgaacctgtttgtaaggaaatttggcatctcagaccagatgagaaagtctggtgtaatggagtgtggaactgggaatctgacaagtatggattccaattttggc

SEQ ID NO: 72762 - DNA, 120 bp, Artificial Sequence
  ENSG00000078043_129 (sequence is synthesized)
acaccatcgcttacttgttctgtgatcttagatgaaatacttaatttgattgagcctcttttttgtgttctgttaaatggagctaaataacgcctatattacaggatcattttcaggttt

SEQ ID NO: 72763 - DNA, 120 bp, Artificial Sequence
  ENSG00000078043_130 (sequence is synthesized)
taatgagatgaaagaaagcctcggtgtcaggcatgtggtaatttcccaataaaaattgattcctttcccttttcaccctctccagggcaaaatataggtgggtaggatggcattctacct

SEQ ID NO: 72764 - DNA, 120 bp, Artificial Sequence
  ENSG00000078043_131 (sequence is synthesized)
gaattttagcgtggattctctgtaagttatctggcagaaggcattactgacctgcattaaaaatcaggtttgggtatttaacaatagttgctttttcagagaggttttgaaccataaaag

SEQ ID NO: 72765 - DNA, 120 bp, Artificial Sequence
  ENSG00000078043_132 (sequence is synthesized)
gagataacaggagagttctcctggctgtctacgaacacattctttcaaacttgggtttgctagtgtcatctttttggcctcttggtccacttggttttctaatggctttactgagttata

SEQ ID NO: 72766 - DNA, 120 bp, Artificial Sequence
  ENSG00000078043_133 (sequence is synthesized)
atttacatagcataaaatgtacccatcttaagtatataatggcacaattcagtgattttagtaaatacatagagctgtgcaatcatcaccatgattcagtagtagaatattttcaacacc

SEQ ID NO: 72767 - DNA, 120 bp, Artificial Sequence
  ENSG00000078043_134 (sequence is synthesized)
caaaaaactttcttcatgttcttttgtagtttattcctatttacaccccaaatctaggcaatcgtttttttgtgtctataatgcctgtttagacattttatataaaatgtcttgttttgc

SEQ ID NO: 72768 - DNA, 120 bp, Artificial Sequence
  ENSG00000078043_135 (sequence is synthesized)
aacattgtttatttttataattttaagaattaaaccttttcagctgccttctttgctgttaaaatacttacatttccaaatataatttacacatatattaaaggcatatatttacttcta

SEQ ID NO: 72769 - DNA, 120 bp, Artificial Sequence
  ENSG00000078043_136 (sequence is synthesized)
ataaaatggcggatttcgaagagttgagggatctccagtacaatgttgaatagaagctgtgatgggggcatcctgatcttgttcctgattttaaagggaatgctttcaaagtttcacagt

SEQ ID NO: 72770 - DNA, 120 bp, Artificial Sequence
  ENSG00000078043_137 (sequence is synthesized)
taagtatgatgcttgctgtaggtttattatagataatcttttcaggttaaggatgttccctttcttagtttgctaatttaaaaaatcatgaatgaattttatcagaagctttttctgcat

SEQ ID NO: 72771 - DNA, 120 bp, Artificial Sequence
  ENSG00000078043_138 (sequence is synthesized)
cctgatctatctgttcctttttttcactggactcagtttggagatatttaatttaggatttttgtctctcataatgagtaaaactagcctatagttaaaaaatataccttttctcttctg

SEQ ID NO: 72772 - DNA, 120 bp, Artificial Sequence
  ENSG00000078043_139 (sequence is synthesized)
gaagagtttatgtaacattagaaaggtctgtttcttaaatatttagtagaacttgcttataaaattattactattgttttctttgaggaatgcttcaattgctttggttgtaggactgtt

SEQ ID NO: 72773 - DNA, 120 bp, Artificial Sequence
  ENSG00000078043_140 (sequence is synthesized)
gaccttcaggtgcccttcaaggtcagaaaaactcggcaaggatctccagtacaatgttgaatagaagctgtgatgggggcatcctgatcttgttcctgattttaaagggaatgctttcaa

SEQ ID NO: 72774 - DNA, 120 bp, Artificial Sequence
  ENSG00000078043_141 (sequence is synthesized)
agtttcacaagttaacatcttaaagaccatagtacagtatcacaaccaggatattgacatgaacacaatcaagatatagaccattttatcaccacaaggatccctctctccaaatggctg

SEQ ID NO: 72775 - DNA, 120 bp, Artificial Sequence
  ENSG00000078053_0 (sequence is synthesized)
gcagctccccggacccgcagccatggccgacatcaagacgggcatcttcgccaagaacgtccagaagcgactcaaccgcgcgcaggaaaaggtcctccaaaagctggggaaagctgatga

SEQ ID NO: 72776 - DNA, 120 bp, Artificial Sequence
  ENSG00000078053_1 (sequence is synthesized)
gacaaaagacgaacagttcgaagaatatgtccagaacttcaaacggcaagaagcagagggtaccagacttcagcgagaactccgaggatatttagcagcaatcaaaggcatgcaggaggc

SEQ ID NO: 72777 - DNA, 120 bp, Artificial Sequence
  ENSG00000078053_2 (sequence is synthesized)
ctccatgaagctcacagagtcgctgcatgaagtctatgagcctgactggtatgggcgggaagatgtgaaaatggttggtgagaaatgtgatgtgctgtgggaagacttccatcaaaaact

SEQ ID NO: 72778 - DNA, 120 bp, Artificial Sequence
  ENSG00000078053_3 (sequence is synthesized)
cgtggatgggtccttgctaacactggatacctacctggggcaatttcctgacataaagaatcgcatcgccaagcgcagcaggaagctagtggactatgacagtgcccgccaccatctgga

SEQ ID NO: 72779 - DNA, 120 bp, Artificial Sequence
  ENSG00000078053_4 (sequence is synthesized)
agctctgcagagctccaagaggaaggatgagagtcgaatctctaaggcagaagaagaatttcagaaagcacagaaagtgtttgaagagtttaacgttgacttacaagaagagttaccatc

SEQ ID NO: 72780 - DNA, 120 bp, Artificial Sequence
  ENSG00000078053_5 (sequence is synthesized)
attatggtcaagacgagttggattttatgttaatactttcaaaaacgtctccagccttgaagccaagtttcataaggaaattgcggtgctttgccacaaactgtatgaagtgatgacaaa

SEQ ID NO: 72781 - DNA, 120 bp, Artificial Sequence
  ENSG00000078053_6 (sequence is synthesized)
actgggtgaccagcacgccgacaaggccttcaccatccaaggagcgcccagtgattcgggtcctctccgcattgcaaagacaccatcaccgcctgaggagccttcacccctcccgagccc

SEQ ID NO: 72782 - DNA, 120 bp, Artificial Sequence
  ENSG00000078053_7 (sequence is synthesized)
gacagcaagtccaaatcatacattagcacctgcgtctcccgcaccagcacggcctcggtcaccttcacagacaaggaaagggcctcctgtcccacctctacctaaagtcaccccgacaaa

SEQ ID NO: 72783 - DNA, 120 bp, Artificial Sequence
  ENSG00000078053_8 (sequence is synthesized)
ggaactgcagcaggagaacatcatcagtttctttgaggacaactttgttccagaaatcagtgtgacaacaccttcccagaatgaagtccctgaggtgaagaaagaggagactttgctgga

SEQ ID NO: 72784 - DNA, 120 bp, Artificial Sequence
  ENSG00000078053_9 (sequence is synthesized)
tctggactttgatcctttcaagcccgaggtgacacctgcaggttctgctggagtgacccactcacccatgtctcagacattgccctgggacctatggacgacaagcactgatttggtaca

SEQ ID NO: 72785 - DNA, 120 bp, Artificial Sequence
  ENSG00000078053_10 (sequence is synthesized)
gccggcttctggtggttcatttaatggattcacacagccccaggatacttcattattcacaatgcagacagaccagagtatgatctgcaacttggctgaatctgaacaggctccacccac

SEQ ID NO: 72786 - DNA, 120 bp, Artificial Sequence
  ENSG00000078053_11 (sequence is synthesized)
agagccaaaagcagaggagcctctggctgctgtcacacctgccgttggtctggaccttggaatggacactcgggctgaggagccagtggaggaggcagtgatcatacctggagctgatgc

SEQ ID NO: 72787 - DNA, 120 bp, Artificial Sequence
  ENSG00000078053_12 (sequence is synthesized)
tgatgcagctgttggaaccttggtgtcagcagctgagggggccccaggagaggaagcagaggcggagaaggccactgtccctgccggggaaggagtaagtttagaggaggccaaaattgg

SEQ ID NO: 72788 - DNA, 120 bp, Artificial Sequence
  ENSG00000078053_13 (sequence is synthesized)
cctccaaccatgaagaggaaggagaaaacgaaataactataggtgcagagcccaaggagaccaccgaggacgcggctcctccgggccccaccagcgagacaccggagctggctacggagc

SEQ ID NO: 72789 - DNA, 120 bp, Artificial Sequence
  ENSG00000078053_14 (sequence is synthesized)
agaagcctatccaggaccctcagcccacgccttctgcaccagccatgggggctgctgaccagctagcatctgcaagggaggcctctcaggaattgcctcctggctttctctacaaggtgg

SEQ ID NO: 72790 - DNA, 120 bp, Artificial Sequence
  ENSG00000078053_15 (sequence is synthesized)
aaacactgcatgattttgaggcagcaaattctgatgaacttaccttacaaaggggtgatgtggtgctggtggtcccctcagattcagaagctgatcaggatgcaggctggctggtgggag

SEQ ID NO: 72791 - DNA, 120 bp, Artificial Sequence
  ENSG00000078053_16 (sequence is synthesized)
tgaaggaatcagactggcttcagtacagagaccttgccacctacaaaggcctctttccagagaacttcacccgacgcttagattagggcaacaagtactgcaagaaggagctcagttacg

SEQ ID NO: 72792 - DNA, 120 bp, Artificial Sequence
  ENSG00000078053_17 (sequence is synthesized)
gggtttttaaaccttcatgaaaacctgaagagttcacttttgttattatgctcttaatgatttacagactgatgccagacaaaccttgggaagatgtatcaatggagcatgtgtgcaaaa

SEQ ID NO: 72793 - DNA, 120 bp, Artificial Sequence
  ENSG00000078053_18 (sequence is synthesized)
aaatgtaagaggaaaaaaagtaaattaaggaaaaaatcctcactcattcccatgttgtcaataacaggtttgtttgtgctttgtccaagctgtggagactcttgtacttgatcccctccc

SEQ ID NO: 72794 - DNA, 120 bp, Artificial Sequence
  ENSG00000078053_19 (sequence is synthesized)
accaattctaaagtagctttctccagatcagactttaatttctctgcatcaggtgtatcgtattgagtggctgccctgcagaagatgtgatgaattatcctgtagtacaagattatctta

SEQ ID NO: 72795 - DNA, 120 bp, Artificial Sequence
  ENSG00000078053_20 (sequence is synthesized)
ttcccctgcccaggtgtgagcacgtgctctcgctccctttcaggtttactatgtttaaaactaaactgctgcaaaagttctcaatgttcttttccaacacatctatatatatatggacac

SEQ ID NO: 72796 - DNA, 120 bp, Artificial Sequence
  ENSG00000078053_21 (sequence is synthesized)
acagtcacgcaagctagttcccatgactcctggatctatgtgtatgcagaaggctacatatacatagttgcttctttcctttccattgtagctctttgcctctcaattgtcattgataca

SEQ ID NO: 72797 - DNA, 120 bp, Artificial Sequence
  ENSG00000078053_22 (sequence is synthesized)
tgcattgctcttattctgtctggcattacaattgcagttttgcctaatggcaaaaccagccatcccattggcaaaagagtcaacagtatctgtgtttgtactgtgcagttttcaggatga

SEQ ID NO: 72798 - DNA, 120 bp, Artificial Sequence
  ENSG00000078053_23 (sequence is synthesized)
gatgacagatagcacgactacactgaggcaccctcagagaaggcagggcctgatttatctagctgtccagccgctgtggctggaggtaggctagttgggatgggcagctaagcagtcttc

SEQ ID NO: 72799 - DNA, 120 bp, Artificial Sequence
  ENSG00000078053_24 (sequence is synthesized)
tcttctgcctttatgagattgggtagaaagatggggcatattcatctacccccaaaagaacactataaaaacagctcctctatatttccacctctttctatttatgcaactcatcttcac

SEQ ID NO: 72800 - DNA, 120 bp, Artificial Sequence
  ENSG00000078053_25 (sequence is synthesized)
agattgttctaaagtaaaatagatggtgtatgctgtatccacaaatcatctgtaacaattatgttttcagtgctgtgtcattccaaataaacctttggtaatcttcaacgattaccctaa

SEQ ID NO: 72801 - DNA, 120 bp, Artificial Sequence
  ENSG00000078053_26 (sequence is synthesized)
caggtggaaatgaacaactgcccccaaagcctgcgccggaggctggagttgccattgctgcttgtgtggagatggagcagctgtatgacccacttgactcagacatgccagccatggaca

SEQ ID NO: 72802 - DNA, 120 bp, Artificial Sequence
  ENSG00000078053_27 (sequence is synthesized)
cagctggcctgttcaaagaaagtcatgaagatatgaagaagtcagatgaagaggaagagaaacagaagatggaagattctctgtgggcaggtgtggaggcgtgtcaaaaggtagacactg

SEQ ID NO: 72803 - DNA, 120 bp, Artificial Sequence
  ENSG00000078053_28 (sequence is synthesized)
gagctattgatatcaagacactagaaggtacagaggaatttgaagagaaagcatgtgaaaggacaggaaacagagtggtagaacttcttaataccataggaaaggaagaccataagacct

SEQ ID NO: 72804 - DNA, 120 bp, Artificial Sequence
  ENSG00000078053_29 (sequence is synthesized)
taaaaattaatgaagtggaaactagaaaagatctaagagcagggtataaggaaagtacaaacgccaatgaaaattattttgagaaaactgacctattagaaaaggacatggaaggaggag

SEQ ID NO: 72805 - DNA, 120 bp, Artificial Sequence
  ENSG00000078053_30 (sequence is synthesized)
atatggcaaaagaacttagtgacagagaccaaggtctacatgatggaattcaaaaggtaatcaataattgtggaatgatagaaggctttggagccaaacctgccaatcacccagatatct

SEQ ID NO: 72806 - DNA, 120 bp, Artificial Sequence
  ENSG00000078053_31 (sequence is synthesized)
tgaatccatctctccagacctactctgtatctaatattgaagatggcagccctgagggatgggatttgactagaaaagacataaagaaaaatgcaatagacactcccaaccatgatatga

SEQ ID NO: 72807 - DNA, 120 bp, Artificial Sequence
  ENSG00000078053_32 (sequence is synthesized)
tattttacccagcacaagacagtacagatgctgaagaaattcagtgtgagactgtgttaaatgctcttgtaggtgacagggataaaaatcaggctgttttatcaataaaacttgaagtag

SEQ ID NO: 72808 - DNA, 120 bp, Artificial Sequence
  ENSG00000078053_33 (sequence is synthesized)
tctgaaagaacagtaactgagaaccgtagtcatactgttaacttgccaagaattgcagagatagactcttggggaacagatccaggtcaaatctggcagccaagcttggattcagcaatg

SEQ ID NO: 72809 - DNA, 120 bp, Artificial Sequence
  ENSG00000078053_34 (sequence is synthesized)
aataatttggatataacaggattctctggtataccagatggccaagcaagtggatttgccagttgtctggattctattaaccactggcctatcagagatacagaaggcttagataatagc

SEQ ID NO: 72810 - DNA, 120 bp, Artificial Sequence
  ENSG00000078053_35 (sequence is synthesized)
tggacacattcagatgtagttgagcacaaggaagaactgaaggtggacttactagcaggtgattgtagggaacaagccattgctagctgctgggaacaaagccaggagatagcaagacca

SEQ ID NO: 72811 - DNA, 120 bp, Artificial Sequence
  ENSG00000078053_36 (sequence is synthesized)
ttgattttggggacctcctggaatgctagcactgagagttctgctagttcccgagaccaggacatcaacaactcagatttatctgaagatgaaattgctaaccagagatatggattgttg

SEQ ID NO: 72812 - DNA, 120 bp, Artificial Sequence
  ENSG00000078053_37 (sequence is synthesized)
aactccagacagtgggttggccgaagaaattcaaagatctcaaaatgatataggtgcatttacttggggccctgacgctagtacagacagggtcagccaagaagttacctcaggtgggtt

SEQ ID NO: 72813 - DNA, 120 bp, Artificial Sequence
  ENSG00000078053_38 (sequence is synthesized)
tggagaagactctgcatgtccctccgaaacagagcaagacataagattatccaccagcctgctttcgtctgctgactggcccactgtagctgaagagagtgagcatgccccggggccagc

SEQ ID NO: 72814 - DNA, 120 bp, Artificial Sequence
  ENSG00000078053_39 (sequence is synthesized)
atgatctgcaacttggaaatcacagtgaactgatgtctcccagtgagtcgtgattgtacacgatcttcccaggagcaagaaaacgccccagtgtttggctcattgactattctgagcgag

SEQ ID NO: 72815 - DNA, 120 bp, Artificial Sequence
  ENSG00000078053_40 (sequence is synthesized)
tttctatggtggtcttaaacaattttggaacaaaaatcattcctatcacaaaacaagttgtaaaatttgttcctaaaccagtaaaagctatagccttcagcagaatgttgactctagaca

SEQ ID NO: 72816 - DNA, 120 bp, Artificial Sequence
  ENSG00000078061_0 (sequence is synthesized)
aagagaggcccaagatggagacggcggcggctgtagcggcgtgacaggagccccatggcacctgcccagccccacctcagcccatcttgacaaaatctaaggctccatggagccaccacg

SEQ ID NO: 72817 - DNA, 120 bp, Artificial Sequence
  ENSG00000078061_1 (sequence is synthesized)
gggcccccctgccaatggggccgagccatcccgggcagtgggcaccgtcaaagtatacctgcccaacaagcaacgcacggtggtgactgtccgggatggcatgagtgtctacgactctct

SEQ ID NO: 72818 - DNA, 120 bp, Artificial Sequence
  ENSG00000078061_2 (sequence is synthesized)
agacaaggccctgaaggtgcggggtctaaatcaggactgctgtgtggtctaccgactcatcaagggacgaaagacggtcactgcctgggacacagccattgctcccctggatggcgagga

SEQ ID NO: 72819 - DNA, 120 bp, Artificial Sequence
  ENSG00000078061_3 (sequence is synthesized)
gctcattgtcgaggtccttgaagatgtcccgctgaccatgcacaattttgtacggaagaccttcttcagcctggcgttctgtgacttctgccttaagtttctgttccatggcttccgttg

SEQ ID NO: 72820 - DNA, 120 bp, Artificial Sequence
  ENSG00000078061_4 (sequence is synthesized)
ccaaacctgtggctacaagttccaccagcattgttcctccaaggtccccacagtctgtgttgacatgagtaccaaccgccaacagttctaccacagtgtccaggatttgtccggaggctc

SEQ ID NO: 72821 - DNA, 120 bp, Artificial Sequence
  ENSG00000078061_5 (sequence is synthesized)
cagacagcatgaggctccctcgaaccgccccctgaatgagttgctaaccccccagggtcccagcccccgcacccagcactgtgacccggagcacttccccttccctgccccagccaatgc

SEQ ID NO: 72822 - DNA, 120 bp, Artificial Sequence
  ENSG00000078061_6 (sequence is synthesized)
ccccctacagcgcatccgctccacgtccactcccaacgtccatatggtcagcaccacggcccccatggactccaacctcatccagctcactggccagagtttcagcactgatgctgccgg

SEQ ID NO: 72823 - DNA, 120 bp, Artificial Sequence
  ENSG00000078061_7 (sequence is synthesized)
tagtagaggaggtagtgatggaaccccccgggggagccccagcccagccagcgtgtcctcggggaggaagtccccacattccaagtcaccagcagagcagcgcgagcggaagtccttggc

SEQ ID NO: 72824 - DNA, 120 bp, Artificial Sequence
  ENSG00000078061_8 (sequence is synthesized)
cgatgacaagaagaaagtgaagaacctggggtaccgggactcaggctattactgggaggtaccacccagtgaggtgcagctgctgaagaggatcgggacgggctcgtttggcaccgtgtt

SEQ ID NO: 72825 - DNA, 120 bp, Artificial Sequence
  ENSG00000078061_9 (sequence is synthesized)
tcaggaagacgcgacatgtcaacatcttgctgtttatgggcttcatgacccggccgggatttgccatcatcacacagtggtgtgagggctccagcctctaccatcacctgcatgtggccg

SEQ ID NO: 72826 - DNA, 120 bp, Artificial Sequence
  ENSG00000078061_10 (sequence is synthesized)
acacacgcttcgacatggtccagctcatcgacgtggcccggcagactgcccagggcatggactacctccatgccaagaacatcatccaccgagatctcaagtctaacaacatcttcctac

SEQ ID NO: 72827 - DNA, 120 bp, Artificial Sequence
  ENSG00000078061_11 (sequence is synthesized)
atgaggggctcacggtgaagatcggtgactttggcttggccacagtgaagactcgatggagcggggcccagcccttggagcagccctcaggatctgtgctgtggatggcagctgaggtga

SEQ ID NO: 72828 - DNA, 120 bp, Artificial Sequence
  ENSG00000078061_12 (sequence is synthesized)
tccgtatgcaggacccgaacccctacagcttccagtcagacgtctatgcctacggggttgtgctctacgagcttatgactggctcactgccttacagccacattggctgccgtgaccaga

SEQ ID NO: 72829 - DNA, 120 bp, Artificial Sequence
  ENSG00000078061_13 (sequence is synthesized)
ttatctttatggtgggccgtggctatctgtccccggacctcagcaaaatctccagcaactgccccaaggccatgcggcgcctgctgtctgactgcctcaagttccagcgggaggagcggc

SEQ ID NO: 72830 - DNA, 120 bp, Artificial Sequence
  ENSG00000078061_14 (sequence is synthesized)
ccctcttcccccagatcctggccacaattgagctgctgcaacggtcactccccaagattgagcggagtgcctcggaaccctccttgcaccgcacccaggccgatgagttgcctgcctgcc

SEQ ID NO: 72831 - DNA, 120 bp, Artificial Sequence
  ENSG00000078061_15 (sequence is synthesized)
tactcagcgcagcccgccttgtgccttaggccccgcccaagccaccagggagccaatctcagccctccacgccaaggagccttgcccaccagccaatcaatgttcgtctctgccctgatg

SEQ ID NO: 72832 - DNA, 120 bp, Artificial Sequence
  ENSG00000078061_16 (sequence is synthesized)
ctgcctcaggatcccccattccccaccctgggagatgagggggtccccatgtgcttttccagttcttctggaattgggggacccccgccaaagactgagccccctgtctcctccatcatt

SEQ ID NO: 72833 - DNA, 120 bp, Artificial Sequence
  ENSG00000078061_17 (sequence is synthesized)
tggtttcctcttggctttggggatacttctaaattttgggagctcctccatctccaatggctgggatttgtggcagggattccactcagaacctctctggaatttgtgcctgatgtgcct

SEQ ID NO: 72834 - DNA, 120 bp, Artificial Sequence
  ENSG00000078061_18 (sequence is synthesized)
tccactggattttggggttcccagcaccccatgtggattttggggggtcccttttgtgtctcccccgccattcaaggactcctctctttcttcaccaagaagcacagaattctgctgggc

SEQ ID NO: 72835 - DNA, 120 bp, Artificial Sequence
  ENSG00000078061_19 (sequence is synthesized)
cctaaaattttctaggataaggactcccagaatcccttgggctccagacacttacaataaattctctgggtctcccctaccccaacttccctcttctcacatccacagccctctgggaca

SEQ ID NO: 72836 - DNA, 120 bp, Artificial Sequence
  ENSG00000078061_20 (sequence is synthesized)
gctgggggagaaaaagatcttggggctcttgtagaccacgagccatactttattcatttgtttacttgacaaacatttattgagcacctacaagtgtgagtaagggcatgaaactgggac

SEQ ID NO: 72837 - DNA, 120 bp, Artificial Sequence
  ENSG00000078061_21 (sequence is synthesized)
cttgggcaagtcacctcatttctctgggcctcagttttctcatctgtaaagaggggatgatgatactttctaccatataaaggttctggtgaggcttaaatgagttaagacatgttcagt

SEQ ID NO: 72838 - DNA, 120 bp, Artificial Sequence
  ENSG00000078061_22 (sequence is synthesized)
gcctagaacaggatctggtacagtgtaaataatcaatttttttgttattaattataaatatatttataagcatctaactactttgctaattctagtataatcatactcaagcctttccat

SEQ ID NO: 72839 - DNA, 120 bp, Artificial Sequence
  ENSG00000078061_23 (sequence is synthesized)
ctttgctaattctagtataatcatactcaagcctttccattttgaaatacgtattattttatcataaattacttcccttttattgcttttttatgttaaatattatataaaactatagct

SEQ ID NO: 72840 - DNA, 120 bp, Artificial Sequence
  ENSG00000078061_24 (sequence is synthesized)
gttgacatgagtaccaaccgccaacagtgagcccagcctggggtgggtggggggatggggagcacagaggcccagccacgaggcccttacagacagctgacccgtgtccccttgctttat

SEQ ID NO: 72841 - DNA, 120 bp, Artificial Sequence
  ENSG00000078070_0 (sequence is synthesized)
gtgggacgcagctgcctctgtactggggagtcacggagtggccgggctccagggacatggcggcggcctctgcggtgtcggtgctgctggtggcggcggagaggaaccggtggcatcgtc

SEQ ID NO: 72842 - DNA, 120 bp, Artificial Sequence
  ENSG00000078070_1 (sequence is synthesized)
tcccgagcctgctcctgccgccgaggacatgggtgtggaggcaaagaaccatgaagtacacaacagccacaggaagaaacattaccaaggtcctcattgcaaacagaggagaaattgcct

SEQ ID NO: 72843 - DNA, 120 bp, Artificial Sequence
  ENSG00000078070_2 (sequence is synthesized)
gcagggtgatgcgcacagccaaaaaactgggtgtacagactgtggcggtttatagtgaggctgacagaaattccatgcatgtagatatggcagatgaagcatattccatcggccccgctc

SEQ ID NO: 72844 - DNA, 120 bp, Artificial Sequence
  ENSG00000078070_3 (sequence is synthesized)
cctcccagcagagctacctatctatggagaaaatcattcaagtggccaagacctctgctgcacaggctatccatccaggatgcggttttctctcagaaaacatggaatttgctgaacttt

SEQ ID NO: 72845 - DNA, 120 bp, Artificial Sequence
  ENSG00000078070_4 (sequence is synthesized)
gtaagcaagaaggaattatttttataggccctcctccatctgcaattagagacatgggtataaagagcacatccaaatccataatggctgctgctggagtacctgttgtggagggttatc

SEQ ID NO: 72846 - DNA, 120 bp, Artificial Sequence
  ENSG00000078070_5 (sequence is synthesized)
atggtgaggaccaatcagaccagtgcctgaaggaacacgccaggagaattggctatcctgtcatgattaaagccgtccggggtggaggaggaaaaggaatgaggattgttagatcagaac

SEQ ID NO: 72847 - DNA, 120 bp, Artificial Sequence
  ENSG00000078070_6 (sequence is synthesized)
aagaatttcaagaacagttagagtcagcacggagagaagctaagaagtctttcaatgatgatgctatgctgatcgagaagtttgtagacacaccgaggcatgtagaagtccaggtgtttg

SEQ ID NO: 72848 - DNA, 120 bp, Artificial Sequence
  ENSG00000078070_7 (sequence is synthesized)
gtgatcaccatggcaatgctgtgtacttgtttgaaagagactgtagtgtgcagaggcgacatcagaagatcattgaggaggccccagcgcctggtattaaatctgaagtaagaaaaaagc

SEQ ID NO: 72849 - DNA, 120 bp, Artificial Sequence
  ENSG00000078070_8 (sequence is synthesized)
tgggagaagctgcagtcagagctgctaaagctgtaaattatgttggagcagggactgtggagtttattatggactcaaaacataatttctgtttcatggagatgaatacaaggctgcaag

SEQ ID NO: 72850 - DNA, 120 bp, Artificial Sequence
  ENSG00000078070_9 (sequence is synthesized)
tggaacatcctgttactgagatgatcacaggaactgacttggtggagtggcagcttagaattgcagcaggagagaagattcctttgagccaggaagaaataactctgcagggccatgcct

SEQ ID NO: 72851 - DNA, 120 bp, Artificial Sequence
  ENSG00000078070_10 (sequence is synthesized)
gcccattagtgcacctctctactcctcgagcagacccttccaccaggattgaaactggagtacggcaaggagacgaagtttccgtgcattatgaccccatgattgcgaagctggtcgtgt

SEQ ID NO: 72852 - DNA, 120 bp, Artificial Sequence
  ENSG00000078070_11 (sequence is synthesized)
gggcagcagatcgccaggcggcattgacaaaactgaggtacagccttcgtcagtacaatattgttggactgcacaccaacattgacttcttactcaacctgtctggccacccagagtttg

SEQ ID NO: 72853 - DNA, 120 bp, Artificial Sequence
  ENSG00000078070_12 (sequence is synthesized)
aagctgggaacgtgcacactgatttcatccctcaacaccacaaacagttgttgctcagtcggaaggctgcagccaaagagtctttatgccaggcagccctgggtctcatcctcaaggaga

SEQ ID NO: 72854 - DNA, 120 bp, Artificial Sequence
  ENSG00000078070_13 (sequence is synthesized)
aagccatgaccgacactttcactcttcaggcacatgatcaattctctccattttcgtctagcagtggaagaagactgaatatctcgtataccagaaacatgactcttaaagatggtaaaa

SEQ ID NO: 72855 - DNA, 120 bp, Artificial Sequence
  ENSG00000078070_14 (sequence is synthesized)
acaatgtagccatagctgtaacgtataaccatgatgggtcttatagcatgcagattgaagataaaactttccaagtccttggtaatctttacagcgagggagactgcacttacctgaaat

SEQ ID NO: 72856 - DNA, 120 bp, Artificial Sequence
  ENSG00000078070_15 (sequence is synthesized)
gttctgttaatggagttgctagtaaagcgaagctgattatcctggaaaacactatttacctattttccaaggaaggaagtattgagattgacattccagtccccaaatacttatcttctg

SEQ ID NO: 72857 - DNA, 120 bp, Artificial Sequence
  ENSG00000078070_16 (sequence is synthesized)
tgagctcacaagaaactcagggcggccccttagctcctatgactggaaccattgaaaaggtgtttgtcaaagctggagacaaagtgaaagcgggagattccctcatggttatgatcgcca

SEQ ID NO: 72858 - DNA, 120 bp, Artificial Sequence
  ENSG00000078070_17 (sequence is synthesized)
tgaagatggagcataccataaagtctccaaaggatggcacagtaaagaaagtgttctacagagaaggtgctcaggccaacagacacactcctttagtcgagtttgaggaggaagaatcag

SEQ ID NO: 72859 - DNA, 120 bp, Artificial Sequence
  ENSG00000078070_18 (sequence is synthesized)
acaaaagggaatcggaataaactccagcaaggaaatggccagttaagtagtgtcttctctctccaccaaaaagaggaagtgcctccagcttttctgggggtctcataaagagcagtttta

SEQ ID NO: 72860 - DNA, 120 bp, Artificial Sequence
  ENSG00000078070_19 (sequence is synthesized)
ctaaatgattgtatgcttatgctgaacacctttcatattggagaatcatgcatttgggtcactaattatctcaaaatatttcatactaataaagttgaattattttttattggaagccaa

SEQ ID NO: 72861 - DNA, 120 bp, Artificial Sequence
  ENSG00000078070_20 (sequence is synthesized)
ggtaggaaaaccccaggcactttcggaggggttctgccggcagtcacggcgtcgggaggaagacatccccaccagcccttccctttctccccgcttccgcacatccacgcttcagcgcgc

SEQ ID NO: 72862 - DNA, 120 bp, Artificial Sequence
  ENSG00000078070_21 (sequence is synthesized)
ctttggcttctgtttttccatttctgaggactgggcccgccatcctccaggctcccctcgccgtcgctgcagctcgtagccgtttacatcgggctttcgcagcaccccttaggtgggagc

SEQ ID NO: 72863 - DNA, 120 bp, Artificial Sequence
  ENSG00000078070_22 (sequence is synthesized)
gttgttataatccggttccggggaagcccaaagggatcaacgacttcctcaacgaaacacagctagtaagaaatggggccgggatgccctcaaagccatttttcagttcagctgtgcccc

SEQ ID NO: 72864 - DNA, 120 bp, Artificial Sequence
  ENSG00000078070_23 (sequence is synthesized)
atcaggtgtccagttcagagaaagactcctggagttccttctcattgttagaagagtgaagttgtcaagaagagcaaatgtaccttccacagagctgggaaattattttgtcaaaaactc

SEQ ID NO: 72865 - DNA, 120 bp, Artificial Sequence
  ENSG00000078070_24 (sequence is synthesized)
ttgtacccaagtttgaacaacgctatcagatgactcagtctagctcacctgactccagctctgtttcaaattttgagctctaagctttggtggcaataactctggcagtgaaaaaaccct

SEQ ID NO: 72866 - DNA, 120 bp, Artificial Sequence
  ENSG00000078070_25 (sequence is synthesized)
caggcttgtagatagctttgcttctttgtcttcttttgcttcatcgttatcatccttcatcattctggaaagattgacagtttagtgttcaagggcacagactctgcagtcaaggctgag

SEQ ID NO: 72867 - DNA, 120 bp, Artificial Sequence
  ENSG00000078070_26 (sequence is synthesized)
ggaggcttctgagggtttcctaggggttttgctgggttctttctagcttaatttaaaaaaaaccctacttgagggggctcttcagcaactgcttgctcgagcccactcccactctgtgac

SEQ ID NO: 72868 - DNA, 120 bp, Artificial Sequence
  ENSG00000078070_27 (sequence is synthesized)
cgtcttcaataaatctgtgcccactccgtggtgttgtgttcaactatttgtccaatacgccaagaacctggacatcacatttaggactttttttttttaatttgagatggagttttgctc

SEQ ID NO: 72869 - DNA, 120 bp, Artificial Sequence
  ENSG00000078070_28 (sequence is synthesized)
acgggcgtgggccaccgcacctggcagcatttaggaccttctctctggtaacataagtaggggaagagacaacacacacccaaaatggcaagaatccgctggcacggacaggctggaccc

SEQ ID NO: 72870 - DNA, 120 bp, Artificial Sequence
  ENSG00000078070_29 (sequence is synthesized)
gaataggggaaaagttccatgactttttaaaaaatatatgttatatatgtttaagacacattttatgttttaaaactaccaatagtgaagaattgattctgatcttattaattctgtagt

SEQ ID NO: 72871 - DNA, 120 bp, Artificial Sequence
  ENSG00000078070_30 (sequence is synthesized)
ccgtccggggtggaggaggaaaatcataatcatcttttctctcttagggaatgaggattgttagatcagaacaagaatttcaagaacagttagagtcagcacggagagaagctaagaagt

SEQ ID NO: 72872 - DNA, 120 bp, Artificial Sequence
  ENSG00000078081_0 (sequence is synthesized)
acaggtaggtttctctggcaccgattcggggcctgcccggacttcgccgcacgctgcagaacctcgcccagcgcccaccatgccccggcagctcagcgcggcggccgcgctcttcgcgtc

SEQ ID NO: 72873 - DNA, 120 bp, Artificial Sequence
  ENSG00000078081_1 (sequence is synthesized)
cctggccgtaattttgcacgatggcagtcaaatgagagcaaaagcatttccagaaaccagagattattctcaacctactgcagcagcaacagtacaggacataaaaaaacctgtccagca

SEQ ID NO: 72874 - DNA, 120 bp, Artificial Sequence
  ENSG00000078081_2 (sequence is synthesized)
accagctaagcaagcacctcaccaaactttagcagcaagattcatggatggtcatatcacctttcaaacagcggccacagtaaaaattccaacaactaccccagcgactacaaaaaacac

SEQ ID NO: 72875 - DNA, 120 bp, Artificial Sequence
  ENSG00000078081_3 (sequence is synthesized)
tgcaaccaccagcccaattacctacaccctggtcacaacccaggccacacccaacaactcacacacagctcctccagttactgaagttacagtcggccctagcttagccccttattcact

SEQ ID NO: 72876 - DNA, 120 bp, Artificial Sequence
  ENSG00000078081_4 (sequence is synthesized)
gccacccaccatcaccccaccagctcatacaactggaaccagttcatcaaccgtcagccacacaactgggaacaccactcaacccagtaaccagaccacccttccagcaactttatcgat

SEQ ID NO: 72877 - DNA, 120 bp, Artificial Sequence
  ENSG00000078081_5 (sequence is synthesized)
agcactgcacaaaagcacaaccggtcagaagcctgttcaacccacccatgccccaggaacaacggcagctgcccacaataccacccgcacagctgcacctgcctccacggttcctgggcc

SEQ ID NO: 72878 - DNA, 120 bp, Artificial Sequence
  ENSG00000078081_6 (sequence is synthesized)
cacccttgcacctcagccatcgtcagtcaagactggaatttatcaggttctaaacggaagcagactctgtataaaagcagagatggggatacagctgattgttcaagacaaggagtcggt

SEQ ID NO: 72879 - DNA, 120 bp, Artificial Sequence
  ENSG00000078081_7 (sequence is synthesized)
tttttcacctcggagatacttcaacatcgaccccaacgcaacgcaagcctctgggaactgtggcacccgaaaatccaaccttctgttgaattttcagggcggatttgtgaatctcacatt

SEQ ID NO: 72880 - DNA, 120 bp, Artificial Sequence
  ENSG00000078081_8 (sequence is synthesized)
taccaaggatgaagaatcatattatatcagtgaagtgggagcctatttgaccgtctcagatccagagacaatttaccaaggaatcaaacatgcggtggtgatgttccagacagcagtcgg

SEQ ID NO: 72881 - DNA, 120 bp, Artificial Sequence
  ENSG00000078081_9 (sequence is synthesized)
gcattccttcaagtgcgtgagtgaacagagcctccagttgtcagcccacctgcaggtgaaaacaaccgatgtccaacttcaagcctttgattttgaagatgaccactttggaaatgtgga

SEQ ID NO: 72882 - DNA, 120 bp, Artificial Sequence
  ENSG00000078081_10 (sequence is synthesized)
tgagtgctcgtctgactacacaattgtgcttcctgtgattggggccatcgtggttggtctctgccttatgggtatgggtgtctataaaatccgcctaaggtgtcaatcatctggatacca

SEQ ID NO: 72883 - DNA, 120 bp, Artificial Sequence
  ENSG00000078081_11 (sequence is synthesized)
gagaatctaattgttgcccggggggaatgaaaataatggaatttagagaactctttcatcccttccaggatggatgttgggaaattccctcagagtgtgggtccttcaaacaatgtaaac

SEQ ID NO: 72884 - DNA, 120 bp, Artificial Sequence
  ENSG00000078081_12 (sequence is synthesized)
caccatcttctattcaaatgaagtgagtcatgtgtgatttaagttcaggcagcacatcaatttctaaatactttttgtttattttatgaaagatatagtgagctgtttattttctagttt

SEQ ID NO: 72885 - DNA, 120 bp, Artificial Sequence
  ENSG00000078081_13 (sequence is synthesized)
agccttcaaattataaaccaagggtcaattgtaactaatactactgtgtgtgcattgaagattttattttacccttgatcttaacaaagcctttgctttgttatcaaatggactttcagt

SEQ ID NO: 72886 - DNA, 120 bp, Artificial Sequence
  ENSG00000078081_14 (sequence is synthesized)
cagtgcttttactatctgtgttttatggtttcatgtaacatacatattcctggtgtagcacttaactccttttccactttaaatttgtttttgttttttgagacggagtttcactcttgt

SEQ ID NO: 72887 - DNA, 120 bp, Artificial Sequence
  ENSG00000078081_15 (sequence is synthesized)
gagccattgcgcccggccttaaatgttttttttaatcatcaaaaagaacaacatatctcaggttgtctaagtgtttttatgtaaaaccaacaaaaagaacaaatcagcttatatttttta

SEQ ID NO: 72888 - DNA, 120 bp, Artificial Sequence
  ENSG00000078081_16 (sequence is synthesized)
tcttgatgactcctgctccagaatcgctagactaagaattaggtggctacagatggtagaactaaacaataagcaagagacaataataatggcccttaattattaacaaagtgccagagt

SEQ ID NO: 72889 - DNA, 120 bp, Artificial Sequence
  ENSG00000078081_17 (sequence is synthesized)
ctaggctaagcactttatctatatctcatttcattctcacaacttataggtgaatgagtaaactgagacttaagggaactgaatcacttaaatgtcacctggctaactgatggcagagcc

SEQ ID NO: 72890 - DNA, 120 bp, Artificial Sequence
  ENSG00000078081_18 (sequence is synthesized)
agagcttgaattcatgttggtctgacatcaaggtctttggtcttctccctacaccaagttacctacaagaacaatgacaccacactctgcctgaaggctcacacctcataccagcatacg

SEQ ID NO: 72891 - DNA, 120 bp, Artificial Sequence
  ENSG00000078081_19 (sequence is synthesized)
ctcaccttacagggaaatgggtttatccaggatcatgagacattagggtagatgaaaggagagctttgcagataacaaaatagcctatccttaataaatcctccactctctggaaggaga

SEQ ID NO: 72892 - DNA, 120 bp, Artificial Sequence
  ENSG00000078081_20 (sequence is synthesized)
ctgaggggctttgtaaaacattagtcagttgctcatttttatgggattgcttagctgggctgtaaagatgaaggcatcaaataaactcaaagtatttttaaatttttttgataatagaga

SEQ ID NO: 72893 - DNA, 120 bp, Artificial Sequence
  ENSG00000078081_21 (sequence is synthesized)
aacttcgctaaccaactgttctttcttgagtgtatagccccatcttgtggtaacttgctgcttctgcacttcatatccatatttcctattgttcactttattctgtagagcagcctgcca

SEQ ID NO: 72894 - DNA, 120 bp, Artificial Sequence
  ENSG00000078081_22 (sequence is synthesized)
agaattttatttctgctgttttttttgctgctaaagaaaggaactaagtcaggatgttaacagaaaagtccacataaccctagaattcttagtcaaggaataattcaagtcagcctagag

SEQ ID NO: 72895 - DNA, 120 bp, Artificial Sequence
  ENSG00000078081_23 (sequence is synthesized)
accatgttgactttcctcatgtgtttccttatgactcagtaagttggcaaggtcctgactttagtcttaataaaacattgaattgtagtaaaggtttttgtaataaaaacttactttgga

SEQ ID NO: 72896 - DNA, 120 bp, Artificial Sequence
  ENSG00000078081_24 (sequence is synthesized)
cgggccccggcggctgcgccgagtccccgcccctccctgctccgtaggggtaggagggggccggcggagtttccctccccgcccagcggccctgggcgggcttttcggctgcttctcata

SEQ ID NO: 72897 - DNA, 120 bp, Artificial Sequence
  ENSG00000078081_25 (sequence is synthesized)
ggagtcggcagcgcgagctcccagccagacctagcgcctctgggctgtgctcctgttgcttcccgcaaaccgcggtcctggcgaggcctgggcgtggagcgcggctgccgcagactccct

SEQ ID NO: 72898 - DNA, 120 bp, Artificial Sequence
  ENSG00000078081_26 (sequence is synthesized)
gctcatcagcacatggtaattaacaatgatggacatggcttcctggcactctctgcatgccaggcactgttcgcagtgctttaatccacaaaacagctttggagaagaggagagtgggaa

SEQ ID NO: 72899 - DNA, 120 bp, Artificial Sequence
  ENSG00000078098_0 (sequence is synthesized)
gtcctggcttcagcttccaactacaaagacagacttggtccttttcaacggttttcacagatccagtgacccacgctctgaagacagaattagctaactttcaaaaacatctggaaaaat

SEQ ID NO: 72900 - DNA, 120 bp, Artificial Sequence
  ENSG00000078098_1 (sequence is synthesized)
gaagacttgggtaaaaatcgtatttggagttgccacctctgctgtgcttgccttattggtgatgtgcattgtcttacgcccttcaagagttcataactctgaagaaaatacaatgagagc

SEQ ID NO: 72901 - DNA, 120 bp, Artificial Sequence
  ENSG00000078098_2 (sequence is synthesized)
actcacactgaaggatattttaaatggaacattttcttataaaacattttttccaaactggatttcaggacaagaatatcttcatcaatctgcagataacaatatagtactttataatat

SEQ ID NO: 72902 - DNA, 120 bp, Artificial Sequence
  ENSG00000078098_3 (sequence is synthesized)
tgaaacaggacaatcatataccattttgagtaatagaaccatgaaaagtgtgaatgcttcaaattacggcttatcacctgatcggcaatttgtatatctagaaagtgattattcaaagct

SEQ ID NO: 72903 - DNA, 120 bp, Artificial Sequence
  ENSG00000078098_4 (sequence is synthesized)
ttggagatactcttacacagcaacatattacatctatgaccttagcaatggagaatttgtaagaggaaatgagcttcctcgtccaattcagtatttatgctggtcgcctgttgggagtaa

SEQ ID NO: 72904 - DNA, 120 bp, Artificial Sequence
  ENSG00000078098_5 (sequence is synthesized)
attagcatatgtctatcaaaacaatatctatttgaaacaaagaccaggagatccaccttttcaaataacatttaatggaagagaaaataaaatatttaatggaatcccagactgggttta

SEQ ID NO: 72905 - DNA, 120 bp, Artificial Sequence
  ENSG00000078098_6 (sequence is synthesized)
tgaagaggaaatgcttgctacaaaatatgctctctggtggtctcctaatggaaaatttttggcatatgcggaatttaatgatacggatataccagttattgcctattcctattatggcga

SEQ ID NO: 72906 - DNA, 120 bp, Artificial Sequence
  ENSG00000078098_7 (sequence is synthesized)
tgaacaatatcctagaacaataaatattccatacccaaaggctggagctaagaatcccgttgttcggatatttattatcgataccacttaccctgcgtatgtaggtccccaggaagtgcc

SEQ ID NO: 72907 - DNA, 120 bp, Artificial Sequence
  ENSG00000078098_8 (sequence is synthesized)
tgttccagcaatgatagcctcaagtgattattatttcagttggctcacgtgggttactgatgaacgagtatgtttgcagtggctaaaaagagtccagaatgtttcggtcctgtctatatg

SEQ ID NO: 72908 - DNA, 120 bp, Artificial Sequence
  ENSG00000078098_9 (sequence is synthesized)
tgacttcagggaagactggcagacatgggattgtccaaagacccaggagcatatagaagaaagcagaactggatgggctggtggattctttgtttcaacaccagttttcagctatgatgc

SEQ ID NO: 72909 - DNA, 120 bp, Artificial Sequence
  ENSG00000078098_10 (sequence is synthesized)
catttcgtactacaaaatatttagtgacaaggatggctacaaacatattcactatatcaaagacactgtggaaaatgctattcaaattacaagtggcaagtgggaggccataaatatatt

SEQ ID NO: 72910 - DNA, 120 bp, Artificial Sequence
  ENSG00000078098_11 (sequence is synthesized)
gaagaagaaacatctacagaattagcattggaagctatcctccaagcaagaagtgtgttacttgccatctaaggaaagaaaggtgccaatattacacagcaagtttcagcgactacgcca

SEQ ID NO: 72911 - DNA, 120 bp, Artificial Sequence
  ENSG00000078098_12 (sequence is synthesized)
agtactatgcacttgtctgctacggcccaggcatccccatttccacccttcatgatggacgcactgatcaagaaattaaaatcctggaagaaaacaaggaattggaaaatgctttgaaaa

SEQ ID NO: 72912 - DNA, 120 bp, Artificial Sequence
  ENSG00000078098_13 (sequence is synthesized)
atatccagctgcctaaagaggaaattaagaaacttgaagtagatgaaattactttatggtacaagatgattcttcctcctcaatttgacagatcaaagaagtatcccttgctaattcaag

SEQ ID NO: 72913 - DNA, 120 bp, Artificial Sequence
  ENSG00000078098_14 (sequence is synthesized)
tgtatggtggtccctgcagtcagagtgtaaggtctgtatttgctgttaattggatatcttatcttgcaagtaaggaagggatggtcattgccttggtggatggtcgaggaacagctttcc

SEQ ID NO: 72914 - DNA, 120 bp, Artificial Sequence
  ENSG00000078098_15 (sequence is synthesized)
aaggtgacaaactcctctatgcagtgtatcgaaagctgggtgtttatgaagttgaagaccagattacagctgtcagaaaattcatagaaatgggtttcattgatgaaaaaagaatagcca

SEQ ID NO: 72915 - DNA, 120 bp, Artificial Sequence
  ENSG00000078098_16 (sequence is synthesized)
tatggggctggtcctatggaggatacgtttcatcactggcccttgcatctggaactggtcttttcaaatgtggtatagcagtggctccagtctccagctgggaatattacgcgtctgtct

SEQ ID NO: 72916 - DNA, 120 bp, Artificial Sequence
  ENSG00000078098_17 (sequence is synthesized)
acacagagagattcatgggtctcccaacaaaggatgataatcttgagcactataagaattcaactgtgatggcaagagcagaatatttcagaaatgtagactatcttctcatccacggaa

SEQ ID NO: 72917 - DNA, 120 bp, Artificial Sequence
  ENSG00000078098_18 (sequence is synthesized)
cagcagatgataatgtgcactttcaaaactcagcacagattgctaaagctctggttaatgcacaagtggatttccaggcaatgtggtactctgaccagaaccacggcttatccggcctgt

SEQ ID NO: 72918 - DNA, 120 bp, Artificial Sequence
  ENSG00000078098_19 (sequence is synthesized)
ccacgaaccacttatacacccacatgacccacttcctaaagcagtgtttctctttgtcagactaaaaacgatgcagatgcaagcctgtatcagaatctgaaaaccttatataaacccctc

SEQ ID NO: 72919 - DNA, 120 bp, Artificial Sequence
  ENSG00000078098_20 (sequence is synthesized)
agacagtttgcttattttattttttatgttgtaaaatgctagtataaacaaacaaattaatgttgttctaaaggctgttaaaaaaaagatgaggactcagaagttcaagctaaatattgt

SEQ ID NO: 72920 - DNA, 120 bp, Artificial Sequence
  ENSG00000078098_21 (sequence is synthesized)
ttacattttctggtactctgtgaaagaagagaaaagggagtcatgcattttgctttggacacagtgttttatcacctgttcatttgaagaaaaataataaagtcagaagttcaagtgcta

SEQ ID NO: 72921 - DNA, 120 bp, Artificial Sequence
  ENSG00000078098_22 (sequence is synthesized)
ctcacataagcacagcatccccacaggcatggttgtcatcctcctcacctctatctgatcaattcgtagctacagttaatgagcatttgttatatgtaagaatcttatcttgtgcttata

SEQ ID NO: 72922 - DNA, 120 bp, Artificial Sequence
  ENSG00000078098_23 (sequence is synthesized)
tgcattcttaattgctagagctaacatgctctcagcatggtcttttaattacaccctaataatttattatagtttctctctacaatgtaaagtcttggaaatcacccactaaaaagtgcc

SEQ ID NO: 72923 - DNA, 120 bp, Artificial Sequence
  ENSG00000078098_24 (sequence is synthesized)
tgtgtactctggggctttggcaggctagggcagaacttctgagaacacggtgtgttccagagaagacaatcaatctgagaggacttacacagaaacagttcattcaggacctggctgctg

SEQ ID NO: 72924 - DNA, 120 bp, Artificial Sequence
  ENSG00000078098_25 (sequence is synthesized)
gattacttcattttgtaaagaggtgactccaccaacagcaaaggagagggcccagccccagccaccaggaatacagttctctgccaaaatcttttgaaacttggcacggtattcaaaagt

SEQ ID NO: 72925 - DNA, 120 bp, Artificial Sequence
  ENSG00000078098_26 (sequence is synthesized)
ccgtggaaagaaaaaaaccttgtcctggcttcagcttccaactacaaagacagacttggtccttttcaacggttttcacagatccagtgacccacgctctgaagacagaattagctaact

SEQ ID NO: 72926 - DNA, 120 bp, Artificial Sequence
  ENSG00000078098_27 (sequence is synthesized)
aaacaaagaaaatgtagcgtttctattaaatctttggattaaatatggttgtgtaatgaagtaaatgtcatgtgtatacacttaacattctaaaaatttgtttcttttactttagaaaat

SEQ ID NO: 72927 - DNA, 120 bp, Artificial Sequence
  ENSG00000078098_28 (sequence is synthesized)
cttctggggtgcatttgtgtaattcgatattaatgattcaggattagtcttggaaaagtgcacaggcaaggcttctttcacagctgttctttgagtgggctttgatctcatgtattgttt

SEQ ID NO: 72928 - DNA, 120 bp, Artificial Sequence
  ENSG00000078098_29 (sequence is synthesized)
aaatgtgacttagaagtgatgttttcttctctatggggaaaaaaatagctgcagaattaaaagatgtactggcacttgacactaatcacaaatactaccagcagcccgtcttgaaaagga

SEQ ID NO: 72929 - DNA, 120 bp, Artificial Sequence
  ENSG00000078098_30 (sequence is synthesized)
aaagaaaggtgccaatattacacagcaagtttcagcgactacgccaagtactatgcacttgtctgctacggggaatgaacaacggcttggaaacccgagatgcccacgtcggaggtcaat

SEQ ID NO: 72930 - DNA, 120 bp, Artificial Sequence
  ENSG00000078098_31 (sequence is synthesized)
cattcctcaaactgtagtttcaatggggatagaagatgaacctttgtcctttctaaatttggaaaacatcttgcagaggccctgaagatctcataaagggaaccagaatgaaggctaccc

SEQ ID NO: 72931 - DNA, 120 bp, Artificial Sequence
  ENSG00000078098_32 (sequence is synthesized)
taacatgccacttccctcagtccagccacctggccccggaacctgagctgcagctcatttgactacgtggacatgaataagcattttaacccaaattctcccttgaagatagcacaaaga

SEQ ID NO: 72932 - DNA, 120 bp, Artificial Sequence
  ENSG00000078098_33 (sequence is synthesized)
ttttctaaaggtctctggcttactctgctctcatttgaacttgaaattcagaaggaaggaaagccttcccatttcagcaggagttgctgcaaacctgctaatcaaaataagtcatttttt

SEQ ID NO: 72933 - DNA, 120 bp, Artificial Sequence
  ENSG00000078098_34 (sequence is synthesized)
taaattataagtgaaagtttaaaccagacagagaattttcacttgcaataaggattttcaaacccaaatgtatcttctgtttttaaaatatactttttccctattaaaacatggttcagt

SEQ ID NO: 72934 - DNA, 120 bp, Artificial Sequence
  ENSG00000078098_35 (sequence is synthesized)
tctcctccaagtataataaaaagaggccatggtacaatctgagccccctcttttattctgtgttttgtagctaaaggtcttcaataaaataccccagagctaaaaacaaagaactgtaaa

SEQ ID NO: 72935 - DNA, 120 bp, Artificial Sequence
  ENSG00000078098_36 (sequence is synthesized)
ttagtttgagaattcttcatttaactgttagattcagcaagattatttagctgattctcccattccatgcatttcatgaattaaaaatagacctctgccactgacctattaccagcacca

SEQ ID NO: 72936 - DNA, 120 bp, Artificial Sequence
  ENSG00000078098_37 (sequence is synthesized)
tgtctgtctacctctctctctctctctttctcacactgtcactcattctccctgtctaaagaatgactttctctggtaaagatgatatgatctatcctgatctgagggaagtgattccca

SEQ ID NO: 72937 - DNA, 120 bp, Artificial Sequence
  ENSG00000078098_38 (sequence is synthesized)
gaaatctgtggtcataaggtcctaaaaacatggtatggctttagctggagagtcacactgtccccttatgatttttagggacgttcttgcatcagggcaagaataaacacagagagtcac

SEQ ID NO: 72938 - DNA, 120 bp, Artificial Sequence
  ENSG00000078098_39 (sequence is synthesized)
ttcctaatctagtgcacacatttttttttggtccatgtcccagacaactgcttagtccacgttcccaggagaagcacctctctcacagcatgtttgtacagaccaaacttgcttctcacg

SEQ ID NO: 72939 - DNA, 120 bp, Artificial Sequence
  ENSG00000078098_40 (sequence is synthesized)
aggcagtgcaaccttatttggatgccctgttcatttcttcatatttaagaaaaggttcaaatttccatgtgacatgggcagagatctctttctcttaacaggatcccatttctgaatcac

SEQ ID NO: 72940 - DNA, 120 bp, Artificial Sequence
  ENSG00000078098_41 (sequence is synthesized)
ctcttgattccttggagaagaaaatctatgagagctaaacttactcctgactctgcaaattgcatcctgttttgtatttatttccttttccttaaatttgcaggaagaaatataaggttt

SEQ ID NO: 72941 - DNA, 120 bp, Artificial Sequence
  ENSG00000078098_42 (sequence is synthesized)
ttaaagacaccaatgacttttcctcctttgagctgctatgtcagaaatccttagaacatgtaccactacaacatacacaaactatggccatgtcttaaattatccaaaaagttcttatgg

SEQ ID NO: 72942 - DNA, 120 bp, Artificial Sequence
  ENSG00000078098_43 (sequence is synthesized)
tattctgttgtgaaaataaataagtaaatacaaagatacatgttctgcctcacagaacttttgcaaactgcgaggatgtatcttacatttaaattttggtaattttttttctgtgcatct

SEQ ID NO: 72943 - DNA, 120 bp, Artificial Sequence
  ENSG00000078098_44 (sequence is synthesized)
ctttcaagtaaaatcttgtttttgttccagcatggtcctagttggaaagatatagagaaaaaaatgagaattttttttttgcaaaagaaaattgaaattctgtctatctcttaaactgct

SEQ ID NO: 72944 - DNA, 120 bp, Artificial Sequence
  ENSG00000078098_45 (sequence is synthesized)
cctaccatgttttaagagggtctgttctgatcagcacaccaagtatttctaatgaattagggaagaaattaccattatgtctggtcatttatctgaagcttgctgccgaggatgcaagat

SEQ ID NO: 72945 - DNA, 120 bp, Artificial Sequence
  ENSG00000078098_46 (sequence is synthesized)
agacatgtaatccacccttagccatattctccagctcccttcagtccggattgtgagtagagttgctataaacatatggaggaaagcttatgaaagtaaatctgagtctgactcataaca

SEQ ID NO: 72946 - DNA, 120 bp, Artificial Sequence
  ENSG00000078098_47 (sequence is synthesized)
ttggagatactcttacacagcaacatattacatctatgaccttagcaatggaaaatggcagctgtgatggcttgagacatgcgctgagatttttagcttagtgctgcttgtgtgattgca

SEQ ID NO: 72947 - DNA, 120 bp, Artificial Sequence
  ENSG00000078098_48 (sequence is synthesized)
tagataattccactgtatgtagaaaactgagacaatgttacagtatgaaagagaatttgtaagaggaaatgagcttcctcgtccaattcagtatttatgctggtcgcctgttgggagtaa

SEQ ID NO: 72948 - DNA, 120 bp, Artificial Sequence
  ENSG00000078098_49 (sequence is synthesized)
acgcactgatcaagctacatcacattgttgccacgtatgaacgccctgaaatttggaggctctttccattttcaactgctatcaagacagtcctcctctatcctgtatttgtgatattgg

SEQ ID NO: 72949 - DNA, 120 bp, Artificial Sequence
  ENSG00000078098_50 (sequence is synthesized)
ttcaaaatagttcacatctcaaagacgaccagttttgctcgcagcagagttgtccaagtatctaattgctctgatactcttcctgctggctctccattatcttttgatttactattaaac

SEQ ID NO: 72950 - DNA, 120 bp, Artificial Sequence
  ENSG00000078098_51 (sequence is synthesized)
aatgaggcagatgccactttcttcagcactcatgcctgcgattgtccctggacagctttggtgacaagtcaggagactgccttgggattactttggctgtcagctcaatggctcaagtgt

SEQ ID NO: 72951 - DNA, 120 bp, Artificial Sequence
  ENSG00000078098_52 (sequence is synthesized)
aggtgaaaataacaagaaaaaaaaacaaaaacagaatcaatttgggaactctggacaggacaggcattgtgataatgggactgtgaatttagtttcattttaaggttttttttgaaacct

SEQ ID NO: 72952 - DNA, 120 bp, Artificial Sequence
  ENSG00000078098_53 (sequence is synthesized)
tgtgtctaataaggaaatacttttaagaataacagattatatttcttaatttgaccatctcagtcagtgagattgatttcaagtcgacaaggttttgttttaatagaaatcactattagc

SEQ ID NO: 72953 - DNA, 120 bp, Artificial Sequence
  ENSG00000078098_54 (sequence is synthesized)
agaaagcagaactggatgggctggtggagtatgattttgctatctttttcttatgttttaatgaaacttgacagattctcagctatcaaaggactatttgcaatgtacccaaactggcac

SEQ ID NO: 72954 - DNA, 120 bp, Artificial Sequence
  ENSG00000078098_55 (sequence is synthesized)
tacttattttcatagaaaaagtagcaaggtataaaacacataggtagtgatctcttgagtgattttgtgccggacaatttcaatgtcctttttagaattctattgaaaataactcatact

SEQ ID NO: 72955 - DNA, 120 bp, Artificial Sequence
  ENSG00000078098_56 (sequence is synthesized)
cctcatgtcccaattttaagtttgtcaactgaatccttggtatctataactaatattactttttaaacaaatacaatatagatcattgttcaaaaggagacaaaatccctgatctgttaa

SEQ ID NO: 72956 - DNA, 120 bp, Artificial Sequence
  ENSG00000078114_0 (sequence is synthesized)
cctgcgcggcggcggcggcgaggcgggggagcgagtgagcgcgaggggcgggcgcgagtgactgtgtgagtcacccgtacctggagtgcgagcgacgcagagccagcggcgcggagccgg

SEQ ID NO: 72957 - DNA, 80 bp, Artificial Sequence
  ENSG00000078114_1 (sequence is synthesized)
ggagccgagacccagcgcctgcgagcccgagagcgcggccggccccaggcgccaggccccgtcgccctccccgtgcactc

SEQ ID NO: 72958 - DNA, 120 bp, Artificial Sequence
  ENSG00000078114_2 (sequence is synthesized)
cagccctcccgcctgccaggaggcggtgcggggctcgccgggggatgtcacagcggctcctgggagccagcagccgccgccgccgccgcccccgggaaccgcgatcatgaacccccagtg

SEQ ID NO: 72959 - DNA, 120 bp, Artificial Sequence
  ENSG00000078114_3 (sequence is synthesized)
ccccagtgcgcccgttgcggaaaagtcgtgtatcccaccgagaaagtcaactgcctggataagtattggcataaaggatgtttccattgtgaggtctgcaagatggcactcaacatgaac

SEQ ID NO: 72960 - DNA, 120 bp, Artificial Sequence
  ENSG00000078114_4 (sequence is synthesized)
aactacaaaggctatgaaaagaagccctattgtaatgcacactacccgaagcagtccttcaccacggtggcagatacacctgaaaatcttcgcctgaagcagcaaagtgaattgcagagt

SEQ ID NO: 72961 - DNA, 120 bp, Artificial Sequence
  ENSG00000078114_5 (sequence is synthesized)
caggtcaagtacaaaagagattttgaagaaagcaaagggaggggcttcagcatcgtcacggacactcctgagctacagagactgaagaggactcaggagcaaatcagtaatgtaaaatac

SEQ ID NO: 72962 - DNA, 120 bp, Artificial Sequence
  ENSG00000078114_6 (sequence is synthesized)
catgaagattttgaaaaaacaaaggggagaggctttactcccgtcgtggacgatcctgtgacagagagagtgaggaagaacacccaggtggtcagcgatgctgcctataaaggggtccac

SEQ ID NO: 72963 - DNA, 120 bp, Artificial Sequence
  ENSG00000078114_7 (sequence is synthesized)
cctcacatcgtggagatggacaggagacctggaatcattgttgcacctgttcttcccggagcctatcagcaaagccattcccaaggctatggctacatgcaccagaccagtgtgtcatcc

SEQ ID NO: 72964 - DNA, 120 bp, Artificial Sequence
  ENSG00000078114_8 (sequence is synthesized)
atgagatcaatgcagcattcaccaaatctaaggacctaccgagccatgtacgattacagtgcccaggatgaagacgaggtctcctttagagacggcgactacatcgtcaacgtgcagcct

SEQ ID NO: 72965 - DNA, 120 bp, Artificial Sequence
  ENSG00000078114_9 (sequence is synthesized)
attgacgatggctggatgtacggcacagtgcagagaacagggagaacaggaatgctcccagcgaattacattgagtttgttaattaattatttctccctgccctttgagctttattctaa

SEQ ID NO: 72966 - DNA, 120 bp, Artificial Sequence
  ENSG00000078114_10 (sequence is synthesized)
tgtatcccaaacctaatctttttaaaagatagaagatacttttaagacaacttggccattattttacaatgatgtatccttcctttgacaattagacacacaggtaccaggaagaaggaa

SEQ ID NO: 72967 - DNA, 120 bp, Artificial Sequence
  ENSG00000078114_11 (sequence is synthesized)
tgacctctgggctgaaaacagcagcattttcagtaattcctacaaacaaaaatctttgtgtctggacacctggtgctgctaattgtgttcatggtttcctttgattggctattgaaccct

SEQ ID NO: 72968 - DNA, 120 bp, Artificial Sequence
  ENSG00000078114_12 (sequence is synthesized)
atgtatttttgtagactttaatagagaagttgattgtcccttaaatgtagtgtgtgtttgaaacttcttagctgtcactttggaatcaccccaagccaattctcttaactctgtaatgca

SEQ ID NO: 72969 - DNA, 120 bp, Artificial Sequence
  ENSG00000078114_13 (sequence is synthesized)
gccaataatttcaaacccgttttgcttttgagtcatgaggcaatttccaatattagtgaaaattgcccaatataataagtgtaaacagtggcagaaggacagtctggttaaaattatatt

SEQ ID NO: 72970 - DNA, 120 bp, Artificial Sequence
  ENSG00000078114_14 (sequence is synthesized)
gactggtggccttagggatctagaaacttctactaaacagagaaatttccttgttccctaggctgactggtatctatttatttctcatttgtaccaaggcatctcctactctccatttat

SEQ ID NO: 72971 - DNA, 120 bp, Artificial Sequence
  ENSG00000078114_15 (sequence is synthesized)
attctatggacccaagtctatgctcagttccacagaatgtcaggaccaaataacttcacagctactctgcaaagggcaaattataatgtcattgatataatttccctagtagcatttacc

SEQ ID NO: 72972 - DNA, 120 bp, Artificial Sequence
  ENSG00000078114_16 (sequence is synthesized)
ctgttgcatgtcatgtagattcaagcttctgtaacataggcagctgcactgcgcgttcctattattgaagcaaaaagggtgactgatacctaaaagccctttcttcctctagtcgccagc

SEQ ID NO: 72973 - DNA, 120 bp, Artificial Sequence
  ENSG00000078114_17 (sequence is synthesized)
tcatcagaaaaacatactttgaaaagatgcttgagattttcctgctgcatcgcactctagttttgaaggatttacatcttaggaaataacatgtatactctagtaaataagcgatttagg

SEQ ID NO: 72974 - DNA, 120 bp, Artificial Sequence
  ENSG00000078114_18 (sequence is synthesized)
tgttccattgaacagctttgattaacttaatgccaccattgatttcaaagtgaagaaaatgtaacagaagccagtgaagcaatggaagctggagtgtgactggaaaaatactcagcaaac

SEQ ID NO: 72975 - DNA, 120 bp, Artificial Sequence
  ENSG00000078114_19 (sequence is synthesized)
aaagttaccaattccatacagagatgatctggtatcttcttttggaaaatggtattcaaattctggaatggaaatctagccaccaaaacgggttaatcaaaagacgtccttttccatttt

SEQ ID NO: 72976 - DNA, 120 bp, Artificial Sequence
  ENSG00000078114_20 (sequence is synthesized)
tttttgcttttattttctaaatcatttttaagggaatgaaacaggaatgtcatcagagattttttagtacaggcccaagagcctgttctctaagaaagaaattgttgccatgttttgatt

SEQ ID NO: 72977 - DNA, 120 bp, Artificial Sequence
  ENSG00000078114_21 (sequence is synthesized)
ttcgaataagtgactttgcaggctttatgctagcccttgctggtgggtcttgaaatttcatccagagtctgcagtccaggtcaccaagccagcggcacccgtcggcaaccctgtgttttt

SEQ ID NO: 72978 - DNA, 120 bp, Artificial Sequence
  ENSG00000078114_22 (sequence is synthesized)
ctgattgtgccgtttactgtgacctgcaacggggtggcattcacttagggtctgacttcacagctatgacaaaaccgaaaaagcaaaactgcaaaaaagtactaagatgtacgggtcttg

SEQ ID NO: 72979 - DNA, 120 bp, Artificial Sequence
  ENSG00000078114_23 (sequence is synthesized)
gggatatctgccttatatgttatattcaaggaaattaacaaaacatcctgtaaaacatcgtttaaggaaacgtttactagtccaaaggccaaagctaatttatttccactttagaaaagt

SEQ ID NO: 72980 - DNA, 120 bp, Artificial Sequence
  ENSG00000078114_24 (sequence is synthesized)
tagcacatgcttttgaaaatctgtgatttcattttattaggctaaaagggtaaataggctttattacactgaagctgcatctatatgtcactgacataaagttgaaaaaataaatgcagg

SEQ ID NO: 72981 - DNA, 120 bp, Artificial Sequence
  ENSG00000078114_25 (sequence is synthesized)
gtgaggtctgcaagatggcactcaacatgaacaactacaaaggctatgaaaagaagccctattgtaatgctgcttacaggtagaccagaaacttttcaagaaatcagaaaatgggggcat

SEQ ID NO: 72982 - DNA, 120 bp, Artificial Sequence
  ENSG00000078114_26 (sequence is synthesized)
tgaacagaattcaggactttcttggagaggggaagtccacagatattccccaaactttctgatgtcttcgatcctcctacaccgtgcttcctattggaatagcgtgaagcaaaaatgagg

SEQ ID NO: 72983 - DNA, 120 bp, Artificial Sequence
  ENSG00000078114_27 (sequence is synthesized)
gatcaaaggcaggcgtaaggagaagggaaagggccccaagcacccataaacgggataattgttctttggttaaaggaaagtgaaccattcttcctgtaactgtttcagtgggcagcctgt

SEQ ID NO: 72984 - DNA, 120 bp, Artificial Sequence
  ENSG00000078114_28 (sequence is synthesized)
ttccatcaggctttatggaccacatcaggattcaggattctttacagggcagggccaggaatttaaccccagtgataacaatgcctttgggtggccctggtaggcctgaagggattggga

SEQ ID NO: 72985 - DNA, 120 bp, Artificial Sequence
  ENSG00000078114_29 (sequence is synthesized)
cttgagtgttagagctgagtagttttcccagaatctctaagtcctttttatgctcttttatgaatgaatagaattagtaaaagataaataaattttttcttttggatttcttaaccagtg

SEQ ID NO: 72986 - DNA, 120 bp, Artificial Sequence
  ENSG00000078114_30 (sequence is synthesized)
gaaaaaatgttgactttaaaagttcataaaatcaaattttgcttaagaatatgttatttccacttgtgaggccagcctggtagacctctgggatccttttctgttcactcacacaccact

SEQ ID NO: 72987 - DNA, 120 bp, Artificial Sequence
  ENSG00000078114_31 (sequence is synthesized)
gagataaggagtgaagtgtgggctaaatagggctgaggcttgggcaagggcatttctgccagagcaccagagacgtcagcatctcaagggcactgtggtatggaaaaggacgccacatga

SEQ ID NO: 72988 - DNA, 120 bp, Artificial Sequence
  ENSG00000078114_32 (sequence is synthesized)
gtaaattttaaaaatataaatattttaaagggtaaaaatgagggtccctgtatttgaggatataaaagatgaaactgaagaagaaaagataggggaagaagaaaatgaagaagaccaggt

SEQ ID NO: 72989 - DNA, 120 bp, Artificial Sequence
  ENSG00000078114_33 (sequence is synthesized)
cttctataagcctgttattgaagacttaagcatggaattggccagaaaatgcacggaactcattagcgatatccgttataaagaagagtttaaaaagtccaaggataagtgtacatttgt

SEQ ID NO: 72990 - DNA, 120 bp, Artificial Sequence
  ENSG00000078114_34 (sequence is synthesized)
gactgacagtcctatgctaaaccatgtaaaaaatatcggtgcttttatttctgaggcaaaatacaaaggcaccattaaagctgacctttctaattctctttataagcggatgccagccac

SEQ ID NO: 72991 - DNA, 120 bp, Artificial Sequence
  ENSG00000078114_35 (sequence is synthesized)
aattgacagtgtttttgcaggagaagttacacagctccagagtgaggtggcctacaagcagaaacatgatgctgccaaaggattctcagattatgcccacatgaaggagccccctgaggt

SEQ ID NO: 72992 - DNA, 120 bp, Artificial Sequence
  ENSG00000078114_36 (sequence is synthesized)
taaacatgccatggaggtcaataaacaccagagtaatatttcttataggaaagacgtgcaggacacccacacgtacagtgcagaacttgaccgaccagacatcaagatggcaacccagat

SEQ ID NO: 72993 - DNA, 120 bp, Artificial Sequence
  ENSG00000078114_37 (sequence is synthesized)
ctctaagatcataagcaatgcagaatacaagaaaggacaaggaataatgaataaagagcccgctgtaattggaagaccagattttgaacatgccgtggaagcttctaaactttctagtca

SEQ ID NO: 72994 - DNA, 120 bp, Artificial Sequence
  ENSG00000078114_38 (sequence is synthesized)
aattaaatacaaagaaaaatttgataatgaaatgaaggataagaaacatcattacaatcctcttgaaagtgcttcttttaggcagaatcagcttgctgctacactggcgagcaatgtgaa

SEQ ID NO: 72995 - DNA, 120 bp, Artificial Sequence
  ENSG00000078114_39 (sequence is synthesized)
gtacaagaaagacattcaaaatatgcatgatccagtttcagatctcccaaatttgttgtttttagaccatgttttgaaagccagcaaaatgctcagcggccgagaatataaaaagctctt

SEQ ID NO: 72996 - DNA, 120 bp, Artificial Sequence
  ENSG00000078114_40 (sequence is synthesized)
tgaggaaaacaaaggaatgtatcattttgatgcagatgctgtggaacatctgcaccataaaggcaatgccgtcctccaaagtcaggtgaaatataaagaagaatatgagaaaaataaggg

SEQ ID NO: 72997 - DNA, 120 bp, Artificial Sequence
  ENSG00000078114_41 (sequence is synthesized)
aaagccaatgcttgaatttgttgagacaccatcatatcaagcttcaaaggaggctcaaaagatgcaaagtgaaaaagtttacaaagaggattttgagaaggagattaaaggaaggtcatc

SEQ ID NO: 72998 - DNA, 120 bp, Artificial Sequence
  ENSG00000078114_42 (sequence is synthesized)
actggatttagacaagactccagaatttttacatgtaaagtacatcaccaaccttctgagggagaaagaatataaaaaagatttggaaaatgagataaaagggaaaggaatggaacttaa

SEQ ID NO: 72999 - DNA, 120 bp, Artificial Sequence
  ENSG00000078114_43 (sequence is synthesized)
ttcagaagttcttgatatccaaagagcaaagcgagcctctgaaatggcaagtgagaaagaatacaagaaagacctggagtcaataattaaagggaaaggaatgcaagctggcactgacac

SEQ ID NO: 73000 - DNA, 120 bp, Artificial Sequence
  ENSG00000078114_44 (sequence is synthesized)
ccttgaaatgcagcatgccaagaaggctgcagagatagcgagtgagaaagactataaaagagatctggagactgaaattaaagggaaagggatgcaggtgagcacagacactcttgatgt

SEQ ID NO: 73001 - DNA, 120 bp, Artificial Sequence
  ENSG00000078114_45 (sequence is synthesized)
ccagagagctaagaaagcatccgagatggccagccagaaacaatacaagaaggacttagaaaatgaaattaaagggaaaggaatgcaagtgagcatggatatcccagatatccttcgagc

SEQ ID NO: 73002 - DNA, 120 bp, Artificial Sequence
  ENSG00000078114_46 (sequence is synthesized)
caagaggacatctgaaatctatagccagagaaagtataaagatgaagcagagaagatgctttctaactattctaccatagcagatactcctgaaattcagagaattaagacaactcaaca

SEQ ID NO: 73003 - DNA, 120 bp, Artificial Sequence
  ENSG00000078114_47 (sequence is synthesized)
aaacattagtgcggtattttataagaaagaagtgggagctggcactgcagtgaaagatagcccagagatcgaacgagtgaagaaaaatcagcagaatattagttcagtgaaatacaaaga

SEQ ID NO: 73004 - DNA, 120 bp, Artificial Sequence
  ENSG00000078114_48 (sequence is synthesized)
agagattaaacatgcaacagccatttctgatcctccagaactaaagagagttaaagaaaaccagaagaacatcagcaatctccagtataaagagcaaaactacaaggccactccggtaag

SEQ ID NO: 73005 - DNA, 120 bp, Artificial Sequence
  ENSG00000078114_49 (sequence is synthesized)
catgaccccggagatagagagagtgaggcgaaaccaggagcagctgagtgcggtaaaatataagggagaacttcaacggggaactgcaatttctgatccaccagagctgaagagggcaaa

SEQ ID NO: 73006 - DNA, 120 bp, Artificial Sequence
  ENSG00000078114_50 (sequence is synthesized)
agaaaaccagaaaaacatcagcaatgtttattacagaggtcagctgggaagagctaccactttaagtgtaactcctgaaatggaaagagtgaagaagaatcaagaaaatattagctcggt

SEQ ID NO: 73007 - DNA, 120 bp, Artificial Sequence
  ENSG00000078114_51 (sequence is synthesized)
cgtggagatggacaggagacctggaatcattgttgacctcaaagtttggcgcacagatcctggctccatcttcgaccttgatcccctggaagacaatattcagtctagaagtctccatat

SEQ ID NO: 73008 - DNA, 120 bp, Artificial Sequence
  ENSG00000078114_52 (sequence is synthesized)
gctctctgaaaaggcgagtcactataggcgacactggtctcgatcccattccagcagtactttcggtacaggtctcggagacgacaggtcagaaatctccgagatttaccctagcttttc

SEQ ID NO: 73009 - DNA, 120 bp, Artificial Sequence
  ENSG00000078114_53 (sequence is synthesized)
tttggtatattgtacacaaacctacaaaaataaactgaacttgcaatatttttgcaaaaaaatctgtcgttaaaactgaggataaaatacctgctcaattttattttactaagtatatat

SEQ ID NO: 73010 - DNA, 120 bp, Artificial Sequence
  ENSG00000078114_54 (sequence is synthesized)
ttacatttcacccaggcaggccattttcttttgtgattataagaaagagtagttgttgattaaattttcagactaaatataggacaggtacaattttggataaatagcacatttataaga

SEQ ID NO: 73011 - DNA, 120 bp, Artificial Sequence
  ENSG00000078114_55 (sequence is synthesized)
accgcaatgaaaactgacttgaaataatgcttgtaatcaggaaagtaatttcatccaccgatttcaaaaccagattcactgagcataaaagtcaatacatatttgaggaataagtctcct

SEQ ID NO: 73012 - DNA, 120 bp, Artificial Sequence
  ENSG00000078114_56 (sequence is synthesized)
aaaattttaagcttcacgtaataatgtttgcatagcaaaatatttctgcttcaagcctttaggaattaagatctgatcagaatttaactaaagggtagttgttttacaatgaagactaaa

SEQ ID NO: 73013 - DNA, 120 bp, Artificial Sequence
  ENSG00000078114_57 (sequence is synthesized)
actgaacaagatgttgcatgctcttgaggccataatttggtagtgttggcagttgttaataaagcttgtcaggatgttaagcatctcaggagaaatattggaaaattatatgtataaaac

SEQ ID NO: 73014 - DNA, 120 bp, Artificial Sequence
  ENSG00000078114_58 (sequence is synthesized)
caaagtgctatttttaaaagcatcatttaaaaaaaaatgacatgcctgaacaacttttccactttccacgtgcttccctcccacctttggtttggcaacaggtatctcgtgcatgaagct

SEQ ID NO: 73015 - DNA, 120 bp, Artificial Sequence
  ENSG00000078114_59 (sequence is synthesized)
gacagctaaagaagattttaaaaattgagttaaagatgactgtgtaaatgtccaagcacagagagcatgcacctgactttctaaagtttgatgtgttctcaagcctgacagaagcacaag

SEQ ID NO: 73016 - DNA, 120 bp, Artificial Sequence
  ENSG00000078114_60 (sequence is synthesized)
gaacagtttgatacacttttaaaaggttctgaaaacaaagctgtatagggatcctctctctcttgagcaaagtatagcaacagaatatattgcttttgttgtaagcttttgtagtacatg

SEQ ID NO: 73017 - DNA, 120 bp, Artificial Sequence
  ENSG00000078114_61 (sequence is synthesized)
tttttactaataattcttgttctctagaaagctttctatttctaacctatggcaaaatgaatccttcatgtcttcttgttattgtttacacacttgcagtgtagcccagtttgaaatatt

SEQ ID NO: 73018 - DNA, 120 bp, Artificial Sequence
  ENSG00000078114_62 (sequence is synthesized)
tatttggttatcaactgcccatggaggaggctcttgatgatcccaggtctcctcgacctccatacaccacacaggcatttgtaagcacagtttccacaagcaccttgtaggaatatggat

SEQ ID NO: 73019 - DNA, 120 bp, Artificial Sequence
  ENSG00000078114_63 (sequence is synthesized)
aagattagaccagcccctctctgtccactgggtttatttcttgaagaagatgcagatctggtttttccaatgtgccacagtctttccttatcctctccatgctgagcttgacaacactct

SEQ ID NO: 73020 - DNA, 120 bp, Artificial Sequence
  ENSG00000078114_64 (sequence is synthesized)
gggaatgaggaacaagactttttctaaaaagatagtggaagttcaagggatgtacctcgttttcaggttcatccatctccagtggaatgttttcaataaaagatgaagaaaatgtgtgtg

SEQ ID NO: 73021 - DNA, 120 bp, Artificial Sequence
  ENSG00000078114_65 (sequence is synthesized)
atctttaataacacatccctatagaaagtggataaaagatataccaaaactgtaatacagatatatacaaatataggtgcctttttgattactcttgtttgtctagtatgctcttggaaa

SEQ ID NO: 73022 - DNA, 120 bp, Artificial Sequence
  ENSG00000078114_66 (sequence is synthesized)
gaaaaccaagcaagcaagttgctgcctattctatagtaatattttattacacatgattgatatttttgtggtagggaagtgggatgctcctcagatattaaaggtgttagctgattgtat

SEQ ID NO: 73023 - DNA, 120 bp, Artificial Sequence
  ENSG00000078114_67 (sequence is synthesized)
tttatctctaaagatttagaactttagaaaatgccgacttcttccatctatttctgaaaggttctttgtggatttatatagagttgagctatataaacattaactttagatttgggattt

SEQ ID NO: 73024 - DNA, 120 bp, Artificial Sequence
  ENSG00000078114_68 (sequence is synthesized)
aaaatgcctattgtaagatagaataattgtgaggctggattcactacacaagatgaacttcacttcataaattaattataccttagcgatttgcttctgataatctaaaagtggctagat

SEQ ID NO: 73025 - DNA, 120 bp, Artificial Sequence
  ENSG00000078114_69 (sequence is synthesized)
tgtggttgttttggttaaggtgatatggaggtgggagagcttttagttaagtaagaagctatgtaaactgacaaggatgctaaaataaaagtctctgaagtattccatgccttttggacc

SEQ ID NO: 73026 - DNA, 120 bp, Artificial Sequence
  ENSG00000078114_70 (sequence is synthesized)
ctttcctcgcaactaactgtcaactgttgatcaaaaaagtcaaggcattgtatgttgcttctgtggttattattctgtgatgcttagactacttgaacccataaacttggaagaatcttt

SEQ ID NO: 73027 - DNA, 120 bp, Artificial Sequence
  ENSG00000078114_71 (sequence is synthesized)
gagcaaattttctcagttgtctgtatgacttcagtatattcctgggaatgccataggattttttgtgcttgatacatggtatccagtttgcatagtatcacttctttgtaatccagttgc

SEQ ID NO: 73028 - DNA, 120 bp, Artificial Sequence
  ENSG00000078114_72 (sequence is synthesized)
tgttaagaatgatgtactttaaaggaaaagagaaaactgcatcacagtcccattctccagtgtccatgcaatgaattgctgagcatttaggaagcagcaccaagtctattacaggcatgg

SEQ ID NO: 73029 - DNA, 120 bp, Artificial Sequence
  ENSG00000078114_73 (sequence is synthesized)
tgtgaaacttgatgtttgacctgtgatcaaaattgaaccattgtacagtttggcttctgtttgcttcaaaatatgtagaattgtggttgatgattaatttgcgagactaactttgagagt

SEQ ID NO: 73030 - DNA, 120 bp, Artificial Sequence
  ENSG00000078114_74 (sequence is synthesized)
gtaacagttttgaagaaaacattgaatgttttgcaaatgaaggggcttcacggaatgttacaatgttactaatataatttggcttttgttatgcaaattgttaacaccagctattaaaat

SEQ ID NO: 73031 - DNA, 120 bp, Artificial Sequence
  ENSG00000078114_75 (sequence is synthesized)
atattttagtagaaatgctttaattcatatttttttcctctacactgtgaatctttaagccttggtggactagagcaacatcgtgctgcccaaaggactaacctatgcaaactagttcac

SEQ ID NO: 73032 - DNA, 120 bp, Artificial Sequence
  ENSG00000078114_76 (sequence is synthesized)
attttagtggatgtcgcagttaatgtgtaataagacattatttcccctgcataatgtacaacagcattgaaatgacacattaagcctagcatcacattgtatagtacagtcactcacaaa

SEQ ID NO: 73033 - DNA, 120 bp, Artificial Sequence
  ENSG00000078114_77 (sequence is synthesized)
cccttcaaggctaccctaatcattaacattaatatttgtttaaaagcaaatcaccgatttatctattgaaactacttaaatgacggcaaaccaggaatgacagatggctgtgtcagcaat

SEQ ID NO: 73034 - DNA, 120 bp, Artificial Sequence
  ENSG00000078114_78 (sequence is synthesized)
ggctttaatgtgttccctgcaagtggtctcctatgatagaactgcgttctcaaatgcactctcttcagggtcttaatattctgtgttttctctctgtatttgtaaaacattataacacat

SEQ ID NO: 73035 - DNA, 120 bp, Artificial Sequence
  ENSG00000078114_79 (sequence is synthesized)
taatttcctatctctacacatttggtttgcttaaataaatgcaggatataaaaaaaatggttcacttcttggctctcaccgtggtttcttggagcatgggttgttagatgcaagcaatgc

SEQ ID NO: 73036 - DNA, 120 bp, Artificial Sequence
  ENSG00000078114_80 (sequence is synthesized)
accctaataataccccgggtctgagatttaacatgacaactcacatcaaatcgcatcagaggtgtgtgctgccttcagtgcatttacattggtgaatcagtcaagatattttcctccccc

SEQ ID NO: 73037 - DNA, 120 bp, Artificial Sequence
  ENSG00000078114_81 (sequence is synthesized)
aaataaacttagttgtaagtgataacaatattatgcttctccaagctcagtatctttctgattttatatcaaagtaccgcaacaatgcatcattgtagttaatttatttcaagaataaat

SEQ ID NO: 73038 - DNA, 120 bp, Artificial Sequence
  ENSG00000078114_82 (sequence is synthesized)
tcctcatatgtcctcaatagtacaattctaattttcttctattcataagatgaaagaaatggtttggagcatagaatagaaagtgcacaaattgagtacataaaatgggaagcaactgat

SEQ ID NO: 73039 - DNA, 120 bp, Artificial Sequence
  ENSG00000078114_83 (sequence is synthesized)
ttctcagctaagaaaggctcatttatcacagaacacaattgcttttctccccccactacgcttcccataattgaaaaagtgagtccctatttttcacactcatataaatctatgcgattt

SEQ ID NO: 73040 - DNA, 120 bp, Artificial Sequence
  ENSG00000078114_84 (sequence is synthesized)
ggatgctagtcttattgtattattttgtaaaactttctctttggctcataatccttcctaattgtaaattgataaactttgcggatgacatctgctcgtagaataaacacttcttccaaa

SEQ ID NO: 73041 - DNA, 120 bp, Artificial Sequence
  ENSG00000078114_85 (sequence is synthesized)
ctatgagacatgttaaagaagcacaaaatcatatttcaatggtagggtccaaccagatcattcttaaaacatgctaaggaatgggcggatccagtgcacggatggcattacttcactatt

SEQ ID NO: 73042 - DNA, 120 bp, Artificial Sequence
  ENSG00000078114_86 (sequence is synthesized)
aatccgataactaacaaagcatggaaatgtggttggcttgtcttttgagggaggggcatttctaatcacactgaaatgcagtggaaacatttagtctaataaaatgatttttctcagtga

SEQ ID NO: 73043 - DNA, 120 bp, Artificial Sequence
  ENSG00000078114_87 (sequence is synthesized)
ggatgaccctcaggtggtagaactacctaagaaaacatcatttttgttctgggaactcttgttcaaatctcttttcaatggtcactgatatttgctaactttaaaattatgtggtcttat

SEQ ID NO: 73044 - DNA, 120 bp, Artificial Sequence
  ENSG00000078114_88 (sequence is synthesized)
gttctgatcctagtgcttcattgaatggctttgtaaatgagacacataatttttcatagccttcattttgtcatctgtgaaagagagggctttaggtgtattgatttcttaaggatccct

SEQ ID NO: 73045 - DNA, 120 bp, Artificial Sequence
  ENSG00000078114_89 (sequence is synthesized)
ttggcttgaaattctgattctagaatctcaaatggaaaatttgtgttcacattgcacgtggtgtttggtttttgttttcaaaagtttgtgcattaaatctcaacagcttattttcttgca

SEQ ID NO: 73046 - DNA, 120 bp, Artificial Sequence
  ENSG00000078114_90 (sequence is synthesized)
ttgaagaactgactcactgtgtcacccaggtgtggcaggggccagttacctgtttatatcacagactctggggccatgtactttgttgacgatcactgctttttatacctttctaatgtg

SEQ ID NO: 73047 - DNA, 120 bp, Artificial Sequence
  ENSG00000078114_91 (sequence is synthesized)
ttgggtaacgtctatgcatcttcaatcaggttagtttttgaggttcgcagtgttacagccttagggacacttattagaagctgctgaacttccccactgagaacgtgtgggctctgaagt

SEQ ID NO: 73048 - DNA, 120 bp, Artificial Sequence
  ENSG00000078114_92 (sequence is synthesized)
ttaatcataggatgttgccatactgcaatttcatacctgaacctagttgctatggaaaggagtcttgctcatttggtcttagctgagaccactgcagagattctgggcttaaacaggaaa

SEQ ID NO: 73049 - DNA, 120 bp, Artificial Sequence
  ENSG00000078114_93 (sequence is synthesized)
tcaaagaatggtttggagaatggaaccaaagacatgggtattcctggctggttagtagtaggtcgtttgtagtagaccgactgaagtagaccgggtacttccgactggttagtgctgtag

SEQ ID NO: 73050 - DNA, 120 bp, Artificial Sequence
  ENSG00000078114_94 (sequence is synthesized)
taggtggggattaaaaaaggtaagccttctttggaaggcttttgtgtaggcatgctgctagcctagaatagcaattagctagcatttatatcgcgctcaccgtgtgtcaagctctgttct

SEQ ID NO: 73051 - DNA, 120 bp, Artificial Sequence
  ENSG00000078114_95 (sequence is synthesized)
aagcactttatgcatactgatcatttaatctttacaacgaccctacgagttaggggacactattattacccccatgtggcgggtaatgaaattgcggccttgagaggatcaggctcagga

SEQ ID NO: 73052 - DNA, 120 bp, Artificial Sequence
  ENSG00000078114_96 (sequence is synthesized)
attatccttagcaaactaacacaggaacgtaaaaccaaatactgcataataatgagagctaaatgatgagaatacatggacacatagaggggaataacagacaccggagcctgttggacg

SEQ ID NO: 73053 - DNA, 120 bp, Artificial Sequence
  ENSG00000078114_97 (sequence is synthesized)
tgccggggtgatgaagtcatctgtacaacaaactcccataacacaagttcacctgtgtaacaaacctgcacatgtaccgctgaacttaaaagttttaaaagaaaatgaatttgagcaaca

SEQ ID NO: 73054 - DNA, 120 bp, Artificial Sequence
  ENSG00000078114_98 (sequence is synthesized)
tgcaattatatggatgaatcatatcattataacatgaaaaagtgaatatgtacatgcagcattaattcttttgtaaaatttaacaactgcaataataacgatgatgataaacggaatatc

SEQ ID NO: 73055 - DNA, 120 bp, Artificial Sequence
  ENSG00000078114_99 (sequence is synthesized)
tccagatttaataaaactatctaaaaatttaaaaaggaaaagttttacaccctctgcatttttggatgttccttttcacatttccttgttgaagggcatgaactgcgtgtccaggaaatt

SEQ ID NO: 73056 - DNA, 120 bp, Artificial Sequence
  ENSG00000078114_100 (sequence is synthesized)
tgggactgtgttgctgtaccttagctgtgtttgcttattcaagagatcttcattaagtacccaaatgtactgggcattgtcctggtcacccagacacaaagatgggtaaaatataaggga

SEQ ID NO: 73057 - DNA, 120 bp, Artificial Sequence
  ENSG00000078114_101 (sequence is synthesized)
aatattgcattttagataatatctttaattgcaagaataaacagagataatgtttctgaacccagttcagatgggcttgcaatcattatgaatttcagtaaaggaaaaaaattaagtcta

SEQ ID NO: 73058 - DNA, 120 bp, Artificial Sequence
  ENSG00000078114_102 (sequence is synthesized)
attttaagcataaaacaaagttttcttttctccaggcataaatctgaacatttttcaatgtctctagccatgttgtcacatttccctggatttccagaagtcattaatagtcatactaaa

SEQ ID NO: 73059 - DNA, 120 bp, Artificial Sequence
  ENSG00000078114_103 (sequence is synthesized)
cacacacacacacacacacacacagtttttaacttagtaataaaaatattaattttcccaattttcaagtgcttttgtttaatcacaaaatttaaaaagggagatgaaaatgaagaaaac

SEQ ID NO: 73060 - DNA, 120 bp, Artificial Sequence
  ENSG00000078114_104 (sequence is synthesized)
aagggagatgaaaatgaagaaaactttgaagtcttatcaaagagcataaaataagatctgaaaaagtataaaggcattttatgtttttggctgaaagtttcaatagataaagatgtcagt

SEQ ID NO: 73061 - DNA, 120 bp, Artificial Sequence
  ENSG00000078114_105 (sequence is synthesized)
tctttcagaattatataaacgtcatgcaacttctgttagactccaacagcgtttttttttttttttaatatagataaaatgatcttaaagtttgtgtggaaagaaaataccagggaatag

SEQ ID NO: 73062 - DNA, 120 bp, Artificial Sequence
  ENSG00000078114_106 (sequence is synthesized)
cctttaaaagtatgaaaatgaagaccagtgaaggggaacttaagttatgagttactataagttaatagaaaaccactgaaattaaatcaatatgggattggtgtagtgagagattaaata

SEQ ID NO: 73063 - DNA, 120 bp, Artificial Sequence
  ENSG00000078114_107 (sequence is synthesized)
atcagtaggatagaatagggagtcctgaaatagattccagtatgtataagaatttaatatatgataaaagtgtcgattcaagtcagtgggaagaagttggattagctaataaatggtgct

SEQ ID NO: 73064 - DNA, 120 bp, Artificial Sequence
  ENSG00000078114_108 (sequence is synthesized)
gtgacagagcaagaccctgtcttaaataaataaataagtctctttgttgaattgattcatagtattctattttttgttctctgaaatgataggtttattacagaggtcagctgggaagag

SEQ ID NO: 73065 - DNA, 120 bp, Artificial Sequence
  ENSG00000078124_0 (sequence is synthesized)
gtcgccagcctaacccggcacagtgagcggagcgcctgggcggcggcggcggcggcgtgatggctccggccgcggaccgagagggctactggggccccacgacctccacgctggactggt

SEQ ID NO: 73066 - DNA, 120 bp, Artificial Sequence
  ENSG00000078124_1 (sequence is synthesized)
gcgaggagaactactccgtgacctggtacatcgccgagttctggaatacagtgagtaacctgatcatgattatacctccaatgttcggtgcagttcagagtgttagagacggtctggaaa

SEQ ID NO: 73067 - DNA, 120 bp, Artificial Sequence
  ENSG00000078124_2 (sequence is synthesized)
agcggtacattgcttcttatttagcactcacagtggtaggaatgggatcctggtgcttccacatgactctgaaatatgaaatgcagctattggatgaactcccaatgatatacagctgtt

SEQ ID NO: 73068 - DNA, 120 bp, Artificial Sequence
  ENSG00000078124_3 (sequence is synthesized)
gcatatttgtgtactgcatgtttgaatgtttcaagatcaagaactcagtaaactaccatctgctttttaccttagttctattcagtttaatagtaaccacagtttaccttaaggtaaaag

SEQ ID NO: 73069 - DNA, 120 bp, Artificial Sequence
  ENSG00000078124_4 (sequence is synthesized)
agccgatattccatcaggtcatgtatggaatgttggtctttacattagtacttcgatctatttatattgttacatgggtttatccatggcttagaggactgggttatacatcattgggta

SEQ ID NO: 73070 - DNA, 120 bp, Artificial Sequence
  ENSG00000078124_5 (sequence is synthesized)
tatttttattgggatttttattttggaatatagataacatattttgtgagtcactgaggaactttcgaaagaaggtaccacctatcataggtattaccacacaatttcatgcatggtggc

SEQ ID NO: 73071 - DNA, 120 bp, Artificial Sequence
  ENSG00000078124_6 (sequence is synthesized)
atattttaactggccttggttcctatcttcacatccttttcagtttgtatacaagaacactttacctgagatataggccaaaagtgaagtttctctttggaatctggccagtgatcctgt

SEQ ID NO: 73072 - DNA, 120 bp, Artificial Sequence
  ENSG00000078124_7 (sequence is synthesized)
ttgagcctctcaggaagcattgatgaatcattccaccaagaaaacaaacaagcacctaccatagacctggcagaataaataaggaaatccttaaagatctacaagttcaaatatgtcatg

SEQ ID NO: 73073 - DNA, 120 bp, Artificial Sequence
  ENSG00000078124_8 (sequence is synthesized)
accatcacagcagaggagtgactttctgactaatgctgccacccacacagagaataaggagtagggcctgctgggtgtttagctcatggctttatcttatttgtccccctcctcctttca

SEQ ID NO: 73074 - DNA, 120 bp, Artificial Sequence
  ENSG00000078124_9 (sequence is synthesized)
cgctccagtttataaagaaacagagatgatgtgtgtgtatgcctcaaatgcagaaacagttgggcttttcttaacaggttaacagtttgtgctggttataagaaattaaccttcttttct

SEQ ID NO: 73075 - DNA, 120 bp, Artificial Sequence
  ENSG00000078124_10 (sequence is synthesized)
ttttgccaagggttgcatgtgaattatacctttcttaatatttgattaaataatgcagtcagctaagagccaacaaaaccccatatccagatagttagctgtgagccagcactcagctgt

SEQ ID NO: 73076 - DNA, 120 bp, Artificial Sequence
  ENSG00000078124_11 (sequence is synthesized)
gtcagatttgattaatattgtattaatctcatggatggttctcaaaggtaaaaaaagagagagaaagagagagagctagctgtgggattctgtgtagttcttcactatctgttccagggc

SEQ ID NO: 73077 - DNA, 120 bp, Artificial Sequence
  ENSG00000078124_12 (sequence is synthesized)
tagtcggaggatcataagcaagctcagacctgcccccagttcagtacttgaccacatcccaggatttatggtgtctgtctatggccacagccaaccagaatgagtgggtcatcttataac

SEQ ID NO: 73078 - DNA, 120 bp, Artificial Sequence
  ENSG00000078124_13 (sequence is synthesized)
ctttctgaagctccatgaggacatgtatagaatgctgcaccttcagccagctctgctctgatctttgcagatctttaagttgtcactgtttctacggctagacaaatatgactggtggtc

SEQ ID NO: 73079 - DNA, 120 bp, Artificial Sequence
  ENSG00000078124_14 (sequence is synthesized)
tagactacccatagttcatcctcctcacataacttatttgaagttgtcagggaatgtcattacactctgatttttaaaattatgcagtattttccagttctcagagaggtcatggttgtg

SEQ ID NO: 73080 - DNA, 120 bp, Artificial Sequence
  ENSG00000078124_15 (sequence is synthesized)
cccagggaagtgtgttgcattaactaaagctaaaattatcagaatcctatttacataaagcatattaaaatatctgctccttaattttctgaaggaaatagatgtaagtttctgctactt

SEQ ID NO: 73081 - DNA, 120 bp, Artificial Sequence
  ENSG00000078124_16 (sequence is synthesized)
gaaacctacagaaccgacaaaaattagggtgctaaaaaaatgacagtgaaatctcatcgtaaggcagctagttctaatttgcatttgaatgtataacaaattgcatcacttttcacaaac

SEQ ID NO: 73082 - DNA, 120 bp, Artificial Sequence
  ENSG00000078124_17 (sequence is synthesized)
ttaacacctgcctggagtaaaaatctgatttgacccctctgctcatgtttcatcatatttgtagctctgcatcatttagcatttttatgactttttttgctttatataaattattgtaaa

SEQ ID NO: 73083 - DNA, 120 bp, Artificial Sequence
  ENSG00000078124_18 (sequence is synthesized)
atccagattgtttttaccacatgatgacgtgactcaggattaaatcctgagctacagtttcaaaaggaaaatcatttttttcttatgcaaagatggtaaaacactgttgtcattttttcc

SEQ ID NO: 73084 - DNA, 120 bp, Artificial Sequence
  ENSG00000078124_19 (sequence is synthesized)
agtattcaataagtagcctttgtacaaatttaaaaccaaaaactattctgttgtttttcttcacctactagccttagtttttaaccaagtatccaaggatgtcaacttgacatccttccc

SEQ ID NO: 73085 - DNA, 120 bp, Artificial Sequence
  ENSG00000078124_20 (sequence is synthesized)
ttagcatgccaacaagccattagactgattcttccacctatttttatgaacctccaggaagaaaaacacttgccaaaacattaagagaactttgattctgccttaagagggtataaaact

SEQ ID NO: 73086 - DNA, 120 bp, Artificial Sequence
  ENSG00000078124_21 (sequence is synthesized)
aaaccatttgaaggcacagcccataagactatacttgattttgccccaagattctgacttctggctacatttcacctgcagttacctgggctatcggccgtgatacattttttaattcat

SEQ ID NO: 73087 - DNA, 120 bp, Artificial Sequence
  ENSG00000078124_22 (sequence is synthesized)
ttgttttccaccattatatttttatacttttcagttagatatacttctgcataaagagtatatatacagtgtaggataaaggcatatcgtacatggcaatgctgttaaacatggtaagac

SEQ ID NO: 73088 - DNA, 120 bp, Artificial Sequence
  ENSG00000078124_23 (sequence is synthesized)
tgaggttctgcaggattaaagtcagattaagggtacagaaagcacaccttgatactgaggccatttagagcaatttgtttaatgagtggttcagccatcaccaccagtggccacctgttc

SEQ ID NO: 73089 - DNA, 120 bp, Artificial Sequence
  ENSG00000078124_24 (sequence is synthesized)
aataaaattgcctagcaccacagtggagagtcatctacaccccaaggtgagctgtaagactggccaattctttgaagacctttttttctgttgggagaatggaaagcagaaagggaagcc

SEQ ID NO: 73090 - DNA, 120 bp, Artificial Sequence
  ENSG00000078124_25 (sequence is synthesized)
aggctctttaatgttccaagtcagctgtgcctcacacaaggctctctttttagctactaagtaacatactcaagactttgtatctgtgcagcattttatggaaatcactggtgacctata

SEQ ID NO: 73091 - DNA, 120 bp, Artificial Sequence
  ENSG00000078124_26 (sequence is synthesized)
ggatattactaaattatttcaatagctttatttttttcctacttggattctaggtggacattacagagttgaattcctcactaccccctcccgctgtcatttgttttattggaaaacttc

SEQ ID NO: 73092 - DNA, 120 bp, Artificial Sequence
  ENSG00000078124_27 (sequence is synthesized)
atgttaactagagtgtacaaaaagtctgtttcctgctgagccaatagtgatttgtttgcatatcacctaatgtgaaaagtgctcatctgtgaactctacagcaaattatattttagaaaa

SEQ ID NO: 73093 - DNA, 72 bp, Artificial Sequence
  ENSG00000078124_28 (sequence is synthesized)
ggatgtaaaagaagcaatttgcttgcacatctgaatatccttcttgtgcctccattttcactcttgaaaact

SEQ ID NO: 73094 - DNA, 120 bp, Artificial Sequence
  ENSG00000078124_29 (sequence is synthesized)
gaatatccttcttgtgcctccattttcactcttgaaaactgaaagcaatttgacttttatttttgtttttctaaagaacagctaggtgaaaggaggttaagctgattgtcactctgcctg

SEQ ID NO: 73095 - DNA, 120 bp, Artificial Sequence
  ENSG00000078124_30 (sequence is synthesized)
ccccaccatggtgtttcatgaaacatccccaccacctgaagtgatctttttaatccttgtgatagtaaatgcattgataattaacaggaaaaacatgtttttaaataatctacaaatgag

SEQ ID NO: 73096 - DNA, 120 bp, Artificial Sequence
  ENSG00000078124_31 (sequence is synthesized)
aacccaaatagtagtgttttgtttgacagaagtaaatcaaatattatggtttaaatataatgcaaaatttcaggacagttaatttggacttcccttaccctaagagggtttttcttataa

SEQ ID NO: 73097 - DNA, 120 bp, Artificial Sequence
  ENSG00000078124_32 (sequence is synthesized)
taaggagaagaggtgtggttcaaagaaaattaagagacaaaaccttcaggtacataatgcatgaaaatctttaaatgcctgcaaaaattaagttctgttataataccagccaattctgaa

SEQ ID NO: 73098 - DNA, 120 bp, Artificial Sequence
  ENSG00000078124_33 (sequence is synthesized)
ttagccaatgccctaaaagcatctaacaatttaaggttatcttatgagtcctatgaaaacaattatttgttgctaaatttgagttttagctaccaacgccatgtttacgtgacaagaaat

SEQ ID NO: 73099 - DNA, 120 bp, Artificial Sequence
  ENSG00000078124_34 (sequence is synthesized)
tgttttggccctgtggtttatgacgtgctgctggataagcatttatgtaaaactgagtatttcaaagagaaccatttacaattggaatttccacctgtgtggctgtttgcagacctacct

SEQ ID NO: 73100 - DNA, 120 bp, Artificial Sequence
  ENSG00000078124_35 (sequence is synthesized)
ctgtcttccattttgcatcctgtcagtgctataattagtttgatcactttgtcttgtttttcagtgtctacaattatagcttattcactatgttctaactatttaaaaataatgggccgg

SEQ ID NO: 73101 - DNA, 86 bp, Artificial Sequence
  ENSG00000078124_36 (sequence is synthesized)
tgatttaaagtagttaaacccctttatggaaggagctgcaaaatgaaaaaaaaaaaaaaaaggaatcatgtcatcttgacccagct

SEQ ID NO: 73102 - DNA, 120 bp, Artificial Sequence
  ENSG00000078124_37 (sequence is synthesized)
caaaatgaaaaaaaaaaaaaaaaggaatcatgtcatcttgacccagctgactggaaattttcaatactgtcttttaactgttgtactccagccagcctgggcaacagagtgagaccctgt

SEQ ID NO: 73103 - DNA, 120 bp, Artificial Sequence
  ENSG00000078124_38 (sequence is synthesized)
aaaaaaaaaaaaaaaagaattaggaaatacttgttaaaatatctaactacgtaattgctacatgggggagctgctggtgttgttgaggtccttgggagcattccactggacttcaccatt

SEQ ID NO: 73104 - DNA, 120 bp, Artificial Sequence
  ENSG00000078124_39 (sequence is synthesized)
tcaccatttctccaaaattatcagcccagtcagcttcatatacccagatatggacacttctacacgtgaaattcaaactgaagataaaactctgactttggagtataaacttttgccttg

SEQ ID NO: 73105 - DNA, 120 bp, Artificial Sequence
  ENSG00000078124_40 (sequence is synthesized)
agtatgaaaccttgacattgctgaaagaaaagtggaaactgtaagggacaacaagtttcaccaaggcacagtcttctctgataggccagcagagcagctaaggagaagacagatcattca

SEQ ID NO: 73106 - DNA, 120 bp, Artificial Sequence
  ENSG00000078124_41 (sequence is synthesized)
agaacttaagtcgtttgttagctacagcatttccattgctgtgatacacattcagccattttggaggaaagctaagcaggttctgaccacccattttcatgtactttaaataacaaatat

SEQ ID NO: 73107 - DNA, 120 bp, Artificial Sequence
  ENSG00000078124_42 (sequence is synthesized)
tatttctcaaggtcttcattttatcattaaattcagctaattactacctgatttcaaaggcagctagtgtagaagactggtcacaagaatttttttttaaatagaaaaccctaaaatgca

SEQ ID NO: 73108 - DNA, 120 bp, Artificial Sequence
  ENSG00000078124_43 (sequence is synthesized)
aatcaagaaattcagttacaggctgcaagtgacctaaaattcccctactctagctcagcagccatcagtcagtatagcatcagccacaggtcactgctctgcatacagttccttttcaac

SEQ ID NO: 73109 - DNA, 120 bp, Artificial Sequence
  ENSG00000078124_44 (sequence is synthesized)
ccttacaagacctgcttcattgctttaaaaatgtagtgttgatacttgaactgaatttagtcattggtaacttaaatattcacaaaattgtcataaagcttctgaaacatctggcaatgc

SEQ ID NO: 73110 - DNA, 120 bp, Artificial Sequence
  ENSG00000078124_45 (sequence is synthesized)
cagatctgtaatcatcacttttaaattgaatttgcagaattaactctaaagttgcagcaaccatatttattagagaaatctttaagcatatacatatggttccctataagcattcattca

SEQ ID NO: 73111 - DNA, 120 bp, Artificial Sequence
  ENSG00000078124_46 (sequence is synthesized)
gagatcatctgtgcctaaaagaaaatgataaaaatgtgtcataatatcaaaggggtctagatcaggggttggtaaactacaacccatgggccaaattcaggctgcgttgtatggcctgca

SEQ ID NO: 73112 - DNA, 120 bp, Artificial Sequence
  ENSG00000078124_47 (sequence is synthesized)
ggccaaattcaggctgcgttgtatggcctgcaaggtaagaatggttattttattttattttattctttatatatatatatatatatttatttatttttttgagacagagtctctctctgt

SEQ ID NO: 73113 - DNA, 87 bp, Artificial Sequence
  ENSG00000078124_48 (sequence is synthesized)
cctggaattacaggcgtgagctaccgtgcccagctggtttttacattttaaaaacgtttagagaaagaagaatatgcaacagaaact

SEQ ID NO: 73114 - DNA, 120 bp, Artificial Sequence
  ENSG00000078124_49 (sequence is synthesized)
ttaaaaacgtttagagaaagaagaatatgcaacagaaactgtatgtagcctgcaaagcctaaaatgtttactctctggcttgggagtttgtctcccctgctctagactgtcagcaagtgg

SEQ ID NO: 73115 - DNA, 120 bp, Artificial Sequence
  ENSG00000078124_50 (sequence is synthesized)
tacagtggtacagtacagtggtactgcccaactgcacttctctgcaaggtgattctagtgtgcacttgtcagaatgaaaatatgttattcatttaagacatctcatgtctttgaatgtaa

SEQ ID NO: 73116 - DNA, 120 bp, Artificial Sequence
  ENSG00000078124_51 (sequence is synthesized)
tcacatgatttgtatttaatatttacatgacctaattattttttcacgtcagtttttctagattggcaatagcctgttgcaaagtgcctaaacctttgagaaaaattactatgagcaagg

SEQ ID NO: 73117 - DNA, 120 bp, Artificial Sequence
  ENSG00000078124_52 (sequence is synthesized)
tccatgatttagttttcaatataaagggaattccattctatactgtaaaatccaaaaatgctagttgccctcagcttttgagttgacttccagaaagttgagatcttttgaccatttttt

SEQ ID NO: 73118 - DNA, 120 bp, Artificial Sequence
  ENSG00000078124_53 (sequence is synthesized)
ctcatgtcatataaaatgtgccacatggtagttgtcaagctgtggtagtcatgtacactttttttcttttttttaactttctaaaaggaaaagttcaaagtcctttccacagttagtctt

SEQ ID NO: 73119 - DNA, 120 bp, Artificial Sequence
  ENSG00000078124_54 (sequence is synthesized)
cgcttcttttggatttttctttttagagctaaattattcataccaatgaataagtgagtctgttctaagatataggggccattatctatttttgcttaatggactcatgtggcattgttc

SEQ ID NO: 73120 - DNA, 120 bp, Artificial Sequence
  ENSG00000078124_55 (sequence is synthesized)
actatcatgcctttccatacttgtaatatttctgagtcacttattaatgtgaccaacagataaactgttcaagctaatacagcatttcctaacttcatagttgtcgcagatgtttgttct

SEQ ID NO: 73121 - DNA, 120 bp, Artificial Sequence
  ENSG00000078124_56 (sequence is synthesized)
agtagcgattatttaataaacatacattgtactgaatcttactagcaactaactattttcaggtaatctcagtctgcttattcactttttccatttgatttgctaatgccacaatcattt

SEQ ID NO: 73122 - DNA, 120 bp, Artificial Sequence
  ENSG00000078124_57 (sequence is synthesized)
ttctagaaaatagtaggataatgtattttttcctgtctgctataatggagactatatttctgcattcattacctctcataggtgaaaatattaaattaaataatattgttttgaataaga

SEQ ID NO: 73123 - DNA, 120 bp, Artificial Sequence
  ENSG00000078124_58 (sequence is synthesized)
gacctggtacatcgccgagttctgttccttcctaccatcctccctgaagagcaacctcaagttagtgagcacacatcaggcttcttttttggtcttgggactctgggctggcagaggtga

SEQ ID NO: 73124 - DNA, 120 bp, Artificial Sequence
  ENSG00000078124_59 (sequence is synthesized)
ttccttcagaaatatttttggaagcattttattaagtagagaattttataaacatatagaaatagtagtgccctgaaatgaatttttactattgttgacatttaaaagatatatacagta

SEQ ID NO: 73125 - DNA, 120 bp, Artificial Sequence
  ENSG00000078124_60 (sequence is synthesized)
ctgcccctgagagctgaagattggccatgggtttatccatggcttagaggactgggttatacatcattgggtatatttttattgggatttttattttggaatatagataacatattttgt

SEQ ID NO: 73126 - DNA, 120 bp, Artificial Sequence
  ENSG00000078124_61 (sequence is synthesized)
tttaataaagttaagcagactcttaacttttcctcagaagttagcatgatttagtgatttaacacattttttaacattctattctttaaaatgtagtgaaggataataaatatttacatt

SEQ ID NO: 73127 - DNA, 120 bp, Artificial Sequence
  ENSG00000078124_62 (sequence is synthesized)
catttacagcatggtttactgaatattttgagtagatgctcaaaaaaaaaacagttgctgaacaaatgaagcatatactcatgttgtttttgcttcgtacatgcagaagcactatggtta

SEQ ID NO: 73128 - DNA, 120 bp, Artificial Sequence
  ENSG00000078124_63 (sequence is synthesized)
gaagtacttcagatttgagaaaagagcacataactatggctaaaagatgggatttgtaatctctggagttttttacttcaagtctgaggatccaaactgactaagtgaagtaaagaaata

SEQ ID NO: 73129 - DNA, 120 bp, Artificial Sequence
  ENSG00000078140_0 (sequence is synthesized)
gccattttggtggccgggcgcggaggtgattccacactgaggcgagcgcggcggccggggtggtagtggcagtgttcgtgtgctcaggtctgaatcgccgagggaggaggcggtggagga

SEQ ID NO: 73130 - DNA, 120 bp, Artificial Sequence
  ENSG00000078140_1 (sequence is synthesized)
agaggtggcggcggtggcggtggtcgtagcggtggcggaggaggcgggtacgaatcagctgcgggcggagacatggccaacatcgcggtgcagcgaatcaagcgggagttcaaggaggtg

SEQ ID NO: 73131 - DNA, 120 bp, Artificial Sequence
  ENSG00000078140_2 (sequence is synthesized)
ctgaagagcgaggagacgagcaaaaatcaaattaaagtagatcttgtagatgagaattttacagaattaagaggagaaatagcaggacctccagacacaccatatgaaggaggaagatac

SEQ ID NO: 73132 - DNA, 120 bp, Artificial Sequence
  ENSG00000078140_3 (sequence is synthesized)
caactagagataaaaataccagaaacatacccatttaatccccctaaggtccggtttatcactaaaatatggcatcctaatattagttccgtcacaggggctatttgtttggatatcctg

SEQ ID NO: 73133 - DNA, 120 bp, Artificial Sequence
  ENSG00000078140_4 (sequence is synthesized)
aaagatcaatgggcagctgcaatgactctccgcacggtattattgtcattgcaagcactattggcagctgcagagccagatgatccacaggatgctgtagtagcaaatcagtacaaacaa

SEQ ID NO: 73134 - DNA, 120 bp, Artificial Sequence
  ENSG00000078140_5 (sequence is synthesized)
aatcccgaaatgttcaaacagacagctcgactttgggcacatgtgtatgctggagcaccagtttctagtccagaatacaccaaaaaaatagaaaacctatgtgctatgggctttgatagg

SEQ ID NO: 73135 - DNA, 120 bp, Artificial Sequence
  ENSG00000078140_6 (sequence is synthesized)
aatgcagtaatagtggccttgtcttcaaaatcatgggatgtagagactgcaacagaattgcttctgagtaactgaggcatagagagctgctgatatagtcaagcttgcctcttcttgagg

SEQ ID NO: 73136 - DNA, 120 bp, Artificial Sequence
  ENSG00000078140_7 (sequence is synthesized)
agcaccaacatctgttatttttaggattctgcatagatttcttttaaactggcattcttgcctaatgatgttatctaggcaccattggagactgaaaaaaaaaaatccctgctctgtaaa

SEQ ID NO: 73137 - DNA, 120 bp, Artificial Sequence
  ENSG00000078140_8 (sequence is synthesized)
taaagctaattaaacgtctgtgtaaatttaaaaaggggaaatactttaattttttttcttaatagtgtaaaaattccctgagctaagctaaaaccatggaagaaacatgctactttagtg

SEQ ID NO: 73138 - DNA, 120 bp, Artificial Sequence
  ENSG00000078140_9 (sequence is synthesized)
tttagcagtgtaccaagactagcaagagtttgcttcaggattttgttgaataattaagataatattttgagtgtgtcagggccattcaaattgttggtgttgcatcacagctaccttaac

SEQ ID NO: 73139 - DNA, 120 bp, Artificial Sequence
  ENSG00000078140_10 (sequence is synthesized)
tgtttttaacatggatcctctgtgcctgtgaatttacttgcatgcttgtacttgacttcttaggatgggtagctgaaaagaccaccattttaagcatttgagaattcttaaatatgaaat

SEQ ID NO: 73140 - DNA, 120 bp, Artificial Sequence
  ENSG00000078140_11 (sequence is synthesized)
ttattcagaattgaagatggtgacctattcagagcctttttgtccttgtcaacagactgggacagtgtctgattcccccttcaccccccccacccccgccttgccacacacagctaatat

SEQ ID NO: 73141 - DNA, 120 bp, Artificial Sequence
  ENSG00000078140_12 (sequence is synthesized)
tctaatggtaaatttctctgtatcaggtggggaaatgtgctgaaggacagtatgtatcccttgcttcatttttaggtcgtaggtttggaatgtcttgtcccagttcttcaaacactctta

SEQ ID NO: 73142 - DNA, 120 bp, Artificial Sequence
  ENSG00000078140_13 (sequence is synthesized)
aatttttcttaagtaatgtaaaaatggaactgccaattttatttctcttgcaaaaatagtaaatacttgatgttacattattcccaggtttaatgaaagaacccaacttagtttttcagt

SEQ ID NO: 73143 - DNA, 120 bp, Artificial Sequence
  ENSG00000078140_14 (sequence is synthesized)
gaatttgacacctattttttagtgatgaaatttttctttgagaactggcaaggatgcagtcagctgtttgcagtttttagcctgattttggggtctatagagattgctttattggatact

SEQ ID NO: 73144 - DNA, 120 bp, Artificial Sequence
  ENSG00000078140_15 (sequence is synthesized)
tcaagtcattcttgcttgcacttcccctattgacacatgaaagctgtgttggtgttttattgtacatacttcagatgcacataggaatagaagtgtgttataaatctagctttctttatg

SEQ ID NO: 73145 - DNA, 120 bp, Artificial Sequence
  ENSG00000078140_16 (sequence is synthesized)
atgtttctgataatacgagaattgaaaactttaccttctcttgtacatagtcagactatttgtattaaatttacatttcattctaagttcaaaagtttgaaaattattagttttgcaaga

SEQ ID NO: 73146 - DNA, 120 bp, Artificial Sequence
  ENSG00000078140_17 (sequence is synthesized)
tcacacactaatgtaaccattttatgaaggttgaagtggatttatgcaggcagttctatatatagaaatacaattctttttaaatttttaggaccaatacaaaataacaaaaatgtaatg

SEQ ID NO: 73147 - DNA, 120 bp, Artificial Sequence
  ENSG00000078140_18 (sequence is synthesized)
gaatcagactgaattaaagtaaggctgtatattgaaagtcatattataaaaggtttgctttctttaagtgttatttatcttaaattataatcgttaaatgtttggaagataatttttgaa

SEQ ID NO: 73148 - DNA, 120 bp, Artificial Sequence
  ENSG00000078140_19 (sequence is synthesized)
tcataacgtcagcataacttcatttgacttctcaataatcttgatactagaagcaataaaagaaccattattaaatatattgtaatgttaaagatgtgaaggttcttccaaaaatttgta

SEQ ID NO: 73149 - DNA, 120 bp, Artificial Sequence
  ENSG00000078140_20 (sequence is synthesized)
aggctttcctaattaacagtaaactcttatagctgatattattacatactaaacacaagttgctgttttttccccatatgtttgcttacgcatgtctttatacaatcacctctttttatt

SEQ ID NO: 73150 - DNA, 120 bp, Artificial Sequence
  ENSG00000078140_21 (sequence is synthesized)
gtggatggtttttctccagtgttggttagaactactttttttaagtggagggcaacttggtagtattagtagaatttgggtttaaaaatatcagacacatctacccagtttattttttgc

SEQ ID NO: 73151 - DNA, 120 bp, Artificial Sequence
  ENSG00000078140_22 (sequence is synthesized)
ctgtattatcagggtatatttaattgtcctgtggttaaacaaaggtgagagagctcagaggtttctaaaggtcaagcattttacatatatacatacatacatgctcttggaggcagctat

SEQ ID NO: 73152 - DNA, 120 bp, Artificial Sequence
  ENSG00000078140_23 (sequence is synthesized)
atcctgctttgatttttatgcacatgagccctatagggttatatactcatctaactacacttcagcatccccagtgcccaagaaattggaaagtacaatatttggtttgagacattcttc

SEQ ID NO: 73153 - DNA, 120 bp, Artificial Sequence
  ENSG00000078140_24 (sequence is synthesized)
ataaaagattctttattataaaaatttacctcatttacatttaatgtgatgatcttttttttcctttctggtatatttcccactgtactgtttggtttttgttattctcttgtctgtggg

SEQ ID NO: 73154 - DNA, 120 bp, Artificial Sequence
  ENSG00000078140_25 (sequence is synthesized)
tagatttagttacccaaacatagaaactaaagcaattgcttttttcctctggtcttaaatatgtttggacaaaaagacactaaaaggtcaggcctaggggaaaagtaccctggtggaaat

SEQ ID NO: 73155 - DNA, 120 bp, Artificial Sequence
  ENSG00000078140_26 (sequence is synthesized)
tatttttgtaattcttaatatttttgagttggctccgtttgtcagttttaaaagcctcaaaaattatgttaaaaaaaaaatccagtgaaatcccatttagggcaggccgatttgttagaa

SEQ ID NO: 73156 - DNA, 120 bp, Artificial Sequence
  ENSG00000078140_27 (sequence is synthesized)
gtcactgatgctccagtaggcttttgttataatcaggcctgtttcctgagtatgtgcctcttttaaaagaagaaataattagctgtatagtatttcagtactgatgaatgaatgaatgaa

SEQ ID NO: 73157 - DNA, 120 bp, Artificial Sequence
  ENSG00000078140_28 (sequence is synthesized)
tgaatggcagttagtggacccaaataagtattcagtggtatataaatatttgaggaactaggtactgaattaggtgctctgagttggcaccccgaaatgtttggaatcacgactatgatt

SEQ ID NO: 73158 - DNA, 120 bp, Artificial Sequence
  ENSG00000078140_29 (sequence is synthesized)
tacttaaacacgtaacacattcaaggatatataaatggagtctaagtattttgcttttgaagagaataatctatgaaatggaagacttgattttttttttcattttttagaagtaataca

SEQ ID NO: 73159 - DNA, 120 bp, Artificial Sequence
  ENSG00000078140_30 (sequence is synthesized)
catttatgattgttggcacataaaactatgcaaaataattctttttaagtatctgtaagaaagaattggcagtttaaacggattttgcttatttatgcactacagaatgcagcatactgt

SEQ ID NO: 73160 - DNA, 120 bp, Artificial Sequence
  ENSG00000078140_31 (sequence is synthesized)
attactgttgaggctgcttaataagtttaccaatgtgaaaagcagatcttgggtataagtgtatgcctgatttgagcttttaaaactgtgcagtaggtgtatggtaatgttttacaatcc

SEQ ID NO: 73161 - DNA, 120 bp, Artificial Sequence
  ENSG00000078140_32 (sequence is synthesized)
tatgtagcaaaataggaaattatgaatttttgttgttattgttttaaagatttaagatggattggggtagggaacagctggagccaggtataccttctagtatgtagagggaaacaatgt

SEQ ID NO: 73162 - DNA, 120 bp, Artificial Sequence
  ENSG00000078140_33 (sequence is synthesized)
ttagataggaaaaaggaagccgtctgtttacagttaactttatttcatggacttctacaaaatgttgtattaatcactttttctagttcaaggaatttcaattccagggtacaaaccatt

SEQ ID NO: 73163 - DNA, 120 bp, Artificial Sequence
  ENSG00000078140_34 (sequence is synthesized)
gatttaaaaattacgtttccattctttttagtatcagtttaaagtaaatgcttaccatcagccagttgctgtcactgggaagaaggcaacttgaagtatttactgataaaatagccttta

SEQ ID NO: 73164 - DNA, 120 bp, Artificial Sequence
  ENSG00000078140_35 (sequence is synthesized)
ttcccaagtgtgacttttcttcagtgtctacatattatgtcacacgttctatttgcactgctgcaatatagatcaaagatcttgtggcataggggtaggggagtgttagtatctcccttg

SEQ ID NO: 73165 - DNA, 120 bp, Artificial Sequence
  ENSG00000078140_36 (sequence is synthesized)
tcccatttgttctgttactgcttcattggactgatacaccctcatgaacttgcaatcacctaaatggaagtcttgaatgtgtcaccttttgcttggttatttcaaccatgctgctatata

SEQ ID NO: 73166 - DNA, 120 bp, Artificial Sequence
  ENSG00000078140_37 (sequence is synthesized)
taatcaggtgtggcacagtttgtcagtttgattataggtgtgagtggatagaaatcattacactgtgctgttaacgatccttgtctgcttgctgttacctactttttacaggcatcataa

SEQ ID NO: 73167 - DNA, 120 bp, Artificial Sequence
  ENSG00000078140_38 (sequence is synthesized)
taaaagctagactatttctttggggggaaagagacttatttaatgtaatttaaaaaacttttccaatagaaaatgaaatattattgaaaataatatctattttttagctttcagcaattg

SEQ ID NO: 73168 - DNA, 120 bp, Artificial Sequence
  ENSG00000078140_39 (sequence is synthesized)
atggtgctttgttgtggtgtctgctggaagtctactgccattatagggaaccttgcttgttagcttctctagatctctattctaaacaatctgttagtgatgataaattctgtaggaggg

SEQ ID NO: 73169 - DNA, 120 bp, Artificial Sequence
  ENSG00000078140_40 (sequence is synthesized)
tctattctgagccgttaacttcctgtaaggggaaaatgggtgggttaccagaaataccattgaagcagggtgggctgtggggtggaaggttggggtatttgtcttgagaattaaaaacta

SEQ ID NO: 73170 - DNA, 120 bp, Artificial Sequence
  ENSG00000078140_41 (sequence is synthesized)
cgaaacacttttgtacacaactgattttttaaaaaataaacacatttttaaagatgttgaatttttccccccttattgggaattcttaaaaataaatgcatgcatgttttcccctgaaaa

SEQ ID NO: 73171 - DNA, 120 bp, Artificial Sequence
  ENSG00000078142_0 (sequence is synthesized)
atgttgtttttcctgtacctaagttcccgctgtaggtggtacctttgcagacggtgcgatgggggaagcagagaagtttcactacatctatagttgtgacctggatatcaacgtccagct

SEQ ID NO: 73172 - DNA, 120 bp, Artificial Sequence
  ENSG00000078142_1 (sequence is synthesized)
taagataggaagcttggaagggaagagagaacaaaagagttataaagctgtcctggaagacccaatgttgaagttctcaggactatatcaagagacatgctctgatctttatgttacttg

SEQ ID NO: 73173 - DNA, 120 bp, Artificial Sequence
  ENSG00000078142_2 (sequence is synthesized)
tcaagtttttgcagaagggaagcctttggccttgccagtgagaacatcctacaaagcatttagtacaagatggaactggaatgaatggctgaaactaccagtaaaataccctgacctgcc

SEQ ID NO: 73174 - DNA, 120 bp, Artificial Sequence
  ENSG00000078142_3 (sequence is synthesized)
caggaatgcccaagtggccctcaccatatgggatgtgtatggtcccggaaaagcagtgcctgtaggaggaacaacggtttcgctctttggaaaatacggcatgtttcgccaagggatgca

SEQ ID NO: 73175 - DNA, 120 bp, Artificial Sequence
  ENSG00000078142_4 (sequence is synthesized)
tgacttgaaagtctggcctaatgtagaagcagatggatcagaacccacaaaaactcctggcagaacaagtagcactctctcagaagatcagatgagccgtcttgccaagctcaccaaagc

SEQ ID NO: 73176 - DNA, 120 bp, Artificial Sequence
  ENSG00000078142_5 (sequence is synthesized)
tcatcgacaaggacacatggtgaaagtagattggctggatagattgacatttagagaaatagaaatgataaatgagagtgaaaaacgaagttctaatttcatgtacctgatggttgaatt

SEQ ID NO: 73177 - DNA, 120 bp, Artificial Sequence
  ENSG00000078142_6 (sequence is synthesized)
tcgatgtgtcaagtgtgatgataaggaatatggtattgtttattatgaaaaggacggtgatgaatcatctccaattttaacaagttttgaattagtgaaagttcctgacccccagatgtc

SEQ ID NO: 73178 - DNA, 120 bp, Artificial Sequence
  ENSG00000078142_7 (sequence is synthesized)
tatggagaatttagttgagagcaaacaccacaagcttgcccggagtttaagaagtggaccttctgaccacgatctgaaacccaatgctgccacgagagatcagttaaatattattgtgag

SEQ ID NO: 73179 - DNA, 120 bp, Artificial Sequence
  ENSG00000078142_8 (sequence is synthesized)
ttatccaccaaccaagcaacttacatatgaagaacaagatcttgtttggaagtttagatattatcttacgaatcaagaaaaagccttgacaaaattcttgaaatgtgttaattgggatct

SEQ ID NO: 73180 - DNA, 120 bp, Artificial Sequence
  ENSG00000078142_9 (sequence is synthesized)
acctcaagaggccaaacaggccttggaacttctgggaaaatggaagccgatggatgtagaggactccttggagctgttatcctctcattacaccaacccaactgtgaggcgttatgctgt

SEQ ID NO: 73181 - DNA, 120 bp, Artificial Sequence
  ENSG00000078142_10 (sequence is synthesized)
tgcccggttgcgacaggccgatgatgaggatttgttgatgtacctattacaattggtccaggctctcaaatatgaaaattttgatgatataaagaatggattggaacctaccaagaagga

SEQ ID NO: 73182 - DNA, 120 bp, Artificial Sequence
  ENSG00000078142_11 (sequence is synthesized)
tagtcagagttcagtgtcagaaaatgtgtcaaattctggaataaattctgcagaaatagatagctcccaaattataaccagcccccttccttcagtctcttcacctcctcctgcatcaaa

SEQ ID NO: 73183 - DNA, 120 bp, Artificial Sequence
  ENSG00000078142_12 (sequence is synthesized)
aacaaaagaagttccagatggcgaaaatctggaacaagatctctgtaccttcttgatatcgagagcctgcaaaaactcaacactggctaattatttatactggtatgtgatagtggaatg

SEQ ID NO: 73184 - DNA, 120 bp, Artificial Sequence
  ENSG00000078142_13 (sequence is synthesized)
tgaagatcaagatactcagcagagagatccaaagacccatgagatgtacttgaacgtaatgagaagattcagccaagcattgttgaagggtgataagtctgtcagagttatgcgttcttt

SEQ ID NO: 73185 - DNA, 120 bp, Artificial Sequence
  ENSG00000078142_14 (sequence is synthesized)
gctggctgcacaacagacatttgtagatcggttggtgcatctaatgaaggcagtacaacgcgaaagtggaaatcgtaagaaaaagaatgagagactacaggcattgcttggagataatga

SEQ ID NO: 73186 - DNA, 120 bp, Artificial Sequence
  ENSG00000078142_15 (sequence is synthesized)
aaagatgaatttgtcagatgtggaacttatcccgttgcctttagaaccccaagtgaaaattagaggaataattccggaaacagctacactgtttaaaagtgcccttatgcctgcacagtt

SEQ ID NO: 73187 - DNA, 120 bp, Artificial Sequence
  ENSG00000078142_16 (sequence is synthesized)
gttttttaagacggaagatggaggcaaatatccagttatatttaagcatggagatgatttacgtcaagatcaacttattcttcaaatcatttcactcatggacaagctgttacggaaaga

SEQ ID NO: 73188 - DNA, 120 bp, Artificial Sequence
  ENSG00000078142_17 (sequence is synthesized)
aaatctggacttgaaattgacaccttataaggtgttagccaccagtacaaaacatggcttcatgcagtttatccagtcagttcctgtggctgaagttcttgatacagagggaagcattca

SEQ ID NO: 73189 - DNA, 120 bp, Artificial Sequence
  ENSG00000078142_18 (sequence is synthesized)
gaacttttttagaaaatatgcaccaagtgagaatgggccaaatgggattagtgctgaggtcatggacacttacgttaaaagctgtgctggatattgcgtgatcacctatatacttggagt

SEQ ID NO: 73190 - DNA, 120 bp, Artificial Sequence
  ENSG00000078142_19 (sequence is synthesized)
tggagacaggcacctggataaccttttgctaacaaaaacaggcaaactcttccacatagactttggatatattttgggtcgggatccaaagcctcttcctccaccaatgaagctgaataa

SEQ ID NO: 73191 - DNA, 120 bp, Artificial Sequence
  ENSG00000078142_20 (sequence is synthesized)
agaaatggtagaaggaatggggggcacacagagtgagcagtaccaagagttccgtaaacagtgttacacggctttcctccacctgcgaaggtattctaatctgattttgaacttgttttc

SEQ ID NO: 73192 - DNA, 120 bp, Artificial Sequence
  ENSG00000078142_21 (sequence is synthesized)
cttgatggttgatgcaaacattccagatattgcacttgaaccagataaaactgtgaaaaaggttcaggataaattccgcttagacctgtcggatgaagaggctgtgcattacatgcagag

SEQ ID NO: 73193 - DNA, 120 bp, Artificial Sequence
  ENSG00000078142_22 (sequence is synthesized)
tctgattgatgagagtgtccatgctctttttgctgcagtggtggaacagattcacaagtttgcccagtactggagaaaatgaaactgggattgacccatcaagatgcttggctcaataag

SEQ ID NO: 73194 - DNA, 120 bp, Artificial Sequence
  ENSG00000078142_23 (sequence is synthesized)
aaaaccacgttaggagcaacctttgtatattggagacttcagagtaaccagcaaggaagagaaatcttaatcttcaagttaccatattttccaaatattacatggtacctgagttctgct

SEQ ID NO: 73195 - DNA, 120 bp, Artificial Sequence
  ENSG00000078142_24 (sequence is synthesized)
tccttggatgtcattgcttaaatatagtcttgaagggcttgttttgaaatattgtatatattttttcaaatgtatacattgttaataaattaagaaatgagaaacattcttatttatgta

SEQ ID NO: 73196 - DNA, 120 bp, Artificial Sequence
  ENSG00000078142_25 (sequence is synthesized)
catgttatgagagttctggaggaagtaatatgttgaaatagtaaaacattttagtttttgagtttaaaatgttattttttcctcttatatcttcatatcaggacagcagtaacctgaatt

SEQ ID NO: 73197 - DNA, 120 bp, Artificial Sequence
  ENSG00000078142_26 (sequence is synthesized)
tagattgtcacagtttacaagtttttgtttgttccttctttcctctctcttctcccactcacttttgtgtgttgtttgtttttgcctaatttacatgtttaaagttctacttaaaatttt

SEQ ID NO: 73198 - DNA, 120 bp, Artificial Sequence
  ENSG00000078142_27 (sequence is synthesized)
tcttcaagttttacatgtgatggctcattcttctgcagttcaagaattgcttatatttttagaagatactcattttctcttacaaataattaattttttgtaaactacagttaatagttc

SEQ ID NO: 73199 - DNA, 120 bp, Artificial Sequence
  ENSG00000078142_28 (sequence is synthesized)
ttctagcttgtaagtgtgtaaagtagaatatgaaaatgtggctatttagataactggccaaaaggtcatatgaccaccagttttagtattgagcataagatatttttacatattcatgta

SEQ ID NO: 73200 - DNA, 120 bp, Artificial Sequence
  ENSG00000078142_29 (sequence is synthesized)
agacaatgtaaattgtctttctgcaataaattttttggatgcaaatttagatttcaaaagctttttgatgttataaaggagttgaggaacaaaaagctctttgaaatagctcacctagac

SEQ ID NO: 73201 - DNA, 120 bp, Artificial Sequence
  ENSG00000078142_30 (sequence is synthesized)
ctgttaatgtaatatattctttctgaattaagcaaaattttttttgtcttttaagactagaactaatccctctagcttttttactggaactttggggaaaaagaacaaatacaaatatac

SEQ ID NO: 73202 - DNA, 120 bp, Artificial Sequence
  ENSG00000078142_31 (sequence is synthesized)
aaatgatatgaacaatatggtaataatcttttgcaacttaatatgttacatagtcatatgacttggtcttggaagaaaaagaattgttttggtgctgaataaatattagaaatcaagtga

SEQ ID NO: 73203 - DNA, 120 bp, Artificial Sequence
  ENSG00000078142_32 (sequence is synthesized)
cagagaagatgaaggtaaaattgtggcacagtttcagagaatgccgttaatgataacgtgttatttgtctcaaattcttagccctgggcttgcctcttcagagtggggttaccggcgaga

SEQ ID NO: 73204 - DNA, 120 bp, Artificial Sequence
  ENSG00000078142_33 (sequence is synthesized)
gggcaagcatgtaattaagagacactctagaggcatatggaatatagtttgtataaaacatacctgctgattagaaaaatggtaaaaatgaaaatacctttgtacatcatcttaagagag

SEQ ID NO: 73205 - DNA, 120 bp, Artificial Sequence
  ENSG00000078142_34 (sequence is synthesized)
cttatatataaactaaatgggcaggctccatcgtctacctttctttttcttttcttcacatgtttatgtcttttttgttattagtcagacatttttagccctctgtatgctcattcttgt

SEQ ID NO: 73206 - DNA, 120 bp, Artificial Sequence
  ENSG00000078142_35 (sequence is synthesized)
agttctatttctattgaaacttcctccaaaacttttctctgaattacccttgttgaaactgacctttcttccgtgtgaactcctacacttgcatctcctatttcaggatttggcatactt

SEQ ID NO: 73207 - DNA, 120 bp, Artificial Sequence
  ENSG00000078142_36 (sequence is synthesized)
tttctttaatgggctaagaaagtaaatatcttcagctttggggggcatatgatcccaatagcatcaacttaactctgctaactggaaggcaaaagtgtatcatcttactcgtctttataa

SEQ ID NO: 73208 - DNA, 120 bp, Artificial Sequence
  ENSG00000078142_37 (sequence is synthesized)
actccacagcactctgcatagatatgaccatgtttataaggaactcaataaataattttgacacaaacatgaaattctagaagggcagacactgacaactagtaaggaagttgatcatga

SEQ ID NO: 73209 - DNA, 120 bp, Artificial Sequence
  ENSG00000078142_38 (sequence is synthesized)
gtaactttgtattcagtgccaccttaacaagaattgtaaagaggataaacctttctaggaaggttgatgcgtgttgggtgaggaaggagcatctctcaggagggtaaacagtagctgtgg

SEQ ID NO: 73210 - DNA, 120 bp, Artificial Sequence
  ENSG00000078142_39 (sequence is synthesized)
cttatcaatctcagtttttattgctcaaagcaattctttactcctattttttccaaattccattgtttttactctttagagctctatcctcagagtgtagtctgcatatttctttattat

SEQ ID NO: 73211 - DNA, 120 bp, Artificial Sequence
  ENSG00000078142_40 (sequence is synthesized)
cattgccatgtgacttctttggtgacaagttcagtgatatttcaagcatgatgttttgagtttgagaaatgtatttgtgaggacacatcactttaattaaaaaagtgtgagtactatggt

SEQ ID NO: 73212 - DNA, 120 bp, Artificial Sequence
  ENSG00000078142_41 (sequence is synthesized)
cattaagttattcagagtgagatttctgagaggagaagagagaatgtagatggcagttattgagagtggggctataggacaaaaagaagaaaagtatggttaacattgccaaataaaggg

SEQ ID NO: 73213 - DNA, 120 bp, Artificial Sequence
  ENSG00000078142_42 (sequence is synthesized)
tcatacagccttgctttttgctggagttagcaaaaatcattctccatatgatagttttagatgttccccagctcatttgtattattgagttttcagctgggtatatattataataacagt

SEQ ID NO: 73214 - DNA, 120 bp, Artificial Sequence
  ENSG00000078142_43 (sequence is synthesized)
caacatgatgtaggggctcagtattacatggcagggctatactaattgcttcatatgccttatctcattattctgtgagatagaattgtctcctcattttttagttgaaataactgaagt

SEQ ID NO: 73215 - DNA, 120 bp, Artificial Sequence
  ENSG00000078142_44 (sequence is synthesized)
ttaaagcaattgaatcatctgcccaaggataagctgctggtgagagcagagttgggatttgaagtcgagttagaccccagtgatcacagtcttgacgattaaattcttccagctttcatt

SEQ ID NO: 73216 - DNA, 120 bp, Artificial Sequence
  ENSG00000078142_45 (sequence is synthesized)
tttcactgagataatggtagtgatagtactgacctctaatgtgtgcatttgtgggtatgtggtccattcagctttaatccccagaagacaaggcttattccttttcttatttttggtcat

SEQ ID NO: 73217 - DNA, 120 bp, Artificial Sequence
  ENSG00000078142_46 (sequence is synthesized)
gttttatttttccattgcttttaacaggattaccaaaggcacactcagtagtcagtaaacacatttctaggaaaggtgttgtgtcatcatgccacatattcatactttccttgggttgga

SEQ ID NO: 73218 - DNA, 120 bp, Artificial Sequence
  ENSG00000078142_47 (sequence is synthesized)
aaatagatcattcagtaaaaacatacaggaaaaatgaatcttgccaatgcaattgttaacctacaaccataatataccttaagtatatttttgcacataagtataacattgcgatttaaa

SEQ ID NO: 73219 - DNA, 120 bp, Artificial Sequence
  ENSG00000078142_48 (sequence is synthesized)
acaataaaccagattgagattctaaggagcattttgtaagtaattactaatgtttattttagagagatcacacaacttcaaataaaaactgacatagattgaacaccttgagaataaact

SEQ ID NO: 73220 - DNA, 120 bp, Artificial Sequence
  ENSG00000078142_49 (sequence is synthesized)
ttagtgccaaatggaaaataattttttacaagtaaatttgaagaacaatgtgaactttctataattatatacagaaaatatactgatttgccaaaatgagtaattttgatatattaatat

SEQ ID NO: 73221 - DNA, 120 bp, Artificial Sequence
  ENSG00000078142_50 (sequence is synthesized)
ttcacttataagaatgcataccacctgatccaggatgggatccaggaacagaaaaagaacattaggtaaaaatgacagaaatctgaatatagtatagagtagctaaaaacaaaccaaaaa

SEQ ID NO: 73222 - DNA, 120 bp, Artificial Sequence
  ENSG00000078142_51 (sequence is synthesized)
aaaaaaaaaaaaggaaaaacagaataagcctcagaagatagtgagcatcccacctgggtgaccacttagagaagctgaggtgggacccctgcatccgataagtggctgcactagaccaca

SEQ ID NO: 73223 - DNA, 120 bp, Artificial Sequence
  ENSG00000078142_52 (sequence is synthesized)
cacaggaaccagactccactgtaagaactagagtgggaatggacatgtcaaaacctcctgggaaccttattaaatgtgcacattcccaatccccactcctgagcagccaaatcaatctgc

SEQ ID NO: 73224 - DNA, 120 bp, Artificial Sequence
  ENSG00000078142_53 (sequence is synthesized)
aggtgggccttgtgagttttcccaggggattccgatgcctgctagatttaaccagtagatgagatgttaagttatcctgtagtccagagattccacaggccagtgtcagggaacaggggc

SEQ ID NO: 73225 - DNA, 120 bp, Artificial Sequence
  ENSG00000078142_54 (sequence is synthesized)
cagggctgggaaggcataagaacagaagataaatttgaggctctgttacgctggtcatccaacccaaccaggtatctcttgttatatgctaacttcattttccctttcttgtccatagtg

SEQ ID NO: 73226 - DNA, 120 bp, Artificial Sequence
  ENSG00000078142_55 (sequence is synthesized)
ggaaaaaataatttttaactggctatgtagttaaaaaacctaacaaaaagcacttttctatataatgagtggtttatattaagaataggtacaatgtaaatactggtaagtgaaagttca

SEQ ID NO: 73227 - DNA, 120 bp, Artificial Sequence
  ENSG00000078142_56 (sequence is synthesized)
ttttgttcagtgctatgggctggtacattgcatttcaacactagttttttacttttatctaccctgagggtagataacccatattccaaaatacagtattattttcatttgctgtaacat

SEQ ID NO: 73228 - DNA, 120 bp, Artificial Sequence
  ENSG00000078142_57 (sequence is synthesized)
tttaagaaatatgtagtttctaaaacttcatatactttatatggaatatgaacaactttaatatgaataaatagtctagaaaaaaatttaggaaaaattgccatgaaatcatgagctaag

SEQ ID NO: 73229 - DNA, 120 bp, Artificial Sequence
  ENSG00000078142_58 (sequence is synthesized)
tcaatggttattttaaaccacttaattttgagactagtatttcatacagaaaaagctaatactgatatcacacactaattgtgtataaaacactaggaatgtcaaaatagaacataagaa

SEQ ID NO: 73230 - DNA, 120 bp, Artificial Sequence
  ENSG00000078142_59 (sequence is synthesized)
aatgagtctagtggacccactgcatagtgtaactttgggatgaatttaaaagaatatttaagtcacagtcaattttctgttggtctaattttaccaaataaccccctaaataagaagtct

SEQ ID NO: 73231 - DNA, 120 bp, Artificial Sequence
  ENSG00000078142_60 (sequence is synthesized)
gatttatctaaaatagaagttaacatagcatcccagtattgccattctaaaactctggcatgtaaatgggagaaatggaaataagctcaaaatgggtagagtaacccatttctgcatgaa

SEQ ID NO: 73232 - DNA, 64 bp, Artificial Sequence
  ENSG00000078142_61 (sequence is synthesized)
ataagctcaaaatgggtagagtaacccatttctgcatgaaccatagaatttaactagaatttgg

SEQ ID NO: 73233 - DNA, 120 bp, Artificial Sequence
  ENSG00000078142_62 (sequence is synthesized)
ctccatctcttcaaaaatatatatttgtgtgtgtgtgtgtgtgtatgtgcgtgcacaaaaattagctgagtgtggtggttcacacttgtaatcacagctacctgggaggctgaggcagga

SEQ ID NO: 73234 - DNA, 120 bp, Artificial Sequence
  ENSG00000078142_63 (sequence is synthesized)
agattgcaccattgcactgcagcctgggtaatagagcgagacaactctatctcaaaaaaaagaatttcactagaatttatatcttcagtgtttgcattagattgtcaccagcactatctg

SEQ ID NO: 73235 - DNA, 120 bp, Artificial Sequence
  ENSG00000078142_64 (sequence is synthesized)
atcttcagtgtttgcattagattgtcaccagcactatctgccttgtgactgtcaggactaatccttatatcatttatcttatgtcctttacctcagtttatgtctgtcaccacaagaaac

SEQ ID NO: 73236 - DNA, 120 bp, Artificial Sequence
  ENSG00000078142_65 (sequence is synthesized)
ccagacctccctaatcataccatatgccctggtcttacccacatacagctcggtacaactgcatttccccaaacctcagaactccttgggccatcactgtcagagacatttgaactagag

SEQ ID NO: 73237 - DNA, 120 bp, Artificial Sequence
  ENSG00000078142_66 (sequence is synthesized)
atcactgtcagagacatttgaactagagcaactccatcttgagtagggactgggtataatgaagctgagacccactgggctgcattcccaggaagttaggcattcttagtcacaggatga

SEQ ID NO: 73238 - DNA, 120 bp, Artificial Sequence
  ENSG00000078142_67 (sequence is synthesized)
agccagccaaaacccaccaaaaccaagacgggaatgaaagtgacctccggtcatcctcactgctcattatacgctagttataatgcattgacatgctaagagacactcccaccagcacca

SEQ ID NO: 73239 - DNA, 79 bp, Artificial Sequence
  ENSG00000078142_68 (sequence is synthesized)
ctccggtcatcctcactgctcattatacgctagttataatgcattgacatgctaaaacaacatcaggaagttaccctat

SEQ ID NO: 73240 - DNA, 120 bp, Artificial Sequence
  ENSG00000078142_69 (sequence is synthesized)
ttgtttagcatatgatcaagaaataatcattaaaaaatagccaaccagcagctcatgctgctggtctgcctatggagtagccatcctttctttattaacctgctttcactttatggactc

SEQ ID NO: 73241 - DNA, 120 bp, Artificial Sequence
  ENSG00000078142_70 (sequence is synthesized)
tattaacctgctttcactttatggactcccctgaattcttctgcaggagatccaagaaccctctcttggagtcttaaccaggatccctttccagtaacttcagcaggatctgtgagtgcc

SEQ ID NO: 73242 - DNA, 120 bp, Artificial Sequence
  ENSG00000078142_71 (sequence is synthesized)
agtttccttctgtggtgcaaaactaggtgctaagtacactttttcccccctttcctctatttttaaaagaactttcagcccttttgaagtgggtacattgtctggagtacataccctggg

SEQ ID NO: 73243 - DNA, 120 bp, Artificial Sequence
  ENSG00000078142_72 (sequence is synthesized)
gttcattgttataggagaatttaggacacagacacacgaggagtttaggagcagaggtttaataggtagaagagaagggaaagagaaacagcttcctctatagatgtctgcactgacacc

SEQ ID NO: 73244 - DNA, 120 bp, Artificial Sequence
  ENSG00000078142_73 (sequence is synthesized)
gtggctttaaggcatggcccatgatgtgtctccgagtggaaaagactggttggtggtgaatgcgccaaattttatagtccggtttgaggaggtggtttctgattggttgcatcatgtatg

SEQ ID NO: 73245 - DNA, 120 bp, Artificial Sequence
  ENSG00000078142_74 (sequence is synthesized)
acgtttgcaaggtgcatgtggaaggctggtcgccccaccctaatcttatgcaaatgggctttccagttgattgggtccatcttgtgtaacacgtggctggcagagaagggaagatgaagc

SEQ ID NO: 73246 - DNA, 120 bp, Artificial Sequence
  ENSG00000078142_75 (sequence is synthesized)
caccatcttgaaaatgtctagtccttagtttctgctggcattcacccatgcaagctgccagcttgtctatgtctgcagctcaactttacaggctgctctttgttagcaaatgatttggag

SEQ ID NO: 73247 - DNA, 120 bp, Artificial Sequence
  ENSG00000078142_76 (sequence is synthesized)
cttcttttcattaaagaaaaaagccttaccgaggactcccatacccttgctttctgcttaagtgatttcttcttaactcctatgtcaattttatacagcatgaaataatgatgtatctat

SEQ ID NO: 73248 - DNA, 120 bp, Artificial Sequence
  ENSG00000078142_77 (sequence is synthesized)
aaatgagcctttgcaagattaccatttatcaaagaaaaccagtgatgtttagttaactgtttgtaaaaataaatggttagtagaatgtctaattcaataaatgtttcataaatgagtaaa

SEQ ID NO: 73249 - DNA, 120 bp, Artificial Sequence
  ENSG00000078142_78 (sequence is synthesized)
cttcacatgttaggaacattaagccatcatgtaagaagtccagctattctgttggagtgaccaagttgaaaaaccacttggagagggagcagcactgagaatacgtggggaaagagaggc

SEQ ID NO: 73250 - DNA, 120 bp, Artificial Sequence
  ENSG00000078142_79 (sequence is synthesized)
cctaccaccctggtatcccggctaagcccaccctttatcaccaaggtgttagaaatctcaccaaagctcatcgacaaggacacatggtgaaagtagattggctggatagattgacattta

SEQ ID NO: 73251 - DNA, 120 bp, Artificial Sequence
  ENSG00000078142_80 (sequence is synthesized)
tttcactacatctatagttgtgacctggatatcaacgtccagcttaagattttttgcagaagggaagcctttggccttgccagtgagaacatcctacaaagcatttagtacaagatggaa

SEQ ID NO: 73252 - DNA, 120 bp, Artificial Sequence
  ENSG00000078142_81 (sequence is synthesized)
agttttgatgcaagtgacttttgtaatttaacagaattctacaagattttctcttttaaatagtactttgagtttcaagtgacagacatgaagattgcatatttgagaattcagatgaga

SEQ ID NO: 73253 - DNA, 120 bp, Artificial Sequence
  ENSG00000078142_82 (sequence is synthesized)
aaccagagacattagaaaacaaattgatattaaagttgcacaaactgcttttatattcagtagaatgtataacctggtttgcatttgttttcacatattttttttaactgttactgcagc

SEQ ID NO: 73254 - DNA, 120 bp, Artificial Sequence
  ENSG00000078142_83 (sequence is synthesized)
ctgactgatgtctattgtagtatatataccttgacattatgaactctgtcagatttttaaaaaatctaaatcttaacttttaaataattgttttattgagatataattcacataccataa

SEQ ID NO: 73255 - DNA, 120 bp, Artificial Sequence
  ENSG00000078142_84 (sequence is synthesized)
attaacagtcactcccattttctgctccctgcagttagttccaggcaagtactaatctacttactatctgtatggatttgcctgttctggaaatttcatataaatggaatcattcagtat

SEQ ID NO: 73256 - DNA, 120 bp, Artificial Sequence
  ENSG00000078142_85 (sequence is synthesized)
gtgaccttatgtctggaaatctgtcaggtttgaaaatgtggagcgttggtgatattttcaagatgaccacccactttttctggtgacatagccttaaagttgttagtgtaacattctaga

SEQ ID NO: 73257 - DNA, 120 bp, Artificial Sequence
  ENSG00000078142_86 (sequence is synthesized)
gaagcttatgccacttggaagtgaagatgactcagacaattaactagtataaagtttctttgtaagcaaatgaagttattacctttttctttcaaaattgttttaatcaagtgttttcac

SEQ ID NO: 73258 - DNA, 120 bp, Artificial Sequence
  ENSG00000078142_87 (sequence is synthesized)
ttagaaatataaaaactaaattctattccgtgcattaattgcaacgctgtcatttattttgtgaacttcctttcacaaagcactgtgttagatactgtttaaggatccctttacagttat

SEQ ID NO: 73259 - DNA, 120 bp, Artificial Sequence
  ENSG00000078142_88 (sequence is synthesized)
ctgattaggacactttcttgtagttataatacatactttttttttgcaatcttattagtaggagtgcctctttaatgtctggaggaagttttgttgctaagcttttaacagcttgttgcc

SEQ ID NO: 73260 - DNA, 120 bp, Artificial Sequence
  ENSG00000078142_89 (sequence is synthesized)
tttacccacatatagaagaaatcttcaagaataagtacttgggttggctaggcttcatgcttcaacacagaatttttgtcaagttcattttgtcttttgtattgctcttttaaggaaaaa

SEQ ID NO: 73261 - DNA, 120 bp, Artificial Sequence
  ENSG00000078142_90 (sequence is synthesized)
aagttcccgctgtaggtggtacctttgcagacggtgcgatgggggaagcagagaagtttcactacatctatagttgtgacctggatatcaacgtccagcttaagatctggaatgaatggc

SEQ ID NO: 73262 - DNA, 120 bp, Artificial Sequence
  ENSG00000078142_91 (sequence is synthesized)
tgaatatgtatttatatttgaaaattatcaataatgagatagtagctaaatccacaagagtggaattattcattcaacagtaatgtattaataatatgttgagcatctattatgagctag

SEQ ID NO: 73263 - DNA, 120 bp, Artificial Sequence
  ENSG00000078142_92 (sequence is synthesized)
gattaccattactgtgacatgattttaggcatagtttcgtgtgaacgaatgagttaaaatgagttaattatgttctgaaggccactctcaaacctgcagttagaaatatcgaagaattta

SEQ ID NO: 73264 - DNA, 120 bp, Artificial Sequence
  ENSG00000078142_93 (sequence is synthesized)
ataggcttcatcgtgaactaatattctttatgaagagacactgtttatatcaattgtgtgacatatcacctacccagttctttaagataattctggaaacaaatgagtttcttgtcaaca

SEQ ID NO: 73265 - DNA, 120 bp, Artificial Sequence
  ENSG00000078142_94 (sequence is synthesized)
tcgcccaggttggagtgcagtggcatgaccatggttcactgcagtcttgacttcccaggctcagatgatccttccacctcagacttgcaggtattctaatctgattttgaacttgttttc

SEQ ID NO: 73266 - DNA, 120 bp, Artificial Sequence
  ENSG00000078142_95 (sequence is synthesized)
ttgcaggtattctaatctgattttgaacttgttttccttgatggttgatgcaaacattccagatattgcacttgaaccagataaaactgtgaaaaaggttcaggataaattccgcttaga

SEQ ID NO: 73267 - DNA, 120 bp, Artificial Sequence
  ENSG00000078142_96 (sequence is synthesized)
aataataccatattgacagtttcaccatttagaactgctgttttttgttttaatgttcggctttagattcatggaccacaaattgaactgagtgccaaggaaagtttgaggtagtgctat

SEQ ID NO: 73268 - DNA, 120 bp, Artificial Sequence
  ENSG00000078142_97 (sequence is synthesized)
gttctctggtttggctgcagccccacttctctgtctttccttctatttaagtgattcaaacatttgtttcctgcctgccttttgagaaaatttggagtttgtgaaccctgctacatgaga

SEQ ID NO: 73269 - DNA, 120 bp, Artificial Sequence
  ENSG00000078142_98 (sequence is synthesized)
attcctagcccaaataccttggatattgttagtaccttcgatagaggtagaaaaaattcaatttaatgtgataagtttggttttacatgtgttcagttagaaatgacaaacagtgtcttg

SEQ ID NO: 73270 - DNA, 120 bp, Artificial Sequence
  ENSG00000078142_99 (sequence is synthesized)
acaagacaggtaagccctcagctctcatgaagttgaccatctgaatggctgaatacagagtatactctcccagaaatagtggaaagcataataataagcatccgtgacttgagatttggg

SEQ ID NO: 73271 - DNA, 120 bp, Artificial Sequence
  ENSG00000078142_100 (sequence is synthesized)
aaacattgtcagttaagaaggtcgaaaagtttcacatgtgttttaaagataaaacagtgtgaaagtcaacttagtaaaatcaaaaaagtctgacctgggagcccaaagtcctgggtttca

SEQ ID NO: 73272 - DNA, 120 bp, Artificial Sequence
  ENSG00000078142_101 (sequence is synthesized)
atctcagttttacaatcagtcataccaccatagacaagacacagcccctctaagtttcactattgatgaagcaagcaagttgattgagattgatggttttcaaactacacatcatcatga

SEQ ID NO: 73273 - DNA, 120 bp, Artificial Sequence
  ENSG00000078142_102 (sequence is synthesized)
tccactgaaagtaatttaaagtttcacagtctagcatttgtatttaaagaaaaatgaaataaacagaatagcaaatattaacatattgctcacaggatgttgctttgtgaaacttttccg

SEQ ID NO: 73274 - DNA, 120 bp, Artificial Sequence
  ENSG00000078142_103 (sequence is synthesized)
ttttatacatctgtgtgcatatgtggctgtgtgtatcaagctgtgatacttttttttttctctttgagagatatcatctccctttgttgcccaagctggagtgcaatggtatgatcatag

SEQ ID NO: 73275 - DNA, 120 bp, Artificial Sequence
  ENSG00000078142_104 (sequence is synthesized)
cttactgcagcttcacctgggctcaagctatcttcccacctcagcctccttagtagctgggactatagtcggcgacaccacacttggcttatatttaatttttttttaaatgtagaggct

SEQ ID NO: 73276 - DNA, 88 bp, Artificial Sequence
  ENSG00000078142_105 (sequence is synthesized)
cctcccaaaacacctgttatttgctttggtttgttcccagtggaacatttagaaacactggattagaagacctataaagtcttattca

SEQ ID NO: 73277 - DNA, 120 bp, Artificial Sequence
  ENSG00000078142_106 (sequence is synthesized)
ttagaaacactggattagaagacctataaagtcttattcagatcattgcttatatgatttttgtaattgtataagcagatgagggttaagaagacatttaaaatgtcttttactctttaa

SEQ ID NO: 73278 - DNA, 120 bp, Artificial Sequence
  ENSG00000078142_107 (sequence is synthesized)
aaccatagttttttaattggaaagttaaagattatgtatggatctttgaaaaacgggaaactggatgggaaaggaaaaattacttaaaattttattcatcttttgaaaatataagtgaca

SEQ ID NO: 73279 - DNA, 120 bp, Artificial Sequence
  ENSG00000078142_108 (sequence is synthesized)
agaatagcttcagagaggttttcagaataagagagtcttatgtaataccaaagtattacacagattatgaaaataatagtttttgttctcgagttactcagtaaatatgtgagcttagat

SEQ ID NO: 73280 - DNA, 120 bp, Artificial Sequence
  ENSG00000078142_109 (sequence is synthesized)
taggagaaaatgcttgttttggtggcaaaagttttagaaaatttgggatattacacaaattaaggcattaccactcttagtttaccttttattgatggttgtatgtgttcctctttaagt

SEQ ID NO: 73281 - DNA, 120 bp, Artificial Sequence
  ENSG00000078142_110 (sequence is synthesized)
tttcacttttaaaagtgatgataaaatgtgttttattactccaattttattatttttgcatatgtaaattaatctgttttagtgaaatgatatgagtatttacaaactgaatctaagttt

SEQ ID NO: 73282 - DNA, 120 bp, Artificial Sequence
  ENSG00000078142_111 (sequence is synthesized)
aaacaggtaacaattaatgactaccagtagacatacattgtatatgcccatggtttttacccctgaatctatgtactaacaagataagttgcggcctggcgcggtggctcacgcccgtaa

SEQ ID NO: 73283 - DNA, 120 bp, Artificial Sequence
  ENSG00000078142_112 (sequence is synthesized)
caaaacgccatcttagaaaaaaaaaaaaaaaaagatgagttgcgtaattgaagataaatcagagagtcttaaaaattcctttaaatgttaccttggaagaacatttagggaaagtccttt

SEQ ID NO: 73284 - DNA, 120 bp, Artificial Sequence
  ENSG00000078142_113 (sequence is synthesized)
cccttttaagaattgctttagtagtaatcctacagatggtcattttgcccacacttctgtactggaaaatgcctctttttatggaaagccaataatggatacaagtagcttagtctctta

SEQ ID NO: 73285 - DNA, 120 bp, Artificial Sequence
  ENSG00000078142_114 (sequence is synthesized)
ttctcttacaaagtgtgcttaattcactttaatatctacctttaattatttgcttttccccttggagttctatgggataatcattctcagtcccctttgtcctgacaactctttagccct

SEQ ID NO: 73286 - DNA, 120 bp, Artificial Sequence
  ENSG00000078142_115 (sequence is synthesized)
atgtatttatctttatgcagacagcttccagacttacagctttttacctcagtccatttcattaacttcaaattgaaatatcgaactgcttacttgaaattgtcattatatatggccagt

SEQ ID NO: 73287 - DNA, 120 bp, Artificial Sequence
  ENSG00000078142_116 (sequence is synthesized)
tgtaaaaggttgtcctttcctctactacctgcctaaaacctgtttctcacctcatttttccatttcaatagatagcaacatcacctacccagttgttcaagctctagacctcaaagtcat

SEQ ID NO: 73288 - DNA, 120 bp, Artificial Sequence
  ENSG00000078142_117 (sequence is synthesized)
tcttaacatgtctcttggcctcatctcatatactgaacctattagcaaatcttgtctactcctcaactccaaaatagatcatgaagttacccactgtcttcatttttactactttgaccc

SEQ ID NO: 73289 - DNA, 120 bp, Artificial Sequence
  ENSG00000078142_118 (sequence is synthesized)
cacttgaagcaaacaatatatgttgcctaaacaatttgaatgaaacctgaaccctttattggggccttgtggcttgtccaggcaggccatttgtctgaatgtcaaaccactcctgcctca

SEQ ID NO: 73290 - DNA, 120 bp, Artificial Sequence
  ENSG00000078142_119 (sequence is synthesized)
gacaagagcctttgttgttttctctttctggaaagttatttattcagatctttgcagggctgactttagttattaagttgaagttctaatggcatctctttagagaagccctttctaact

SEQ ID NO: 73291 - DNA, 120 bp, Artificial Sequence
  ENSG00000078142_120 (sequence is synthesized)
ccttgatctgtaataacatatctgccctcttcctccaatgctctctacttattactgtattgtttatagcacttatcactagctgaagttaccttttttgtttaattcaacaactattta

SEQ ID NO: 73292 - DNA, 120 bp, Artificial Sequence
  ENSG00000078142_121 (sequence is synthesized)
ttgaacagctagtagatgctgggaataccaaagttaacagaagagacagaaatccttgctctcctagagcttgttgagttcttatcatcatcttctccccttcaggatgcaagttccatg

SEQ ID NO: 73293 - DNA, 120 bp, Artificial Sequence
  ENSG00000078142_122 (sequence is synthesized)
agagcaggaacctttgtccattggggttacccccatgcctctggaccttgaacaccacctagctaaagtgttcaataaatcagtgttgaattaatgatgaataaatacttctgctcttcc

SEQ ID NO: 73294 - DNA, 120 bp, Artificial Sequence
  ENSG00000078177_0 (sequence is synthesized)
gcgcgctcgccgtgtctcccccgcggccgcagctgcttgctagccttgcgcggcgcgggagagcgcagtggcgccggcgggaaagggctgcggacctgcggcgccgcgttgtgcgttcga

SEQ ID NO: 73295 - DNA, 120 bp, Artificial Sequence
  ENSG00000078177_1 (sequence is synthesized)
cgcgttgtgcgttcgacgacgcggcaccggcttcgacgccctctgcccgctccagaagcagtaagaagacatgttggataacaagaagaggtgtagagtttgcatatatcaactgtggcc

SEQ ID NO: 73296 - DNA, 120 bp, Artificial Sequence
  ENSG00000078177_2 (sequence is synthesized)
ttaatgagcatgttgacagcatcgatgctagacagacagtctttttactgctggattgtgcaagatatttaaccctattttgtttgaattatgacttaaatgtcaaacatcttaactaag

SEQ ID NO: 73297 - DNA, 120 bp, Artificial Sequence
  ENSG00000078177_3 (sequence is synthesized)
aaaagggaaacattttagttttggaagtcagaatgccaaggagaaggaaaaatcttgggggaaatccttttcggaagactgcaaaccctaaggaagttgtcgtatccagtgttgctagtc

SEQ ID NO: 73298 - DNA, 120 bp, Artificial Sequence
  ENSG00000078177_4 (sequence is synthesized)
gtgaggagccaaccactactctaccttccatgggtgagacaaaagttgatcaggaagaactcttcaccagtatctcagagatattttctgatctggatcctgatgtagtgtatttgatgc

SEQ ID NO: 73299 - DNA, 120 bp, Artificial Sequence
  ENSG00000078177_5 (sequence is synthesized)
tttctgaatgtgatttcaaagttgaaaatgctatggattgtctattagaattatctgccactgataccaagatagaagaatcatcttcacaaagtttcgttgcttctgagaaccaagtag

SEQ ID NO: 73300 - DNA, 120 bp, Artificial Sequence
  ENSG00000078177_6 (sequence is synthesized)
gtgcagcagaaagtaaaataatggaaaaacgtcctgaagaagagagtgaagattcaaaaatggattcatttttggacatgcagctaactgaagacctggattccttaatacagaatgctt

SEQ ID NO: 73301 - DNA, 120 bp, Artificial Sequence
  ENSG00000078177_7 (sequence is synthesized)
ttgagaaattgaactcttctcctgatgaccaagtatactcatttttgccttcacaagatgttaatagttttaatgactcaagtgagtttataaatcctgattcaagtaatatgactccca

SEQ ID NO: 73302 - DNA, 120 bp, Artificial Sequence
  ENSG00000078177_8 (sequence is synthesized)
ttttttctacacaaaatatgaatttgaacggtgaaaatttagagaattctggttctactttaagtttaaacccattaccttcacattcagttttgaacgagtccaagtgttttataaagg

SEQ ID NO: 73303 - DNA, 120 bp, Artificial Sequence
  ENSG00000078177_9 (sequence is synthesized)
ataacacattggctttggaaagtaactacccggaagattctcttctcagtagttctttaaatgtagcaagtgactccatcgcaggttgtagcagtctcaatcaaaaacagaaagaacttt

SEQ ID NO: 73304 - DNA, 120 bp, Artificial Sequence
  ENSG00000078177_10 (sequence is synthesized)
tagaatctgagtgcgttgaggctcaattctctgaagctcctgtagatttggatgccagtgaacctcaggcttgtttaaaccttccagggcttgatttaccaggtacaggtggggatcaga

SEQ ID NO: 73305 - DNA, 120 bp, Artificial Sequence
  ENSG00000078177_11 (sequence is synthesized)
aatctactcgggtctctgatgtgtttctaccttccgaagggttcaacttcaagccacacaaacatcctgaactgccaactaaggggaaggatgtgagttactgcccggtacttgctcctc

SEQ ID NO: 73306 - DNA, 120 bp, Artificial Sequence
  ENSG00000078177_12 (sequence is synthesized)
tcccattgctgttgcctcctccgccacctccaccgatgtggaatccaatgattcctgcttttgacctcttccaaggaaaccatggctttgtagctcctgttgtaaccacagctgcacact

SEQ ID NO: 73307 - DNA, 120 bp, Artificial Sequence
  ENSG00000078177_13 (sequence is synthesized)
ggagatctgtcaactacacatttccaccctcagttatttctcacacttccccaacaaaagtatggagaaataaagatggaacaagtgcttatcaagtacaagaaaccccagtttctcagg

SEQ ID NO: 73308 - DNA, 120 bp, Artificial Sequence
  ENSG00000078177_14 (sequence is synthesized)
ttgtaagaaagaagacatcttacgttggactagttcttgttcttctcagaggtcttccgggatctggaaaatcttttttggcaaggactttgcaagaggataatccaagtggagtcattc

SEQ ID NO: 73309 - DNA, 120 bp, Artificial Sequence
  ENSG00000078177_15 (sequence is synthesized)
ttagtactgatgattatttttatataaatggacagtaccagtttgatgtaaagtacttaggagaagcacatgaatggaaccagaatcgtgcaaaagaagcatttgagaagaagatatctc

SEQ ID NO: 73310 - DNA, 120 bp, Artificial Sequence
  ENSG00000078177_16 (sequence is synthesized)
ctataattatagataatacaaacctacaggcatgggaaatgaaaccatatgttgctttgtctcagaaacacaaatataaagtcctttttcgggaaccagacacatggtggaagtttaaac

SEQ ID NO: 73311 - DNA, 120 bp, Artificial Sequence
  ENSG00000078177_17 (sequence is synthesized)
caaaggaacttgcaaggcgtaacattcatggggtaagcaaagaaaaaataacaagaatgttggaacattatcaacgttttgtttcagtgccaataattatgagttcttcggttccagaga

SEQ ID NO: 73312 - DNA, 120 bp, Artificial Sequence
  ENSG00000078177_18 (sequence is synthesized)
aaattgaacgtattgagttgtgtgcatattcttgtgaggatagaagcactagcccaagagacgatgaagatattatctctgaaaaagaagaaaatattttatctttatctttgaagcatc

SEQ ID NO: 73313 - DNA, 120 bp, Artificial Sequence
  ENSG00000078177_19 (sequence is synthesized)
tagagttcactgaagagaagaatcttgatgtaaccaaagaaacaatgttacctgagaatgttgcatatctctctaatgcagatttaaacaaaagaagaaaagaaataagtgatatgaatc

SEQ ID NO: 73314 - DNA, 120 bp, Artificial Sequence
  ENSG00000078177_20 (sequence is synthesized)
ctagcattcaaagtgctttaattctggaaactccacacatgtatttttctgactctgaaagcaaactacaggcaacagacaaaagtgaaaacgagcaaatagaaatggtggctgtaaaag

SEQ ID NO: 73315 - DNA, 120 bp, Artificial Sequence
  ENSG00000078177_21 (sequence is synthesized)
ggtatagtaaaactgacacagatagttctatggagagagtatcacctagtacttgctgtagtgaaaataatcaagaagactgtgatcttgcaaatagtggaccacttcaaaatgaaaaat

SEQ ID NO: 73316 - DNA, 120 bp, Artificial Sequence
  ENSG00000078177_22 (sequence is synthesized)
cctcacctggtgaaatagtggaagaaagagcaacagtaacgaaaaaagcctttgggaaacaaaaaagcaaatcgactttggaaaagttcccaagacatgagctatcaaattttgttggtg

SEQ ID NO: 73317 - DNA, 120 bp, Artificial Sequence
  ENSG00000078177_23 (sequence is synthesized)
actggccagttgataagactattggtcagaggacaaaaaggaacagaaaaactgaaaaaacttcatccgtacaaagcgacaaaaagtataattaccctcagtcacacaaattagttaaca

SEQ ID NO: 73318 - DNA, 120 bp, Artificial Sequence
  ENSG00000078177_24 (sequence is synthesized)
gtgtatctgtgaatacagattgtgtccagcaacgaggatctccacatgaaagtgtagaggatggcagaaagtcacagtgtgatgatgcttcagagccactcaatagctataaatatgatg

SEQ ID NO: 73319 - DNA, 120 bp, Artificial Sequence
  ENSG00000078177_25 (sequence is synthesized)
cttataaaaatattgacaaaaactcattcaacattatgggtgactggccttcatctgattctttagctcagagggaacacagatcaagaatgccaaagactggtttaagtgagcccaacc

SEQ ID NO: 73320 - DNA, 120 bp, Artificial Sequence
  ENSG00000078177_26 (sequence is synthesized)
tagaaattggaacaaatgacaaaatgaatgaaatatccttatctacagcacatgaggcctgttggggcacaagctctcaaaaactaaagacattgggtagctccaatctaggaagttctg

SEQ ID NO: 73321 - DNA, 120 bp, Artificial Sequence
  ENSG00000078177_27 (sequence is synthesized)
aaatgctgctcagtgaaatgacctgtgagagtcagacttgtctaagtaaaaagagtcatgggcaacacacatcgttgcctcttacttttaccaatagtgcaccaactgtttctggagtag

SEQ ID NO: 73322 - DNA, 120 bp, Artificial Sequence
  ENSG00000078177_28 (sequence is synthesized)
tagaaccacaaacgttagctgaatgtcaagagcaaatgcctaagagagaccctggaaaagaagtaggcatgtgcacccagactgaaccacaggattttgctcttttatggaaaatagaaa

SEQ ID NO: 73323 - DNA, 120 bp, Artificial Sequence
  ENSG00000078177_29 (sequence is synthesized)
agaataaaattagcatttcagattctatcaaagtattaacaggaagattagatggatttaagccgaaagttttcaatattaacacaaaatcagacgttcaagaagcaattccatatagag

SEQ ID NO: 73324 - DNA, 120 bp, Artificial Sequence
  ENSG00000078177_30 (sequence is synthesized)
taatgtatgataaaagcacgtttgttgaagaaagtgagcttaccagtgcagatgaatctgaaaatcttaacattctttgtaaactgtttggatccttttcattagaagccctgaaagact

SEQ ID NO: 73325 - DNA, 120 bp, Artificial Sequence
  ENSG00000078177_31 (sequence is synthesized)
tatatgagaggtgcaataaagatattatttgggccacaagccttttgttggattctgaaactaagttatgtgaggatacagagtttgagaatttccaaaaatcgtgtgatggatcacaaa

SEQ ID NO: 73326 - DNA, 120 bp, Artificial Sequence
  ENSG00000078177_32 (sequence is synthesized)
ttgggcctttttctctggggttgaatttgaaagaaattattagccaaagaggaactttagagaattctaattctcctgtgccagagtttagccatgggattggtattagtaacgctgact

SEQ ID NO: 73327 - DNA, 120 bp, Artificial Sequence
  ENSG00000078177_33 (sequence is synthesized)
cacagtctacttgtgatgcagaaagaggaaactcagagcaggcggaaatgagagctgtcactcctgaaaaccatgaatcgatgacaagtatatttcccagtgctgctgtgggtctaaaga

SEQ ID NO: 73328 - DNA, 120 bp, Artificial Sequence
  ENSG00000078177_34 (sequence is synthesized)
ataataatgacatacttcctaacagccaggaagaacttttatatagcagtaagcagtcctttccaggtattctaaaagctactactcctaaagatatgagtgaaacagaaaaaaacctag

SEQ ID NO: 73329 - DNA, 120 bp, Artificial Sequence
  ENSG00000078177_35 (sequence is synthesized)
tagtcacagagactggagacaacatacattctccttcacatttctctgatatttttaactttgtatctagtacttcaaatcttgaattaaatgaagaaatttattttactgattctcttg

SEQ ID NO: 73330 - DNA, 120 bp, Artificial Sequence
  ENSG00000078177_36 (sequence is synthesized)
aaataaagagaaatgaaaattttccaaaggattatgtgaaattttcagatgaagaagaatttatgaatgaagatgagaaggaaatgaaggaaattctaatggcaggaagtagtttatcag

SEQ ID NO: 73331 - DNA, 120 bp, Artificial Sequence
  ENSG00000078177_37 (sequence is synthesized)
ctggagttagtggggaagataaaaccgagatattgaatcccactccagcgatggccaaatctctgaccatagactgtctggaattggcattaccccctgaactggcttttcaacttaatg

SEQ ID NO: 73332 - DNA, 120 bp, Artificial Sequence
  ENSG00000078177_38 (sequence is synthesized)
aattatttggtcctgttggtattgattcagggtctctaacagttgaagattgtgtggttcatatagatctgaatctggcgaaagtgattcatgagaaatggaaagaatctgtaatggagc

SEQ ID NO: 73333 - DNA, 120 bp, Artificial Sequence
  ENSG00000078177_39 (sequence is synthesized)
gacaaagacaagaagaggtgtcttgtggcaagtttatgcaagatccttccttggttggacatactgggcttgataatcctgaacaaaaatcatctcagagaacaggcaaaaaattactga

SEQ ID NO: 73334 - DNA, 120 bp, Artificial Sequence
  ENSG00000078177_40 (sequence is synthesized)
agactttaacagcatctgaaatgctacctttattggatcattggaatactcaaactaaaaaagtatcactcagagaaataatgtcagaagaaattgccttacaggaaaaacataatttga

SEQ ID NO: 73335 - DNA, 120 bp, Artificial Sequence
  ENSG00000078177_41 (sequence is synthesized)
aaagggagacccttatgtttgaaaaagattgtgccactaaactaaaggagaagcagctctttaagatatttccagccattaaccaaaattttctggtggacattttcaaggaccacaact

SEQ ID NO: 73336 - DNA, 120 bp, Artificial Sequence
  ENSG00000078177_42 (sequence is synthesized)
attcattagaacacacagtgcaatttcttaactgtgttcttgaaggggaccctgtaaaaacagttgtagcccaagagtttgttcaccaaaatgagaatgtcacatctcatactggccaga

SEQ ID NO: 73337 - DNA, 120 bp, Artificial Sequence
  ENSG00000078177_43 (sequence is synthesized)
agtctaaagagaaaaagccaaagaaattaaaagagactgaagaaacaccaagtgaactgtctttccaggactttgagtacccagactatgatgactacagagcagaggctttccttcacc

SEQ ID NO: 73338 - DNA, 120 bp, Artificial Sequence
  ENSG00000078177_44 (sequence is synthesized)
aacagaagaggatggagtgctacagcaaggccaaagaagcttatcggatagggaaaaaaaatgtcgccaccttttatgcccagcagggtactcttcatgagcagaagatgaaagaagcca

SEQ ID NO: 73339 - DNA, 120 bp, Artificial Sequence
  ENSG00000078177_45 (sequence is synthesized)
atcaccttgctgccatagagatctttgagaaagtcaatgcttcgctgctgccacagaatgttttagacctccatgggctgcatgtggatgaagctctagaacatttgatgagagttttag

SEQ ID NO: 73340 - DNA, 120 bp, Artificial Sequence
  ENSG00000078177_46 (sequence is synthesized)
agaagaagactgaagaatttaagcagaacggtgggaagccctatttgtctgtgattacggggagaggaaaccacagccagggaggagttgctcgcatcaaaccagctgtcattaagtacc

SEQ ID NO: 73341 - DNA, 120 bp, Artificial Sequence
  ENSG00000078177_47 (sequence is synthesized)
tcataagccatagcttcaggttctctgaaattaaaccagggtgcttgaaagtcatgctaaagtaaaataaacatccttgaattagaagtatgaaggtttgtaggttaaaattacttttat

SEQ ID NO: 73342 - DNA, 120 bp, Artificial Sequence
  ENSG00000078177_48 (sequence is synthesized)
ttgcagtaattcagtcaattctaccctaaagatgtgttttattataaataatattcaattatgaaacaaaaaaattatgatgtttttcaaaatgcaagtgaggtttgattttttactgaa

SEQ ID NO: 73343 - DNA, 120 bp, Artificial Sequence
  ENSG00000078177_49 (sequence is synthesized)
tcaaatgcaaatgttacctgttaaagatattacagagaaattttattgattacaaaatatgtaagaaaattatcagctacagttttaaagtttaaaatgctctgattgtttctcagaaaa

SEQ ID NO: 73344 - DNA, 120 bp, Artificial Sequence
  ENSG00000078177_50 (sequence is synthesized)
ggttacctttgtattaattgttgtatgacatttagtaatgtcctaaaagtcttttgtgagaggtatttaaagtgctttgagacctgattcatgccccccaaagggtggtattaaaagagg

SEQ ID NO: 73345 - DNA, 120 bp, Artificial Sequence
  ENSG00000078177_51 (sequence is synthesized)
aaaaaggacatagtagtggtagtaaagaaaaaaaggagatctaacaaaaacacttgaatattttttattttcaaaactaaacacataaaatgcttttattttgccatatcctacaggaag

SEQ ID NO: 73346 - DNA, 120 bp, Artificial Sequence
  ENSG00000078177_52 (sequence is synthesized)
gaagacatgcttttgccctttcttctgctttgtatatgaccttgatcttttaccttttgttctgttcttctgtgtgcattttatggaaagaaagttgggtctgagattatattgtaattt

SEQ ID NO: 73347 - DNA, 120 bp, Artificial Sequence
  ENSG00000078177_53 (sequence is synthesized)
tatactttctatagacagaaaggttttcagagaaaaagaaatggttaaatatcttccagatgttgctgccttatcgaaatgcttctagaactgtctgtataagtcgtatttcagacagta

SEQ ID NO: 73348 - DNA, 120 bp, Artificial Sequence
  ENSG00000078177_54 (sequence is synthesized)
ctaaatacttatattttatttttgaggcatgtaattttaaaactgcagtaggttaaaattctattaaacaaatatagaaaatattttgtttataattggcctggtgtggtggcccacgcc

SEQ ID NO: 73349 - DNA, 120 bp, Artificial Sequence
  ENSG00000078177_55 (sequence is synthesized)
aaaaaaaaagaaaaaaaagagaaaatattttggttataatcataagaagaatccttacaatttaaaatattttcacttttattttgaaaaagagccaactttctcaaaggaagctgtcat

SEQ ID NO: 73350 - DNA, 120 bp, Artificial Sequence
  ENSG00000078177_56 (sequence is synthesized)
agccaactttctcaaaggaagctgtcattaacttctgttgtttggttagctaataaattctgttagtatgcaagttaaacctgtgtaaaggaggttataatgtggtaaggtataattttc

SEQ ID NO: 73351 - DNA, 120 bp, Artificial Sequence
  ENSG00000078177_57 (sequence is synthesized)
caatatgagacaatggcttaaatttgcctttggagatggagaatattttcaacatacataattttaacaaatagttttgttgctttttgttaagcttaaaaaaaaatttggatcagaaat

SEQ ID NO: 73352 - DNA, 120 bp, Artificial Sequence
  ENSG00000078177_58 (sequence is synthesized)
tataggattgagctggtaccaaaagaatcctaaagtacagaatggttttccaaaagagcagacatttcaatgaaaataaaaccccaaaacattttttttatatatcatgattgcatgctt

SEQ ID NO: 73353 - DNA, 120 bp, Artificial Sequence
  ENSG00000078177_59 (sequence is synthesized)
ttaaaataaggaggcttatcattgaattttagttccataaaaatgaaaatacatgtttattatttagaaatggttagtgactggtattgaagtattattcacacttatgtttgtaataat

SEQ ID NO: 73354 - DNA, 120 bp, Artificial Sequence
  ENSG00000078177_60 (sequence is synthesized)
ttatttaaagaatgccaacagtttagcacacttttgtaatctctagaacagttctatacattaaaaataaacattaaaaataaagcagttcctttaaacaacttactatgaaactataat

SEQ ID NO: 73355 - DNA, 120 bp, Artificial Sequence
  ENSG00000078177_61 (sequence is synthesized)
tgttaatgaaataagatattcctatgtatacattagtatgatttaagggtatgaaaaacagtgctaaaatgtggagttaattggaatgtgtgcagctgcatactcactttctgtgttttt

SEQ ID NO: 73356 - DNA, 120 bp, Artificial Sequence
  ENSG00000078177_62 (sequence is synthesized)
atatttccttacctagttttaaaaatcatcacttttcggcacttcagctagacttatttcaatattataattatgattaatgaaggagcagtcagaagtagaggtgtggtattccgtggg

SEQ ID NO: 73357 - DNA, 120 bp, Artificial Sequence
  ENSG00000078177_63 (sequence is synthesized)
cagaagtcaaatgaaaaaagctatattgtttacttgtttactatatcaatgttaatattatgccttattttgataaatcaaatagtatatcttaatcattgttgataaatatacaggcaa

SEQ ID NO: 73358 - DNA, 120 bp, Artificial Sequence
  ENSG00000078177_64 (sequence is synthesized)
agtttgagcatcatatgtatttttatgaagctgcttaattccaaattgcctcccaccccactatctagcatagtttaagcaacacataattttgaaagaaaagtttgtaatccctccttt

SEQ ID NO: 73359 - DNA, 120 bp, Artificial Sequence
  ENSG00000078177_65 (sequence is synthesized)
cttttttttgcccatttctaaatcctgtatgcccgcagtaaagatagtttggggattttaaaagttttctctattacccatttctaaatcctgtatgtcaaagatagtttggagattata

SEQ ID NO: 73360 - DNA, 120 bp, Artificial Sequence
  ENSG00000078177_66 (sequence is synthesized)
aaaattttcatgtattggtgtaggttgagtatccctaatgagaaaattcaaaatctgaaatgcttcaaaatctgaaatttttcgagcacagacatgatgctcaaaggaaatactcacaga

SEQ ID NO: 73361 - DNA, 120 bp, Artificial Sequence
  ENSG00000078177_67 (sequence is synthesized)
gcattttacatttgtaggttagcgatactcaacaagtaaatataatgcacatgttctaaaatatccccccaaaccccagcaatccaaaacacttctggtcctaagcattttgagtagggg

SEQ ID NO: 73362 - DNA, 120 bp, Artificial Sequence
  ENSG00000078177_68 (sequence is synthesized)
atactcactcaacctgtatatttgtgctaatacatgactcattagaatgattctttgtaaacttaatattttaaaagtacagcacttctgtagtatggaaggtttcagtaataattatat

SEQ ID NO: 73363 - DNA, 120 bp, Artificial Sequence
  ENSG00000078177_69 (sequence is synthesized)
tcattcagtagtctcttaccattatctcccagatggaaaaagaggactaatgtggaaaccccagagggtgtccagttggaccagggagatattagacacttaacagtattttcagtctgt

SEQ ID NO: 73364 - DNA, 120 bp, Artificial Sequence
  ENSG00000078177_70 (sequence is synthesized)
ccatctctttattccaatgtgagaaatggaagtgtttttttttttacgtttattggctcttcatatttctctacattatttttaatgtgcagtttcttcaattggttagtatttccatac

SEQ ID NO: 73365 - DNA, 120 bp, Artificial Sequence
  ENSG00000078177_71 (sequence is synthesized)
tatttgcaactttatggcctttaaatataggacatattatatagcagaaattttgactttaaatcctcttgagtagtatattttgagaagaaaagctatactgctcttctggatggtttc

SEQ ID NO: 73366 - DNA, 120 bp, Artificial Sequence
  ENSG00000078177_72 (sequence is synthesized)
catcctttatttaggtcttttctttttgaattcaagtgttttgtatgcttagaaagtagacatgtataatattgagatcggttatttctgagctggaaattggaaactttggaaactcag

SEQ ID NO: 73367 - DNA, 120 bp, Artificial Sequence
  ENSG00000078177_73 (sequence is synthesized)
gaaattgctctgacaatgttttaactgctctcaatttaagaaaatgacgaaatgtataaaaaagacaaaaataacgtgtgctgttttttccaagtgctttttctaagtgcttttccattg

SEQ ID NO: 73368 - DNA, 120 bp, Artificial Sequence
  ENSG00000078177_74 (sequence is synthesized)
tgcaatgaggtgaagtttggtaatttttcggtgtagtagttaaatattgctcaatttttatttacatgtaaagaaaacagatttaaatgtttatgtggccaaaaggtgtcatttaaaagg

SEQ ID NO: 73369 - DNA, 120 bp, Artificial Sequence
  ENSG00000078177_75 (sequence is synthesized)
taaaataagtttatgtagaatgtatgttcatggtgcttatttttaaaatgtaattcaagtttacagtattacttaatgcttctttacagaatttaatagagaaacaaggctagaacacat

SEQ ID NO: 73370 - DNA, 120 bp, Artificial Sequence
  ENSG00000078177_76 (sequence is synthesized)
ctacatcctgaagagccgtttataacttcatattatatgatgacaaagttcattattttccttaaagttgagcaattgacttttatggtccaatgatgaacttattattaataaatgatt

SEQ ID NO: 73371 - DNA, 120 bp, Artificial Sequence
  ENSG00000078177_77 (sequence is synthesized)
gagttaactgtgaggcttctcattaaaatacaatattgcagctatcagttggagaatatattataaaattttcagacagtatatcagaaaaatgtttttatttgtactgtatagaaaatg

SEQ ID NO: 73372 - DNA, 120 bp, Artificial Sequence
  ENSG00000078177_78 (sequence is synthesized)
taattttgctgttaactctgtactttttaaattgaaaatgttttataaatttgcttttaaattttcttatgaagccatttgcaaattacatacttaatttaataaaatactttagccaca

SEQ ID NO: 73373 - DNA, 120 bp, Artificial Sequence
  ENSG00000078237_0 (sequence is synthesized)
agcccgcagtgcaggggcagcgcggcgcggggccaccgacgggacgcggctccgggaacatggctcgcttcgctctgactgttgtccggcatggagaaacaagatttaacaaggagaaaa

SEQ ID NO: 73374 - DNA, 120 bp, Artificial Sequence
  ENSG00000078237_1 (sequence is synthesized)
taatccaaggacaaggagtagatgaacctctttcagaaactggatttaaacaagcagcagctgctggtatatttctgaataatgtgaagtttactcatgctttctccagtgatctcatga

SEQ ID NO: 73375 - DNA, 120 bp, Artificial Sequence
  ENSG00000078237_2 (sequence is synthesized)
ggacaaagcagaccatgcatggaattttggagagaagcaaattttgcaaagatatgacggtaaagtatgactcaagacttcgggaaaggaaatacggggttgtagaaggcaaagcgctaa

SEQ ID NO: 73376 - DNA, 120 bp, Artificial Sequence
  ENSG00000078237_3 (sequence is synthesized)
gtgagctgagggccatggccaaagcagccagggaagagtgccctgtgtttacaccgcccggaggagagacgctggaccaggtgaaaatgcgtggaatagacttttttgaatttctttgtc

SEQ ID NO: 73377 - DNA, 120 bp, Artificial Sequence
  ENSG00000078237_4 (sequence is synthesized)
aactaatcctgaaagaagcggatcaaaaagaacagttttcccaaggatctccaagcaactgtctggaaacttctttggcagagatatttcctttaggaaaaaatcacagctctaaagtta

SEQ ID NO: 73378 - DNA, 120 bp, Artificial Sequence
  ENSG00000078237_5 (sequence is synthesized)
attcagacagcggtattccaggattagcagccagtgtcttagttgtgagtcacggtgcttacatgagaagtctgtttgattattttctgactgaccttaagtgttccttaccagccactc

SEQ ID NO: 73379 - DNA, 120 bp, Artificial Sequence
  ENSG00000078237_6 (sequence is synthesized)
tgagcagatctgaacttatgtcagtcactcccaatacagggatgagtctctttatcataaactttgaggaaggaagagaagttaaaccaacggttcagtgtatttgtatgaacctacagg

SEQ ID NO: 73380 - DNA, 120 bp, Artificial Sequence
  ENSG00000078237_7 (sequence is synthesized)
atcatctaaatggactgactgaaactcgctaaggttaaatctgcatcaaaatctaaccattttgagcctctgaagggagtgccattggctttatttacttctctcctctgctagttctga

SEQ ID NO: 73381 - DNA, 120 bp, Artificial Sequence
  ENSG00000078237_8 (sequence is synthesized)
tttggaaacagttaaaagccaatttttagctccagtggaaccatagccacataaaactttaatggacaaccatatagaattaacttattttgtccaagtacagttggcattttccagaat

SEQ ID NO: 73382 - DNA, 120 bp, Artificial Sequence
  ENSG00000078237_9 (sequence is synthesized)
aattttaccaccctgctagatgtcatctctggattgcacatggatgatgaaggaactcagcattgaaagttgggggattagtaaccttgttacaacggtttctttttcattttagcctat

SEQ ID NO: 73383 - DNA, 120 bp, Artificial Sequence
  ENSG00000078237_10 (sequence is synthesized)
tttaatggctattggtaagatactgtatgtttttagtatctcatccagtgcttagaagaaagaatggtttataattcccagtacatgtttatattgactgtgttatatttttaaatcctt

SEQ ID NO: 73384 - DNA, 120 bp, Artificial Sequence
  ENSG00000078237_11 (sequence is synthesized)
taaataaaaaatccttataagtttatgtaaagcaaaataacactaacatgttttacgtataaatcaactattggaattttttattctagagggcttgaaatgtggatgaatacagattat

SEQ ID NO: 73385 - DNA, 120 bp, Artificial Sequence
  ENSG00000078237_12 (sequence is synthesized)
gattgcagaatggtctgggggaagaagttaaaacatttgatttaaatacagtaaagaaagaatcttggagcagaagatagaagaacagccttttctaaataatgccttgccaaagtcaag

SEQ ID NO: 73386 - DNA, 120 bp, Artificial Sequence
  ENSG00000078237_13 (sequence is synthesized)
tcaatggaaaccaggaaagccaaaaaaatgaagaatatccacttgcttcttatctaacctgtaggctgaagaatttccagtttgaggaaggctctaaagaaagtaaacagttaacagaac

SEQ ID NO: 73387 - DNA, 120 bp, Artificial Sequence
  ENSG00000078237_14 (sequence is synthesized)
tttgaggaaggctctaaagaaagtaaacagttaacagaacaccacacagtaatcagaataaaagaggggccttctttgtaaagaatggtgctctgggccgggcccagtggctcacacctg

SEQ ID NO: 73388 - DNA, 120 bp, Artificial Sequence
  ENSG00000078237_15 (sequence is synthesized)
gccgagatcgcaccacttcactccagcctaggtgacagaggggatgacagagggtgctctgcgggcagggaaggcggggtggttgggggggagagaatgttgctctgataaccacagctg

SEQ ID NO: 73389 - DNA, 120 bp, Artificial Sequence
  ENSG00000078237_16 (sequence is synthesized)
ggttgggggggagagaatgttgctctgataaccacagctgtggttattttgtggcaggtacaggtgaggttgcctcttctttccaccagatggcactggagaaaagggattttgattaac

SEQ ID NO: 73390 - DNA, 120 bp, Artificial Sequence
  ENSG00000078237_17 (sequence is synthesized)
ttaattttatacacaagattggtctttcagaaatctttatctaaatgaagaaactgttctacatgtagttcgcttttaagtcaccatgttgctaaatgctgtgagtctcaactttaaaga

SEQ ID NO: 73391 - DNA, 120 bp, Artificial Sequence
  ENSG00000078237_18 (sequence is synthesized)
gggttaatactaaagttgtcagttaaggctatagtcacatatagtcaaaatttactttgacatcattttaaatcatatgtaaaattcagtattatattgttcttagtgtgtctagcacta

SEQ ID NO: 73392 - DNA, 120 bp, Artificial Sequence
  ENSG00000078237_19 (sequence is synthesized)
ccagttttctaccagtattgaaacagggcacgtgtttgagcatcagaggaagtatactgtaaataaaaatttgaaaaataagcaaaaaggacagacaataattatctccattcccaccat

SEQ ID NO: 73393 - DNA, 120 bp, Artificial Sequence
  ENSG00000078237_20 (sequence is synthesized)
actgaagtcatctttccacttttttttttaaagaaacaaaacataaagataaaagtagagttctctttaaccagctctcacagtcctgttccctccagaggcagccactgcagtgagtct

SEQ ID NO: 73394 - DNA, 120 bp, Artificial Sequence
  ENSG00000078237_21 (sequence is synthesized)
gtgtatatgttcacctgttcatctgcttgcaatgttcatctgttccttatattttcacctagtgtctggaaggagatggtactgttttggtgctttaaaaataaatatcaagccatctgt

SEQ ID NO: 73395 - DNA, 120 bp, Artificial Sequence
  ENSG00000078237_22 (sequence is synthesized)
gttctttatttttacttatgtcttggaggcatctctgtgttgatatatatagatctagttaattataaccactctattctattaaatatagcacatttttgtttattagtgggcatttag

SEQ ID NO: 73396 - DNA, 80 bp, Artificial Sequence
  ENSG00000078237_23 (sequence is synthesized)
cgtgcctggcctatgatgcatttttttaatatgtgttcttaatttttaagacaaaccaatataccttatcctttatgggg

SEQ ID NO: 73397 - DNA, 120 bp, Artificial Sequence
  ENSG00000078237_24 (sequence is synthesized)
aatttttaagacaaaccaatataccttatcctttatggggtttttttggtgtgtatctttaagaagacttctctaccatgaggtcatacagtaatgtcttcttacagtttttgagaactt

SEQ ID NO: 73398 - DNA, 120 bp, Artificial Sequence
  ENSG00000078237_25 (sequence is synthesized)
ctgaatgtcaaatcttgaaattgaaatttgctttttatagtataaggtaagaatttaattttttttttcatgtggttgaaacagttatcccaacaccattgtaaaggctgttctttccca

SEQ ID NO: 73399 - DNA, 120 bp, Artificial Sequence
  ENSG00000078237_26 (sequence is synthesized)
attggtttgtggtgtgtgctctcaggcctcacaccccctcatttgctagagtctgtggactcttttagttatctgtgtatttccttatcagtgtcatacttagttactgtggctttgcag

SEQ ID NO: 73400 - DNA, 120 bp, Artificial Sequence
  ENSG00000078237_27 (sequence is synthesized)
ctgactgtcttaaagggtggatacctcctcttgttcatttttaaagttgtcttaactatttatgcacttttattcttccatataaattttggaatcaattggtcaatttccagaaaaatt

SEQ ID NO: 73401 - DNA, 120 bp, Artificial Sequence
  ENSG00000078237_28 (sequence is synthesized)
ctgttacaaattttattggagtcacatgcatctcttcatctattcaatacgtattttttgagcatggcacacacatgccaggctattttaagaactactacaactatgataaagctgtga

SEQ ID NO: 73402 - DNA, 120 bp, Artificial Sequence
  ENSG00000078237_29 (sequence is synthesized)
atatgtagccatgaaccaaaacaaagtctctgtccttgtggaacatttgttctgtcagagaagacagtgtgttggctcacattgtggtcagtgctgttgagcaaaataggtcagagtaag

SEQ ID NO: 73403 - DNA, 120 bp, Artificial Sequence
  ENSG00000078237_30 (sequence is synthesized)
ggggatggagactggtgggaggaatgctgctttatccaggatgggcagggaggactcgatggtgtcagcactgaaggatgtaagatctgctgctctggggagaggagcagcatggaagga

SEQ ID NO: 73404 - DNA, 120 bp, Artificial Sequence
  ENSG00000078237_31 (sequence is synthesized)
agggggatgggagagtgacgggagaagaggacaggccacatggcctggtggcctgtgctgaggccttgggcttttactcaagtgagatgagatgccattggccagtttgggcagtgatgt

SEQ ID NO: 73405 - DNA, 120 bp, Artificial Sequence
  ENSG00000078237_32 (sequence is synthesized)
gatcagacttgtttcagcaggaccatcctgcttgcaatgtggagagcaggctgtagggggtgctataggagcacaaggttggaggcagggaagatggcagcactggctgttgggccattt

SEQ ID NO: 73406 - DNA, 120 bp, Artificial Sequence
  ENSG00000078237_33 (sequence is synthesized)
gaagaagcaaggccagggatgttggcagggaccaggccagagtgcctccaatggctaactaaggagcctggacattgaatttctaggttagcttaggatttctcatcctcccatctgtga

SEQ ID NO: 73407 - DNA, 120 bp, Artificial Sequence
  ENSG00000078237_34 (sequence is synthesized)
atgtcatagatctctcattttgcctgagtcttttatgcaatgatattttatttgtaatattttcccggtttttgattgttttttaacaaatgaattttttaagagacttaattttttaag

SEQ ID NO: 73408 - DNA, 120 bp, Artificial Sequence
  ENSG00000078237_35 (sequence is synthesized)
agaaactttaatttcccagcaaaagtgagaggaaggtagagagatttcccatctatcccctgcccctacacacgcattgcttctcctactatcaacatcccccaccagaccagtgcatct

SEQ ID NO: 73409 - DNA, 120 bp, Artificial Sequence
  ENSG00000078237_36 (sequence is synthesized)
gttaccatcggtgagcccacattacactgacatatccacatcacctgaaacccatagtttacattagggttcattcttggtgttgcatgatctgtgggtttggacaaacgtatgaagaca

SEQ ID NO: 73410 - DNA, 120 bp, Artificial Sequence
  ENSG00000078237_37 (sequence is synthesized)
tgtattccaccattatagtatcatgcagagtattttcactgccctaaaagtcctctgtgttccctgtactcatctttcccaccttgtcttgcctgtttctgttaggtttagtccgaggcc

SEQ ID NO: 73411 - DNA, 120 bp, Artificial Sequence
  ENSG00000078237_38 (sequence is synthesized)
tagcagagggaatgggcagaagtttccagttccaggcttcaccccaggctcgcagcttcaagcagagcctgtcgcttaggctcccttgcacctggagtcgaaaccatggctcccattcac

SEQ ID NO: 73412 - DNA, 120 bp, Artificial Sequence
  ENSG00000078237_39 (sequence is synthesized)
ctgtctcttattttcctgtccttcccactcctcactcacctactattcatttccatttttggatgaggattctcctttattgctttttaactaaaaacctgttttagttagcatctttat

SEQ ID NO: 73413 - DNA, 120 bp, Artificial Sequence
  ENSG00000078237_40 (sequence is synthesized)
tctaatttctttaaatgctatgtcatactcagcaaggacatgctcatattaggggaagcacataaagtaagatatccctgagagaacagtgcatctcacacccattccatggcttaggct

SEQ ID NO: 73414 - DNA, 120 bp, Artificial Sequence
  ENSG00000078237_41 (sequence is synthesized)
tatgcaggaagtgcaatatttggccatatcacttaagtacatatgcttatattatgtatacttgcatgcatattacatttacaagtagatgaattcgtgtaagttaaatggttctattat

SEQ ID NO: 73415 - DNA, 120 bp, Artificial Sequence
  ENSG00000078237_42 (sequence is synthesized)
atgtcttcactatattaaggtcagtcacaatttaattgaaatagatcatcctaggtgaatccacctggcataattatcagccctgttaagcacagacacaggagatgcaaaggaaagaag

SEQ ID NO: 73416 - DNA, 120 bp, Artificial Sequence
  ENSG00000078237_43 (sequence is synthesized)
tattcagtagagcggtggtgctgggctgagtacctgctatcagacgcagcacttaccagtttggaaattgaatggggctcctagaaaacatccttgtttcatgtaaatgttgctttttac

SEQ ID NO: 73417 - DNA, 120 bp, Artificial Sequence
  ENSG00000078237_44 (sequence is synthesized)
ccctctttctttgggccccatcaatttggaagtacagctttcagattgaagtatgtgtcagttcctttgtgtccaaacaagatggctaagtaggtcgtcatgacaggtaactaccagtgc

SEQ ID NO: 73418 - DNA, 120 bp, Artificial Sequence
  ENSG00000078237_45 (sequence is synthesized)
tttaaaaactttaggatttccccccacagttctcaatcacttggttcattgttcagcaatatggcctaagggggtgatttcttcattgataagtgacagggcagggacactggaaagatc

SEQ ID NO: 73419 - DNA, 120 bp, Artificial Sequence
  ENSG00000078237_46 (sequence is synthesized)
ggacactggaaagatctattgtcagaaggcctggattcaggttcaaggcctggttcttagtaattttgtgaccaagcaatcgctgaggtggctgggcgtggtggctcgcacctgtaatcc

SEQ ID NO: 73420 - DNA, 78 bp, Artificial Sequence
  ENSG00000078237_47 (sequence is synthesized)
actgcagcctgggtgacagagcaagactgggtctcaaaaaaaaaaaaaaaaaatcatttgataaataatgggctgtgc

SEQ ID NO: 73421 - DNA, 86 bp, Artificial Sequence
  ENSG00000078237_48 (sequence is synthesized)
aaattagctgggcgtctgagctactgtatcctcatagagaataattacagtaatgtgtatgtgcgtgtgttttggtaatcttttat

SEQ ID NO: 73422 - DNA, 120 bp, Artificial Sequence
  ENSG00000078237_49 (sequence is synthesized)
acagtaatgtgtatgtgcgtgtgttttggtaatcttttatcttggatttatcaaacctacagaaaagttgcaagaacagtagaaggaatggctgtatactcttcacacttattcaccact

SEQ ID NO: 73423 - DNA, 120 bp, Artificial Sequence
  ENSG00000078237_50 (sequence is synthesized)
tgcttacctgttgtcccacttgctttgccattttttctctctccctctgttttcccctgaaacattggagagtaactttgagtcctcatactcttcccctataaaatttcaatgtgtgtt

SEQ ID NO: 73424 - DNA, 120 bp, Artificial Sequence
  ENSG00000078237_51 (sequence is synthesized)
tcctgagatcaacaatgttcttatatataacccagaataaatatctgagtcaggaaatttgacattgatattgcctattagctaatccttagaccaaatttaaattctgtcaattatttt

SEQ ID NO: 73425 - DNA, 120 bp, Artificial Sequence
  ENSG00000078237_52 (sequence is synthesized)
gttgatgtacctgtggctttttttttttttctgaatcaagaatccaatcaatccaggactgtgtgttgtgttgcatttagttgtcatgtttcttcatgtccttccgtctactcctttgcc

SEQ ID NO: 73426 - DNA, 120 bp, Artificial Sequence
  ENSG00000078237_53 (sequence is synthesized)
ttcctttgcccttctttttttctcccaccatctatctaaccagatgaactttgtctttcttgatcttgttactttttaaaaaataggtgagttcttgtggttttttttcctgacatatcc

SEQ ID NO: 73427 - DNA, 120 bp, Artificial Sequence
  ENSG00000078237_54 (sequence is synthesized)
tcattattagatttggattgtatacttttgtcagaagcagcccagaaaggatgtgtccttggtcatgtcaggagggacaggacgttgtatcaatatgtctggttcctcattaaatttgca

SEQ ID NO: 73428 - DNA, 120 bp, Artificial Sequence
  ENSG00000078237_55 (sequence is synthesized)
actactcttttagcctttattgtttattttctgactctgttttttttttctttagccaactcacgccatgactctacttttgcttctatgtttattagttggcattctgtactaagacag

SEQ ID NO: 73429 - DNA, 120 bp, Artificial Sequence
  ENSG00000078237_56 (sequence is synthesized)
ctttacccttcttgcctacttatttatgtcagtatgagctcagaagttcttattcaggggcttataatacagtactcttattattttatggttacacagtcccaactttgtcctgtggga

SEQ ID NO: 73430 - DNA, 120 bp, Artificial Sequence
  ENSG00000078237_57 (sequence is synthesized)
accctttcaggctggctcttatgttctggtgacataatctcatccttctttaagtactttctttctggtattaacaatatgctccagactcattcttcccgagccccagccccagaatca

SEQ ID NO: 73431 - DNA, 120 bp, Artificial Sequence
  ENSG00000078237_58 (sequence is synthesized)
gctttttctctaaagagccctggttctttggaaatgaaatgaaagacgcctggtgtgcatggtatttagaaaccaagatctcggtgccagggtgctcattgctaatagtgcctttaaaaa

SEQ ID NO: 73432 - DNA, 120 bp, Artificial Sequence
  ENSG00000078237_59 (sequence is synthesized)
aattactgcattgaattccaatgcatagatacacaacagtttgtttattcttccattgacggaacacaaggaccatttctagtttggagctattatgaataaagctgctataaatatttt

SEQ ID NO: 73433 - DNA, 120 bp, Artificial Sequence
  ENSG00000078237_60 (sequence is synthesized)
tacaagtctttttgcggacgtatgttttcatttctcttgggtaaataatctgggagtggaattgctgagttataggttatatgttggtgtatgtttagttttataagacacttgccagat

SEQ ID NO: 73434 - DNA, 120 bp, Artificial Sequence
  ENSG00000078237_61 (sequence is synthesized)
ctttttccatggtggttgtaccatttcatgcttatcaacaatgagttctaggtgcttcacatccttgccaacatttgttattatcagtttctaaaattttagccattctgattgttgtat

SEQ ID NO: 73435 - DNA, 120 bp, Artificial Sequence
  ENSG00000078237_62 (sequence is synthesized)
ggtagtatatccctgcaattttaactggtgatatggaatgctttttaatgtacaattcttattgatcattcatacagctttctttgtgaaatgtgtattaaaatcttatccattaaaaaa

SEQ ID NO: 73436 - DNA, 120 bp, Artificial Sequence
  ENSG00000078237_63 (sequence is synthesized)
aactgggcggcctgagaaagcaagaccagcgcccctgcctctgtctcattgtccccctgaagctttgagtttatgcttcaagctttgagtttactcattattatggtttctttcatgctg

SEQ ID NO: 73437 - DNA, 120 bp, Artificial Sequence
  ENSG00000078237_64 (sequence is synthesized)
attcgctcggaggaccctggcccttctgctgcgctcaccgccgccgctctggtaaatgactgtccgcatggtttcaacatgcagttcttcctgcgaagtccactaggtggtactaatgcc

SEQ ID NO: 73438 - DNA, 120 bp, Artificial Sequence
  ENSG00000078237_65 (sequence is synthesized)
acggacaggatcactcacaaggaaacccagagccagccgggtgtaggttgcctctgccctgcacggaagggaacacctccctccagcagacagcactggagcagcacccccgcctccgcc

SEQ ID NO: 73439 - DNA, 120 bp, Artificial Sequence
  ENSG00000078237_66 (sequence is synthesized)
atctccccagggcagcctggggaaggaacgtcaggcctttcccgtccacacctggcgcagttccctcacctgcttctctcactaccgccacatcgtgactccatctggggtggctggtgc

SEQ ID NO: 73440 - DNA, 120 bp, Artificial Sequence
  ENSG00000078237_67 (sequence is synthesized)
tggttcatcaccttccctgactcttcagtgactaatccagagatggcacactggcagcttacagaccaaatccagcctgcagacataattagcttgactcccacagtgattgaaactgtc

SEQ ID NO: 73441 - DNA, 120 bp, Artificial Sequence
  ENSG00000078237_68 (sequence is synthesized)
ttggatttacttgccaatacaagatgagagctttcacataaaagtcaggattgtaacgactcttgggagatttaagtcctggcaaccacaggcccgcgaggccgcgagggctgcagctga

SEQ ID NO: 73442 - DNA, 120 bp, Artificial Sequence
  ENSG00000078237_69 (sequence is synthesized)
gtgtgactggcccctttctctaccctctgcccaccccacaaccgactgaacccgctgctctcttttacggcgcctgccagtcggcttagggcttacagctctgcagcctaacctgtgtct

SEQ ID NO: 73443 - DNA, 120 bp, Artificial Sequence
  ENSG00000078237_70 (sequence is synthesized)
gttttacctccctggccaggaaggagggcccagtaagtcccaagtggagtcatcctcctccaaccctctccaccacaaacagacctggaatacttctttcagtttgtggaccataacctc

SEQ ID NO: 73444 - DNA, 120 bp, Artificial Sequence
  ENSG00000078237_71 (sequence is synthesized)
tttcctctttgtgccatgggagcactgaaggagaagtcagtagcgtgtaatgtggagaggccctcaccagaacccaaccatgatggtaccctcatctcaaacttccagcctccagaactg

SEQ ID NO: 73445 - DNA, 120 bp, Artificial Sequence
  ENSG00000078237_72 (sequence is synthesized)
gccgctggcacgcactgtacagctgcgtcagctgctcgcaggacacgtcccgtcccgcagctggtccaagtctgtgccgcgtggagaaacaagatttaacaaggagaaaataatccaagg

SEQ ID NO: 73446 - DNA, 120 bp, Artificial Sequence
  ENSG00000078246_0 (sequence is synthesized)
actctagcgacggcggggaagagtgtgtacgtggtgggggcttcctcggtggcgggcatggaggcttcgcgctgccggctcagtcccagcggcgacagtgtcttccatgaagaaatgatg

SEQ ID NO: 73447 - DNA, 120 bp, Artificial Sequence
  ENSG00000078246_1 (sequence is synthesized)
aagatgcgacaggctaagctggattatcagaggctactacttgagaagaggcaaaggaaaaagcgccttgagccatttatggtgcagcccaatccagaagccaggctacgtcgggcaaag

SEQ ID NO: 73448 - DNA, 120 bp, Artificial Sequence
  ENSG00000078246_2 (sequence is synthesized)
ccaagggccagtgatgagcagactcccttggtgaactgtcatactccccacagcaatgtcatcttacatggtattgatggtccagctgctgtcctgaaaccagacgaagttcatgctcca

SEQ ID NO: 73449 - DNA, 120 bp, Artificial Sequence
  ENSG00000078246_3 (sequence is synthesized)
tcagtaagctcctctgttgtggaagaagatgctgaaaacaccgtggatactgcttccaagccaggacttcaggagcgtctccaaaagcatgatatctctgaaagtgtgaacttcgatgag

SEQ ID NO: 73450 - DNA, 120 bp, Artificial Sequence
  ENSG00000078246_4 (sequence is synthesized)
gagactgatggaatatcccagtcagcatgtttagaaagacccaattctgcatcaagccagaattcaaccgatacaggcacttccggttctgctactgccgcccaaccagctgataacctc

SEQ ID NO: 73451 - DNA, 120 bp, Artificial Sequence
  ENSG00000078246_5 (sequence is synthesized)
ctgggagacatagacgacctggaggactttgtgtatagtcctgcccctcaaggtgtcacagtaagatgtcggataatccgggataaaaggggaatggatcggggtctcttccccacctac

SEQ ID NO: 73452 - DNA, 120 bp, Artificial Sequence
  ENSG00000078246_6 (sequence is synthesized)
tatatgtacttggaaaaagaagaaaatcagaagatatttcttcttgcagctagaaagcggaaaaagagcaaaacagccaactaccttatctccattgatccagttgatttatctcgtgaa

SEQ ID NO: 73453 - DNA, 120 bp, Artificial Sequence
  ENSG00000078246_7 (sequence is synthesized)
ggagaaagttatgtcggcaagcttagatccaacctcatggggaccaagtttacagtttatgaccgtggcatctgccccatgaagggccggggtttggtaggagcggcccacacccggcag

SEQ ID NO: 73454 - DNA, 120 bp, Artificial Sequence
  ENSG00000078246_8 (sequence is synthesized)
gagctggctgccatctcctatgaaacaaacgtacttggatttaaaggtcctaggaaaatgtctgtgatcattcctggaatgacactgaatcataagcagatcccctatcagccacaaaac

SEQ ID NO: 73455 - DNA, 120 bp, Artificial Sequence
  ENSG00000078246_9 (sequence is synthesized)
aaccatgacagtttgctctcaaggtggcagaacagaactatggaaaatctggttgagctgcacaacaaggcccccgtctggaacagtgacactcagtcctatgtcctcaacttccgtggc

SEQ ID NO: 73456 - DNA, 120 bp, Artificial Sequence
  ENSG00000078246_10 (sequence is synthesized)
cgggtcactcaggcgtctgtgaagaacttccagatagtccacaaaaatgaccctgattatatagtcatgcagtttggacgtgtggcagatgacgtgttcacactggattacaactaccca

SEQ ID NO: 73457 - DNA, 120 bp, Artificial Sequence
  ENSG00000078246_11 (sequence is synthesized)
ctttgtgcagtacaggcctttggcatcggtctttctagctttgacagtaagctggcgtgtgaatgagagaacagtcaggcagggagcccttctccccacagagctttcaggagcagacag

SEQ ID NO: 73458 - DNA, 120 bp, Artificial Sequence
  ENSG00000078246_12 (sequence is synthesized)
acacacacacaaagagcaatagtttgccccttttggaacgacccctgaatatataaaacacacacacgaagagcaatagtttgccccttttggaacgacccctgaatatataaaacacac

SEQ ID NO: 73459 - DNA, 120 bp, Artificial Sequence
  ENSG00000078246_13 (sequence is synthesized)
acgaagagcaatagtttgccccttttggaacgacccctgaatatataaaacacacacacgaagagcaatagtttgccccttttggaacgacccctgaatatataaaacacacacacaccc

SEQ ID NO: 73460 - DNA, 120 bp, Artificial Sequence
  ENSG00000078246_14 (sequence is synthesized)
cgcgcactctcactccttttccaggtttcatagacttggtgagggatcacagcttagcatgggtgagagatgatttaaagcacagggagattcttgtcacattggggtctccaaagctag

SEQ ID NO: 73461 - DNA, 120 bp, Artificial Sequence
  ENSG00000078246_15 (sequence is synthesized)
aatgggatttcatgtgcttggaaacttgcagtagaatcagggactgacatcgcagttcctctcctctcttcattccctcacagcagattggccggcaccaatcttagtcaagagtggctg

SEQ ID NO: 73462 - DNA, 120 bp, Artificial Sequence
  ENSG00000078246_16 (sequence is synthesized)
tgatcacatttgtgatcaattatgtgagaattttatataattgtcttcatttcaattaaggctgaaagcataaactctagaggtgactcagtcaggactgacagtaatgtgataattgcc

SEQ ID NO: 73463 - DNA, 120 bp, Artificial Sequence
  ENSG00000078246_17 (sequence is synthesized)
ttcattttcaacccaggagtgcctctcacagctatatgactacggatccattagtgaggagcgacacacacacctgtaggcatcctgtgcaaacactttgtcattatcaagagagatggc

SEQ ID NO: 73464 - DNA, 120 bp, Artificial Sequence
  ENSG00000078246_18 (sequence is synthesized)
agtattgaccatttagtttagttaaaaaaaaaaaaaaaaaggtggcaggagaggctttggggaggatcagccagcagacatgagcactgctggcccgtgtggcagagctgtggactttct

SEQ ID NO: 73465 - DNA, 120 bp, Artificial Sequence
  ENSG00000078246_19 (sequence is synthesized)
tctcggctccctcaaccctggctcaggcacagaaggtgttttgctacgtttttttgattattacacccctccacgtattatgtgactcttacaccagttcacccttcccagaatgtatcc

SEQ ID NO: 73466 - DNA, 120 bp, Artificial Sequence
  ENSG00000078246_20 (sequence is synthesized)
aaaccttgagaatgcaggagctctgtgagctccaccgtcagcaccattcagctgcatcccttgtgcacagaactgtttgccagcgttgggtgggacacccgtggcggctgctccctcaga

SEQ ID NO: 73467 - DNA, 120 bp, Artificial Sequence
  ENSG00000078246_21 (sequence is synthesized)
cctcccttctgtggactgacctctcacctccgcctgttgttcctgcaccacatcagataagcatgtgaaggagggccaactggcagctgcgggacccttggcttgtcccccaccgacaag

SEQ ID NO: 73468 - DNA, 120 bp, Artificial Sequence
  ENSG00000078246_22 (sequence is synthesized)
tcccacctgctgggtgaggacgagactgtttccatctcaggcatgtatcccaccaagtgcctccctcacagccatgcccagaagcctcacacctcgtcaccaccaccaccccccacccca

SEQ ID NO: 73469 - DNA, 120 bp, Artificial Sequence
  ENSG00000078246_23 (sequence is synthesized)
tcctgaggcactgcctggcagataaccctggttggccacagaagctattaatacacgacagcatgtggggaaggacttatggtgggccaggtggacctcatcctgcttcttcctccctct

SEQ ID NO: 73470 - DNA, 120 bp, Artificial Sequence
  ENSG00000078246_24 (sequence is synthesized)
ggtttaaagagatatataaactaatttcacataatttgtgtgtgcaggtgattggtttttacataagtcctatttataccttttatatgttacagaaataaaagttaatttatataaaaa

SEQ ID NO: 73471 - DNA, 120 bp, Artificial Sequence
  ENSG00000078269_0 (sequence is synthesized)
gaaactctggcaagttgcgggcgcgcggggagctgtcgcgggcagcgcgccctcgggaggacgtggccccggcccccgcccgcagtgggcccgaccctcatggccctgagcaaagggctg

SEQ ID NO: 73472 - DNA, 120 bp, Artificial Sequence
  ENSG00000078269_1 (sequence is synthesized)
cggctgctggggcgcctgggggccgagggggactgtagcgtgctgctggaggcgcgcggccgcgacgactgcctgctgttcgaggccggcacggtggccacgctggctccagaagaaaag

SEQ ID NO: 73473 - DNA, 120 bp, Artificial Sequence
  ENSG00000078269_2 (sequence is synthesized)
gaagtcattaaaggacagtatggcaagctcacggacgcgtacggctgcctgggggagctgaggctgaaatctggtggcacgtctctgagcttcctggtgttggtgacaggctgcacatct

SEQ ID NO: 73474 - DNA, 120 bp, Artificial Sequence
  ENSG00000078269_3 (sequence is synthesized)
gtgggcagaattccagatgctgaaatctacaaaatcactgccactgacttttaccctcttcaggaagaggccaaggaggaggaacgcctcatagctttgaagaaaatcctcagctcgggg

SEQ ID NO: 73475 - DNA, 120 bp, Artificial Sequence
  ENSG00000078269_4 (sequence is synthesized)
gtgttctatttctcatggccaaacgatgggtctcgctttgacctgactgtccgcacgcagaagcagggggatgacagctctgaatgggggaactccttcttctggaaccagctgttgcac

SEQ ID NO: 73476 - DNA, 120 bp, Artificial Sequence
  ENSG00000078269_5 (sequence is synthesized)
gtgcccttgaggcagcaccaggtgagctgctgtgactggctgctgaagatcatctgcggggtggtcaccatccgcaccgtgtatgcctcccacaagcaggccaaggcctgcctcgtctct

SEQ ID NO: 73477 - DNA, 120 bp, Artificial Sequence
  ENSG00000078269_6 (sequence is synthesized)
cgcgttagctgtgagcgcacaggcactcgcttccacacccgtggcgtgaacgacgacggccatgtgtccaacttcgtggagacagagcagatgatttacatggacgatggagtgtcatct

SEQ ID NO: 73478 - DNA, 120 bp, Artificial Sequence
  ENSG00000078269_7 (sequence is synthesized)
tttgtccagatcagaggctccgttccgctgttctgggaacagccagggcttcaggttggctcccatcatctgagactccacagaggcctggaagccaatgcccctgctttcgacaggcac

SEQ ID NO: 73479 - DNA, 120 bp, Artificial Sequence
  ENSG00000078269_8 (sequence is synthesized)
atggtgcttctgaaggagcagtacgggcagcaggtggtcgtgaaccttctgggaagcagaggcggagaggaggtgctcaacagagccttcaagaagctgctctgggcttcttgccacgcg

SEQ ID NO: 73480 - DNA, 120 bp, Artificial Sequence
  ENSG00000078269_9 (sequence is synthesized)
ggcgacacgcctatgatcaattttgacttccatcagtttgccaaaggtgggaagctagagaaattggagaccctcttgaggccacagttaaagctgcactgggaagacttcgatgtgttc

SEQ ID NO: 73481 - DNA, 120 bp, Artificial Sequence
  ENSG00000078269_10 (sequence is synthesized)
acaaagggggagaacgtcagtccacgttttcagaaaggcactttgcggatgaactgtcttgactgcctggaccgaaccaacactgtgcagagcttcatcgcgctcgaggtcctgcatctg

SEQ ID NO: 73482 - DNA, 120 bp, Artificial Sequence
  ENSG00000078269_11 (sequence is synthesized)
cagctcaagaccctggggctgagttcaaaacccatcgttgaccgctttgtggagtccttcaaagccatgtggtctctgaatggccacagcctgagcaaggtgttcacaggcagcagagcc

SEQ ID NO: 73483 - DNA, 120 bp, Artificial Sequence
  ENSG00000078269_12 (sequence is synthesized)
ctggaagggaaggccaaggtggggaagctgaaggatggagcccggtccatgtctcgaaccatccagtccaacttcttcgacggggtgaagcaggaggccatcaagctgctgctggttggg

SEQ ID NO: 73484 - DNA, 120 bp, Artificial Sequence
  ENSG00000078269_13 (sequence is synthesized)
gacgtctacggcgaggaggtggcagacaaagggggcatgctgctggacagcacggcgctcctggtgactcccaggatcctgaaagctatgactgagcgtcagtccgaattcacaaatttc

SEQ ID NO: 73485 - DNA, 120 bp, Artificial Sequence
  ENSG00000078269_14 (sequence is synthesized)
aagcggatccggattgctatggggacctggaacgtgaacggaggaaagcagttccggagcaacgtgctcaggacggcggagctgacagactggctgctcgactcgccccagctctcggga

SEQ ID NO: 73486 - DNA, 120 bp, Artificial Sequence
  ENSG00000078269_15 (sequence is synthesized)
gctaccgactcccaggatgacagcagcccagctgacatatttgctgtggggtttgaagagatggtggaattgagcgcagggaatattgtcaatgccagtactaccaacaagaagatgtgg

SEQ ID NO: 73487 - DNA, 120 bp, Artificial Sequence
  ENSG00000078269_16 (sequence is synthesized)
ggtgaacagcttcagaaagccatctcacgctctcatagatacattctgttgacttcggcacagctggtgggcgtctgtctttatatctttgtacgtccataccatgtcccgttcatcagg

SEQ ID NO: 73488 - DNA, 120 bp, Artificial Sequence
  ENSG00000078269_17 (sequence is synthesized)
gacgtagccatcgacacagtgaagacgggcatggggggcaaggcggggaacaagggcgccgtcggcatccgcttccagttccacagcaccagcttctgcttcatatgtagtcacctgacg

SEQ ID NO: 73489 - DNA, 120 bp, Artificial Sequence
  ENSG00000078269_18 (sequence is synthesized)
gccgggcagtcccaggtgaaggagcggaatgaagactacaaggagatcacccagaaactctgcttcccaatggggagaaatgttttttctcatgattatgtattttggtgtggcgatttc

SEQ ID NO: 73490 - DNA, 120 bp, Artificial Sequence
  ENSG00000078269_19 (sequence is synthesized)
aactaccgcattgatcttacttatgaagaagtcttctattttgttaaacgccaagactggaagaaacttctggaatttgatcaactacagctacagaaatcaagtggaaaaatttttaag

SEQ ID NO: 73491 - DNA, 120 bp, Artificial Sequence
  ENSG00000078269_20 (sequence is synthesized)
gactttcacgaaggagccattaactttggacccacctacaagtatgacgttggctcagccgcctacgatacaagcgacaaatgccgcacccccgcctggacagacagggtgctgtggtgg

SEQ ID NO: 73492 - DNA, 120 bp, Artificial Sequence
  ENSG00000078269_21 (sequence is synthesized)
aggaagaaacatccctttgataaaacagctggagaactcaaccttctagacagtgatctagatgttgacaccaaagtcagacacacctggtctcctggtgccctgcagtattatggtcgt

SEQ ID NO: 73493 - DNA, 120 bp, Artificial Sequence
  ENSG00000078269_22 (sequence is synthesized)
gcggagctacaagcgtctgatcacagacctgtgctggcgatcgtggaggtggaagttcaggaagtcgatgtgggtgctcgggagagggttttccaggaagtgtcctccttccagggcccc

SEQ ID NO: 73494 - DNA, 120 bp, Artificial Sequence
  ENSG00000078269_23 (sequence is synthesized)
ctggatgccactgttgtagtaaaccttcaatcaccgaccttagaagagaaaaacgagtttccagaggacctgcgtactgagctcatgcagaccttggggagttatgggacaattgttctt

SEQ ID NO: 73495 - DNA, 120 bp, Artificial Sequence
  ENSG00000078269_24 (sequence is synthesized)
gtcaggatcaaccaagggcagatgctggtaacttttgcagacagtcactcggctctcagtgtcctggacgtggacggtatgaaggtgaaaggcagagcagtgaagattagaccgaagacc

SEQ ID NO: 73496 - DNA, 120 bp, Artificial Sequence
  ENSG00000078269_25 (sequence is synthesized)
aaggactggctgaaaggtttgcgagaggagatcattcggaaacgagacagcatggcccccgtgtctcccactgccaactcctgtttgctggaggaaaactttgacttcacaagtttggac

SEQ ID NO: 73497 - DNA, 120 bp, Artificial Sequence
  ENSG00000078269_26 (sequence is synthesized)
tatgagtcagaaggggatattcttgaagacgatgaagactacttggtggatgaattcaatcagcctggagtctcggacagtgaactcgggggagacgacctctctgatgtccccggcccc

SEQ ID NO: 73498 - DNA, 120 bp, Artificial Sequence
  ENSG00000078269_27 (sequence is synthesized)
acagcactggctcctcccagcaagtcacctgctctcaccaaaaagaagcagcatccaacgtacaaagatgacgcggacctggtggagctcaagcgggagctggaagccgtcggggagttc

SEQ ID NO: 73499 - DNA, 120 bp, Artificial Sequence
  ENSG00000078269_28 (sequence is synthesized)
cgccaccgttctccgagcaggtctctgtcggtccccaaccggcctcggccacctcaacccccgcagagacccccccctccaaccggtttaatggtgaaaaagtcggcttcagatgcgtcc

SEQ ID NO: 73500 - DNA, 120 bp, Artificial Sequence
  ENSG00000078269_29 (sequence is synthesized)
atctcctccggcacccatggacagtattcaattttgcagacggcaagacttctaccaggagcacctcagcaacctcccaaggctcggactggaataagtaaaccttataatgtcaagcag

SEQ ID NO: 73501 - DNA, 120 bp, Artificial Sequence
  ENSG00000078269_30 (sequence is synthesized)
taagtgccgtggccccaagggaccttgaagcatcctctgaaccagagcccacaccgggggcagccaaaccagagaccccacaggcgcccccactccttccccgtcggcccccacccagag

SEQ ID NO: 73502 - DNA, 120 bp, Artificial Sequence
  ENSG00000078269_31 (sequence is synthesized)
ttcctgccatcaagaagccaaccttgagaaggacaggaaagcccctgtcaccggaagaacagtttgagcaacagactgtccattttacaatcgggcccccggagacaagcgttgaggccc

SEQ ID NO: 73503 - DNA, 120 bp, Artificial Sequence
  ENSG00000078269_32 (sequence is synthesized)
ctcctgtcgtgacagcccctcgagtccctcctgttcccaaaccaagaacatttcagcctgggaaagctgcagagaggccaagccacaggaagccagcatcagacgaagcccctcctgggg

SEQ ID NO: 73504 - DNA, 120 bp, Artificial Sequence
  ENSG00000078269_33 (sequence is synthesized)
caggagcctctgtgccaccacctctggaggcgccgcctcttgtgcccaaggtacccccgaggaggaagaagtcagcccccgcagccttccacctgcaggtcctgcagagcaacagccagc

SEQ ID NO: 73505 - DNA, 120 bp, Artificial Sequence
  ENSG00000078269_34 (sequence is synthesized)
ttctccagggcctcacttacaatagcagtgacagcccctctgggcacccacctgccgcgggcaccgtcttcccacaaggggactttctcagcacttcatctgctacaagccccgacagcg

SEQ ID NO: 73506 - DNA, 120 bp, Artificial Sequence
  ENSG00000078269_35 (sequence is synthesized)
atggcaccaaagcgatgaagccagaggcagccccacttcttggtgattatcaggaccccttctggaaccttcttcaccaccctaaactgttgaataacacttggctttctaagagctcag

SEQ ID NO: 73507 - DNA, 120 bp, Artificial Sequence
  ENSG00000078269_36 (sequence is synthesized)
accctttggactcaggaaccaggagccccaaaagagatcccatagacccagtgtcagctggcgcttcagctgccaaggcagagctgccaccagatcatgaacacaaaaccttaggtcact

SEQ ID NO: 73508 - DNA, 120 bp, Artificial Sequence
  ENSG00000078269_37 (sequence is synthesized)
gggtgacaatcagtgaccaagaaaagaggacagcactgcaggtgtttgacccactggcaaaaacatgactgagcagctttgaaggctgcagtcctatagaatgcataccttcctccctct

SEQ ID NO: 73509 - DNA, 120 bp, Artificial Sequence
  ENSG00000078269_38 (sequence is synthesized)
agacatccctccaccagaagagacatctatttaaaggcacactggccaaaacgtttgtgcatctgtcactctcgtgtagtttacaaaaatcgtgtctcttattcagtaagatggttactc

SEQ ID NO: 73510 - DNA, 120 bp, Artificial Sequence
  ENSG00000078269_39 (sequence is synthesized)
agccaccaaaatatatttcactcaaggcttgtacatctgaagtttgctcttcaaggaatgggaaccttcctgttaaattcggtgtatggattttaagaaaggaatctagccaatgaggtc

SEQ ID NO: 73511 - DNA, 120 bp, Artificial Sequence
  ENSG00000078269_40 (sequence is synthesized)
caagaagttctcacccattgaatttttaaatggctgttcagttcatgttgtacgtgatggagatttgtcttttgttttatttgcattttacagatttggtataacattttggggagccac

SEQ ID NO: 73512 - DNA, 120 bp, Artificial Sequence
  ENSG00000078269_41 (sequence is synthesized)
ctgaaggttgatgtataaagtaaggattagagaaagaggtcgttgtgaccattagtagctgtcctggcccacttaaacaaggttacaaaaaatcagagtcggaagcagccaaataggtca

SEQ ID NO: 73513 - DNA, 120 bp, Artificial Sequence
  ENSG00000078269_42 (sequence is synthesized)
acctaatgactagactgtacattcccatgagccttcatgtttaagtgtgtacatgtgcgttaaccttgatgatgcgtgaatcccgagggagccggtggcatacaccgttagcttaacctt

SEQ ID NO: 73514 - DNA, 120 bp, Artificial Sequence
  ENSG00000078269_43 (sequence is synthesized)
agcttaaactagctgaaggctcctgtgccatgtcttagacattgcatgccctatcaattactataatcctgagccatggtgtgctactgaaaccaatttttatccaccatctagtcctta

SEQ ID NO: 73515 - DNA, 120 bp, Artificial Sequence
  ENSG00000078269_44 (sequence is synthesized)
ttaaatgaaacctcacggatcctttgttccgcttatattccatgcataccacataaaagcacacagtgcgaaaactcttgctgatacgcgatattgattctcattgttagaatatggaga

SEQ ID NO: 73516 - DNA, 120 bp, Artificial Sequence
  ENSG00000078269_45 (sequence is synthesized)
gtgtttcagcctcgtctgtccggctggagcttcgggatggaaagtgctatgtgtccctgcatataagaatcaccaggccagtgtttctgggtttgcttgtctatatgtttgtctatattt

SEQ ID NO: 73517 - DNA, 120 bp, Artificial Sequence
  ENSG00000078269_46 (sequence is synthesized)
tttgcctatacatttttcccacgtttccaacagcacttctcacctattcaataactgaaaaagacattaccatagtgctttacatttttaaagtaatgttacaaggtctggaatccattt

SEQ ID NO: 73518 - DNA, 120 bp, Artificial Sequence
  ENSG00000078269_47 (sequence is synthesized)
ggagcagataccgtgttttcgctatttaataagaagttcagtagtgaaatcttactgtaccgcctgttgtatctgggagcctcgtacagaggctcgcacagcagtgatcaagtgtcatcc

SEQ ID NO: 73519 - DNA, 120 bp, Artificial Sequence
  ENSG00000078269_48 (sequence is synthesized)
cttacgtgactgggggatgtctgtcctaaaagctgactgctaggatagtaaggatcatcttgcctgggctatgccactgtcttgttaccaattagacatctggaatttcataattagttt

SEQ ID NO: 73520 - DNA, 120 bp, Artificial Sequence
  ENSG00000078269_49 (sequence is synthesized)
tcattgtcactgtcaagatatattgcagattacttaaatatggccatcaaaacaaaagttacaacacgtatctcttttcatctgaaaactaatacctggaaaaggataaaaaaaaaaagg

SEQ ID NO: 73521 - DNA, 120 bp, Artificial Sequence
  ENSG00000078269_50 (sequence is synthesized)
aatccgtgacccacagagctagacagataagatgcatagttgaccagtcataaaaggcggtgtttaggtgatcaggatgccgttggtggcatttacgtgctttatatgatttttacctct

SEQ ID NO: 73522 - DNA, 120 bp, Artificial Sequence
  ENSG00000078269_51 (sequence is synthesized)
gtaacaaacacaagaaataaacagaatggtccttaacagagtttgggggagagagcaagatgggttccttggagaagctgatttgccaagatgcacatcgctattaacagccagagtcat

SEQ ID NO: 73523 - DNA, 120 bp, Artificial Sequence
  ENSG00000078269_52 (sequence is synthesized)
aaatgaaatgaaattgaagaattcattcaaatgctcttttccctataacctcttttctcaccaaaaaggagataaatttgaaaacagataaatgtaacaaccagtcaaagaagcagggga

SEQ ID NO: 73524 - DNA, 120 bp, Artificial Sequence
  ENSG00000078269_53 (sequence is synthesized)
aaagtaagctcctccaaagttgcttgcagtgctggaaatagatctcatttttaggttttctcttcgttccagataccaaataaatgggacagagaataaaatttttgttaaaatatgtgc

SEQ ID NO: 73525 - DNA, 120 bp, Artificial Sequence
  ENSG00000078269_54 (sequence is synthesized)
tcatctcctaagtagctcttcagagtctgaccgtaagtaaaaacacacagaattgtgttgactgggggaggtgaatcacaaaaaagttacgaggagtttaagagttaaatattatttgat

SEQ ID NO: 73526 - DNA, 120 bp, Artificial Sequence
  ENSG00000078269_55 (sequence is synthesized)
cgtggctgtcaaatttagtgaacaacatagattggatttggagttggtagtaggtatggttctcataccagaattctcttaaaaaaaaaaaaaaggacaattggaattgccttatttatt

SEQ ID NO: 73527 - DNA, 120 bp, Artificial Sequence
  ENSG00000078269_56 (sequence is synthesized)
tttaaaatcaatgcttactagttggtaggattcccaggtcagcagcagggttgattaaataatcttgacaatgagcagctgccatcttgggggatttcattctgtggttttttaaatgtt

SEQ ID NO: 73528 - DNA, 120 bp, Artificial Sequence
  ENSG00000078269_57 (sequence is synthesized)
tcgtctttgatgctaccatccagggcttcttattgtgaccttgtagcctattttgttcctgctgttctctaacatggtgcagttcacgcagactggtttaggtacttcacaactcaccat

SEQ ID NO: 73529 - DNA, 120 bp, Artificial Sequence
  ENSG00000078269_58 (sequence is synthesized)
tgtctctctgaccccaagcctagtcccttttacatcaccatcttctcagacttcttgcctattcttaaaatatgttttggttaatgattgaattaggacatcagcttaagcaattcctgt

SEQ ID NO: 73530 - DNA, 120 bp, Artificial Sequence
  ENSG00000078269_59 (sequence is synthesized)
aacggtttaacgttgttgaagttcaaggcacataataaaattctccctgatgtgtgtgtaagtataaacaaagtaatgtatcaaagcgttcactttataatgaagtcatttcattgggaa

SEQ ID NO: 73531 - DNA, 120 bp, Artificial Sequence
  ENSG00000078269_60 (sequence is synthesized)
ggaaagctgcaaagattattgggggactagtgattaataaaatcctgtaatatttttgaagtgaaaatttgtactgaaattgtacatgatacctattaaatgtttttgtctttttttaaa

SEQ ID NO: 73532 - DNA, 120 bp, Artificial Sequence
  ENSG00000078269_61 (sequence is synthesized)
atcaagaagccaaccttgagaaggacaggaaagattgttttttgctctcgctctcaagcttctcagccttgcttactgcttcaaagacatgagtttgtaaggacagtagcagcccaaaga

SEQ ID NO: 73533 - DNA, 120 bp, Artificial Sequence
  ENSG00000078269_62 (sequence is synthesized)
ctggcatctgtagacacatctggatcttccgtttgatctcagtgttctagtaacggaccctcggtaatcccttcctggtcatcacagcacgatgctgcttcccccctagagagtgtgagg

SEQ ID NO: 73534 - DNA, 120 bp, Artificial Sequence
  ENSG00000078269_63 (sequence is synthesized)
atcagaaagggggcgagcttaggggcggcattcctcttggggtgtgggtgtgggtgtttggatgctggaggaactcatcttttccccagcttgtggttggcctcatcttaccacctgggc

SEQ ID NO: 73535 - DNA, 120 bp, Artificial Sequence
  ENSG00000078269_64 (sequence is synthesized)
ctacccatggcttttgaatttccaccagcctttcggcgagctggcagcaggcgttgaactgacctccccactgagcccctgggtcccgggaagggcctgtgcctgccaagagcaccacgg

SEQ ID NO: 73536 - DNA, 120 bp, Artificial Sequence
  ENSG00000078269_65 (sequence is synthesized)
gtacacccctgcagcacctggagactaagactatgctgcccataatcctcttctctgactttcagaagatgtttaggtccctgtccctctgcttgtgttatttgggcagcttggcagtgt

SEQ ID NO: 73537 - DNA, 120 bp, Artificial Sequence
  ENSG00000078269_66 (sequence is synthesized)
tgaattcctgatttctgccggaagaaggggaccctccccacatccctgtgtccatcccaacgctccccacccccacatcctctttggttctctggtattgtggatatttgggggcagtaa

SEQ ID NO: 73538 - DNA, 85 bp, Artificial Sequence
  ENSG00000078269_67 (sequence is synthesized)
tctttggttctctggtattgtggatatttgggggcagtaatgtgcccagacttcaaaatgcacgtgaatcaaggctgggcatggt

SEQ ID NO: 73539 - DNA, 60 bp, Artificial Sequence
  ENSG00000078269_68 (sequence is synthesized)
aggctggtctgaaactcgccgtgcctggccgacctctcttctcttttaagatgtttcttt

SEQ ID NO: 73540 - DNA, 120 bp, Artificial Sequence
  ENSG00000078269_69 (sequence is synthesized)
cctaattacacattttgggagagcatagccaggaaattgcatctgtgaaaagaaaatacaaattttcctctagatgagtttgtgaacgcctgtgtggccccagcgctctgagaggtgggg

SEQ ID NO: 73541 - DNA, 120 bp, Artificial Sequence
  ENSG00000078269_70 (sequence is synthesized)
cctagaatgagtccgagtgttctcagctcctgcagctcttaccataccaattgctgccaaccttctgggattcctgggtcctggaaacccggcagcaacactgtgtctcaagcctacagt

SEQ ID NO: 73542 - DNA, 120 bp, Artificial Sequence
  ENSG00000078269_71 (sequence is synthesized)
gggcatgctggcgaggactgcaggcatggtcatgactgttttgaataattatatgcgaggaatgtttttaaccaaaggccccaaagcatccgaagcctggcttcaaggtggaggagtaag

SEQ ID NO: 73543 - DNA, 120 bp, Artificial Sequence
  ENSG00000078269_72 (sequence is synthesized)
gaggatgagtctgggacgtggggtggttcgtggcgcagacctctattgtggaagtgtcatgatcgcattcttggatattgactcgattctatatgggtctctcgaatggaacccctgcga

SEQ ID NO: 73544 - DNA, 120 bp, Artificial Sequence
  ENSG00000078269_73 (sequence is synthesized)
aggtgaggtcctgacttccatggcgttttctcctgtgctgggcaaggcagcgtctccctctccgcaggaaaatgcatgctgtccccataaggatgtgtgtgcgcatgggggtgcattttg

SEQ ID NO: 73545 - DNA, 120 bp, Artificial Sequence
  ENSG00000078269_74 (sequence is synthesized)
tgtgcatacaatacaccaaagaacaaagaatgatggaacaaatatctgtggacccaccaccaagaactaattaatcttagcattttgtcattgctccatatcataaatgacatcattgat

SEQ ID NO: 73546 - DNA, 120 bp, Artificial Sequence
  ENSG00000078269_75 (sequence is synthesized)
gaaaatttcaaagatgcaacctacgtattttgcggcttttatattttcttaaatgatgtcgttgtgcaacttgcttttttgttactatttttgagatacagtcgtgttgatgttatagct

SEQ ID NO: 73547 - DNA, 120 bp, Artificial Sequence
  ENSG00000078269_76 (sequence is synthesized)
ctggtgcattcatttgtaactgctgtctagtatcccactaaatatatccatggaacttacaacttatccattcacctcttgatgaatattttctccaggattttatgattacaaacacca

SEQ ID NO: 73548 - DNA, 82 bp, Artificial Sequence
  ENSG00000078269_77 (sequence is synthesized)
gatgaatattttctccaggattttatgattacaaacaccatagggtttttaaatctgggatgcacaaccattgcccaggctg

SEQ ID NO: 73549 - DNA, 63 bp, Artificial Sequence
  ENSG00000078269_78 (sequence is synthesized)
aggatgcagggctttttaaatgctctgtgcatcatgcattgaggatagagtggaggcagcaga

SEQ ID NO: 73550 - DNA, 120 bp, Artificial Sequence
  ENSG00000078269_79 (sequence is synthesized)
tctgtgcatcatgcattgaggatagagtggaggcagcagagggagcaccgtgggcaccagcacctgtgccctgggattgctgcagaggaagactcaccctgcagaatgtctttaaagaca

SEQ ID NO: 73551 - DNA, 120 bp, Artificial Sequence
  ENSG00000078269_80 (sequence is synthesized)
gaggagaggatggcatttgagggtgtgaagaaggaagagtttgatcttcccaaggctgctgcctaaactctcatgtcagtttcaacttttacaaggaaagaaattaagaaaaagaagacc

SEQ ID NO: 73552 - DNA, 120 bp, Artificial Sequence
  ENSG00000078269_81 (sequence is synthesized)
ataaaacctccacacttggtgtttgtgggccgagctattgtctttgtgttttctttttggagtgggtgggaagccagcttggcaagccgggtgtgaatgaacaggaatgagcaggagacg

SEQ ID NO: 73553 - DNA, 120 bp, Artificial Sequence
  ENSG00000078269_82 (sequence is synthesized)
ctctccacagctgggctgggcggcaggtggccatggtggagcgttgagcctggaggtggctcctgcagggactggagctgacagcccagccctccttcgtttcctgaggcttccccagca

SEQ ID NO: 73554 - DNA, 120 bp, Artificial Sequence
  ENSG00000078269_83 (sequence is synthesized)
aaaggccggtttctacccgatgatctcttgggccccgtcccgagagtgaggcacggcgccaccaggcacccccgatacgcagcgtgttgtgaagtgcccttgtgagcagcgggggatagg

SEQ ID NO: 73555 - DNA, 120 bp, Artificial Sequence
  ENSG00000078269_84 (sequence is synthesized)
gaacagaaaaccagctgtcagcgacagcgaggtggtgccccagagagggctgcctcattcgcctggctgcagggtccgaggtcgtcttggtagcatttggcaggaatttatttaggaagc

SEQ ID NO: 73556 - DNA, 120 bp, Artificial Sequence
  ENSG00000078269_85 (sequence is synthesized)
attcagcaaaccgagtgtgtgtggtgctgggagatgacgacgaaatggccctgcccccaaggaagcccctcccctgggggcacaggtggggagggaggtcatgagctttgtgtgtgtgac

SEQ ID NO: 73557 - DNA, 120 bp, Artificial Sequence
  ENSG00000078269_86 (sequence is synthesized)
aactgctgatgggaatgctattggcacgtacgaggggtgcctgtccgtgtcttgggagagcaaggaaggcttcccggaggagttgctgccaagttggcccagaaggatgaggaggagttc

SEQ ID NO: 73558 - DNA, 120 bp, Artificial Sequence
  ENSG00000078269_87 (sequence is synthesized)
ttctggtgaagtggggagggcagaggcaggatggtccctacggagcatgtggggacgctcgtgttcttccagaggatggaatgctgggcccgaagcctgaagtattgttagggtagagac

SEQ ID NO: 73559 - DNA, 120 bp, Artificial Sequence
  ENSG00000078269_88 (sequence is synthesized)
aggcgggaggtgcgtggagaaggggtcatggaggtcttgttgggcagatggcggtgggacgtcccaggcagggggagcatcttgggcaagagcccagggtgcgaggtcatgcttatggca

SEQ ID NO: 73560 - DNA, 120 bp, Artificial Sequence
  ENSG00000078269_89 (sequence is synthesized)
cattggaccagctggaggacagccagctcaggagagcagccggctggggtgtctgcccacgtgtggggcagggatgggctgcagcggggagggatttgggagcttctgtcgtagtcctgc

SEQ ID NO: 73561 - DNA, 120 bp, Artificial Sequence
  ENSG00000078269_90 (sequence is synthesized)
agggagtgggagctgtgcaagaaggaagggcggagcggctgtgatccaatgactttgggaaggccactcctgtgatggagtgggggaagacagaccccaggccaggggtcctgagtcaag

SEQ ID NO: 73562 - DNA, 120 bp, Artificial Sequence
  ENSG00000078269_91 (sequence is synthesized)
gcagtggctgaggaggcactggggaaggtgatttggagaggctttgggggtaggtcctgggggtctggaagggctctaggccaggaattttcagactcctgggggcatcagaatcacctg

SEQ ID NO: 73563 - DNA, 120 bp, Artificial Sequence
  ENSG00000078269_92 (sequence is synthesized)
gagggcttgttaaagcaaagcttgcccccagcctcaggcagctgggcggcaggaatctgcatgtctaacaggctcccaggggatgctgacttgctggccagggtcccacactttgagaag

SEQ ID NO: 73564 - DNA, 120 bp, Artificial Sequence
  ENSG00000078269_93 (sequence is synthesized)
ccccgcctgaagcttacaggacagggcaggttcttgagccattgagttgggcaatgccatgggaagttgcaggtgcacagacgttgccttcctggctgcggttgaacctgggctccattt

SEQ ID NO: 73565 - DNA, 120 bp, Artificial Sequence
  ENSG00000078269_94 (sequence is synthesized)
cagagggtgggccctgggtctcctgcagagggtgggccctggttggcatctgaggccttgacctccacttgcaccacccccgggttatggggcacctctggagagttaggacccaggcct

SEQ ID NO: 73566 - DNA, 120 bp, Artificial Sequence
  ENSG00000078269_95 (sequence is synthesized)
gctctcagcacaatgagaggaaaactaaccctgaactccctgccaccccccacccctggcccctggaatgtgttcagtgtagatttggaaaagaaacctgcgccaggcatggtgcctcat

SEQ ID NO: 73567 - DNA, 120 bp, Artificial Sequence
  ENSG00000078295_0 (sequence is synthesized)
ctgtgagcggccccgatgtggcaggaggcgatgcggcgccgccgctacctgcgggaccgctccgaggaggcggcgggcggcggagacgggctgccgcggtcccgggactggctctacgag

SEQ ID NO: 73568 - DNA, 120 bp, Artificial Sequence
  ENSG00000078295_1 (sequence is synthesized)
cggtcccgggactggctctacgagtcctactactgcatgagccagcagcacccgctcatcgtcttcctgctgctcatcgtcatgggctcctgcctcgccctgctcgccgtcttcttcgcg

SEQ ID NO: 73569 - DNA, 120 bp, Artificial Sequence
  ENSG00000078295_2 (sequence is synthesized)
ctcgggctggaagttgaagaccatgtggcgtttctaataacagttccaactgccctggcgattttctttgcgatatttatcctggtctgcatcgagtctgtgtttaagaagctgctgcgc

SEQ ID NO: 73570 - DNA, 120 bp, Artificial Sequence
  ENSG00000078295_3 (sequence is synthesized)
ctcttctcgttggtgatatggatatgccttgttgccatgggatacctgttcatgtgttttggaggcaccgtctctccctgggaccaggtatcgttcttcctcttcatcatcttcgtggtg

SEQ ID NO: 73571 - DNA, 120 bp, Artificial Sequence
  ENSG00000078295_4 (sequence is synthesized)
tacaccatgctgcccttcaacatgcgagacgccatcattgccagcgtcctcacctcctcctcccacaccatcgtgcttagcgtctgcctgtctgcaacaccgggaggcaaggagcacctg

SEQ ID NO: 73572 - DNA, 120 bp, Artificial Sequence
  ENSG00000078295_5 (sequence is synthesized)
gtctggcagatcctggccaatgtgatcattttcatctgtgggaacctggcgggagcctaccataagcacctcatggaactcgctcttcagcaaacatatcaggacacctgtaattgcatc

SEQ ID NO: 73573 - DNA, 120 bp, Artificial Sequence
  ENSG00000078295_6 (sequence is synthesized)
aagtcgcggatcaagttggaatttgaaaaacgtcaacaggagcggcttctgctctccctgctgccggcccacatcgccatggagatgaaagcggagatcatccagaggctgcagggcccc

SEQ ID NO: 73574 - DNA, 120 bp, Artificial Sequence
  ENSG00000078295_7 (sequence is synthesized)
aaggcgggccagatggagaacacaaataacttccacaacctgtatgtgaagcggcatacaaacgtgagcatcttatacgctgacatcgttggctttacccggctggcaagtgactgctcc

SEQ ID NO: 73575 - DNA, 120 bp, Artificial Sequence
  ENSG00000078295_8 (sequence is synthesized)
ccgggagaactagtccacatgctgaatgagctctttggaaagtttgatcaaattgcaaaggagaatgaatgcatgagaattaaaattttaggagactgctactactgtgtatctggactc

SEQ ID NO: 73576 - DNA, 120 bp, Artificial Sequence
  ENSG00000078295_9 (sequence is synthesized)
cctatatctctccctaaccatgccaagaactgtgtgaaaatggggctggacatgtgtgaagccataaagaaagtgagggatgctactggagttgatatcaacatgcgcgtgggcgtgcat

SEQ ID NO: 73577 - DNA, 120 bp, Artificial Sequence
  ENSG00000078295_10 (sequence is synthesized)
tctgggaatgtcctgtgtggcgtgattggtctgcagaagtggcaatatgatgtgtggtcacatgatgtgaccttggccaaccacatggaagctggaggggtccctggacgtgttcacatt

SEQ ID NO: 73578 - DNA, 120 bp, Artificial Sequence
  ENSG00000078295_11 (sequence is synthesized)
tcttctgtcaccctggagcacttgaatggcgcttataaagtggaggagggagatggtgacattagggacccatatttaaaacagcacctggtgaaaacctactttgtgatcaaccccaag

SEQ ID NO: 73579 - DNA, 120 bp, Artificial Sequence
  ENSG00000078295_12 (sequence is synthesized)
ggagaacgacggagcccccagcatctcttcagacctcgccacacccttgatggagccaaaatgagggcctcggtccgcatgacccggtacttggagtcctggggggcagccaagcccttt

SEQ ID NO: 73580 - DNA, 120 bp, Artificial Sequence
  ENSG00000078295_13 (sequence is synthesized)
gcacacctacatcacagggacagcatgaccacagagaacggcaagatcagcaccacggatgtacccatgggtcagcataattttcaaaatcgcaccttaagaaccaagtcacaaaagaag

SEQ ID NO: 73581 - DNA, 120 bp, Artificial Sequence
  ENSG00000078295_14 (sequence is synthesized)
agatttgaagaagaattgaatgaaaggatgattcaagcaattgatgggattaatgcacagaagcaatggctcaagtctgaagacattcagagaatctcactgcttttctataacaaagta

SEQ ID NO: 73582 - DNA, 120 bp, Artificial Sequence
  ENSG00000078295_15 (sequence is synthesized)
ctagaaaaagagtaccgggccacggcactgccagcgttcaagtattatgtgacttgtgcctgtctcatattcttctgcatcttcattgtgcagattctcgtgctgccaaaaacgtccgtc

SEQ ID NO: 73583 - DNA, 120 bp, Artificial Sequence
  ENSG00000078295_16 (sequence is synthesized)
ctgggcatctcctttggggctgcgtttctcttgctggccttcatcctcttcgtctgctttgctggacagcttctgcaatgcagcaaaaaagcctctcccctgctcatgtggcttttgaag

SEQ ID NO: 73584 - DNA, 120 bp, Artificial Sequence
  ENSG00000078295_17 (sequence is synthesized)
tcctcgggcatcattgccaaccgcccctggccacggatctctctcacgatcatcaccacagccatcatattaatgatggccgtgttcaacatgtttttcctgagtgactcagaggaaaca

SEQ ID NO: 73585 - DNA, 120 bp, Artificial Sequence
  ENSG00000078295_18 (sequence is synthesized)
atccctccaactgccaacacaacaaacacaagcttttcagcctcaaataatcaggtggcgattctgcgtgcgcagaatttatttttcctcccgtactttatctacagctgcattctggga

SEQ ID NO: 73586 - DNA, 120 bp, Artificial Sequence
  ENSG00000078295_19 (sequence is synthesized)
ctgatatcctgttccgtgttcctgcgggtaaactatgagctgaagatgttgatcatgatggtggccttggtgggctacaacaccatcctactccacacccacgcccacgtcctgggcgac

SEQ ID NO: 73587 - DNA, 120 bp, Artificial Sequence
  ENSG00000078295_20 (sequence is synthesized)
tacagccaggtcttatttgagagaccaggcatttggaaagacctgaagaccatgggctctgtgtctctctctatattcttcatcacactgcttgttctgggtagacagaatgaatattac

SEQ ID NO: 73588 - DNA, 120 bp, Artificial Sequence
  ENSG00000078295_21 (sequence is synthesized)
tgtaggttagacttcttatggaagaacaaattcaaaaaagagcgggaggagatagagaccatggagaacctgaaccgcgtgctgctggagaacgtgcttcccgcgcacgtggctgagcac

SEQ ID NO: 73589 - DNA, 120 bp, Artificial Sequence
  ENSG00000078295_22 (sequence is synthesized)
ttcctggccaggagcctgaagaatgaggagctataccaccagtcctatgactgcgtctgcgtcatgtttgcctccattccggatttcaaagaattttatacagaatccgacgtgaacaag

SEQ ID NO: 73590 - DNA, 120 bp, Artificial Sequence
  ENSG00000078295_23 (sequence is synthesized)
gagggcttggaatgccttcggctcctgaacgagatcatcgctgactttgatgatcttctttccaagccaaaattcagtggagttgaaaagattaagaccattggcagcacatacatggca

SEQ ID NO: 73591 - DNA, 120 bp, Artificial Sequence
  ENSG00000078295_24 (sequence is synthesized)
gcaacaggtctgagcgctgtgcccagccaggagcactcccaggagcccgagcggcagtacatgcacattggcaccatggtggagtttgcttttgccctggtagggaagctggatgccatc

SEQ ID NO: 73592 - DNA, 120 bp, Artificial Sequence
  ENSG00000078295_25 (sequence is synthesized)
aacaagcactccttcaacgacttcaaattgcgagtgggtattaaccatggacctgtgatagctggtgtgattggagctcagaagccacaatatgatatctggggcaacactgtcaatgtg

SEQ ID NO: 73593 - DNA, 120 bp, Artificial Sequence
  ENSG00000078295_26 (sequence is synthesized)
accgaggagacgagcctcgtcctgcagaccctcggatacacgtgcacctgtcgaggaataatcaacgtgaaaggaaagggggacctgaagacgtactttgtaaacacagaaatgtcaagg

SEQ ID NO: 73594 - DNA, 120 bp, Artificial Sequence
  ENSG00000078295_27 (sequence is synthesized)
tccctttcccagagcaacgtggcatcctgaagagtcaccttcattttggcaagaagactgtattttcaggaaggtatcacacactttctgactgcaacttctgtcccttgtttttgatgt

SEQ ID NO: 73595 - DNA, 120 bp, Artificial Sequence
  ENSG00000078295_28 (sequence is synthesized)
gcgtgctgtctgtcctatggagcctctgcagactcgttctcgtgacccagtggcataccgtttggtgtctgatgtgtgcccagatcgttctgccacttgcactgtgcttgctcctaagca

SEQ ID NO: 73596 - DNA, 120 bp, Artificial Sequence
  ENSG00000078295_29 (sequence is synthesized)
aaagggaaaaggagcgcgcgtgatagaagaaaagcactgggagaactaacagaggagaaaggtgaaacacacacacattcttaaggcaataaaactagggggtgtatattatcttctggt

SEQ ID NO: 73597 - DNA, 120 bp, Artificial Sequence
  ENSG00000078295_30 (sequence is synthesized)
gcatgttcttttctggaaaatatggtagctcgccaaccgcatctgctcatctgatattcaaacacacagtattcgtgaataagttgattctgtcccccacgtggactctgtgctcaccca

SEQ ID NO: 73598 - DNA, 120 bp, Artificial Sequence
  ENSG00000078295_31 (sequence is synthesized)
ttgtctcattgccagtggtgtccaagggcccccgttgggacccacggctctcgtccctctgctccgtgtgtctcatgccagcagcacgtcgccatccgtcaccagaattagtcctcacag

SEQ ID NO: 73599 - DNA, 120 bp, Artificial Sequence
  ENSG00000078295_32 (sequence is synthesized)
cctaggaccagttttgtatcaaactcgtctgatgttttgatgccatttgtcttttgtaaagttaattcattaaaagttttatgtactttgatttacagtgcctgtatcttttattttcct

SEQ ID NO: 73600 - DNA, 120 bp, Artificial Sequence
  ENSG00000078295_33 (sequence is synthesized)
gtcttctttctcctgtggtttgctccagaattaaggtttgttttccatccattctcccttttgacacagttgtttcagaaagagctctccagaagccaatattgagatgtaattcagatt

SEQ ID NO: 73601 - DNA, 120 bp, Artificial Sequence
  ENSG00000078295_34 (sequence is synthesized)
aggacacagtgtgtgacgcagataactggttactcagctccctggaaagcaggcaagcatgttgaatgtatctagtggtctgattttaatttgggcatctctagagaacgctttcaggga

SEQ ID NO: 73602 - DNA, 120 bp, Artificial Sequence
  ENSG00000078295_35 (sequence is synthesized)
aaaatactttaatagtaaaaagattctctgcgagcaacagtgccccctccgtccactacgctcctgtctccaagaatgttttgctagagctaacagacatagactgcaaaagaataattt

SEQ ID NO: 73603 - DNA, 120 bp, Artificial Sequence
  ENSG00000078295_36 (sequence is synthesized)
ggaatcagctatgcaaatcagtctcacaatagcgtgagctaactgagagaagtactaagacccacaaactgcctgttaagtctgagaaggctaaagaagacacacagccaacgttcatgc

SEQ ID NO: 73604 - DNA, 120 bp, Artificial Sequence
  ENSG00000078295_37 (sequence is synthesized)
atttttaaagacagaaggccttgaagaatttgttcttgtaaatccaacacaagttgtttggtacttttaacataaagaaatcatactttgccaaatagtgaaaagtagagcaatcgtgta

SEQ ID NO: 73605 - DNA, 120 bp, Artificial Sequence
  ENSG00000078295_38 (sequence is synthesized)
taagctaatgtttaaaagcaaaactgcaaattgtagcccagttggtcaaacttgttttctttttataactcatggcaggcatctgtaagaagtagagaacccagatgatctcttaggaag

SEQ ID NO: 73606 - DNA, 120 bp, Artificial Sequence
  ENSG00000078295_39 (sequence is synthesized)
ccttttattcgtgggaactcgaacttgaagcacaagttcctggtttgaatcctggctctgattttttactggctgtgtgactttgaacacatctcttagtccctcttaggagtactttcc

SEQ ID NO: 73607 - DNA, 120 bp, Artificial Sequence
  ENSG00000078295_40 (sequence is synthesized)
ttattggcaacttatggactcgctagtgattaaacgaggcaatgactgtgagcgagcctggcaggtgccccgtggtacattcacagcacgggcacagctgctgtgccaggactgtgactc

SEQ ID NO: 73608 - DNA, 120 bp, Artificial Sequence
  ENSG00000078295_41 (sequence is synthesized)
attcccagtaaaaggcacttatcgaagctgataaccgtccttcatcaccgaagtgtgagtagagcatgacttatttagtattctgcctcaatggggaattttttgatcctgtaatcacaa

SEQ ID NO: 73609 - DNA, 120 bp, Artificial Sequence
  ENSG00000078295_42 (sequence is synthesized)
ctcagcattggccttaatatacctaaatctccaaaaacagtgattaaagcaagagaattattacaagggcttttctctttcctctaactcattcttcacggatgccgtagcgtttccgtg

SEQ ID NO: 73610 - DNA, 120 bp, Artificial Sequence
  ENSG00000078295_43 (sequence is synthesized)
agctcaaactggccttggtgtaaaatgtgtaaggatgagcagcaggcgtgcctcgtgggttcttcctctgttacatcctgctacactcatccgcaggtcaccttagttcacctaccctga

SEQ ID NO: 73611 - DNA, 120 bp, Artificial Sequence
  ENSG00000078295_44 (sequence is synthesized)
gtgaacacccccagctgggtggtccaccaagttctcataaacagagtccctcccattcccccacggggtgcaccgaacttgggtttgcgctaaaaagaactcaaaaggagaactgtgctc

SEQ ID NO: 73612 - DNA, 120 bp, Artificial Sequence
  ENSG00000078295_45 (sequence is synthesized)
tcccaaagccatatcaccagtcttaccaaacaataggcttttaaaagcattgagtcattgtcagaatccactatgggaagctctgtgtgtacctggtcccttctaggtgtggtcccatag

SEQ ID NO: 73613 - DNA, 120 bp, Artificial Sequence
  ENSG00000078295_46 (sequence is synthesized)
gagcagccttagcatcccctgtgaacttatcaaaaatgcaaattctcaggccccaacctgaaggaggaccctgaatttgagatccccggggctggggcccagcacaactgctgtttagtg

SEQ ID NO: 73614 - DNA, 120 bp, Artificial Sequence
  ENSG00000078295_47 (sequence is synthesized)
aacaggttctccaggtgattctgatccctgatcaagcttcagacctccctccctccccagtgtttttgcaggtgaggaaacaggggcagagtaattcaggcacatgtgttcagagttcca

SEQ ID NO: 73615 - DNA, 120 bp, Artificial Sequence
  ENSG00000078295_48 (sequence is synthesized)
cagttgattagcagttgaggccaggctagaatggaaaactgcctgttccttgaatctgaaagagcattattcctggtcaaagctccttaaagttctgggcagctaaaagcatccctgtga

SEQ ID NO: 73616 - DNA, 120 bp, Artificial Sequence
  ENSG00000078295_49 (sequence is synthesized)
gcaaaaatgccaggcagaaaactggcagtgcacctctcatcagcccaggtcccagtgccattggcttcaagaaaaaaaaaaaatctctccccaatgctctccttaacctttaagtcttac

SEQ ID NO: 73617 - DNA, 120 bp, Artificial Sequence
  ENSG00000078295_50 (sequence is synthesized)
aggaagcctctcatagaaattgcctccagtccagtttcccaaaaaccccagtgttttacatatctgtttaggagtgtctaagttttgtcatcaatccaggatgttattcttccttcccaa

SEQ ID NO: 73618 - DNA, 120 bp, Artificial Sequence
  ENSG00000078295_51 (sequence is synthesized)
ctcactgtgctcctaaaggcagcaaccattcatctttcctttgctctggatacaccgaatgaccaggtaacatcatcaggccgggtgcagtggctcctataatcccaatattttgggagg

SEQ ID NO: 73619 - DNA, 69 bp, Artificial Sequence
  ENSG00000078295_52 (sequence is synthesized)
ccgggtgcagtggctcctataatcccaatattttgggaggccgaggagagaggatcacttagcaaaaaa

SEQ ID NO: 73620 - DNA, 120 bp, Artificial Sequence
  ENSG00000078295_53 (sequence is synthesized)
agaggcagatatcaaagctgatcagccaaagacttttactgaacatggagatcttcagttgtacccaaccaatgcactgcactgatggactgttttgaacccctgcacgctgggtggaga

SEQ ID NO: 73621 - DNA, 120 bp, Artificial Sequence
  ENSG00000078295_54 (sequence is synthesized)
agaacaatctagccttgcctgggatgaagtgcaagaaacactcctgtggatacaatctctaccccagccttcacttcctgtttctgcacttcagagcctctcctgtggggcatttctcct

SEQ ID NO: 73622 - DNA, 120 bp, Artificial Sequence
  ENSG00000078295_55 (sequence is synthesized)
ttctcctataagttccactcttccatcttctcgtttatttgagctgttaagctcaacattaggtgttcacatatgggtcagggtggtgagcatgtttttgcagtagaaatgagaaaacag

SEQ ID NO: 73623 - DNA, 120 bp, Artificial Sequence
  ENSG00000078295_56 (sequence is synthesized)
ccagactcagcctcctccctgggtgctagttctggatcccacttggagtctccttgccctcaggccatctggacttgcagtcttcgccaccgtgtgggaatttgatcccttgggttcttt

SEQ ID NO: 73624 - DNA, 120 bp, Artificial Sequence
  ENSG00000078295_57 (sequence is synthesized)
cctctgcgtggtgctagtggttgggcacttgggtgcagcaggatgtagtcatctctaggacggtggaaaaatctgtattttagcttccaggaaagaattcccaaactggccttcctacaa

SEQ ID NO: 73625 - DNA, 120 bp, Artificial Sequence
  ENSG00000078295_58 (sequence is synthesized)
tatgcttgctccttggctggtctgggagtctgcctgactggagacattttgcctgggatctcacacctcatatcaccatctctcctttgtgacagtggatcctttgcaggggaaataatc

SEQ ID NO: 73626 - DNA, 120 bp, Artificial Sequence
  ENSG00000078295_59 (sequence is synthesized)
acacagattctgccatcccactcacctgttcctgcctctcagggccttcacattaagatgagaaaataggatgctgtttgctgtgttggattgagttgtccttcatagccctggcttctg

SEQ ID NO: 73627 - DNA, 120 bp, Artificial Sequence
  ENSG00000078295_60 (sequence is synthesized)
tagccaagcatccatcacagaaaggagtgaaggggacagcggggtcttcattctggaaaccccgtggtcagattgcagtaagattggagggagagtctgtgggatctccaggcacaagac

SEQ ID NO: 73628 - DNA, 120 bp, Artificial Sequence
  ENSG00000078295_61 (sequence is synthesized)
gtctggaagaccagtgaccaaagtcacagaacactgatgtgcaccttagctaatttaccgtgaaagttactgcttttctgagactggtatactcatatctacttcccaggagtcgttctg

SEQ ID NO: 73629 - DNA, 120 bp, Artificial Sequence
  ENSG00000078295_62 (sequence is synthesized)
ggaattacagtgcctagaaaactaacatgttatcatcatgggattatagtagggaaagagattggtgtggggcttctgtctcccatgagctctagagagaaattatgaggaggcctcact

SEQ ID NO: 73630 - DNA, 120 bp, Artificial Sequence
  ENSG00000078295_63 (sequence is synthesized)
tcaggctggagaggattgtccctcccatttctctcctgcccctgtctccgagccacagcagagcgaggcccacccagaccgtctcgatttctgtgcccctcccattcccagtaccacgtc

SEQ ID NO: 73631 - DNA, 120 bp, Artificial Sequence
  ENSG00000078295_64 (sequence is synthesized)
ttttgggggtttgttctttcatccactcagtatgttaatacactgctttgcattctagctgggtgtagttgtccattcttgcactgctataaaaaactaactgagactgggtaatttata

SEQ ID NO: 73632 - DNA, 84 bp, Artificial Sequence
  ENSG00000078295_65 (sequence is synthesized)
taatcacggcagaaggtgaaggggaagcaggcacgttttacatgtccagagaaggagaaagagagggaaggggaaggtgtcaca

SEQ ID NO: 73633 - DNA, 120 bp, Artificial Sequence
  ENSG00000078295_66 (sequence is synthesized)
tccagagaaggagaaagagagggaaggggaaggtgtcacacacttttaaacagaccttgtgagagctcactcactatcacaagaacagcaagggagaaatctacccctctggcccaatcg

SEQ ID NO: 73634 - DNA, 79 bp, Artificial Sequence
  ENSG00000078295_67 (sequence is synthesized)
tgagttatcgccataagtaacctgtgcatgaatctgacctcatctgttatgttttgatggtcttcgtttagtcattaga

SEQ ID NO: 73635 - DNA, 120 bp, Artificial Sequence
  ENSG00000078295_68 (sequence is synthesized)
tcatctgttatgttttgatggtcttcgtttagtcattagagtttttagaagagccaggctgcttcaggtctaggttttttgaagcttattaaagagaaacaaatttaaccgttacttaaa

SEQ ID NO: 73636 - DNA, 120 bp, Artificial Sequence
  ENSG00000078295_69 (sequence is synthesized)
tcctgggcgactacagccaggtcttatttgagagaccaggcatttggaaagacctgaagaccatgggctctgtgtctctctctatattcttcatcacactgcttgttctgggtagacagg

SEQ ID NO: 73637 - DNA, 120 bp, Artificial Sequence
  ENSG00000078295_70 (sequence is synthesized)
ggcagctcggaaactttccaggagcaaagcaggaatgggaacatttagatgaagccagctctgggctttgtttctgtatttgtcaaataaagaaggtgaaccccttgggggtgtcatcac

SEQ ID NO: 73638 - DNA, 120 bp, Artificial Sequence
  ENSG00000078295_71 (sequence is synthesized)
agccactgtagccctgtgtgtacatagggacctgtctttaagcattgatataaatccccctgcagatgatcagtgcctgttcaccaagcttccagttgcaacacctgaagatggttcctt

SEQ ID NO: 73639 - DNA, 120 bp, Artificial Sequence
  ENSG00000078295_72 (sequence is synthesized)
ccttcattcgggaaacacggggtcctcaaatctacacctgactgggggcagcctacagccctataggagaatgaaagagcttggtttcagagctcttcagacttggaccagcatggatgg

SEQ ID NO: 73640 - DNA, 120 bp, Artificial Sequence
  ENSG00000078295_73 (sequence is synthesized)
ctccacgttccataacaggcatgccaagggtgtttggatgacgctcaaggccagtgattcctgcctggtaggcttgcagtctcgctgctgacctgacatgttctctggaagggagaagag

SEQ ID NO: 73641 - DNA, 120 bp, Artificial Sequence
  ENSG00000078295_74 (sequence is synthesized)
tggacactgaaccttaaatcagagcatcatcattcccactgtgatgctgggaaatgaaatgatcgtgtcattctgctcagctggcgggctgcagggttctctgtacttaatcacacaatg

SEQ ID NO: 73642 - DNA, 120 bp, Artificial Sequence
  ENSG00000078295_75 (sequence is synthesized)
cagatcttcccttggctgtaacatttcaaatgttactaccaatttctgtctaatagggtgagcaatgggggtgatggctactctagcagccattgtaagacttggggactaaactattaa

SEQ ID NO: 73643 - DNA, 120 bp, Artificial Sequence
  ENSG00000078295_76 (sequence is synthesized)
aaggagcccccaatccccaccacaatcagagcagacctatgccgtctcctcaaggaccctgtactcccccaggggaggtttgctagccagttgcgggaacagtgagtgtggggagattct

SEQ ID NO: 73644 - DNA, 120 bp, Artificial Sequence
  ENSG00000078295_77 (sequence is synthesized)
ggaggcttcagtccccatgggaacagcactgcatgcaaaacagagcccacacaaagggcctgagcaagaaagagaggcaccaaccccctgccaaaagttctcagagttcccacagtgagt

SEQ ID NO: 73645 - DNA, 120 bp, Artificial Sequence
  ENSG00000078295_78 (sequence is synthesized)
ctcagaaagggagagttttgtttgtttctgaaaacacataatgagggtgttataagaagagccacctgcgtgcataaagcatagcaaagtcgtgcccctcccttctgtggaatgtctcct

SEQ ID NO: 73646 - DNA, 120 bp, Artificial Sequence
  ENSG00000078295_79 (sequence is synthesized)
gtggccatcggaccctgctgccctaaagtagcctcctcactggacagaagaatctatttccttgacctaatgatgtaatattaaccttgcaatcccaggccaggtggggctaatattgtg

SEQ ID NO: 73647 - DNA, 120 bp, Artificial Sequence
  ENSG00000078295_80 (sequence is synthesized)
tggccttgcacagctgaatgataacggtgcccatgctgtttaagagtgtagctatcatcaaggtttctgtcccctctacagtgtcaggaccaaatactgacatcctgcctgagctctttt

SEQ ID NO: 73648 - DNA, 120 bp, Artificial Sequence
  ENSG00000078295_81 (sequence is synthesized)
cctccctaaggtttccccaagcagaagccctaccccttactgaaactgcatggcagagtgtggctgatgctgggaccaaagaagtccctgcagacaagagcagtgcttctgaaagtgaag

SEQ ID NO: 73649 - DNA, 120 bp, Artificial Sequence
  ENSG00000078295_82 (sequence is synthesized)
cacctgctaaacaagctattactggtccccacacaagccttccttgacctcctgggccctgagaggtgactgagagcaaagcatctgtcccagccctggcacctcttggctatggggcct

SEQ ID NO: 73650 - DNA, 120 bp, Artificial Sequence
  ENSG00000078295_83 (sequence is synthesized)
cagagtcctctcagagaccattaccaatttttgaagcaataatttagatgaagctcttagaactgtgcatggcatgtagtaaatactgttagctatcttttaagcaaatatcccagattc

SEQ ID NO: 73651 - DNA, 120 bp, Artificial Sequence
  ENSG00000078295_84 (sequence is synthesized)
atgcaaaacttgagaatcactgcccctgggaattgatcaaaagctttcagaaagggctcctgcccaacatttttagagcctgaataaagtggaaaacaaaacccaatgtaatcacttcgc

SEQ ID NO: 73652 - DNA, 120 bp, Artificial Sequence
  ENSG00000078295_85 (sequence is synthesized)
tcctgttcctggcattggataaaaagcactgtgggcagtgcctgccttcccagccccctctcagcagggtgggccaagccctggtgctgagtgctcagtgcctctgaatgcagaggcccc

SEQ ID NO: 73653 - DNA, 120 bp, Artificial Sequence
  ENSG00000078295_86 (sequence is synthesized)
gggggaggcttctggggcatggggtggatgggagcaggccctcagcccctttgtgtgggttgccccggcatccaccacactaatccatttccactaaactcttggtgatactgctctgtg

SEQ ID NO: 73654 - DNA, 120 bp, Artificial Sequence
  ENSG00000078295_87 (sequence is synthesized)
agtcttctggaaataatacaggaaaacaagactttggcaaaagcaagtatagctatactttaccaatattgccggtttggttccagacctctgcaataaagtgaatatcactatcaagcg

SEQ ID NO: 73655 - DNA, 120 bp, Artificial Sequence
  ENSG00000078295_88 (sequence is synthesized)
agtcacaaatttttgctttcccagcacatgtgaagattgtttacactatactgtatgttttaagtattcaatagcatgatgtgtaaaaaaaaatgtacataccttaactttaaaatactg

SEQ ID NO: 73656 - DNA, 120 bp, Artificial Sequence
  ENSG00000078295_89 (sequence is synthesized)
tattgcaaaaaatgctgacatggatacacaaaatgagcacatgctgttgggaaaatggtgccattagacttggtcaagggagggtggcagcaaacattcactttgtgaaagatgcaatat

SEQ ID NO: 73657 - DNA, 120 bp, Artificial Sequence
  ENSG00000078295_90 (sequence is synthesized)
ctgtgcactgcaataaagcaagacgcaatacaacaaggtctacctataagccaaaaaaaaaaggacttgaagtcatgttttatttccctgcctgggatcagcttatacctgcatcctttc

SEQ ID NO: 73658 - DNA, 120 bp, Artificial Sequence
  ENSG00000078295_91 (sequence is synthesized)
tgacttaactagtgaaatacttcatgcataaacaggatgggggctgcttccctgcagaatcactgccctgaggatgaacgacttcctgggaccaaaactgacaggtcaggactctgggag

SEQ ID NO: 73659 - DNA, 120 bp, Artificial Sequence
  ENSG00000078295_92 (sequence is synthesized)
agaccagggaggcagttccattcctctctgtggcacaacctgtggttgctgatgactttttgagtccagggcagggcgtctttggatagcctccactccatggcttctggaacaatgctt

SEQ ID NO: 73660 - DNA, 120 bp, Artificial Sequence
  ENSG00000078295_93 (sequence is synthesized)
ggaaaatggcacagcttatgccaagacctgcattaacacagatcatgtcatttttgctctcctacccactgcatcaatgcacaaaaggaaattaatttcccttcagaaatagggagtcaa

SEQ ID NO: 73661 - DNA, 120 bp, Artificial Sequence
  ENSG00000078295_94 (sequence is synthesized)
gaatgatgtaatcgctgtaacaatcaattctgaaaaggttttatttcaatgaagaagtgctcataggcctatgctcgggctcatgggcatagggctggctgtttgtgtctacactggctt

SEQ ID NO: 73662 - DNA, 120 bp, Artificial Sequence
  ENSG00000078295_95 (sequence is synthesized)
tgcagtgcctcttccttctcctgggcacttgtgttacttaaaacttcctgaagcttctccatcagctgttaactgtcatggccagattcagcccacacaaccctcaggctcatcaggaga

SEQ ID NO: 73663 - DNA, 120 bp, Artificial Sequence
  ENSG00000078295_96 (sequence is synthesized)
gttctgtgcacccagatgggagccttctctgtttcggaagcctgttctccccacctctgtgtgtggcaggaacatttctgaaaagccccttcaatgggcatcaaagccagctctcatcac

SEQ ID NO: 73664 - DNA, 120 bp, Artificial Sequence
  ENSG00000078295_97 (sequence is synthesized)
ttggggagaagactgcattttgtcaccaaatcgaccccgtgccaagtccccgggtggtagaggattgtgagccagacatcctcattcggagagagccaatgcctgatcaaaacaagccac

SEQ ID NO: 73665 - DNA, 120 bp, Artificial Sequence
  ENSG00000078295_98 (sequence is synthesized)
atgagccacggatgccaccacagaaatttgggaaatgcccctcgtgtgcaaacagcacctccctttctgctggtgagaaccctcccagtgacgaccaggcagatcactcaacagtgctaa

SEQ ID NO: 73666 - DNA, 120 bp, Artificial Sequence
  ENSG00000078295_99 (sequence is synthesized)
gctttaagctctatgcccatgcgtcctctgcaggagggtcaggctagcatgcccttggggtttcaatagacgcttctgtgctttctagtcatttgactcccctgagtaaattaggcatta

SEQ ID NO: 73667 - DNA, 120 bp, Artificial Sequence
  ENSG00000078295_100 (sequence is synthesized)
actgacagttggggacaccaggtgcttaatggttcccacatagatcaactcgggaaacgtggacgatccaaagcctctatgcagcccaagtcagtgagacaaagcaccagtctggtctgg

SEQ ID NO: 73668 - DNA, 120 bp, Artificial Sequence
  ENSG00000078295_101 (sequence is synthesized)
gaggtgggagacctgagcgccggtggcagctttgaatgttttctagaacactccaacccccatgcccacctggatggagagccccagacgcctccacacctgggcccacggcaccaactg

SEQ ID NO: 73669 - DNA, 120 bp, Artificial Sequence
  ENSG00000078295_102 (sequence is synthesized)
cactttattatgttttctggattttctctgtctctccaactagacttcatgctccctaagggcagggcttgtgttcttttcctctgtgtccctaacatctggtatgaagtctggcacaca

SEQ ID NO: 73670 - DNA, 120 bp, Artificial Sequence
  ENSG00000078295_103 (sequence is synthesized)
gcaggccctttgatagggcacgtgtgtgtgtaacagggcgtcagagggaatttcagcctgcgacactaagagacgcttgctctcttattccaaaggaggcattaaacagtgtgcagagct

SEQ ID NO: 73671 - DNA, 120 bp, Artificial Sequence
  ENSG00000078295_104 (sequence is synthesized)
tacaaacgccttccttgacctgcagggagcttatgaattggccagaagactagaggttgaaagagggtttgggtagaatgtagtggggatgagccccctcctagaggggaaggtggggat

SEQ ID NO: 73672 - DNA, 120 bp, Artificial Sequence
  ENSG00000078295_105 (sequence is synthesized)
cccccctcacttccagcctgtgaacaggccagaactgctcagcctgggagcaccccatgacttgagtctctgagtggtcctgggaagcatctccaactgggggacaccaatagcaggcag

SEQ ID NO: 73673 - DNA, 120 bp, Artificial Sequence
  ENSG00000078295_106 (sequence is synthesized)
gttctgatacttggaaacactgaatgcaggtgctgatggggcatctgggcacacagggtggggagctgtggtttgggacatggctggactgtcagttgtttggacagcaaagggtgctca

SEQ ID NO: 73674 - DNA, 120 bp, Artificial Sequence
  ENSG00000078295_107 (sequence is synthesized)
gtgttgcccaaggatcaagcaagaaaaagagaattggtgtagggttattttagatccaatgttacaaagctgcctgggtgacggggggaaggcagtgggaggtgaaggcacctccacaga

SEQ ID NO: 73675 - DNA, 120 bp, Artificial Sequence
  ENSG00000078295_108 (sequence is synthesized)
gaaagcccggacctgagagggtagtgaggagcaggagggatgtgcatggcctccatcatagaagactcaggtttgaggggatgtccagggatgggcgaaatggcagggagtcttccaaaa

SEQ ID NO: 73676 - DNA, 120 bp, Artificial Sequence
  ENSG00000078295_109 (sequence is synthesized)
acccatgaaaacatccacaggaggaaagccaggtttgagtattcagggagcaggatgcagctaataggaagctgtcctgcctcgcagcctcttcctccttcccctcttctccattctgga

SEQ ID NO: 73677 - DNA, 120 bp, Artificial Sequence
  ENSG00000078295_110 (sequence is synthesized)
tggtttggaaaacccagctagcaagttaggaagagtggaggagtggtggagagagagtagaaaccaactgatcccccttctccacttgcaaaaggcccacactggggaagggcacaagcc

SEQ ID NO: 73678 - DNA, 120 bp, Artificial Sequence
  ENSG00000078295_111 (sequence is synthesized)
gtgagccaacgcgccctgccaagttttgactatttcttggactggggcctctaattatggatgagaggaccttgcattacacacagtgacatgcagggccacagggtagtcccgagtgtt

SEQ ID NO: 73679 - DNA, 120 bp, Artificial Sequence
  ENSG00000078295_112 (sequence is synthesized)
cgtccaagatggggaagatctagccacactccaaaaactgaaaggggtagtggccacagaaacgcagttgctttgtgattattttttcatgccttgagcttgttcaacagaatggttaca

SEQ ID NO: 73680 - DNA, 120 bp, Artificial Sequence
  ENSG00000078295_113 (sequence is synthesized)
tgtgaatgaatgttgaggagacgtctaaactcactttcaattctaaagctcagtaatacttttgggtagccatatgctgacatgggtcacccattctagaccttgaattccaaattatct

SEQ ID NO: 73681 - DNA, 120 bp, Artificial Sequence
  ENSG00000078295_114 (sequence is synthesized)
tcaaaggctgcccacctgccctactccagcccccaggtcctctggaagtctaagacaatctcaggtcatctaccagtcagcatgcaatcctctctggccccacacccaatgcaaccacat

SEQ ID NO: 73682 - DNA, 120 bp, Artificial Sequence
  ENSG00000078295_115 (sequence is synthesized)
gagggaacctctcttgagttcagtgcatggttctcagccctccaagtttcacaggctccagagaatttcagaagcctagaagtttccctggtttcccagtagttatagtcttatggaagc

SEQ ID NO: 73683 - DNA, 120 bp, Artificial Sequence
  ENSG00000078295_116 (sequence is synthesized)
cctgaatctgaggaccaggtgagcagtgacctgagctcaccctgggcattccctcagagcctcagagcttccaagagaccactctgccaaagaaagtgggtgatcagtttgtagtccaag

SEQ ID NO: 73684 - DNA, 120 bp, Artificial Sequence
  ENSG00000078295_117 (sequence is synthesized)
ctccccagaagcattcacggcctgcagagaatgcagggattggtcctggcccttccccttagccagctgagagccttggtggcaaccgcagctcccctgagctccatttcctcacgtagt

SEQ ID NO: 73685 - DNA, 120 bp, Artificial Sequence
  ENSG00000078295_118 (sequence is synthesized)
ctgtcattcttaatcaaggctgaacagcagaataacccagggaactttccaaaacaatgcctgcgcttggagcccagcctaggggatgagggtcgtttggtcagtggggaggcccaggca

SEQ ID NO: 73686 - DNA, 120 bp, Artificial Sequence
  ENSG00000078295_119 (sequence is synthesized)
cctgccctctgggaagtcccattggagattctcccgtgcagccccattttggtcctgtgtaatgaaatgacatgtcagatccaaactgcccatcagttcagtcttgcatttcatcatctc

SEQ ID NO: 73687 - DNA, 120 bp, Artificial Sequence
  ENSG00000078295_120 (sequence is synthesized)
caactcccagacacccttaaagactccagaggaaaatacaaaggtaaagtgacaggacccgcaagtgtcagaggacctgtgctacccccaaactgagcagtgaagcccatgatcatcccg

SEQ ID NO: 73688 - DNA, 120 bp, Artificial Sequence
  ENSG00000078295_121 (sequence is synthesized)
gagacttgatcaagtataaagtatagtatttacacgggtggattctactgtcagacttgataactccagcctcgggcaagtaatgtaacccctctgtgcctcagtttctttatttgtaga

SEQ ID NO: 73689 - DNA, 120 bp, Artificial Sequence
  ENSG00000078295_122 (sequence is synthesized)
tggaaaactctagtaccagcctcacagggttgtagttgtggtgagttcatgcacttaaagtgttcagagaggtgcccatcctaccatgtggtgagcgctcagtaagtgctggctattatt

SEQ ID NO: 73690 - DNA, 120 bp, Artificial Sequence
  ENSG00000078295_123 (sequence is synthesized)
gtgcttattcttgtcatcattatcattccccaaagagcactctggacagtgtcagcagagagtggggaaatgcaggatatagaaaatatgtccttggctgggtgcggtggctcacacctg

SEQ ID NO: 73691 - DNA, 76 bp, Artificial Sequence
  ENSG00000078295_124 (sequence is synthesized)
ctactaccagctactcagtaggctgagggaggagaatcgcttggatccgcgaggtggaggttgcagtgagccaaga

SEQ ID NO: 73692 - DNA, 120 bp, Artificial Sequence
  ENSG00000078295_125 (sequence is synthesized)
gtgagactttgtctcaaaaagaaaaaaaagtatgtcctcccctggctagatgcacccttttcctcaagcacagggacatcagtggagtttataccatttttataaaactgacatttttaa

SEQ ID NO: 73693 - DNA, 120 bp, Artificial Sequence
  ENSG00000078295_126 (sequence is synthesized)
ctcacacaagatcctagggggttctcatccctgttctctgacccctggctgcagtcagcattgccagcgctgtgccttggctgtcataggctgtctaccgaggatatgagtgttcacaaa

SEQ ID NO: 73694 - DNA, 120 bp, Artificial Sequence
  ENSG00000078295_127 (sequence is synthesized)
ggcaactttgcagagagagagaaaacacaattctgcacaagaaaccagcacaatcatattgagcacaaaatagaaaagaaaaccttgatttcgttgttcatgtactttgtacagatcttg

SEQ ID NO: 73695 - DNA, 120 bp, Artificial Sequence
  ENSG00000078295_128 (sequence is synthesized)
aggcagtagtagggattacagagtggctggtcctgagaaccagaaaaggacacgagtccatctttttctcaaaactgttgtggccttcacctgggttgccctggctctgatgggtttgtg

SEQ ID NO: 73696 - DNA, 120 bp, Artificial Sequence
  ENSG00000078295_129 (sequence is synthesized)
acgggacctccctggggaaagaacagttcctctgaggtgccaccaaaccttggagttataatactatttaagtgcttgctctctgcaaaggagttcatctgggtgccccaaagagcaggg

SEQ ID NO: 73697 - DNA, 120 bp, Artificial Sequence
  ENSG00000078295_130 (sequence is synthesized)
cttactgataatgttcatgtagaatggattccctcgccctgccagacacacaggaagcaccaaccatttttccctcccctcagaggtcagccatcttgtttaacagaactctcctcacct

SEQ ID NO: 73698 - DNA, 120 bp, Artificial Sequence
  ENSG00000078295_131 (sequence is synthesized)
ttcctggagaagaaagcatttcccatgctgcactgcgtccacagtggccccggctagtctgcctgtgttagggccatctcaggggtctgaggaccccttgccagtggaagggcagatcct

SEQ ID NO: 73699 - DNA, 120 bp, Artificial Sequence
  ENSG00000078295_132 (sequence is synthesized)
ccacacctaggactagcccccaagaccacctaacaactcttcctttctggaaccttcattgaattcgaaggtgtcactgtgttgggaaaattatggaaacaccttgaaattgtgtttaca

SEQ ID NO: 73700 - DNA, 120 bp, Artificial Sequence
  ENSG00000078295_133 (sequence is synthesized)
agacactgcaatttaactcatgtctgtggataaagaactatgagcttcttcctatttaaaaacaaaagaatatcatgaataaatatagtcagtgtctaatataatataaataagtagact

SEQ ID NO: 73701 - DNA, 120 bp, Artificial Sequence
  ENSG00000078295_134 (sequence is synthesized)
gaggagctctattggttctttctggtgtaataagaagtaacttgatgaattccatacgctgttttcaggagacactgaagaggaaaattcatcaagactcccatccaaatactatagcca

SEQ ID NO: 73702 - DNA, 120 bp, Artificial Sequence
  ENSG00000078295_135 (sequence is synthesized)
taatgagttatttcaggacaatctgagagtttgggaaattattttgtttcccttcagttgttgaaaggacactttttactaagccagaactccgtggtctgttgtcattgtctcaagtca

SEQ ID NO: 73703 - DNA, 120 bp, Artificial Sequence
  ENSG00000078295_136 (sequence is synthesized)
atatgacagagaggtttaactggcaaggcacctcttcttaactggtagtggcctgaatccagctcattagaagctttcccctgagagcagcggcagcatctggattgggccgcggctggg

SEQ ID NO: 73704 - DNA, 120 bp, Artificial Sequence
  ENSG00000078295_137 (sequence is synthesized)
gtggggcaagtggagtaggcatttgggcgatgtctgtgtgaatcctggcataaacaagccacttgcctgtggagtgtttctgtttaaaggtcagtctcctagtgatcagctcttgctttt

SEQ ID NO: 73705 - DNA, 120 bp, Artificial Sequence
  ENSG00000078304_0 (sequence is synthesized)
ctggtttcttgccttaaggagcccattgcctttcccgctgaagtctagatgttgacatgtaataaagcgggcagcaggatggtggtggatgcggccaactccaatgggcctttccagccc

SEQ ID NO: 73706 - DNA, 120 bp, Artificial Sequence
  ENSG00000078304_1 (sequence is synthesized)
gtggtccttctccatattcgagatgttcctcctgctgatcaagagaagctttttatccagaagttacgtcagtgttgcgtcctctttgactttgtttctgatccactaagtgacctaaag

SEQ ID NO: 73707 - DNA, 120 bp, Artificial Sequence
  ENSG00000078304_2 (sequence is synthesized)
tggaaggaagtaaaacgagctgctttaagtgaaatggtagaatatatcacccataatcggaatgtgatcacagagcctatttacccagaagtagtccatatgtttgcagttaacatgttt

SEQ ID NO: 73708 - DNA, 120 bp, Artificial Sequence
  ENSG00000078304_3 (sequence is synthesized)
cgaacattaccaccttcctccaatcctacgggagcggaatttgacccggaggaagatgaaccaacgttagaagcagcctggcctcatctacagcttgtttatgaatttttcttaagattt

SEQ ID NO: 73709 - DNA, 120 bp, Artificial Sequence
  ENSG00000078304_4 (sequence is synthesized)
ttagagtctccagatttccaacctaatatagcgaagaaatatattgatcagaagtttgtattgcagcttttagagctctttgacagtgaagatcctcgggagagagattttcttaaaacc

SEQ ID NO: 73710 - DNA, 120 bp, Artificial Sequence
  ENSG00000078304_5 (sequence is synthesized)
acccttcacagaatctatgggaaattcctaggcttgagagcttacatcagaaaacagataaataatatattttataggtttatttatgaaacagagcatcataatggcatagcagagtta

SEQ ID NO: 73711 - DNA, 120 bp, Artificial Sequence
  ENSG00000078304_6 (sequence is synthesized)
ctggaaatattgggaagtataattaatggatttgccttaccactaaaagaagagcacaagattttcttattgaaggtgttactacctttgcacaaagtgaaatctctgagtgtctaccat

SEQ ID NO: 73712 - DNA, 120 bp, Artificial Sequence
  ENSG00000078304_7 (sequence is synthesized)
ccccagctggcatactgtgtagtgcagtttttagaaaaggacagcaccctcacggaaccagtggtgatggcacttctcaaatactggccaaagactcacagtccaaaagaagtaatgttc

SEQ ID NO: 73713 - DNA, 120 bp, Artificial Sequence
  ENSG00000078304_8 (sequence is synthesized)
ttaaacgaattagaagagattttagatgtcattgaaccatcagaatttgtgaagatcatggaacccctcttccggcagttggccaaatgtgtctccagcccacacttccaggtggcagag

SEQ ID NO: 73714 - DNA, 120 bp, Artificial Sequence
  ENSG00000078304_9 (sequence is synthesized)
cgagctctctattactggaataatgaatacatcatgagtttaatcagtgacaacgcagcgaagattctgcccatcatgtttccttccttgtaccgcaactcaaagacccattggaacaag

SEQ ID NO: 73715 - DNA, 120 bp, Artificial Sequence
  ENSG00000078304_10 (sequence is synthesized)
acaatacatggcttgatatacaacgccctgaagctcttcatggagatgaaccaaaagctatttgatgactgtacacaacagttcaaagcagagaaactaaaagagaagctaaaaatgaaa

SEQ ID NO: 73716 - DNA, 120 bp, Artificial Sequence
  ENSG00000078304_11 (sequence is synthesized)
gaacgggaagaagcatgggttaaaatagaaaatctagccaaagccaatccccagtacacagtgtatagtcaagccagcaccatgagcattccggttgcaatggagacagatgggccttta

SEQ ID NO: 73717 - DNA, 120 bp, Artificial Sequence
  ENSG00000078304_12 (sequence is synthesized)
tttgaagatgtgcagatgctgagaaagacagtgaaggacgaggctcatcaggcacagaaagatccgaagaaggaccgtcctcttgcacgccgcaagtccgagctgcctcaggacccccac

SEQ ID NO: 73718 - DNA, 120 bp, Artificial Sequence
  ENSG00000078304_13 (sequence is synthesized)
accaagaaagccttggaagctcactgcagggccgatgagctggcctcccaggacggccgctagcctccggggcgccgcgtcggggccgggcccgccagttcttttccggattctgtagaa

SEQ ID NO: 73719 - DNA, 120 bp, Artificial Sequence
  ENSG00000078304_14 (sequence is synthesized)
aatacatacttcctgtgccataccaatcagttacactcaaagctttcttggaccccgttccgtaggcaataacgtgcgtccgcctcagcgcgagattaggagttcaaacaatggtgactt

SEQ ID NO: 73720 - DNA, 120 bp, Artificial Sequence
  ENSG00000078304_15 (sequence is synthesized)
cccagagcccgctggcagagccgcgggttgacgacggtgtcctcgcagtgtcgccgccaccccagcgtagtccaagtcagactatttcacaaagtcagagcgataggaaagcaccctgcc

SEQ ID NO: 73721 - DNA, 120 bp, Artificial Sequence
  ENSG00000078304_16 (sequence is synthesized)
cttcatcttcatgttctcccaaatggaacttaggatcttttaacataggtggttctgtgataacatcagtgttttccaaatcaaaggaacgctttaaaaaataggacctattttttaaga

SEQ ID NO: 73722 - DNA, 120 bp, Artificial Sequence
  ENSG00000078304_17 (sequence is synthesized)
ctttacagcctttgaaatggtttccacgtgattgttacgccagcagttctcgttttgtttgtttttcaatctcagtgaaatggctctttgctttcgagttctcacgcaacgtactgggca

SEQ ID NO: 73723 - DNA, 120 bp, Artificial Sequence
  ENSG00000078304_18 (sequence is synthesized)
tcctcagccgctggtattttctaaggggtctcttcactttgatgagtgacatgaacaccgtgtctccttctcttgtgtgtacctaaagccatatttccaagtctgtggtactccaggatt

SEQ ID NO: 73724 - DNA, 120 bp, Artificial Sequence
  ENSG00000078304_19 (sequence is synthesized)
ccaggagtaagcctgtagaagagatttattttaaaagagattgctctgaaatttatcttaaaagagcttgctctgtctaccttgacagaaattggagttttaaaattatgtgttaatatt

SEQ ID NO: 73725 - DNA, 120 bp, Artificial Sequence
  ENSG00000078304_20 (sequence is synthesized)
tttatttgcagatttcgtttccgtcaacttaaacattgttgcccttcaacaaggctcttgaattaataaaattatagtctctaagaattccacattttatggaaagttagagcaaaatca

SEQ ID NO: 73726 - DNA, 120 bp, Artificial Sequence
  ENSG00000078304_21 (sequence is synthesized)
ttttgagttaagccagttcttagcctaatgcaaactgcagcgcctttaagcataaagtaacacaacagcattgcacggggccggcactgccgctgccttcactgaaggctgcagtgctgt

SEQ ID NO: 73727 - DNA, 120 bp, Artificial Sequence
  ENSG00000078304_22 (sequence is synthesized)
tctgagagcttggaggaggcaccagcgaggatgacgtttagtggagctctttctgttgaaaagagctcacgttatcaacaccttgtaaggaaaatacagtgtctgagttttcatcggtct

SEQ ID NO: 73728 - DNA, 120 bp, Artificial Sequence
  ENSG00000078304_23 (sequence is synthesized)
tcacatgctgctatatattccacagagttccttgcatgtactgagcttttgttttagatggaatagcacaaggagaaaaatctttaaacttagtgctttgtctattctttatttctctca

SEQ ID NO: 73729 - DNA, 120 bp, Artificial Sequence
  ENSG00000078304_24 (sequence is synthesized)
gggtggccagtattttgacttatttatcctgcttgaaagctacttgagatgtgtactgctattctaaacacgtgatctagtttctttcatctctggcataagattatataacttaatgtt

SEQ ID NO: 73730 - DNA, 120 bp, Artificial Sequence
  ENSG00000078304_25 (sequence is synthesized)
aagtgtcttgaggcataaaagacaaaatgtggcttattttaggatctgttttttcatcgaggtctcgggtatcctttcaaagatagtgagaagcagacactgctccttgtgcagctctgg

SEQ ID NO: 73731 - DNA, 120 bp, Artificial Sequence
  ENSG00000078304_26 (sequence is synthesized)
tacctcctgcccactgctgtcacttcaagccactggcaatgcttctgtcctcgtgtcttggaggaaaatcacctggggggaggggacttcttgtggtaagagcaagtgcaggtatgaaat

SEQ ID NO: 73732 - DNA, 120 bp, Artificial Sequence
  ENSG00000078304_27 (sequence is synthesized)
gcgaagattgccccagctaaaagtggacaagtccgctttgtgagatgaatacttcctgagaaacttgacaagtatctctccattttaccattatgaaaactatcattaaaaaaaacagtt

SEQ ID NO: 73733 - DNA, 120 bp, Artificial Sequence
  ENSG00000078304_28 (sequence is synthesized)
tagatgccttctccttttgagggaaaaagggtgctttttattgtataaagcagcgtcttatgtattttgatataccattgtttgaacttccgtctttagctgatagattctcaaatatcc

SEQ ID NO: 73734 - DNA, 120 bp, Artificial Sequence
  ENSG00000078304_29 (sequence is synthesized)
ttgattttggatgttcagtatgtttgtgagagaggtttctgggaagactctctttttgccctcgggaaaaagcaaaatatcaatgtttgggtgactgtgtaaagctcagtgtgtaagaac

SEQ ID NO: 73735 - DNA, 120 bp, Artificial Sequence
  ENSG00000078304_30 (sequence is synthesized)
atctttttgtctaggttttctttctgctctttattgaagacaaacactcaccaaaaagaaaaataaaagttttcagagaaactaattttctttggcaagagtattacttaatattttggc

SEQ ID NO: 73736 - DNA, 120 bp, Artificial Sequence
  ENSG00000078304_31 (sequence is synthesized)
ctcctaaagtttccctagttagtactcggactcctgtgctaattgtcagcttacatatcattgtatagagactgtttattctgtaccaaactgatttcaaaagtactacattgaaaataa

SEQ ID NO: 73737 - DNA, 120 bp, Artificial Sequence
  ENSG00000078304_32 (sequence is synthesized)
accggtgactgtttttcttcataaagttctgcgtttggcatcttcactctttccaaaatgtatctgtacatcagaaatgtcactattccaagtgtctttttagtgtggctttagtatggc

SEQ ID NO: 73738 - DNA, 120 bp, Artificial Sequence
  ENSG00000078304_33 (sequence is synthesized)
ttccttttaatattgtacatacattgtatctttgttttatggtaataagtaataaaaatgtagacttcatattttgtacaaaatgtcctatgtacagaataaaaaagttcatagaaacag

SEQ ID NO: 73739 - DNA, 120 bp, Artificial Sequence
  ENSG00000078304_34 (sequence is synthesized)
caaatataggtaagtggcacaattatttttctttagaaaatatctgtaactttatgcattagtgaaatgttaagtaccgacatattttttaacattttgtaattcaaaactttttgtttt

SEQ ID NO: 73740 - DNA, 120 bp, Artificial Sequence
  ENSG00000078304_35 (sequence is synthesized)
gacattgtttatgaagagaaacttcatacacttgccatttaatatgctcttttatctaattttcaaaaactctaaaaaacggtgtatcatatggactaaataaagaacatgtgaatttta

SEQ ID NO: 73741 - DNA, 120 bp, Artificial Sequence
  ENSG00000078304_36 (sequence is synthesized)
cagggttacttgaatgtttttataagataggaatatatgtcttcaccatggggggggtctcgatttcactaacgttgtatatgaaaatgtctgcaataaaaagtacttttaaactttgta

SEQ ID NO: 73742 - DNA, 120 bp, Artificial Sequence
  ENSG00000078304_37 (sequence is synthesized)
ctgcagcctcggcctcctggactcaagcaatccgcccacttcagcctcccaagcagcagtgactaccggcaccaccacactcagctgatttttgtatttttagcagagatggagttttaa

SEQ ID NO: 73743 - DNA, 120 bp, Artificial Sequence
  ENSG00000078304_38 (sequence is synthesized)
ggcggcggcggcggcggcggcccgctccagccatgccgaataaaaacaagaaggagaaagaatcaccaaaagcagggaagagtggaaaaagttcaaaagaaggacaagacacagtagaat

SEQ ID NO: 73744 - DNA, 120 bp, Artificial Sequence
  ENSG00000078304_39 (sequence is synthesized)
cagagcaaatttccgtcaggaaaaacagccttgttgctgtcccgtctacagtatctgctaaaataaaagtaccagtctctcagcccatagtgaagaaagacaaacggcaaaattcttcaa

SEQ ID NO: 73745 - DNA, 120 bp, Artificial Sequence
  ENSG00000078304_40 (sequence is synthesized)
ggtttagcgcaagcaataatagagaacttcaaaaactaccatccttaaaagattgcaaatgcacaagattcgagacctatgtatacagagggccaacttttcatacgcacgggttctgcg

SEQ ID NO: 73746 - DNA, 120 bp, Artificial Sequence
  ENSG00000078304_41 (sequence is synthesized)
aagtccctgaccttcagctgtggccgcctacggagcagcagggagagcaaacccatggagaaccccgcggcccccaaagcatggacggagctgccagccttctcccctgcccttcttcct

SEQ ID NO: 73747 - DNA, 120 bp, Artificial Sequence
  ENSG00000078304_42 (sequence is synthesized)
ctactcccgacctgccagccttctcccctgcccttctgcctctactcccgacctgccaaccttagcctaaaatcagagctgctagaatcacacacactgtcgtagctggttttgtattgt

SEQ ID NO: 73748 - DNA, 120 bp, Artificial Sequence
  ENSG00000078304_43 (sequence is synthesized)
aaatgagtcattctgttattttggaaacttatgtctcatgccaggatctgcagatagttctttttcaaaatattgtttagacaaaataaatttctttaaatataatatctctactttaaa

SEQ ID NO: 73749 - DNA, 120 bp, Artificial Sequence
  ENSG00000078304_44 (sequence is synthesized)
gacaaacggcaaaattcttcaaggtttagcgcaagcaataatagagaacttcaaaaactaccatccttaaaaggtccccccacattgtagcacgtgccagaccctcgctcccgtcgaagg

SEQ ID NO: 73750 - DNA, 120 bp, Artificial Sequence
  ENSG00000078304_45 (sequence is synthesized)
ctgatgccatccttcagtgatgtgtggacggacacattccgcgtatcccccaatcagtggatggacgcgtgggttgcagagcacgccacacacattcagtcagtacacgagttaacagtt

SEQ ID NO: 73751 - DNA, 120 bp, Artificial Sequence
  ENSG00000078304_46 (sequence is synthesized)
gccctcctggcccctctgccctctttctccaccctctccattttcaccgagatggttgtggtgtcacctctcgtggggtggccaaaaccccagccagggccacctatcccttcacctccc

SEQ ID NO: 73752 - DNA, 120 bp, Artificial Sequence
  ENSG00000078304_47 (sequence is synthesized)
tccacctcggatttcctcttggaaaatgaggctcctgactcacttgacctactgcgtaggctcctaaaagggtgtcggcaagttggcaagttaaaaaaaaaaacaatcagcatgaaagca

SEQ ID NO: 73753 - DNA, 120 bp, Artificial Sequence
  ENSG00000078304_48 (sequence is synthesized)
cggcggcggcggcccgctccagccatgccgaataaaaacaagaaggagaaagaatcaccaaaagcagggaagagtggaaaaagttcaaaagaaggacaagacacagtagaatcagagtgc

SEQ ID NO: 73754 - DNA, 120 bp, Artificial Sequence
  ENSG00000078304_49 (sequence is synthesized)
tactgtctaagagctggagctacagagcttgaaattaccactgaaaacactgaaatgttgggcccttcactgcttcctcataaggataccagaggcaacctggcatattaagcttgacac

SEQ ID NO: 73755 - DNA, 120 bp, Artificial Sequence
  ENSG00000078304_50 (sequence is synthesized)
ttggcagatcactgtgtaaattgtttttcaggaatacaagttgggacacttctgttcatttgacctttgagttgacccttaaattttattattgttttttttcccctcagtcttcagctc

SEQ ID NO: 73756 - DNA, 120 bp, Artificial Sequence
  ENSG00000078304_51 (sequence is synthesized)
actgcttcacttctagttccacccacttaccaaatatgattgactcatgcaggtgaattaaaccattattgcacactttttccctctcctctctctcagtattactcttaacttgaatat

SEQ ID NO: 73757 - DNA, 89 bp, Artificial Sequence
  ENSG00000078304_52 (sequence is synthesized)
tccctctcctctctctcagtattactcttaacttgaatattttaacctgaacaatttaaataggcttgacattcccatgctgctttcaa

SEQ ID NO: 73758 - DNA, 74 bp, Artificial Sequence
  ENSG00000078304_53 (sequence is synthesized)
ttgttggccaggctagtctcgaactcgtgacctcaggtgatccgtctgcctcagcatcccaaagtgctgggatt

SEQ ID NO: 73759 - DNA, 120 bp, Artificial Sequence
  ENSG00000078304_54 (sequence is synthesized)
atgcagcccctttcaagccttttaacatcatgtcaccttcacaatgagcagttgctcccattacccagtgaactcaccttctgatgggacagttaccctagttggggcttctcagccttg

SEQ ID NO: 73760 - DNA, 120 bp, Artificial Sequence
  ENSG00000078304_55 (sequence is synthesized)
ggttgacttaacacactacttcaagtatatggcaggtctgtataataaactcctgcctgtctagtcttcagcctcatagaaagcaagaaagcaggtggcgtatgttgcagaacaattctt

SEQ ID NO: 73761 - DNA, 120 bp, Artificial Sequence
  ENSG00000078304_56 (sequence is synthesized)
gggtagaacaaggggacatttgatggtttgggtttttcagtaagaaagatgaagtcctggagtatagggtagagtggtacagtggaaaatatttcagcttgggggttagaaaataaacat

SEQ ID NO: 73762 - DNA, 120 bp, Artificial Sequence
  ENSG00000078304_57 (sequence is synthesized)
gccgattcttgctttgccataaatgatgtcacctaacttgtgtgaccctgttttctcatccctaaaatgatttgataagtttaagattaggctatttttaaatgtatggaagaaattggg

SEQ ID NO: 73763 - DNA, 120 bp, Artificial Sequence
  ENSG00000078304_58 (sequence is synthesized)
tgttacccttcttgaaagacattttccctgcaagtatggcaggctgtatctttcagtgtaacaaagttctattaaaggtcataactgctgccctgtaacttttgccttattctagaaact

SEQ ID NO: 73764 - DNA, 120 bp, Artificial Sequence
  ENSG00000078304_59 (sequence is synthesized)
tctactccttgaatgacatgtgttggtacatgtttcttctctttcagatagaatggttaattttgacttgttgcttctgcacacgtgtcctggaaataaaagtttcttcccactacttat

SEQ ID NO: 73765 - DNA, 120 bp, Artificial Sequence
  ENSG00000078304_60 (sequence is synthesized)
tgctgatttatttcataggaagtcttaaggaaagaggcaaaaaacgggctcatgggtcacttgaagttggaaaattctgtggagattgacaaaggagactcacttttgagcatctgttct

SEQ ID NO: 73766 - DNA, 120 bp, Artificial Sequence
  ENSG00000078304_61 (sequence is synthesized)
cagtgtaaccttcaaatctgtggaaacataactaggcacattttatgattatttagaatgttaataaattgctctgagtttcctcaagtccattttgtaagatcagaccataggtgggtg

SEQ ID NO: 73767 - DNA, 120 bp, Artificial Sequence
  ENSG00000078304_62 (sequence is synthesized)
ttgtttcttttaagtgtgtgtactgtgtccaatgttacatttttagaagtgttcatgctttttgtaaagtgattcgttttaagcacattaaaggtcgtttgagtattgtcatgtatttta

SEQ ID NO: 73768 - DNA, 120 bp, Artificial Sequence
  ENSG00000078304_63 (sequence is synthesized)
tgttgaaggaacagactccaggactgactttccacttgattttcggagctcgcacatcccgagagattcatgttcaagctgcattttagacatagctggcaagagtattttcgtgatgtt

SEQ ID NO: 73769 - DNA, 120 bp, Artificial Sequence
  ENSG00000078304_64 (sequence is synthesized)
tatttgatgactgtacacaacagttcaaagcagagaaactaaaagagaagctaaaaatgaaagaacgggaagaagcatgggttaaaatagaaaatctagccaaagccaatccccaggcat

SEQ ID NO: 73770 - DNA, 120 bp, Artificial Sequence
  ENSG00000078304_65 (sequence is synthesized)
gccgtggttctgcataggagctttgacgaactgtgatgctgggagcttagccctgccttgtcctcatgtctgtgttgacgccatctgtgacgcagtccccatgagtctcgtccacatgct

SEQ ID NO: 73771 - DNA, 120 bp, Artificial Sequence
  ENSG00000078304_66 (sequence is synthesized)
ctagtcgcatggcacatggtctcctaaacagaaaatacttcatgggtcaatacctcagagctggaaactctggcctcgtacttgcttctcattctcaggagaaaatatctaaattctgat

SEQ ID NO: 73772 - DNA, 120 bp, Artificial Sequence
  ENSG00000078304_67 (sequence is synthesized)
tagttgggttttcaaagtttggttttccatctcagatctgcctgtggagaattggtttgcgggctttgtttttaagtacacagtgtatagtcaagccagcaccatgagcattccggttgc

SEQ ID NO: 73773 - DNA, 120 bp, Artificial Sequence
  ENSG00000078304_68 (sequence is synthesized)
ttttcgtggtaaacgtaaacttactattggtaaagattcttaatgagtaattcttaggatttagtacaaaattagatatattctttttattcgtaatgatatagcatgaagttcttgcgg

SEQ ID NO: 73774 - DNA, 120 bp, Artificial Sequence
  ENSG00000078304_69 (sequence is synthesized)
agcatcaagaaatatttcttgatgtgtacaattgaagtgatgtttacaatgtagtgaaaaaaaaacctatgcacgcatgttcctgattttaataaagctctgcaaagatttccttcctca

SEQ ID NO: 73775 - DNA, 120 bp, Artificial Sequence
  ENSG00000078304_70 (sequence is synthesized)
ctgttctgctcagttgctccctgtggcctcggccagaatggtggtctcttcctctgtggcatgtctgtgactcttgggcagcaggcctcttccagagggacggctgtttcctctccccca

SEQ ID NO: 73776 - DNA, 120 bp, Artificial Sequence
  ENSG00000078304_71 (sequence is synthesized)
aaaattcttcaaggtttagcgcaagcaataatagagaacttcaaaaactaccatccttaaaagatttgttgtcaccagcactttgtgaaggttcctggggtggcctggagcagcttttcc

SEQ ID NO: 73777 - DNA, 120 bp, Artificial Sequence
  ENSG00000078304_72 (sequence is synthesized)
gagatggacccggatttcagaaacaataaaatgtggaatgtgtccatgaaatagggttgaaagtttgacttggaactcagtgggcctgttgcttttctctatgaaacgtctgtagcttct

SEQ ID NO: 73778 - DNA, 120 bp, Artificial Sequence
  ENSG00000078304_73 (sequence is synthesized)
ggtttagcgcaagcaataatagagaacttcaaaaactaccatccttaaaagccttttcatctcttgcagtttgcttggcatttcaccatttggaagaaattagtatcatcagtacctctg

SEQ ID NO: 73779 - DNA, 120 bp, Artificial Sequence
  ENSG00000078304_74 (sequence is synthesized)
gagtttgcactatgctctgcttatagattgtgtatagttacctgctaagatggtcctaagcacatgtccacggcctcagttcagagtatacttaatgctccctattcagtctttctgttc

SEQ ID NO: 73780 - DNA, 120 bp, Artificial Sequence
  ENSG00000078304_75 (sequence is synthesized)
ccgtgctccagtccgtgaagtctagagtaaaataagaaattggcatttatatacatctcccctcctcatctttaactcttttgaagaagagagttttagtatcacattcataagaaattt

SEQ ID NO: 73781 - DNA, 72 bp, Artificial Sequence
  ENSG00000078304_76 (sequence is synthesized)
ttgaagaagagagttttagtatcacattcataagaaatttcatctttaaaagttggtattacaggcgcagtg

SEQ ID NO: 73782 - DNA, 83 bp, Artificial Sequence
  ENSG00000078304_77 (sequence is synthesized)
agcaatatctgtggttaatctcaaatagggtggctttccgtgtcatttccctttagttgtttttaaatgcagatgttgcttta

SEQ ID NO: 73783 - DNA, 120 bp, Artificial Sequence
  ENSG00000078304_78 (sequence is synthesized)
catttccctttagttgtttttaaatgcagatgttgctttaattaaataatatttgaaataagtggggtcccaactataaccttatatcttattgtttttaaatgttgatattttggtgtt

SEQ ID NO: 73784 - DNA, 120 bp, Artificial Sequence
  ENSG00000078304_79 (sequence is synthesized)
ttcagtagaatttgagctgttaacagtgattaggttttttcagtttgtcatcgatgtatgtgacctcgttataatacacatggatttttgtctgctggttgtgttactcatgagcaatgt

SEQ ID NO: 73785 - DNA, 120 bp, Artificial Sequence
  ENSG00000078304_80 (sequence is synthesized)
gttctaattatggtattttaacttataacttatgaaaaagttatgtttcactctagggaacaagtcctgaagaaccctcaagccctaaagtaccacctccacttcttcctgagttgctgg

SEQ ID NO: 73786 - DNA, 120 bp, Artificial Sequence
  ENSG00000078304_81 (sequence is synthesized)
ttcttatttttggtgggcttcaaggaagaggtgggtggtgagggtgtctgtatatgtgtgtttacatttgtagacagtttctgtacatgtataattaggaatgggttgtcggttttggtt

SEQ ID NO: 73787 - DNA, 120 bp, Artificial Sequence
  ENSG00000078304_82 (sequence is synthesized)
tttttcccagctttatgtaattggtcagacttctcaaaggggggtagcacttgataatcgctctcttggaactctgaagcctttgcatggagcagtgttcaccctgggcagcctgtggcc

SEQ ID NO: 73788 - DNA, 120 bp, Artificial Sequence
  ENSG00000078304_83 (sequence is synthesized)
cctggggtcacagagctgctttccagggggtttgcaaggccgtcactgcctcataagattaccaagatctaatttacctctcactgtgtggacgtttgccctggtggtgcaaaggcaatg

SEQ ID NO: 73789 - DNA, 120 bp, Artificial Sequence
  ENSG00000078304_84 (sequence is synthesized)
aggaatatggcgcctttctttcatcgagcaggacagcggtgttcagctagcaacacaccagtctgacccaagaatgtcctcgataaagcatgaagttactggttttttaagtctcaactc

SEQ ID NO: 73790 - DNA, 120 bp, Artificial Sequence
  ENSG00000078304_85 (sequence is synthesized)
ttttgtatacctttttaattttgtttttgtttgggtttgtttttagttttgtttttgtttgggtttgtttttagttttgtttttgtttgggtttgtttttgtttggttttttggttgctc

SEQ ID NO: 73791 - DNA, 120 bp, Artificial Sequence
  ENSG00000078304_86 (sequence is synthesized)
acagctcactgcagcctcaacctccccagctcgagcattccgcccaccgcagcatcctgtgtagctgggactacaggcaagcaccaccacacccagcgtggttttttgttgttgttgttt

SEQ ID NO: 73792 - DNA, 120 bp, Artificial Sequence
  ENSG00000078304_87 (sequence is synthesized)
cgtggttttttgttgttgttgttttggtagagctggggtctcactgggttgctcaggctggtctcaaacccctgggctcaaatgatcctcctgctttggcctcccagagtgctgggatta

SEQ ID NO: 73793 - DNA, 120 bp, Artificial Sequence
  ENSG00000078304_88 (sequence is synthesized)
gaggcgtgagccaccgcacccagcctcctttttaattttgcgtgacgaaatgcagagttcacatgaagccgttctagcatgctggagtgtgatggccgtctcgaagaaaagcgcccatgt

SEQ ID NO: 73794 - DNA, 120 bp, Artificial Sequence
  ENSG00000078304_89 (sequence is synthesized)
gatgtgtgagttatgagccaaaatagccactttttccaggaactttaaattatgagaatagtaatgtaaaatcatttttacttgacagaacaaaaagcagacaaactgtggatattaaga

SEQ ID NO: 73795 - DNA, 120 bp, Artificial Sequence
  ENSG00000078304_90 (sequence is synthesized)
cttaaatatttggctgatattttctagaaaatctatgaagtgagcttatcaattgaggggaaaacaactgcgacactgtttttggcccatggtaaaatttgagctttcaagaaaaatttg

SEQ ID NO: 73796 - DNA, 120 bp, Artificial Sequence
  ENSG00000078304_91 (sequence is synthesized)
aactttggagaacttttatctgccagtgtaaatgtggcagctcccagtgccacagactcttctgctgagaggggtggtgacattagcaagtggggtttcttgatgtatacggtggaaggt

SEQ ID NO: 73797 - DNA, 120 bp, Artificial Sequence
  ENSG00000078304_92 (sequence is synthesized)
cacacaccacatgcagcagtgtgttctcagtgaccaacgaacgatgctacaaacaagcgtgggtgaagagccaccaaagtgtaagacacactgccgggtgttcatgtaactgacaggttc

SEQ ID NO: 73798 - DNA, 120 bp, Artificial Sequence
  ENSG00000078304_93 (sequence is synthesized)
atcaacatggtttcagattcctcattgcaactaatctttaaggaactatcacttgttgaattttagcataggcaaagaagaacatcggcaattttttgagaagcattgaaacctcccttt

SEQ ID NO: 73799 - DNA, 120 bp, Artificial Sequence
  ENSG00000078304_94 (sequence is synthesized)
tcccaccagacgtgtctgtctgagcctggggtgtttctttacatatacttgaaccagaatagcatatcacagcaagttgaacacagaagcatgtcggcagatccgcctgtcttctgttga

SEQ ID NO: 73800 - DNA, 120 bp, Artificial Sequence
  ENSG00000078304_95 (sequence is synthesized)
gtattgaagatacatgcaaaaatgtacaacatggccattttctcgctggtttctttttgaaaataaggttattttcataaaatattacttaacatgaagtgaacctattgctaatttaat

SEQ ID NO: 73801 - DNA, 120 bp, Artificial Sequence
  ENSG00000078304_96 (sequence is synthesized)
gaataagtaaatatttttaaaattttcaagtatggtcagtatcaatggatataacccccataatcaaagctctttagggttctccatactttctaagaatgtaaataggtcttgacacca

SEQ ID NO: 73802 - DNA, 120 bp, Artificial Sequence
  ENSG00000078304_97 (sequence is synthesized)
aaaaaatggaaaacacgtggacttggaagtttttctcgaatgggctggatgtgaccctgaccctgtttttaccaagcctccttggttttttccctcttttctctaaaaaaaaaaataaaa

SEQ ID NO: 73803 - DNA, 120 bp, Artificial Sequence
  ENSG00000078304_98 (sequence is synthesized)
aggtatcgggctctgggtgatagactcggagggcactggtgacacatgggaatggcctgggatccacagagcgggcgcactggtctggccagatggacctctcctcctcagtagcatggg

SEQ ID NO: 73804 - DNA, 120 bp, Artificial Sequence
  ENSG00000078304_99 (sequence is synthesized)
atatttcagcagaataaagttaatgtgtgtgtttgaccactttacaacagccagtgaagatgtgtaattgtgagtatgttctcagtgaagatggccgctgtgttgatggccgttgaattg

SEQ ID NO: 73805 - DNA, 120 bp, Artificial Sequence
  ENSG00000078304_100 (sequence is synthesized)
aattcaggcccagaggtcctaagccaacaatctcccagtttttgctcctcatatttaataggtgcctgctgggcccccaggtcctgcgctggccactgcctttccccagggcatttgtaa

SEQ ID NO: 73806 - DNA, 120 bp, Artificial Sequence
  ENSG00000078304_101 (sequence is synthesized)
ggcagaaggttggttggcaaggaggcgccagggtcggcatgagcagagcgggggccaggtgtgcgggtgggagggccatccatccgtgacaggcggcccacgctgtcccacccagcatgt

SEQ ID NO: 73807 - DNA, 120 bp, Artificial Sequence
  ENSG00000078304_102 (sequence is synthesized)
ctgcacagggaaagaattgtcccagctccaggaggtcatgattctgggtccacatcttagggccctcttacctggcagccccagagttcctgtgtatttggttggctctgcgccttggca

SEQ ID NO: 73808 - DNA, 120 bp, Artificial Sequence
  ENSG00000078304_103 (sequence is synthesized)
ttgtgggacactcctaggcgacaggctgcaaatcccccctgcagagttgggtcatggcttggtttgtggcatctgtgccctgtagtccctgaacagtgtactataactgatgacatcagc

SEQ ID NO: 73809 - DNA, 120 bp, Artificial Sequence
  ENSG00000078304_104 (sequence is synthesized)
gtgttgcatgcatttttctaggctagcaaagcttaaagattatttctataatttcagttacatttacctttatagatgggttactctaagtaacaaattaaacacacatggatcttctaa

SEQ ID NO: 73810 - DNA, 120 bp, Artificial Sequence
  ENSG00000078304_105 (sequence is synthesized)
tgcgggctttaaaattaagtaagacattggcctatgttgaaatacagcaaaaacgtaagatggattaatgaacgagtaaaagatggatgaacagatgtgcgtgtgatcaagcagatggag

SEQ ID NO: 73811 - DNA, 120 bp, Artificial Sequence
  ENSG00000078304_106 (sequence is synthesized)
cacattgctcgtggtcgaatctggtggttgaaatgggtgttcactgtagaattctttccgttttcctagatgcttgaaattttccaaaataaaatattgagaaaaaaattcgtgcaagac

SEQ ID NO: 73812 - DNA, 120 bp, Artificial Sequence
  ENSG00000078304_107 (sequence is synthesized)
cacgagcagtgtttgcacaaatagatgcgcttcttgttgcctggctccatggctcctcctagagcattgttttcttattcaggttagttcagtgtctaattctaatgggaaaattgtttt

SEQ ID NO: 73813 - DNA, 120 bp, Artificial Sequence
  ENSG00000078304_108 (sequence is synthesized)
ttctaggtttatttatgaaacagagcatcataatggcatagcagagttactggaaatattgggaagtataattaatggatttgccttaccactaaaagaagagcacaagattttcttatt

SEQ ID NO: 73814 - DNA, 120 bp, Artificial Sequence
  ENSG00000078304_109 (sequence is synthesized)
gaagcagagaggttctccaacttgtctgaggtccaagaaggagctggtgacagagaccagataccggaccagcacttgggttttctgactcacggttctgggctcacccctctctgagca

SEQ ID NO: 73815 - DNA, 120 bp, Artificial Sequence
  ENSG00000078328_0 (sequence is synthesized)
accttccattttggtagcttcaactttgcagctgctgtgtctcttcgtcgtctgggaagaaaactttcacattaagagttgctgatgcggattttctttctttcctctcccggcgttgat

SEQ ID NO: 73816 - DNA, 120 bp, Artificial Sequence
  ENSG00000078328_1 (sequence is synthesized)
gagtgcttggctcctgacagaagggatttggctcccagctttgtagttcggaagaagttgggtctatagatttccccctaactctccattgatgtgttgagcttcagagggaataataac

SEQ ID NO: 73817 - DNA, 120 bp, Artificial Sequence
  ENSG00000078328_2 (sequence is synthesized)
tctacgtaaagcatgctggcgtctcaaggagttctcctgcatccttatggcgtgcctatgattgtaccggcagctccttaccttcctggactgattcagggtaatcaggaagcagccgct

SEQ ID NO: 73818 - DNA, 120 bp, Artificial Sequence
  ENSG00000078328_3 (sequence is synthesized)
gcccctgacacaatggctcagccttacgcttcggcccagtttgctcccccgcagaacggtatccccgcggaatacacggcccctcatccccaccccgcgccagagtacacaggccagacc

SEQ ID NO: 73819 - DNA, 120 bp, Artificial Sequence
  ENSG00000078328_4 (sequence is synthesized)
acggttcccgagcacacattaaacctgtaccctcccgcccagacgcactccgagcagagcccggcggacacgagcgctcagaccgtctctggcaccgccacacagacagatgacgcagca

SEQ ID NO: 73820 - DNA, 120 bp, Artificial Sequence
  ENSG00000078328_5 (sequence is synthesized)
ccgacggatggccagccccagacacaaccttctgaaaacacggaaaacaagtctcagcccaagcggctgcatgtctccaatatccccttcaggttccgggatccggacctcagacaaatg

SEQ ID NO: 73821 - DNA, 120 bp, Artificial Sequence
  ENSG00000078328_6 (sequence is synthesized)
tttggtcaatttggtaaaatcttagatgttgaaattatttttaatgagcgaggctcaaagggatttggtttcgtaactttcgaaaatagtgccgatgcggacagggcgagggagaaatta

SEQ ID NO: 73822 - DNA, 120 bp, Artificial Sequence
  ENSG00000078328_7 (sequence is synthesized)
cacggcaccgtggtagagggccgtaaaatcgaggtaaataatgccacagcacgtgtaatgacaaataaaaagaccgtcaacccttatacaaatggctggaaattgaatccagttgtgggt

SEQ ID NO: 73823 - DNA, 120 bp, Artificial Sequence
  ENSG00000078328_8 (sequence is synthesized)
gcagtctacagtcccgaattctatgcaggcacggtcctgttgtgccaggccaaccaggagggatcttccatgtacagtgcccccagttcacttgtatatacttctgcaatgccaggcttc

SEQ ID NO: 73824 - DNA, 120 bp, Artificial Sequence
  ENSG00000078328_9 (sequence is synthesized)
ccgtatccagcagccaccgccgcggccgcctaccgaggggcgcacctgcgaggccgcggtcgcaccgtgtacaacaccttcagggccgcggcgcccccgcccccgatcccggcctacggc

SEQ ID NO: 73825 - DNA, 120 bp, Artificial Sequence
  ENSG00000078328_10 (sequence is synthesized)
ggagtagtgtatcaagagcctgtgtatggcaataaattgctgcagggtggttatgctgcataccgctacgcccagcctacccctgccactgccgctgcctacagtgacagttacggacga

SEQ ID NO: 73826 - DNA, 120 bp, Artificial Sequence
  ENSG00000078328_11 (sequence is synthesized)
gtttatgctgccgacccctaccaccacgcacttgctccagcccccacctacggcgttggtgccatgaatgcttttgcacctttgactgatgccaagactaggagccatgctgatgatgtg

SEQ ID NO: 73827 - DNA, 120 bp, Artificial Sequence
  ENSG00000078328_12 (sequence is synthesized)
ggtctcgttctttcttcattgcaggctagtatataccgagggggatacaaccgttttgctccatactaaatgacaaaaccataaaaaccttccaatgtggggagaaaggaagctttccga

SEQ ID NO: 73828 - DNA, 120 bp, Artificial Sequence
  ENSG00000078328_13 (sequence is synthesized)
aaaaaatacaaataaaaaggaaaaaaaattacattttttatcttatacctcagatattttgttctgtgtattttaatattgtgggtctttaatttctgaaggttccgtagtttggttgct

SEQ ID NO: 73829 - DNA, 120 bp, Artificial Sequence
  ENSG00000078328_14 (sequence is synthesized)
tttctgaaggttccgtagtttggttgctggctgtaggagtttttgtggttgatctagacagatgctagataatgaataaaaactggtttagggccatatccagagtgctatattatgtaa

SEQ ID NO: 73830 - DNA, 120 bp, Artificial Sequence
  ENSG00000078328_15 (sequence is synthesized)
atgaattatatatgctgaatattaagctactggggttatcagctatttgggaagagtgtaagtgactacagtagtcatttttttctgcacctgcattattttattttgcgaaaggggagg

SEQ ID NO: 73831 - DNA, 120 bp, Artificial Sequence
  ENSG00000078328_16 (sequence is synthesized)
ttgggaggggcttaggggattggaactggggtttggctgaaagaaaaaaaaaaaaatgtaactgatgaatctaaacgacccactgcaccaacaatcatttatcaatggttctaagttact

SEQ ID NO: 73832 - DNA, 120 bp, Artificial Sequence
  ENSG00000078328_17 (sequence is synthesized)
cattgccagttcaagccaaaggtcatgttgttaagggggtgcttctagtagcacttgtgcatctgagttgaatgaagctgtgcaaacccaccctttaaaccattccacccggcagtattc

SEQ ID NO: 73833 - DNA, 120 bp, Artificial Sequence
  ENSG00000078328_18 (sequence is synthesized)
agcttcttaaccagtcgctatttaggaaaaaaaacccactagttaggccatcaacaagcattctttttatatttcttccagtataataaattattgatatcactgctgacttttatatta

SEQ ID NO: 73834 - DNA, 120 bp, Artificial Sequence
  ENSG00000078328_19 (sequence is synthesized)
tgggagggaaaaaataacattaataaaaaggtgataaaaaagcactgtttctatttttttctttttttccaaaaaaagaaagtaataaaaacttaaattctttgtaccagttaaaaaaaa

SEQ ID NO: 73835 - DNA, 120 bp, Artificial Sequence
  ENSG00000078328_20 (sequence is synthesized)
tgtataaaatttacatctgtgcagtggagttgttaagttctagaaacagtctatgaagctttagttttagcctagtagaacaactgttagagacagacgtataatttttatggaattaca

SEQ ID NO: 73836 - DNA, 120 bp, Artificial Sequence
  ENSG00000078328_21 (sequence is synthesized)
tgataatcatattcggatttatagaagcattttacaagtattgcaatcattgagtagagataatcatggtattttcatcagcttggtactttttgaaacgtgactgcgttgtgtgaacaa

SEQ ID NO: 73837 - DNA, 120 bp, Artificial Sequence
  ENSG00000078328_22 (sequence is synthesized)
tctgcaatttttcagtccgtgagatcctgcccttccacctctttcccatacccccaaggattatctcaaaatgatctctttagttctgtctccaaggcccaggacacttgtcagaaggat

SEQ ID NO: 73838 - DNA, 120 bp, Artificial Sequence
  ENSG00000078328_23 (sequence is synthesized)
gcaaaaaaagaaaaaagtacatccaccctcttaatcccaaaagaacaaagtctccccacctttctcggatgcagggccagagtgacacagccgaaaaattgcagtttgtctgtacttctg

SEQ ID NO: 73839 - DNA, 120 bp, Artificial Sequence
  ENSG00000078328_24 (sequence is synthesized)
tttgaactttccacgttgtcctgtttacaagttaacttaagttggggtatccgtcacgggtcttcctgttttgtatttaaataaaaacaacagcagcaggctgtccctgagtagttttgc

SEQ ID NO: 73840 - DNA, 120 bp, Artificial Sequence
  ENSG00000078328_25 (sequence is synthesized)
tgccataggttaagtcctcatgtgtacagtgcaggccctgtggcccgcacttcagtaagttatcaactctcaccgctgtgaacctgccaatccgctgtaacaactctgctttaaaacaaa

SEQ ID NO: 73841 - DNA, 120 bp, Artificial Sequence
  ENSG00000078328_26 (sequence is synthesized)
accaaacaaaactttaaaaaaaaatgtgtgatccagctttctcttgccatcctatgtgcatgccgtaagatcagttggatattaaaccatcaataaagtttcacaagatttgaaaacaaa

SEQ ID NO: 73842 - DNA, 120 bp, Artificial Sequence
  ENSG00000078328_27 (sequence is synthesized)
ttttgttatgcacctactgccttttataaattaaaatgcattttactttttagttttcttttttaataagtaatcacggtcataatgcatgcaactaattgaattgggagctggccctag

SEQ ID NO: 73843 - DNA, 120 bp, Artificial Sequence
  ENSG00000078328_28 (sequence is synthesized)
tcaactgccgttgtctccaacctccttaatccaatgtgaaaacgatcctcggttcctgtgttttggatcttgtgaccagactaacctcgccagtgcaggggttggtgtgtctgcatggga

SEQ ID NO: 73844 - DNA, 120 bp, Artificial Sequence
  ENSG00000078328_29 (sequence is synthesized)
aatgcactaatatggatgtttctctttgtgtgtgcacccttgcagtgttgtttaccaggatggattttatggtgcagacatttatggtggttatgctgcataccgctacgcccagcctac

SEQ ID NO: 73845 - DNA, 120 bp, Artificial Sequence
  ENSG00000078328_30 (sequence is synthesized)
tccggctctcctttgtttattttctaatctatatttttactggaagatttcctctttattctctcccgccctcctacaagcgctcttgctggccgtctgggtgcacacaccgctccctcg

SEQ ID NO: 73846 - DNA, 120 bp, Artificial Sequence
  ENSG00000078328_31 (sequence is synthesized)
atcaccccagcccccttcctggtctcccgagcgcggggtttgaaggtcacctcctttccagtccccgtgcgagccgcgctgccgccgcctcctccagccagagtcggtgggactggctgc

SEQ ID NO: 73847 - DNA, 120 bp, Artificial Sequence
  ENSG00000078328_32 (sequence is synthesized)
gctgccctgaagtggttctccaagcagcgcggagggtggcggacggcggacggagcccaggggccgcgtcgggtggggaaacccgaactcgcggaggggaatccctccccctccgcccca

SEQ ID NO: 73848 - DNA, 120 bp, Artificial Sequence
  ENSG00000078328_33 (sequence is synthesized)
gccccccagcagcacccgcggtggggcgggggcgctctgccagccccgggaacagcagaggcggcggcactggctggacccacgcgcgcgcctccggggctgaagaaggaaggagtgagc

SEQ ID NO: 73849 - DNA, 120 bp, Artificial Sequence
  ENSG00000078328_34 (sequence is synthesized)
cgagccgagcaccccacatctggaggggacagccagccgtgggccccgccccggcgtccggagcaggagaactccgagcttcttgcccaggcagagagagcaggagcggaccgcgcgccc

SEQ ID NO: 73850 - DNA, 120 bp, Artificial Sequence
  ENSG00000078328_35 (sequence is synthesized)
gggattgagagtccttgcgctccagacccccacccagtggccgccagggtccccgcctgtccggaccctcgccgcgcccaggcaggcgcgccagggcggggctgacctgcccgcgaagtt

SEQ ID NO: 73851 - DNA, 120 bp, Artificial Sequence
  ENSG00000078328_36 (sequence is synthesized)
gcggacagtgcgtgagaaaccagcacccccttccgccgcctccagcttatggtgagtgtggctgggggtgcagagagcgcacgggaattcgggggtctggggccgagaacgtgaccgcag

SEQ ID NO: 73852 - DNA, 120 bp, Artificial Sequence
  ENSG00000078328_37 (sequence is synthesized)
ccgggctcgccgggagttctaggaaactggtcaaagaactcatgcaagtggaacttacagcttccttgatcggactcagcattcagatatcaaagcagactgcaatacctgcgtggaaat

SEQ ID NO: 73853 - DNA, 120 bp, Artificial Sequence
  ENSG00000078328_38 (sequence is synthesized)
agtgtgattaataacaaggaggaaacctgcttgttggattattaatttcccatcccctttgccttattttttttctttgccatattcctgatgctttttcttctgcctcttttctttttg

SEQ ID NO: 73854 - DNA, 120 bp, Artificial Sequence
  ENSG00000078328_39 (sequence is synthesized)
ccatttgctaaagcctctccacccctccttttccctcctgtggcccacacttttgcccatggagatatccactagtcctttacactgacacctggccacccaacctcgtgccggctggct

SEQ ID NO: 73855 - DNA, 120 bp, Artificial Sequence
  ENSG00000078328_40 (sequence is synthesized)
ctttgggtgggtgaggggaggggcaagagggtgttttatagcatcactaagacattctcattcccccacctggaaaacagtgttatggcaatgggtgcctggttgatgttcttaaaggaa

SEQ ID NO: 73856 - DNA, 120 bp, Artificial Sequence
  ENSG00000078328_41 (sequence is synthesized)
acgaattattaaaacactatgacatcctccagagggaagaaagagtaggagcagggggctatggagaataaatttctcccaattgccgcctcagatttcaaaatccagaatttgtattgt

SEQ ID NO: 73857 - DNA, 120 bp, Artificial Sequence
  ENSG00000078328_42 (sequence is synthesized)
gtttcgaatcacaaacatagaattcttactgtgttggttaaagtaaaattcatttgcagttttgattttcatcaatgagctgtactttcccccatgactgtatgtagttttaataaaatc

SEQ ID NO: 73858 - DNA, 120 bp, Artificial Sequence
  ENSG00000078328_43 (sequence is synthesized)
atttagagtgagtgagtgccaaccgatgttgcagaatcttttgtctaggcactccaagatgccaataagtcattttaaaatgtatgtcagagatgtaaacaaacattttggatttttttt

SEQ ID NO: 73859 - DNA, 120 bp, Artificial Sequence
  ENSG00000078328_44 (sequence is synthesized)
aaacagtatttatttggaatgttttcatttatctaaataactattgctattatgaattatggaaaattaatattatgtgtggcatatagtgacttcttaacacacacatcacgcaatctg

SEQ ID NO: 73860 - DNA, 120 bp, Artificial Sequence
  ENSG00000078328_45 (sequence is synthesized)
caaacccagaaaatgtgtatatctgtctttagaaattagtgtttatatcacttacagtggtttgtgaataaagaaaactggtttgtaatatcaaaaaaataaaagcttagtctgaaaagg

SEQ ID NO: 73861 - DNA, 120 bp, Artificial Sequence
  ENSG00000078328_46 (sequence is synthesized)
cgcacctgcgaggccgcggtcgcaccgtgtacaacaccttcagggccgcggcgcccccgcccccgatcccggcctacggcggggtggttatgctgcataccgctacgcccagcctacccc

SEQ ID NO: 73862 - DNA, 120 bp, Artificial Sequence
  ENSG00000078328_47 (sequence is synthesized)
gttttggcgcggacagaggccgaggccggccggggaagccggacccgggccctggcgccgccgtggcctccctttgtgcgcgcccgggtgttgattgcctccttgcacgggctgctcgct

SEQ ID NO: 73863 - DNA, 120 bp, Artificial Sequence
  ENSG00000078328_48 (sequence is synthesized)
ctcgcgcccgcgcgctcggggcgttctgcacctgctggcggtcgtgccaggcagcccgggcgagcgaaggcgcgcggcgcgcacgacagatgactggagtcatttacattgctagcacgt

SEQ ID NO: 73864 - DNA, 120 bp, Artificial Sequence
  ENSG00000078328_49 (sequence is synthesized)
gggtgccgtttgctgttgcctcggacttctcccgtgctgtgttttcccggtgaggaaacaggaggcactttgcagccgacaatgaaatcttggcagctaattgcagtcgtgggagatgcc

SEQ ID NO: 73865 - DNA, 120 bp, Artificial Sequence
  ENSG00000078328_50 (sequence is synthesized)
tgcacacttccaggcctctgctgtcaggcagctgagaatctgactgcctctcctcccctattacaattcatgtttaaagtcatagtcgcccaggaaagaaaatagagaggggcacacttt

SEQ ID NO: 73866 - DNA, 120 bp, Artificial Sequence
  ENSG00000078328_51 (sequence is synthesized)
gtgtgtgtacctagtacataagaaagtagaaggaatcagctgggtttgggggttgccttttgttttggggcaggtctgggtttttgttttgggagggggtggggggagggtaaaaaatgg

SEQ ID NO: 73867 - DNA, 120 bp, Artificial Sequence
  ENSG00000078328_52 (sequence is synthesized)
agatgttgagggggaggtcagccaggcggcctcagccccccaccttcctcaacaccccgatcatccacacattgcacagcgcgcacaccctcgctcgtaattgaggcgtgcttggggcag

SEQ ID NO: 73868 - DNA, 120 bp, Artificial Sequence
  ENSG00000078328_53 (sequence is synthesized)
gcggcgtgtgcgcctccggggctgctgattagaataggggacttggccgtggatggaatccgggaaacccaaaccggagatggaaggatgaggctgcgtttgcagcgcgtgaatgggacg

SEQ ID NO: 73869 - DNA, 120 bp, Artificial Sequence
  ENSG00000078328_54 (sequence is synthesized)
gggaaaacagtgttgcatctctaggcttgaaggtctgctcttctgctcagaagtttcaagacaacagatgaattgtgaaagagagcagctaagggtggagggatgagattgaactatcaa

SEQ ID NO: 73870 - DNA, 120 bp, Artificial Sequence
  ENSG00000078328_55 (sequence is synthesized)
agcctggctaagaaaaagcaaaatccttgatggaaatctctggcacagggaaaatgagcagaactggcaccaaggaagcattaggagagagaagaagatagtggggaagcagaaaggaac

SEQ ID NO: 73871 - DNA, 67 bp, Artificial Sequence
  ENSG00000078328_56 (sequence is synthesized)
agctccgccgagaggccgctcgcgccgggtccttcctcttccccaagtgcaggcagagcccccggag

SEQ ID NO: 73872 - DNA, 120 bp, Artificial Sequence
  ENSG00000078328_57 (sequence is synthesized)
gggaggaggacgacgtccctcccgaagagaagaggctgcggctggggctggaggggggaagcgcacagcccgaggactgcgaggacgggaaggacgcgccgcggccgggcagggaggaga

SEQ ID NO: 73873 - DNA, 120 bp, Artificial Sequence
  ENSG00000078328_58 (sequence is synthesized)
cagacaggtggcgacggcagaggagatctactgtgcctgccatacagcctggttgagggtcaggactacaagtctgaaaattcaaccctcctccccggtgccaagaacagcctgcaagac

SEQ ID NO: 73874 - DNA, 120 bp, Artificial Sequence
  ENSG00000078328_59 (sequence is synthesized)
ggtaagggtggggtgaacttgcctgtacttgttcaaacttctatgcactgaaactcttgagtacagtaagacgtgcccatcacgtgagagcatatgcaatcattacaaagctttggcatg

SEQ ID NO: 73875 - DNA, 120 bp, Artificial Sequence
  ENSG00000078328_60 (sequence is synthesized)
cagttttctgcttggatcaagaatatcagtccttaccctaaaaatgaatccccataggcattcatttgaattgccaatacttttagaaaaaggaaatcgttaagtgccaccttgtagcca

SEQ ID NO: 73876 - DNA, 120 bp, Artificial Sequence
  ENSG00000078328_61 (sequence is synthesized)
ttaaaaccatggccggacagttcactgaagctcagtcatagaaattcagccatgatttggaagcattgttttgcacaagcttaattacatcaagcaattcatctgtacaactccacaact

SEQ ID NO: 73877 - DNA, 120 bp, Artificial Sequence
  ENSG00000078328_62 (sequence is synthesized)
cccttctcaagatcagattccatacagcttacagagccaagttaagtaagaagtaggttgagattttcatcccaattctgcattcaacaactctgcttcaacacctagtccacatgagga

SEQ ID NO: 73878 - DNA, 120 bp, Artificial Sequence
  ENSG00000078328_63 (sequence is synthesized)
atgtgttggagagttgaattacattcaacaactggtccaaattcaacctcaagtgcagattattctgttataaaaaaatgagacagtgaaaatccttccattgtccagcttataatagag

SEQ ID NO: 73879 - DNA, 120 bp, Artificial Sequence
  ENSG00000078328_64 (sequence is synthesized)
tccttttagctaagaggactggctgacagaatttggttttgcagggaatttctttaggaggagctattggggaaggtcaggaatggccctatctttagttctccaagaatgacctgggat

SEQ ID NO: 73880 - DNA, 120 bp, Artificial Sequence
  ENSG00000078328_65 (sequence is synthesized)
gggtagggggtgcctccatttcggttggttttgagtgtctatttttcacattagtctttttgatgatccacatgttgcaaaaggaaaatgtaaaaaacacacccctcaaattgctttgtt

SEQ ID NO: 73881 - DNA, 120 bp, Artificial Sequence
  ENSG00000078328_66 (sequence is synthesized)
gtgcatttgtgttgtgggggcatggggtgcatttgtgtgtatatatgtgtggatgtagggtgcgtttgtctgtgtgtatttgtgtgggcatggagtgcatttgcgttgcgggggtgtgga

SEQ ID NO: 73882 - DNA, 120 bp, Artificial Sequence
  ENSG00000078328_67 (sequence is synthesized)
gtgtgtttgtgtgtgtgcacacgcacatggttctcatggtcctcccgttttcaactgaacctgtaattagctcctcagagaccaggtttcaagacaacagatgaattgtgaaagagagca

SEQ ID NO: 73883 - DNA, 120 bp, Artificial Sequence
  ENSG00000078328_68 (sequence is synthesized)
cccggtgccaagaacagcctgcaagactccgtaagtagaagcattttgctgaacagattagattttgaaactacttttgcatccttttcagcctctttggtctccgtcatcaatcaccgg

SEQ ID NO: 73884 - DNA, 120 bp, Artificial Sequence
  ENSG00000078328_69 (sequence is synthesized)
gaatggtttttacctgaaactgatcttgctggagaattaactgggtttgaggggaataaattttccagagcacttgcacaatttctatcacttgggccgtattcccagcctctggtacat

SEQ ID NO: 73885 - DNA, 120 bp, Artificial Sequence
  ENSG00000078328_70 (sequence is synthesized)
ggtgtgagagctgtattctgtcctctaaaaaagaccaggcccacttggtggacagatccggggcacagtggttggtgacaaggctgcaaattggtccctctgcgccctggtgtgacggcc

SEQ ID NO: 73886 - DNA, 120 bp, Artificial Sequence
  ENSG00000078328_71 (sequence is synthesized)
aaagaagtcgaatgtcattgggttgtcttcctagtaaggacaggaatgcttactgagtgctctggggtcctgcatcatggcattgggcttggagtcactggggtacataacctgggatga

SEQ ID NO: 73887 - DNA, 120 bp, Artificial Sequence
  ENSG00000078328_72 (sequence is synthesized)
tggcagtgaattcccgtgtatccctcatctgtcacccacgaataacagtggccaggaagttccctgcacagatacttctgaaatcactcatgcaccgcctctcggcaatgcaatcatggt

SEQ ID NO: 73888 - DNA, 120 bp, Artificial Sequence
  ENSG00000078328_73 (sequence is synthesized)
gtggtgcattccccaagtgtgacctgtttgtgtattgttggtgaccttgggatggcaccttcaagtggcacacagactgttgctgtttggtattcatcattatgtatttcattttatgat

SEQ ID NO: 73889 - DNA, 120 bp, Artificial Sequence
  ENSG00000078328_74 (sequence is synthesized)
gattttctctttatagccatcactactagctttccgttaatggcagtggtatgaaatttccttcaaaaaaagtttaacataaagtgagttgactcaaagacaaaaaatgatatggaaata

SEQ ID NO: 73890 - DNA, 120 bp, Artificial Sequence
  ENSG00000078328_75 (sequence is synthesized)
acagaatggaaatcgtaatgtaggtatggtgagacattgtgatagtggtaagtgaaaggctgagagtaaattcttttatcaaaagatgttcatggctaggcctaatggatcacacctata

SEQ ID NO: 73891 - DNA, 75 bp, Artificial Sequence
  ENSG00000078328_76 (sequence is synthesized)
tataatcccagccctttgggaggccaaggtaactctacaaaaaataaacaaattaggccgggcacggtggctcac

SEQ ID NO: 73892 - DNA, 120 bp, Artificial Sequence
  ENSG00000078328_77 (sequence is synthesized)
gatgaggctcccctagacttctggagagtcttccagctacgtactcaagatcttagcttactgacctgtatgttctgcacgaggttctcaccattgtttccagctccacaccctggccag

SEQ ID NO: 73893 - DNA, 120 bp, Artificial Sequence
  ENSG00000078328_78 (sequence is synthesized)
catgtgaacaaatgcgtgaaccacagtcagtctctgaatggaaatccatgtgtcttatgaaaatcagttattgttgaaagccatttgcaaagcttccacgatcctcgcttggctggtgca

SEQ ID NO: 73894 - DNA, 120 bp, Artificial Sequence
  ENSG00000078328_79 (sequence is synthesized)
cggctgtgagtgcttctttccaagtctcctgtgggtgacggggaatggctaaccagggattgtgttcacaggcatatcgattccaagtctgatcacagccacaaatttctttcccaggtt

SEQ ID NO: 73895 - DNA, 80 bp, Artificial Sequence
  ENSG00000078369_0 (sequence is synthesized)
catcccgatggctggaggcgtctgaggggcggacggaggcggcggcggcggcggcgggagcgggagcgggcggcgagtgg

SEQ ID NO: 73896 - DNA, 120 bp, Artificial Sequence
  ENSG00000078369_1 (sequence is synthesized)
ctgcccgcagcgcccgcggagcgcgcagcgcggcccgagcgcgacgacctgccgagcggcggccgaggcggcggtgtgggcgcgtcaggccgcgacgagggcgctgagacaaatttacat

SEQ ID NO: 73897 - DNA, 120 bp, Artificial Sequence
  ENSG00000078369_2 (sequence is synthesized)
cgcgtcaggccgcgacgagggcgctgagacaaatttacatgtattggagaccagaccagaagcccttctgaattaagatctcacattcttgaaggtggcattgaagagcactaagatcgg

SEQ ID NO: 73898 - DNA, 120 bp, Artificial Sequence
  ENSG00000078369_3 (sequence is synthesized)
aagatgagtgagcttgaccagttacggcaggaggccgagcaacttaagaaccagattcgagacgccaggaaagcatgtgcagatgcaactctctctcagatcacaaacaacatcgaccca

SEQ ID NO: 73899 - DNA, 120 bp, Artificial Sequence
  ENSG00000078369_4 (sequence is synthesized)
gtgggaagaatccaaatgcgcacgaggaggacactgcgggggcacctggccaagatctacgccatgcactggggcacagactccaggcttctcgtcagtgcctcgcaggatggtaaactt

SEQ ID NO: 73900 - DNA, 120 bp, Artificial Sequence
  ENSG00000078369_5 (sequence is synthesized)
atcatctgggacagctacaccaccaacaaggtccacgccatccctctgcgctcctcctgggtcatgacctgtgcatatgccccttctgggaactatgtggcctgcggtggcctggataac

SEQ ID NO: 73901 - DNA, 120 bp, Artificial Sequence
  ENSG00000078369_6 (sequence is synthesized)
atttgctccatttacaatctgaaaactcgtgaggggaacgtgcgcgtgagtcgtgagctggcaggacacacaggttacctgtcctgctgccgattcctggatgacaatcagatcgtcacc

SEQ ID NO: 73902 - DNA, 120 bp, Artificial Sequence
  ENSG00000078369_7 (sequence is synthesized)
agctctggagacaccacgtgtgccctgtgggacatcgagaccggccagcagacgaccacgtttaccggacacactggagatgtcatgagcctttctcttgctcctgacaccagactgttc

SEQ ID NO: 73903 - DNA, 120 bp, Artificial Sequence
  ENSG00000078369_8 (sequence is synthesized)
gtctctggtgcttgtgatgcttcagccaaactctgggatgtgcgagaaggcatgtgccggcagaccttcactggccacgagtctgacatcaatgccatttgcttctttccaaatggcaat

SEQ ID NO: 73904 - DNA, 120 bp, Artificial Sequence
  ENSG00000078369_9 (sequence is synthesized)
gcatttgccactggctcagacgacgccacctgcaggctgtttgaccttcgtgctgaccaggagctcatgacttactcccatgacaacatcatctgcgggatcacctctgtctccttctcc

SEQ ID NO: 73905 - DNA, 120 bp, Artificial Sequence
  ENSG00000078369_10 (sequence is synthesized)
aagagcgggcgcctcctccttgctgggtacgacgacttcaactgcaacgtctgggatgcactcaaagccgaccgggcaggtgtcttggctgggcatgacaaccgcgtcagctgcctgggc

SEQ ID NO: 73906 - DNA, 120 bp, Artificial Sequence
  ENSG00000078369_11 (sequence is synthesized)
gtgactgacgatggcatggctgtggcgacagggtcctgggatagcttcctcaagatctggaactaacgccagtagcatgtggatgccatggagactggaagaccattccaacttggacgc

SEQ ID NO: 73907 - DNA, 120 bp, Artificial Sequence
  ENSG00000078369_12 (sequence is synthesized)
gttaccatgagagcatatcctatccaaccgtactaacgtggacaccctacacctcccctcagaacttcaaaagggcaagatcttttttccttcacttattgctgaaaccaagagcacaat

SEQ ID NO: 73908 - DNA, 120 bp, Artificial Sequence
  ENSG00000078369_13 (sequence is synthesized)
tgtgcattccttccggggccatcgtctttgttttcttttttgtcttgaatgaattttaaaaggaaatatataataaaaatgttaaccagaaggtaaacttgagtgtaattgtcagacaga

SEQ ID NO: 73909 - DNA, 120 bp, Artificial Sequence
  ENSG00000078369_14 (sequence is synthesized)
cacacttttccaccagtgtatttgaattttagaccagtgaccctgttttgtggcattcatgcaaaacatgctgagggctttgttcatctggtcatcgtgtccaaatttcagtcatgtttg

SEQ ID NO: 73910 - DNA, 120 bp, Artificial Sequence
  ENSG00000078369_15 (sequence is synthesized)
tagcaagattttggaagcattcatatttcctttttaaaatgtattcctttgtgttcaacagttaatcaaaaccagagagtctagggcagcctctctgatgttgtcaatgatgtaaattca

SEQ ID NO: 73911 - DNA, 120 bp, Artificial Sequence
  ENSG00000078369_16 (sequence is synthesized)
gtccctggtttttaattttctgtctgatgtcacagatcattgttgcacacaaacgtggcatagaaaagaacatgttcagaagccatggggccaagcacatgcggggacggtctcaaatgc

SEQ ID NO: 73912 - DNA, 120 bp, Artificial Sequence
  ENSG00000078369_17 (sequence is synthesized)
gtgatcagagaatccttcacctttgctgaaaagtgagctcagatccagcaccatgttcctcctgacccatcctgtctatcttctcagttgagtttttaatctcactttgggtttccttgt

SEQ ID NO: 73913 - DNA, 120 bp, Artificial Sequence
  ENSG00000078369_18 (sequence is synthesized)
gaagttggagggaagtttataatagcctaacactaccccacccccaactaggaggaacctctgttttcaagagagatgcctgtcctgtgcttggatagtcagtcaattatttgtgtatga

SEQ ID NO: 73914 - DNA, 120 bp, Artificial Sequence
  ENSG00000078369_19 (sequence is synthesized)
aacaatgtacaaatcaatgttttgaaaataatgatctcagactttctaagttaaattttaaaaattttgattgtttgccatattgggtgggtttactcttagaatcgcatgctgtagaaa

SEQ ID NO: 73915 - DNA, 120 bp, Artificial Sequence
  ENSG00000078369_20 (sequence is synthesized)
tgctcaaaagtgcatatgggactcagtccttaggtgttctttttcttttaagaaataacctcttacagttgtaaccattgcggctctgtccacttctcgttgctgctctgtggcacatat

SEQ ID NO: 73916 - DNA, 120 bp, Artificial Sequence
  ENSG00000078369_21 (sequence is synthesized)
cggaagcagtacagcgcgcggctctacacgcttgggtagcgggataagtcactgttttctttatttctttaaaaaaaaaaaagttctgttgcaaacgactgctgttggattctgagggtg

SEQ ID NO: 73917 - DNA, 120 bp, Artificial Sequence
  ENSG00000078369_22 (sequence is synthesized)
gggagggagagagagggagggagagggagtgaagagcctgccctcctatatggattcttcagggccctccacatctgaggtggctcattcccatcacacacagattgtcctggtgttcat

SEQ ID NO: 73918 - DNA, 120 bp, Artificial Sequence
  ENSG00000078369_23 (sequence is synthesized)
ttcaaggccagtgttcagcagcagcgtttggaaagcaggttctgtgggaccccccgccccgccccccgcactccttcatagcagcagtagtggcttctccatcctgttttctgcaacatt

SEQ ID NO: 73919 - DNA, 120 bp, Artificial Sequence
  ENSG00000078369_24 (sequence is synthesized)
ctatacaaaactgtgctgtgaccttgcggtaggcctggatctggcaaagagaatacaaatgaaaccccttctttctctttccgtccaacaactctgtagagctctctgcacccttacccc

SEQ ID NO: 73920 - DNA, 120 bp, Artificial Sequence
  ENSG00000078369_25 (sequence is synthesized)
tttccaccttttgtatttaattttaaagtcagtgtactgcaaggaagctggatgcaagatagatactatattaaactgtactgttatttaagatgtaataaagcagtttgacatgaggga

SEQ ID NO: 73921 - DNA, 120 bp, Artificial Sequence
  ENSG00000078369_26 (sequence is synthesized)
agatgttacttgttttaggaaaaatggtttacaggatgacttgttctatgttttatatgaaattgaatcttagttggcccaggatgtactaattatagatctagatacttagcctagtac

SEQ ID NO: 73922 - DNA, 120 bp, Artificial Sequence
  ENSG00000078369_27 (sequence is synthesized)
attgtttttgggattttgctttctgtatacaatttgttatttgaatatacaccagatgtctccgtagaatttataagtgtcttttgcattctttatcataaccttgaaaatttgtgatac

SEQ ID NO: 73923 - DNA, 120 bp, Artificial Sequence
  ENSG00000078369_28 (sequence is synthesized)
cctgggccactgatcagactgtgatatctacctccctcccctgaatattgggactattgacagcagaaaacttgcttaaaagtaagagtattaacaacaataaaaaaagtatttcaggta

SEQ ID NO: 73924 - DNA, 120 bp, Artificial Sequence
  ENSG00000078369_29 (sequence is synthesized)
cttcattaaattatccaacagttgtttattgattgtgcttgtctttctgtttcagatctcacattcttgaaggtggcattgaagagcactaagatcggaagatgagtgagcttgaccagt

SEQ ID NO: 73925 - DNA, 120 bp, Artificial Sequence
  ENSG00000078369_30 (sequence is synthesized)
ttttgttgttgcttttcctcattttggaagttgtttaggacggggcatcttggtgtgtcctgctctcgcctctgatgcttccttcccagtgggagtgggtgggaatactcagagacacag

SEQ ID NO: 73926 - DNA, 120 bp, Artificial Sequence
  ENSG00000078369_31 (sequence is synthesized)
aattgtgcccacgctgatgtgggtgtcacagccactgtccccaagaaaacaaacccacccacacatattcacgagcacccccgtgtctgcagtgttgctgccatgccgcgttcctgttgc

SEQ ID NO: 73927 - DNA, 120 bp, Artificial Sequence
  ENSG00000078369_32 (sequence is synthesized)
cttcgttatcccttccatgacctgcaggcccttgccaccctgaccctgtggcctcgccgcctcctgccctggctgggccctctgtttggatcctccttctctgagtctactctcgtcctc

SEQ ID NO: 73928 - DNA, 120 bp, Artificial Sequence
  ENSG00000078369_33 (sequence is synthesized)
cctcctctcctggcttccatcttgtgaggcccctactttgtcctcttccttcccctagcactccctttctgatgtcctctttcagtgattctcattctctgtccctgctgagcgtgggct

SEQ ID NO: 73929 - DNA, 120 bp, Artificial Sequence
  ENSG00000078369_34 (sequence is synthesized)
gtaggagagcaggaggtgtctgtctggttaaggctgcttcctgggcactggagtcagcgtgccctgaatgagtaaatagacgagggatccccagcctttgatgggtcaaacagtaaagca

SEQ ID NO: 73930 - DNA, 120 bp, Artificial Sequence
  ENSG00000078369_35 (sequence is synthesized)
gatgaaagatgtgtatgtttcatgggtgtggtttctgcttctgcccccatcacggagctgtgggtctctgtgggacgtgctgtcctgcctggccaggctctcaccctcaccagcagtgcg

SEQ ID NO: 73931 - DNA, 120 bp, Artificial Sequence
  ENSG00000078369_36 (sequence is synthesized)
tgtggaccttctgctgtgtgcacagatgggaataaaaggtcactagcatggtgctggtcttaccttagacgtagagcttccaccgggccaatgtgtttctctatgtatgaggctgggtgc

SEQ ID NO: 73932 - DNA, 120 bp, Artificial Sequence
  ENSG00000078369_37 (sequence is synthesized)
agccgaccgggcaggtacgtggccatggggcctttctgtgtcttgtggacatttacgtggtatctttagagcaaacacagagtggttgcataagctgcagtgttttagtatcggtgggac

SEQ ID NO: 73933 - DNA, 120 bp, Artificial Sequence
  ENSG00000078369_38 (sequence is synthesized)
tgtggcatggcgtagcaggagtgacagtcgcaaactgatggcccagctctgaccctccaggcaagtggactccgaggagtaccagcagatcttcccacatgcgtcggggagggctctggg

SEQ ID NO: 73934 - DNA, 120 bp, Artificial Sequence
  ENSG00000078369_39 (sequence is synthesized)
gagagtcagtgggcaggagagggtcagctgtgcaggctccagggcccagccccgtgctttcccctctgaactctgcttcagggggaggagttccatgcagggacacctctgggtgccgtt

SEQ ID NO: 73935 - DNA, 120 bp, Artificial Sequence
  ENSG00000078369_40 (sequence is synthesized)
acagttaacatatcaaaggcaagcgtgttattgccaggtgtacaaaagatgagacttccttactaaaaatggtcatttgggcatttgaatttgagaactgttgacacttacagacttaga

SEQ ID NO: 73936 - DNA, 120 bp, Artificial Sequence
  ENSG00000078369_41 (sequence is synthesized)
ttcatttgtctcagtacctgggaggacagaagggagcatggctccaggtcttggcccttaccggggcttcctgcttccggatgggtgccactcccacctcctggttaaacacatttcttt

SEQ ID NO: 73937 - DNA, 120 bp, Artificial Sequence
  ENSG00000078369_42 (sequence is synthesized)
ttctccccagcctggggggaccagagtggagccatttccagccaagtctcacagtcacagtgctgttgaagggcggtggaagccagcccaggccttggcagagcacacgccggcccctgt

SEQ ID NO: 73938 - DNA, 120 bp, Artificial Sequence
  ENSG00000078369_43 (sequence is synthesized)
actcagctgtgtggtggctgcaggaggtggaggagggtggctgaaatgggccttcggatccccctgggaggaagtggagcttctggctggtgatgatccaagccaaggttattgggagtg

SEQ ID NO: 73939 - DNA, 120 bp, Artificial Sequence
  ENSG00000078369_44 (sequence is synthesized)
ttgacagaaggccccctcatcacatgacagtgacagtgcagtgccagtggtctcagccaccatcgctactcctgtgttctgtgccttgtgctgggctctagggatcacagacaaaggaaa

SEQ ID NO: 73940 - DNA, 120 bp, Artificial Sequence
  ENSG00000078369_45 (sequence is synthesized)
cttgtgctgggctctagggatcacagacaaaggaaaaacggctcatgcctctaagctcctgtgttacagattgctttgagattggggcggttttgattttttttttttttttttgagatg

SEQ ID NO: 73941 - DNA, 80 bp, Artificial Sequence
  ENSG00000078369_46 (sequence is synthesized)
tctggtcccttttctttgggccacagccttcctgaccctagatgggctttgtaaaaagagcaagtcgtgtgtgccagcct

SEQ ID NO: 73942 - DNA, 120 bp, Artificial Sequence
  ENSG00000078369_47 (sequence is synthesized)
gatgggctttgtaaaaagagcaagtcgtgtgtgccagcctgtgcagcagtgagggcacaggcagcaccagggtcccgggtgtgtgggtgctgccccagcttgcagtgtggtctcctcggt

SEQ ID NO: 73943 - DNA, 120 bp, Artificial Sequence
  ENSG00000078369_48 (sequence is synthesized)
gctggccacagctgtgggtccccaggaatattgtgctgcaggtcttagacagatttgggtactactggttctctgttcagcgtggcctggacagtccacagatggtagtagaccatgggg

SEQ ID NO: 73944 - DNA, 120 bp, Artificial Sequence
  ENSG00000078369_49 (sequence is synthesized)
tgttgagatgcaaggagactctgccgttctttcacattctgcttttgctcctgacagcttaggaaagctctctttgaaactttggtatgtgtggacctgagattgaatgtatctgaaagg

SEQ ID NO: 73945 - DNA, 120 bp, Artificial Sequence
  ENSG00000078369_50 (sequence is synthesized)
ttgctaatttctcactgtccttgcttcccaggacgccaggaaagcatgtgcagatgcaactctctctcaggtaagagcccactgagtcacgcagagccatctgcctgtgaggaggctagc

SEQ ID NO: 73946 - DNA, 120 bp, Artificial Sequence
  ENSG00000078369_51 (sequence is synthesized)
acggcacccacacctggagcctcgggagggctctgcttgcattctctgttgcgcagtgaggatgccaagccactgcttttattaagaagtcattctgatgatcacaaacaacatcgaccc

SEQ ID NO: 73947 - DNA, 120 bp, Artificial Sequence
  ENSG00000078399_0 (sequence is synthesized)
gccaccaagttgttacatgaaatctgcagtttcataatttccgtgggtcgggccgggcgggccaggcgctgggcacggtgatggccaccactggggccctgggcaactactacgtggact

SEQ ID NO: 73948 - DNA, 120 bp, Artificial Sequence
  ENSG00000078399_1 (sequence is synthesized)
cgttcctgctgggcgccgacgccgcggatgagctgagcgttggccgctatgcgccggggaccctgggccagcctccccggcaggcggcgacgctggccgagcaccccgacttcagcccgt

SEQ ID NO: 73949 - DNA, 120 bp, Artificial Sequence
  ENSG00000078399_2 (sequence is synthesized)
gcagcttccagtccaaggcgacggtgtttggcgcctcgtggaacccagtgcacgcggcgggcgccaacgctgtacccgctgcggtgtaccaccaccatcaccaccacccctacgtgcacc

SEQ ID NO: 73950 - DNA, 120 bp, Artificial Sequence
  ENSG00000078399_3 (sequence is synthesized)
cccaggcgcccgtggcggcggcggcgccggacggcaggtacatgcgctcctggctggagcccacgcccggtgcgctctccttcgcgggcttgccctccagccggccttatggcattaaac

SEQ ID NO: 73951 - DNA, 120 bp, Artificial Sequence
  ENSG00000078399_4 (sequence is synthesized)
ctgaaccgctgtcggccagaaggggtgactgtcccacgcttgacactcacactttgtccctgactgactatgcttgtggttctcctccagttgatagagaaaaacaacccagcgaaggcg

SEQ ID NO: 73952 - DNA, 120 bp, Artificial Sequence
  ENSG00000078399_5 (sequence is synthesized)
ccttctctgaaaacaatgctgagaatgagagcggcggagacaagccccccatcgatcccaataacccagcagccaactggcttcatgcgcgctccactcggaaaaagcggtgcccctata

SEQ ID NO: 73953 - DNA, 120 bp, Artificial Sequence
  ENSG00000078399_6 (sequence is synthesized)
caaaacaccagaccctggaactggagaaagagtttctgttcaacatgtacctcaccagggaccgcaggtacgaggtggctcgactgctcaacctcaccgagaggcaggtcaagatctggt

SEQ ID NO: 73954 - DNA, 120 bp, Artificial Sequence
  ENSG00000078399_7 (sequence is synthesized)
tccagaaccgcaggatgaaaatgaagaaaatcaacaaagaccgagcaaaagacgagtgatgccatttgggcttatttagaaaaaagggtaagctagagagaaaaagaaagaactgtccgt

SEQ ID NO: 73955 - DNA, 120 bp, Artificial Sequence
  ENSG00000078399_8 (sequence is synthesized)
tcacccccaccctagcctccaccatccccgcacaaagcggctctaaacctcaggccacatcttttccaaggcaaaccctgttcaggctggctcgtaggcctgccgctttgatggaggagg

SEQ ID NO: 73956 - DNA, 120 bp, Artificial Sequence
  ENSG00000078399_9 (sequence is synthesized)
tattgtaagctttccattttctataagaaaaaggaaaagttgaggggggggcattagtgctgatagctgtgtgtgttagcttgtatatatatttttaaaaatctacctgttcctgactta

SEQ ID NO: 73957 - DNA, 120 bp, Artificial Sequence
  ENSG00000078399_10 (sequence is synthesized)
aaacaaaaggaaagaaactacctttttataatgcacaactgttgatggtaggctgtatagtttttagtctgtgtagttaatttaatttgcagtttgtgcggcagattgctctgccaagat

SEQ ID NO: 73958 - DNA, 120 bp, Artificial Sequence
  ENSG00000078399_11 (sequence is synthesized)
acttgaacactgtgttttattgtggtaattatgttttgtgattcaaacttctgtgtactgggtgatgcacccattgtgattgtggaagatagaattcaatttgaactcaggttgtttatg

SEQ ID NO: 73959 - DNA, 120 bp, Artificial Sequence
  ENSG00000078399_12 (sequence is synthesized)
aggggaaaaaaacagttgcatagagtatagctctgtagtggaatatgtcttctgtataactaggctgttaacctatgattgtaaagtagctgtaagaatttcccagtgaaataaaaaaaa

SEQ ID NO: 73960 - DNA, 120 bp, Artificial Sequence
  ENSG00000078399_13 (sequence is synthesized)
attttaagtgttctcggggatgcatagattcatcattttctccaccttaaaaatgcgggcatttaagtctgtccattatctatatagtcctgtcttgtctattgtatatataatctatat

SEQ ID NO: 73961 - DNA, 120 bp, Artificial Sequence
  ENSG00000078399_14 (sequence is synthesized)
gattaaagaaaatatgcataatcagacaagcttgaatattgtttttgcaccagacgaacagtgaggaaattcggagctatacatatgtgcagaaggttactacctagggtttatgcttaa

SEQ ID NO: 73962 - DNA, 120 bp, Artificial Sequence
  ENSG00000078399_15 (sequence is synthesized)
ttttaattggaggaaatgaatgctgattgtaacggagttaattttattgataataaattatacactatgaaaccgccattgggctactgtagatttgtatccttgatgaatctggggttt

SEQ ID NO: 73963 - DNA, 120 bp, Artificial Sequence
  ENSG00000078399_16 (sequence is synthesized)
ccatcagactgaacttacactgtatattttgcaatagttacctcaaggcctactgaccaaattgttgtgttgagatgatatttaactttttgccaaataaaatatattgattcttttcta

SEQ ID NO: 73964 - DNA, 120 bp, Artificial Sequence
  ENSG00000078399_17 (sequence is synthesized)
ggccgggcggggcatcacggccctggtcgtgccaggcctgcggtggcaacctcggctttccctgctcaggagcctcgtgtctttctccgcagcgctttgccagccggccggctttcccct

SEQ ID NO: 73965 - DNA, 120 bp, Artificial Sequence
  ENSG00000078399_18 (sequence is synthesized)
cttgacgcatttgcggccgcctggggcactctgttgcactggcgggcgcaggttgcctaggggctgggctgggccgggccaggcgcgatggcagggttctctccttggcggcggcggcag

SEQ ID NO: 73966 - DNA, 120 bp, Artificial Sequence
  ENSG00000078399_19 (sequence is synthesized)
cggcggaggcggcggcggcggcgggcgaggcagcccttcgcgggcagcaccagaactggtcggtgatttaggtagtttcctgttgttgggatccacctttctctcgacagcacgacactg

SEQ ID NO: 73967 - DNA, 120 bp, Artificial Sequence
  ENSG00000078399_20 (sequence is synthesized)
tgaggggatgcttggatctggctctggccttgggagtgggagtggggccgtctttccatcaaggctggcagccgcttcccacccccagtcccgccagcccaccaaagtccactgacagga

SEQ ID NO: 73968 - DNA, 120 bp, Artificial Sequence
  ENSG00000078399_21 (sequence is synthesized)
gttgtagagaaggcaagccgggtgagcacaacaccagaggagaagatcctaactggatcaacggactaggggagaaaagtgttgggggttaggggctagggaacaaccactgcattttgg

SEQ ID NO: 73969 - DNA, 120 bp, Artificial Sequence
  ENSG00000078399_22 (sequence is synthesized)
tcctgacactctgaggatcctgacggccatagggccaggttcgccacttttgaggaggcagaattcagacaaggggccagttccagatccagagctgaatgggaagcgcgtgagtccccg

SEQ ID NO: 73970 - DNA, 120 bp, Artificial Sequence
  ENSG00000078399_23 (sequence is synthesized)
acacggccgcttcagtggttagagtacaccggggactagtggcagcttctgcgacagggatgataacccagcagccaactggcttcatgcgcgctccactcggaaaaagcggtgccccta

SEQ ID NO: 73971 - DNA, 120 bp, Artificial Sequence
  ENSG00000078401_0 (sequence is synthesized)
agacgcgcctctgcatctgcgccaggcgaacgggtcctgcgcctcctgcagtcccagctctccaccgccgcgtgcgcctgcagacgctccgctcgctgccttctctcctggcaggcgctg

SEQ ID NO: 73972 - DNA, 120 bp, Artificial Sequence
  ENSG00000078401_1 (sequence is synthesized)
ccttttctccccgttaaaagggcacttgggctgaaggatcgctttgagatctgaggaacccgcagcgctttgagggacctgaagctgtttttcttcgttttcctttgggttcagtttgaa

SEQ ID NO: 73973 - DNA, 120 bp, Artificial Sequence
  ENSG00000078401_2 (sequence is synthesized)
cgggaggtttttgatccctttttttcagaatggattatttgctcatgattttctctctgctgtttgtggcttgccaaggagctccagaaacagcagtcttaggcgctgagctcagcgcgg

SEQ ID NO: 73974 - DNA, 120 bp, Artificial Sequence
  ENSG00000078401_3 (sequence is synthesized)
tgggtgagaacggcggggagaaacccactcccagtccaccctggcggctccgccggtccaagcgctgctcctgctcgtccctgatggataaagagtgtgtctacttctgccacctggaca

SEQ ID NO: 73975 - DNA, 120 bp, Artificial Sequence
  ENSG00000078401_4 (sequence is synthesized)
tcatttgggtcaacactcccgagcacgttgttccgtatggacttggaagccctaggtccaagagagccttggagaatttacttcccacaaaggcaacagaccgtgaaaatagatgccaat

SEQ ID NO: 73976 - DNA, 120 bp, Artificial Sequence
  ENSG00000078401_5 (sequence is synthesized)
gtgctagccaaaaagacaagaagtgctggaatttttgccaagcaggaaaagaactcagggctgaagacattatggagaaagactggaataatcataagaaaggaaaagactgttccaagc

SEQ ID NO: 73977 - DNA, 120 bp, Artificial Sequence
  ENSG00000078401_6 (sequence is synthesized)
ttgggaaaaagtgtatttatcagcagttagtgagaggaagaaaaatcagaagaagttcagaggaacacctaagacaaaccaggtcggagaccatgagaaacagcgtcaaatcatcttttc

SEQ ID NO: 73978 - DNA, 120 bp, Artificial Sequence
  ENSG00000078401_7 (sequence is synthesized)
atgatcccaagctgaaaggcaagccctccagagagcgttatgtgacccacaaccgagcacattggtgacagaccttcggggcctgtctgaagccatagcctccacggagagccctgtggc

SEQ ID NO: 73979 - DNA, 120 bp, Artificial Sequence
  ENSG00000078401_8 (sequence is synthesized)
cccccaaccatcttcactggcttccatcagtggtaactgctttggtctcttctttcatctggggatgacaatggacctctcagcagaaacacacagtcacattcgaattcgggtggcatc

SEQ ID NO: 73980 - DNA, 120 bp, Artificial Sequence
  ENSG00000078401_9 (sequence is synthesized)
ctccggagagagagagaggaaggagattccacacaggggtggagtttctgacgaaggtcctaagggagtgtttgtgtctgactcaggcgcctggcacatttcagggagaaactccaaagt

SEQ ID NO: 73981 - DNA, 120 bp, Artificial Sequence
  ENSG00000078401_10 (sequence is synthesized)
ccacacaaagattttctaaggaatgcacaaattgaaaacacactcaaaagacaaacatgcaagtaaagaaaaaaaaaagaaagacttttgtttaaatttgtaaaatgcaaaactgaatga

SEQ ID NO: 73982 - DNA, 120 bp, Artificial Sequence
  ENSG00000078401_11 (sequence is synthesized)
aactgttactaccataaatcaggatatgtttcatgaatatgagtctacctcacctatattgcactctggcagaagtatttcccacatttaattattgcctccccaaactcttcccacccc

SEQ ID NO: 73983 - DNA, 120 bp, Artificial Sequence
  ENSG00000078401_12 (sequence is synthesized)
tgctgccccttcctccatcccccatactaaatcctagcctcgtagaagtctggtctaatgtgtcagcagtagatataatattttcatggtaatctactagctctgatccataagaaaaaa

SEQ ID NO: 73984 - DNA, 120 bp, Artificial Sequence
  ENSG00000078401_13 (sequence is synthesized)
aagatcattaaatcaggagattccctgtccttgatttttggagacacaatggtatagggttgtttatgaaatatattgaaaagtaagtgtttgttacgctttaaagcagtaaaattattt

SEQ ID NO: 73985 - DNA, 120 bp, Artificial Sequence
  ENSG00000078401_14 (sequence is synthesized)
tcctttatataaccggctaatgaaagaggttggattgaattttgatgtacttatttttttatagatatttatattcaaacaatttattccttatatttaccatgttaaatatctgtttgg

SEQ ID NO: 73986 - DNA, 120 bp, Artificial Sequence
  ENSG00000078401_15 (sequence is synthesized)
gcaggccatattggtctatgtatttttaaaatatgtatttctaaatgaaattgagaacatgctttgttttgcctgtcaaggtaatgactttagaaaataaatatttttttccttactgta

SEQ ID NO: 73987 - DNA, 120 bp, Artificial Sequence
  ENSG00000078403_0 (sequence is synthesized)
gcgcacgccaagtgacgctccgaggaggaagcgcagcccccttcccctccctcgctgcccctggcccagcgggagccccccctccccccagtgcgcctgtgcggaggccctcttgattat

SEQ ID NO: 73988 - DNA, 120 bp, Artificial Sequence
  ENSG00000078403_1 (sequence is synthesized)
gtgtgccctctccgggcgcccgcgttagcggccgggtggaggtggggagggaagacgctgaggaggaggaggaggcggaggaggcggtggaggggaggtggggggaatcagcaaggacat

SEQ ID NO: 73989 - DNA, 120 bp, Artificial Sequence
  ENSG00000078403_2 (sequence is synthesized)
ggctcctgactcctgtgcggaacgtgagtgactgagcggcaaagcccgaatggtctctagcgaccggcccgtgtcactggaggacgaggtctcccatagtatgaaggagatgattggagg

SEQ ID NO: 73990 - DNA, 120 bp, Artificial Sequence
  ENSG00000078403_3 (sequence is synthesized)
ctgttgcgtttgctcagacgagagaggctgggccgagaacccgctggtttattgcgacgggcacggctgcagcgtcgcggtgcatcaagcttgctatggcattgttcaagtacccactgg

SEQ ID NO: 73991 - DNA, 120 bp, Artificial Sequence
  ENSG00000078403_4 (sequence is synthesized)
accgtggttttgcaggaaatgtgaatctcaggagagagcagccagagtgagatgtgaactttgtccccataaggatggagctttaaaaagaacagataatgggggttgggcccatgtggt

SEQ ID NO: 73992 - DNA, 120 bp, Artificial Sequence
  ENSG00000078403_5 (sequence is synthesized)
ttgtgccctgtatattccagaggtacaatttgccaatgtttccacaatggaaccaattgttttacagtctgttccgcatgatcgttataataagacttgctacatttgtgatgaacaagg

SEQ ID NO: 73993 - DNA, 120 bp, Artificial Sequence
  ENSG00000078403_6 (sequence is synthesized)
aagagaaagcaaagcagccactggtgcttgcatgacatgtaataaacatggatgtcgacaggctttccatgtaacatgcgctcagtttgccggactgctttgtgaagaagaaggtaatgg

SEQ ID NO: 73994 - DNA, 120 bp, Artificial Sequence
  ENSG00000078403_7 (sequence is synthesized)
tgccgataatgtccaatactgtggctactgtaaataccattttagtaagctgaaaaagagcaaacggggatctaataggtcatatgatcaaagtttaagtgattcttcctctcactctca

SEQ ID NO: 73995 - DNA, 120 bp, Artificial Sequence
  ENSG00000078403_8 (sequence is synthesized)
ggataaacatcatgagaaagagaaaaaaaaatataaagagaaggacaaacacaaacagaaacacaagaagcagccagaaccatcacctgcattggttccatccttgactgttactacaga

SEQ ID NO: 73996 - DNA, 120 bp, Artificial Sequence
  ENSG00000078403_9 (sequence is synthesized)
aaaaacttatacaagcactagcaacaactctatatctggatcattgaagcgcttggaagatactactgcacgatttacaaatgcaaatttccaggaagtctctgcacacacctctagtgg

SEQ ID NO: 73997 - DNA, 120 bp, Artificial Sequence
  ENSG00000078403_10 (sequence is synthesized)
aaaagatgtttcagagactagagggtcagagggcaaagggaagaaatcttcagctcacagctcaggtcaaaggggaagaaagcctggtggtggaagaaatccaggaacaactgtgtcagc

SEQ ID NO: 73998 - DNA, 120 bp, Artificial Sequence
  ENSG00000078403_11 (sequence is synthesized)
agctagcccttttcctcaaggcagtttttcaggaactccaggcagtgtaaagtcatcttctggaagttcagtgcagtctccccaggatttcctgagctttacagactcagatctgcgtaa

SEQ ID NO: 73999 - DNA, 120 bp, Artificial Sequence
  ENSG00000078403_12 (sequence is synthesized)
tgacagttactctcactcccaacagtcatcagcaaccaaagatgtacataaaggagagtctggaagccaggaagggggggtaaatagttttagtaccttaattggcctcccttcaacctc

SEQ ID NO: 74000 - DNA, 120 bp, Artificial Sequence
  ENSG00000078403_13 (sequence is synthesized)
agctgttacttcacagcctaaaagctttgaaaattcacctggagatttgggtaattccagccttcctacagcaggatataagcgggctcaaacttctggcatagaagaagaaactgtaaa

SEQ ID NO: 74001 - DNA, 120 bp, Artificial Sequence
  ENSG00000078403_14 (sequence is synthesized)
ggaaaagaaaaggaaaggaaataaacaaagtaagcatgggcctggcagacccaaaggaaacaaaaatcaagagaatgtttctcatctctcagtttcttctgcttcaccaacatcatctgt

SEQ ID NO: 74002 - DNA, 120 bp, Artificial Sequence
  ENSG00000078403_15 (sequence is synthesized)
agcatcagctgcaggaagcataacaagctctagtctgcagaaatctcctacattgctcaggaatggaagtttacagagcctcagtgttggctcatctccagttggttcagaaatttccat

SEQ ID NO: 74003 - DNA, 120 bp, Artificial Sequence
  ENSG00000078403_16 (sequence is synthesized)
gcagtatcggcatgatggagcttgcccaacaactacgttctcagagttgctgaatgcaatacacaacgacagaggtgacagttctacactaacaaagcaagaacttaaattcataggtat

SEQ ID NO: 74004 - DNA, 120 bp, Artificial Sequence
  ENSG00000078403_17 (sequence is synthesized)
ttataacagcaatgatgtagcagtatcgtttccaaatgtagtatctggctcgggatctagtactcctgtctccagctctcacttacctcagcagtcttctgggcatttgcaacaagtagg

SEQ ID NO: 74005 - DNA, 120 bp, Artificial Sequence
  ENSG00000078403_18 (sequence is synthesized)
agcgctctctccctcagctgtgtcatctgcagcccctgctgttgctacaactcaggcaaatactctatctggatcttctctcagtcaggcaccatctcatatgtatggcaatagatcaaa

SEQ ID NO: 74006 - DNA, 120 bp, Artificial Sequence
  ENSG00000078403_19 (sequence is synthesized)
ttcatcaatggcagctcttatagctcagtctgaaaacaatcaaacagatcaagatcttggagacaatagccgcaacctagttggcagaggaagctcaccccgaggaagtctctcgccacg

SEQ ID NO: 74007 - DNA, 120 bp, Artificial Sequence
  ENSG00000078403_20 (sequence is synthesized)
atcccctgtaagcagcttacagattcgctatgatcaaccaggcaacagcagtttggaaaatctgcctccagtagcagccagcatagaacagcttttggagaggcagtggagtgaaggaca

SEQ ID NO: 74008 - DNA, 120 bp, Artificial Sequence
  ENSG00000078403_21 (sequence is synthesized)
tagtgacattttaggaatgctgaagtcattacaccaacttcaagttgaaaaccgaagattagaggaacaaattaaaaacttgactgccaaaaaggaacggcttcagttattgaatgcaca

SEQ ID NO: 74009 - DNA, 120 bp, Artificial Sequence
  ENSG00000078403_22 (sequence is synthesized)
gctttcagtgccttttccaacaataacagcaaatcctagtccgtctcatcaaatacacacattttcagcacagactgctcctactactgattccttgaacagcagtaagagccctcatat

SEQ ID NO: 74010 - DNA, 120 bp, Artificial Sequence
  ENSG00000078403_23 (sequence is synthesized)
aggaaacagctttttacctgataattctcttcctgtattaaatcaggacttaacctccagtggacaaagtaccagcagctcatcagctctttctaccccacctcctgctgggcagagtcc

SEQ ID NO: 74011 - DNA, 120 bp, Artificial Sequence
  ENSG00000078403_24 (sequence is synthesized)
ggctcaacaaggctcaggagtgagtggagttcagcaggtcaatggcgtgacagtgggggcactagctagtggaatgcagcctgtaacttccaccattcctgccgtgtctgcagtgggtgg

SEQ ID NO: 74012 - DNA, 120 bp, Artificial Sequence
  ENSG00000078403_25 (sequence is synthesized)
aataattggagctttgccaggtaaccaactggcaattaatggcattgtaggagctttaaatggggttatgcagactcctgtcacaatgtcccagaaccctacccctctcacccacacaac

SEQ ID NO: 74013 - DNA, 120 bp, Artificial Sequence
  ENSG00000078403_26 (sequence is synthesized)
cgtaccacctaatgcaacacatccaatgccagctacactgactaacagtgcctcaggactaggattactttctgaccagcaacgacaaatacttattcatcaacagcagtttcagcagtt

SEQ ID NO: 74014 - DNA, 120 bp, Artificial Sequence
  ENSG00000078403_27 (sequence is synthesized)
gttaaattctcaacagctcacaccagtacacaggcacccccacttcacacagctaccaccaacccatttctcaccatccatggagataatgcaagtcagaaagtagcaagacttagtgat

SEQ ID NO: 74015 - DNA, 120 bp, Artificial Sequence
  ENSG00000078403_28 (sequence is synthesized)
aaaactgggcctgtagctcaagagaaaagttgacacctgagaaacatctagaaattgcctatcctgctgttctagcacttcatctggctgcctttgcagtccttttactacagctatgaa

SEQ ID NO: 74016 - DNA, 120 bp, Artificial Sequence
  ENSG00000078403_29 (sequence is synthesized)
gaaacgcaacaagaaactcaatgcacaacaaaggattaattgctgcaaggacattcttgtaaggctttgattagttttcttgttgctttgttgcactgaaatggaattcccatgccccta

SEQ ID NO: 74017 - DNA, 120 bp, Artificial Sequence
  ENSG00000078403_30 (sequence is synthesized)
ccccttaccccagttttttgaacatggaaagaaaatttaataactttttaaagtgacataatttacatgcaatatgtttatcaactcaagaatttaatatagttggtacacaactagttt

SEQ ID NO: 74018 - DNA, 120 bp, Artificial Sequence
  ENSG00000078403_31 (sequence is synthesized)
tgtttataaattggagatgcaaatagcaaaactaaatacttgctccatttacaaactacttgattttattgtacaagttgaaatatgctcttttgtttgggttacagtatgcttgctcta

SEQ ID NO: 74019 - DNA, 120 bp, Artificial Sequence
  ENSG00000078403_32 (sequence is synthesized)
agtcaaattccaaggaactaatttcttctcctggagttgcattgattcagtattacaaatatatagcacatcacctgggacttggcaatctttgttaaaaaaaaatttcctttctaatgg

SEQ ID NO: 74020 - DNA, 120 bp, Artificial Sequence
  ENSG00000078403_33 (sequence is synthesized)
gatttggccaattttggtaatgaagttaggatggtaatgtctgcatctgctaaaggtaattttcttttgagaattgctttctttagtgttaagacctactcatattttgaagaaatcttg

SEQ ID NO: 74021 - DNA, 120 bp, Artificial Sequence
  ENSG00000078403_34 (sequence is synthesized)
agttaagtgagttctgaggctgctgggggaaccagatcaattcaaagctaaatacttctttcagaaaggggccactgtggaaagtgctggtggggtttgcccttgatcaagtgcctccat

SEQ ID NO: 74022 - DNA, 120 bp, Artificial Sequence
  ENSG00000078403_35 (sequence is synthesized)
tgtgctgcaagggctgtagacagcagggtgggacagtcagtcctccgagcagcaggaatcatcccgtcacctgcagccttcccatgcttccgcctttattcagaactttctgtgccactg

SEQ ID NO: 74023 - DNA, 120 bp, Artificial Sequence
  ENSG00000078403_36 (sequence is synthesized)
tagatagctcaggcaaaactattacctgggtatttatccactaatgagtcacaagaaaaggagtggatttggtaagaatagagatttgttttatttaaaccacttcccattactgaccat

SEQ ID NO: 74024 - DNA, 120 bp, Artificial Sequence
  ENSG00000078403_37 (sequence is synthesized)
taaaagctcaccactagagttcctgaaacaggtgaaacctgtatgacagcccttccactttggggagccacgcttttgatgtgacagtaccgcagagtgattcccccactgaggatgtca

SEQ ID NO: 74025 - DNA, 120 bp, Artificial Sequence
  ENSG00000078403_38 (sequence is synthesized)
tcatcaaactcttctttggtgtgtgaattattagtggaaaagacccagctgtaattagacctccactgtgtacttagctggaagaacatgttaattctgcaatatgtttcttggttaaac

SEQ ID NO: 74026 - DNA, 120 bp, Artificial Sequence
  ENSG00000078403_39 (sequence is synthesized)
attgcacagttcttacctcatttctgtaaataaagttttgtgaatctgttttgtattgtgacaaattcataagataacattgatattttgatttgtaatatttctaattggtagatttaa

SEQ ID NO: 74027 - DNA, 120 bp, Artificial Sequence
  ENSG00000078403_40 (sequence is synthesized)
ttgaaaagtaaaattaatttatttttatatgttcaggggaattttaaagtcaaatcttttgtagataatttaaaaaatcagtgtggtttattttacttatttaacccactggttgttatt

SEQ ID NO: 74028 - DNA, 120 bp, Artificial Sequence
  ENSG00000078403_41 (sequence is synthesized)
ctggttgttattctgtaacagtttgtataaatggtaaattttgaatgtgttgttattttacctagatgtaaaattccacatgtattaaaatgtacaaaatgttttgttaataaaatttaa

SEQ ID NO: 74029 - DNA, 120 bp, Artificial Sequence
  ENSG00000078403_42 (sequence is synthesized)
aattctcaacagctcacaccagaacaacatcaagcctttttgtatcagttaatgcaacatcaccaccagcagcaccaccaacctgaacttcagcagctgcagatccctggaccaacacaa

SEQ ID NO: 74030 - DNA, 120 bp, Artificial Sequence
  ENSG00000078403_43 (sequence is synthesized)
tggaatacaaactctcccgacatccgtagttactttcaaggtggattgtgtattttaaggctgatgggaacgtctggtttgtggagcaaaaagaagagaagatggtctctagcgaccggc

SEQ ID NO: 74031 - DNA, 120 bp, Artificial Sequence
  ENSG00000078403_44 (sequence is synthesized)
ttggtttgtttttgaacttataactaatggatgttctagattattatatgattagttgctttagtaagattactttaaagatagtgtttcctattaaatttttttaatagggactttttc

SEQ ID NO: 74032 - DNA, 120 bp, Artificial Sequence
  ENSG00000078403_45 (sequence is synthesized)
tttccttttataatatgatttgtgcttccagagttgaattgtaattttaatgtttaactagatatggaataatgcttaaaattggggagaaaaataataaaagctggagctttgctttga

SEQ ID NO: 74033 - DNA, 120 bp, Artificial Sequence
  ENSG00000078403_46 (sequence is synthesized)
atgtgaatctcaggagagagcagccagagtgactctacttcatgaggctggaaccatgactgctggcagctcttgtttccagccccttttaccagaagaaggggctctctagaagaatcc

SEQ ID NO: 74034 - DNA, 120 bp, Artificial Sequence
  ENSG00000078403_47 (sequence is synthesized)
cttggatcatgtgcccatcatctctgtggctggagtggggagggtactgtgaatggcaaccctcactagaactacatagttggagtcagggagatgtgaactttgtccccataaggatgg

SEQ ID NO: 74035 - DNA, 120 bp, Artificial Sequence
  ENSG00000078403_48 (sequence is synthesized)
aagtcatgaagagatgtgaactttgtccccataaggatggagctttaaaaagaacagataatgggggttgggcccatgtggtttgtgccctgtatattccagaggtacaatttgccaatg

SEQ ID NO: 74036 - DNA, 120 bp, Artificial Sequence
  ENSG00000078403_49 (sequence is synthesized)
gattacaggtgtgagccaccacgcccagagaatcctaggttttcaatagaggagttgaaatcatgtacctagttagataattagtttttttttttttctgtgtccttgtaaatattgttg

SEQ ID NO: 74037 - DNA, 120 bp, Artificial Sequence
  ENSG00000078403_50 (sequence is synthesized)
tattgttgcatggtgttatttggcaccacagtgcaaagtgaatgaaaccatttggttgtgttgaagttgggctaggttatgctttattactatttagaaattagtttctttttcaacatg

SEQ ID NO: 74038 - DNA, 120 bp, Artificial Sequence
  ENSG00000078403_51 (sequence is synthesized)
tatcacctgattatatgtagttagacataactttttgtatcctcaacttggagtctgctgattttattcattatacaccgatacttacagattgttgtttttgcagttcagtcttctgtc

SEQ ID NO: 74039 - DNA, 120 bp, Artificial Sequence
  ENSG00000078403_52 (sequence is synthesized)
acatgaccagccatgattttgagctgtgaaaagttaatattgcgtattagttacttgcacatggaaaatggaagatgtcagtcaaagtttctcggggtgttcattggctttgtatctctt

SEQ ID NO: 74040 - DNA, 120 bp, Artificial Sequence
  ENSG00000078403_53 (sequence is synthesized)
gggcatttctgacctacttagctaaagtatcttcttctgtagcccacatatgtcagcttggtggggctgaatgacagcctacccgtataggattcctcacagacagtggaaatgaatgac

SEQ ID NO: 74041 - DNA, 120 bp, Artificial Sequence
  ENSG00000078403_54 (sequence is synthesized)
ctaaacgttgctaattcgtgtagggctgttatttgtctcttaggtcccaataccctgtttcaaaccctcttagatatgattatttcctgcagaggggaaagataaacattgtttttacac

SEQ ID NO: 74042 - DNA, 120 bp, Artificial Sequence
  ENSG00000078403_55 (sequence is synthesized)
ccttgttacaggaatcagtcttgatgacaaggtgttgggaagaagaggtgtggtagattgtgtcctggcccgccagcctcagtgcctgggaagagtcttcctgtcttgcaaagtttgtga

SEQ ID NO: 74043 - DNA, 120 bp, Artificial Sequence
  ENSG00000078403_56 (sequence is synthesized)
gactgatgaagataatgcctttgtgaatttttttaataggactatttgtatgtctttgtttatatttttctgtttgtattgtatgcaaaaattagattattgtccaaaatgaattcatat

SEQ ID NO: 74044 - DNA, 120 bp, Artificial Sequence
  ENSG00000078403_57 (sequence is synthesized)
tttgagttaagataggttacttagtatacctgatcttcatttctgaagataattgtaaaattctgattcatgttaagaacatgtatgatttttgtcttttttttttttaaccccaagact

SEQ ID NO: 74045 - DNA, 85 bp, Artificial Sequence
  ENSG00000078403_58 (sequence is synthesized)
ggagagagcagccagagtggcagagtctcgctctgttgcccaggctaaagtgcagtggtgtgatctcagcccactgcaacctctg

SEQ ID NO: 74046 - DNA, 120 bp, Artificial Sequence
  ENSG00000078403_59 (sequence is synthesized)
ggtgcatcaagagatgtgaactttgtccccataaggatggagctttaaaaagaacagataatgggggttgggcccatgtggtttgtgccctgtatattccagaggtacaatttgccaatg

SEQ ID NO: 74047 - DNA, 72 bp, Artificial Sequence
  ENSG00000078403_60 (sequence is synthesized)
cacaaacagaaacacaagaagcagccagaaccatcacctgcattggttccatccttgactgttactacagaa

SEQ ID NO: 74048 - DNA, 120 bp, Artificial Sequence
  ENSG00000078403_61 (sequence is synthesized)
ctttcttcggtcctcagtcatttaccacttgtcatatgtcctttctagtttccagggatattcttttttatatttatggctttatgccatttatctcagttgtcatttggcgtttcaaga

SEQ ID NO: 74049 - DNA, 120 bp, Artificial Sequence
  ENSG00000078403_62 (sequence is synthesized)
aggagaggtggtagtgtttaagtggaattaactacttgtgtttctgatgtggtcttttatatttcttacagggttttgttttaccaagtactagtcttcagtctatcctgtttacttgat

SEQ ID NO: 74050 - DNA, 120 bp, Artificial Sequence
  ENSG00000078403_63 (sequence is synthesized)
tttttcccactcaactcacaaacatttttgaatcatctcatgaattctgctttccatttacatttttgcccttttgtcttttcctcttcgctgttaaacttcctgaaaaaataaaactag

SEQ ID NO: 74051 - DNA, 120 bp, Artificial Sequence
  ENSG00000078403_64 (sequence is synthesized)
gggacttacagagatgtgaactttgtccccataaggatggagctttaaaaagaacagataatgggggttgggcccatgtggtttgtgccctgtatattccagaggtacaatttgccaatg

SEQ ID NO: 74052 - DNA, 120 bp, Artificial Sequence
  ENSG00000078403_65 (sequence is synthesized)
gctaaaagagggcagagagcgaaaaagaatggaatacaaactctcccgacatccgtagttactttcaaggtggattgtgtattttaaggctgatgggaacgtctggtttgtggagcaaaa

SEQ ID NO: 74053 - DNA, 120 bp, Artificial Sequence
  ENSG00000078403_66 (sequence is synthesized)
agaggaatcctccatcaaaactggacgccactgtctgatggcgttaattatgttttagcgactgactaggagggctagagttccttcttccttttggtgtaatacaactgcattttccgg

SEQ ID NO: 74054 - DNA, 120 bp, Artificial Sequence
  ENSG00000078403_67 (sequence is synthesized)
atcatcgtattatattgctaattccggataaaccaccatttgtcctgcacaccgagctgaggggcgccttggcgttccctctccgagtgcagccctaacacaggcttttgaccttcagcc

SEQ ID NO: 74055 - DNA, 120 bp, Artificial Sequence
  ENSG00000078403_68 (sequence is synthesized)
tggaatacactttcgtttgtcattggggcccacgtagtgcgaaaatgggcggcagatttggtaggacttccagcgggtgaactttgggaagagtccaggacgtgaatttaatgggtggag

SEQ ID NO: 74056 - DNA, 120 bp, Artificial Sequence
  ENSG00000078403_69 (sequence is synthesized)
tggctgcggcagcactgtgaagttagcgcggccaactgcaggaagccatgcttcattacacccttcatggaagctggcacactcgccccaccctcgttttccacgggccagtcttggagg

SEQ ID NO: 74057 - DNA, 120 bp, Artificial Sequence
  ENSG00000078403_70 (sequence is synthesized)
actgtttgaatatcactactgggaagtagaaaggaagtttttgtgtttttaaaatcacaggtctccatcaaatccagggagatttggaaaaaaaattactactccaaactgcagttatta

SEQ ID NO: 74058 - DNA, 120 bp, Artificial Sequence
  ENSG00000078487_0 (sequence is synthesized)
cgccgttttcccggggagatgcgccgcccggtctccctgccagcggagtgctgggccgaggacagggcggcaggggtgacagtggggtccaggagagtctcaaaatcctaagctttcagt

SEQ ID NO: 74059 - DNA, 120 bp, Artificial Sequence
  ENSG00000078487_1 (sequence is synthesized)
atttgttattgtgaaagaagttaattcacctgaaacagaggaggggcaacctgagttatcagaaagtgacttcctggccttcccttctttactgatcagaggcacacaaagcgtagtttc

SEQ ID NO: 74060 - DNA, 120 bp, Artificial Sequence
  ENSG00000078487_2 (sequence is synthesized)
taagctgaatgatgacaacgttgcagaataaagaagaatgtggaaagggaccaaagagaatctttgccccacctgcacaaaaatcttacagcctgttaccttgtagccctaactccccta

SEQ ID NO: 74061 - DNA, 120 bp, Artificial Sequence
  ENSG00000078487_3 (sequence is synthesized)
aggaggagaccccggggatcagttccccagagacagaggccaggataagcctgccaaaggccagtttaaagaagaaagaggaaaaagcaaccatgaagaatgttccaagcagggaacagg

SEQ ID NO: 74062 - DNA, 120 bp, Artificial Sequence
  ENSG00000078487_4 (sequence is synthesized)
agaaaaaaagaaaggcacaaatcaacaagcaagcagagaagaaagaaaaggaaaaatcaagtcttaccaatgcagaatttgaggagattgtccagattgttctgcagaagtcccttcagg

SEQ ID NO: 74063 - DNA, 120 bp, Artificial Sequence
  ENSG00000078487_5 (sequence is synthesized)
agtgcttggggatgggatctggccttgattttgcagagacttcttgtgcccagcccgtagtatctacccaatcagacaaggagccaggaattactgcttctgctactgatactgataatg

SEQ ID NO: 74064 - DNA, 120 bp, Artificial Sequence
  ENSG00000078487_6 (sequence is synthesized)
ctaatggagaggaggtaccacatactcaagagatttcagtgtcttgggaaggtgaagctgcccctgagataaggacatctaagttaggccagccagatcctgcaccctctaagaagaaat

SEQ ID NO: 74065 - DNA, 120 bp, Artificial Sequence
  ENSG00000078487_7 (sequence is synthesized)
ccaatagactcaccttaagcaaaagaaagaaggaagctcatgagaaggtggagaaaactcaaggtggacatgagcacagacaggaagaccgactaaagaaaacagttcaggatcattctc

SEQ ID NO: 74066 - DNA, 120 bp, Artificial Sequence
  ENSG00000078487_8 (sequence is synthesized)
agatcagggaccagcaaaaaggagagataagtggttttggtcaatgtctggtctgggtccagtgttccttcccaaactgtgggaaatggaggcggctgtgtgggaacattgacccctcag

SEQ ID NO: 74067 - DNA, 120 bp, Artificial Sequence
  ENSG00000078487_9 (sequence is synthesized)
gacagggcttgagagtgatgtggcctatgcctcctacatcccaggatccatcatctgggccaagcaatacggttacccctggtggccaggcatgatagaatctgatcctgacttagggga

SEQ ID NO: 74068 - DNA, 120 bp, Artificial Sequence
  ENSG00000078487_10 (sequence is synthesized)
atattttctttttacttcccatcttgattccctgccgtctaagtaccatgtgacgttttttggagaaacagtttctcgtgcatggatcccagtcaacatgctaaagaacttccaggagct

SEQ ID NO: 74069 - DNA, 120 bp, Artificial Sequence
  ENSG00000078487_11 (sequence is synthesized)
gtccctggagctatcagtcatgaaaaagcgcagaaatgactgcagccagaaactgggggtggccctgatgatggctcaagaggcagaacagatcagcattcaggaacgggttaacttgtt

SEQ ID NO: 74070 - DNA, 120 bp, Artificial Sequence
  ENSG00000078487_12 (sequence is synthesized)
tggtttctggagccgattcaacggatctaacagtaatggggaaagaaaagacttacagctctctggtttgaacagcccaggatcctgcttagagaaaaaggagaaagaggaagagttgga

SEQ ID NO: 74071 - DNA, 120 bp, Artificial Sequence
  ENSG00000078487_13 (sequence is synthesized)
aaaggaggaaggagagaaaacagacccaattttgcccattcgtaagcgagtcaaaatacagacccaaaaaaccaagccaagagggcttgggggtgatgcaggcacagcagatggccgagg

SEQ ID NO: 74072 - DNA, 120 bp, Artificial Sequence
  ENSG00000078487_14 (sequence is synthesized)
caggacactgcagaggaagataatgaagagatctctaggcaggaaatccacagctcctcctgcacccagaatgggaaggaaagaaggccaagggaattcagattctgaccagccaggccc

SEQ ID NO: 74073 - DNA, 120 bp, Artificial Sequence
  ENSG00000078487_15 (sequence is synthesized)
taagaaaaaatttaaagctccccagagcaaggccttggcagccagcttttcagagggaaaagaagttagaacagtgccaaagaacctgggcctatcagcgtgtaagggggcctgcccctc

SEQ ID NO: 74074 - DNA, 120 bp, Artificial Sequence
  ENSG00000078487_16 (sequence is synthesized)
atctgcgaaagaagagcccagacaccgggaacccctgacccaggaggctggaagtgtcccccttgaggacgaagcctccagtgacctggacctggagcaactcatggaagatgttgggag

SEQ ID NO: 74075 - DNA, 120 bp, Artificial Sequence
  ENSG00000078487_17 (sequence is synthesized)
agagctggggcagagcggggagctgcagcacagcaacagtgatggcgaggacttccccgtggcgctgtttgggaagtagctggtgctcctctgctccctctttttctcccttctctgggg

SEQ ID NO: 74076 - DNA, 120 bp, Artificial Sequence
  ENSG00000078487_18 (sequence is synthesized)
cgcaggagggagaagttgctaagtgctgggtctgttcattggctatgaggttcaaatgtgtgtggtgcagtttctgtgttaataaagcaggttacagtcgactgggttggctggtctcta

SEQ ID NO: 74077 - DNA, 120 bp, Artificial Sequence
  ENSG00000078487_19 (sequence is synthesized)
aaaacagccgatgttgtccaacttcctcttcccccgaaacggctgagtcgttctctggctcctctaccttcccccaatcgcaatcacctggagacgccacaccacgccttcctctccgcc

SEQ ID NO: 74078 - DNA, 120 bp, Artificial Sequence
  ENSG00000078487_20 (sequence is synthesized)
tcaacacccacgacccgaaccccaacgcatccgcccactcccgacgcccgctcactggcccgtcagttcgcgggcctctcaacacccaccgcggcgccacgccgacttatataccagcga

SEQ ID NO: 74079 - DNA, 120 bp, Artificial Sequence
  ENSG00000078487_21 (sequence is synthesized)
gaaaaagggtttcagttaagcagtgactgttacctgagagggagagttaagtctgacagcttctctctttctctcccatcttctaaataaggtaatattagatgagacttcaacatattt

SEQ ID NO: 74080 - DNA, 120 bp, Artificial Sequence
  ENSG00000078487_22 (sequence is synthesized)
taaaaatacttcatcatctgtcaacaggactatagctaaaccaccttagataaagggtacatatttttagaaaaagtggattacattgacttcagaatttatatatagtcttaactaaat

SEQ ID NO: 74081 - DNA, 72 bp, Artificial Sequence
  ENSG00000078487_23 (sequence is synthesized)
aactaaattttcaagccattatgggatttttgttgttatttatttacttatttattggcagtgatatgatct

SEQ ID NO: 74082 - DNA, 120 bp, Artificial Sequence
  ENSG00000078487_24 (sequence is synthesized)
gtacacaaaattatcattacctggccatcctggaatgaggcagatcgatctggaaaggcttgcagaaagatacatatttgtagtttttcctgaaaatttaaatatttaaagttctgtgat

SEQ ID NO: 74083 - DNA, 120 bp, Artificial Sequence
  ENSG00000078487_25 (sequence is synthesized)
atgacaggtaggctctttcaggctacagggagaagacactttagagaaaatgttagggagtaatagagtggctttttcgtttttttgcttctctgcttatagtattttgttttgggaggg

SEQ ID NO: 74084 - DNA, 80 bp, Artificial Sequence
  ENSG00000078549_0 (sequence is synthesized)
gcgagcgtggtccccgcgtgcgcacacgcacacgccgccgcgcagggacacacggaccccggccgccagccggccacaca

SEQ ID NO: 74085 - DNA, 120 bp, Artificial Sequence
  ENSG00000078549_1 (sequence is synthesized)
cgctccccatccccgcgccgcgcgggccgcggacttgcaggctgcgcgtcctttgcggagtctgccccggccccacggacaggccccgcagtgagcagcccagagacacattggggctga

SEQ ID NO: 74086 - DNA, 120 bp, Artificial Sequence
  ENSG00000078549_2 (sequence is synthesized)
cctgccgctgctgtcagtgggaggccagtggtgctggccaagaagtgtcatggctggtgtcgtgcacgtttccctggctgctctcctcctgctgcctatggcccctgccatgcattctga

SEQ ID NO: 74087 - DNA, 120 bp, Artificial Sequence
  ENSG00000078549_3 (sequence is synthesized)
ctgcatcttcaagaaggagcaagccatgtgcctggagaagatccagagggccaatgagctgatgggcttcaatgattcctctccaggctgtcctgggatgtgggacaacatcacgtgttg

SEQ ID NO: 74088 - DNA, 120 bp, Artificial Sequence
  ENSG00000078549_4 (sequence is synthesized)
gaagcccgcccatgtgggtgagatggtcctggtcagctgccctgagctcttccgaatcttcaacccagaccaagtctgggagaccgaaaccattggagagtctgattttggtgacagtaa

SEQ ID NO: 74089 - DNA, 120 bp, Artificial Sequence
  ENSG00000078549_5 (sequence is synthesized)
ctccttagatctctcagacatgggagtggtgagccggaactgcacggaggatggctggtcggaacccttccctcattactttgatgcctgtgggtttgatgaatatgaatctgagactgg

SEQ ID NO: 74090 - DNA, 120 bp, Artificial Sequence
  ENSG00000078549_6 (sequence is synthesized)
ggaccaggattattactacctgtcagtgaaggccctctacacggttggctacagcacatccctcgtcaccctcaccactgccatggtcatcctttgtcgcttccggaagctgcactgcac

SEQ ID NO: 74091 - DNA, 120 bp, Artificial Sequence
  ENSG00000078549_7 (sequence is synthesized)
acgcaacttcatccacatgaacctgtttgtgtcgttcatgctgagggcgatctccgtcttcatcaaagactggattctgtatgcggagcaggacagcaaccactgcttcatctccactgt

SEQ ID NO: 74092 - DNA, 120 bp, Artificial Sequence
  ENSG00000078549_8 (sequence is synthesized)
ggaatgtaaggccgtcatggttttcttccactactgtgttgtgtccaactacttctggctgttcatcgagggcctgtacctcttcactctgctggtggagaccttcttccctgaaaggag

SEQ ID NO: 74093 - DNA, 120 bp, Artificial Sequence
  ENSG00000078549_9 (sequence is synthesized)
atacttctactggtacaccatcattggctgggggaccccaactgtgtgtgtgacagtgtgggctacgctgagactctactttgatgacacaggctgctgggatatgaatgacagcacagc

SEQ ID NO: 74094 - DNA, 120 bp, Artificial Sequence
  ENSG00000078549_10 (sequence is synthesized)
tctgtggtgggtgatcaaaggccctgtggttggctctatcatggttaactttgtgctttttattggcattatcgtcatccttgtgcagaaacttcagtctccagacatgggaggcaatga

SEQ ID NO: 74095 - DNA, 120 bp, Artificial Sequence
  ENSG00000078549_11 (sequence is synthesized)
gtccagcatctacttgcgactggcccggtccaccctgctgctcatcccactattcggaatccactacacagtatttgccttctccccagagaatgtcagcaaaagggaaagactcgtgtt

SEQ ID NO: 74096 - DNA, 120 bp, Artificial Sequence
  ENSG00000078549_12 (sequence is synthesized)
tgagctggggctgggctccttccagggctttgtggtggctgttctctactgttttctgaatggtgaggtacaagcggagatcaagcgaaaatggcgaagctggaaggtgaaccgttactt

SEQ ID NO: 74097 - DNA, 120 bp, Artificial Sequence
  ENSG00000078549_13 (sequence is synthesized)
cgctgtggacttcaagcaccgacacccgtctctggccagcagtggggtgaatgggggcacccagctctccatcctgagcaagagcagctcccaaatccgcatgtctggcctccctgctga

SEQ ID NO: 74098 - DNA, 120 bp, Artificial Sequence
  ENSG00000078549_14 (sequence is synthesized)
caatctggccacctgagccatgctcccctcctcctcctctcctccatccacaggctgggaccgcaggcaggtgccagcccacgcatgtttgcgcctcttccctccccttgggcaggccct

SEQ ID NO: 74099 - DNA, 120 bp, Artificial Sequence
  ENSG00000078549_15 (sequence is synthesized)
gggctggaagcttggctcctgaggggggagaaggaggcagggcacagactggaattgtcccctccttgttttggtactggtcccacccactgtggtcccctgggccctgaccccagacat

SEQ ID NO: 74100 - DNA, 120 bp, Artificial Sequence
  ENSG00000078549_16 (sequence is synthesized)
gtaaatactcctcaaatttggaaaagttgtcccatcccttccccctttgccccagtgtccctgctcacttccagtcaggtctcagctccaccccactgtttcttggtcagcctcagtgat

SEQ ID NO: 74101 - DNA, 120 bp, Artificial Sequence
  ENSG00000078549_17 (sequence is synthesized)
ggcctgaccccagctgtgaggccttgtgagctaaggctgaagagaccttgcctgtgggagctggggtggtacctgccccaacagccccccatcatctgattttgggtgtgacccctcgag

SEQ ID NO: 74102 - DNA, 120 bp, Artificial Sequence
  ENSG00000078549_18 (sequence is synthesized)
tgtgcatgccaccctggggctcttctcagtcctgggcccaagtccctgaagcctagcagagggccagctcgggtggccagaacaccccttggtgcaggcctcctggcactcgcctggcat

SEQ ID NO: 74103 - DNA, 120 bp, Artificial Sequence
  ENSG00000078549_19 (sequence is synthesized)
cttggtgtccgggtgctcagctcctgggtcccagggcagtgggacagctcccaggctcttctcatcagagacttcagtttgggtggggagtctgcaggtcagggaaggttctggtgcttt

SEQ ID NO: 74104 - DNA, 120 bp, Artificial Sequence
  ENSG00000078549_20 (sequence is synthesized)
tcgtttgatccaaaaggagctgagagccagaaatgtggctgtgattgcgaaagagacggagtttgggagacccatggaagaaaaccttcgccatctccattgttttacccccagctcaag

SEQ ID NO: 74105 - DNA, 120 bp, Artificial Sequence
  ENSG00000078549_21 (sequence is synthesized)
atggacagggttcttctggtcatctcccttccacctcttccaccctcatggatgccttccagaagctgtctccaaccatgcacaccacagagagcccttaagccctcccctccccatttc

SEQ ID NO: 74106 - DNA, 120 bp, Artificial Sequence
  ENSG00000078549_22 (sequence is synthesized)
ccctaagtcaaagccatgactaggatgtaccagccacctgcctctgatgtcggcgaatcctgaagcacctgcacccgaatctggggcccagggctgcccgacccccactcccatggatga

SEQ ID NO: 74107 - DNA, 120 bp, Artificial Sequence
  ENSG00000078549_23 (sequence is synthesized)
tgaggagccccagacaccagctcctctggcctggactcaactattgaaatctctctgagacctctgcaaagatgtcccttttatgcccttgaccttgactcaccatgggctgctggggtg

SEQ ID NO: 74108 - DNA, 120 bp, Artificial Sequence
  ENSG00000078549_24 (sequence is synthesized)
tcgggagaagccacacccaacatgcccattagcagaggctgctgctgatgtggcagctgctccctaccacccgccctggctccccagctgcaggttgcacaccctcagcctgagaatgta

SEQ ID NO: 74109 - DNA, 120 bp, Artificial Sequence
  ENSG00000078549_25 (sequence is synthesized)
aaatagggcagtgcccagctggggaggtagaggaaagtgctagagtacatggtccgtgtgtggcctagctcattccatgtcagcatttggtgttactcctgtccaaattctgtttgcaga

SEQ ID NO: 74110 - DNA, 120 bp, Artificial Sequence
  ENSG00000078549_26 (sequence is synthesized)
cttgtttcatgatgatgctctggaatgcttggggactttgggtggaggaggatgttacttcattttataaagaggaaggggcctgggagacttgggaaaatgtttctggagaggctttca

SEQ ID NO: 74111 - DNA, 120 bp, Artificial Sequence
  ENSG00000078549_27 (sequence is synthesized)
tggaaaaggctcttgttgctgtaatttagagaggagctctgtgtccttggccagtcaagtaagttcctggatctttggcaaagccagaggaagaaaggagctacctgccctttcctgggc

SEQ ID NO: 74112 - DNA, 120 bp, Artificial Sequence
  ENSG00000078549_28 (sequence is synthesized)
atgcttggtgactcagattgatcttggagtgtgcagtggcccttctaccctgcacctgacctcatgatcccctccacctgcactggtgtgcattactgaagcaagggtcctgtggacatc

SEQ ID NO: 74113 - DNA, 120 bp, Artificial Sequence
  ENSG00000078549_29 (sequence is synthesized)
ttgcattttgggcactgctagggggtctgggctgcttggaaggagccatggcctagggttcagggaactagactctatcccagttgggttcagactgctgtgactgtggacacgatgctc

SEQ ID NO: 74114 - DNA, 120 bp, Artificial Sequence
  ENSG00000078549_30 (sequence is synthesized)
cttgttctgggctccagttttcccatttgtgagatgaggcaacttccaatgcttctctaggccctgcacgtaagtgatttttccagttcaaagtcaagacaggtaaaagggcattcatca

SEQ ID NO: 74115 - DNA, 87 bp, Artificial Sequence
  ENSG00000078549_31 (sequence is synthesized)
tggacaggatgctgtttattttccctttcttggaaatggaccttctgtcccttccatttggacaccacagtggaagctggtggcctg

SEQ ID NO: 74116 - DNA, 120 bp, Artificial Sequence
  ENSG00000078549_32 (sequence is synthesized)
tcccttccatttggacaccacagtggaagctggtggcctggaaggaaggattaggtcatggacatttgaacaggtgccttgggcatgatgtatagatgcagtcatatataccttgctggg

SEQ ID NO: 74117 - DNA, 120 bp, Artificial Sequence
  ENSG00000078549_33 (sequence is synthesized)
gtggggtgccacctccagtggccagctccagatccaaggagcagccccctggggatggaccccattcattcatcatgactcccaacagttttcattgtggaagaagaaactttggcatta

SEQ ID NO: 74118 - DNA, 120 bp, Artificial Sequence
  ENSG00000078549_34 (sequence is synthesized)
tagagacatcatcacaaaacagtaaaaacaaaatcaaccctgaaccccatgcactgtgctgcttcctgagcctggccctgcatcctcatagaggtgccgggttcctattggttagttggt

SEQ ID NO: 74119 - DNA, 120 bp, Artificial Sequence
  ENSG00000078549_35 (sequence is synthesized)
tgtttttccgtctgagtgaatttttgccagtcttgtgagcagatgtacctgatgtattctcaatgttccaagaggttctggccttcagggtcacaggcagtagggggacagcataaggtc

SEQ ID NO: 74120 - DNA, 120 bp, Artificial Sequence
  ENSG00000078549_36 (sequence is synthesized)
tatgtaaaacccttccctctctgaccctctgttttcaaatctgtaaaatgggcaataagactagatgatttgtatatagcccaatgcatctctggaactctgtctaaacaccagccatct

SEQ ID NO: 74121 - DNA, 120 bp, Artificial Sequence
  ENSG00000078549_37 (sequence is synthesized)
acttggaatgggccccaggactgtggtatttgcctgggccaggaaaggataagaaatcctgtcatgtgaagacagcttgagaggcttgagaaaagtggggctggggagaagcaggcttgt

SEQ ID NO: 74122 - DNA, 120 bp, Artificial Sequence
  ENSG00000078549_38 (sequence is synthesized)
cagactccacccctgttgatgatcattcctgggaaggggtttctcgttctatgcaatcctaaaggacgaaactcacccatgggaggccgaattctccttgggatgaagaaatttctcttt

SEQ ID NO: 74123 - DNA, 120 bp, Artificial Sequence
  ENSG00000078549_39 (sequence is synthesized)
ccctgtcatgagtgtccagccagggagcagggaggcagtgtcagggagggactctcatcctggaggaaatgggattccaagtcaaggatgctgaggctgtcagggagccagagagggggg

SEQ ID NO: 74124 - DNA, 120 bp, Artificial Sequence
  ENSG00000078549_40 (sequence is synthesized)
tccaagtgcgggatgtgggtggctctgtggttcagtggctctgtggtagttcctagcactgcagacttcatgactccccacttaagtccaagtcacattgtctatcccagtgtgtagctc

SEQ ID NO: 74125 - DNA, 120 bp, Artificial Sequence
  ENSG00000078549_41 (sequence is synthesized)
tgtcaccctgcttgacacatccagtggcctacagcgactcttctctaaccccaccccctccaagctgggttctttgtggaagaaggacagggagctagagccaagccctaggcttgagag

SEQ ID NO: 74126 - DNA, 120 bp, Artificial Sequence
  ENSG00000078549_42 (sequence is synthesized)
agagacacctgcatctataatccccgccaaggatgcccactcacctctctcatctgatcctcactctttgtggaagggaaagctcaaagggactctctctctctctctcttttttttttt

SEQ ID NO: 74127 - DNA, 120 bp, Artificial Sequence
  ENSG00000078549_43 (sequence is synthesized)
gagtagtacccttgccctcttcatggccacttcaaagtgaagccagcaaagtgataatactttatcatttagtattatcataaagtattaatactttgtcataaagtcctccttgagccc

SEQ ID NO: 74128 - DNA, 120 bp, Artificial Sequence
  ENSG00000078549_44 (sequence is synthesized)
agggaccatggaagtcagctagaagagccctgagcaaggagcaaggacttgggcttctccacgctttgctcctggcttgtttgaccttgactcattccccatatgtctttgaggaggctc

SEQ ID NO: 74129 - DNA, 120 bp, Artificial Sequence
  ENSG00000078549_45 (sequence is synthesized)
acaaaatactaaagctgggaggaaacttggagatctataggtcaaacctccccattgggctgatgagaaaatacacgcaggcctagcatggtgcctgccaccatggtgggatccagtatg

SEQ ID NO: 74130 - DNA, 120 bp, Artificial Sequence
  ENSG00000078549_46 (sequence is synthesized)
ttttataaatctgaatgagtaaatggctcaccaatttatgcatagccctgcacatgagcagaatgtgacactcaaagcatccatgcagtacgcatgtaaccttgcacaggagtggggctc

SEQ ID NO: 74131 - DNA, 120 bp, Artificial Sequence
  ENSG00000078549_47 (sequence is synthesized)
tggtgaccgaaggttgtccaggactcttgcaggagaagcaatggagtcagtgtggtgtggggagacctactttttaacctgggcttagccacctgctctgtgatccagggcttaccttct

SEQ ID NO: 74132 - DNA, 120 bp, Artificial Sequence
  ENSG00000078549_48 (sequence is synthesized)
ttgggcctcggcctcctaatctgggtaatggggaggacttcattggcattgttagtcccacaggccaaggataaggttgaaatgagacggcttgtgtgtgaaaagattttggaaattaca

SEQ ID NO: 74133 - DNA, 120 bp, Artificial Sequence
  ENSG00000078549_49 (sequence is synthesized)
cagatgtgggcttgttattgggatgaagactgctggaagggactccttgctgtttatctactgctttgagccctcctaagttaacctgtgcctcatttgtaaaaccaccagcatcaggag

SEQ ID NO: 74134 - DNA, 120 bp, Artificial Sequence
  ENSG00000078549_50 (sequence is synthesized)
taagggggaggccagagggctcagatggacacagaattctagctttacctgcatccgctgattcagttttctgttgggatcagagtgaggatacttccatatgggtgatagcagccatgc

SEQ ID NO: 74135 - DNA, 120 bp, Artificial Sequence
  ENSG00000078549_51 (sequence is synthesized)
ccctgggagtcaacttcaaggatctgggacattttggtgtgcccattccttcttttcctgaactcacagtcttggggtgtttctgcacttggctatgtgtgtcttgtctgatgtctgtct

SEQ ID NO: 74136 - DNA, 120 bp, Artificial Sequence
  ENSG00000078549_52 (sequence is synthesized)
tctgtagctttgcctctatcagggctggagtggtgcagcccctggcatctcagacatggttcctgcctcacttgtgggagctggaccagcctgggtttcatctcccacagtaaagctaag

SEQ ID NO: 74137 - DNA, 120 bp, Artificial Sequence
  ENSG00000078549_53 (sequence is synthesized)
taagccccacagaccttactgctactgctgctgccattaatgctgtgctcactatcttgtccaggattttaaggatgtcagactgctgtagatgactcaataaatgttttgccatttttc

SEQ ID NO: 74138 - DNA, 120 bp, Artificial Sequence
  ENSG00000078549_54 (sequence is synthesized)
atccaggttttctgggcactcgtgtgtcttgcctgtgccaggtgctgtgggcacacgcacgtcagagctgggctcatgctcacttaggagaggctgaagcttaaccagcgtctgcacaaa

SEQ ID NO: 74139 - DNA, 120 bp, Artificial Sequence
  ENSG00000078579_0 (sequence is synthesized)
actctgatctgatcagtttgcggaattggagccccagccaacagccctagtcctagtattggcagcggcagctatagatatttctgcagagccagcagccggctcccacctacccaagga

SEQ ID NO: 74140 - DNA, 120 bp, Artificial Sequence
  ENSG00000078579_1 (sequence is synthesized)
gagaagatcgctccaagacagtgagagcttccctgccatttcagtgcaaagtccctccggagcgacctcagaggagtaaccgggccttaactttttgcgctcgttttgctataatttttc

SEQ ID NO: 74141 - DNA, 120 bp, Artificial Sequence
  ENSG00000078579_2 (sequence is synthesized)
tctatccacctccatcccacccccacaacactctttactgggggggtcttttgtgttccggatctccccctccatggctcccttagccgaagtcgggggctttctgggcggcctggaggg

SEQ ID NO: 74142 - DNA, 120 bp, Artificial Sequence
  ENSG00000078579_3 (sequence is synthesized)
tttctgggcggcctggagggcttgggccagcaggtgggttcgcatttcctgttgcctcctgccggggagcggccgccgctgctgggcgagcgcaggagcgcggcggagcggagcgcgcgc

SEQ ID NO: 74143 - DNA, 120 bp, Artificial Sequence
  ENSG00000078579_4 (sequence is synthesized)
gctggcgcacctgcacggcatcctgcgccgccggcagctctattgccgcaccggcttccacctgcagatcctgcccgacggcagcgtgcagggcacccggcaggaccacagcctcttcgg

SEQ ID NO: 74144 - DNA, 120 bp, Artificial Sequence
  ENSG00000078579_5 (sequence is synthesized)
tatcttggaattcatcagtgtggcagtgggactggtcagtattagaggtgtggacagtggtctctatcttggaatgaatgacaaaggagaactctatggatcagagaaacttacttccga

SEQ ID NO: 74145 - DNA, 120 bp, Artificial Sequence
  ENSG00000078579_6 (sequence is synthesized)
atgcatctttagggagcagtttgaagagaactggtataacacctattcatctaacatatataaacatggagacactggccgcaggtattttgtggcacttaacaaagacggaactccaag

SEQ ID NO: 74146 - DNA, 120 bp, Artificial Sequence
  ENSG00000078579_7 (sequence is synthesized)
ttcttacctagaccagtggatccagaaagagttccagaattgtacaaggacctactgatgtacacttgaagtgcgatagtgacattatggaagagtcaaaccacaaccattctttcttgt

SEQ ID NO: 74147 - DNA, 120 bp, Artificial Sequence
  ENSG00000078579_8 (sequence is synthesized)
catagttcccatcataaaataatgacccaaggagacgttcaaaatattaaagtctattttctactgagagactggatttggaaagaatattgagaaaaaaaaccaaaaaaaattttgact

SEQ ID NO: 74148 - DNA, 120 bp, Artificial Sequence
  ENSG00000078579_9 (sequence is synthesized)
agaaatagatcatgatcactctttatatgtggattaagttcccttagatacattggattagtccttaccagtagactgaagccaaaaatctgttaaactgtggataatgggaaccctcac

SEQ ID NO: 74149 - DNA, 120 bp, Artificial Sequence
  ENSG00000078579_10 (sequence is synthesized)
atggttgctgctggtgcctcacctctctggattatgtttactttaaaatttatgttaaaaatagagacttcatgttgaagaaatggattgacttagccaagagcattgctacataaattc

SEQ ID NO: 74150 - DNA, 120 bp, Artificial Sequence
  ENSG00000078579_11 (sequence is synthesized)
tgaggaccttgtagaattcacaggttatggcattatatgttttaagaaaaaaaaaaactaaacaacacctgggtgaaacatgaactatgaaacatgccacaccaagacagaacacttttt

SEQ ID NO: 74151 - DNA, 120 bp, Artificial Sequence
  ENSG00000078579_12 (sequence is synthesized)
acactttcaatttgaaaatatttattatatatatttatttattaaagagtttattttttactgggatatgaagataatacaaagagtaaaaaacaacaaaacttccgttattgtgccatt

SEQ ID NO: 74152 - DNA, 120 bp, Artificial Sequence
  ENSG00000078579_13 (sequence is synthesized)
acttccgttattgtgccattactttattgtggtgtcttgctctgtaaagaggacattattataccaccttaaccatagaatcagattttgaatttctttttaaaatatagtatagattat

SEQ ID NO: 74153 - DNA, 120 bp, Artificial Sequence
  ENSG00000078579_14 (sequence is synthesized)
attttttatgcagtcaattgccttctaaatgtaacgttggtttcttttggcctagaaaaatgcctcattgatttgtattaaattcaacacacattcaaaagggaattaaacattttcatg

SEQ ID NO: 74154 - DNA, 120 bp, Artificial Sequence
  ENSG00000078589_0 (sequence is synthesized)
aacaaatgtgtcagttatcagcaggatccatgccgccagagtaaagctttctaccctttactccctgcaaagaaacaagagtgcttatcccagctaagctccagggtaatgttatcatga

SEQ ID NO: 74155 - DNA, 120 bp, Artificial Sequence
  ENSG00000078589_1 (sequence is synthesized)
cagcttcaacttttagaccacaggcaaatgctttgttaaaactctatgctggtcattcccttcaggatttggcactcaccaacatacccttctttcaagtgaaaaggcatctcttttaat

SEQ ID NO: 74156 - DNA, 120 bp, Artificial Sequence
  ENSG00000078589_2 (sequence is synthesized)
ggtcctgacctttggaataggaagcatgtaccctggacagagcacttcaaactagaggaaccataaatccatggctaaccttgacaaatacactgaaacattcaagatgggtagcaacag

SEQ ID NO: 74157 - DNA, 120 bp, Artificial Sequence
  ENSG00000078589_3 (sequence is synthesized)
taccagcactgctgagatttactgtaatgtcactaatgtgaaatttcaatactccctctatgcaaccacctatatcctcatattcattcctggtcttctggctaacagtgcagccttgtg

SEQ ID NO: 74158 - DNA, 120 bp, Artificial Sequence
  ENSG00000078589_4 (sequence is synthesized)
ggttctgtgccgcttcatcagcaagaaaaataaagccatcattttcatgatcaacctctctgtggctgaccttgctcatgtattatctttacccctccggatttactattacatcagcca

SEQ ID NO: 74159 - DNA, 120 bp, Artificial Sequence
  ENSG00000078589_5 (sequence is synthesized)
ccactggcctttccagagagccctttgcctgctctgcttctacctgaagtatctcaacatgtatgccagcatttgtttcctgacgtgcatcagtcttcaaaggtgcttttttctcctcaa

SEQ ID NO: 74160 - DNA, 120 bp, Artificial Sequence
  ENSG00000078589_6 (sequence is synthesized)
gcccttcagggccagagactggaagcgtaggtacgatgtgggcatcagtgctgccatctggatcgttgtggggactgcctgtttgccatttcccatcctgagaagcacagacttaaacaa

SEQ ID NO: 74161 - DNA, 120 bp, Artificial Sequence
  ENSG00000078589_7 (sequence is synthesized)
caacaagtcctgctttgctgatcttggatacaagcaaatgaatgcagttgcgttggtcgggatgattacagttgctgagcttgcaggatttgtgatcccagtgatcatcatcgcatggtg

SEQ ID NO: 74162 - DNA, 120 bp, Artificial Sequence
  ENSG00000078589_8 (sequence is synthesized)
tacctggaaaactactatatccttgagacagccaccaatggctttccaagggatcagtgagaggcagaaagcactgcggatggtgttcatgtgtgctgcagtcttcttcatctgcttcac

SEQ ID NO: 74163 - DNA, 120 bp, Artificial Sequence
  ENSG00000078589_9 (sequence is synthesized)
tccctatcatattaactttattttttacaccatggtaaaggaaaccatcattagcagttgtcccgttgtccgaatcgcactgtatttccaccctttttgcctgtgccttgcaagtctctg

SEQ ID NO: 74164 - DNA, 120 bp, Artificial Sequence
  ENSG00000078589_10 (sequence is synthesized)
ctgccttttggatccaattctttattactttatggcttcagagtttcgtgaccaactatcccgccatggcagttctgtgacccgctcccgcctcatgagcaaggagagtggttcatcaat

SEQ ID NO: 74165 - DNA, 120 bp, Artificial Sequence
  ENSG00000078589_11 (sequence is synthesized)
gattggctaaaattaagatatctctttaattacgcctttgtttacctacgttccttgtctttttccaaaggccagaattgtcaaccaatttctttaattgaacattgtaaaaaacaggaa

SEQ ID NO: 74166 - DNA, 120 bp, Artificial Sequence
  ENSG00000078589_12 (sequence is synthesized)
taagtacttttgtgtaatattcacagtcaacaggggtgtgatggtgaaggcagagtgtgaaaaacgtgagagaggaagagaaaatagatttacctgattcctctttaaaattcaagccac

SEQ ID NO: 74167 - DNA, 120 bp, Artificial Sequence
  ENSG00000078589_13 (sequence is synthesized)
ccactttcttatttaagaaacctagatcaagtttttacagatgtaaataaaagttgaatagtttaccttaaatttttttcaataagtaagttattgttaataatgcacagtaaatatgtg

SEQ ID NO: 74168 - DNA, 120 bp, Artificial Sequence
  ENSG00000078589_14 (sequence is synthesized)
accttaaattctgagtgagagtaaaaatgtctaatctttctaacaggtaaatttttctaacaggcaagacagtgtgaagaattgaagcaatatgtgcataaatttcaggaccacaagcct

SEQ ID NO: 74169 - DNA, 120 bp, Artificial Sequence
  ENSG00000078589_15 (sequence is synthesized)
gttattaaagaaaaggcatggaaattcattcattccttgaaaatgtgttgagtgcctattgtgttcttggttgtcactttgttaggtactttctttttttttcataagttattggggtac

SEQ ID NO: 74170 - DNA, 120 bp, Artificial Sequence
  ENSG00000078589_16 (sequence is synthesized)
agtggtgatttgtgagattttggtgcagccatcacccgagcagtatacactgcaccacatttgtagtcttctatccctcgcccccttcccactcttccacacataacatctcatcttgcc

SEQ ID NO: 74171 - DNA, 120 bp, Artificial Sequence
  ENSG00000078589_17 (sequence is synthesized)
ccactcttccacacataacatctcatcttgccctcctaataaacctgtggaagttgccgatacaaatgaataaatggaacttcagagaggttaagcaatttgcctcaggatcaacagtgg

SEQ ID NO: 74172 - DNA, 120 bp, Artificial Sequence
  ENSG00000078589_18 (sequence is synthesized)
ttagccaaaattggtccagtataatacaccatatatgcttatgttattcccttgcttttgttgttacatttattaggtctatactaaattagccttcaatgatgaagacagactaaagct

SEQ ID NO: 74173 - DNA, 120 bp, Artificial Sequence
  ENSG00000078589_19 (sequence is synthesized)
aagccacatgagatcaaggccatttcaacatggtttgcctggaattctccaaaaaacctgtgggttgtgggtttggcatgtcaagcttcagaccacaaggtcttaagtggtaaatagatg

SEQ ID NO: 74174 - DNA, 120 bp, Artificial Sequence
  ENSG00000078589_20 (sequence is synthesized)
cgttgtcctaatactgttccaaggtagagaatcctgatgataaggagtataggaaactcaaatagttcattatttctaaaaaatgtatattttaaggcatgatacaagtcctacaaacct

SEQ ID NO: 74175 - DNA, 120 bp, Artificial Sequence
  ENSG00000078589_21 (sequence is synthesized)
cataagtaggtgaaaaaaaaaaccctgtggagtgataaacattctataaaacctggaaatttgtgtggagttcgcctaagctcacttttcctaaatatagctatataatattgtaaacaa

SEQ ID NO: 74176 - DNA, 120 bp, Artificial Sequence
  ENSG00000078589_22 (sequence is synthesized)
atttgttttttagaaacttttaagaagatttctgtgagcgtaattgacaatatctgcattagaaacagaaagtattatccatcataaatatgagaaaagtgtgtgtcctctttctgacaa

SEQ ID NO: 74177 - DNA, 120 bp, Artificial Sequence
  ENSG00000078589_23 (sequence is synthesized)
tctttttatcttatttttttcaaacgttgtggttgttgtttcagcaccattttaaagaatttgaatacaaacaatccctcagcttatcaggttgacatttatgaagctgacctcatcact

SEQ ID NO: 74178 - DNA, 120 bp, Artificial Sequence
  ENSG00000078589_24 (sequence is synthesized)
ctttatcttttatgtctgcagtataaatagcatagacatttggtgtgaagggaggagaaaggaagtagtagttctgagaatattcatttgaacagagtgactatggaagaatgaatagca

SEQ ID NO: 74179 - DNA, 120 bp, Artificial Sequence
  ENSG00000078589_25 (sequence is synthesized)
aaaaaaggagaatttttttaaaaagatctctcactgggaaaagaaaaagttatgcatttataaagtaattaaactggttttccttgtactttattaatctgaatctaatggcacttcctt

SEQ ID NO: 74180 - DNA, 120 bp, Artificial Sequence
  ENSG00000078589_26 (sequence is synthesized)
acgagggttttcagatgtgcttgtagttaatggcaacattatcagaatgactacacagacagtcctactctgaggagatgactttggaagaaacccatttggaactacacaccctgctat

SEQ ID NO: 74181 - DNA, 120 bp, Artificial Sequence
  ENSG00000078589_27 (sequence is synthesized)
gtctgtggagaaatggaactgcaatcctcaagagtcacacttcatattccttcctttcaagtggttgataaaaggtagtgcttcaagcacaggatttatggaatagttggcaaattaaac

SEQ ID NO: 74182 - DNA, 120 bp, Artificial Sequence
  ENSG00000078589_28 (sequence is synthesized)
aacatgctttttattttgactaccatttaagtggaatctttgaactttttttttgacatgtgaatctctaatgtggtgagagagaaaaacataaaaatataaaaacattcaagcaatcga

SEQ ID NO: 74183 - DNA, 120 bp, Artificial Sequence
  ENSG00000078589_29 (sequence is synthesized)
tttgtgcaaataaggtttctgtggtgagacaccagataaactcaacttcctctttcaacaacaaatgtgtcagttatcagcaggatccatgccgccagagtaaagctttctaccctttac

SEQ ID NO: 74184 - DNA, 120 bp, Artificial Sequence
  ENSG00000078596_0 (sequence is synthesized)
agtagtgttagactgaagataaagtaagtgctgtttgggctaacaggatctcctcttgcagtctgcagcccaggacgctgattccagcagcgccttaccgcgcagcccgaagattcacta

SEQ ID NO: 74185 - DNA, 120 bp, Artificial Sequence
  ENSG00000078596_1 (sequence is synthesized)
tggtgaaaatcgccttcaatacccctaccgccgtgcaaaaggaggaggcgcggcaagacgtggaggccctcctgagccgcacggtcagaactcagatactgaccggcaaggagctccgag

SEQ ID NO: 74186 - DNA, 120 bp, Artificial Sequence
  ENSG00000078596_2 (sequence is synthesized)
ttgccacccaggaaaaagagggctcctctgggagatgtatgcttactctcttaggcctttcattcatcttggcaggacttattgttggtggagcctgcatttacaagtacttcatgccca

SEQ ID NO: 74187 - DNA, 120 bp, Artificial Sequence
  ENSG00000078596_3 (sequence is synthesized)
agagcaccatttaccgtggagagatgtgcttttttgattctgaggatcctgcaaattcccttcgtggaggagagcctaacttcctgcctgtgactgaggaggctgacattcgtgaggatg

SEQ ID NO: 74188 - DNA, 120 bp, Artificial Sequence
  ENSG00000078596_4 (sequence is synthesized)
acaacattgcaatcattgatgtgcctgtccccagtttctctgatagtgaccctgcagcaattattcatgactttgaaaagggaatgactgcttacctggacttgttgctggggaactgct

SEQ ID NO: 74189 - DNA, 120 bp, Artificial Sequence
  ENSG00000078596_5 (sequence is synthesized)
atctgatgcccctcaatacttctattgttatgcctccaaaaaatctggtagagctctttggcaaactggcgagtggcagatatctgcctcaaacttatgtggttcgagaagacctagttg

SEQ ID NO: 74190 - DNA, 120 bp, Artificial Sequence
  ENSG00000078596_6 (sequence is synthesized)
aataacagaaagtccttccgccttcgtcgcagagacctcttgctgggtttcaacaaacgtgccattgataaatgctggaagattagacacttccccaacgaatttattgttgagaccaag

SEQ ID NO: 74191 - DNA, 120 bp, Artificial Sequence
  ENSG00000078596_7 (sequence is synthesized)
atctgtcaagagtaagaggcaacagatagagtgtccttggtaataagaagtcagagatttacaatatgactttaacattaaggtttatgggatactcaagatatttactcatgcatttac

SEQ ID NO: 74192 - DNA, 120 bp, Artificial Sequence
  ENSG00000078596_8 (sequence is synthesized)
tctattgcttatgctttaaaaaaaggaaaaaaaaaaactactaaccactgcaagctcttgtcaaattttagtttaattggcattgcttgttttttgaaactgaaattacatgagtttcat

SEQ ID NO: 74193 - DNA, 120 bp, Artificial Sequence
  ENSG00000078596_9 (sequence is synthesized)
catgagtttcattttttctttgaatttatagggtttagatttctgaaagcagcatgaatatatcacctaacatcctgacaataaattccatccgttgttttttttgtttgtttgtttttt

SEQ ID NO: 74194 - DNA, 120 bp, Artificial Sequence
  ENSG00000078596_10 (sequence is synthesized)
gtaagctctttattcatcttatggtggagcaattttaaaatttgaaatattttaaattgtttttgaactttttgtgtaaaatatatcagatctcaacattgttggtttcttttgtttttc

SEQ ID NO: 74195 - DNA, 120 bp, Artificial Sequence
  ENSG00000078596_11 (sequence is synthesized)
attttgtacaactttcttgaatttagaaattacatctttgcagttctgttaggtgctctgtaattaacctgacttatatgtgaacaattttcatgagacagtcatttttaactaatgcag

SEQ ID NO: 74196 - DNA, 120 bp, Artificial Sequence
  ENSG00000078596_12 (sequence is synthesized)
tgattctttctcactactatctgtattgtggaatgcacaaaattgtgtaggtgctgaatgctgtaaggagtttaggttgtatgaattctacaaccctataataaattttactctatacaa

SEQ ID NO: 74197 - DNA, 120 bp, Artificial Sequence
  ENSG00000078596_13 (sequence is synthesized)
gtgcaggtgaggcacgtttagcctgagccggccacggactccacttcccctgctcttcccccagtggcaaatccgcgccacctcgcaaacccccaactcaggcacttgggccccttttgg

SEQ ID NO: 74198 - DNA, 120 bp, Artificial Sequence
  ENSG00000078596_14 (sequence is synthesized)
tcatagtcaggggctattgtggcctggacagaggcagaaagacacgacacagcaggcttccttcctgtcttgctcttatctgaagttgcagagagtgggtgggagtatgcctgaggtgca

SEQ ID NO: 74199 - DNA, 120 bp, Artificial Sequence
  ENSG00000078618_0 (sequence is synthesized)
agtagcgtcatcggcggccgggagggcggagggacgagggaagtcggcgagagggagactgggttgggggaggggttcaggcctgttccccgcggctgcggcagcaccagggccggccgc

SEQ ID NO: 74200 - DNA, 120 bp, Artificial Sequence
  ENSG00000078618_1 (sequence is synthesized)
caccgcctctagaacgcggaggaggtgggtcctgggaagcgggatgtccatcgctccagcttggtggtgaatgctgaggagagtcactgttgctgcagtctgtgccacccggaggaagtt

SEQ ID NO: 74201 - DNA, 120 bp, Artificial Sequence
  ENSG00000078618_2 (sequence is synthesized)
gtgtgaggccgggcgggagctcgcggcgctctggggaatcgaaacgcggggtcggtgcgaagactctgctgctgccagaccctttcctattctggccatgcctggaaggaacaaggcgaa

SEQ ID NO: 74202 - DNA, 120 bp, Artificial Sequence
  ENSG00000078618_3 (sequence is synthesized)
gtctacctgcagctgccctgacctgcagcccaatggacaggatctgggcgagaacagccgggttgcccgtctaggagcggatgaatctgaggaagagggacggagggggtctctcagtaa

SEQ ID NO: 74203 - DNA, 120 bp, Artificial Sequence
  ENSG00000078618_4 (sequence is synthesized)
tgctggggaccctgagatcgtcaagtctcccagcgaccccaagcaataccgatacatcaaattacagaatggcttgcaggcacttctgatttcagacctaagtaatatggaaggtaaaac

SEQ ID NO: 74204 - DNA, 120 bp, Artificial Sequence
  ENSG00000078618_5 (sequence is synthesized)
aggaaatacaacagatgatgaagaagaagaggaggtggaggaagaagaagaagatgatgatgaagattctggagctgaaatagaagatgacgatgaagagggttttgatgatgaagatga

SEQ ID NO: 74205 - DNA, 120 bp, Artificial Sequence
  ENSG00000078618_6 (sequence is synthesized)
gtttgatgatgaacatgatgatgatcttgatactgaggataatgaattggaagaattagaagagagagcagaagctagaaaaaaaactactgaaaaacagcaattgcagagcctgttttt

SEQ ID NO: 74206 - DNA, 120 bp, Artificial Sequence
  ENSG00000078618_7 (sequence is synthesized)
gctgtggtcaaagctgactgatagactgtggtttaagtcaacttattcaaaaatgtcttcaaccctgctggtcgagacaagaaatctttatggggtagttggagctgaaagcaggtctgc

SEQ ID NO: 74207 - DNA, 120 bp, Artificial Sequence
  ENSG00000078618_8 (sequence is synthesized)
acctgttcagcatttggcaggatggcaagcggaggagcagcagggtgaaactgacacagttctgtctgcagcggctctttgtgttggagttgggagtttcgctgatccagatgacctgcc

SEQ ID NO: 74208 - DNA, 120 bp, Artificial Sequence
  ENSG00000078618_9 (sequence is synthesized)
ggggctggcacactttttggagcacatggtattcatgggtagtttgaaatatccagatgagaatggatttgatgccttcctgaagaagcatgggggtagtgataatgcctcaactgattg

SEQ ID NO: 74209 - DNA, 120 bp, Artificial Sequence
  ENSG00000078618_10 (sequence is synthesized)
tgaacgcactgtctttcagtttgatgtccagaggaagtacttcaaggaagctcttgatagatgggcgcagttcttcatccacccactaatgatcagagatgcaattgaccgtgaagttga

SEQ ID NO: 74210 - DNA, 120 bp, Artificial Sequence
  ENSG00000078618_11 (sequence is synthesized)
agctgttgatagtgaatatcaacttgcaaggccttctgatgcaaacagaaaggaaatgttgtttggaagccttgctagacctggacatcctatgggaaaatttttttggggaaatgctga

SEQ ID NO: 74211 - DNA, 120 bp, Artificial Sequence
  ENSG00000078618_12 (sequence is synthesized)
gacgctcaagcatgagccaagaaagaataatattgatacacatgctagattgagagaattctggatgcgttactactcttctcattacatgactttagtggttcaatccaaagaaacact

SEQ ID NO: 74212 - DNA, 120 bp, Artificial Sequence
  ENSG00000078618_13 (sequence is synthesized)
ggatactttggaaaagtgggtgactgaaatcttctctcagataccaaacaatgggttacccagaccaaactttggccatttaacggatccatttgacacaccagcatttaacaaacttta

SEQ ID NO: 74213 - DNA, 120 bp, Artificial Sequence
  ENSG00000078618_14 (sequence is synthesized)
tagagttgttccaatcagaaaaattcatgctctgaccatcacatgggcacttcctcctcaacagcaacattacagggtgaagccacttcattatatatcctggctggttggacatgaagg

SEQ ID NO: 74214 - DNA, 120 bp, Artificial Sequence
  ENSG00000078618_15 (sequence is synthesized)
caaaggcagcattctttctttccttaggaaaaaatgctgggctcttgcactgtttggtggaaatggtgagacaggatttgagcaaaattctacttattcagtgttcagcatttctattac

SEQ ID NO: 74215 - DNA, 120 bp, Artificial Sequence
  ENSG00000078618_16 (sequence is synthesized)
tatttaaaaatgctgcagaagctaggcccagaaaaaagaatttttgaagagattcggaaaattgaggataatgaatttcattaccaagaacagacagatccagttgagtatgtggaaaac

SEQ ID NO: 74216 - DNA, 120 bp, Artificial Sequence
  ENSG00000078618_17 (sequence is synthesized)
atgtgtgagaacatgcagctgtacccattgcaggacattctcactggagatcagcttctttttgaatacaagccagaagtcattggtgaagccttgaatcagctagttcctcaaaaagca

SEQ ID NO: 74217 - DNA, 120 bp, Artificial Sequence
  ENSG00000078618_18 (sequence is synthesized)
aatcttgttttactgtctggtgctaatgagggaaaatgtgacctcaaggagaaatggtttggaactcaatatagtatagaagatattgaaaactcttgggctgaactgtggaatagtaat

SEQ ID NO: 74218 - DNA, 120 bp, Artificial Sequence
  ENSG00000078618_19 (sequence is synthesized)
ttcgaattaaatccagatcttcatcttccagctgaaaacaagtacatagccacggactttacgttgaaggctttcgattgcccggaaacagaatacccagttaaaattgtgaatactcca

SEQ ID NO: 74219 - DNA, 120 bp, Artificial Sequence
  ENSG00000078618_20 (sequence is synthesized)
caaggttgcctgtggtataagaaagacaacaaattcaaaatccccaaagcatatatacgtttccatctaatttcaccgttgatacagaaatctgcagcaaatgtggtcctctttgatatc

SEQ ID NO: 74220 - DNA, 120 bp, Artificial Sequence
  ENSG00000078618_21 (sequence is synthesized)
tttgtcaatatccttacgcataaccttgcggaaccagcttatgaagcagatgtggcacagctggagtataaactggtagctggagaacatggtttaattattcgagtgaaaggatttaac

SEQ ID NO: 74221 - DNA, 120 bp, Artificial Sequence
  ENSG00000078618_22 (sequence is synthesized)
cacaaactacctctactgtttcagctcattattgactacttagctgagttcaattccacaccagctgtctttacaatgataactgagcagttgaagaagacctactttaacatcctcatc

SEQ ID NO: 74222 - DNA, 120 bp, Artificial Sequence
  ENSG00000078618_23 (sequence is synthesized)
aagcccgagactttggccaaagatgtacggcttttaatcttggaatatgcccgttggtctatgattgacaagtaccaggctttgatggacggcctttcccttgagtctctgctgagcttc

SEQ ID NO: 74223 - DNA, 120 bp, Artificial Sequence
  ENSG00000078618_24 (sequence is synthesized)
gtcaaagaattcaaatcccagctctttgtggagggcctggtacaagggaatgtcacaagcacagaatctatggatttcctgaaatatgttgttgacaaactaaacttcaagcctctggag

SEQ ID NO: 74224 - DNA, 120 bp, Artificial Sequence
  ENSG00000078618_25 (sequence is synthesized)
caggagatgcctgtgcagttccaggtggtagagctgcccagtggccaccatctatgcaaagtgaaagctctgaacaagggtgatgccaactctgaagtcactgtgtactaccagtcaggt

SEQ ID NO: 74225 - DNA, 120 bp, Artificial Sequence
  ENSG00000078618_26 (sequence is synthesized)
accaggagtctaagagaatatacgcttatggagctgcttgtgatgcacatggaagaaccttgttttgacttccttcgaaccaagcagacccttgggtaccatgtctaccctacctgtagg

SEQ ID NO: 74226 - DNA, 120 bp, Artificial Sequence
  ENSG00000078618_27 (sequence is synthesized)
aacacatccgggattctaggattttctgtcactgtggggactcaggcaaccaaatacaattctgaagttgttgataagaagatagaagagtttctttctagctttgaggagaagattgag

SEQ ID NO: 74227 - DNA, 120 bp, Artificial Sequence
  ENSG00000078618_28 (sequence is synthesized)
aacctcactgaagaggcattcaacacccaggtcacagctctcatcaagctgaaggagtgtgaggatacccaccttggggaggaggtggataggaactggaatgaagtggttacacagcag

SEQ ID NO: 74228 - DNA, 120 bp, Artificial Sequence
  ENSG00000078618_29 (sequence is synthesized)
tacctctttgaccgccttgcccacgagattgaagcactgaagtcattctcaaaatcagacctggtcaactggttcaaggcccatagagggccaggaagtaaaatgctcagcgttcatgtt

SEQ ID NO: 74229 - DNA, 120 bp, Artificial Sequence
  ENSG00000078618_30 (sequence is synthesized)
gttggatatgggaagtatgaactggaagaggatggtaccccttctagtgaggattcaaattcttcttgtgaagtgatgcagctgacctacctgccaacctctcctctgctggcagattgt

SEQ ID NO: 74230 - DNA, 120 bp, Artificial Sequence
  ENSG00000078618_31 (sequence is synthesized)
atcatccccattactgatatcagggctttcacaacaacactcaaccttctcccctaccataaaatagtcaaataaataaactgcagtcacgttggcctgaagcaatgtgtattttaaaat

SEQ ID NO: 74231 - DNA, 120 bp, Artificial Sequence
  ENSG00000078618_32 (sequence is synthesized)
tttcagtatagcaatctctgaaaaatagtagacaataagtattatataatgcattcttttactttagctgccaggaagcctagaataaaatttaatgcttaattatagttattttaataa

SEQ ID NO: 74232 - DNA, 120 bp, Artificial Sequence
  ENSG00000078618_33 (sequence is synthesized)
cttacattattttaatggccatattatatttgtgtatttccttgtaagccaccttttagcccattgttggaagttatttgtacacaaaattttaaaaaatcataaatgaaattaatagat

SEQ ID NO: 74233 - DNA, 120 bp, Artificial Sequence
  ENSG00000078618_34 (sequence is synthesized)
tccagaattacataaaagaattagctctaatcaagaatttatatttgactgaatggtaaagaaatcaattatttaaatgccatggatctccaggctttcctaacccccaaggctagactt

SEQ ID NO: 74234 - DNA, 120 bp, Artificial Sequence
  ENSG00000078618_35 (sequence is synthesized)
gatgttttgttttcaggttgcttacactgtctttcagtatttaaaaatgctgcagaagctaggcccagaaaaaaggtaataaacacttcctggaatgaggccaggagccagtcctggtat

SEQ ID NO: 74235 - DNA, 120 bp, Artificial Sequence
  ENSG00000078618_36 (sequence is synthesized)
atttgaggcttcaggctgccggtagacatgctttagtcttgccttgatggtttttcaggcattttctgctctatttcctttattgactccatatccttatccctctacatgtgattgtat

SEQ ID NO: 74236 - DNA, 120 bp, Artificial Sequence
  ENSG00000078618_37 (sequence is synthesized)
actaaggctttacacatatgtgggcagtccctttattttcacgcttctcttttattgttgatgcttctattgagaattttttaaacttttattctaggttcaggggtatatgtgcaggtt

SEQ ID NO: 74237 - DNA, 120 bp, Artificial Sequence
  ENSG00000078618_38 (sequence is synthesized)
tctgatcctctccctcctcccgcccttctccctcaagtaggcagaaattttaatgtatcttctaattatagttttctccttcacagaatttttgaagagattcggaaaattgaggataat

SEQ ID NO: 74238 - DNA, 120 bp, Artificial Sequence
  ENSG00000078618_39 (sequence is synthesized)
aaacaggtgcgagtcatgtctgttttcttctaatttgggaattctttgggtaacttctaaactcaagctttattttttaatggcaaaaaggaagtatatagttatcttttggtcttcagt

SEQ ID NO: 74239 - DNA, 120 bp, Artificial Sequence
  ENSG00000078618_40 (sequence is synthesized)
aaaggtctattctgtatcaggattacattttgaaaacattttcctccaattataaaagtagtaaatgctcattatataaactaatggaatataaagaaaacaaaaatataaaaatcaccc

SEQ ID NO: 74240 - DNA, 120 bp, Artificial Sequence
  ENSG00000078618_41 (sequence is synthesized)
tggtttaagtcaacttattcaaaaatgtcttcaaccctgctggtcgagacaagaaatctttatggggtagttggagctgaaagcaggttaggcacctattaaaacatcacagaacaggtc

SEQ ID NO: 74241 - DNA, 120 bp, Artificial Sequence
  ENSG00000078618_42 (sequence is synthesized)
actttgggtttcgaaatgttcgctggctgttccgagaatcagtccgggtcacgttggtgcctctcctttcctgttctgattggttgcttacgtgagcgtgactactttcttgcctcatga

SEQ ID NO: 74242 - DNA, 120 bp, Artificial Sequence
  ENSG00000078618_43 (sequence is synthesized)
gaggcaggaggatcacttgaggccacgagtttgagaccagcctggcaacataagaagaccttgtctgtacaaaagcaaaaaaattagccgggcatggtggcccctgtctgtagtcccagc

SEQ ID NO: 74243 - DNA, 120 bp, Artificial Sequence
  ENSG00000078618_44 (sequence is synthesized)
tactcaggaggctgaggtgggagtatggctagagcctaggcattcgaggttataatgaattacagtcgatagtaccactgcactccagcctgggtgaccagtgatatcctgtctccagct

SEQ ID NO: 74244 - DNA, 87 bp, Artificial Sequence
  ENSG00000078618_45 (sequence is synthesized)
ttctagatggatgtcttttattggcgggggggaaagccctatatacgtatatatgtattttttactaattctaaaactgctaaccca

SEQ ID NO: 74245 - DNA, 120 bp, Artificial Sequence
  ENSG00000078618_46 (sequence is synthesized)
tatatatgtattttttactaattctaaaactgctaacccaagcaggacaaaatttaattgaataccaagaaaataaccatgccagattttcatgctaaatcagctaatactaacattgtt

SEQ ID NO: 74246 - DNA, 120 bp, Artificial Sequence
  ENSG00000078618_47 (sequence is synthesized)
atgtctgtggggccttgtacctgactaaggccttttcctcagtcagatgcttgttcaagattctctccctgaactgttttgttattaaccatcctcctccatgccttcccagtttctcag

SEQ ID NO: 74247 - DNA, 120 bp, Artificial Sequence
  ENSG00000078618_48 (sequence is synthesized)
ggctggccctttgattggaatatataaatggccactcttgaaattgtggctgctatcctcccctttctctctatcttcattctgcaaccccagaaccagccttagtttctgtcttggcca

SEQ ID NO: 74248 - DNA, 120 bp, Artificial Sequence
  ENSG00000078618_49 (sequence is synthesized)
ccaaaagaatcttaagtctcagtccacaaagggaagagaagaaataggctgcctgtttttccgagcaccgttgaagtaccaggcaagggcttttgatacagagtccttagtaccatgaat

SEQ ID NO: 74249 - DNA, 120 bp, Artificial Sequence
  ENSG00000078618_50 (sequence is synthesized)
ttcctccagtagaaatcactttagagaagagctaatccctccatttatcccttattttatagataagaaaacagaattcttaagaagggaagaggatgtattcactcagtattaaatgtt

SEQ ID NO: 74250 - DNA, 120 bp, Artificial Sequence
  ENSG00000078618_51 (sequence is synthesized)
tcataaaggccacagcctagttgggtaaaccaacactgaacaattaagtttgatccagttgggaaactgtattatgggtaaacagattgccaagagagccagaacagttaagagctgctt

SEQ ID NO: 74251 - DNA, 120 bp, Artificial Sequence
  ENSG00000078618_52 (sequence is synthesized)
agtgttccacaaacacaatcaatcttgaatcagtcaatgaataacttgccagcatttaggtcaccaactatatctgctttcctaaagctatgcagggctccccaagcaattggaacattg

SEQ ID NO: 74252 - DNA, 120 bp, Artificial Sequence
  ENSG00000078618_53 (sequence is synthesized)
atattagctgattctgggtgaaatgaatgtctagagagcttaatgtagttattctcttttgcctcttaggaatctatggatttcctgaaatatgttgttgacaaactaaacttcaagcct

SEQ ID NO: 74253 - DNA, 120 bp, Artificial Sequence
  ENSG00000078618_54 (sequence is synthesized)
gcttcatcatcgttttggtctggaaggttaggggtaacctgagaataggaagaataaaatgaggtcttcagatgctaagcaggtccagggacatctgcctgggggttaggtttaagagct

SEQ ID NO: 74254 - DNA, 120 bp, Artificial Sequence
  ENSG00000078668_0 (sequence is synthesized)
gaccttcagcgttgccctggcggagcagagacaggccctcggggtggaggtctttggtttcataagagcctgagagagatttttctaagatatgtgtaacacaccaacgtactgtgacct

SEQ ID NO: 74255 - DNA, 120 bp, Artificial Sequence
  ENSG00000078668_1 (sequence is synthesized)
aggaaaggctgctaaggatgtcttcaacaaaggatatggctttggcatggtcaagatagacctgaaaaccaagtcttgtagtggagtggaattttctacttctggtcatgcttacactga

SEQ ID NO: 74256 - DNA, 120 bp, Artificial Sequence
  ENSG00000078668_2 (sequence is synthesized)
tacagggaaagcatcaggcaacctagaaaccaaatataaggtctgtaactatggacttaccttcacccagaaatggaacacagacaatactctagggacagaaatctcttgggagaataa

SEQ ID NO: 74257 - DNA, 120 bp, Artificial Sequence
  ENSG00000078668_3 (sequence is synthesized)
gttggctgaagggttgaaactgactcttgataccatatttgtaccgaacacaggaaagaagagtgggaaattgaaggcctcctataaacgggattgttttagtgttggcagtaatgttga

SEQ ID NO: 74258 - DNA, 120 bp, Artificial Sequence
  ENSG00000078668_4 (sequence is synthesized)
tatagatttttctggaccaaccatctatggctgggctgtgttggccttcgaagggtggcttgctggctatcagatgagttttgacacagccaaatccaaactgtcacagaataatttcgc

SEQ ID NO: 74259 - DNA, 120 bp, Artificial Sequence
  ENSG00000078668_5 (sequence is synthesized)
aaacatccataaaccttgcttggacagctgggagtaacaacacccgttttggcattgctgctaagtacatgctggattgtagaacttctctctctgctaaagtaaataatgccagcctga

SEQ ID NO: 74260 - DNA, 120 bp, Artificial Sequence
  ENSG00000078668_6 (sequence is synthesized)
ttggactgggttatactcagacccttcgaccaggagtcaaattgactttatcagctttaatcgatgggaagaacttcagtgcaggaggtcacaaggttggcttgggatttgaactggaag

SEQ ID NO: 74261 - DNA, 120 bp, Artificial Sequence
  ENSG00000078668_7 (sequence is synthesized)
cttaatgtggtttgaggaaagcatcagatttgtccctggaagtgaagagaaatgaacccactatgttttggccttaaaattcttctgtgaaatttcaaaagtgtgaactttttattcttc

SEQ ID NO: 74262 - DNA, 120 bp, Artificial Sequence
  ENSG00000078668_8 (sequence is synthesized)
caaagaattgtaatcctccccacactgaagtctaggggttgcgaatccctcctgagggagatgcttgaaggcatgcctggaagttgtcatgtttgtgccacgtttcagttcagttctgaa

SEQ ID NO: 74263 - DNA, 120 bp, Artificial Sequence
  ENSG00000078668_9 (sequence is synthesized)
gtgttattaaatgtgttcctcagcgacagtgtagcgtcatgttagaggagacgatctgacccaccagtttgtacatcacgtcctgcatgtcccacaccattttttcatgaccttgtaata

SEQ ID NO: 74264 - DNA, 120 bp, Artificial Sequence
  ENSG00000078668_10 (sequence is synthesized)
tactggtctctgtgctatagtggaatctttggttttgcatcatagtaaaataaaataaacccatcacatttggaacataactgctcatgtgacttgctggtgatggttttcttaccttga

SEQ ID NO: 74265 - DNA, 120 bp, Artificial Sequence
  ENSG00000078668_11 (sequence is synthesized)
tggctgcttttggtttctggtattgatttaggataaatttcaatcattgttccaaatttcttagattgtgtcttgatatttttctcatatgctatctacttaacagtaacatttttgttt

SEQ ID NO: 74266 - DNA, 120 bp, Artificial Sequence
  ENSG00000078668_12 (sequence is synthesized)
gttttgttgcttactaagcatttaatgtagagctatatgcatgttatatgcatgttataaatgtgttttgcacttgtttgaccaaattatgaaattagacacaaactgaactgtgaatcg

SEQ ID NO: 74267 - DNA, 120 bp, Artificial Sequence
  ENSG00000078668_13 (sequence is synthesized)
gagatttgtacctgtggcattttagattcgtgacagaccttcaaactaagaattgatgctgacaagggagaaatgtagactacccctctaccttaattttgtgcataaggtttttctagc

SEQ ID NO: 74268 - DNA, 120 bp, Artificial Sequence
  ENSG00000078668_14 (sequence is synthesized)
accaaaattaagatttgcatttgttatacttgtcaagtttgtgaaaagtaaatgtaaaaaataaaacactagatagttggatctactaaaagaaaaatgattgtcacgttaaaataatta

SEQ ID NO: 74269 - DNA, 120 bp, Artificial Sequence
  ENSG00000078668_15 (sequence is synthesized)
tgtgaacagttaaacatgattaacatgttatcattttttttttactaaggccttcccctaaatgtgcagcatgatactctctttgaaaccattctgtgtggtttgataaacagaacataa

SEQ ID NO: 74270 - DNA, 120 bp, Artificial Sequence
  ENSG00000078668_16 (sequence is synthesized)
cttcccagttgtctcatctgcctgtagaactagagttaggggacagggcatttgttaaggagaggattcatgttgcaggcagtgaaaaagactggtcagggttggcagcatctcattact

SEQ ID NO: 74271 - DNA, 120 bp, Artificial Sequence
  ENSG00000078668_17 (sequence is synthesized)
gttggcaggatttcagaaatgctccctaaaacaggaccaatcagaatgttttttcttgacagttcatagattgtcagtgacaggtgctgtctgctttccccagaaggaggtccatttcta

SEQ ID NO: 74272 - DNA, 120 bp, Artificial Sequence
  ENSG00000078668_18 (sequence is synthesized)
cagtgcagttgcccaaaatattgtagccattagcatgctgagaagtgatggtactcagatttagcatgccttggtgaatatccatccttgcggtgctatcctcatagcaaaaccttgcca

SEQ ID NO: 74273 - DNA, 120 bp, Artificial Sequence
  ENSG00000078668_19 (sequence is synthesized)
gtctgcctttgtgcttaattgaattgtcttaagaaactcacatcatgtggaggagccaagtaaatggatcaagtgttaacgttttaattaagcagtcattactggcatagctggatttag

SEQ ID NO: 74274 - DNA, 120 bp, Artificial Sequence
  ENSG00000078668_20 (sequence is synthesized)
ttctgtgttttgtttagtagtcatttatgctagaaatttgctgaaatctatagttacaaaatgggatccttgtttagatagtcttagaatttgttttcataccataataacaatggtaca

SEQ ID NO: 74275 - DNA, 120 bp, Artificial Sequence
  ENSG00000078668_21 (sequence is synthesized)
aggcgcggacggcgttggtttgaagaccttcagcgttgccctggcggagcagagacaggccctcggggtggagtttctttaaaaatttccattgttgtcttatacaggtctttggtttca

SEQ ID NO: 74276 - DNA, 120 bp, Artificial Sequence
  ENSG00000078668_22 (sequence is synthesized)
agggcacaggtgcggtccccagcctcttgggcccccagtcaacctcactgtccacaccgagccctcctgcgcacgcgcgctgcggagccggacagttggtggtgctggcttggcccggct

SEQ ID NO: 74277 - DNA, 120 bp, Artificial Sequence
  ENSG00000078668_23 (sequence is synthesized)
agcgcgcgaccgtggcgcgacacgccggcgcacaggcgctctcggggaggggcggcgcgcaggcgcggctgggggtgcgaggctgcgcaggcgcggacggcgttggtttgaagaccttca

SEQ ID NO: 74278 - DNA, 120 bp, Artificial Sequence
  ENSG00000078674_0 (sequence is synthesized)
tccggcgggtcacatgactccagtctagctcgcattgcggctcccgcccgggcgagttctcgcccccgcgcggccgttgccgaggagacggcgcatgtcccgccgcgcgttgccccctct

SEQ ID NO: 74279 - DNA, 120 bp, Artificial Sequence
  ENSG00000078674_1 (sequence is synthesized)
gcagtacccccgcccctcttctcccaccacaatgagatcctaagatggcggtggctgcggcggttggcgctgcgtagctgaggtcgaaaaggcggccactggggccgaggcagccaggaa

SEQ ID NO: 74280 - DNA, 120 bp, Artificial Sequence
  ENSG00000078674_2 (sequence is synthesized)
acgtgtgggcctctctgctgcggtctccgagggccgaccgctgccggcggcgggtcgtgggggctgactgtcgctctgcctttgacaggagaggctgcttcttgtagaggaaacagcttt

SEQ ID NO: 74281 - DNA, 120 bp, Artificial Sequence
  ENSG00000078674_3 (sequence is synthesized)
gaagtgtggagcgggaaaggagcagtttctgagctgcaaaaactagtttctaaacagagagttaattgttaaatccagtatggccacaggaggaggtccctttgaagatggcatgaatga

SEQ ID NO: 74282 - DNA, 120 bp, Artificial Sequence
  ENSG00000078674_4 (sequence is synthesized)
tcaggatttaccaaactggagtaatgagaatgttgatgacaggctcaacaatatggattggggtgcccaacagaagaaagcaaatagatcatcagaaaagaataagaaaaagtttggtgt

SEQ ID NO: 74283 - DNA, 120 bp, Artificial Sequence
  ENSG00000078674_5 (sequence is synthesized)
agaaagtgataaaagagtaaccaatgatatttctccggagtcgtcaccaggagttggaaggcgaagaacaaagactccacatacgttcccacacagtagatacatgagtcagatgtctgt

SEQ ID NO: 74284 - DNA, 120 bp, Artificial Sequence
  ENSG00000078674_6 (sequence is synthesized)
cccagagcaggcagaattagagaaactgaaacagcggataaacttcagtgatttagatcagagaagcattggaagtgattcccaaggtagagcaacagctgctaacaacaaacgtcagct

SEQ ID NO: 74285 - DNA, 120 bp, Artificial Sequence
  ENSG00000078674_7 (sequence is synthesized)
tagtgaaaaccgaaagcccttcaactttttgcctatgcagattaatactaacaagagcaaagatgcatctacaaaccccccaaacagagaaacgattggatcagcacagtgtaaagagtt

SEQ ID NO: 74286 - DNA, 120 bp, Artificial Sequence
  ENSG00000078674_8 (sequence is synthesized)
gtttgcttctgctttaagtaatgacctcttgcaaaactgtcaggtgtctgaagaagatgggaggggagaacctgcaatggagagcagccagattgtaagcaggcttgttcaaattcgcga

SEQ ID NO: 74287 - DNA, 120 bp, Artificial Sequence
  ENSG00000078674_9 (sequence is synthesized)
ttatattactaaagctagttccatgcgggaagatcttgtagagaaaaatgagagatctgctaatgttgagcgccttactcatctaatagatcaccttaaagaacaagagaagtcatatat

SEQ ID NO: 74288 - DNA, 120 bp, Artificial Sequence
  ENSG00000078674_10 (sequence is synthesized)
gaaatttcttaaaaaaatccttgccagagatcctcagcaggagcctatggaagagatagaaaatttgaagaaacaacatgatttattaaaaagaatgttacaacagcaggagcaactaag

SEQ ID NO: 74289 - DNA, 120 bp, Artificial Sequence
  ENSG00000078674_11 (sequence is synthesized)
agctctacagggacggcaggctgcacttctagctctgcaacataaagcagagcaagctattgcagtgatggatgattctgttgttgcagaaactgcaggtagcttatctggcgtcagtat

SEQ ID NO: 74290 - DNA, 120 bp, Artificial Sequence
  ENSG00000078674_12 (sequence is synthesized)
cacatctgaactaaatgaagaattgaatgacttaattcagcgttttcataatcagcttcgtgattctcagcctccagctgttccagacaatagaagacaggcagaaagtctttcattaac

SEQ ID NO: 74291 - DNA, 120 bp, Artificial Sequence
  ENSG00000078674_13 (sequence is synthesized)
tagggaggtttcccagagcaggaaaccatcagcttcagaacgtttacctgatgagaaagtcgaactttttagcaaaatgagagtgctacaggaaaagaaacaaaaaatggacaaattgct

SEQ ID NO: 74292 - DNA, 120 bp, Artificial Sequence
  ENSG00000078674_14 (sequence is synthesized)
tggagaacttcatacacttcgagatcagcatcttaacaattcatcatcctctccacaaaggagtgtcgatcagagaagtacttcagctccctctgcttctgtaggcttggcaccggttgt

SEQ ID NO: 74293 - DNA, 120 bp, Artificial Sequence
  ENSG00000078674_15 (sequence is synthesized)
caatggagaatccaatagcctcacatcatctgttccttatcctactgcttctctagtatctcagaatgagagtgaaaacgaaggccacctcaatccatctgaaaaactccagaagttaaa

SEQ ID NO: 74294 - DNA, 120 bp, Artificial Sequence
  ENSG00000078674_16 (sequence is synthesized)
tgaagttcgaaagagattgaatgagctaagagaattagttcattattatgaacaaacgtcagacatgatgacagatgctgtgaatgaaaacaggaaagatgaagaaactgaagagtcaga

SEQ ID NO: 74295 - DNA, 120 bp, Artificial Sequence
  ENSG00000078674_17 (sequence is synthesized)
atatgattctgagcatgaaaattccgagcctgttactaacattcgaaatccacaagtagcttccacttggaatgaagtaaatagtcatagtaatgcacagtgtgtttctaataatagaga

SEQ ID NO: 74296 - DNA, 120 bp, Artificial Sequence
  ENSG00000078674_18 (sequence is synthesized)
tgggcgaacagttaattctaattgtgaaattaacaacagatctgctgccaacataagggctctaaacatgcctccttctttagattgtcgatataatagagaaggggaacaggagattca

SEQ ID NO: 74297 - DNA, 120 bp, Artificial Sequence
  ENSG00000078674_19 (sequence is synthesized)
tgttgcacaaggtgaagatgatgaggaggaggaggaagaagcagaagaggagggagtcagtggagcttcattatctagtcacaggagcagtctggttgatgagcatccagaagatgctga

SEQ ID NO: 74298 - DNA, 120 bp, Artificial Sequence
  ENSG00000078674_20 (sequence is synthesized)
atttgaacagaagatcaaccgacttatggctgcaaaacagaaacttagacagttacaagatcttgttgctatggtacaggatgatgatgcagctcaaggagttatctctgccagtgcatc

SEQ ID NO: 74299 - DNA, 120 bp, Artificial Sequence
  ENSG00000078674_21 (sequence is synthesized)
aaatttggatgatttctacccagcagaagaagacaccaagcaaaattcaaataacactagaggaaatgccaataaaacacagaaagatactggagtaaatgaaaaggcaagagagaaatt

SEQ ID NO: 74300 - DNA, 120 bp, Artificial Sequence
  ENSG00000078674_22 (sequence is synthesized)
ttatgaggctaaactacagcagcaacagagagagctaaaacaattgcaggaagaaagaaagaaactgattgacattcaggagaaaattcaagcattgcaaacggcatgccctgacttaca

SEQ ID NO: 74301 - DNA, 120 bp, Artificial Sequence
  ENSG00000078674_23 (sequence is synthesized)
gctgtcagctgctagtgtgggtaactgtcccaccaaaaaatatatgccagctgttacttcaaccccaactgttaatcaacacgagaccagtacaagcaaatctgtttttgagcctgaaga

SEQ ID NO: 74302 - DNA, 120 bp, Artificial Sequence
  ENSG00000078674_24 (sequence is synthesized)
ttcttcaatagtagataatgagttgtggtcagaaatgagaagacatgaaatgttgagggaggagctgcgacagagaagaaagcagcttgaagctctgatggctgaacatcagaggaggca

SEQ ID NO: 74303 - DNA, 120 bp, Artificial Sequence
  ENSG00000078674_25 (sequence is synthesized)
aggtctagctgaaactgcatctccagtggctgtgtcattgagaagtgatggatctgagaacctatgtactcctcagcaaagtagaacagaaaaaacgatggcaacttggggagggtctac

SEQ ID NO: 74304 - DNA, 120 bp, Artificial Sequence
  ENSG00000078674_26 (sequence is synthesized)
ccagtgtgcactagatgaagaaggagatgaagacggttacctttctgaaggaattgttcggacagatgaagaggaggaagaagagcaagatgccagttccaatgataacttttctgtgtg

SEQ ID NO: 74305 - DNA, 120 bp, Artificial Sequence
  ENSG00000078674_27 (sequence is synthesized)
tccttctaacagtgtgaatcataactcctacaatggaaaggaaactaaaaataggtggaagaacaattgccctttttcggcagatgaaaattatcgtcctttagccaagacaaggcaaca

SEQ ID NO: 74306 - DNA, 120 bp, Artificial Sequence
  ENSG00000078674_28 (sequence is synthesized)
aaacagcttgattttagtgtcagtatttgtcagactttgatgcaagaccagcagactctatcttgtctgctacaaactcttctcacgggtccttacagtgttatgcccagcaatgttgca

SEQ ID NO: 74307 - DNA, 120 bp, Artificial Sequence
  ENSG00000078674_29 (sequence is synthesized)
tctcctcaagtacacttcataatgcaccagttgaaccagtgctatactcagctaacatggcaacagaataatgttcagaggttgaaacaaatgctaaatgaacttatgcgccagcaaaat

SEQ ID NO: 74308 - DNA, 120 bp, Artificial Sequence
  ENSG00000078674_30 (sequence is synthesized)
cagcatccagaaaaacctggaggcaaggaaagaggcagtagtgcatcgcaccctccttctcccagtttattttgtcctttcagctttccaacacagcctgtaaatctcttcaatatacct

SEQ ID NO: 74309 - DNA, 120 bp, Artificial Sequence
  ENSG00000078674_31 (sequence is synthesized)
ggatttactaacttttcatcatttgcaccaggtatgaatttcagccctttatttccttctaattttggagatttttctcagaatatctctacacccagtgaacagcagcaacccttagcc

SEQ ID NO: 74310 - DNA, 120 bp, Artificial Sequence
  ENSG00000078674_32 (sequence is synthesized)
cagaattcttcaggaaaaacagaatatatggcttttccaaaaccttttgaaagcagttcctctattggagcagagaaaccaaggaataaaaaactgcctgaagaggaggtggaaagcagt

SEQ ID NO: 74311 - DNA, 120 bp, Artificial Sequence
  ENSG00000078674_33 (sequence is synthesized)
aggacaccatggttatatgaacaagaaggtgaagtagagaaaccatttatcaagactggattttcagtgtctgtagaaaaatctacaagtagtaaccgcaaaaatcaattagatacaaac

SEQ ID NO: 74312 - DNA, 120 bp, Artificial Sequence
  ENSG00000078674_34 (sequence is synthesized)
ggaagaagacgccagtttgatgaagaatcactggaaagctttagcagtatgcctgatccagtagatccaacaacagtgactaaaacattcaagacaagaaaagcgtctgcacaggccagc

SEQ ID NO: 74313 - DNA, 120 bp, Artificial Sequence
  ENSG00000078674_35 (sequence is synthesized)
ctggcatctaaagataaaactcccaagtcaaaaagtaagaagaggaattctactcagctgaaaagcagagttaaaaacatcaggtatgaaagtgccagtatgtctagcacatgtgaacct

SEQ ID NO: 74314 - DNA, 120 bp, Artificial Sequence
  ENSG00000078674_36 (sequence is synthesized)
tgcaaaagtaggaacagacattcagcccagactgaagagcctgttcaagcaaaagtattcagcagaaagaatcatgagcaactggaaaaaataataaaatgtaataggtctacagaaata

SEQ ID NO: 74315 - DNA, 120 bp, Artificial Sequence
  ENSG00000078674_37 (sequence is synthesized)
tcttcagaaactgggagtgatttttccatgtttgaagctttgcgagatactatttattctgaagtagctacattaatttctcaaaatgaatctcgtccacattttcttattgaactcttc

SEQ ID NO: 74316 - DNA, 120 bp, Artificial Sequence
  ENSG00000078674_38 (sequence is synthesized)
catgagctgcagctactaaacacagactacttgagacagagggctttatatgcattgcaggacatagtatccagacatatttctgagagccatgaaaaaggagaaaatgtaaagtcagta

SEQ ID NO: 74317 - DNA, 120 bp, Artificial Sequence
  ENSG00000078674_39 (sequence is synthesized)
aactctggtacttggatagcatcaaactcagaacttactcctagtgagagccttgctactactgatgatgaaacttttgagaagaactttgaaagagaaacccataaaataagtgagcaa

SEQ ID NO: 74318 - DNA, 120 bp, Artificial Sequence
  ENSG00000078674_40 (sequence is synthesized)
aatgatgctgataatgctagtgtcctgtctgtatcatcaaattttgagccttttgcaacagatgatctaggtaacaccgtgattcacttagatcaagcattagccagaatgagagaatat

SEQ ID NO: 74319 - DNA, 120 bp, Artificial Sequence
  ENSG00000078674_41 (sequence is synthesized)
gagcgtatgaagactgaggctgaaagtaactcaaatatgagatgcacctgcaggattattgaggatggagatggtgctggtgcaggtactacagttaataatttagaagaaactcccgtt

SEQ ID NO: 74320 - DNA, 120 bp, Artificial Sequence
  ENSG00000078674_42 (sequence is synthesized)
attgaaaatcgtagttcacaacaacctgtaagtgaagtttctaccatcccatgtcctagaattgatactcagcagctggaccggcaaattaaagcaattatgaaagaagtcattcctttt

SEQ ID NO: 74321 - DNA, 120 bp, Artificial Sequence
  ENSG00000078674_43 (sequence is synthesized)
ttgaaggagcacatggatgaagtatgctcctcgcagcttctaacttcagtaaggcgcatggttttgacccttacccagcaaaatgatgagagcaaagagtttgtaaagttctttcataaa

SEQ ID NO: 74322 - DNA, 120 bp, Artificial Sequence
  ENSG00000078674_44 (sequence is synthesized)
caacttggaagtatattacaggattcactggcaaaatttgctggcagaaaactgaaagactgtggagaagatcttcttgtagagatatctgaagtgttgttcaatgaattggctttcttt

SEQ ID NO: 74323 - DNA, 120 bp, Artificial Sequence
  ENSG00000078674_45 (sequence is synthesized)
aagcttatgcaagatttggataataatagtataactgttaaacagagatgcaaaaggaaaatagaagcaactggagtgatacaatcttgtgccaaagaggctaaaaggattcttgaagat

SEQ ID NO: 74324 - DNA, 120 bp, Artificial Sequence
  ENSG00000078674_46 (sequence is synthesized)
catggctcacctgctggagagattgatgatgaagacaaagacaaggatgaaactgaaacagttaagcagactcaaacatctgaggtgtatgatggtcccaaaaatgtaagatctgatatt

SEQ ID NO: 74325 - DNA, 120 bp, Artificial Sequence
  ENSG00000078674_47 (sequence is synthesized)
tctgatcaagaggaagatgaagaaagtgaaggatgtccagtgtctattaatttgtctaaagctgaaactcaggctttaactaattatggaagtggagaagatgaaaatgaggatgaagaa

SEQ ID NO: 74326 - DNA, 120 bp, Artificial Sequence
  ENSG00000078674_48 (sequence is synthesized)
atggaagaatttgaagaaggccctgtggatgtccagacttccctccaggctaacactgaagctactgaagaaaatgaacatgatgaacaggtcctacaacgtgactttaaaaagacagca

SEQ ID NO: 74327 - DNA, 120 bp, Artificial Sequence
  ENSG00000078674_49 (sequence is synthesized)
gaaagcaaaaatgtcccattggaacgagaagccactagtaaaaatgaccaaaataactgtcctgtgaaaccctgttacctcaatatcttggaagatgagcaacctttaaatagtgctgcc

SEQ ID NO: 74328 - DNA, 120 bp, Artificial Sequence
  ENSG00000078674_50 (sequence is synthesized)
cataaggagtcacctcctactgttgattcaactcaacagcctaaccctttgccgttacgtttacctgaaatggaacccttagtgcctagagtcaaagaagttaaatctgctcaggaaact

SEQ ID NO: 74329 - DNA, 120 bp, Artificial Sequence
  ENSG00000078674_51 (sequence is synthesized)
cctgaaagctctctggctggaagtcctgatactgaatctccagtgttagtgaatgactatgaagcagaatctggtaatataagtcaaaagtctgatgaagaagattttgtaaaagttgaa

SEQ ID NO: 74330 - DNA, 120 bp, Artificial Sequence
  ENSG00000078674_52 (sequence is synthesized)
gatttaccactgaaactgacaatatattcagaggcagatctaagaaagaaaatggtagaagaagaacagaaaaaccatttatctggtgaaatatgtgaaatgcagaccgaagaattagct

SEQ ID NO: 74331 - DNA, 120 bp, Artificial Sequence
  ENSG00000078674_53 (sequence is synthesized)
ggaaattctgagacactaaaagaacctgaaacggtgggagcccagagtatatgagatgtcttcagaggctcatctaactctgtccttacatactcaatgcatatatgaaaacaatactaa

SEQ ID NO: 74332 - DNA, 120 bp, Artificial Sequence
  ENSG00000078674_54 (sequence is synthesized)
ataaacatctgatctgtataaaaatgtaaattagtttgacactgcttttttgataggtgtggtcatttctccccatggtagtttaaaacatcagaaactgaattctggacagatttaagc

SEQ ID NO: 74333 - DNA, 120 bp, Artificial Sequence
  ENSG00000078674_55 (sequence is synthesized)
cttgacacactgtgtttttttttttttcccccttcttttttgggtcttcatttttttccccattgtgatgtttggtaacgaatttaaaatgtagttttaaataaagtttggacttatcta

SEQ ID NO: 74334 - DNA, 120 bp, Artificial Sequence
  ENSG00000078674_56 (sequence is synthesized)
ataactttaggctgctcagagaagagcaatggttaagagttagttagagaaatatattatttgttataaagcccatccattaggccagtcttccaactaatgccagtgttgctgctgttg

SEQ ID NO: 74335 - DNA, 120 bp, Artificial Sequence
  ENSG00000078674_57 (sequence is synthesized)
ggtctgatgttcttcttttagatacctgcaggtcctattcctgtgcaagaatagggcagattatcaagatatccaggatacctatgaagttattatagaatatttattaatccattgaaa

SEQ ID NO: 74336 - DNA, 120 bp, Artificial Sequence
  ENSG00000078674_58 (sequence is synthesized)
ttggataataagtttagaacataggttctcagtatctagaacttacatcattatcatctgtttgttaggatttgaaattctggaaaatatttatctacatcgcctcagactaaaagtaaa

SEQ ID NO: 74337 - DNA, 120 bp, Artificial Sequence
  ENSG00000078674_59 (sequence is synthesized)
aaaaataagctttatataattagggagatttctgcacagagaagtaacattgtggttaattttaaatgaaaaacttaactttttcaagtggggataaataatacaactaaatttctgtaa

SEQ ID NO: 74338 - DNA, 120 bp, Artificial Sequence
  ENSG00000078674_60 (sequence is synthesized)
tagtaagattctgtatgccttcagataaacttgcctattgagatggtaatttaaagccaaagcatagcagtttcttttgtgtgtagtgaggttgaagcagatttgcaggtgaagtattga

SEQ ID NO: 74339 - DNA, 120 bp, Artificial Sequence
  ENSG00000078674_61 (sequence is synthesized)
aagtttatgtgactttaagtcagcttttgaaaagtgattgatttgctttttatcccaaactgtccatatacccagtaaggcttcaaaaaaccagtcaacaatgagtaagtcaatcttata

SEQ ID NO: 74340 - DNA, 120 bp, Artificial Sequence
  ENSG00000078674_62 (sequence is synthesized)
gattcttcttcctcgaataaaatacaaagaattagttccaataagtattttaactttgttaacaactgaaataccccataaaaaaagaacttgttgagagtatttctttaaaatggttac

SEQ ID NO: 74341 - DNA, 66 bp, Artificial Sequence
  ENSG00000078674_63 (sequence is synthesized)
aaaaattagctgggagactgaacccgggaggtggaggttgcaggttgcagtgagccgagatcatgc

SEQ ID NO: 74342 - DNA, 75 bp, Artificial Sequence
  ENSG00000078674_64 (sequence is synthesized)
tgctgtatacctcagtgtaatgtccattcaaggagtattaaatgaggatttccctgcgaggacatttactgtatt

SEQ ID NO: 74343 - DNA, 120 bp, Artificial Sequence
  ENSG00000078674_65 (sequence is synthesized)
tattaaatgaggatttccctgcgaggacatttactgtattgctacttaaattatggaagacaatatatcttcaactttaataaaacctattcagaaaattaccaattcagaattcggagt

SEQ ID NO: 74344 - DNA, 120 bp, Artificial Sequence
  ENSG00000078674_66 (sequence is synthesized)
tcttatccaggtgctctaactaacttcagggaaattggaacaataagttatgttacatgcacactcaaattctttattttctccactttaagcaggaaagggtaaaaactgttttggtac

SEQ ID NO: 74345 - DNA, 120 bp, Artificial Sequence
  ENSG00000078674_67 (sequence is synthesized)
tcaagcccagccttacatactgtgtttctctctctgtctgcatgcatattaaagtggaaaaattgtatttatatcttagttattaccatagtacctatgaaccttatcaaaattgcttat

SEQ ID NO: 74346 - DNA, 120 bp, Artificial Sequence
  ENSG00000078674_68 (sequence is synthesized)
ttgactggtgttacagctgctattaatctaagtctattgtttttctattttagtagataatttagttttaaaatacgtagggtttgagagcagatatatttatttaatctgttttctcta

SEQ ID NO: 74347 - DNA, 120 bp, Artificial Sequence
  ENSG00000078674_69 (sequence is synthesized)
gtaactattgctgaagggttaggcattcagtattcctatttgtcctaattttgaagttaaaaattttggttacagatagatagagggagaaaagttcaaaatgagtgagagagaacttta

SEQ ID NO: 74348 - DNA, 120 bp, Artificial Sequence
  ENSG00000078674_70 (sequence is synthesized)
tgcaggttgagataatgcctaaaataatgagctggccagactgtggaggtactctttgtattttgtaacattgactttgggtaaatgctttttcactgttaataaatatatatcctgtat

SEQ ID NO: 74349 - DNA, 120 bp, Artificial Sequence
  ENSG00000078674_71 (sequence is synthesized)
catacctcagctttctaacagccccatcagagttgatacactgaaaagtttgtaagtggttacttacattctgctgggtacagctctcgtgttcagtaaacatatgaaaaaacaagagtt

SEQ ID NO: 74350 - DNA, 120 bp, Artificial Sequence
  ENSG00000078674_72 (sequence is synthesized)
gtctttctgtttttagtcctggttgtaactatttcttcagcatgtatgaactgcccccctgcctttttttttttttttttttgtgacaaaatggtaacagcttgacagtatgtttcacag

SEQ ID NO: 74351 - DNA, 120 bp, Artificial Sequence
  ENSG00000078674_73 (sequence is synthesized)
ctgtgattgtagcttttcctatgaactgcatatttctaaattattcatagagctgaatgtagaagaaaacgaaatgtgatagaattactgagaaaataattcactatttctttacatgga

SEQ ID NO: 74352 - DNA, 120 bp, Artificial Sequence
  ENSG00000078674_74 (sequence is synthesized)
attttaaccttcatggacatgttagtgtgaaaaggagagaatgagaatagaaacctttgttgatactgacaatactagtagtcttttactcttttaggctacagcaaatccaaatattta

SEQ ID NO: 74353 - DNA, 120 bp, Artificial Sequence
  ENSG00000078674_75 (sequence is synthesized)
aaatgaggaggaggatgttcggactatagattcagctgtgggatctggttctgtagctgagagcacatcgctaaacatagatgtgcagtctgaggcttcagataccacggccagagatcc

SEQ ID NO: 74354 - DNA, 120 bp, Artificial Sequence
  ENSG00000078674_76 (sequence is synthesized)
agttaaatagattattgtcaaattgtaggtagacctaatatatttgattttcagctttttttaaaacttgggtataatgtgttattttattttgagggcgagatataatatgcaatcaaa

SEQ ID NO: 74355 - DNA, 120 bp, Artificial Sequence
  ENSG00000078674_77 (sequence is synthesized)
tgggtcaaaattgccaaacctctcaatacgtatgaataaagtaggagtttggcttttcttatgaatggatatttctaaacagacatctgaaaattgaggagcatctacggcaagaaaatt

SEQ ID NO: 74356 - DNA, 120 bp, Artificial Sequence
  ENSG00000078674_78 (sequence is synthesized)
gagctgcaaaaactagtttctaaacaggtaatttgacattattatctgtattatcctttgtattagagttggagaagactttatggtggacactgctgtcacagttacagtgcatgactg

SEQ ID NO: 74357 - DNA, 120 bp, Artificial Sequence
  ENSG00000078674_79 (sequence is synthesized)
aggatcctctctgcttagtaaacaaactttctgggttcaccgccctgtttgctctgcttttcggcgtgctgctttggcctgccggtatatctttgttcggaaaggccctgtcattcctaa

SEQ ID NO: 74358 - DNA, 120 bp, Artificial Sequence
  ENSG00000078674_80 (sequence is synthesized)
ttattaattactagaatggtttatgcagtaccgtttgaaatttatttgtcttcacagaattttttcaacctgtttgaatttgtcctataactggatagcctctctttccaaatccattta

SEQ ID NO: 74359 - DNA, 120 bp, Artificial Sequence
  ENSG00000078674_81 (sequence is synthesized)
atctcaagttctctcctacaacattcctattaattggctgttcatgaactctacttgtcgaacttgttataccttgaccgaaatttagttgtctaaaattactttattattattttttgt

SEQ ID NO: 74360 - DNA, 120 bp, Artificial Sequence
  ENSG00000078674_82 (sequence is synthesized)
acttcgatctccctttcctggtataaagttacttgaaacattacttttagcgcatagtacattgtcacatgcaagtgacataaaggtattctctgtccagcagaataaagtcagtgttgt

SEQ ID NO: 74361 - DNA, 120 bp, Artificial Sequence
  ENSG00000078674_83 (sequence is synthesized)
agaatgtaagttcactaggagaagttcaataattgtttgcaaagggcagtttggaaaaatggctaaaagataattagaagtttgttaaaagctttttagaaataattgctcttcagaaaa

SEQ ID NO: 74362 - DNA, 120 bp, Artificial Sequence
  ENSG00000078674_84 (sequence is synthesized)
attgctcttcagaaaaaaacctcagaaataaataacctaaatttaattctactcttaaaattttaagaaagttcattttgaaagttttgtagaaattggctgggcgcagtggctcacgcc

SEQ ID NO: 74363 - DNA, 73 bp, Artificial Sequence
  ENSG00000078674_85 (sequence is synthesized)
actttgggaggccgaggtgggcggatgacgaggtcaggagatcaagaccaattagccaggcgtggtggcgggc

SEQ ID NO: 74364 - DNA, 76 bp, Artificial Sequence
  ENSG00000078674_86 (sequence is synthesized)
gtgaacctgggagcaggcaacagagtgtgactccgtctcaaaaaaaaagaaacttttgtagaaatcaatatatatt

SEQ ID NO: 74365 - DNA, 120 bp, Artificial Sequence
  ENSG00000078674_87 (sequence is synthesized)
ctcaaaaaaaaagaaacttttgtagaaatcaatatatattcttgctttctacaaaagcagacagatttttattttatagctctcctatgaggacctgaaatgagactgtcatgagaaaat

SEQ ID NO: 74366 - DNA, 120 bp, Artificial Sequence
  ENSG00000078674_88 (sequence is synthesized)
acgaataggtagttgatgtatatcttaattataattctcagtgggtttttttttttttaaactggaagactaacaaaacagggcaagaaaaatggaactcaagggaaaggtcacatgtga

SEQ ID NO: 74367 - DNA, 120 bp, Artificial Sequence
  ENSG00000078674_89 (sequence is synthesized)
atgtgtgtgttagagttgttaatactacagtgattgctgtatggtgggctttagtaaaataaacaataattacaaaattagttataagattttccttttagcacattggggaagatgatg

SEQ ID NO: 74368 - DNA, 120 bp, Artificial Sequence
  ENSG00000078674_90 (sequence is synthesized)
tttttttctgaaggaggaaagtggatttgagacttggagaaactagtaaggctgtgagattcacagtacagaactaagaagacaaccagaaatacctatcagtactttcatttttacgga

SEQ ID NO: 74369 - DNA, 120 bp, Artificial Sequence
  ENSG00000078674_91 (sequence is synthesized)
tttgagtgctaggcaacgtgctatgtaatgactactacagataaaacagtgtgcaaaacagacagggtgcctttcttcatggagtaaatttacattttaaaagtatctatgtgtatgtag

SEQ ID NO: 74370 - DNA, 120 bp, Artificial Sequence
  ENSG00000078674_92 (sequence is synthesized)
agtgtagtatatcttaatagtgatcacaggcaatgccattttatgatcatttccccactttttgacagcttgagaatagtagcagagaaaacagacagtggagtttagccagaattgagt

SEQ ID NO: 74371 - DNA, 120 bp, Artificial Sequence
  ENSG00000078674_93 (sequence is synthesized)
cgacacagtacgcaagtaggtgaggaagtgaaggatgctagctagcaaggcatttttgcaatgacttagttgggtttgggtttgagtaaagaatcaagggattgatggatttagggagag

SEQ ID NO: 74372 - DNA, 120 bp, Artificial Sequence
  ENSG00000078674_94 (sequence is synthesized)
agaaacgatcaaggggctggtagtattcaggaaggctaagagcagtttcagcaggaatcaagtgagagaagtagaatgcaaaaacttatgatcagaaagaggaacttcagaagttcagga

SEQ ID NO: 74373 - DNA, 120 bp, Artificial Sequence
  ENSG00000078674_95 (sequence is synthesized)
tcctgaacaaattatcagttcagtattggaatagagaagatgagatggatattggaattgaggccagagtcctagaaaagtcattgcaagtgtttagttcatgcaagcagggaatgaagt

SEQ ID NO: 74374 - DNA, 120 bp, Artificial Sequence
  ENSG00000078674_96 (sequence is synthesized)
agaaagtgaaaccatgcgccagttactgtcaggaaaagtacaggcatatcttggatattttcagaggtgattatgagtaatttaatgccatttgagaaaaaaataatttttttcgttact

SEQ ID NO: 74375 - DNA, 74 bp, Artificial Sequence
  ENSG00000078674_97 (sequence is synthesized)
tactgcatccctctcctcccgagttcaagcaattgattctccttactcagcctaccaaacagctgggattacag

SEQ ID NO: 74376 - DNA, 120 bp, Artificial Sequence
  ENSG00000078674_98 (sequence is synthesized)
gattctccttactcagcctaccaaacagctgggattacaggaacgccccaccacacgtggctaatatttgcgtttttagtagaggcggagtttcgccatgttgaccaggcgaatcaagtg

SEQ ID NO: 74377 - DNA, 120 bp, Artificial Sequence
  ENSG00000078674_99 (sequence is synthesized)
atccgcctgcctcagcttcccaaagtggtgggatcacaagtgtgagccactgcacccagcctgattatttgattactttgaatttcttctttaccttatattcttatttcaaaggtaaac

SEQ ID NO: 74378 - DNA, 120 bp, Artificial Sequence
  ENSG00000078674_100 (sequence is synthesized)
tgtagtcataggtattttcatggtaattaatactgtgatattctactgtaatatgtctctatagttagaatcctgcaacgggatgttcttttttttggcgatggagtcttgctctggcac

SEQ ID NO: 74379 - DNA, 120 bp, Artificial Sequence
  ENSG00000078674_101 (sequence is synthesized)
gtagctgggattacagacgcgtgccaccacgtccgactaatttttgtatttttaatatagatggggttttaacatgttgatcaggctagtcttcaactcctgacctcgtgatccgcccgc

SEQ ID NO: 74380 - DNA, 120 bp, Artificial Sequence
  ENSG00000078674_102 (sequence is synthesized)
ccaccgcgcccagcctaacaggattttcttaaaaaaaaaaaaaaaaaaaagtcattgaaagtagcttaaaattgccatagtatattttcatttttgtgtctttgtaaaaaaaaaaaaaaa

SEQ ID NO: 74381 - DNA, 120 bp, Artificial Sequence
  ENSG00000078674_103 (sequence is synthesized)
ttttatgttgaaaattctgcaaaacgagatttatttaatattgttgtaaacattcttaagggataggtagaagaggcgtgtgtgtgttgtgtgggcataatttgagttgtctaagagatg

SEQ ID NO: 74382 - DNA, 120 bp, Artificial Sequence
  ENSG00000078674_104 (sequence is synthesized)
tgatgtaacatagtttctgtgaactgatgttactttcttgtttttcaaataaaggatcaaaaataagattacagttaaaatatttctatattcagatggtttagagaccaggctgtagaa

SEQ ID NO: 74383 - DNA, 120 bp, Artificial Sequence
  ENSG00000078674_105 (sequence is synthesized)
aaatagttttagaagatacttttaaatttctttgtatgaaggtcttgggttggacaaaaactacacactagtaatcatctcttttatagtgaccatatatttcaggccctgctattaaaa

SEQ ID NO: 74384 - DNA, 120 bp, Artificial Sequence
  ENSG00000078674_106 (sequence is synthesized)
atctccagtgttagtgaatgactatatttgtcttttacagtttggtgtcagagtaggatttgaaagagaccccctgtggcctctggaagcatcgaggaaccaggcaaaaggtgtccattg

SEQ ID NO: 74385 - DNA, 120 bp, Artificial Sequence
  ENSG00000078674_107 (sequence is synthesized)
tccctctataatggatatttgtatatatcggatgtgattcttatgtctcctaatattaaaaattgctaacttggaattctagtagagatttggggtcatgtaaggtctgccatatacttc

SEQ ID NO: 74386 - DNA, 120 bp, Artificial Sequence
  ENSG00000078674_108 (sequence is synthesized)
gaattggaatatactcattaagatgagtatcaaagaacagtgaaggttagatttattactgttagctcatgcttccaaagggtattgcaaagatacctccaagacatatttactgttttg

SEQ ID NO: 74387 - DNA, 71 bp, Artificial Sequence
  ENSG00000078674_109 (sequence is synthesized)
cactgagtagctgggactacagcacatgctaggagaatactacagcagtctaacagaaatgcatgcaatga

SEQ ID NO: 74388 - DNA, 120 bp, Artificial Sequence
  ENSG00000078674_110 (sequence is synthesized)
agtgattggataaatattagcttttttttttaattaacagttttttgttttggtggatttgaatgacatgtttaattaaaactgtcttttaatttcattttaaagctaaagacatttatt

SEQ ID NO: 74389 - DNA, 120 bp, Artificial Sequence
  ENSG00000078687_0 (sequence is synthesized)
aggctgctgatcaaaaaaccaaagtgccagaacctactaagacctgttcaagccagccccaacctgccggtaccagtaccagtacttccaccagcactatctcaagcagcaacaatggca

SEQ ID NO: 74390 - DNA, 120 bp, Artificial Sequence
  ENSG00000078687_1 (sequence is synthesized)
aacgtgcatctgccagtggccagcagccagctgcatcccgttacctgcctcgtgaggtgcctccacgcttccgccagcaagaacagaagcagctattaaagagaggccagccattgccta

SEQ ID NO: 74391 - DNA, 120 bp, Artificial Sequence
  ENSG00000078687_2 (sequence is synthesized)
cggggactctaaccagtgtgagcccaacccagggtgctgggcctgcaggggtaagcccacctcccctacctggagccggaacacagcatcatcccagtaagctccaaccagatctcagtc

SEQ ID NO: 74392 - DNA, 120 bp, Artificial Sequence
  ENSG00000078687_3 (sequence is synthesized)
atagtggattggcagatcattatgaaaattcccactggggacagcagcctacttacagaagcgaagccaactgcagctgggataaagtgataatagataggactgacaaggaggcgtggc

SEQ ID NO: 74393 - DNA, 120 bp, Artificial Sequence
  ENSG00000078687_4 (sequence is synthesized)
cttccatcacaggaacagagactgaatctgcctcagaatgtactacagacactgactctgcctccaactgtggctcagagaacagtagcatggctacagggagtgcccagggcaacttca

SEQ ID NO: 74394 - DNA, 120 bp, Artificial Sequence
  ENSG00000078687_5 (sequence is synthesized)
ctggacataccaagaagacaaatggcaataatggcaccaatggcgcactcgtccaaagcccttctaatcagagtgcccttggagcagggggagcgaacagtaatggaagtgcggccagag

SEQ ID NO: 74395 - DNA, 120 bp, Artificial Sequence
  ENSG00000078687_6 (sequence is synthesized)
tgtggggtgtagccacaggctccagctctggcctggctcactgctctgtcagtggtggggatggaaaaatggacactatgattggagatgggagaagtcagaattgctggggtgcttcca

SEQ ID NO: 74396 - DNA, 120 bp, Artificial Sequence
  ENSG00000078687_7 (sequence is synthesized)
actccaatgctggcattaatcttaaccttaatcctaatgccaacccagctgcctggcctgtacttggacatgaaggaaccgtggcgacaggcaacccttccagtatttgcagtccagtca

SEQ ID NO: 74397 - DNA, 120 bp, Artificial Sequence
  ENSG00000078687_8 (sequence is synthesized)
gtgccataggtcaaaatatgggcaaccagaacgggaacccaacaggcactttaggtgcttggggaaacttgctgccacaagagagcacagaaccacaaacgtccacttctcagaatgtgt

SEQ ID NO: 74398 - DNA, 120 bp, Artificial Sequence
  ENSG00000078687_9 (sequence is synthesized)
ctttcagcgcacaacctcagaaccttaacactgatggaccaaataacactaaccccatgaactcttcacccaaccctatcaatgcaatgcagacaaatggactgccaaactggggcatgg

SEQ ID NO: 74399 - DNA, 120 bp, Artificial Sequence
  ENSG00000078687_10 (sequence is synthesized)
ctgttggtatgggggccatcatcccgccccacctgcaaggccttcctggtgctaatggatcatcagtttctcaagtcagtgggggcagtgctgaaggaataagcaattctgtgtggggac

SEQ ID NO: 74400 - DNA, 120 bp, Artificial Sequence
  ENSG00000078687_11 (sequence is synthesized)
tgtccccaggtaaccctgccacaggaaatagcaattctgggttcagtcaggggaatggagacactgtgaactcagcattaagtgctaaacaaaatggatccagcagtgctgtgcaaaagg

SEQ ID NO: 74401 - DNA, 120 bp, Artificial Sequence
  ENSG00000078687_12 (sequence is synthesized)
aaggaagtggaggaaatgcttgggattcaggacctcctgctggtcctggaatactcgcctggggaaggggcagtggcaacaatggcgttggtaatatccattcaggagcttggggccacc

SEQ ID NO: 74402 - DNA, 120 bp, Artificial Sequence
  ENSG00000078687_13 (sequence is synthesized)
ccagccgaagcacctctaacggtgtgaatggggaatggggaaagcccccaaaccagcattccaacagtgacatcaatgggaaaggatcaacagggtgggagagtcctagtgtcaccagcc

SEQ ID NO: 74403 - DNA, 120 bp, Artificial Sequence
  ENSG00000078687_14 (sequence is synthesized)
agaaccctaccgtacagcctggtggtgaacacatgaactcctgggccaaagcggcatcttctggaactacagcaagtgaaggaagtagtgatggttctggcaaccacaatgaaggaagca

SEQ ID NO: 74404 - DNA, 120 bp, Artificial Sequence
  ENSG00000078687_15 (sequence is synthesized)
ctgggagggaaggaacgggagaaggccgaaggcgagataaagggattatagaccaagggcacatccagttgccaaggaatgatcttgacccaagagttctgtctaatactggttggggac

SEQ ID NO: 74405 - DNA, 120 bp, Artificial Sequence
  ENSG00000078687_16 (sequence is synthesized)
agactcctgtaaagcaaaacactgcctgggaatttgaagaatcccctaggtctgaaaggaaaaatgacaatgggacagaggcctggggttgtgcagctactcaggcttcaaactcagggg

SEQ ID NO: 74406 - DNA, 120 bp, Artificial Sequence
  ENSG00000078687_17 (sequence is synthesized)
ggaagaacgatgggtccatcatgaacagtacaaatacctcttcagtatctgggtgggtcaacgcgccacctgccgctgtgccagcaaacacaggttggggagacagcaacaacaaagcgc

SEQ ID NO: 74407 - DNA, 120 bp, Artificial Sequence
  ENSG00000078687_18 (sequence is synthesized)
caagtggcccgggggtttggggggactcgataagctctactgctgttagtactgctgctgctgccaagagtggccatgcttggagtggggccgcaaatcaggaggacaagtcacccacct

SEQ ID NO: 74408 - DNA, 120 bp, Artificial Sequence
  ENSG00000078687_19 (sequence is synthesized)
ggggtgagcctccaaagcccaaatcccaacactggggagatggacaaagatcaaatccagcctggagtgcaggagggggagattgggcagattcatcgtctgtccttggacacttggggg

SEQ ID NO: 74409 - DNA, 120 bp, Artificial Sequence
  ENSG00000078687_20 (sequence is synthesized)
atgggaaaaaaaatggatctggatgggatgctgacagtaataggtcagggtctggttggaatgacaccacgagatctgggaacagtggctggggcaacagcacaaatacaaaggccaatc

SEQ ID NO: 74410 - DNA, 120 bp, Artificial Sequence
  ENSG00000078687_21 (sequence is synthesized)
caggtacaaactggggggagactttaaaacctggcccccaacagaactgggctagcaaaccccaagacaacaatgtgagtaactggggaggagctgcttctgtgaaacagacaggaacag

SEQ ID NO: 74411 - DNA, 120 bp, Artificial Sequence
  ENSG00000078687_22 (sequence is synthesized)
ggtggatcggggggccggtaccggtcaaacagaaggacagcagtgaagcaactggctgggaagaaccctctccaccgtccattcgccgcaaaatggaaattgatgatggtacctcagctt

SEQ ID NO: 74412 - DNA, 120 bp, Artificial Sequence
  ENSG00000078687_23 (sequence is synthesized)
ggggggacccaagcaactataacaataaaactgtaaacatgtgggatagaaacaacccggtcatccagagcagtaccacgaccaataccaccaccaccaccaccactaccacgagcaaca

SEQ ID NO: 74413 - DNA, 120 bp, Artificial Sequence
  ENSG00000078687_24 (sequence is synthesized)
ccacacacagggtcgagacgccgcccccgcaccaggccggtactcagctgaatcgatcaccgttgcttggtccagtttcatcaggctggggagaaatgcctaatgttcactcaaagactg

SEQ ID NO: 74414 - DNA, 120 bp, Artificial Sequence
  ENSG00000078687_25 (sequence is synthesized)
aaaactcttggggagaaccatcctccccttctaccctggtggataatggcacagcagcatgggggaagccacccagcagtggcagcgggtggggagatcaccctgcagagccgccggtgg

SEQ ID NO: 74415 - DNA, 120 bp, Artificial Sequence
  ENSG00000078687_26 (sequence is synthesized)
catttggaagagctggcgcacctgttgctgcctcagccctgtgcaaaccagcttcaaaatctatgcaagaaggctggggcagtggtggggatgaaatgaacctcagtaccagccagtggg

SEQ ID NO: 74416 - DNA, 120 bp, Artificial Sequence
  ENSG00000078687_27 (sequence is synthesized)
aggatgaagaaggggacgtgtggaataatgctgcttcccaagaaagcacctcctcctgcagctcctgggggaacgcccccaaaaaaggacttcaaaagggcatgaagacgtctggcaagc

SEQ ID NO: 74417 - DNA, 120 bp, Artificial Sequence
  ENSG00000078687_28 (sequence is synthesized)
aggatgaggcctggatcatgagccggctgatcaaacaactcacagacatgggcttcccgagagagccagctgaggaggccttgaagagtaacaatatgaatcttgatcaggccatgagcg

SEQ ID NO: 74418 - DNA, 120 bp, Artificial Sequence
  ENSG00000078687_29 (sequence is synthesized)
ctctgctggaaaagaaggtggacgtggacaagcgtgggctgggagtgaccgaccataatggaatggccgccaagcccctcggctgccgcccgccaatctccaaagagtcttccgtggacc

SEQ ID NO: 74419 - DNA, 120 bp, Artificial Sequence
  ENSG00000078687_30 (sequence is synthesized)
gccccacctttcttgacaaggatggcggcctcgtggaagagcccacgccttcaccgttcttgccttccccaagcctgaagctccccctttcacacagtgcactccccagtcaggccctgg

SEQ ID NO: 74420 - DNA, 120 bp, Artificial Sequence
  ENSG00000078687_31 (sequence is synthesized)
gtgggattgcctccgggctgggcatgcaaaacttgaattcttctagacagataccgagtggcaatctgggtatgtttggcaatagtggagcagcacaagccaggaccatgcagcagccgc

SEQ ID NO: 74421 - DNA, 120 bp, Artificial Sequence
  ENSG00000078687_32 (sequence is synthesized)
cacagccaccagtgcagcctcttaactcttcccagcccagtctccgtgctcaagtgcctcagtttctatcccctcaggttcaagcacagcttttgcagtttgcagcaaaaaacattggtc

SEQ ID NO: 74422 - DNA, 120 bp, Artificial Sequence
  ENSG00000078687_33 (sequence is synthesized)
tcaaccctgcactattaacctcgccaattaatcctcaacatatgacgatgttgaaccagctctatcagctgcagctggcataccaacgtttacaaatccagcagcagatgttacaggccc

SEQ ID NO: 74423 - DNA, 120 bp, Artificial Sequence
  ENSG00000078687_34 (sequence is synthesized)
agcgtaatgtgtccggatccatgagacaacaggagcagcaagttgcgcgcacaatcactaatctgcagcagcagatccagcagcaccagcgccagctggcccaggccctgctcgtgaagc

SEQ ID NO: 74424 - DNA, 120 bp, Artificial Sequence
  ENSG00000078687_35 (sequence is synthesized)
agccaccaccgccaccgcccccgccgcacctgtctctgcacccctctgcaggcaaatcggccatggacagcttcccctcgcacccacagactcccggcctacctgacctgcagaccaaag

SEQ ID NO: 74425 - DNA, 120 bp, Artificial Sequence
  ENSG00000078687_36 (sequence is synthesized)
agcagcagtcttcacccaacacctttgctccttaccctctcgctggactgaacccaaacatgaatgtcaacagcatggacatgaccggtggcttgtcggtgaaggacccatcccagtccc

SEQ ID NO: 74426 - DNA, 120 bp, Artificial Sequence
  ENSG00000078687_37 (sequence is synthesized)
agtcacgcctcccccagtggacgcaccccaactccatggataacttgcccagtgccgcttcccccctggagcagaaccctagcaagcatggtgctatccctggaggtctaagcattgggc

SEQ ID NO: 74427 - DNA, 120 bp, Artificial Sequence
  ENSG00000078687_38 (sequence is synthesized)
ctccaggtaagtcctccattgatgactcctatggccggtacgatttaatccagaacagtgagtcaccagccagtcctcccgtagctgttccccatagctggtcacgtgccaaatctgaca

SEQ ID NO: 74428 - DNA, 120 bp, Artificial Sequence
  ENSG00000078687_39 (sequence is synthesized)
gtgataaaatctcaaatggctctagcatcaactggcccccagaattccatccgggagttccatggaaaggactgcagaatattgaccctgagaatgaccctgacgtcactcctggcagtg

SEQ ID NO: 74429 - DNA, 120 bp, Artificial Sequence
  ENSG00000078687_40 (sequence is synthesized)
aacaccaccatccaggatgtcaaccgctacctcctcaagagtggagggtcctccccgccatcatctcagaatgccacgctgccttcttcgagtgcctggccactcagtgcctccggctac

SEQ ID NO: 74430 - DNA, 120 bp, Artificial Sequence
  ENSG00000078687_41 (sequence is synthesized)
agtagctctttcagcagcattgcatccgcacctagtgttgcaggtaaactgtcagacatcaaatcgacgtggtcctctggccctacctcccacacgcaagcctctctgtctcatgaacta

SEQ ID NO: 74431 - DNA, 120 bp, Artificial Sequence
  ENSG00000078687_42 (sequence is synthesized)
tggaaggtgcccagaaacagtactgcacccacgaggccacctccagggttaaccaatcccaagccctcctccacctggggtgccagccccctcggctggaccagctcctactcctcgggt

SEQ ID NO: 74432 - DNA, 120 bp, Artificial Sequence
  ENSG00000078687_43 (sequence is synthesized)
tctgcctggagcaccgacacctcaggaagaaccagcagctggctcgttcttcgaaacctcactccccagattgatggttctacactgcggacattgtgtttgcaacatgggcctcttatc

SEQ ID NO: 74433 - DNA, 120 bp, Artificial Sequence
  ENSG00000078687_44 (sequence is synthesized)
acattccacctgaatctgactcaaggcaatgctgtggtccggtacagctccaaggaggaggctgccaaggcccagaagtctctgcacatgtgcgtcctgggaaacactaccatcctggcc

SEQ ID NO: 74434 - DNA, 120 bp, Artificial Sequence
  ENSG00000078687_45 (sequence is synthesized)
gagttcgctggtgaagaagaagtgaatcgcttcttagcccaaggccaggcgctgccacccacttccagctggcagtccagcagcgcgtccagccagccgcggctcagcgcagcgggcagc

SEQ ID NO: 74435 - DNA, 120 bp, Artificial Sequence
  ENSG00000078687_46 (sequence is synthesized)
tcccatggcctggtacgcagcgacgctggccactggaacgccccgtgcctgggtggcaaggggagcagtgagctgctgtggggcggggtgccccagtactccagcagcctgtggggcccg

SEQ ID NO: 74436 - DNA, 120 bp, Artificial Sequence
  ENSG00000078687_47 (sequence is synthesized)
cccagcgccgacgacagcagggtgataggcagccccacgccgctaaccaccctgctgcctggggacctgctcagcggggagtccctgtaggctctgccatcatcagcaccaggagagccg

SEQ ID NO: 74437 - DNA, 120 bp, Artificial Sequence
  ENSG00000078687_48 (sequence is synthesized)
acccctcccgggacccctcccggctgggcggccccacagacccgctggaacccagcagcggccgcccttttgagtacctctgtccaggactgaagacgaaccttggccgcagtccttgcg

SEQ ID NO: 74438 - DNA, 120 bp, Artificial Sequence
  ENSG00000078687_49 (sequence is synthesized)
aactgttcgcaaaacagtgcgggctgcggtgggtcagcgtcacatgctaatgacaggatgttcctcgtagctttttattttgtgcgtcttatgtttgtatagtgtgttgtcattttgatt

SEQ ID NO: 74439 - DNA, 120 bp, Artificial Sequence
  ENSG00000078687_50 (sequence is synthesized)
ttttttttttttttaagtataaaagctgcttagaatagttctatcatgaagggcacttttcagattgtgggctggaaagggttattttatctgtgggggagggagggagacgtgaagcct

SEQ ID NO: 74440 - DNA, 120 bp, Artificial Sequence
  ENSG00000078687_51 (sequence is synthesized)
atttaaaatgagcctgtgacgattatgcacatgaccagaggcggccggtaatcagggcagagtctggtgtggaccgccgggcgcagagcggctccgcggcgggagctgagcggaaggcgc

SEQ ID NO: 74441 - DNA, 120 bp, Artificial Sequence
  ENSG00000078687_52 (sequence is synthesized)
gggctgcgatctgctctctgttcccctggatccgcctatgcacattacccttgtttcattactttttcatgtcatttttttatcccaaaaaatattttttaaaagttaaaaaaagacata

SEQ ID NO: 74442 - DNA, 120 bp, Artificial Sequence
  ENSG00000078687_53 (sequence is synthesized)
tcaaacatgcaaatacttgaatccagcaggccaatagtgaaatgtgaacactttctaattctacacttccaggttgacatcagtacacagaaacaggctctaggaaaaatttctaagttc

SEQ ID NO: 74443 - DNA, 120 bp, Artificial Sequence
  ENSG00000078687_54 (sequence is synthesized)
atagcctacgtgtgtgtatgtgtgcgtgttgaaacagaagtgtgtgtgtgtgtgcatgtgtggcgcgtgctcctgcacggcgtgcagttttctgtgtttgtgtgtttgaaagcgtgtgag

SEQ ID NO: 74444 - DNA, 120 bp, Artificial Sequence
  ENSG00000078687_55 (sequence is synthesized)
gatttaactgtgggttttcccttgtattcagtatacgctttttttttggcgcattggtcaaacggttgttattattagcttctaactttgcactgagtgtcctcgcccttcctttagcta

SEQ ID NO: 74445 - DNA, 120 bp, Artificial Sequence
  ENSG00000078687_56 (sequence is synthesized)
atcctatacattacagagaattcctaggacagggctggcgacaattcatgtgtaaatgtttactcaaggactctgtgactgcgtttaaaaagtacagtgtatatctctggagaaataaca

SEQ ID NO: 74446 - DNA, 120 bp, Artificial Sequence
  ENSG00000078687_57 (sequence is synthesized)
tgtatacctacctttagcagctttttattgtggactaatgcaagaaaattattaccagagtattgcaccatttttccatttggaatataaagttaaagagaaaaaaaaaaaaaactgttg

SEQ ID NO: 74447 - DNA, 120 bp, Artificial Sequence
  ENSG00000078687_58 (sequence is synthesized)
ttgaactgtggccatagatacttgtaaagaatggatggttccgtggaaggaacagaaacaagcacttgggcgtgggttgtgactgcttttgggggagcctggggtttgggctcccacctg

SEQ ID NO: 74448 - DNA, 120 bp, Artificial Sequence
  ENSG00000078687_59 (sequence is synthesized)
tttacagacctttttttctccttcagactttaaaattttaaaaatttaaaaaggaattaaaaaaaaaaaaagacttccgtcgtaaagaaacctattttcagaatgcagatgcgttccttc

SEQ ID NO: 74449 - DNA, 120 bp, Artificial Sequence
  ENSG00000078687_60 (sequence is synthesized)
agagctctgggacgggacagtgttgttccctcggccatcgtcgtggactctgtcgattgctttcgccccttcgtcaaggtgacaggcgttgtggccactgtcttgcacatgccggacgcg

SEQ ID NO: 74450 - DNA, 120 bp, Artificial Sequence
  ENSG00000078687_61 (sequence is synthesized)
cggacgcgctctcaggaaagccagggctcccgagggcagctccacaccatttcatgtatttttaaacccaactcctagcactgaagatgttatttaaaaaaaaaaaaaacaaaacaaaac

SEQ ID NO: 74451 - DNA, 120 bp, Artificial Sequence
  ENSG00000078687_62 (sequence is synthesized)
gaaaaaaaagaaaaagaggaaaaaaaaacacaaagaagaaaaatacctaatctctaatgtgtagcagttacatatttaccaaataatggactcaaaagaaatagatgtttgaagagtgct

SEQ ID NO: 74452 - DNA, 120 bp, Artificial Sequence
  ENSG00000078687_63 (sequence is synthesized)
ttatatattaaaaattgctttatgttttaaaaatgatcaatgttttgattgttttgcaaggaagaaagacaatggaataacataccttcaagtatgttttaaaaaatatatatatgaaca

SEQ ID NO: 74453 - DNA, 120 bp, Artificial Sequence
  ENSG00000078687_64 (sequence is synthesized)
ttttaaaaaatatatatatgaacattgtgctccctgcctgcttgatcaggaaacttgtgcattacatttttttaattagctttttaatggttttatcaaaacaaaaaaaatacaaaaaaa

SEQ ID NO: 74454 - DNA, 120 bp, Artificial Sequence
  ENSG00000078687_65 (sequence is synthesized)
agatccacaaaagctggttttatagaggatcatgaactatgcacaaactgggttcaagactttttttctcaagtttagtaggatatttagaaaaaccaaccttcctcagagtgactgcat

SEQ ID NO: 74455 - DNA, 120 bp, Artificial Sequence
  ENSG00000078687_66 (sequence is synthesized)
ctcattgccattacatgcgttctatatattcgatggacatacacctgcgtatgtatatccaatatgtgtgcgtgtgagcatgcgtgtgcgtatgtgcgtccgacataccacttcccgtgc

SEQ ID NO: 74456 - DNA, 120 bp, Artificial Sequence
  ENSG00000078687_67 (sequence is synthesized)
tgccggcgagcattgagttgtagaaaaactgttgttttaaaattggggatggaagtcaagaatatgtttgtttgtttttgggttttgttgggtttgaggggttttttgtttgtttgtttt

SEQ ID NO: 74457 - DNA, 120 bp, Artificial Sequence
  ENSG00000078687_68 (sequence is synthesized)
ttgttttttttaccttttattttgaacttaatatgtctgtaactctgagattaaacaacaagttcgtggctcttaatgttttcctcatagaatgtgactgttgaagaacatgcatcgaaa

SEQ ID NO: 74458 - DNA, 120 bp, Artificial Sequence
  ENSG00000078687_69 (sequence is synthesized)
gttgctttcgaaagtacaacgctttattgaatcttaataaattgcaatttttttcttggctgttcaaagtaatgtgtttttcatttttcaaaagacactatggatgtctactttgcacgc

SEQ ID NO: 74459 - DNA, 120 bp, Artificial Sequence
  ENSG00000078687_70 (sequence is synthesized)
tgcgattgggagagctgtcccgctgcatgcgttccctctgtaatttcctcagagctcacatacgtacctctctcacgagtgaactcagattttccattgttttgctttattctatcattt

SEQ ID NO: 74460 - DNA, 120 bp, Artificial Sequence
  ENSG00000078687_71 (sequence is synthesized)
gctttgtggttttgctgtaaatattgaaatcttaatcatcatcgagaggcacagccaagctttccagctctccacccccgtggcccatccaagtctgttcatctggtaacttctgttgtc

SEQ ID NO: 74461 - DNA, 120 bp, Artificial Sequence
  ENSG00000078687_72 (sequence is synthesized)
tgggacggcagcaagaagatgccggggcttgcctggagtcctggcagaggagtgccactcacttttgcctagggtccagttggggcttaaaaaatatttggagagaagagtaatgaggat

SEQ ID NO: 74462 - DNA, 120 bp, Artificial Sequence
  ENSG00000078687_73 (sequence is synthesized)
tttttgtgtttcctagacattttatgcatctatttttgtaaaatcaccttcgctaactttcaccaagcactttgagcacagtggaacttcagaagcacaaccagcctaaccccagaatct

SEQ ID NO: 74463 - DNA, 120 bp, Artificial Sequence
  ENSG00000078687_74 (sequence is synthesized)
caggtggcacagctagaaattgagtcccttcctaggacactggccgtggccttcagggtgaccagtcagtgccaccgggttggcattggtgttacagacaggcctctgaagacaaaccga

SEQ ID NO: 74464 - DNA, 120 bp, Artificial Sequence
  ENSG00000078687_75 (sequence is synthesized)
gcaccccagcggcccctcaaactaagcaaggatcttttttctgtctgcgctccctggggcaaggtcaaaggtggacccgcccactgtgggtcaattccttcgaaaagatgggacccgcac

SEQ ID NO: 74465 - DNA, 120 bp, Artificial Sequence
  ENSG00000078687_76 (sequence is synthesized)
ccccgccacaggctggcccccccccacccatggggaaggtggtgtgctgctggctctgaccatactcttttggaaattgagaaggaaagcattgagtgggacctaatccggagaagaaat

SEQ ID NO: 74466 - DNA, 120 bp, Artificial Sequence
  ENSG00000078687_77 (sequence is synthesized)
taaagaccagaaaaagaaggaagctgggaatgaaactcaaaatgcacttgaacctggaagcggcaaccctcagctctgcgcggccgagcctcagcaagagttcgttttgtgcctgagtta

SEQ ID NO: 74467 - DNA, 120 bp, Artificial Sequence
  ENSG00000078687_78 (sequence is synthesized)
ctactacaggggcaaactgtacccgtgcctgtgcgctgggagaacaaggtcagcgcccaagggtgtgcaaaggatgtggcaggcttcatggaggaggtggcatttgccctgggcctggga

SEQ ID NO: 74468 - DNA, 120 bp, Artificial Sequence
  ENSG00000078687_79 (sequence is synthesized)
gaccaggttggattttgacagactgggaactcgggggacaggagggcagcacagtgtaagctaaagccctgtgtagggaccccacgcaaagacctcgtgggcctgggtgtccagggcacc

SEQ ID NO: 74469 - DNA, 120 bp, Artificial Sequence
  ENSG00000078687_80 (sequence is synthesized)
atttccacccatgggtgaaaaagaggcttgaggaagacaacaggttcttcacctgcatctgtggatatatatttttttaagtttattaaatttttttttaaatggcagtttcagacctgc

SEQ ID NO: 74470 - DNA, 120 bp, Artificial Sequence
  ENSG00000078687_81 (sequence is synthesized)
ccgccgccgccgccggggacggagcccagggagaaagagcaagaaacacaagaagaggaacgtttgatggaagaaaagaaaaagaaaaagcaggaagaaaagaaaaagaaggaaggtgct

SEQ ID NO: 74471 - DNA, 120 bp, Artificial Sequence
  ENSG00000078687_82 (sequence is synthesized)
agggagggttcccgcttggcccccaatgcagatgaggctgtctggtggggcaggatagttgggggttcttggtcagggtccataagtgacgctgcatgggaggagatgagcaagtgccag

SEQ ID NO: 74472 - DNA, 120 bp, Artificial Sequence
  ENSG00000078687_83 (sequence is synthesized)
gattggctccagcagcggcagcagatggggcccaggggcctcttttaaccatgttcctggtgaattgtttgtttccccaccagaggctggaaaagtgtgctctgtaaatagaattgttta

SEQ ID NO: 74473 - DNA, 120 bp, Artificial Sequence
  ENSG00000078687_84 (sequence is synthesized)
ctgcagagagtgattaggctgagaggacccagaatctgagctaaggatctggaagcgttaagcccagagctttggcattttccttggaaatccatttgtcagatcaattttgggtatggt

SEQ ID NO: 74474 - DNA, 120 bp, Artificial Sequence
  ENSG00000078687_85 (sequence is synthesized)
ggctgggcatgcaaaacttgaattcttctagacaggtaaggctgtttggagagagcaaaacatggcctttgttttacctgccttctaaaaaatgtgtttgagacataaacttacttattt

SEQ ID NO: 74475 - DNA, 120 bp, Artificial Sequence
  ENSG00000078687_86 (sequence is synthesized)
atagttaatacctctatttttaaatgtgactgaaaaagtagttgaaatactaccaggatttcccttcaggtgacttactggagtcaagagttgaagtaggaaatgctttagttatattta

SEQ ID NO: 74476 - DNA, 120 bp, Artificial Sequence
  ENSG00000078687_87 (sequence is synthesized)
ttcttacacttaactaaaacgtgtttgagctctcagcacccttggtgctaacttgggactggctaaagtgatgatgtgttgcacagtggtcttcggctgccggatgcatccagaggtcca

SEQ ID NO: 74477 - DNA, 120 bp, Artificial Sequence
  ENSG00000078687_88 (sequence is synthesized)
ggtagtgcccaccctctttcctcatggcaaccaaaacgacgttacatctgttgatctgcgagaaagcaccacattctccccctttttcccagaaataaagatgacatctcttgcaaggtg

SEQ ID NO: 74478 - DNA, 120 bp, Artificial Sequence
  ENSG00000078687_89 (sequence is synthesized)
ctttcttgacaaggtatgaatataggtggtttgttgtttttgcttttttaacaagaggagtttttcatttcaactgtgtccttaatacaagccagattaaaaacttgctggactataata

SEQ ID NO: 74479 - DNA, 120 bp, Artificial Sequence
  ENSG00000078699_0 (sequence is synthesized)
ggcggcggcgacggcgacagcagcggtggtggtgtctggttagctcggcggctgcagatctcgcggcgacgcctgcgagggacccgggccgcgggtcgaggcgggcggcgcctgcgaggg

SEQ ID NO: 74480 - DNA, 120 bp, Artificial Sequence
  ENSG00000078699_1 (sequence is synthesized)
cgcctgcgagggacccgtgtcgcgggtagaggcgggcggcgcgcggcggcggcgctcggcgatggtaggcgtccctggagcggccgccttccagcttggtcctgagaaaagggtgccagc

SEQ ID NO: 74481 - DNA, 120 bp, Artificial Sequence
  ENSG00000078699_2 (sequence is synthesized)
gatgcctggatcgcctgtggaagtgaagatacagtccagatcctcacctcccaccatgccacccctcccaccaataaatcctggaggaccgaggccagtgtccttcactcctactgcatt

SEQ ID NO: 74482 - DNA, 120 bp, Artificial Sequence
  ENSG00000078699_3 (sequence is synthesized)
aagcaatggcatcaaccattctcctcctaccctgaatggtgccccatcaccgccacagagattcagcaatggtcctgcctcctccacatcatctgcactcacaaatcagcaattgccagc

SEQ ID NO: 74483 - DNA, 120 bp, Artificial Sequence
  ENSG00000078699_4 (sequence is synthesized)
cacttgtggtgctcgacaactcagcaagttgaaacgctttcttaccactctgcaacagtttggcaatgacatctcccctgagattggggagaaggtgcggactcttgttcttgcactggt

SEQ ID NO: 74484 - DNA, 120 bp, Artificial Sequence
  ENSG00000078699_5 (sequence is synthesized)
gaactcaacagtgacaattgaggaattccactgtaagctccaagaagccacaaactttccccttcgtccttttgtgattccatttctcaaggccaacctgcccctgctgcagcgggaact

SEQ ID NO: 74485 - DNA, 120 bp, Artificial Sequence
  ENSG00000078699_6 (sequence is synthesized)
gctgcactgcgctcgggcggccaagcagaccccatcccagtacctggctcagcacgaacaccttctgctcaacacaagcattgcatcgcctgctgactcgtcagagttgctcatggaggt

SEQ ID NO: 74486 - DNA, 120 bp, Artificial Sequence
  ENSG00000078699_7 (sequence is synthesized)
gcacggaaatgggaagaggcccagtccagagaggagagaagagaatagttttgatagagacacaattgctcctgagcctcctgccaagagagtatgtaccatcagccctgctcctcggca

SEQ ID NO: 74487 - DNA, 120 bp, Artificial Sequence
  ENSG00000078699_8 (sequence is synthesized)
cagtcctgctctcactgtgcccctcatgaatcccgggggccaattccatcctacccctccacctcttcagcattacaccttagaggatattgcaacttctcacctgtatcgggaacccaa

SEQ ID NO: 74488 - DNA, 120 bp, Artificial Sequence
  ENSG00000078699_9 (sequence is synthesized)
caagatgctagagcatcgagaagttcgtgatagacaccacagtcttggtctaaatggaggctatcaagatgagttggtagatcatcgtttgacagaaagggaatgggctgatgaatggaa

SEQ ID NO: 74489 - DNA, 120 bp, Artificial Sequence
  ENSG00000078699_10 (sequence is synthesized)
acatcttgaccatgcgctgaattgcattatggaaatggtagagaaaacaaggcgctctatggcagttctgcggcgctgtcaggaatcagatcgtgaagaactcaactactggaaaagacg

SEQ ID NO: 74490 - DNA, 120 bp, Artificial Sequence
  ENSG00000078699_11 (sequence is synthesized)
tcaacagcaggccaggtacaggatacgtacctgtggagttttggaaaaaaacagaagaagctgtgaataaggtgaaaattcaggccatgtcagaagtacagaaggccgtcgctgaggcag

SEQ ID NO: 74491 - DNA, 120 bp, Artificial Sequence
  ENSG00000078699_12 (sequence is synthesized)
agcagaaagcctttgaagtgattgcaacagagagagcacgaatggagcaaaccatagcggatgtcaagcggcaggccgcagaggatgctttcctcgtcatcaatgagcaagaggagtcca

SEQ ID NO: 74492 - DNA, 120 bp, Artificial Sequence
  ENSG00000078699_13 (sequence is synthesized)
cggagaactgctggaactgtggccgcaaagccagcgagacatgcagtggctgcaatatcgcgcgatactgtggctctttctgccagcacaaggactgggagcggcaccaccgcctctgtg

SEQ ID NO: 74493 - DNA, 120 bp, Artificial Sequence
  ENSG00000078699_14 (sequence is synthesized)
gtcagaacctgcatggccagagcccccacggccagggccggccgctgcttcctgtaggcaggggctcctctgccaggtccgccgactgcagcgtgcccagcccagccctcgacaagacct

SEQ ID NO: 74494 - DNA, 120 bp, Artificial Sequence
  ENSG00000078699_15 (sequence is synthesized)
cggcaaccacatcgcgttcctcaacacctgcttctgtgacagctatcgacaccaacggactctgagccccggactctgcttaccctgatggctgctcagcaccacagagtgcttgggctg

SEQ ID NO: 74495 - DNA, 120 bp, Artificial Sequence
  ENSG00000078699_16 (sequence is synthesized)
agggactgactgttggaacccgtgcatgtagctgccgggtcatcagcaagaaatgaattggaggcaggaagagtccaagcctgaataataacaccccacagcctctctgtgcacttgctg

SEQ ID NO: 74496 - DNA, 120 bp, Artificial Sequence
  ENSG00000078699_17 (sequence is synthesized)
tctgcggagccagtgtgccattctctgcacatgggcagccagcctgagctgcctcctccatggctttcctggtttgttcctctctccactgaagctgacttagccggccccttttcagtg

SEQ ID NO: 74497 - DNA, 120 bp, Artificial Sequence
  ENSG00000078699_18 (sequence is synthesized)
tagaccaccagctcccctccccatctccttgagtcagcagactgtccaatgtgctcagccaggctggaggcggcaggcggcaggcagcaggctgtggaggaggcccctcggtcagggagc

SEQ ID NO: 74498 - DNA, 120 bp, Artificial Sequence
  ENSG00000078699_19 (sequence is synthesized)
ggcctgcctcacccctgaatagctccttcggccccatctccatcctcagcagatgacactgattggcctcacggggacttgggtaagcaacaggcggcattcaggactcttctcaaccct

SEQ ID NO: 74499 - DNA, 120 bp, Artificial Sequence
  ENSG00000078699_20 (sequence is synthesized)
gctgttcagacttgataagatctcagagtccacaggaaagaagtcactgttgcaataaaagcacccgtagtagcaaaaacataaaacaaataaaacttcccccacatcacagatgatttt

SEQ ID NO: 74500 - DNA, 120 bp, Artificial Sequence
  ENSG00000078699_21 (sequence is synthesized)
ggacaagattttccaaccttgctggctactttagtttgggacctgttttttttctcatttgattttgcttgtgcagaaaatagtttccagcacatggattgatctgagagagaatgaggc

SEQ ID NO: 74501 - DNA, 120 bp, Artificial Sequence
  ENSG00000078699_22 (sequence is synthesized)
tcagttgtggatagtctgttttctctgagcatgttggccaactagtatcgtcaaattattgagtggatcatctcttggaaatgcagaacttctgccaccacttggctatttgcacagtca

SEQ ID NO: 74502 - DNA, 120 bp, Artificial Sequence
  ENSG00000078699_23 (sequence is synthesized)
ggagggagaaaaagagagagactgactgtatctggggattctggcaaggtgaagagctggtctgtttggcaggaccttcccatctgggatccatctgtgtttccctggaatgggacaggc

SEQ ID NO: 74503 - DNA, 120 bp, Artificial Sequence
  ENSG00000078699_24 (sequence is synthesized)
agctctagtcagtgagaaatcgcagatgtgagagagctgacacatgtccagctaatgaaaggaggaggaaggctggtctccgattgagctttgaagattaggaggagaaaaagaggagct

SEQ ID NO: 74504 - DNA, 120 bp, Artificial Sequence
  ENSG00000078699_25 (sequence is synthesized)
ggaacgctgtgggcatcttctgcccatgggctccatttggcacctgctgagccacagttgtcctgctggatgtgctgtgcaggttggtaggacttgcccccactgtcaaggcctggtctc

SEQ ID NO: 74505 - DNA, 120 bp, Artificial Sequence
  ENSG00000078699_26 (sequence is synthesized)
atctgaaaagccctcctggacctcaaagaattcttcagacctcatagttacaggtcattatatctactatgttgatttatcatcaggcacacaacttctgtttccttctcttgtgttatc

SEQ ID NO: 74506 - DNA, 120 bp, Artificial Sequence
  ENSG00000078699_27 (sequence is synthesized)
tgatagcgtccctccttgagctcatcagaaaggttttatgaaatgtgaaccattttgggaaaagctgatcaatttttcttcctagcttcccattttcaaatgggacatcactcatatccc

SEQ ID NO: 74507 - DNA, 120 bp, Artificial Sequence
  ENSG00000078699_28 (sequence is synthesized)
cactcatatccctttcagaatgttaggaactgcctcccacattcttccctgtctttttgggttttgttttttgttgttgtggtggttttttaacacaaagtctcactctgttgcccaggc

SEQ ID NO: 74508 - DNA, 62 bp, Artificial Sequence
  ENSG00000078699_29 (sequence is synthesized)
cgaactcctgacctcaggtggtctttttggttttgatgggagtctgaggaccccgacccctc

SEQ ID NO: 74509 - DNA, 120 bp, Artificial Sequence
  ENSG00000078699_30 (sequence is synthesized)
tttgatgggagtctgaggaccccgacccctcctgctctccatctttgagcctctggcatcctctcacacccagaaatcagttggagtaagtttaattggccctgctccagctggcctttg

SEQ ID NO: 74510 - DNA, 120 bp, Artificial Sequence
  ENSG00000078699_31 (sequence is synthesized)
aagcacaagtttaaatctccaccttctgtgcactgaccagagtctaaaataaaagttgtcagtaccataaaggaaaagggatccacacaggtagccttctccttggatacaggtacatct

SEQ ID NO: 74511 - DNA, 65 bp, Artificial Sequence
  ENSG00000078699_32 (sequence is synthesized)
atccacacaggtagccttctccttggatacaggtacatcttactgtaagaatttcaagtcaggca

SEQ ID NO: 74512 - DNA, 71 bp, Artificial Sequence
  ENSG00000078699_33 (sequence is synthesized)
aaaattaaagaatttcaagtccctaatttactctaaccaagcattttcagtcttacaaagaaatctagtgc

SEQ ID NO: 74513 - DNA, 120 bp, Artificial Sequence
  ENSG00000078699_34 (sequence is synthesized)
tctaaccaagcattttcagtcttacaaagaaatctagtgcacgacacctttaaaatgcctagatttccattgcctaaagtaaggtgtgaccagtgaaacaacagcagagaatcatgttcc

SEQ ID NO: 74514 - DNA, 120 bp, Artificial Sequence
  ENSG00000078699_35 (sequence is synthesized)
tttgctgtggaacacataagccccacagttttccagtcagcctaatacatgggtatcccccgaccccatctgcctccttaagccacagtccttggtggggaactctaagggggacggagt

SEQ ID NO: 74515 - DNA, 120 bp, Artificial Sequence
  ENSG00000078699_36 (sequence is synthesized)
cagtaccccggacagggccacatttgcatgagacatggctgtctcacaggtcacagagccattacaacagcttactagtttttcatggatttgttggattaacaccttaagcaggttttt

SEQ ID NO: 74516 - DNA, 120 bp, Artificial Sequence
  ENSG00000078699_37 (sequence is synthesized)
tattgttattttgtttgtttgtttgttttgagacgggagtttctctcttgtctcccaggctggagtgcaatcgcgcaatctcggctcacggtaacctctgcctcccaggttcaagcgagt

SEQ ID NO: 74517 - DNA, 120 bp, Artificial Sequence
  ENSG00000078699_38 (sequence is synthesized)
tgccaggattacaggcatgagccactgtgtccggtcttgagcaggtttttaaaatctccagtggccataaaactagccagggtagctcatgcttttactggttggaataaggagccaaaa

SEQ ID NO: 74518 - DNA, 120 bp, Artificial Sequence
  ENSG00000078699_39 (sequence is synthesized)
gctcatgcttttactggttggaataaggagccaaaaccaacaaaataatatttattagggctcgatgcccatttctgtggctaaggcttaggtttggtgtgcagagcctggcctgctctt

SEQ ID NO: 74519 - DNA, 120 bp, Artificial Sequence
  ENSG00000078699_40 (sequence is synthesized)
gtgggctgtggttgctgtgacagtttcgttttctgaatctttgtaatgctcttccaccctgctcgtgctgcccagaggctgatctgcaaacctgggcagtattccacactgaagctcagt

SEQ ID NO: 74520 - DNA, 120 bp, Artificial Sequence
  ENSG00000078699_41 (sequence is synthesized)
ttgcaaaccttctgctgtgttaattctggtcagtttcacacagaagtcacgagggcctctgcccaggaccttctattcacatttcaagaatccctttctgaaattctccaactctctggt

SEQ ID NO: 74521 - DNA, 120 bp, Artificial Sequence
  ENSG00000078699_42 (sequence is synthesized)
caggaggaggagcaccattggggcggggtaggcagctagaggcgcaggagcgaatccaggttccttgcgtggttcccagcctctgctgacagcacctcagctaccaggtggggagtggaa

SEQ ID NO: 74522 - DNA, 120 bp, Artificial Sequence
  ENSG00000078699_43 (sequence is synthesized)
attcagcctgcttagaggactgacctctacagttcatatttgcagtgacataaaaggcaaagaggagctggcatggtggtacagaaggtatcagtcaagcgcaggctcttcagaaaccta

SEQ ID NO: 74523 - DNA, 120 bp, Artificial Sequence
  ENSG00000078699_44 (sequence is synthesized)
gaaactaaaaagagatgcaacatgtgactggccatcagccagacatgtctagggtgagaccagtgctcagcaccacccgccaaggaacactgatgagttgtgggacattatggtcggcca

SEQ ID NO: 74524 - DNA, 120 bp, Artificial Sequence
  ENSG00000078699_45 (sequence is synthesized)
agtgaggaatgattgcagggaccagagaagaccaaagatgccagatgtccccagagtttcttgagggctgggtttcacgtctttgcttgtcctttttgtccccacttgcctgcaccgtgc

SEQ ID NO: 74525 - DNA, 120 bp, Artificial Sequence
  ENSG00000078699_46 (sequence is synthesized)
ctgactcatccagtggggaaggtgactcaagaagttgtttaagcctaggcctaggcagtccacttcgggaggtgggggcactccacactggggggccctgcagctccagggctggtgctc

SEQ ID NO: 74526 - DNA, 120 bp, Artificial Sequence
  ENSG00000078699_47 (sequence is synthesized)
tagcagatccgctcaggcacggttgggtgaccgtggggtcaccgattgcgtagattatttctagggcagtgctgggttagaaatgtctgtctggaaacaggacacatcttgccaccacaa

SEQ ID NO: 74527 - DNA, 120 bp, Artificial Sequence
  ENSG00000078699_48 (sequence is synthesized)
gtccacacctggccttggctgctgcccgctctctgcagcgtggatttcctttgcccatttgggccagaaggtcaccaggagttcatcactgcttagtgtcaacttgacatcttcagcttc

SEQ ID NO: 74528 - DNA, 120 bp, Artificial Sequence
  ENSG00000078699_49 (sequence is synthesized)
cagacagaaaacccatgctttactttgtacagccctgtcccagagttagtaagcctcggcttgtcacctgcttgcaaagggtatagacatcattctgggtagttctagaggatatcgcaa

SEQ ID NO: 74529 - DNA, 120 bp, Artificial Sequence
  ENSG00000078699_50 (sequence is synthesized)
caagtgcgtttgaaggttcagcacagctggaattgtacggtagtgagctcttcaaaatgaaaacagaatgaccggatggccatctgtcctggaaactgtagaattgaataaatcactgaa

SEQ ID NO: 74530 - DNA, 120 bp, Artificial Sequence
  ENSG00000078699_51 (sequence is synthesized)
aatagaacacttcttggaggctttcttcagaactgaactagaaacaaggtttccaggctcccaggtcagtagaccaaaccaacttccttagatttttttttttaagctgtttgcagaaaa

SEQ ID NO: 74531 - DNA, 120 bp, Artificial Sequence
  ENSG00000078699_52 (sequence is synthesized)
ctgggtggtagcgtgtctgaaccaaacggaagaatagccagcggagcatggactgttccagcacgggccagatggccagctgtcgagagcagccctgcccagattgcggtgggggctgtg

SEQ ID NO: 74532 - DNA, 120 bp, Artificial Sequence
  ENSG00000078699_53 (sequence is synthesized)
ccagcggctccgcagggcccttccaactctggagtgtctgtagttcttgtgaaaccaaaacgttgactacctgcctctttcctcgggcatcgacgtgctcatttccaaagatgatggtgc

SEQ ID NO: 74533 - DNA, 120 bp, Artificial Sequence
  ENSG00000078699_54 (sequence is synthesized)
aggtgaccttttccatcgtgagctaagagaaggttaggaggcctgaggggcgggccttgtgtcccctcctccccctccacagcccctgaggtggagcttccctcacagaccccatctggt

SEQ ID NO: 74534 - DNA, 120 bp, Artificial Sequence
  ENSG00000078699_55 (sequence is synthesized)
cgagcctacggctgcccagtgtacactcagtgatgcttataccaaatagggcatgtgcgctggtgtctgttggggacagccccatccctaccttggagtcggcagagaagcagcaataag

SEQ ID NO: 74535 - DNA, 120 bp, Artificial Sequence
  ENSG00000078699_56 (sequence is synthesized)
cattaggcgaatgattgaaagggctgctgcgccaagaggccttcagtccccttaacgtggctttccaacttcctgacgaggctacaaaggctccgctcacaaaagaaagccaataatgta

SEQ ID NO: 74536 - DNA, 120 bp, Artificial Sequence
  ENSG00000078699_57 (sequence is synthesized)
aataaatagaaaacgaagcctccacgcgtggtttttaaagggggatgatgaatgtgacaccacccacagaatgcattagaatctggtttttctgtgctttgtcattttactctgatagga

SEQ ID NO: 74537 - DNA, 120 bp, Artificial Sequence
  ENSG00000078699_58 (sequence is synthesized)
atttttgttacctaactctgtgcataacttatttaatgtactgtataaatgaaccaaaactgttaaatatgtatttagtttgttctacttaaagtagtcaataaaaaggctatattcctt

SEQ ID NO: 74538 - DNA, 120 bp, Artificial Sequence
  ENSG00000078699_59 (sequence is synthesized)
caaataaatttggtgtatttaagaatctggattgtttataatttgggcatttgggaggtggggttttgccatgttgcccaggtgggtctcaaactcctgggctaaagcgatcttcccatg

SEQ ID NO: 74539 - DNA, 120 bp, Artificial Sequence
  ENSG00000078699_60 (sequence is synthesized)
ctgggattacaggcaagagccaccataccagttcctgtctagatattatgatgaagattgaggatggtagtttttgtggagcacaatcctgactgtacctgtgatgttgcattcatcttt

SEQ ID NO: 74540 - DNA, 120 bp, Artificial Sequence
  ENSG00000078699_61 (sequence is synthesized)
tgttgcattcatcttttggaacataagcagatcaccaggtgaatggctaaagaatctggaataagcttgaaagaaatacaggtcctggcaaggcaatggaaagggtctcaccctgtcact

SEQ ID NO: 74541 - DNA, 120 bp, Artificial Sequence
  ENSG00000078699_62 (sequence is synthesized)
ttcagatgcctgcacacccggtaagaaactctactctagagaatttatgggtcgactgttccagaagcctcaggagtacagttctgccttttccttgatgctgtttgtagaaagaattgg

SEQ ID NO: 74542 - DNA, 120 bp, Artificial Sequence
  ENSG00000078699_63 (sequence is synthesized)
gtattttgggacttcacattcacattctcattgggctgaggctcaaacatatggaatgtgttattttgcagcgtctacattagggaaatcaagcagggcattggtgatgggaggaagtga

SEQ ID NO: 74543 - DNA, 120 bp, Artificial Sequence
  ENSG00000078699_64 (sequence is synthesized)
acaggaaccaggtaggatgatggtaagtggacagggtttaaaaacccagggcttttggcagtctgcccaaatctatgtctttagcccttgtttgtgcacctagtcttatttatttaattg

SEQ ID NO: 74544 - DNA, 120 bp, Artificial Sequence
  ENSG00000078699_65 (sequence is synthesized)
cctcctggccatttacacctggatgccccagaggcacctccaccttctcacttgcctccacactagctttgtgtggactgtccatttcattgcctagctttagcattcttctctttcacc

SEQ ID NO: 74545 - DNA, 120 bp, Artificial Sequence
  ENSG00000078699_66 (sequence is synthesized)
tccacttccaggcccttcggtgctcccaacctttttctgcctcatcccttcctcagtgccacttattcctgcctaaattcagcctcttctatcagttcaatcattgcaccagcctcccgg

SEQ ID NO: 74546 - DNA, 120 bp, Artificial Sequence
  ENSG00000078699_67 (sequence is synthesized)
tcattgcaccagcctcccggttgctatctctgtctttaatcttccccttgcatagaatcctttatggagtttcctttgaaaataaagtcaagccgactgggcacggtggctcatgcctgt

SEQ ID NO: 74547 - DNA, 120 bp, Artificial Sequence
  ENSG00000078699_68 (sequence is synthesized)
gcaacagagcgggactccgtcgcaaaaaaaaaaaaagaaaataagttcaagccgggggtggtgcctcacccctataacactttaacaccaacgctttgggaggctgaggtaggaggatca

SEQ ID NO: 74548 - DNA, 120 bp, Artificial Sequence
  ENSG00000078725_0 (sequence is synthesized)
attcgccagccgcctcgctcccggaccccacggctgcaaactgatctggcgcgcggggaggaggagagcgcaggcgagcgaacccgcgagagagggagagagcgagcgagcaacagcgag

SEQ ID NO: 74549 - DNA, 120 bp, Artificial Sequence
  ENSG00000078725_1 (sequence is synthesized)
agcgagagcgagagagccgggaggcagagggagtagtgaccgccttccggagccgggattcatgcctgtcctcgggaccagcgaaggggactttacggctgagtatgagccaggctgcta

SEQ ID NO: 74550 - DNA, 120 bp, Artificial Sequence
  ENSG00000078725_2 (sequence is synthesized)
ggagccaggtacccccacgcctgcagtccccgcgccgtgcccggaatgcgagctgcacgcagggctctcccaagttcccaccgagccgaataaaaagcgtcctcccgcagctctccgcca

SEQ ID NO: 74551 - DNA, 120 bp, Artificial Sequence
  ENSG00000078725_3 (sequence is synthesized)
aagacggacattgactccaggactccacagaatggagcaagaatgagaggaaaaaggccggcagaaaagcatgaactggaggtttgttgagctcctctacttcctgtttatatggggccg

SEQ ID NO: 74552 - DNA, 120 bp, Artificial Sequence
  ENSG00000078725_4 (sequence is synthesized)
tatctcagtgcagccctcccaccaggaaccagctgggacagaccaacatgtctccaaggaatttgattggctcatttcagacagggggcctttccaccactccaggagctacctatcctt

SEQ ID NO: 74553 - DNA, 120 bp, Artificial Sequence
  ENSG00000078725_5 (sequence is synthesized)
tgtggaaagacaccgtcaaggatttacaaccagatataaaatatacagggagtttgcccgttggaaggtgaggaacacagccatcgagaggagagatctggtccgccatccagtgcccct

SEQ ID NO: 74554 - DNA, 120 bp, Artificial Sequence
  ENSG00000078725_6 (sequence is synthesized)
catgccggagtttcaaaggagcatccgcctgcttggcaggagacctaccactcagcagttcatcgataccatcatcaaaaagtacggcacccacctgctcatctcagccacattgggagg

SEQ ID NO: 74555 - DNA, 120 bp, Artificial Sequence
  ENSG00000078725_7 (sequence is synthesized)
ggaggaggctttgaccatgtatatggacaaaagtcgcctcgacaggaagtcagggaatgccactcaaagtgttgaagctctgcaccagctcgcatcatcctactttgttgaccgtgatgg

SEQ ID NO: 74556 - DNA, 120 bp, Artificial Sequence
  ENSG00000078725_8 (sequence is synthesized)
taccatgaggaggcttcatgagatccagatatcaactggagcaatcaaggtcacagagacacgcactgggcctctgggctgtaacagctatgacaatctggactctgtgagttccgtcct

SEQ ID NO: 74557 - DNA, 120 bp, Artificial Sequence
  ENSG00000078725_9 (sequence is synthesized)
tctgcaaagcacggagagcaaactgcaccttcaaggtcttcagataatctttcctcagtatctgcaagagaagtttgtccagtcggccttgagctatatcatgtgcaatggggaggggga

SEQ ID NO: 74558 - DNA, 120 bp, Artificial Sequence
  ENSG00000078725_10 (sequence is synthesized)
gtacctgtgccagaacagccagtgtcgctgccaatgtgccgaggagtttccgcagtgcaactgccccatcacggacatccagatcatggagtacacgctggccaacatggccaagtcttg

SEQ ID NO: 74559 - DNA, 120 bp, Artificial Sequence
  ENSG00000078725_11 (sequence is synthesized)
ggccgaagcttataaggacctggagaattcagatgagtttaaatcatttatgaagcgcctccccagcaaccacttcctgaccatcggaagcatccatcagcactggggcaatgactggga

SEQ ID NO: 74560 - DNA, 120 bp, Artificial Sequence
  ENSG00000078725_12 (sequence is synthesized)
cctgcagaaccgctacaagctcctgcagagtgccacggaggcacagagacaaaagatccaacgcactgcccgcaagcttttcggcctcagtgtacgctgtcgccacaatcccaaccacca

SEQ ID NO: 74561 - DNA, 120 bp, Artificial Sequence
  ENSG00000078725_13 (sequence is synthesized)
cctctactgtaatgagaatgggttttggggaaccttcctggagagccagcggagctgcgtgtgccacggcagcaccacgctgtgccagcgccccatcccctgcgtgataggcgggaacaa

SEQ ID NO: 74562 - DNA, 120 bp, Artificial Sequence
  ENSG00000078725_14 (sequence is synthesized)
cagctgcgccatgtgcagcctggccaacatctccctctgcggctcctgcaacaagggctacaagctgtatcgaggccgctgtgaaccacagaacgtggactcggagcggagcgagcagtt

SEQ ID NO: 74563 - DNA, 120 bp, Artificial Sequence
  ENSG00000078725_15 (sequence is synthesized)
catcagctttgagactgacctggacttccaggacctggagctgaagtacctgctgcagaagatggactcacgcctctacgtccacaccaccttcatcagcaacgagatccgcctcgacac

SEQ ID NO: 74564 - DNA, 120 bp, Artificial Sequence
  ENSG00000078725_16 (sequence is synthesized)
cttctttgaccctcggtggcgcaagcgcatgtccctcactctcaagagcaacaagaaccgcatggacttcatccacatggtgatcggcatgtccatgcgcatctgccagatgcgcaacag

SEQ ID NO: 74565 - DNA, 120 bp, Artificial Sequence
  ENSG00000078725_17 (sequence is synthesized)
cagcctggaccccatgttctttgtctatgtcaacccctttagcgggagccattcggagggctggaacatgcccttcggggaatttggctacccacgctgggagaagatccgtctccaaaa

SEQ ID NO: 74566 - DNA, 120 bp, Artificial Sequence
  ENSG00000078725_18 (sequence is synthesized)
cagccagtgctacaactggactcttttgctgggcaatcggtggaaaacatttttcgagacggtccacatctacctacgtagtcggactcggctacctaccctactgcgaaatgagactgg

SEQ ID NO: 74567 - DNA, 120 bp, Artificial Sequence
  ENSG00000078725_19 (sequence is synthesized)
ccagggccccgtggacctgtcggatccctccaagaggcagttctacatcaagatctcagacgtgcaggtgtttgggtatagcctgaggttcaacgccgacctcctgcgcagtgcagtgca

SEQ ID NO: 74568 - DNA, 120 bp, Artificial Sequence
  ENSG00000078725_20 (sequence is synthesized)
gcaggtcaaccagtcctacacacagggcggccagttctattcctcttcgtcagtgatgctcctcttgttggatattcgggaccgaattaatcgcctggcccctcctgtggccccggggaa

SEQ ID NO: 74569 - DNA, 120 bp, Artificial Sequence
  ENSG00000078725_21 (sequence is synthesized)
accccagctggacttgttctcctgtatgctgaaacaccgcctgaaactgaccaacagcgagatcatcagggtgaaccacgccttggacctgtacaacacggagatcctcaaacagtcgga

SEQ ID NO: 74570 - DNA, 120 bp, Artificial Sequence
  ENSG00000078725_22 (sequence is synthesized)
ccagatgacagccaaactctgctaacccgggactccttgccatggacttttcctgttgttgtacacacacaacagaacaaaatgaagcaaaacaaaacaaaaaaacccacaaaaatttgt

SEQ ID NO: 74571 - DNA, 120 bp, Artificial Sequence
  ENSG00000078725_23 (sequence is synthesized)
aaaatgtaattaatattcaaagaaaaggaggaaaatcttcatttgttggaaatgaaaacgttctagcaactgtataaaagcgttgggcatgtttgttatttctatactcactctgtcatg

SEQ ID NO: 74572 - DNA, 120 bp, Artificial Sequence
  ENSG00000078725_24 (sequence is synthesized)
aagaagggtctcagccttttgtggagcattgagggagttgcttcttaggcctcaggtgctgtattgggggagaagggagaaagcatatgcaatgaattgtaaagatctctgctgtgcagg

SEQ ID NO: 74573 - DNA, 120 bp, Artificial Sequence
  ENSG00000078725_25 (sequence is synthesized)
tgctaagattaaacactaaaaagaaagagagatatatgtaatgtacaactgacactgccatttttcctttttggaggaaatggacatagataaagaagatatttcttcggttaagattta

SEQ ID NO: 74574 - DNA, 120 bp, Artificial Sequence
  ENSG00000078725_26 (sequence is synthesized)
gcagaattatctagtgtgacaaatcctcttttcctccgtccccgtgcaaagggaattgccatcttctgtgatcatcaagctggcaacatcaatctggaagtttgttaatgacactgacct

SEQ ID NO: 74575 - DNA, 120 bp, Artificial Sequence
  ENSG00000078725_27 (sequence is synthesized)
aaatctgtcacattgcaagaaactcttcacagcagctgggatttgctgccatataacagctttatggtatgtggaactctctaataagctgattaaaaaataaaatgtttgaagccttaa

SEQ ID NO: 74576 - DNA, 120 bp, Artificial Sequence
  ENSG00000078725_28 (sequence is synthesized)
ctaatctaactggaattaggactgctgcaagggaaagttcagtgaccctgaccctttcactttggagtgtccagatgcaagtataatagctgtcacagagcaggcactcaataaatctca

SEQ ID NO: 74577 - DNA, 120 bp, Artificial Sequence
  ENSG00000078725_29 (sequence is synthesized)
actgaataaaattaatgaatagcataatccagtttgtggtcatatgatgtattgtttctgtcgtacccagaagacagaaagaataaatctgcataggaagcctctggagagggaagagtc

SEQ ID NO: 74578 - DNA, 120 bp, Artificial Sequence
  ENSG00000078747_0 (sequence is synthesized)
agctgctaactcgctctagtagctgtggtcggggctcgggaccggctgccatcttagtctagggactgaggagtcgccgccgccccgagtcccggtaccatgcatttcacggtggccttg

SEQ ID NO: 74579 - DNA, 120 bp, Artificial Sequence
  ENSG00000078747_1 (sequence is synthesized)
tggagacaacgccttaacccaaggaagtgactcaaactgtgagaacttcaggttttccaacctattggtggtatgtctgacagtggatcacaacttggttcaatgggtagcctcaccatg

SEQ ID NO: 74580 - DNA, 120 bp, Artificial Sequence
  ENSG00000078747_2 (sequence is synthesized)
aaatcacagcttcagatcactgtcatctcagcaaaacttaaggaaaataagaagaattggtttggaccaagtccttacgtagaggtcacagtagatggacagtcaaagaagacagaaaaa

SEQ ID NO: 74581 - DNA, 120 bp, Artificial Sequence
  ENSG00000078747_3 (sequence is synthesized)
tgcaacaacacaaacagtcccaagtggaagcaaccccttacagttatcgttacccctgtgagtaaattacattttcgtgtgtggagtcaccagacactgaaatctgatgttttgttggga

SEQ ID NO: 74582 - DNA, 120 bp, Artificial Sequence
  ENSG00000078747_4 (sequence is synthesized)
actgctgcattagatatttatgaaacattaaagtcaaacaatatgaaacttgaagaagtagttgtgactttgcagcttggaggtgacaaagagccaacagagacaataggagacttgtca

SEQ ID NO: 74583 - DNA, 120 bp, Artificial Sequence
  ENSG00000078747_5 (sequence is synthesized)
atttgtcttgatgggctacagttagagtctgaagttgttaccaatggtgaaactacatgttcagaaagtgcttctcagaatgatgatggctccagatccaaggatgaaacaagagtgagc

SEQ ID NO: 74584 - DNA, 120 bp, Artificial Sequence
  ENSG00000078747_6 (sequence is synthesized)
acaaatggatcagatgaccctgaagatgcaggagctggtgaaaataggagagtcagtgggaataattctccatcactctcaaatggtggttttaaaccttctagacctccaagaccttca

SEQ ID NO: 74585 - DNA, 120 bp, Artificial Sequence
  ENSG00000078747_7 (sequence is synthesized)
cgaccaccaccacccaccccacgtagaccagcatctgtcaatggttcaccatctgccacttctgaaagtgatgggtctagtacaggctctctgccgccgacaaatacaaatacaaataca

SEQ ID NO: 74586 - DNA, 120 bp, Artificial Sequence
  ENSG00000078747_8 (sequence is synthesized)
tctgaaggagcaacatctggattaataattcctcttactatatctggaggctcaggccctaggccattaaatcctgtaactcaagctcccttgccacctggttgggagcagagagtggac

SEQ ID NO: 74587 - DNA, 120 bp, Artificial Sequence
  ENSG00000078747_9 (sequence is synthesized)
cagcacgggcgagtttactatgtagatcatgttgagaaaagaacaacatgggatagaccagaacctctacctcctggctgggaacggcgggttgacaacatgggacgtatttattatgtt

SEQ ID NO: 74588 - DNA, 120 bp, Artificial Sequence
  ENSG00000078747_10 (sequence is synthesized)
gaccatttcacaagaacaacaacgtggcagaggccaacactggaatccgtccggaactatgaacaatggcagctacagcgtagtcagcttcaaggagcaatgcagcagtttaaccagaga

SEQ ID NO: 74589 - DNA, 120 bp, Artificial Sequence
  ENSG00000078747_11 (sequence is synthesized)
ttcatttatgggaatcaagatttatttgctacatcacaaagtaaagaatttgatcctcttggtccattgccacctggatgggagaagagaacagacagcaatggcagagtatatttcgtc

SEQ ID NO: 74590 - DNA, 120 bp, Artificial Sequence
  ENSG00000078747_12 (sequence is synthesized)
aaccacaacacacgaattacacaatgggaagaccccagaagtcaaggtcaattaaatgaaaagcccttacctgaaggttgggaaatgagattcacagtggatggaattccatattttgtg

SEQ ID NO: 74591 - DNA, 120 bp, Artificial Sequence
  ENSG00000078747_13 (sequence is synthesized)
gaccacaatagaagaactaccacctatatagatccccgcacaggaaaatctgccctagacaatggacctcagatagcctatgttcgggacttcaaagcaaaggttcagtatttccggttc

SEQ ID NO: 74592 - DNA, 120 bp, Artificial Sequence
  ENSG00000078747_14 (sequence is synthesized)
tggtgtcagcaactggccatgccacagcacataaagattacagtgacaagaaaaacattgtttgaggattcctttcaacagataatgagcttcagtccccaagatctgcgaagacgtttg

SEQ ID NO: 74593 - DNA, 120 bp, Artificial Sequence
  ENSG00000078747_15 (sequence is synthesized)
tgggtgatttttccaggagaagaaggtttagattatggaggtgtagcaagagaatggttctttcttttgtcacatgaagtgttgaacccaatgtattgcctgtttgaatatgcagggaag

SEQ ID NO: 74594 - DNA, 120 bp, Artificial Sequence
  ENSG00000078747_16 (sequence is synthesized)
gataactactgcttgcagataaaccccgcttcttacatcaatccagatcacctgaaatattttcgttttattggcagatttattgccatggctctgttccatgggaaattcatagacacg

SEQ ID NO: 74595 - DNA, 120 bp, Artificial Sequence
  ENSG00000078747_17 (sequence is synthesized)
ggtttttctttaccattctataagcgtatcttgaacaaaccagttggactcaaggatttagaatctattgatccagaattttacaattctctcatctgggttaaggaaaacaatattgag

SEQ ID NO: 74596 - DNA, 120 bp, Artificial Sequence
  ENSG00000078747_18 (sequence is synthesized)
gaatgtgatttggaaatgtacttctccgttgacaaagaaattctaggtgaaattaagagtcatgatctgaaacctaatggtggcaatattcttgtaacagaagaaaataaagaggaatac

SEQ ID NO: 74597 - DNA, 120 bp, Artificial Sequence
  ENSG00000078747_19 (sequence is synthesized)
atcagaatggtagctgagtggaggttgtctcgaggtgttgaagaacagacacaagctttctttgaaggctttaatgaaattcttccccagcaatatttgcaatactttgatgcaaaggaa

SEQ ID NO: 74598 - DNA, 120 bp, Artificial Sequence
  ENSG00000078747_20 (sequence is synthesized)
ttagaggtccttttatgtggaatgcaagagattgatttgaatgactggcaaagacatgccatctaccgtcattatgcaaggaccagcaaacaaatcatgtggttttggcagtttgttaaa

SEQ ID NO: 74599 - DNA, 120 bp, Artificial Sequence
  ENSG00000078747_21 (sequence is synthesized)
gaaattgataatgagaagagaatgagacttctgcagtttgttactggaacctgccgattgccagtaggaggatttgctgatctcatggggagcaatggaccacagaaattctgcattgaa

SEQ ID NO: 74600 - DNA, 120 bp, Artificial Sequence
  ENSG00000078747_22 (sequence is synthesized)
aaagttgggaaagaaaattggctacccagaagtcatacctgttttaatcgcctggacctgccaccatacaagagctatgagcaactgaaggaaaagctgttgtttgccatagaagaaaca

SEQ ID NO: 74601 - DNA, 120 bp, Artificial Sequence
  ENSG00000078747_23 (sequence is synthesized)
gaaggatttggacaagagtaacttctgagaacttgcaccatgaatgggcaagaacttatttgcaatgtttgtccttctctgcctgttgcacatcttgtaaaattggacaatggctcttta

SEQ ID NO: 74602 - DNA, 120 bp, Artificial Sequence
  ENSG00000078747_24 (sequence is synthesized)
gagagttatctgagtgtaagtaaattaatgttctcatttagatttatctcccagtgatttctactcagcgtttccagaaatcaggtctgcaaatgactagtcagaaccttgcttaacatg

SEQ ID NO: 74603 - DNA, 120 bp, Artificial Sequence
  ENSG00000078747_25 (sequence is synthesized)
agattttaacacaacaatgaaatttgccttgtcttattccactagtttattcctttaacaacaatattttatgtgtgtcaaaagtctcacttgggagtagtgtttttttcttttagacat

SEQ ID NO: 74604 - DNA, 120 bp, Artificial Sequence
  ENSG00000078747_26 (sequence is synthesized)
tcctttggtaactgcaatatacaagattttcctattaagcctcttggtaagaggcatttgttaaaagtgcaagcttactcctgcttctggggatgtgagcaaaattcgggcttgtgttct

SEQ ID NO: 74605 - DNA, 120 bp, Artificial Sequence
  ENSG00000078747_27 (sequence is synthesized)
ccctctcattttagtctgacttgactattgtttttcctttctggcgcatgaatccatacatcattcctggaagtgaggcaagactcttgcatctctacaaagtagttttgtcaatttgaa

SEQ ID NO: 74606 - DNA, 120 bp, Artificial Sequence
  ENSG00000078747_28 (sequence is synthesized)
ttcagggaaaagttggtcacagcctgcaaatgacttcatttggaagtctgattgtttcagttgcctgacaaatactacactttacaaacaatgttaacactgtgattccttcattgtttt

SEQ ID NO: 74607 - DNA, 62 bp, Artificial Sequence
  ENSG00000078747_29 (sequence is synthesized)
tttacaaacaatgttaacactgtgattccttcattgttttaagaagttaacctagggcccct

SEQ ID NO: 74608 - DNA, 120 bp, Artificial Sequence
  ENSG00000078747_30 (sequence is synthesized)
gaccctgtcttttttttgggcagcgtggtgggggataaataaataaaaggaaaaaaaacttagcctagaattagaattaatttaattgaattcatctaaagatgtctctggtgattttta

SEQ ID NO: 74609 - DNA, 120 bp, Artificial Sequence
  ENSG00000078747_31 (sequence is synthesized)
tatgttccgctatataattgatgctttatagttttatcataatccaacaacttcagttatatttaattattgttaaggagtttaagactagaaagactagagtgctttctagtccaaata

SEQ ID NO: 74610 - DNA, 120 bp, Artificial Sequence
  ENSG00000078747_32 (sequence is synthesized)
gaggtcagtgaaacagcttttgacatcagattttcatttgagagggagagctgtggtactggctaaaaagaaaggaagataacatccagtaaccacaggaatatattctctgtgaattaa

SEQ ID NO: 74611 - DNA, 120 bp, Artificial Sequence
  ENSG00000078747_33 (sequence is synthesized)
aagtcttcaaagttatcatttctctgacatatgttggagtagtcatttccattctttacattgtcatgaactggattgataaccctcatctgcaatattttcacccctaaaatttttaac

SEQ ID NO: 74612 - DNA, 120 bp, Artificial Sequence
  ENSG00000078747_34 (sequence is synthesized)
agggtttcctttttttctcacgactatttaagtttagattgctccattattaactgattaatgcactttgaagttctctggaattaattattttaacttggcctagcttcgactgtcaag

SEQ ID NO: 74613 - DNA, 120 bp, Artificial Sequence
  ENSG00000078747_35 (sequence is synthesized)
gtggctgttataaatttgacttcattggcagtggatgaagcctaagccagctgagtctctatcatagctgaaccctgaggacagcctcatagctcatgtatcagggacttttgccacatt

SEQ ID NO: 74614 - DNA, 120 bp, Artificial Sequence
  ENSG00000078747_36 (sequence is synthesized)
tcagaggcatagcatgaacaagtaatattaagccaagaataagcagcagaaccctgttccatatggaaaaaagaaaaacaattttttgtccctaatgttcttccttttacatcctggaac

SEQ ID NO: 74615 - DNA, 120 bp, Artificial Sequence
  ENSG00000078747_37 (sequence is synthesized)
aacaataaaaacatttttttaaacttgtctactgtaagatactgccatcataaagcagagacttacatgagtgaaagggttgcctcatcaagcagctcagtgtaaatggggaggctaggc

SEQ ID NO: 74616 - DNA, 120 bp, Artificial Sequence
  ENSG00000078747_38 (sequence is synthesized)
tctccccagccctatggtttttttatttcatgtaccccaggaaatactgtgtggtttctaaaagccctggttgttaaaagtagggactctgcctttttgttggtagggagaaaaaacgct

SEQ ID NO: 74617 - DNA, 120 bp, Artificial Sequence
  ENSG00000078747_39 (sequence is synthesized)
attgctttgtcttacagagcgaatgtctgccaactacccgttcattatataagtctgaacttggtaatatatggctaatgaagattaagccctctataaagacttcctgttgaggtgaat

SEQ ID NO: 74618 - DNA, 120 bp, Artificial Sequence
  ENSG00000078747_40 (sequence is synthesized)
tctcatactgaaatgtagttacctacaatatttactagagatttatgaaattaaattaagagataatgtaagaaaatacatttttttggttctatataatgcttcatgattcatttaggg

SEQ ID NO: 74619 - DNA, 120 bp, Artificial Sequence
  ENSG00000078747_41 (sequence is synthesized)
acctagaaatattgtgtgaaaatatataaatatcacccaaaaggctttctgccctatatttttaaaatacagaatagttatatttgaagtagccctggccctagttctatagggcttggc

SEQ ID NO: 74620 - DNA, 120 bp, Artificial Sequence
  ENSG00000078747_42 (sequence is synthesized)
tatttaatatttttatggaagaagtgtttagttctggaaaaggtaaatgcttgtatatatttttgcagcctgggatctccctactccattttttcctttaatttaagtggccacatgtat

SEQ ID NO: 74621 - DNA, 120 bp, Artificial Sequence
  ENSG00000078747_43 (sequence is synthesized)
atgtcttccctgctgtgttaggaaaatgggggctggatatcccaagaatcagaggttatataaaaatactgcaaatagaccgcagacataaatatctaccaaatgctatcttaaattttg

SEQ ID NO: 74622 - DNA, 120 bp, Artificial Sequence
  ENSG00000078747_44 (sequence is synthesized)
gtccaaactgaacatatggaaatagatttattgtaagtatttacttagagctttttcttaaatctgaactaacttgcttttagaagtctttttctttgtaagcattgtaaatgctaataa

SEQ ID NO: 74623 - DNA, 120 bp, Artificial Sequence
  ENSG00000078747_45 (sequence is synthesized)
tttttttttttttttttttttactgcatgttacattgaaataaaaacaaagtaaaatgagcaattgccttattgttctgctcttttgcagggggtgggggttggggaagacagcattcca

SEQ ID NO: 74624 - DNA, 120 bp, Artificial Sequence
  ENSG00000078747_46 (sequence is synthesized)
ggaagacagcattccacagcctggtcaggagggaaggacctcacttgtttcatcaaatggagtggtttaaaactgatcaagcagctcataataatgaattcctgctctgtcttttattat

SEQ ID NO: 74625 - DNA, 120 bp, Artificial Sequence
  ENSG00000078747_47 (sequence is synthesized)
cttatgtcagagtgcagcaaaatctcatttcataagacttacaataactctatttaaaattcaggtattgtactcgggaggctgaggtgggaggatcccaggagttcaaatcctgcctgg

SEQ ID NO: 74626 - DNA, 120 bp, Artificial Sequence
  ENSG00000078747_48 (sequence is synthesized)
catagcaagaccctgtctcttaaaaaaacaaaaagacatattcaggtactgatttttcatcaagagattgacataccaatgatcagaaattttagtgaaacttgactcaactatacacaa

SEQ ID NO: 74627 - DNA, 120 bp, Artificial Sequence
  ENSG00000078747_49 (sequence is synthesized)
acaaagttctcatcctaaatgaactatttcagtcaagcccactctaccactttttacttatctggttaataatccgaaatgttaccggggttgactcacggaattaaatttttcctctat

SEQ ID NO: 74628 - DNA, 120 bp, Artificial Sequence
  ENSG00000078747_50 (sequence is synthesized)
ttttatatcctttcctgttgtggatgtaacttacctttctaaactcctttagagttaacgacttctatttagtattgttggtatctccagcccccctcctttttttgtttttcttttagt

SEQ ID NO: 74629 - DNA, 120 bp, Artificial Sequence
  ENSG00000078747_51 (sequence is synthesized)
tatttactttgtttgtataatttgctttcattaactaaaaatggaattggcagcactggattgtatattactgtattaagagtacctttgttttcttgatctgttacttttaatactcag

SEQ ID NO: 74630 - DNA, 120 bp, Artificial Sequence
  ENSG00000078747_52 (sequence is synthesized)
gtaatgctacaaatattacagggagtcaaatgcttttataaagttccttcagtggttgcctcacttgcgttttcctacaagatgtaagactgtttataattaaacttttttggtccttca

SEQ ID NO: 74631 - DNA, 120 bp, Artificial Sequence
  ENSG00000078747_53 (sequence is synthesized)
agtctagggactgaggagtcgccgccgccccgagtcccggtaccatgcatttcacggtggccttgtggagacaacgccttaacccaaggaagtgactcaaactgtgagaacttcagggtc

SEQ ID NO: 74632 - DNA, 86 bp, Artificial Sequence
  ENSG00000078747_54 (sequence is synthesized)
acagtggtgtgatcatagctcactgcagacttgacctcctggttggggagtggtggtgtgcaccagacccccccagcccgggaggc

SEQ ID NO: 74633 - DNA, 90 bp, Artificial Sequence
  ENSG00000078747_55 (sequence is synthesized)
atcttagtctagggactgaggagtcgccgccgccccgagtcccggctggagtacagtggtgtgatctcggcttactgttctgcctcagcc

SEQ ID NO: 74634 - DNA, 120 bp, Artificial Sequence
  ENSG00000078747_56 (sequence is synthesized)
gaatcatcgtcgtgaacacagaaggcattcccatcaagagcaccatggacaaccccaccaccacccagtatgccagcctcatgcacagcttcatcctgaaggcacggagcaccgtgcgtg

SEQ ID NO: 74635 - DNA, 120 bp, Artificial Sequence
  ENSG00000078747_57 (sequence is synthesized)
acatcgacccccagaacgatctcaccttccttcgaattcgctccaagaaaaatgaaattatggttgcaccagataaagactatttcctgattgtgattcagaatccaaccgaataagcca

SEQ ID NO: 74636 - DNA, 120 bp, Artificial Sequence
  ENSG00000078747_58 (sequence is synthesized)
ctctcttggctccctgtgtcattccttaatttaatgccccccaagaatgttaatgtcaatcatgtcagtggactagcacatggcagtcgcttggaacccactcacaccaatccagtgacc

SEQ ID NO: 74637 - DNA, 68 bp, Artificial Sequence
  ENSG00000078747_59 (sequence is synthesized)
tacagttagagtctgaagttgttaccaatggtgaaactacatgttcagaaaatggggtttcgctctgt

SEQ ID NO: 74638 - DNA, 120 bp, Artificial Sequence
  ENSG00000078747_60 (sequence is synthesized)
gacaacgccttaacccaaggaagtgactcaaactgtgagaacttcaggtatggtgtcatcctgtgagagaaattgggggcaagagtgatgcagaggccaagctctggtcttatacctgct

SEQ ID NO: 74639 - DNA, 63 bp, Artificial Sequence
  ENSG00000078747_61 (sequence is synthesized)
gggtagcctcaccatgaaatcacagcttcagatcactgagacgaggtttcaccatcttgacag

SEQ ID NO: 74640 - DNA, 120 bp, Artificial Sequence
  ENSG00000078747_62 (sequence is synthesized)
aaaaaccaagtatctgtttgagttcctacttcgatgacttttgtatctgtacccaaaagttagggttagggttagggttaggatgacttttgtatctattgctggattaaatattaattc

SEQ ID NO: 74641 - DNA, 120 bp, Artificial Sequence
  ENSG00000078747_63 (sequence is synthesized)
tgtatttaattttttgaagaaccaccatactgtttttcagtgtctgtgccagtttacatttccaccctagtgcagaagaattccaatttctgtacgttctcatcaactcttctgtttttt

SEQ ID NO: 74642 - DNA, 120 bp, Artificial Sequence
  ENSG00000078747_64 (sequence is synthesized)
ttttcttcatcatcatcatatttttttttaaatagtcatccttaatgtcgtatttcattgtggtttttctttgtatttttctaatggtttgtgatgttgagtatcttttcatatgcttct

SEQ ID NO: 74643 - DNA, 120 bp, Artificial Sequence
  ENSG00000078747_65 (sequence is synthesized)
tggctatttgtgtatcttctttggaaaaatgtctcttcaagtcctttgcccatttgttgttgttttttttttcttttgcgattgagttttaggtgttctctatatattctgggtgttaat

SEQ ID NO: 74644 - DNA, 120 bp, Artificial Sequence
  ENSG00000078747_66 (sequence is synthesized)
cccttatcaaatacatgatttgcaattattttctcccattctgtggtttcctttttactgtagatagtgccctttgatgtataaaacattttagattttgatgtctgatttgtcaatttt

SEQ ID NO: 74645 - DNA, 61 bp, Artificial Sequence
  ENSG00000078747_67 (sequence is synthesized)
agattttgatgtctgatttgtcaattttttcttttcttttcttttttgagacagttgcctc

SEQ ID NO: 74646 - DNA, 87 bp, Artificial Sequence
  ENSG00000078747_68 (sequence is synthesized)
tcaatttgtcttgatgggctacagttagagtctgaagttgttaccaatggtgaaactacatgttcagaaaacggggtttcgctctta

SEQ ID NO: 74647 - DNA, 82 bp, Artificial Sequence
  ENSG00000078747_69 (sequence is synthesized)
ggattacaggcaagcgccaccacgcccgactaattttgtatttttagtacaggtgagcctcaggtggtccatgtgccttggc

SEQ ID NO: 74648 - DNA, 87 bp, Artificial Sequence
  ENSG00000078747_70 (sequence is synthesized)
aaaactcctttcaacatgtatgttatgtttttgtcttactttatgagaggtactgtaaaaattgaagtattgaggctatgatatggt

SEQ ID NO: 74649 - DNA, 120 bp, Artificial Sequence
  ENSG00000078747_71 (sequence is synthesized)
aggtactgtaaaaattgaagtattgaggctatgatatggtcattgtgaatttcagtgaagactactgtgttcttcatttttacaatttacaaagcccgttgttatatattctcatattta

SEQ ID NO: 74650 - DNA, 120 bp, Artificial Sequence
  ENSG00000078747_72 (sequence is synthesized)
ctttcctttcgagataatcactattctgaactttgaatttgtcatttctgtggtctttaaaagttttatcctatgtgtgatatataagcattacttgtacgtttctcttgagctctatga

SEQ ID NO: 74651 - DNA, 120 bp, Artificial Sequence
  ENSG00000078747_73 (sequence is synthesized)
taagcattacttgtacgtttctcttgagctctatgaaaatatcagtgttgccttttttttttttttgagacggagtcttccactgttgccccggcttgagtgcagtggcacgatcttggc

SEQ ID NO: 74652 - DNA, 63 bp, Artificial Sequence
  ENSG00000078747_74 (sequence is synthesized)
cctcccgagtagttgggattacaggcgtccacgaccacactcagctaattttcagtgttgcac

SEQ ID NO: 74653 - DNA, 68 bp, Artificial Sequence
  ENSG00000078747_75 (sequence is synthesized)
tttaagatttagtcatataattgtgtccgtaggccattcacttttactgctgcatagtaatctgttga

SEQ ID NO: 74654 - DNA, 120 bp, Artificial Sequence
  ENSG00000078747_76 (sequence is synthesized)
gtaggccattcacttttactgctgcatagtaatctgttgagtgaatgtaccgggttttaagatttttatatcaaaggacatttgcttagctttttttttttaaaccatgtgaacagtgat

SEQ ID NO: 74655 - DNA, 120 bp, Artificial Sequence
  ENSG00000078747_77 (sequence is synthesized)
acattgaacatttttgcatatgtttattaataaacagatttaacgtttatgttgggtgtatgcttgagagtagaattgctggggtatgtttattttcagctttacaatattaattgcttc

SEQ ID NO: 74656 - DNA, 120 bp, Artificial Sequence
  ENSG00000078747_78 (sequence is synthesized)
ttcaaatatgctattaggatatttaaaactgagatgaaatttacataacatacaattaacggttatataaagtgtacaccttaatggtgtttagtgtattcacagtgatacacatccacc

SEQ ID NO: 74657 - DNA, 120 bp, Artificial Sequence
  ENSG00000078747_79 (sequence is synthesized)
atctgtctctagtttcagatctttcttgtcaccttagaaaaaaaaccccatttctttcttctcccaagccgtgataactgctaatctgctctctgtctctatggatttgcctattcagga

SEQ ID NO: 74658 - DNA, 120 bp, Artificial Sequence
  ENSG00000078747_80 (sequence is synthesized)
tatatcacataaaaggaatcatgtgactttttttgtttggattctttacttagcataatgaatttgaggttcatccaagttgtagaatgtgtcagtacttcctttcttcttatggctgta

SEQ ID NO: 74659 - DNA, 120 bp, Artificial Sequence
  ENSG00000078747_81 (sequence is synthesized)
tgatagttctactgtgtatatttgtgccacaatttgtttatccattcattcattgatagacatttggcttatttccatttggctgttatgaattataaataatgctgctttaagcatttg

SEQ ID NO: 74660 - DNA, 120 bp, Artificial Sequence
  ENSG00000078747_82 (sequence is synthesized)
agtctagggactgaggagtcgccgccgccccgagtcccggtaccatgcatttcacggtggccttgtggagacaacgccttaacccaaggaagtgactcaaactgtgagaacttcagtcat

SEQ ID NO: 74661 - DNA, 120 bp, Artificial Sequence
  ENSG00000078795_0 (sequence is synthesized)
aacgggcggtgtagtgcaggtccgccatggctgaggcgtcacggtggcaccgaggcggggcttcgaaacataagttgcattacagaaaggaagtagaaattacaaccacacttcaggaat

SEQ ID NO: 74662 - DNA, 120 bp, Artificial Sequence
  ENSG00000078795_1 (sequence is synthesized)
tgttactctactttatttttttaataaacctatgtatattgacttttgggatggtaaacccacatatgtattacttaaacaaggttatgtcatctctatttttggacacttctgtgcctg

SEQ ID NO: 74663 - DNA, 120 bp, Artificial Sequence
  ENSG00000078795_2 (sequence is synthesized)
gtgaagaaagaaccaactttaagtccattcgcagcataactgatttttggaagtttatggaaggaccccttttggaaggtctgtactgggattcatggtacaataaccagcagctgtata

SEQ ID NO: 74664 - DNA, 120 bp, Artificial Sequence
  ENSG00000078795_3 (sequence is synthesized)
atttaaagaacagcagtcgcatctactatgaaaatatacttctaggagttcccagagttcgtcaactaaaagtccgcaacaacacatgcaaagtctattcatcttttcagtctttgatga

SEQ ID NO: 74665 - DNA, 120 bp, Artificial Sequence
  ENSG00000078795_4 (sequence is synthesized)
gtgaatgttatggcaaatatacttctgcaaatgaagacctctctaattttggccttcaaattaatactgaatggagatattctacttctaataccaactccccttggcactggggatttc

SEQ ID NO: 74666 - DNA, 120 bp, Artificial Sequence
  ENSG00000078795_5 (sequence is synthesized)
ttggtgtttaccgaaatgggggatacattttcactttatcaaaatcgaaatctgaaaccaaaaacaagttcattgaccttcgactgaacagctggatcacaagagggactagagttattt

SEQ ID NO: 74667 - DNA, 120 bp, Artificial Sequence
  ENSG00000078795_6 (sequence is synthesized)
ttattgatttttccttatataatgctaatgtaaatctattttgtattatcagattggtggcagaattccctgcaactggaggaatacttacttcatggcagttttactctgtgaagctcc

SEQ ID NO: 74668 - DNA, 120 bp, Artificial Sequence
  ENSG00000078795_7 (sequence is synthesized)
tcagatatgttagctactatgactattttattgcttcctgtgaaatcacattctgtatttttctttttgtcttcacaacacaagaagtcaaaaaaataaaagaatttaagtctgcctatt

SEQ ID NO: 74669 - DNA, 120 bp, Artificial Sequence
  ENSG00000078795_8 (sequence is synthesized)
tcaaaagtatttggaactggctagaattgctacttttgctgttgtgttttgtggctgtttccttcaacacatactataatgtacaaatttttctcttacttggacagctgttgaaaagta

SEQ ID NO: 74670 - DNA, 120 bp, Artificial Sequence
  ENSG00000078795_9 (sequence is synthesized)
gaaaaatattcagatttctattttcttgcatgctggcacatttattacaataatataattgctattaccatcttttttgcatggataaagatattcaaattcataagctttaacaagaca

SEQ ID NO: 74671 - DNA, 120 bp, Artificial Sequence
  ENSG00000078795_10 (sequence is synthesized)
atgtctcagctgtcatcaaccttgtcccgttgtgttaaagacatagtaggatttgccatcatgttttttataatattctttgcttatgcccagttaggatttcttgtttttggatcacaa

SEQ ID NO: 74672 - DNA, 120 bp, Artificial Sequence
  ENSG00000078795_11 (sequence is synthesized)
gttgatgacttttccacttttcagaattccatatttgcacaatttcgaattgttcttggagattttaattttgctggtattcagcaagccaatcctatcttgggacccatttacttcatc

SEQ ID NO: 74673 - DNA, 120 bp, Artificial Sequence
  ENSG00000078795_12 (sequence is synthesized)
actttcatcttttttgtgttctttgtcctgctgaatatgttcttggcaattattaatgatacctattctgaagtgaaagctgactattcaataggcagaaggctagattttgaacttggc

SEQ ID NO: 74674 - DNA, 120 bp, Artificial Sequence
  ENSG00000078795_13 (sequence is synthesized)
aaaatgattaaacagagttacaaaaatgttctcgagaaattcagactgaagaaagctcaaaaagatgaagacaagaaaaccaaaggcagcggagatttggctgaacaagccagaagagaa

SEQ ID NO: 74675 - DNA, 120 bp, Artificial Sequence
  ENSG00000078795_14 (sequence is synthesized)
ggctttgacgaaaatgagattcaaaacgcagagcagatgaaaaaatggaaagagaggcttgagaaaaagtattattctatggaaattcaagatgactaccagcctgtcactcaagaagaa

SEQ ID NO: 74676 - DNA, 120 bp, Artificial Sequence
  ENSG00000078795_15 (sequence is synthesized)
tttcgagaactttttttatatgctgtggagctggagaaggaattacactacatcaatttgaagctaaatcaagtggtgagaaaggtttcagctctatagtattgagacaagtggagagac

SEQ ID NO: 74677 - DNA, 85 bp, Artificial Sequence
  ENSG00000078795_16 (sequence is synthesized)
tagtattgagacaagtggcagcggtgcgacagtggcctcaacatcctccaaacagagaatcaagtgatcctcttgcctcagcctc

SEQ ID NO: 74678 - DNA, 82 bp, Artificial Sequence
  ENSG00000078795_17 (sequence is synthesized)
tcagcctcccaagtatctgggactacacgcgaacaccaccacccctggctaatttaaacaaaatttttatacagtctgggtc

SEQ ID NO: 74679 - DNA, 80 bp, Artificial Sequence
  ENSG00000078795_18 (sequence is synthesized)
cctcctgcctcagcttcaaagatttttttttaatttttgaaatacagtaatgttttatttaaaaatgggaatgacaataa

SEQ ID NO: 74680 - DNA, 75 bp, Artificial Sequence
  ENSG00000078795_19 (sequence is synthesized)
ctgtctgttattaatagtatatagtaaaaaaattatccctgcctcgtaaaactaagaattgaaaaatagccagaa

SEQ ID NO: 74681 - DNA, 120 bp, Artificial Sequence
  ENSG00000078795_20 (sequence is synthesized)
acagctcagccaattcctctagaaactaagctagacttgccatggtttgcacttcaaaggcaatcacaagaacttaaatcatgactgaatctactgaatttgtgattttgttttaaccaa

SEQ ID NO: 74682 - DNA, 120 bp, Artificial Sequence
  ENSG00000078795_21 (sequence is synthesized)
acaggtttctaattcttcaggatttttcagtctgttatgctcaaaggaataagaatagtctctagagattacctgcttaattctcatagttaatgtaaatttgacagcccggtagtccca

SEQ ID NO: 74683 - DNA, 120 bp, Artificial Sequence
  ENSG00000078795_22 (sequence is synthesized)
gctgctgggagaggttgagctggggatcccttaagatcaggagtttgaggccagactgggaaatatagcgagactccatctctaaaaaaaaaaaaattatgtaaatttgattacctatat

SEQ ID NO: 74684 - DNA, 120 bp, Artificial Sequence
  ENSG00000078795_23 (sequence is synthesized)
atgggtgtttttcctctaataatttcaatttcagataatctgttactttagaaagcataattttgtgaacagctgagagtcccagtacaggaaagcccaaatccttttgttaaaactatt

SEQ ID NO: 74685 - DNA, 120 bp, Artificial Sequence
  ENSG00000078795_24 (sequence is synthesized)
ctaaagctttttttcctctcgggcttctagttcactggctgtcagccttttgcgaggcctctcctgttcctctcatcgatggtagtttttgaccctcactactgtgtggccgttttgctt

SEQ ID NO: 74686 - DNA, 120 bp, Artificial Sequence
  ENSG00000078795_25 (sequence is synthesized)
tttatctacacataaaacagcatttatcgacagcagtctacatctctttcagggaaataacaaaagtggctttatcttttactttcaaaactggttagtggttttctttgcaggtttccc

SEQ ID NO: 74687 - DNA, 120 bp, Artificial Sequence
  ENSG00000078795_26 (sequence is synthesized)
tggggcctttggactggattccattttattttcctttttatcaacacgagaatccgtcctggtcttacatcctggagggcttttggctgccttaatttacagccaaattagtttggcctt

SEQ ID NO: 74688 - DNA, 120 bp, Artificial Sequence
  ENSG00000078795_27 (sequence is synthesized)
ttctatagctggtttaccaaccttctcatctttgcaaagcttctgggtcagatgtgggtctgggccccaggactcctgtgtcggcctgacctttcacataatcactgcagagtttttcat

SEQ ID NO: 74689 - DNA, 120 bp, Artificial Sequence
  ENSG00000078795_28 (sequence is synthesized)
tacatcacgggggcaggggagtggaagctacttccagcaacagctctcggttaataaccagtttctgcaagtagcagcagcagcagcagcgtagggtcacggttaggaatttgggcttgg

SEQ ID NO: 74690 - DNA, 120 bp, Artificial Sequence
  ENSG00000078795_29 (sequence is synthesized)
gcatccaagacttggccccaacttccagtgaattacttcatttctcagcttctcggtttcttcaggcctaaaatgaggacaaaaatacctacctttcacggaggtggatgtggagactaa

SEQ ID NO: 74691 - DNA, 120 bp, Artificial Sequence
  ENSG00000078795_30 (sequence is synthesized)
caaggcgataaatgttaaaggggcttcgaaacataagttgcattacagaaaggaagtagaaattacaaccacacttcaggaattgttactctactttatttttttaataaacctatgtat

SEQ ID NO: 74692 - DNA, 120 bp, Artificial Sequence
  ENSG00000078795_31 (sequence is synthesized)
agtgcctgacaaaacgaatttaagtaccagccaagtacacacgatgatagcttcaaggaatacaactgactttatgatatgaattttcaaggaacgtatcttatatggattttgaagaat

SEQ ID NO: 74693 - DNA, 120 bp, Artificial Sequence
  ENSG00000078795_32 (sequence is synthesized)
cttgtttgcttataagaacttcaagaagcctaagcttggctttaattttcttgtactctctgtactcctcaagcactggaacacgatcctctttctgggcattcctaggggagaaaataa

SEQ ID NO: 74694 - DNA, 120 bp, Artificial Sequence
  ENSG00000078795_33 (sequence is synthesized)
aatttgtaatgttctagagatcatttggaaaaaaagatccaaaagttgtcttaatatgagacatactgttactaaacataagttcaaataaaaagttgttctgttaaaaaaaaaaaaaaa

SEQ ID NO: 74695 - DNA, 120 bp, Artificial Sequence
  ENSG00000078795_34 (sequence is synthesized)
aacaaaaagcttgcatttccaaagttcttgaagttgaaaggataaaattccagtcttttgctaaaaggatgtatctgtagtacaaaacaatgaagtaaaccatatgtttgctaaaggtgg

SEQ ID NO: 74696 - DNA, 120 bp, Artificial Sequence
  ENSG00000078795_35 (sequence is synthesized)
agaggacagtctgtggttaatatggaacatcacttacgctcccttgagagggcctacttactctcccatcatttgttttgtttagtggcaccacaaccaagtacaaaatgagattctctg

SEQ ID NO: 74697 - DNA, 80 bp, Artificial Sequence
  ENSG00000078804_0 (sequence is synthesized)
cggccgcacagactcaaagccccgcgggcgagctcagcagcccggagcgaccgcggccccgccgcctcccccgcgagtcc

SEQ ID NO: 74698 - DNA, 120 bp, Artificial Sequence
  ENSG00000078804_1 (sequence is synthesized)
gacgccccgccgcacaactacctcaacgccgtgccgcccccctcccgcccccaggtttttgcactgccatagggcgcccccgtgaggcgcttcgccccccaccatgttccagcgcctctc

SEQ ID NO: 74699 - DNA, 120 bp, Artificial Sequence
  ENSG00000078804_2 (sequence is synthesized)
cagcctcttcttcagcaccccctcgccccccgaagaccccgactgcccccgcgccttcgtgtcggaggaggatgaagtggacggctggctcatcattgacctgccggacagctacgcggc

SEQ ID NO: 74700 - DNA, 120 bp, Artificial Sequence
  ENSG00000078804_3 (sequence is synthesized)
tccacccagccccggggccgcccctgcccccgcgggccgccctccgcccgcgccctccttgatggacgagagctggtttgttacccctcccgcctgttttacggcagaggggcctggact

SEQ ID NO: 74701 - DNA, 120 bp, Artificial Sequence
  ENSG00000078804_4 (sequence is synthesized)
cggtcccgcccgcctccagagcagtcccctggaggacctcctcatcgagcaccccagcatgtccgtttacgtcaccggcagcaccatagtgctagagcccgggtccccttccccgctccc

SEQ ID NO: 74702 - DNA, 120 bp, Artificial Sequence
  ENSG00000078804_5 (sequence is synthesized)
catagtgctagagcccgggtccccttccccgctcccggacgcggccctgcctgacggcgacctcagcgaaggggaattgacgcccgcccgccgcgagccgcgggccgcgcgccacgccgc

SEQ ID NO: 74703 - DNA, 120 bp, Artificial Sequence
  ENSG00000078804_6 (sequence is synthesized)
caggtgcggcggctgcagcgggcccggcagcgggcagagcgccacgcgctgagcgccaaggcggtgcagcggcagaaccgagcccgcgagagccgtccgcgccggtccaagaaccagagc

SEQ ID NO: 74704 - DNA, 120 bp, Artificial Sequence
  ENSG00000078804_7 (sequence is synthesized)
gagcagcttcatctaccagccgtgccagcgccagttcaactactgagcgtccaccggccgcgccacgaaccccttgccgatcccgatccctgtcgggctcctccgactcctcgggctgga

SEQ ID NO: 74705 - DNA, 120 bp, Artificial Sequence
  ENSG00000078804_8 (sequence is synthesized)
caccgaaacctcccttcttaaagcgtgtgaggttgggtgatagccgttccttccccgacaccctcaatttccccatctctgatcctctaatctgcctctgaacccattcacccttcaccc

SEQ ID NO: 74706 - DNA, 120 bp, Artificial Sequence
  ENSG00000078804_9 (sequence is synthesized)
tcactcctggtccccatacccagcatctaatcatccatgccccctactcctggcccctccatcctttcttctctggtccccatccctgtctctccctttcacccttgccctccagtcctc

SEQ ID NO: 74707 - DNA, 120 bp, Artificial Sequence
  ENSG00000078804_10 (sequence is synthesized)
tacctctggcctgcccctatttctgaaagcttcttccagtccctgatctggctcattccccaccttcaactcccaccttacatgtctcacactatcccatggttggcattacactcactc

SEQ ID NO: 74708 - DNA, 120 bp, Artificial Sequence
  ENSG00000078804_11 (sequence is synthesized)
ctgttcccttattcttcattcccagtaattccctaccaaatggtggggaccctgagcccagctctgaccaggtagagcctgtgcagcctgggctgctgtcattgccctccagtaagggct

SEQ ID NO: 74709 - DNA, 120 bp, Artificial Sequence
  ENSG00000078804_12 (sequence is synthesized)
cagggttttgcttttagtctccccttccttctgccttgggggcggtactctgtggagctgcttaggcctggaaaggtacagtatgtagaagaggactgtgagacgtgagttagagggaga

SEQ ID NO: 74710 - DNA, 120 bp, Artificial Sequence
  ENSG00000078804_13 (sequence is synthesized)
agatggagggaatctagggaacgaggcagcctattggagatgcggacaggacagacacgttgagaagctgcagggagcagggcaccaagggagtgtgcactgtgcttgctcagagaggcc

SEQ ID NO: 74711 - DNA, 120 bp, Artificial Sequence
  ENSG00000078804_14 (sequence is synthesized)
aaaccctgctcccaggctgaagcctggagtctgcccccacttcccttttctataatccacccttctgcaggccctgaaatctgaagggcttagttagtaccttgccactctacccccaac

SEQ ID NO: 74712 - DNA, 120 bp, Artificial Sequence
  ENSG00000078804_15 (sequence is synthesized)
acgtcacccgagtagaagctgggcaaggccctaccatcctggccgtctgttcacaagcccaaggtgctagaactagcttaggagacatgcaggccacagggcttctaggcagggaaaggg

SEQ ID NO: 74713 - DNA, 120 bp, Artificial Sequence
  ENSG00000078804_16 (sequence is synthesized)
gccatcccaaggctgacagctcagtcttcaccttgcctctggccttgtatttcacaccctgctcagtatggctagccagcagtcctgagtaggagtccaggactcccactgtctcaatct

SEQ ID NO: 74714 - DNA, 120 bp, Artificial Sequence
  ENSG00000078804_17 (sequence is synthesized)
gcaaattgttcctatccaggttcagggccttcagggggcctcttttcattttctcccacaggcctctctttctttctaggttgctggggagaaatgggtaccctatgatccccctcccct

SEQ ID NO: 74715 - DNA, 120 bp, Artificial Sequence
  ENSG00000078804_18 (sequence is synthesized)
tctcctccagtaaatacctggaagagggaacctgaatccctgggggagacagaaggggcaggggccaccagcctccccttcttgtggtgagactgaattttgggctcagacaccagcaac

SEQ ID NO: 74716 - DNA, 120 bp, Artificial Sequence
  ENSG00000078804_19 (sequence is synthesized)
agcctcttgggatgccctgagttgcttcccatttcctctttctagccgtccttttctagtgtgtgctcactcttcctaggaacttttaagacttcttggtacctatgaacataggtcctc

SEQ ID NO: 74717 - DNA, 120 bp, Artificial Sequence
  ENSG00000078804_20 (sequence is synthesized)
ccctcaccccaactctaggtttccaggcctcacagccaagctgaagcttggagaaaactctgcattcccatgagggcaaaggcagctgccctccctgaccctatagccccaggcctcatg

SEQ ID NO: 74718 - DNA, 120 bp, Artificial Sequence
  ENSG00000078804_21 (sequence is synthesized)
gggggtatgtggggaagggatggggtatccccatggatgctgggatgaggacagaggaagacctgatggggtctcctattccagggaataagccaaattaacactaaaaacggatcaaag

SEQ ID NO: 74719 - DNA, 120 bp, Artificial Sequence
  ENSG00000078804_22 (sequence is synthesized)
ctcccacgccagtccactagggccccagtagttgacagccttgctcctctcccaagttctccttcagaacctagttgcttttattcttccagctaccacttgggcacttcacagccagcc

SEQ ID NO: 74720 - DNA, 120 bp, Artificial Sequence
  ENSG00000078804_23 (sequence is synthesized)
tagggtcttcggcacctccaagagctgaatctccctccaacccttcttgcctactcctcactgccagctgggacctaggctcagtcctgtgtggtgcccatgatccttctggtgggggaa

SEQ ID NO: 74721 - DNA, 120 bp, Artificial Sequence
  ENSG00000078804_24 (sequence is synthesized)
gagtttaagttatagggcatttggctcaaattttaaaaggccttttgtttacctatatttctggaggctcctgtattctagaacccaatctctcacctgcttggttgcaaggctcatatt

SEQ ID NO: 74722 - DNA, 120 bp, Artificial Sequence
  ENSG00000078804_25 (sequence is synthesized)
tttttgtacctttcctatagattctgtagcatttgagtgtggcaatattttaattgtgtatagatttctaagaaccaacactactcagtctcctgctagtctgactcctgaagcatcagc

SEQ ID NO: 74723 - DNA, 120 bp, Artificial Sequence
  ENSG00000078804_26 (sequence is synthesized)
ccttgtcatactgtattgactgtgtacgtgcctttcaccttgagcatgcttcaggatttttttttaaaccacagaacttgaatacatgagggaaccagagttcaaagtcctatgcaacct

SEQ ID NO: 74724 - DNA, 120 bp, Artificial Sequence
  ENSG00000078804_27 (sequence is synthesized)
taggagggggttagagagtctgttttgattgatgttttctgaggccctagaggagtttgtatcaatttgtgagtattaatgtcagtactaccagcactttgccaaaactgtcagagggac

SEQ ID NO: 74725 - DNA, 120 bp, Artificial Sequence
  ENSG00000078804_28 (sequence is synthesized)
ccgtttctagagtgagtcccagttacatcaaacagtgacttccagttattccccagtaagtctgagtggttccttcaagctgggtgtctttccagcctttgccagtctagccccagcagg

SEQ ID NO: 74726 - DNA, 120 bp, Artificial Sequence
  ENSG00000078804_29 (sequence is synthesized)
gcaccgtgtatgaatgcagtttggtgctgttttagagtatgcctgctccccagccccctgcctggaaccctctgagcaacttgctctgacctataatgtcttaggtgcaacacggacccc

SEQ ID NO: 74727 - DNA, 120 bp, Artificial Sequence
  ENSG00000078804_30 (sequence is synthesized)
accagagctcttggatacccccctagatccatgtggctttatgtgaggggactgaatgcagacacaccatagcccccttctactactttccctctcgccctgccacctagttccacatgg

SEQ ID NO: 74728 - DNA, 120 bp, Artificial Sequence
  ENSG00000078804_31 (sequence is synthesized)
aaccaacaagttgagtgcatccctgttgggtgttttgtgttgagactggctgaaatgaggagactttgaccatgtgacgtgtcaacagactcaaggagacaaccacctcaactgggtcat

SEQ ID NO: 74729 - DNA, 120 bp, Artificial Sequence
  ENSG00000078804_32 (sequence is synthesized)
gtggcatgcctgtgtatgtgtgtaacagaattctgattgttagactgtaatgctattcctctatgggagaaaaaaattaatataaagaaaaacaaataaaaatatatttaaagcacatga

SEQ ID NO: 74730 - DNA, 120 bp, Artificial Sequence
  ENSG00000078804_33 (sequence is synthesized)
cccgccgcacaactacctcaacgccgtgccgcccccctcccgcccccagggaatctctggagattggttcaccttttgtggtcctgaccccttctgtcctcactgtaccttgaagtccta

SEQ ID NO: 74731 - DNA, 120 bp, Artificial Sequence
  ENSG00000078808_0 (sequence is synthesized)
gcaccgcccccgcccgcaagaaagatggcagtggcctgatccgggcccgttggcggcgtcactgacgcttcgctccggtcctcggatcccgagcgcggggaggcagaccgactgtgagct

SEQ ID NO: 74732 - DNA, 120 bp, Artificial Sequence
  ENSG00000078808_1 (sequence is synthesized)
gcttgtccccatcctgcggccgtcctggggacacagagccctccgtggtgcccggggattggattggagccaggacctcacttcctcctctgcccctgcccctgcccctcccagcacctg

SEQ ID NO: 74733 - DNA, 120 bp, Artificial Sequence
  ENSG00000078808_2 (sequence is synthesized)
gcccacaccctgcagcccgccccatggtctggccctgggtggcgatggcgtccaggtggggtcccctcattggcctggctccgtgctgcctctggctcctgggggcagtccttctgatgg

SEQ ID NO: 74734 - DNA, 120 bp, Artificial Sequence
  ENSG00000078808_3 (sequence is synthesized)
acgcgtctgcacggcctgccaaccactcgtccactcgagagagagtagccaacagggaggagaatgagatcctgcccccagaccacctgaacggggtgaagctggagatggacgggcacc

SEQ ID NO: 74735 - DNA, 120 bp, Artificial Sequence
  ENSG00000078808_4 (sequence is synthesized)
tcaatcgcggcttccaccaggaggtcttcctaggcaaggacctgggtggctttgatgaggacgcggagccgcggcggagccggaggaagctgatggtcatcttttccaaggtggatgtga

SEQ ID NO: 74736 - DNA, 120 bp, Artificial Sequence
  ENSG00000078808_5 (sequence is synthesized)
acactgaccggaagatcagtgccaaggagatgcagcgctggatcatggagaagacggccgagcacttccaggaggccatggaggagagcaagacacacttccgcgccgtggaccctgacg

SEQ ID NO: 74737 - DNA, 120 bp, Artificial Sequence
  ENSG00000078808_6 (sequence is synthesized)
gggacggtcacgtgtcttgggacgagtataaggtgaagtttttggcgagtaaaggccatagcgagaaggaggttgccgacgccatcaggctcaacgaggaactcaaagtggatgaggaaa

SEQ ID NO: 74738 - DNA, 120 bp, Artificial Sequence
  ENSG00000078808_7 (sequence is synthesized)
cacaggaagtcctggagaacctgaaggaccgctggtaccaggcggacagcccccctgcagacctgctgctgacggaggaggagttcctgtcgttcctccaccccgagcacagccggggaa

SEQ ID NO: 74739 - DNA, 120 bp, Artificial Sequence
  ENSG00000078808_8 (sequence is synthesized)
tggaccaggacggtgacaagcagctctctgtgcccgagttcatctccctgcccgtgggcaccgtggagaaccagcagggccaggacattgacgacaactgggtgaaagacagaaaaaagg

SEQ ID NO: 74740 - DNA, 120 bp, Artificial Sequence
  ENSG00000078808_9 (sequence is synthesized)
agtttgaggagctcattgactccaaccacgacggcatcgtgaccgccgaggagctggagagctacatggaccccatgaacgagtacaacgcgctgaacgaggccaagcagatgatcgccg

SEQ ID NO: 74741 - DNA, 120 bp, Artificial Sequence
  ENSG00000078808_10 (sequence is synthesized)
tcgccgacgagaaccagaaccaccacctggagcccgaggaggtgctcaagtacagcgagttcttcacgggcagcaagctggtggactacgcgcgcagcgtgcacgaggagttttgagcgc

SEQ ID NO: 74742 - DNA, 120 bp, Artificial Sequence
  ENSG00000078808_11 (sequence is synthesized)
cccccacgcaccaccggggcggcctcgcgggtgactccgggctccgtggctgtcccggaccccacctcttccctgccgcccgccaccggccgaccgaccgcggctgccccagttgatgag

SEQ ID NO: 74743 - DNA, 120 bp, Artificial Sequence
  ENSG00000078808_12 (sequence is synthesized)
ccagttgatgagcggcgtgtcccctctgcagcgcgcaccccggcggggctttggctgtgacgcggtcggggcgcggggctgggctgtggccccgcggcgccgcctcctccctggtccctc

SEQ ID NO: 74744 - DNA, 120 bp, Artificial Sequence
  ENSG00000078808_13 (sequence is synthesized)
ggtccctcgaaatcgtggcatctcacttctgagaacgaaatctcgcttcagtcactctgccgaaggcgctgacggcatcgcggccggaacctctgggcccggcccctcccagggccgccg

SEQ ID NO: 74745 - DNA, 120 bp, Artificial Sequence
  ENSG00000078808_14 (sequence is synthesized)
ctccgtgggaaaaaacagctcctccatttccttgaaaactgaacgattattaaaaatagattaaacttcgctggaaatgagtagccaggaagttcaggggagggtgccgggtccttcccg

SEQ ID NO: 74746 - DNA, 120 bp, Artificial Sequence
  ENSG00000078808_15 (sequence is synthesized)
ggcctggcgtgtcggagccacccaggtcccgcagctgccgctgagaaaatgcaaatatttgttgtgacaagaatcacatacatttactttaaatatagttgccttttttggtcagcttca

SEQ ID NO: 74747 - DNA, 120 bp, Artificial Sequence
  ENSG00000078808_16 (sequence is synthesized)
ccttaaatagccacttcgtgcggctggccgcggagctcggagggggaaaggcgacgctgacctgtgccccgctcgcccgcagagctacatggaccccatgaacgagtacaacgcgctgaa

SEQ ID NO: 74748 - DNA, 120 bp, Artificial Sequence
  ENSG00000078808_17 (sequence is synthesized)
cttggatttcagagggttcaagtgacccgctcggcctccccccgtcctggggttgcaggcgcgagtgacccgcctgccttggcctctccccatcctggggttgcaggcatgagcccctgt

SEQ ID NO: 74749 - DNA, 120 bp, Artificial Sequence
  ENSG00000078808_18 (sequence is synthesized)
gcctggccttgaccttctagaatgacgcggagacttttgagcctgttggctctgcctgctcttttcccagttcacgtactcttatctggagtttggtcctgtccgttctaaatcctgcaa

SEQ ID NO: 74750 - DNA, 120 bp, Artificial Sequence
  ENSG00000078808_19 (sequence is synthesized)
cctgtgttgcccaggctggtctcaaagtcctgggctaaagggatctgcctgccgcagcctcccagcatgccgggattacaggcacaagccccagtgcccggccaaattggacgttattac

SEQ ID NO: 74751 - DNA, 120 bp, Artificial Sequence
  ENSG00000078808_20 (sequence is synthesized)
caagccccagtgcccggccaaattggacgttattacttcctttccaaaagagtggtttacattttcctccccacacacggttcgtgcctccaccccggtcccgcgttccctgctgtcctg

SEQ ID NO: 74752 - DNA, 120 bp, Artificial Sequence
  ENSG00000078808_21 (sequence is synthesized)
actgcgtctttaagcttcatcccgttggtccggcctgttggcgatgtgcttggggcaggaggccttgcccgtgcccgccccccaactctgattgtgtctgtctttccttggtgccacttt

SEQ ID NO: 74753 - DNA, 120 bp, Artificial Sequence
  ENSG00000078808_22 (sequence is synthesized)
atttgggtcttttctgcccaggacatggcccacctggacctagagctctgtgacatttctgtgaagcctccgtctacctttgggactcagcagaggtgtgtttagaattcactctgcgtt

SEQ ID NO: 74754 - DNA, 120 bp, Artificial Sequence
  ENSG00000078808_23 (sequence is synthesized)
ttgggggtccccatgcatgctgaggtgctgttccctgcccacccgtgtccgatccgtcttggcctccccgacctcagggtgcctaggaccccccgacctctttgggtatttggtttctgg

SEQ ID NO: 74755 - DNA, 120 bp, Artificial Sequence
  ENSG00000078808_24 (sequence is synthesized)
ctcaggaagagcagctgccgggtcctggaggaggggcctgggaagcgctggcaggcgtcactcctgcgacctcccacccctccctgcatggctcctgcgagggtcaccgcgtgagtccgg

SEQ ID NO: 74756 - DNA, 120 bp, Artificial Sequence
  ENSG00000078808_25 (sequence is synthesized)
gggctgctgtcctcgcgcctcagacctgattctggggaccgcggtgaaggcgtggcaggcgggcatcactcccttcccccgcctccatcgctgcctctctctgggtctgcgtcctcttct

SEQ ID NO: 74757 - DNA, 120 bp, Artificial Sequence
  ENSG00000078808_26 (sequence is synthesized)
cacagggacagcagtcgttgactctccctgatccaggagggtctctccagatccttccctaacagcagaggcccggctcgtggggagggactgggactcaaggcttcttcaccagcctga

SEQ ID NO: 74758 - DNA, 120 bp, Artificial Sequence
  ENSG00000078808_27 (sequence is synthesized)
ggttggtgctggggctcggcggcggctgtgagaatcctgtgctggagaaagcgtctctcggccggcctgtctggggcgtctgtgcctctcctggatgggtctcagtttggccccgtccat

SEQ ID NO: 74759 - DNA, 120 bp, Artificial Sequence
  ENSG00000078808_28 (sequence is synthesized)
ccatcccaggagctgcggtggagcagacagggaggggtgccccaggaaccacagccccgtcactcctgtcttcctttaagtgaaccggtcgtgtagatggaggttgttcagaaagggata

SEQ ID NO: 74760 - DNA, 120 bp, Artificial Sequence
  ENSG00000078808_29 (sequence is synthesized)
agatgggacggcagctgggcctcatcccgcagtgagcgcgacgcagaggctgccgggcttgtggcaggggcttcggccagggcagagtcgggcctcacgtgcagggggctgagtgtgggc

SEQ ID NO: 74761 - DNA, 120 bp, Artificial Sequence
  ENSG00000078808_30 (sequence is synthesized)
ctcaacactggacttggccactgactgcagtgagccccaagatggggcaggaggtggtgtttctgtcctggagacccagggtggcttgggtccttgggatgtgtggggacctcggggtga

SEQ ID NO: 74762 - DNA, 120 bp, Artificial Sequence
  ENSG00000078808_31 (sequence is synthesized)
gggggccacacacccagaggcagtgccgtgtcccggctgggagggttcctgggaagctctgctcagccccagtctcagtcatttctagaaactgtgttttcctccctgtgacgtcacacg

SEQ ID NO: 74763 - DNA, 120 bp, Artificial Sequence
  ENSG00000078808_32 (sequence is synthesized)
tgaaggaaacggaaaagggcagtgagtccttcgccccgcggcgccgtgcgcacgtcagccttcagggtgattccgctcctccagaggggcaggcgcgggtgtggggggtggggcccaggc

SEQ ID NO: 74764 - DNA, 120 bp, Artificial Sequence
  ENSG00000078808_33 (sequence is synthesized)
ccatcctgaggggtcccaggcatgaggggctctgagctgtgtcctggggtggtctgggccatggggaggttctggatcatgtcttgagaggtctgggctgtgtggggggtccaggccatg

SEQ ID NO: 74765 - DNA, 120 bp, Artificial Sequence
  ENSG00000078808_34 (sequence is synthesized)
tcctgggggtctgggctgtgtctgtggggagtcagggccatccatgtattgggggtctggggcaggggggggtccaggctgtcttggggagtccgggctgtgtggaggggtccaagctat

SEQ ID NO: 74766 - DNA, 120 bp, Artificial Sequence
  ENSG00000078808_35 (sequence is synthesized)
gcctttggggatcaggcctgtgggaggctctgggttatgtcttggcgggggtccaggctgtgtcttaggggctgggccatgttctggggacgtgtgaatcctggagggtggggccccggt

SEQ ID NO: 74767 - DNA, 120 bp, Artificial Sequence
  ENSG00000078808_36 (sequence is synthesized)
cgtccgggacctgggtgaggctgggtccagcctggccggcacgccaggacccaggaccgactggcaggggccgggcatcgtcgggaggtcggggcaggtcctgcgggagccccagcctgg

SEQ ID NO: 74768 - DNA, 87 bp, Artificial Sequence
  ENSG00000078814_0 (sequence is synthesized)
gagcttaagtgatgtgtccgcctgtggcaataaaaggggtagcagagcttcctgccctcaccgtggtgccgagtgcctgctgccttg

SEQ ID NO: 74769 - DNA, 120 bp, Artificial Sequence
  ENSG00000078814_1 (sequence is synthesized)
cttcctgccctcaccgtggtgccgagtgcctgctgccttgggccgccttgaacctccagggtttccagctcctcctccttcaccccagtgccactgccatgatggatgtgagtgaacttg

SEQ ID NO: 74770 - DNA, 120 bp, Artificial Sequence
  ENSG00000078814_2 (sequence is synthesized)
gggagtctgcccgctacctccgccagggctaccaggagatgacgaaggtgcacactatcccatgggacgggaagaagcgagtctgggtgcctgatgaacaggacgcctacgtggaggccg

SEQ ID NO: 74771 - DNA, 120 bp, Artificial Sequence
  ENSG00000078814_3 (sequence is synthesized)
aggtcaagtcggaggctaccgggggcagagtcaccgtggagaccaaagaccagaaggtgctgatggtgcgtgaagccgagctgcagcccatgaacccgcctcgcttcgacttactggagg

SEQ ID NO: 74772 - DNA, 120 bp, Artificial Sequence
  ENSG00000078814_4 (sequence is synthesized)
acatggccatgatgacgcacctgaacgaggcctctgtgctgcacaacctgcgccagcgctatgcccgctggatgatctatacctactcaggcctcttctgtgtcaccatcaacccctaca

SEQ ID NO: 74773 - DNA, 120 bp, Artificial Sequence
  ENSG00000078814_5 (sequence is synthesized)
aatggctcccagtctatacggcctccgtagtggctgcttacaagggaaagcgccgctcagattccccgccccatatatatgcggtggcggacaacgcctacaacgacatgctgcgcaacc

SEQ ID NO: 74774 - DNA, 120 bp, Artificial Sequence
  ENSG00000078814_6 (sequence is synthesized)
gagacaaccagtccatgctgatcaccggagagtcgggggccggtaagacggttaacaccaagcgggtcattcagtactttgccatcgtcgctgccctgggagacgggccgggcaagaagg

SEQ ID NO: 74775 - DNA, 120 bp, Artificial Sequence
  ENSG00000078814_7 (sequence is synthesized)
cccaatttctggcaacaaagacggggggcacccttgaggatcaaatcatcgaggccaaccctgccatggaggcctttggcaacgccaagaccctgaggaatgataactcctcccgctttg

SEQ ID NO: 74776 - DNA, 120 bp, Artificial Sequence
  ENSG00000078814_8 (sequence is synthesized)
gcaagttcatccgcattcactttggtccctctgggaagctggcatccgcggatattgacagctatctcctggagaagtcgcgggtgatcttccagttgcctggtgagcgcagctaccatg

SEQ ID NO: 74777 - DNA, 120 bp, Artificial Sequence
  ENSG00000078814_9 (sequence is synthesized)
tctactaccagatcctctcagggaggaagccagagctgcaggacatgctgcttctgtctatgaacccctatgactaccacttctgcagccagggcgtcatcaccgtggacaacatgaatg

SEQ ID NO: 74778 - DNA, 120 bp, Artificial Sequence
  ENSG00000078814_10 (sequence is synthesized)
atggggaggagctcatcgccaccgaccatgccatggacatcctaggcttcagcgtggatgagaaatgtgcctgctataagatcgtgggcgccctcctgcactttggcaacatgaagttca

SEQ ID NO: 74779 - DNA, 120 bp, Artificial Sequence
  ENSG00000078814_11 (sequence is synthesized)
agcagaagcagcgggaggagcaggcggaggccgatggcactgagagtgctgacaaggctgcctacctgatgggggtcagcagtggggacctcctcaaaggccttttgcacccccgggtgc

SEQ ID NO: 74780 - DNA, 120 bp, Artificial Sequence
  ENSG00000078814_12 (sequence is synthesized)
gtgtagggaacgagtacgtgaccaagggccagagtgtggagcaggtggtgtttgctgtgggggctctggccaaggccacctatgaccggctgttcaggtggctggtgtctcggatcaacc

SEQ ID NO: 74781 - DNA, 120 bp, Artificial Sequence
  ENSG00000078814_13 (sequence is synthesized)
agaccctggacacaaagctgccccggcagttcttcatcggggttctggacatcgctgggtttgagatctttgagttcaacagcttcgaacagctgtgcatcaacttcaccaatgagaaat

SEQ ID NO: 74782 - DNA, 120 bp, Artificial Sequence
  ENSG00000078814_14 (sequence is synthesized)
tgcagcagttcttcaaccagcacatgtttgtgctggagcaggaggagtacaagcgggagggcatcgactgggtcttcatcgacttcggccttgacctgcagccttgcatcgacctcatcg

SEQ ID NO: 74783 - DNA, 120 bp, Artificial Sequence
  ENSG00000078814_15 (sequence is synthesized)
agaagccactgggcatcctgtccatcctggaggaggaatgcatgttccccaaggcctcagacgccagcttccgggccaagctctacgacaaccacgcggggaagtcacccaatttccagc

SEQ ID NO: 74784 - DNA, 120 bp, Artificial Sequence
  ENSG00000078814_16 (sequence is synthesized)
agcctcggcctgacaagaagcgcaagtaccaggcccacttcgaggtggtccactacgcaggcgtggtgccttacagcattgtgggctggctggagaaaaacaaggatcccctgaatgaga

SEQ ID NO: 74785 - DNA, 120 bp, Artificial Sequence
  ENSG00000078814_17 (sequence is synthesized)
ccgtggtccccatcttccagaagtcacagaataggctcctggcgactctctatgagaattatgcgggctcctgctccactgagccccccaagtctggggtgaaagagaagcgtaagaagg

SEQ ID NO: 74786 - DNA, 120 bp, Artificial Sequence
  ENSG00000078814_18 (sequence is synthesized)
cagcatcgttccagacggtgtcccagctgcacaaggagaacctcaacaagctgatgaccaacctgcgggccacacagccccacttcgtccgctgcattgtccccaacgagaacaaaaccc

SEQ ID NO: 74787 - DNA, 120 bp, Artificial Sequence
  ENSG00000078814_19 (sequence is synthesized)
caggggtcatggatgccttcttggtgctacaccagctgcgctgcaatggggtcctggaggggatccggatctgccgccaagggttccccaacaggttgctctacaccgacttccggcagc

SEQ ID NO: 74788 - DNA, 120 bp, Artificial Sequence
  ENSG00000078814_20 (sequence is synthesized)
ggtaccgtatcctgaaccccagtgccatcccggatgacaccttcatggacagcaggaaggccacagagaaactgctgggctcgctggacttggatcacacccagtaccagtttggccaca

SEQ ID NO: 74789 - DNA, 120 bp, Artificial Sequence
  ENSG00000078814_21 (sequence is synthesized)
ccaaggtgttcttcaaggctgggcttctaggcgtcctggaagagctccgtgaccagcgcctggccaaggtgctgacgctgctgcaggcgcggagccgtggccgcctcatgcgccttgagt

SEQ ID NO: 74790 - DNA, 120 bp, Artificial Sequence
  ENSG00000078814_22 (sequence is synthesized)
accagcgcctgctgggaggcagggatgcgctgttcaccatccagtggaacatccgtgccttcaatgccgtcaagaactggtcatggatgaagctctttttcaagatgaagccgctgctgc

SEQ ID NO: 74791 - DNA, 120 bp, Artificial Sequence
  ENSG00000078814_23 (sequence is synthesized)
gctcggcgcaggctgaggaggagctggcggccctgcgggcagagctgcgggggttgcgaggggcgctggctgcggccgaggccaagcgccaggaactggaggagacgcacgtcagcatca

SEQ ID NO: 74792 - DNA, 120 bp, Artificial Sequence
  ENSG00000078814_24 (sequence is synthesized)
cccaggagaagaatgacctggccctgcagctgcaggctgagcaggacaacctggcagatgccgaggagcgctgccacttgctgatcaagtccaaggtgcagctggaggggaaggtgaagg

SEQ ID NO: 74793 - DNA, 120 bp, Artificial Sequence
  ENSG00000078814_25 (sequence is synthesized)
agctgagtgagcggctggaggatgaggaggaggtgaacgctgacctggccgcccgccggcgcaagctggaggacgagtgcacggagctcaagaaggacattgatgacctggagctgacac

SEQ ID NO: 74794 - DNA, 120 bp, Artificial Sequence
  ENSG00000078814_26 (sequence is synthesized)
acggaagagatggctgcgctggacgagtcagtggcccggctgaccaaggagaagaaggcgttgcaggaggcccaccaacaggccctgggtgacctgcaggccgaggaggaccgtgtgagc

SEQ ID NO: 74795 - DNA, 120 bp, Artificial Sequence
  ENSG00000078814_27 (sequence is synthesized)
gcgctgaccaaggccaagctccggctggagcaacaggtggaggacctggaatgctccctggagcaggagaagaagctgcgcatggacacggagcgggccaagcgcaagctggagggtgac

SEQ ID NO: 74796 - DNA, 120 bp, Artificial Sequence
  ENSG00000078814_28 (sequence is synthesized)
ctgaagctgacgcaggagtcggtggctgatgctgctcaagacaagcagcagctggaggagaagctcaagaagaaggactccgagctgagccagctgagcctgcgggtggaagacgagcag

SEQ ID NO: 74797 - DNA, 120 bp, Artificial Sequence
  ENSG00000078814_29 (sequence is synthesized)
ctcttgggggcccagatgcagaagaagatcaaggagctgcaggctcgggcggaggagctggaagaggagctggaggcagagcgggcagcccgggcccgcgtggagaagcagcgtgcagag

SEQ ID NO: 74798 - DNA, 120 bp, Artificial Sequence
  ENSG00000078814_30 (sequence is synthesized)
cgcgggagctggaggagctgagcgagcggctggaggaggcaggcggcgcatccgcggggcagcgcgagggctgccgcaagcgggaggcggagctggggaggctgcggcgggagctggagg

SEQ ID NO: 74799 - DNA, 120 bp, Artificial Sequence
  ENSG00000078814_31 (sequence is synthesized)
gaggaggcggcgctgcggcacgaggccacagtggcggcactgcggcgcaagcaggcggagggcgcggcggagctgggggagcaggtggacagcctgcagcgggtgcggcagaagctggag

SEQ ID NO: 74800 - DNA, 120 bp, Artificial Sequence
  ENSG00000078814_32 (sequence is synthesized)
aaggagaagagtgagctgcgcatggaggtggacgacctggctgccaacgtggagactctgacccgcgccaaggccagtgcagagaagctgtgccggacctatgaggatcagctaagcgag

SEQ ID NO: 74801 - DNA, 120 bp, Artificial Sequence
  ENSG00000078814_33 (sequence is synthesized)
gccaagatcaaggtggaggagctgcagcggcagctggcggacgcaagcacgcagcgtgggcgactacagacggaaagcggggagctgagtcgcctgctagaggagaaggagtgtctgatc

SEQ ID NO: 74802 - DNA, 120 bp, Artificial Sequence
  ENSG00000078814_34 (sequence is synthesized)
agtcagctgagccgtggaaaggccctggccgcccaaagcctggaagagttgcggcgccagctagaggaggaaagcaaggccaagagtgccctggcccacgccgtgcaggctctgcggcac

SEQ ID NO: 74803 - DNA, 120 bp, Artificial Sequence
  ENSG00000078814_35 (sequence is synthesized)
gactgtgacctcctgcgggagcaacacgaggaggaggctgaggcccaggctgagctgcagcggctgctgtccaaggccaatgccgaggtggcccagtggaggagcaagtacgaagcagat

SEQ ID NO: 74804 - DNA, 120 bp, Artificial Sequence
  ENSG00000078814_36 (sequence is synthesized)
gccatccagaggaccgaggagctggaggaggccaaaaaaaagctggcactgcggctgcaggaggcagaggagggcgtggaggctgccaacgccaagtgctcatcgttggagaaggccaag

SEQ ID NO: 74805 - DNA, 120 bp, Artificial Sequence
  ENSG00000078814_37 (sequence is synthesized)
ctgcggctacagacagagtcagaggatgtaaccctggagctggagcgggcgacctcagcagctgctgcgctggacaagaagcagcggcacttggaacgggcactggaggaacggcggcgg

SEQ ID NO: 74806 - DNA, 120 bp, Artificial Sequence
  ENSG00000078814_38 (sequence is synthesized)
caggaggaggagatgcagcgggagctggaggcggcacagagggagtcccgtggcctgggcaccgagctcttccggctgcggcacggccacgaggaggcacttgaagccctggagacgctc

SEQ ID NO: 74807 - DNA, 120 bp, Artificial Sequence
  ENSG00000078814_39 (sequence is synthesized)
aagcgggagaacaagaacctgcaggaggagatcagcgacctcacagaccaggtgagtctcagtgggaagagcatccaggaactggagaaaaccaagaaggcgctggaaggcgagaagagt

SEQ ID NO: 74808 - DNA, 120 bp, Artificial Sequence
  ENSG00000078814_40 (sequence is synthesized)
gagatccaggctgcactggaggaggcagagggggccctggagctggaggagaccaagacgctgcggatccagctggagctctcccaggtcaaagcagaagtggaccggaagctggcagag

SEQ ID NO: 74809 - DNA, 120 bp, Artificial Sequence
  ENSG00000078814_41 (sequence is synthesized)
aaagacgaggagtgcgctaacctgaggcgcaaccaccagcgagctgtggagtccctgcaggcctccctggatgcagagacacgggcccgcaatgaggcgctgcggctcaagaagaagatg

SEQ ID NO: 74810 - DNA, 120 bp, Artificial Sequence
  ENSG00000078814_42 (sequence is synthesized)
gagggtgacctcaacgacctggagctgcagctgggccatgccacccgtcaggccacagaggcccaggctgccacgcggctgatgcaggcacagctcaaggaggagcaggcagggcgggac

SEQ ID NO: 74811 - DNA, 120 bp, Artificial Sequence
  ENSG00000078814_43 (sequence is synthesized)
gaggagcagcggctggcagctgagctccacgagcaggcgcaggctctggagcgccgggcctcgctgctggctgcggagctggaggagctgcgggctgccctggagcagggcgagcgcagc

SEQ ID NO: 74812 - DNA, 120 bp, Artificial Sequence
  ENSG00000078814_44 (sequence is synthesized)
cggcgactggcagagcaggagcttttggaggccaccgagcgcctcaaccttctgcattcgcagaacacaggcctcctaaaccagaagaagaagctggaggcggacttggcccagctgagc

SEQ ID NO: 74813 - DNA, 120 bp, Artificial Sequence
  ENSG00000078814_45 (sequence is synthesized)
ggggaggtggaggaggctgcacaggagaggcgggaggctgaggagaaggccaaaaaggccatcactgatgcggccatgatggccgaggagctgaagaaggagcaggacacaagtgcacac

SEQ ID NO: 74814 - DNA, 120 bp, Artificial Sequence
  ENSG00000078814_46 (sequence is synthesized)
ctggaacggatgaagaagacgctggagcagacggtgcgcgagctccaggcccgccttgaggaggcagaacaggccgccctccgtggcgggaagaagcaggtgcagaagctggaggccaag

SEQ ID NO: 74815 - DNA, 120 bp, Artificial Sequence
  ENSG00000078814_47 (sequence is synthesized)
gtacgggagctggaggctgagcttgatgcagagcagaagaagcacgccgaggcccttaagggcgtgcgcaagcatgagcgccgtgtcaaggagctcgcataccaggccgaggaggacagg

SEQ ID NO: 74816 - DNA, 120 bp, Artificial Sequence
  ENSG00000078814_48 (sequence is synthesized)
aagaacctggctcgcatgcaggacctggtggacaagctgcagagcaaggtcaagagctacaagcgccagtttgaggaggcggagcagcaggccaacaccaacctggccaagtatcgcaag

SEQ ID NO: 74817 - DNA, 120 bp, Artificial Sequence
  ENSG00000078814_49 (sequence is synthesized)
gcccagcacgagctggatgatgcggaggagcgggcagacatggcggaaacccaggccaacaagctgcgggcacggacccgggacgccctgggccccaagcacaaggagtgacggcctgac

SEQ ID NO: 74818 - DNA, 120 bp, Artificial Sequence
  ENSG00000078814_50 (sequence is synthesized)
cccctgggctctaaagaggaatgtctgctgttgcacatctggctgaggccacctgccccgatcctgccatctctgcatcgccccctgctgccttcagccttccctgggccctgaataaac

SEQ ID NO: 74819 - DNA, 120 bp, Artificial Sequence
  ENSG00000078814_51 (sequence is synthesized)
accacagccagtttccttctcattcttttctttggggttcaggaggaaaaacacagtcctagggacaaaagccaggtccacagcagtcatttttaaaataaagttatttaatagtctcca

SEQ ID NO: 74820 - DNA, 120 bp, Artificial Sequence
  ENSG00000078814_52 (sequence is synthesized)
gtacgggagctggaggctgagcttgatgcagagcagaagaagcacgccgaggcccttaagggcgtgcgcaagcatgagcgccgtgtcaaggagctcgcataccaggtgggcgacagggtc

SEQ ID NO: 74821 - DNA, 120 bp, Artificial Sequence
  ENSG00000078814_53 (sequence is synthesized)
ggggcgggtctagaactcacctgcggactatggaggccgtgcgtgtgggctggggcagggctgtgagcacaagtcaggggtgaggccaggacggccacagagggtgtggtgtggcaagtc

SEQ ID NO: 74822 - DNA, 120 bp, Artificial Sequence
  ENSG00000078814_54 (sequence is synthesized)
aagtagctccttgaggaatatcgcagggttcttctgaagactggggcctggggcctggggatgggaacttgcgtatccctcccaaaaccctacctatggggggagaatgtggtggcccat

SEQ ID NO: 74823 - DNA, 120 bp, Artificial Sequence
  ENSG00000078814_55 (sequence is synthesized)
gagacaaccagtccatgctgatcacgtgagtgtggggctctgggggtggggtggaaaatgctggccatctggcagaaagagggcggtaccacagtcatttcccaggattgaatccaaagt

SEQ ID NO: 74824 - DNA, 120 bp, Artificial Sequence
  ENSG00000078814_56 (sequence is synthesized)
gcttaggccaggacttttaccacctggagctagtgtcccagctgaagctaaattaggcctgagcactttccctgcccccattctgaacagatgtgttcttgatgggggatagggagggga

SEQ ID NO: 74825 - DNA, 120 bp, Artificial Sequence
  ENSG00000078814_57 (sequence is synthesized)
cacctcctctccccggggcctggaatctcccaccttgatcctctggggttctaattctggctcaggggcagcggaaagattcctctgcttttcctcctttttaccatctacttatgtctg

SEQ ID NO: 74826 - DNA, 120 bp, Artificial Sequence
  ENSG00000078814_58 (sequence is synthesized)
aatcttacctctgatctttccattgcctctgtgggaaaatggtagaataattcttacatgccaggctcatgtccagtcaggccaatatggacaatgtttagtgtgagtgtgcatgcgcgt

SEQ ID NO: 74827 - DNA, 120 bp, Artificial Sequence
  ENSG00000078814_59 (sequence is synthesized)
atatggacaatgtttagtgtgagtgtgcatgcgcgtatgcagttaagagcaagtgccttggccgggcacagtggctcatgcccgtaatttctgcactttgggaggctgaggtgggtggat

SEQ ID NO: 74828 - DNA, 120 bp, Artificial Sequence
  ENSG00000078814_60 (sequence is synthesized)
gccccaaggtgaggagtggcaggggcattgctctctgtgcagggggactgtgggggctgacaggtagtactgctcactcagctatccctttctcctcagcacaaggagtgacggcctgac

SEQ ID NO: 74829 - DNA, 120 bp, Artificial Sequence
  ENSG00000078898_0 (sequence is synthesized)
gggcagaggagggctaccctggggctgagagttcacctgtctcaggaaccacctgagcccacagatcctgtgggcagcggccagggcagccatggcttgggcaagtaggctgggcctgct

SEQ ID NO: 74830 - DNA, 120 bp, Artificial Sequence
  ENSG00000078898_1 (sequence is synthesized)
gctggcactgctgctgcccgtggtcggtgcctccacgccaggcaccgtggtccgactcaacaaggcagcattgagctacgtgtctgaaattgggaaagcccctctccagcgggccctgca

SEQ ID NO: 74831 - DNA, 120 bp, Artificial Sequence
  ENSG00000078898_2 (sequence is synthesized)
ggtcactgtccctcatttcctggactggagtggagaggcgcttcagcccaccaggatccggattctgaatgtccatgtgccccgcctccacctgaaattcattgctggtttcggagtgcg

SEQ ID NO: 74832 - DNA, 120 bp, Artificial Sequence
  ENSG00000078898_3 (sequence is synthesized)
cctgctggcagcagctaattttactttcaaggtctttcgcgccccagagcccctggagctgacgctgcctgtggaactgctggctgacacccgcgtgacccagagctccatcaggacccc

SEQ ID NO: 74833 - DNA, 120 bp, Artificial Sequence
  ENSG00000078898_4 (sequence is synthesized)
tgtggtcagcatctctgcctgctctttattctcgggccacgccaacgagtttgatggcagtaacagcacctcccacgcgctgctggtcctggtgcagaagcacattaaagctgtcttgag

SEQ ID NO: 74834 - DNA, 120 bp, Artificial Sequence
  ENSG00000078898_5 (sequence is synthesized)
taacaagctgtgcctgagcatctccaacctggtgcagggtgtcaatgtccacctgggcaccttaattggcctcaaccccgtgggtcctgagtcccagatccgctattccatggtcagtgt

SEQ ID NO: 74835 - DNA, 120 bp, Artificial Sequence
  ENSG00000078898_6 (sequence is synthesized)
gcccactgtcaccagtgactacatttccctggaagtcaatgctgttctcttcctgctgggcaagcccatcatcctgcccacggatgccaccccttttgtgttgccaaggcatgtgggtac

SEQ ID NO: 74836 - DNA, 120 bp, Artificial Sequence
  ENSG00000078898_7 (sequence is synthesized)
gtcggatgacaacctgctgaacacctctgctctgggccggctcatcccggaggtggcccgccagtttcccgagcccatgcctgtggtgctcaaggtgcggctgggtgccacacctgtggc

SEQ ID NO: 74837 - DNA, 120 bp, Artificial Sequence
  ENSG00000078898_8 (sequence is synthesized)
catgctccacacaaacaacgccaccctgcggctgcagcccttcgtggaggtcctggccacagcctccaactcggctttccagtccctcttctccctggatgtggtagtgaacttgagact

SEQ ID NO: 74838 - DNA, 120 bp, Artificial Sequence
  ENSG00000078898_9 (sequence is synthesized)
ccagctctctgtgtccaaggtgaagcttcaggggaccacgtctgtgctgggggatgtccagctcacggtggcctcctccaacgtgggcttcattgatacagatcaggtgcgcacactgat

SEQ ID NO: 74839 - DNA, 120 bp, Artificial Sequence
  ENSG00000078898_10 (sequence is synthesized)
gggcaccgtttttgagaagcccctgctggaccatctcaatgctctcttggccatgggaattgccctccctggtgtggtcaacctccactatgtcgcccctgagatctttgtctatgaggg

SEQ ID NO: 74840 - DNA, 120 bp, Artificial Sequence
  ENSG00000078898_11 (sequence is synthesized)
ctacgtggtgatatccagtggactcttctaccagagctgaggcaagaccactgggaggcctgagagtgggccagctcgctgctcaggcgaatttctcatttcaagccactggggaaactg

SEQ ID NO: 74841 - DNA, 120 bp, Artificial Sequence
  ENSG00000078898_12 (sequence is synthesized)
aggcaaaaccatacttagtcatcaccaacaagctggactgcttagctgggctgttttatcttccctgagtgcctgggtctccctccctcacttctgccctttcccttcctcctcctcttc

SEQ ID NO: 74842 - DNA, 120 bp, Artificial Sequence
  ENSG00000078898_13 (sequence is synthesized)
tcctccctcttccctcatctcccccctccttcctctgccccaccccagcggggagcagactgctcctccaggctgtatagacctgccctcttgcattaaacaacttctcttgagctgcaa

SEQ ID NO: 74843 - DNA, 80 bp, Artificial Sequence
  ENSG00000078900_0 (sequence is synthesized)
cgcccgcgaaggggacgcagcgaaaccggggcccgcgccaggccagccgggacggacgccgatgcccggggctgcgacgg

SEQ ID NO: 74844 - DNA, 120 bp, Artificial Sequence
  ENSG00000078900_1 (sequence is synthesized)
ctgcagagcgagctgccctcggaggccggcgtggggaagatggcccagtccaccgccacctcccctgatgggggcaccacgtttgagcacctctggagctctctggaaccagacagcacc

SEQ ID NO: 74845 - DNA, 120 bp, Artificial Sequence
  ENSG00000078900_2 (sequence is synthesized)
tacttcgaccttccccagtcaagccgggggaataatgaggtggtgggcggaacggattccagcatggacgtcttccacctggagggcatgactacatctgtcatggcccagttcaatctg

SEQ ID NO: 74846 - DNA, 120 bp, Artificial Sequence
  ENSG00000078900_3 (sequence is synthesized)
ctgagcagcaccatggaccagatgagcagccgcgcggcctcggccagcccctacaccccagagcacgccgccagcgtgcccacccactcgccctacgcacaacccagctccaccttcgac

SEQ ID NO: 74847 - DNA, 120 bp, Artificial Sequence
  ENSG00000078900_4 (sequence is synthesized)
accatgtcgccggcgcctgtcatcccctccaacaccgactaccccggaccccaccactttgaggtcactttccagcagtccagcacggccaagtcagccacctggacgtactccccgctc

SEQ ID NO: 74848 - DNA, 120 bp, Artificial Sequence
  ENSG00000078900_5 (sequence is synthesized)
ttgaagaaactctactgccagatcgccaagacatgccccatccagatcaaggtgtccaccccgccacccccaggcaccgccatccgggccatgcctgtttacaagaaagcggagcacgtg

SEQ ID NO: 74849 - DNA, 120 bp, Artificial Sequence
  ENSG00000078900_6 (sequence is synthesized)
accgacgtcgtgaaacgctgccccaaccacgagctcgggagggacttcaacgaaggacagtctgctccagccagccacctcatccgcgtggaaggcaataatctctcgcagtatgtggat

SEQ ID NO: 74850 - DNA, 120 bp, Artificial Sequence
  ENSG00000078900_7 (sequence is synthesized)
gaccctgtcaccggcaggcagagcgtcgtggtgccctatgagccaccacaggtggggacggaattcaccaccatcctgtacaacttcatgtgtaacagcagctgtgtagggggcatgaac

SEQ ID NO: 74851 - DNA, 120 bp, Artificial Sequence
  ENSG00000078900_8 (sequence is synthesized)
cggcggcccatcctcatcatcatcaccctggagatgcgggatgggcaggtgctgggccgccggtcctttgagggccgcatctgcgcctgtcctggccgcgaccgaaaagctgatgaggac

SEQ ID NO: 74852 - DNA, 120 bp, Artificial Sequence
  ENSG00000078900_9 (sequence is synthesized)
cactaccgggagcagcaggccctgaacgagagctccgccaagaacggggccgccagcaagcgtgccttcaagcagagcccccctgccgtccccgcccttggtgccggtgtgaagaagcgg

SEQ ID NO: 74853 - DNA, 120 bp, Artificial Sequence
  ENSG00000078900_10 (sequence is synthesized)
cggcatggagacgaggacacgtactaccttcaggtgcgaggccgggagaactttgagatcctgatgaagctgaaagagagcctggagctgatggagttggtgccgcagccactggtggac

SEQ ID NO: 74854 - DNA, 120 bp, Artificial Sequence
  ENSG00000078900_11 (sequence is synthesized)
tcctatcggcagcagcagcagctcctacagaggccgagtcacctacagcccccgtcctacgggccggtcctctcgcccatgaacaaggtgcacgggggcatgaacaagctgccctccgtc

SEQ ID NO: 74855 - DNA, 120 bp, Artificial Sequence
  ENSG00000078900_12 (sequence is synthesized)
aaccagctggtgggccagcctcccccgcacagttcggcagctacacccaacctggggcccgtgggccccgggatgctcaacaaccatggccacgcagtgccagccaacggcgagatgagc

SEQ ID NO: 74856 - DNA, 120 bp, Artificial Sequence
  ENSG00000078900_13 (sequence is synthesized)
agcagccacagcgcccagtccatggtctcggggtcccactgcactccgccacccccctaccacgccgaccccagcctcgtcagttttttaacaggattggggtgtccaaactgcatcgag

SEQ ID NO: 74857 - DNA, 120 bp, Artificial Sequence
  ENSG00000078900_14 (sequence is synthesized)
tatttcacctcccaagggttacagagcatttaccacctgcagaacctgaccattgaggacctgggggccctgaagatccccgagcagtaccgcatgaccatctggcggggcctgcaggac

SEQ ID NO: 74858 - DNA, 120 bp, Artificial Sequence
  ENSG00000078900_15 (sequence is synthesized)
ctgaagcagggccacgactacagcaccgcgcagcagctgctccgctctagcaacgcggccaccatctccatcggcggctcaggggaactgcagcgccagcgggtcatggaggccgtgcac

SEQ ID NO: 74859 - DNA, 120 bp, Artificial Sequence
  ENSG00000078900_16 (sequence is synthesized)
ttccgcgtgcgccacaccatcaccatccccaaccgcggcggcccaggcggcggccctgacgagtgggcggacttcggcttcgacctgcccgactgcaaggcccgcaagcagcccatcaag

SEQ ID NO: 74860 - DNA, 120 bp, Artificial Sequence
  ENSG00000078900_17 (sequence is synthesized)
gaggagttcacggaggccgagatccactgagggcctcgcctggctgcagcctgcgccaccgcccagagacccaagctgcctcccctctccttcctgtgtgtccaaaactgcctcaggagg

SEQ ID NO: 74861 - DNA, 120 bp, Artificial Sequence
  ENSG00000078900_18 (sequence is synthesized)
caggaccttcgggctgtgcccggggaaaggcaaggtccggcccatccccaggcacctcacaggccccaggaaaggcccagccaccgaagccgcctgtggacagcctgagtcacctgcaga

SEQ ID NO: 74862 - DNA, 120 bp, Artificial Sequence
  ENSG00000078900_19 (sequence is synthesized)
accttctggagctgccctagtgctgggcttgtggggcgggggctggcccactctcagccctgccactgccccggcgtgctccatggcaggcgtgggtggggaccgcagcgtcggctccga

SEQ ID NO: 74863 - DNA, 120 bp, Artificial Sequence
  ENSG00000078900_20 (sequence is synthesized)
cttccaggcttcatcctagagactgtcatctcccaaccaggcgaggtccttccaaaggaaaggatcctctttgctgatggactgccaaaaagtattttgcgacatcttttggttctggat

SEQ ID NO: 74864 - DNA, 120 bp, Artificial Sequence
  ENSG00000078900_21 (sequence is synthesized)
caccagtgtattttcagggaatgtccctaactgcgtcttgcccgcgccgggggctggggactctctctgctggacttgggactggcctctgcccccagcacgctgtattctgcaggaccg

SEQ ID NO: 74865 - DNA, 120 bp, Artificial Sequence
  ENSG00000078900_22 (sequence is synthesized)
cctccttcctgcccctaacaacaaccacagtgttgctgaaattggagaaaactggggagggcgcaaccccccccaggcgcggggaagcatgtggtaccgcctcagccagtgcccctcagc

SEQ ID NO: 74866 - DNA, 120 bp, Artificial Sequence
  ENSG00000078900_23 (sequence is synthesized)
ctggccacagtcgcctctcctcggggacccctcagcagaaagggacagcctgtccttagaggactggaaattgtcaatatttgataaaatgatacccttttctacatggtgggtcagctt

SEQ ID NO: 74867 - DNA, 120 bp, Artificial Sequence
  ENSG00000078900_24 (sequence is synthesized)
ttttttttttttttttaactttctttctcagcattctctttggagttcaacctagcgcccatgagccaggctgaggaagctgagtgagaagccaggtgggcgggacttgttcccaggaag

SEQ ID NO: 74868 - DNA, 120 bp, Artificial Sequence
  ENSG00000078900_25 (sequence is synthesized)
gccgggtggggaggaagcctagagggaaccccaggaagggcaaatccaggcaaatctgcaggaatgctctgccatgggagcagctcctcccttgccacggccaccttctctagcactgca

SEQ ID NO: 74869 - DNA, 120 bp, Artificial Sequence
  ENSG00000078900_26 (sequence is synthesized)
aggtccacagggcattgctttcctttctaggcggtggcagtcagggaacagactgaggtaggtgtaggggggtctaggccttcgtggagcaccccagggagttagtaggccccggggaga

SEQ ID NO: 74870 - DNA, 120 bp, Artificial Sequence
  ENSG00000078900_27 (sequence is synthesized)
cagagtctgcacaggccctttctggggccacctccatccacgaggagcagcctgagccttggtggccgaaccttgaccgtcccggagcacagcttcagggcagggaaccggagcccctgg

SEQ ID NO: 74871 - DNA, 120 bp, Artificial Sequence
  ENSG00000078900_28 (sequence is synthesized)
ggggcctcacgggtgtgacgaggcccttcattgcaggcaggtgggccaatgggagccctcacccacgcaagccgagacaccacccagagtgcaggctgcctggccccttctggcacggcc

SEQ ID NO: 74872 - DNA, 120 bp, Artificial Sequence
  ENSG00000078900_29 (sequence is synthesized)
agctccacaccccctgcctagggtatgtgtggtcctaagggctaggagcttcccctactaacatctcccagaaaaagcagttaagcccctcagggcacagcaaggttagacacagccccc

SEQ ID NO: 74873 - DNA, 120 bp, Artificial Sequence
  ENSG00000078900_30 (sequence is synthesized)
atccccagatcaggactccatcttgctaagtggcatcaccgtcaccagcctccccttatttaaaagcagcgactggtgttgccgcaggtacctggtctacgaagacgcaggcatccctct

SEQ ID NO: 74874 - DNA, 120 bp, Artificial Sequence
  ENSG00000078900_31 (sequence is synthesized)
cccaccgtccacctccccgggggccgctgacagcacagtcgcctgggtgcacgcttgtgggggcagcaggaacggggctgtcggctctcaggggatctggctgcagccagggcgagggcc

SEQ ID NO: 74875 - DNA, 120 bp, Artificial Sequence
  ENSG00000078900_32 (sequence is synthesized)
tggcccttccttccagctccttccggctccttccagctgaagggcaggaagctctggccgcttagcttctagggttccatctccctagaaaggtgcccacgcccagggcatcagtcagta

SEQ ID NO: 74876 - DNA, 120 bp, Artificial Sequence
  ENSG00000078900_33 (sequence is synthesized)
gcggcagcagcagcagactcggggctttcccagggtggcgcagccaccccagctgcatgtcacctcagctctccatcttattgccattttgtagatgaggaagctgagaccagaaaggct

SEQ ID NO: 74877 - DNA, 120 bp, Artificial Sequence
  ENSG00000078900_34 (sequence is synthesized)
aagacccatgccccaggcaccacacccatctcttgggggctgggcacctgctacccgaggccacctcctgaagcccccactcttcccccatgttccacttcaggagccgcgggggcccat

SEQ ID NO: 74878 - DNA, 120 bp, Artificial Sequence
  ENSG00000078900_35 (sequence is synthesized)
cctgacacccggggttcctcagcccagcgcagatgtgcttcagttccagagggcttgttgatttgtttcttaggtacgttacctgtccaccctgagtccagtgaggctgtcccaagagcc

SEQ ID NO: 74879 - DNA, 120 bp, Artificial Sequence
  ENSG00000078900_36 (sequence is synthesized)
cctgtagtgtgctcctgggaagggctgggggggctgggggggctgggagaggcccaggggcagctgtcactggaaccccagccagatgtccaaggaagccggccagaacacggagcagcc

SEQ ID NO: 74880 - DNA, 120 bp, Artificial Sequence
  ENSG00000078900_37 (sequence is synthesized)
agatggccccagctgcacctgtctagggagcccatgcagcctccttgcactggagaagcagctgtgaaagtagacagagttgagacttcgccgtggtcaggagaaaatgcaaattcccag

SEQ ID NO: 74881 - DNA, 120 bp, Artificial Sequence
  ENSG00000078900_38 (sequence is synthesized)
gaacaagaatcctttaagtgatatgtttttataaaactaaacaaatcaacaaataaatcttgaaggcggatggttttcccagcagtgcaggggttggagggaggctgctggcactcctgg

SEQ ID NO: 74882 - DNA, 120 bp, Artificial Sequence
  ENSG00000078900_39 (sequence is synthesized)
ggccaagggggacaggcagtggtcctgagtctgctcagagaggcaaggcagaaggagctcgccaggcaggtcagctcacatctgtccaagtcgctctggtcagaaacagcgactctcccc

SEQ ID NO: 74883 - DNA, 120 bp, Artificial Sequence
  ENSG00000078900_40 (sequence is synthesized)
cattcccccagcgttcccaccaggcctgggctgctgggaagcccttgctgtacccaggagcccgacccgcagtatcctggcacagagccacttgtcactcagaacagtcagtgtctccaa

SEQ ID NO: 74884 - DNA, 120 bp, Artificial Sequence
  ENSG00000078900_41 (sequence is synthesized)
cgcacaaacatccactcctctgttaccagttaaagcactttaatgctttaaggtgaaaacgaaatcccatccgtgtttttcgtgtaagatcgtgcttctccgagcagtattaatggacgc

SEQ ID NO: 74885 - DNA, 120 bp, Artificial Sequence
  ENSG00000078900_42 (sequence is synthesized)
cctccaatgacataacaactgtttttggtaatgtaatcttgggaaaatgtgttatttttttagctgtgtttcagtggggatttttgtttttgtaacataataaagtgtatgttccaatga

SEQ ID NO: 74886 - DNA, 120 bp, Artificial Sequence
  ENSG00000078900_43 (sequence is synthesized)
ggattcagccagttgacagaactaagggagatgggaaaagcgaaaatgccaacaaacggcccgcatgttccccagcatcctcggctcctgcctcactagctgcggagcctctcccgctcg

SEQ ID NO: 74887 - DNA, 120 bp, Artificial Sequence
  ENSG00000078900_44 (sequence is synthesized)
gtccacgctgccgggcggccacgaccgtgacccttcccctcgggccgcccagatccatgcctcgtcccacgggacaccagttccctggcgtgtgcagaccccccggcgcctaccatgctg

SEQ ID NO: 74888 - DNA, 120 bp, Artificial Sequence
  ENSG00000078900_45 (sequence is synthesized)
agcgggaacactcgctgccggcactgggtgctctgtggtgaccgagggctctcaaggccggtcctgcagggtccgaggtgggtggggaaggtgggcaggttgagggtgggcagggttgag

SEQ ID NO: 74889 - DNA, 120 bp, Artificial Sequence
  ENSG00000078900_46 (sequence is synthesized)
aggccaggaggaccagaaacccctccagaaggcatcatctgccagggacaggcagcagggtccagagcagagcccaccccacatctcctcctccaggaagccttctagcacttggggctg

SEQ ID NO: 74890 - DNA, 120 bp, Artificial Sequence
  ENSG00000078900_47 (sequence is synthesized)
ccctgggaccctgggtcatggcccttgctatgcctctgccactgaggggccttgtaaatgtctgctgagtggaaaggccaggaggggtggccagagtgaccatgacccaccaagaccaga

SEQ ID NO: 74891 - DNA, 120 bp, Artificial Sequence
  ENSG00000078900_48 (sequence is synthesized)
aatgtgtgctggaaggtgtccaggaagccctgctaagcatctgtcagtgtctccagcacagcaggaggctgttacaggtggcgcctgattcacatctgcaggacaggcccagttcaatct

SEQ ID NO: 74892 - DNA, 120 bp, Artificial Sequence
  ENSG00000078900_49 (sequence is synthesized)
tagtccctgagggctgcgggctgcgggctgcgggctggagaggaggtggctgcgttccccgcacctcaagaggtctgagctcgccccactgtctgctcggggttcccacctggcccgggc

SEQ ID NO: 74893 - DNA, 120 bp, Artificial Sequence
  ENSG00000078900_50 (sequence is synthesized)
cgggcaggaggcgggtctcagggccgggcagtctgggtgtgcccacccctctagacgtgagtggccagagccagtcagcctccaaagggccacagaggggacggacttggccctgctggt

SEQ ID NO: 74894 - DNA, 120 bp, Artificial Sequence
  ENSG00000078900_51 (sequence is synthesized)
gagatctctgccaagactggccagcggcttccccatgctcaggtgggatctttggtttgaaatcctgtcctggacagaggcacgggctctgctgccaagagttgtctgtccgagacaggc

SEQ ID NO: 74895 - DNA, 120 bp, Artificial Sequence
  ENSG00000078900_52 (sequence is synthesized)
ccacagccctagggtctgcagaacctgcctcctccaggcagcgagacgcatctgcgggtgggtggatttgggctttgctggcactgtctctggagtgtcatttccaggaattggcatgca

SEQ ID NO: 74896 - DNA, 120 bp, Artificial Sequence
  ENSG00000078900_53 (sequence is synthesized)
ccaaggagatggggtggaaccaccgtgccaagggctcaggtcctcactgcggtgcccctggagacagactggcccacggtggggatcttgctaattctgataacatcacctgtgcacaag

SEQ ID NO: 74897 - DNA, 120 bp, Artificial Sequence
  ENSG00000078900_54 (sequence is synthesized)
gccagtctcctcgagccaggcaccatgctcagggctttgagttgagctaactcttgcacccaccaacaacgcacagggctgactccatcactgctccccttttacagccaaggaggctga

SEQ ID NO: 74898 - DNA, 120 bp, Artificial Sequence
  ENSG00000078902_0 (sequence is synthesized)
gcggctgtcagctgactgtggcggcggcggcctcgaggtgacaactgtctccgtcgcaggctccggcgggggcgcaggaggtcgcccggcgcgtcactgtcgggtcggcgagccacgggg

SEQ ID NO: 74899 - DNA, 120 bp, Artificial Sequence
  ENSG00000078902_1 (sequence is synthesized)
gccgccgcagcaccatggcgaccaccgtcagcactcagcgcgggccggtgtacatcggtgagctcccgcaggacttcctccgcatcacgcccacacagcagcagcggcaggtccagctgg

SEQ ID NO: 74900 - DNA, 120 bp, Artificial Sequence
  ENSG00000078902_2 (sequence is synthesized)
acgcccaggcggcccagcagctgcagtacggaggcgcagtgggcaccgtgggccgactgaacatcacggtggtacaggcaaagttggccaagaattacggcatgacccgcatggacccct

SEQ ID NO: 74901 - DNA, 120 bp, Artificial Sequence
  ENSG00000078902_3 (sequence is synthesized)
actgccgactgcgcctgggctacgcggtgtacgagacgcccacggcacacaatggcgccaagaatccccgctggaataaggtcatccactgcacggtgcccccaggcgtggactctttct

SEQ ID NO: 74902 - DNA, 120 bp, Artificial Sequence
  ENSG00000078902_4 (sequence is synthesized)
atctcgagatcttcgatgagagagccttctccatggacgaccgcattgcctggacccacatcaccatcccggagtccctgaggcagggcaaggtggaggacaagtggtacagcctgagcg

SEQ ID NO: 74903 - DNA, 120 bp, Artificial Sequence
  ENSG00000078902_5 (sequence is synthesized)
ggaggcagggggacgacaaggagggcatgatcaacctcgtcatgtcctacgcgctgcttccagctgccatggtgatgccaccccagcccgtggtcctgatgccaacagtgtaccagcagg

SEQ ID NO: 74904 - DNA, 120 bp, Artificial Sequence
  ENSG00000078902_6 (sequence is synthesized)
gcgttggctatgtgcccatcacagggatgcccgctgtctgtagccccggcatggtgcccgtggccctgcccccggccgccgtgaacgcccagccccgctgtagcgaggaggacctgaaag

SEQ ID NO: 74905 - DNA, 120 bp, Artificial Sequence
  ENSG00000078902_7 (sequence is synthesized)
ccatccaggacatgttccccaacatggaccaggaggtgatccgctccgtgctggaagcccagcgagggaacaaggatgccgccatcaactccctgctgcagatgggggaggagccataga

SEQ ID NO: 74906 - DNA, 120 bp, Artificial Sequence
  ENSG00000078902_8 (sequence is synthesized)
gcctctgcctcgatgccgttttgcccccgctctttggacacgccgacccggcgctccccaaggaatgctgtcccaacaagattcccgtgaaagagcacccgtgtcgccccctcccgtgga

SEQ ID NO: 74907 - DNA, 120 bp, Artificial Sequence
  ENSG00000078902_9 (sequence is synthesized)
cttctgtgccgccccgtccacacctgttcttgggtgcatgtgggttttcggttcctggcggtccaggacggggcgggggctcccctcccatctcgtgctgggaggtctcagcgcgctctc

SEQ ID NO: 74908 - DNA, 120 bp, Artificial Sequence
  ENSG00000078902_10 (sequence is synthesized)
ctgtccctgggacgtgcgtctctccttctcatgccgttctggaaaatgctcttgctgtagagagcagctgcttctgccagggtgttggaggtggtggagcgccttccgattccattcatg

SEQ ID NO: 74909 - DNA, 120 bp, Artificial Sequence
  ENSG00000078902_11 (sequence is synthesized)
gcattttgtgatgtgatgtaattggaatagagctgttgatttaaggcacacacaatccctcacactgtgggttttttttagaacttcccagacgaaaactcacgcccttgccctaacgcg

SEQ ID NO: 74910 - DNA, 120 bp, Artificial Sequence
  ENSG00000078902_12 (sequence is synthesized)
ctttgctgtgagcctggcccctgcccagggcttgggtctggtgagctgagcagcttcctgtggatggtgtggggccggcctctggcctggctcacctggccactgtccagccagccttgt

SEQ ID NO: 74911 - DNA, 120 bp, Artificial Sequence
  ENSG00000078902_13 (sequence is synthesized)
gacagactccggcctgaaggcagaatgaacccacacctggagtgaggaagggggcctggcacggttggccaggctctgcctgattgccagccagcgggcatctgaagccgggtccttcgc

SEQ ID NO: 74912 - DNA, 120 bp, Artificial Sequence
  ENSG00000078902_14 (sequence is synthesized)
ccgccggaggctgccgtccgtctctcctgctgcgctcgtgccagctccgtgggtgtcctcccagggagcttctcttctcaacaggccttgcgaggctggggtgagaggtgatagaggcag

SEQ ID NO: 74913 - DNA, 120 bp, Artificial Sequence
  ENSG00000078902_15 (sequence is synthesized)
gtggcactgccagccgactgctgacagcttgggagctgctgtgcccaggacgtgggttcagcgtgggcgaggaaagcctggcgagcgtggccctgtaaaagctttctgaggcgggaggcg

SEQ ID NO: 74914 - DNA, 120 bp, Artificial Sequence
  ENSG00000078902_16 (sequence is synthesized)
ctcacttacctctgactgcctgggcgctgcgtgtagcatcttggcctacaggacagattttaggtgacacctggttatgacagtcagaaatttgagaagcttctcacaagtgatgcactt

SEQ ID NO: 74915 - DNA, 120 bp, Artificial Sequence
  ENSG00000078902_17 (sequence is synthesized)
taaataatctgcatgccattgagacacctgcatgtctggtgtttgtggttcaagtgtcttgccgccggccttcggatgtaaacccactgataacggacagaaagagaatgcccacaagtg

SEQ ID NO: 74916 - DNA, 120 bp, Artificial Sequence
  ENSG00000078902_18 (sequence is synthesized)
ggtcttctgtggaagatgcagaaggaggaagttagtgcttacattttagtctttttctccctcaaaaaaataggttaagtttcagtgccagctagaaaatactgctttctgccatcgatt

SEQ ID NO: 74917 - DNA, 120 bp, Artificial Sequence
  ENSG00000078902_19 (sequence is synthesized)
gggggtggtttttgtcaaatatactgttgataaatatttatttttgtaaacttgaagtgtgtggtggccgtgggggagggacatgctggcagcaggcgccttcttcagctgtgggtccta

SEQ ID NO: 74918 - DNA, 120 bp, Artificial Sequence
  ENSG00000078902_20 (sequence is synthesized)
aaggcctttgatcctttgaagaagaaagacatggtatttgttcagcagacgccgaccactcagacggaggggcccctgggattccctgtctcagatggcctggtcttacgcctgtgtaga

SEQ ID NO: 74919 - DNA, 120 bp, Artificial Sequence
  ENSG00000078902_21 (sequence is synthesized)
tttcttctccattgggaatgaaggtgtcaggcgggactggaacgttctagatggtatgttccgtgatattaacaactctaacccaggacagaccacaagccacactcagaggcctcactg

SEQ ID NO: 74920 - DNA, 120 bp, Artificial Sequence
  ENSG00000078902_22 (sequence is synthesized)
tgctgggggcttcggtgtccaggcgcccaggtgtggccaccagcaccggtttctgccttcgcgttgctggggtgcagtgagactgccacacgcgtgcacatgtggctctgtgggtgtctc

SEQ ID NO: 74921 - DNA, 120 bp, Artificial Sequence
  ENSG00000078902_23 (sequence is synthesized)
ctagagaggacgtggcccctgctgccagcccttgagcagcccgtgtgggggcccgagggacccacacagtgggggccagcctcgctggagggagagcaaccctttgccgatgaccacgct

SEQ ID NO: 74922 - DNA, 120 bp, Artificial Sequence
  ENSG00000078902_24 (sequence is synthesized)
tgccgccatctcttagttttctttttcacaagcgctttatttttttaatagacaaatcacattttgcaaggcctttaattaaataagattcttctttccttcattttatgctttatttcc

SEQ ID NO: 74923 - DNA, 120 bp, Artificial Sequence
  ENSG00000078902_25 (sequence is synthesized)
tgtttgaaggcttactgtagaagtggcttactgtagaagcagcttgctgagcccctccgagcggtccccagaattagctggttcacaacccccaccctcccccgcccccgcctgtgtcag

SEQ ID NO: 74924 - DNA, 120 bp, Artificial Sequence
  ENSG00000078902_26 (sequence is synthesized)
gtgtggatgaggtcgtcacactcagaaggacaggcttgtctgccagctcacaaggggaggctgcagtgggtttgggagctgggtttaggcccctggtgtctgagggcccaggccttgcca

SEQ ID NO: 74925 - DNA, 120 bp, Artificial Sequence
  ENSG00000078902_27 (sequence is synthesized)
gcctctgctgctcctgctcctgggtttgaagatgcaggccgatcgccagctccgtggcagcggtcactaaggacagcctgactgtgccatcttggagcctcaggcggggctccggagata

SEQ ID NO: 74926 - DNA, 120 bp, Artificial Sequence
  ENSG00000078902_28 (sequence is synthesized)
gaagacaggtcgccggaggctccccctcctctcctctcccctctgcagatgctccctgggcgctaccctgcagggtgccaggcaggagtggtctcagaacgtgcgcttctgattatttta

SEQ ID NO: 74927 - DNA, 120 bp, Artificial Sequence
  ENSG00000078902_29 (sequence is synthesized)
ctggggtccattgtccagatttttctttgattgtaaaatatatttttactttttagtcttctaatttaataaatgatccatataaaaatagagaaataaagtcctttaagggaaggttta

SEQ ID NO: 74928 - DNA, 120 bp, Artificial Sequence
  ENSG00000078902_30 (sequence is synthesized)
atgttgagtttgtttgctgaacaatcatcttacttgccacggtcttctgtcttattctgaacacacgttcactcccaccccgaggacctcaaatgtccctgcccagctgagcacctggcc

SEQ ID NO: 74929 - DNA, 120 bp, Artificial Sequence
  ENSG00000078902_31 (sequence is synthesized)
tgaagtcgaatctcatggtctacatgtgatgtggctccttgtgattgggagacacaagaaagacaagttccagtccccaaaaccccacgtactccgatagcacaggcagggctgctgcct

SEQ ID NO: 74930 - DNA, 120 bp, Artificial Sequence
  ENSG00000078902_32 (sequence is synthesized)
agaagggaattggaagctgctagaggctgagcatgcctgtcgcccaggagcttccggaaaactgtcactccatagcattccggagtacgctgtggccacccaagaaacacgctaaaatta

SEQ ID NO: 74931 - DNA, 120 bp, Artificial Sequence
  ENSG00000078902_33 (sequence is synthesized)
aggacccaagaatggggcagttttgacctaaaaggaccggccacagctttgattagaagtgaaaggagggaacttgtatgtggacaagaatagaaaacagaggacctggcagtccagaga

SEQ ID NO: 74932 - DNA, 120 bp, Artificial Sequence
  ENSG00000078902_34 (sequence is synthesized)
ccctgaatagccactaagggatgcttcagccctgtgcagtgcttccctcacgtttcaaaaaggccagtattttggaaagataaccttttttcaatatagtctgcatattatcagaaagca

SEQ ID NO: 74933 - DNA, 120 bp, Artificial Sequence
  ENSG00000078902_35 (sequence is synthesized)
gtactgtgtggacccctgtgaggagtatcatgggggcccctgcgaggggtaccgtgcgggcccccgcgaggagtatcgaggagtaccgtgtggacccctgccttctgcagtgagatctcg

SEQ ID NO: 74934 - DNA, 120 bp, Artificial Sequence
  ENSG00000078902_36 (sequence is synthesized)
ggacgtttgcgggagactccgctgcagccaccgcggtgccgtcagagaggcctccttggtagaggtgtacatcggtgagctcccgcaggacttcctccgcatcacgcccacacagcagca

SEQ ID NO: 74935 - DNA, 120 bp, Artificial Sequence
  ENSG00000078902_37 (sequence is synthesized)
gcgtccctggcacagtacggccatctagatgaagctgacactgacgcgttggggctgtaccctgcttggagcccgtctgagtccgcagcatccaggccggggtcactggccctccatggc

SEQ ID NO: 74936 - DNA, 120 bp, Artificial Sequence
  ENSG00000078902_38 (sequence is synthesized)
acactggcgtgggagctgccttgccaagagcagttgcatgaaatgccacttatttgctcaagggttgtttattgaacatgccagtgccaggagactggcgtggagcatgaggccgaggct

SEQ ID NO: 74937 - DNA, 120 bp, Artificial Sequence
  ENSG00000078902_39 (sequence is synthesized)
ggctggagtgggttttggggagtgtcaggaggctggtgtggagcgtgaggccgaggctggctggagtgccaggggctgcagggtcaggtgtacatcggtgagctcccgcaggacttcctc

SEQ ID NO: 74938 - DNA, 120 bp, Artificial Sequence
  ENSG00000078902_40 (sequence is synthesized)
tgccagctattatggaggctgcacgtggctgagcgtggctgccgtggggacacacctgccaacacagccacgttcctggctggcttcgaggcgtggctccccacctggtgtttcattggg

SEQ ID NO: 74939 - DNA, 120 bp, Artificial Sequence
  ENSG00000078902_41 (sequence is synthesized)
ctggggctggtgcgctcggtgggggtgggatttcggatttcggcgtttatactgcatttcctaagcgggcaaacagaacttctgattcccgcttttcctgaaacctgtgtgatgttgaaa

SEQ ID NO: 74940 - DNA, 120 bp, Artificial Sequence
  ENSG00000078902_42 (sequence is synthesized)
acgatctgtgtgaaagatattggcattgaccccgggttctaccaaacataactcaagtgatgagtagtgggtgtaggtgggcgtctgctctgtgtagggcctggctcttccaccaggctt

SEQ ID NO: 74941 - DNA, 120 bp, Artificial Sequence
  ENSG00000078902_43 (sequence is synthesized)
tcccccgactggcttctccatgctgctgtctccgggacatgagtcgcctgtctgtcccccacgtgtggccaggagggcatgagccacctgtctgtcccctacgtgtgcccaggagggcac

SEQ ID NO: 74942 - DNA, 120 bp, Artificial Sequence
  ENSG00000078902_44 (sequence is synthesized)
gagccgcctgtctgtctgccatgtgtgcccaggagatacggtgcttttcctgccatgtcctcagagctgtgcatgtggcacacaggaagcagttgtcacaaataaacaggaatttggcct

SEQ ID NO: 74943 - DNA, 120 bp, Artificial Sequence
  ENSG00000078967_0 (sequence is synthesized)
ctcccggcgtgcagcttggtggcggctgagccggcagcgggccgcctcaggcagccccggccgggccgcccgggtccccggcagcggggtaggatggcgctaaagcggatccagaaggaa

SEQ ID NO: 74944 - DNA, 120 bp, Artificial Sequence
  ENSG00000078967_1 (sequence is synthesized)
ggaattaaccgacttgcagagggatcctcctgcccagtgttctgcaggacctgtcggtgatgacttgttccactggcaggccaccatcatgggcccgaatgacagtccttaccaaggagg

SEQ ID NO: 74945 - DNA, 120 bp, Artificial Sequence
  ENSG00000078967_2 (sequence is synthesized)
tgttttcttcctgaccatccactttcctacagattacccgttcaagcccccaaaggttgctttcacaaccaaaatttatcaccctaatatcaacagcaatggcagcatctgccttgatat

SEQ ID NO: 74946 - DNA, 120 bp, Artificial Sequence
  ENSG00000078967_3 (sequence is synthesized)
cctgcggtctcagtggtctccagcgttgactgtgtcaaaagttctcttgtccatctgctcgctgctctgcgaccccaaccccgatgaccccctggtgccagagatagcacacacctacaa

SEQ ID NO: 74947 - DNA, 120 bp, Artificial Sequence
  ENSG00000078967_4 (sequence is synthesized)
ggccgacagagagaagtacaacagactagcaagagagtggacacaaaaatatgctatgtaagtgccttggaggttttacatgagacactgtccaagagaagctggcagagaggtcttccc

SEQ ID NO: 74948 - DNA, 120 bp, Artificial Sequence
  ENSG00000078967_5 (sequence is synthesized)
ttaaaactttgggctgttggctgagccattcaaagagcatcatctgttcttcaaacaaatgttggtcacccactctctccagctgcagcatgttggtgccattttcagcaattacggctt

SEQ ID NO: 74949 - DNA, 120 bp, Artificial Sequence
  ENSG00000078967_6 (sequence is synthesized)
tgacagtgccacctctttgatgccaaatcagcaaccattgttgttatgatctgcagtcttcctggtgacactggaatctctctctctgccgcctcagtttgtctgctggtctcttggggg

SEQ ID NO: 74950 - DNA, 120 bp, Artificial Sequence
  ENSG00000078967_7 (sequence is synthesized)
gccaggccctgcacgtctctcctacccggcctcaaatggtgctgctgcccatgatggtaccacaccagggcctcagcctggcccctcaccacataccctttgccttttagaactcagtgc

SEQ ID NO: 74951 - DNA, 120 bp, Artificial Sequence
  ENSG00000078967_8 (sequence is synthesized)
catcctgggtgcccagggcagagcaggctttgttcgcacctcatctgctgcagaaccacatcctgaggagtctcagcttatcctggagggaattgggaacagtgtcactgggaagtgaag

SEQ ID NO: 74952 - DNA, 120 bp, Artificial Sequence
  ENSG00000078967_9 (sequence is synthesized)
gcctagccctgtggcttccaccagtctcctcctgcagtgccacgtggtggcatttctcgcctcacaccaagaagcagcaagtggaaaatttcaggatacaaagcacataacaccccataa

SEQ ID NO: 74953 - DNA, 120 bp, Artificial Sequence
  ENSG00000078967_10 (sequence is synthesized)
gagatgattatgtttttagaagcaagagcaaaattatgaaacctctagagatttgggtcatgttactccatttgatgaagattctcactaccgcccgctcctcccataggagcctacact

SEQ ID NO: 74954 - DNA, 120 bp, Artificial Sequence
  ENSG00000078967_11 (sequence is synthesized)
aagtccaagtgtgagccattcacagactagaacacaaggagggagagagactcttaaacgtaaataaaaatgcaattcactcacaactctaaatgataattgacatttcagcctctttct

SEQ ID NO: 74955 - DNA, 120 bp, Artificial Sequence
  ENSG00000078967_12 (sequence is synthesized)
tttaggcaaaacagaagatacacactattaacagttatttgaagccttaaattacaatagcctgttaggtgatcggctttctgccttggctttctgatgcagcacattttaagatttgcc

SEQ ID NO: 74956 - DNA, 120 bp, Artificial Sequence
  ENSG00000078967_13 (sequence is synthesized)
tttaaagctttgagccttgagattaggttagttaggaagaggacaacaaagggaagagattattctaataaaacttccacagagggaagaaaattgaggagcttcagatctctaaagcca

SEQ ID NO: 74957 - DNA, 120 bp, Artificial Sequence
  ENSG00000078967_14 (sequence is synthesized)
aattcaacctgatctttctaggttggttataaagctggtccacttccaggaagtgatgtgtaggtgaataggaacaaaaggtgaagaagcagtaaaactgtgaccaagtggccagatggg

SEQ ID NO: 74958 - DNA, 120 bp, Artificial Sequence
  ENSG00000078967_15 (sequence is synthesized)
gcttttgccggctgattgaaaggaagtctacagacctaacataagcagtcagccaaaggtggctgtgggaggttgatttcttccagaaacttccaagttgtggctacaaatttattgcca

SEQ ID NO: 74959 - DNA, 120 bp, Artificial Sequence
  ENSG00000078967_16 (sequence is synthesized)
tgaggttattcacataatcacttccttaacaaaggaagaagcacttttaacttgggctgcattccctttgtgagggtccacatttaggatcctcctgctaccataaggccccttttgggg

SEQ ID NO: 74960 - DNA, 80 bp, Artificial Sequence
  ENSG00000078967_17 (sequence is synthesized)
catttaggatcctcctgctaccataaggccccttttggggttctttgggtgtggctgcatctcaccatgttgagagagcc

SEQ ID NO: 74961 - DNA, 62 bp, Artificial Sequence
  ENSG00000078967_18 (sequence is synthesized)
gcctcaagtgacaaggattgctgttttaattcttgtatcttcgttgcttctttggtctttgc

SEQ ID NO: 74962 - DNA, 120 bp, Artificial Sequence
  ENSG00000078967_19 (sequence is synthesized)
gttttaattcttgtatcttcgttgcttctttggtctttgcttaaacaaaacaataaagcttaatagttggggagaatgctgttaccagtgtcctctaggaaggctgttagcatatggctc

SEQ ID NO: 74963 - DNA, 120 bp, Artificial Sequence
  ENSG00000078967_20 (sequence is synthesized)
tactgagcagcagtgccatctggtgcctgagatcatgtgcttcaggcagttgtcacactgcatctacagccaagcatcacagaaacacttcactcatgtggtcagggaaggtgggactga

SEQ ID NO: 74964 - DNA, 120 bp, Artificial Sequence
  ENSG00000078967_21 (sequence is synthesized)
ttcacatgttagagacaggtcagatgggaaaattaaggcccaacttggtgttggggaataaccatactctggtctttcaagtgtagtagctgatgattcccaagaaactgatgaattttc

SEQ ID NO: 74965 - DNA, 120 bp, Artificial Sequence
  ENSG00000078967_22 (sequence is synthesized)
tgagtccagacaaaatttccccaagcctgctctctctgttggatatacataatagagaaagtcaaatcagccctttggggtttgtggtaaaaattcactcacccattgaagcctaaggtg

SEQ ID NO: 74966 - DNA, 120 bp, Artificial Sequence
  ENSG00000078967_23 (sequence is synthesized)
gctttgtaccttccagatctctcagcaaatcccctgggcagaaatgtcacctgcttgccatgtctttgaggggttcaggtcagcctggagaacaggctccttaggtcaaaaaccttgttt

SEQ ID NO: 74967 - DNA, 120 bp, Artificial Sequence
  ENSG00000078967_24 (sequence is synthesized)
taagagccactgtggtacagtcaatgtaacccacttgtgcagaagccatgcttccaaggaaggtctcaggttgacaactagacatcaaatctgagaagccaactgtggagtaatgtgttt

SEQ ID NO: 74968 - DNA, 120 bp, Artificial Sequence
  ENSG00000078967_25 (sequence is synthesized)
ttttctctgtggacaagagtgatcagaaaggtgcttgatcttgaacaattgatccatgatgaaaaaatgaccattagctctcccccagaagcgtctgtgtttgctgaatggagctgagat

SEQ ID NO: 74969 - DNA, 120 bp, Artificial Sequence
  ENSG00000078967_26 (sequence is synthesized)
tttgatccgctatcagactccagaaagatccaggagttccaagaacatggcaaagagtcaaaatcttaggacaaggaattaaaatgccagaatgcaaatgtccaacaggcctggtagctc

SEQ ID NO: 74970 - DNA, 120 bp, Artificial Sequence
  ENSG00000078967_27 (sequence is synthesized)
acagctatcaacaccctagaattccacactgcctcactgcagttgctcaaggatgggtatgtttctgtctctgaaattcgggaaaaagccttaagtgccagagaaggtgcttccaagact

SEQ ID NO: 74971 - DNA, 120 bp, Artificial Sequence
  ENSG00000078967_28 (sequence is synthesized)
gtctgcagaattcctttcctagggtctgtctctggtacccaaaagggcagagaaggaaccctaagattagcatagagccactcatctctcctcccctccccaccccttcttcccctgctt

SEQ ID NO: 74972 - DNA, 120 bp, Artificial Sequence
  ENSG00000078967_29 (sequence is synthesized)
ccattccccatggctctctcctctgactgtgaaacacttcctctccagcagtgttgggaaagttctggacctctactggatctagccataaatggtggtcttcagaaaaatggagattgt

SEQ ID NO: 74973 - DNA, 120 bp, Artificial Sequence
  ENSG00000078967_30 (sequence is synthesized)
ggctgccagcacccacaagacagcagcctcatgccatgcaggcagcaagccatcctgaacagcgttcctcccagagtctgtttcctcacctgctgttcactggtgagaggaaaagggact

SEQ ID NO: 74974 - DNA, 120 bp, Artificial Sequence
  ENSG00000078967_31 (sequence is synthesized)
tgttctcccttgaccagttttctagttttcctgttcccaccctggtctttgcctgatgacagagaaactttctaaaaaaaaacaaaaacaaaagctataaaaaatctgcaaaacacccta

SEQ ID NO: 74975 - DNA, 120 bp, Artificial Sequence
  ENSG00000078967_32 (sequence is synthesized)
ggtgaggtccctctcccaactcccctgatgtttggatgaaggacagcatgtgacaaggggcccttcaagtcaggttgctttcacaaccaaaatttatcaccctaatatcaacagcaatgg

SEQ ID NO: 74976 - DNA, 120 bp, Artificial Sequence
  ENSG00000078967_33 (sequence is synthesized)
gcaatggcgtgatctcggctcaccgcaacatccacctcccaggttgctttcacaaccaaaatttatcaccctaatatcaacagcaatggcagcatctgccttgatatcctgcggtctcag

SEQ ID NO: 74977 - DNA, 120 bp, Artificial Sequence
  ENSG00000078967_34 (sequence is synthesized)
cggcagcggggtaggatggcgctaaagcggatccagaaggaattaaccgacttgcagagggatcctcctgcccagtgttctgcaggacctgtcggtgatgactaatgacagtccttacca

SEQ ID NO: 74978 - DNA, 120 bp, Artificial Sequence
  ENSG00000078967_35 (sequence is synthesized)
caggtcacatagccctgtccactgctgtgcccttaagtggatatccttacacgcctacgaggcagcaccagcagaactttgtgccccgctccctggcgcttctcagcagtcaattgccct

SEQ ID NO: 74979 - DNA, 120 bp, Artificial Sequence
  ENSG00000078967_36 (sequence is synthesized)
ggtgtgctcaagactgtcacatgggtgcaagaagaaaatactgattctacttatatttttttatccaaaaataagaaaggcaaatattacattaccttctctgttccctcatttattcat

SEQ ID NO: 74980 - DNA, 120 bp, Artificial Sequence
  ENSG00000078967_37 (sequence is synthesized)
ctaataagcacaaaacggactgtgagtcagccctgaaggaagatacagggcatgcctccgggggcctcgaagttggtggagaaatcctcccttcccaaaataaatgatgttgagcacatg

SEQ ID NO: 74981 - DNA, 120 bp, Artificial Sequence
  ENSG00000079101_0 (sequence is synthesized)
tccctgacacggatgaaaattaaagcagagaaaaacgaaggtccttccagaagctggtggcaacttcactggggagatattgcaaataacagcgggaacatgaagccgccactcttggtg

SEQ ID NO: 74982 - DNA, 120 bp, Artificial Sequence
  ENSG00000079101_1 (sequence is synthesized)
tttattgtgtgtctgctgtggttgaaagacagtcactgcgcacccacttggaaggacaaaactgctatcagtgaaaacctgaagagtttttctgaggtgggggagatagatgcagatgaa

SEQ ID NO: 74983 - DNA, 120 bp, Artificial Sequence
  ENSG00000079101_2 (sequence is synthesized)
gaggtgaagaaggctttgactggtattaagcaaatgaaaatcatgatggaaagaaaagagaaggaacacaccaatctaatgagcaccctgaagaaatgcagagaagaaaagcaggaggcc

SEQ ID NO: 74984 - DNA, 120 bp, Artificial Sequence
  ENSG00000079101_3 (sequence is synthesized)
ctgaaacttctgaatgaagttcaagaacatctggaggaagaagaaaggctatgccgggagtctttggcagattcctggggtgaatgcaggtcttgcctggaaaataactgcatgagaatt

SEQ ID NO: 74985 - DNA, 120 bp, Artificial Sequence
  ENSG00000079101_4 (sequence is synthesized)
tatacaacctgccaacctagctggtcctctgtgaaaaataagattgaacggtttttcaggaagatatatcaatttctatttcctttccatgaagataatgaaaaagatctccccatcagt

SEQ ID NO: 74986 - DNA, 120 bp, Artificial Sequence
  ENSG00000079101_5 (sequence is synthesized)
gaaaagctcattgaggaagatgcacaattgacccaaatggaggatgtgttcagccagttgactgtggatgtgaattctctctttaacaggagttttaacgtcttcagacagatgcagcaa

SEQ ID NO: 74987 - DNA, 120 bp, Artificial Sequence
  ENSG00000079101_6 (sequence is synthesized)
gagtttgaccagacttttcaatcacatttcatatcagatacagacctaactgagccttacttttttccagctttctctaaagagccgatgacaaaagcagatcttgagcaatgttgggac

SEQ ID NO: 74988 - DNA, 120 bp, Artificial Sequence
  ENSG00000079101_7 (sequence is synthesized)
taccaaaacaagacaaagctcctgaccacggaggcctgatttcaaagatgttacctgggcaggacagaggactgtgtggggaacttgaccagaatttgtcaagatgtttcaaatttcatg

SEQ ID NO: 74989 - DNA, 120 bp, Artificial Sequence
  ENSG00000079101_8 (sequence is synthesized)
aaaaatgccaaaaatgtcaggctcacctatctgaagactgtcctgatgtacctgctctgcacacagaattagacgaggcgatcaggttggtcaatgtatccaatcagcagtatggccaga

SEQ ID NO: 74990 - DNA, 120 bp, Artificial Sequence
  ENSG00000079101_9 (sequence is synthesized)
ttctccagatgacccggaagcacttggaggacaccgcctatctggtggagaagatgagagggcaatttggctgggtgtctgaactggcaaaccaggccccagaaacagagatcatcttta

SEQ ID NO: 74991 - DNA, 120 bp, Artificial Sequence
  ENSG00000079101_10 (sequence is synthesized)
attcaatacaggtagttccaaggattcatgaaggaaatatttccaaacaagatgaaacaatgatgacagacttaagcattctgccttcctctaatttcacactcaagatccctcttgaag

SEQ ID NO: 74992 - DNA, 120 bp, Artificial Sequence
  ENSG00000079101_11 (sequence is synthesized)
aaagtgctgagagttctaacttcattggctacgtagtggcaaaagctctacagcattttaaggaacattttaaaacctggtaagaagatctaatgcatcctatatccagtaagtagaatt

SEQ ID NO: 74993 - DNA, 120 bp, Artificial Sequence
  ENSG00000079101_12 (sequence is synthesized)
atctcttcatctgggacctggaaatcctgaaataaaaaaggataatgcaataaacacagttgcaggaaagtatgttagctatatactatgaagtactcttagtttacttatgttgaatgg

SEQ ID NO: 74994 - DNA, 120 bp, Artificial Sequence
  ENSG00000079101_13 (sequence is synthesized)
cttagctattaatactcaaattgagttaaaatgaaaattcctccttaaaaaatcaaacgtaatatgtattacatttcatggtacattagtagttctttgtatattgaataaatactaaat

SEQ ID NO: 74995 - DNA, 120 bp, Artificial Sequence
  ENSG00000079101_14 (sequence is synthesized)
cacctaggtgtctatgttctatcacatctacaaacatgtcacttcctaattaacaaaatgttcttcctttagtttgcttttgcacttaaaatatatataattgacttttttggaaaaaaa

SEQ ID NO: 74996 - DNA, 120 bp, Artificial Sequence
  ENSG00000079101_15 (sequence is synthesized)
acctgcaggcccgggccgcggggttggtttccaccctggaggttgctgacaccctgtgccctcggctgacttccagccggtggcacagacgcctccagggggcagcactcaagcgcatct

SEQ ID NO: 74997 - DNA, 120 bp, Artificial Sequence
  ENSG00000079101_16 (sequence is synthesized)
tcggttgccaggctggagttcagtggcatgttcatagctcactgaagcctcaaattcctgggttcaagtgaccctcctacctcagccccatgaggacctgggactacagatggagtcttg

SEQ ID NO: 74998 - DNA, 68 bp, Artificial Sequence
  ENSG00000079101_17 (sequence is synthesized)
ctcagccccatgaggacctgggactacagatggagtcttgctctcgttgcccagactggagtgcactg

SEQ ID NO: 74999 - DNA, 120 bp, Artificial Sequence
  ENSG00000079101_18 (sequence is synthesized)
ctctatttatgaaagtgtcagtgaaacaattactaagatgctgaaggcaatagaagatttaccaaaacaagacaaaggcaagtattaaaagattacttttacttagaggtttacactaaa

SEQ ID NO: 75000 - DNA, 120 bp, Artificial Sequence
  ENSG00000079101_19 (sequence is synthesized)
ctccagcctggacaacacagtgagattctgtctcaaaataaataaataaataaacccaagcagaaaaagaatcactctgaaaacgatcacatctaactatcaatgctcatacagtttatg

SEQ ID NO: 75001 - DNA, 120 bp, Artificial Sequence
  ENSG00000079101_20 (sequence is synthesized)
gaattatcagcccaacttgataaaatcagtatttgaggaaactgtggataagccccctgatttcaatccccattgtgccaggtcctggttaactgaggttaacgaagtaaagagctgcag

SEQ ID NO: 75002 - DNA, 120 bp, Artificial Sequence
  ENSG00000079101_21 (sequence is synthesized)
acactattaactgctaccttaaaccgattactctagcttagcctactttccacgtacagattttaccagtggacaacatgatgctttatcttgtttttctctccctgggacttttctcca

SEQ ID NO: 75003 - DNA, 120 bp, Artificial Sequence
  ENSG00000079101_22 (sequence is synthesized)
gacattgaaaacagaaatactaataaggccacttttacctgcctgatgcaagaacagaattttcaaactcaacattaatgcaactcctcagtccctgacaatggcgggtggaaaagtttc

SEQ ID NO: 75004 - DNA, 120 bp, Artificial Sequence
  ENSG00000079101_23 (sequence is synthesized)
taaaaatatgcagcagcacaattatcgggaagagatgagatactgttacctaataaaaatgccataaatagagaatgatgaactaccatgggaaatgaatgcatagaagaggacatgctg

SEQ ID NO: 75005 - DNA, 120 bp, Artificial Sequence
  ENSG00000079101_24 (sequence is synthesized)
gaatgtgggacagtaaaaatcacttaaactttgcgtgaccttgaagaaagtcacgatgatctgtttttccaggtccctcaaacagtgagatgtggctgtttcccaagtcttcctctccag

SEQ ID NO: 75006 - DNA, 120 bp, Artificial Sequence
  ENSG00000079101_25 (sequence is synthesized)
tgtaaagggtctgaatttagacgctttgtgagtcttccttctttcgacagcctggagtctctcttgagtctcaaggctgcctgagttcctctctaacatcctctaggcagtatcagctaa

SEQ ID NO: 75007 - DNA, 120 bp, Artificial Sequence
  ENSG00000079101_26 (sequence is synthesized)
tgcctggttaggaatgccttgttgacaggaatagttaattctcaaaagggaaaaacaaaacttgtttccaaatacctggaaaacatgtttaacctcattaataaagacatgaaaacaaac

SEQ ID NO: 75008 - DNA, 120 bp, Artificial Sequence
  ENSG00000079101_27 (sequence is synthesized)
aggctaacacccctggcctctcaccctcccatttctcaccctgcaaagcagagtgctatttgattcatgttcttagtctgtggatctcagttgaggagaactcgttagagatttgccctc

SEQ ID NO: 75009 - DNA, 120 bp, Artificial Sequence
  ENSG00000079101_28 (sequence is synthesized)
tttctgtctttttgagaccttactggtgcaggacagcaaatcctagctggtgtctacaggacacatgcactcttaggttacataactgcagggaccactgtcattgtatcctggagctgg

SEQ ID NO: 75010 - DNA, 120 bp, Artificial Sequence
  ENSG00000079101_29 (sequence is synthesized)
cctttggaacgcagcgtgggcacctgcaacgcagagaccactgtatctccggtgcagaatgtaatgagtgcctgatacatttgccgaataaactattccaagggttgaacttgctggaag

SEQ ID NO: 75011 - DNA, 120 bp, Artificial Sequence
  ENSG00000079101_30 (sequence is synthesized)
caagagaagcactattctggtaacagcgggaacatgaagccgccactcttggtgtttattgtgtgtctgctgtggttgaaagacagtcactgcgcacccacttggaaggacaaaactgct

SEQ ID NO: 75012 - DNA, 120 bp, Artificial Sequence
  ENSG00000079102_0 (sequence is synthesized)
tatgcaggcaacatagcccttcatagcaaagcagtctgaaaaattggcacctgcaggatttgcatgtgaaaaaaacggagtcagttgcattttgccggagtctattactaaaagattgat

SEQ ID NO: 75013 - DNA, 120 bp, Artificial Sequence
  ENSG00000079102_1 (sequence is synthesized)
ctctgggctggtgaacataatctctgtcccagtcagaaaaggagagaggaaattagcagagcgattggtggagaatgatatctgtcaaaagaaacacttggagagcactgagtttagtaa

SEQ ID NO: 75014 - DNA, 120 bp, Artificial Sequence
  ENSG00000079102_2 (sequence is synthesized)
taggtgactgccggaaaaaagggaactttgaatattgtcaagatcgtactgagaagcactccacaatgccagactcacctgtggatgtgaagacgcaatctaggctgactcctccaacaa

SEQ ID NO: 75015 - DNA, 120 bp, Artificial Sequence
  ENSG00000079102_3 (sequence is synthesized)
tgccacctcccccaactactcaaggagctccaagaaccagttcatttacaccgacaacgttaactaatggcacgagccattctcctacagccttgaatggcgccccctcaccacccaatg

SEQ ID NO: 75016 - DNA, 120 bp, Artificial Sequence
  ENSG00000079102_4 (sequence is synthesized)
gcttcagcaatgggccttcctcttcttcctcctcctctctggctaatcaacagctgcccccagcctgtggtgccaggcaactcagcaagctgaaaaggttccttactaccctgcagcagt

SEQ ID NO: 75017 - DNA, 120 bp, Artificial Sequence
  ENSG00000079102_5 (sequence is synthesized)
ttggcaatgacatttcacccgagataggagaaagagttcgcaccctcgttctgggactagtgaactccactttgacaattgaagaatttcattccaaactgcaagaagctactaacttcc

SEQ ID NO: 75018 - DNA, 120 bp, Artificial Sequence
  ENSG00000079102_6 (sequence is synthesized)
cactgagaccttttgtcatcccatttttgaaggccaacttgcccctgctgcagcgtgagctcctccactgcgcaagactggccaaacagaaccctgcccagtacctcgcccagcatgaac

SEQ ID NO: 75019 - DNA, 120 bp, Artificial Sequence
  ENSG00000079102_7 (sequence is synthesized)
agctgcttctggatgccagcaccacctcacctgttgactcctcagagctgcttctcgatgtgaacgaaaacgggaagaggcgaactccagacagaaccaaagaaaatggctttgacagag

SEQ ID NO: 75020 - DNA, 120 bp, Artificial Sequence
  ENSG00000079102_8 (sequence is synthesized)
agcctttgcactcagaacatccaagcaagcgaccatgcactattagcccaggccagcggtacagtccaaataacggcttatcctaccagcccaatggcctgcctcaccctaccccacctc

SEQ ID NO: 75021 - DNA, 120 bp, Artificial Sequence
  ENSG00000079102_9 (sequence is synthesized)
cacctcagcattaccgtttggatgatatggccattgcccaccactacagggactcctatcgacaccccagccacagggacctcagggacagaaacagacctatggggttgcatggcacac

SEQ ID NO: 75022 - DNA, 120 bp, Artificial Sequence
  ENSG00000079102_10 (sequence is synthesized)
gtcaagaagaaatgattgatcacagactaacagacagagaatgggcagaagagtggaaacatcttgaccatctgttaaactgcataatggacatggtagaaaaaacaaggcgatctctca

SEQ ID NO: 75023 - DNA, 120 bp, Artificial Sequence
  ENSG00000079102_11 (sequence is synthesized)
ccgtactaaggcggtgtcaagaagcagaccgggaagaattgaattactggatccggcggtacagtgacgccgaggacttaaaaaaaggtggcggcagtagcagcagccactctaggcagc

SEQ ID NO: 75024 - DNA, 120 bp, Artificial Sequence
  ENSG00000079102_12 (sequence is synthesized)
agagtcccgtcaacccagacccagttgcactagacgcgcatcgggaattccttcacaggcctgcgtctggatacgtgccagaggagatctggaagaaagctgaggaggccgtcaatgagg

SEQ ID NO: 75025 - DNA, 120 bp, Artificial Sequence
  ENSG00000079102_13 (sequence is synthesized)
tgaagcgccaggcgatgacggagctgcagaaggccgtgtctgaggcggagcggaaagcccacgacatgatcacaacagagagggccaagatggagcgcacggtcgccgaggccaaacggc

SEQ ID NO: 75026 - DNA, 120 bp, Artificial Sequence
  ENSG00000079102_14 (sequence is synthesized)
aggcggcggaggacgcactggcagttatcaatcagcaggaggattcaagcgagagttgctggaattgtggccgtaaagcgagtgaaacctgcagtggctgtaacacagcccgatactgtg

SEQ ID NO: 75027 - DNA, 120 bp, Artificial Sequence
  ENSG00000079102_15 (sequence is synthesized)
gctcattttgccagcacaaagactgggagaagcaccatcacatctgtggacagaccctgcaggcccagcagcagggagacacacctgcagtcagctcctctgtcacgcccaacagcgggg

SEQ ID NO: 75028 - DNA, 120 bp, Artificial Sequence
  ENSG00000079102_16 (sequence is synthesized)
ctgggagcccgatggacacaccaccagcagccactccgaggtcaaccaccccgggaaccccttccaccatagagacaacccctcgctagacgtgaactcagaactgtcggaggaaagaca

SEQ ID NO: 75029 - DNA, 120 bp, Artificial Sequence
  ENSG00000079102_17 (sequence is synthesized)
acacaaccaacgcgaaaccaattcctcatcctcagatgctcaaagttgttttttttgtttgtttgtttattagatgaattatcctatttcagtacttcagcaagagagaacctaactgta

SEQ ID NO: 75030 - DNA, 120 bp, Artificial Sequence
  ENSG00000079102_18 (sequence is synthesized)
tcttgaggtggtagtaaaacacagagggccagtaacgggtcgtaatgacttattgtggataacaaagatatcttttctttagagaactgaaaagagagcagagaatataacatgaaatga

SEQ ID NO: 75031 - DNA, 120 bp, Artificial Sequence
  ENSG00000079102_19 (sequence is synthesized)
tagatttgacctcctccctgttattttcaagtagctgggattttaaactagatgacctcattaaccgatgctttaccaaacagcaaaccaagagattgctaattgctgttgaaagcaaaa

SEQ ID NO: 75032 - DNA, 120 bp, Artificial Sequence
  ENSG00000079102_20 (sequence is synthesized)
atgctaatattaaaagtcacaatgttctttatatacaataatggaaaaaaaaaaaagaggaaaaccctcaagggcatgagcattggatacagcagtagacattttaacaagaagatgaat

SEQ ID NO: 75033 - DNA, 120 bp, Artificial Sequence
  ENSG00000079102_21 (sequence is synthesized)
ggcgtccgtgggttgctaactgaactttgaagacccgctacaaaacgcgcagatgtgcagcagattggaaggagacacagatgttcggtttttttcctgtttctgaaaagaaataataat

SEQ ID NO: 75034 - DNA, 120 bp, Artificial Sequence
  ENSG00000079102_22 (sequence is synthesized)
atccaggtcaacagaatgaaaaatgaaagatgatttgcaatgggatgtatgaatacagcagcaagaaaaaaaaatgccataatacaaaaggctccatatatatatatatatatatatata

SEQ ID NO: 75035 - DNA, 78 bp, Artificial Sequence
  ENSG00000079102_23 (sequence is synthesized)
agagactcagcctgcagttaattagcattctggcagttttgacatcagccagctgccctaaataacccttcaacgttt

SEQ ID NO: 75036 - DNA, 120 bp, Artificial Sequence
  ENSG00000079102_24 (sequence is synthesized)
ttgacatcagccagctgccctaaataacccttcaacgtttcttcacttttgcaaggttccacagagtaagacattgggtctattccagctcattcattttatattgaaaaaaataatttt

SEQ ID NO: 75037 - DNA, 120 bp, Artificial Sequence
  ENSG00000079102_25 (sequence is synthesized)
aaaaatggtggcttcagctccagcccctttccaaaatttttcaaccccaccctgtttggatttttaattaaaaactagtagttctcttggtgttaaaacacttctgtcctgtgaggtttc

SEQ ID NO: 75038 - DNA, 120 bp, Artificial Sequence
  ENSG00000079102_26 (sequence is synthesized)
ccaatggtgtttttcttgtaaatgtgttggacaaatgtgaagatgcattgtagtttaaccatatgcccacatttagtctctttattcctagttggtgagaaacctgtatctttctatgct

SEQ ID NO: 75039 - DNA, 120 bp, Artificial Sequence
  ENSG00000079102_27 (sequence is synthesized)
gcttttatatctgtatgtattagtgatatttctctagtagttaaaaaaaaaaaaaggaaaaaaagactctttttggttgtcctcaagaaaagaaaagaagaaaagctatctttcggagct

SEQ ID NO: 75040 - DNA, 120 bp, Artificial Sequence
  ENSG00000079102_28 (sequence is synthesized)
gctatttcactctcttataggatttttttttttcctgaaaaccagcatgcttcacggaatgctaacatattggtgtttttgtaagagggatgtacataaatgtattttgcactgtcacaa

SEQ ID NO: 75041 - DNA, 120 bp, Artificial Sequence
  ENSG00000079102_29 (sequence is synthesized)
ctttttgtttttttttttttttttttgagcaaattctttttaaatatgctagagccatttcatcaagtttagctgtagcatagagtagtcgtggaatttttcttttttttttttttaaat

SEQ ID NO: 75042 - DNA, 120 bp, Artificial Sequence
  ENSG00000079102_30 (sequence is synthesized)
atgcatattgctgtaaggtcgtttaagtatttctaattttacaaaagtaaaaatcattagagctccaaatgctgaggtgtagattgacagctttaacactgctgaatgccaggttataca

SEQ ID NO: 75043 - DNA, 120 bp, Artificial Sequence
  ENSG00000079102_31 (sequence is synthesized)
gtattcttacaaaaagggaagtcagccaaagactgatctgatggaccaaaatcggaattttgaaaagcaccagtactactttccaaatgatcagcaggttaaacatgttcagcaaggtat

SEQ ID NO: 75044 - DNA, 120 bp, Artificial Sequence
  ENSG00000079102_32 (sequence is synthesized)
agtatgaatccattaacccttcgttgtccagggtccagaccagaactacttgttagttttgaaaacagtagcccaggatgtggttgtgtgctttaggaaagtcagcagtgctgcaggctg

SEQ ID NO: 75045 - DNA, 120 bp, Artificial Sequence
  ENSG00000079102_33 (sequence is synthesized)
tgtagacaaccaaagtttacaaggctgggaagacacttctccaaatacatatacaccaggcatttctttaaaatcaaaaacaatccattagctttggggcggggggtggggggagggtta

SEQ ID NO: 75046 - DNA, 120 bp, Artificial Sequence
  ENSG00000079102_34 (sequence is synthesized)
aatgtaggccttggaaacagttttaagtggcttttaagtatctgcatagaggcaatcctaaggtttgctttaagtctcttaaatctaacatttttaaaagcatttcttccctgtattttc

SEQ ID NO: 75047 - DNA, 120 bp, Artificial Sequence
  ENSG00000079102_35 (sequence is synthesized)
atatacaagttggttttaattttgtttgggtggtgttattttttttaaatgactttttagtttagaaagttctgatgagcaaataaatacatctatctacatgttggaagtccatctgcc

SEQ ID NO: 75048 - DNA, 120 bp, Artificial Sequence
  ENSG00000079102_36 (sequence is synthesized)
agcacacctgcttaaagtgaaatgaaagcacataaccaggctctgaatgggttatattttatcatggtgctcccagaatcctttgacctcactctgctttctagtctgcttgtgacactg

SEQ ID NO: 75049 - DNA, 120 bp, Artificial Sequence
  ENSG00000079102_37 (sequence is synthesized)
gacagtcctttcttacagagctattatatgttctaggctacgaagggttaaataatcccaaaaatgaggtatgtcatacccacacgtctttatctctagaagctgtgatgtatgtgaaac

SEQ ID NO: 75050 - DNA, 120 bp, Artificial Sequence
  ENSG00000079102_38 (sequence is synthesized)
agcactgttattcttaacactagtgtgtaaaataaggattagtacagtacgtctcattactttttaattcagggcaccctgagtgaaaacaaatacaaaaaaaaatccctaactctgagc

SEQ ID NO: 75051 - DNA, 120 bp, Artificial Sequence
  ENSG00000079102_39 (sequence is synthesized)
tctatctctgattcctcttcctccttcccctcttcctcctcttcctctcctcctgttttgctacattctcctcagtggcaaaaagtttcactctacctctgacagcatgtatattgcacc

SEQ ID NO: 75052 - DNA, 120 bp, Artificial Sequence
  ENSG00000079102_40 (sequence is synthesized)
agtagctaacaaaaactggtctagtcaaaccaaatgggcacaaaagaaccaggataccaaaagttaagctcatacagctgcaaaccatatcacttcttggtaacaatgcagacctcataa

SEQ ID NO: 75053 - DNA, 120 bp, Artificial Sequence
  ENSG00000079102_41 (sequence is synthesized)
acctaaagaagagaaagaaaagaaaacttttgttactttccttttttgcttgtcacttatatacaggctatgtgagaatataatttgtaggtataacacattaagaaaaagttatcttca

SEQ ID NO: 75054 - DNA, 120 bp, Artificial Sequence
  ENSG00000079102_42 (sequence is synthesized)
ttggatagaattgaatggtggtcgctgataggaatagggcgtcctctagctcttatctctgtctcttactcttttctctttctctttttctctgtcatgagactgtgtgtgacagggcca

SEQ ID NO: 75055 - DNA, 120 bp, Artificial Sequence
  ENSG00000079102_43 (sequence is synthesized)
ttttcttaaattttttttttttttatgtgtaggtgcatgtcttggggatttaaaaatttcaaggctggtttacttatgcaaagcatgcctacgtctggaatacttagggaaagaaagcga

SEQ ID NO: 75056 - DNA, 120 bp, Artificial Sequence
  ENSG00000079102_44 (sequence is synthesized)
gaaagaaagcgactccatgttgtccgaattcctcaagggacagaaaaaaaattggagactgttgaaatgcagatttgaagtaatttttttaaaatattattttgggttctgcgacattgt

SEQ ID NO: 75057 - DNA, 120 bp, Artificial Sequence
  ENSG00000079102_45 (sequence is synthesized)
gaaaaattaaagttgttgtgcaatacttaattcagacatgtaccacaagttaatggtagactaacactggggggtggggtctaggcatcatgcttttgtcagcatactcttgagctttta

SEQ ID NO: 75058 - DNA, 120 bp, Artificial Sequence
  ENSG00000079102_46 (sequence is synthesized)
agtctactatgtctgaactgtggtttcttgtttatccttttttccttagttggactgtaatgtatggtctgtcaacctgtgaatctttaaagtatgattcaggtattgttgtattcttta

SEQ ID NO: 75059 - DNA, 120 bp, Artificial Sequence
  ENSG00000079102_47 (sequence is synthesized)
ctgtgtaataaaaaagttgaaaaaaatctggatcctctgtctccctcgtccccggtgtgccatggttgcccaccagtgaccccagcctgaggagtccatcctccatggtgctgaatcaaa

SEQ ID NO: 75060 - DNA, 120 bp, Artificial Sequence
  ENSG00000079102_48 (sequence is synthesized)
tctgtagagtttattcagctacaaagcgtggctctgtaacaggagttggcttatccatgcgtgttgagtagggaatgatgtcagaactttgcaaaagtcgagctcattcataaggggatg

SEQ ID NO: 75061 - DNA, 120 bp, Artificial Sequence
  ENSG00000079102_49 (sequence is synthesized)
tttctcaggcaggaggagtaggaagagtgggaggagaattactaccttccataggaaaggagagcttggcttgcctagattagctgctgcatagatagcagaggcccttttggctgtgtt

SEQ ID NO: 75062 - DNA, 120 bp, Artificial Sequence
  ENSG00000079102_50 (sequence is synthesized)
ttgataaaattagaaatgagtacctaaatctggatcactctgctcagagaggttcgtgccaacctcatgaggctctgactcttgtcaggttgcttggctgccttgtgcatacccgaatgg

SEQ ID NO: 75063 - DNA, 120 bp, Artificial Sequence
  ENSG00000079102_51 (sequence is synthesized)
cagatcagctgacatgacatggaactgctctatctgccttgtcccctctcctctaattaaaagtcgctaccattgtcactcttggttatgtagttaatatccactgtggctatctccaac

SEQ ID NO: 75064 - DNA, 120 bp, Artificial Sequence
  ENSG00000079102_52 (sequence is synthesized)
ttgctgggacatccagttatctcctctgacacatattttttcattctctagttacaaagtttgttagagtttgaaaaacaaacccttctcccctaccctgtgaatgctgttagtttttat

SEQ ID NO: 75065 - DNA, 120 bp, Artificial Sequence
  ENSG00000079102_53 (sequence is synthesized)
gtgtagttttcaaaacacagattatcttatatactgtgttgtagcagaaattcctgtttcctctgaatgttctgactttatagaccaaaataatcgttgcaaaaaatcaaggatggcaca

SEQ ID NO: 75066 - DNA, 120 bp, Artificial Sequence
  ENSG00000079102_54 (sequence is synthesized)
gcaggtgcatgagcccgtgtctggagaaaggttatgaaggtgaatgctggttacatgggagggtgacttggagccctctagtttccttcttgtgccagctgggttcctgtttcaaggcca

SEQ ID NO: 75067 - DNA, 120 bp, Artificial Sequence
  ENSG00000079102_55 (sequence is synthesized)
ggcttctctaacttgtcttcctgggaaatgtagcttttccaagaatttggtagtgcacaccaggaaaaactaggtatcagaacagatttttttttaaatagtggaaacaccctcactccc

SEQ ID NO: 75068 - DNA, 120 bp, Artificial Sequence
  ENSG00000079102_56 (sequence is synthesized)
acactttggacagttagggttggatatttaatttcatagttactctttttttccacagaagaaaggccagcctgacccaagttgcctatttttaatgtgttactgcatcttattttctct

SEQ ID NO: 75069 - DNA, 120 bp, Artificial Sequence
  ENSG00000079102_57 (sequence is synthesized)
tcaaagtgaaaaaggccagaaactagcagatagaaatggaacccgttgacttagttcccttataagaagttcttgcaaacacctctgtgacgttttcattcaagtggatatgttggacaa

SEQ ID NO: 75070 - DNA, 120 bp, Artificial Sequence
  ENSG00000079102_58 (sequence is synthesized)
ataggaaacagttttagtttacgcgaacagtatgagacttccaggtggtggacgccatttttttagaagtgttgatgatgtatttgataacattataaaagtatgtgtctcccgtgaaag

SEQ ID NO: 75071 - DNA, 120 bp, Artificial Sequence
  ENSG00000079102_59 (sequence is synthesized)
aacattgagctatttccctggaatggatggggaagaaatgagcaaaggagtgctgttctgtatgggtgtctatacccttattccaaggtgaataaataaagttgtgtttgcctaatcatg

SEQ ID NO: 75072 - DNA, 120 bp, Artificial Sequence
  ENSG00000079102_60 (sequence is synthesized)
atcacatttgtctgccacagcagcaacaacagaaaagcggagggagggagggaggcgggaggaggggagcagagctccgcaagtcttgggctctgcgtggaggttgcgtttggctggcgt

SEQ ID NO: 75073 - DNA, 120 bp, Artificial Sequence
  ENSG00000079102_61 (sequence is synthesized)
ccccgaccccgggctttttgcacggcagctctctctgcgcagcgccgggcggccgtagtcgctccgcggcgcgactccgcggtctcgtggcgagcgcgcgtgggcgagtggccgcggaca

SEQ ID NO: 75074 - DNA, 120 bp, Artificial Sequence
  ENSG00000079102_62 (sequence is synthesized)
ctctggcctcgcgagggaagccgcgccgcgtcctcgccccgtcgccccgcgggccggccgagacgacgggaagttttatttgcagctcggagcctgtggcggatggtgggactctccggc

SEQ ID NO: 75075 - DNA, 120 bp, Artificial Sequence
  ENSG00000079102_63 (sequence is synthesized)
ccctcctgcctgtccctttctgtcttctctctctctctcccacttttcctccctctcccgctccgtctcacacgcaccctctgtttattttcctgcctccatctgggccctgctgatatt

SEQ ID NO: 75076 - DNA, 120 bp, Artificial Sequence
  ENSG00000079102_64 (sequence is synthesized)
gtaatcaccctgatgcacgttggcttctctcctctccctcctgcgctcacacactcactcacacacaatgtgccatcctgacaaggcttttacttctgataagctccaatgtgtgtttaa

SEQ ID NO: 75077 - DNA, 120 bp, Artificial Sequence
  ENSG00000079102_65 (sequence is synthesized)
tgaatacaaagccgcggtctgggtgccgcctcggccgcggccgctctcccgcgctcctttgccagaagctggcggagagaatttacatttaaagattagcagagtgagaaagagaaatct

SEQ ID NO: 75078 - DNA, 120 bp, Artificial Sequence
  ENSG00000079102_66 (sequence is synthesized)
gccttttgttgtgtggggtgaggaggaggcatctacccctggccttgacgctatctcccatcacctctgctatccagacaggactcaccgagtatcaaatgataagaactgagcacactg

SEQ ID NO: 75079 - DNA, 120 bp, Artificial Sequence
  ENSG00000079102_67 (sequence is synthesized)
tgaataaattattcggcatttagcttatcattctgaatttcactttttgctttttggtgctctgaaacttgcagagagaggtggagtgctaaggggagggtaggggttgtgatactttgc

SEQ ID NO: 75080 - DNA, 120 bp, Artificial Sequence
  ENSG00000079102_68 (sequence is synthesized)
acacacatccctgtcattgttctgcctaaagagacagggctgggttcaaggccacatgtgctcctgtcatcctccacatttctgctccaagtgcaatccggagtgtcagctctccatctg

SEQ ID NO: 75081 - DNA, 120 bp, Artificial Sequence
  ENSG00000079102_69 (sequence is synthesized)
tctctgcctggcaggcgcacgcgcccagcaccctgcctccggcgatgccgccccagcccctctgatggccctcctctctgctgccactcattccagaacaggaggcatgagcccggaacg

SEQ ID NO: 75082 - DNA, 120 bp, Artificial Sequence
  ENSG00000079102_70 (sequence is synthesized)
tataacactaccaaggtagcatctgcctaagccagaaataacaataggatataatataacctagttacaaatgaggtcctgccatctgtgctataccttcttaagtggggtttggatgat

SEQ ID NO: 75083 - DNA, 120 bp, Artificial Sequence
  ENSG00000079102_71 (sequence is synthesized)
aaaatcctgatttaaacgtcagtagataagtgtattttattgatagaagatgttgaatttcttctgttcacttgcttttaaaaaagataaaccccacttgaaaaactgaggtgcttaagg

SEQ ID NO: 75084 - DNA, 120 bp, Artificial Sequence
  ENSG00000079102_72 (sequence is synthesized)
tctctctccctctctccctttccaaatgattcagaagtcgataagaccaggagaagtgaagatgtaacatgttatctgtcgctcctcttagctggcggagagaatttacatttaaagatt

SEQ ID NO: 75085 - DNA, 120 bp, Artificial Sequence
  ENSG00000079102_73 (sequence is synthesized)
agtctgaaaaattggcacctgcaggatttgcatgtgaaaaaaacggagtcagttgcattttgccggagtctattacttatcaaatgataagaactgagcacactggatgaaataatactt

SEQ ID NO: 75086 - DNA, 120 bp, Artificial Sequence
  ENSG00000079102_74 (sequence is synthesized)
gactcctcagagctgcttctcgatgtgaacgaaaacgggaagaggcgaactccagacagatgaataaactgaggtccagagaggttaagtgacttgaccaaggtcacacagctagtcatg

SEQ ID NO: 75087 - DNA, 120 bp, Artificial Sequence
  ENSG00000079102_75 (sequence is synthesized)
ctttgttttcctaaatgtatgtcaaaagatctgctagtttttagactgctggaactgcccaataatttggatgagagtcatgcttcttctatagaattctacaaaaaagtaatcagatag

SEQ ID NO: 75088 - DNA, 120 bp, Artificial Sequence
  ENSG00000079102_76 (sequence is synthesized)
tgggcatggtggctggaaggctcctgtaattccagctgctaggggaaattgatgcagaggataacttgagcccaggggttcgagaccagcctcggaaagaaaaaaaaaattaaaagaaaa

SEQ ID NO: 75089 - DNA, 120 bp, Artificial Sequence
  ENSG00000079102_77 (sequence is synthesized)
aacgggaagaggcgaactccagacaggtgagagggaggaggagcctggatgaaccatgacctttttcccatacctgtggcatgaggaaacatttcatgtcacaattaaaccgctggccta

SEQ ID NO: 75090 - DNA, 120 bp, Artificial Sequence
  ENSG00000079102_78 (sequence is synthesized)
tgtcattcttgcacaatagcaataagccattgtggccatcttgagaatctggctctggcctgggattttacagagttttgaatctctggcctgggacagtttggcttttgtgtaggttaa

SEQ ID NO: 75091 - DNA, 120 bp, Artificial Sequence
  ENSG00000079102_79 (sequence is synthesized)
tcttttctgcttgtagtattaaagcgaaatggtgaagacgaatgatttttctgatttgccaagtaccactgatggctcttagatgcacatcaatattaaaattctcattcattatgtaat

SEQ ID NO: 75092 - DNA, 120 bp, Artificial Sequence
  ENSG00000079102_80 (sequence is synthesized)
ttaacccaaccacatattttacttcaatattctgaaattggctgttcctagtttccttaaaatgtgatggtttggaagcttgtctgtatgtatttcttaacacagtacagtagttatttg

SEQ ID NO: 75093 - DNA, 120 bp, Artificial Sequence
  ENSG00000079102_81 (sequence is synthesized)
ttttggtttgtatatgaactaagagaaaacttctgggacactagatgaactgagtgaagataagagttatacagtagagacaatagatggtatttttgctgaaaattttacttgttagat

SEQ ID NO: 75094 - DNA, 120 bp, Artificial Sequence
  ENSG00000079102_82 (sequence is synthesized)
actgttctatcagatactgtgctctcataactaagaattctaagaaatgtaaaataaaaccacttctccattaaaccctacagagtaattgttgaataaagcatacacatgaaatttccc

SEQ ID NO: 75095 - DNA, 120 bp, Artificial Sequence
  ENSG00000079102_83 (sequence is synthesized)
ctggtctgtaaagtattttaaaccatattgttgctaggtcataactgtgtgcttttttagtacatttaggggctctttgatttaatttaatggatgaaaactatctgaatcgattgtatt

SEQ ID NO: 75096 - DNA, 120 bp, Artificial Sequence
  ENSG00000079102_84 (sequence is synthesized)
tatgaccatttcctaagtagtctgaaaattacaaggagtgttttaaataattacctgaaaagaagtaaagtttgaagaagagtttagaagtctctttgaataaaggttttgttcattttt

SEQ ID NO: 75097 - DNA, 120 bp, Artificial Sequence
  ENSG00000079102_85 (sequence is synthesized)
ttttacattttgcttgtctttagagtgaacagaagattggttgagctttgtagttgttcaggatttttttatcctcctaattttatctttgtaacaacttaacgggaagatcagaccgtc

SEQ ID NO: 75098 - DNA, 120 bp, Artificial Sequence
  ENSG00000079102_86 (sequence is synthesized)
atccttttgtgccagtgaagaagttgggagtaagtgacatgtccaaggtgtgcctggctgaggactgattgaggtgtgggattcgaaatggtttttaagtctctgctgtgagctttctgt

SEQ ID NO: 75099 - DNA, 120 bp, Artificial Sequence
  ENSG00000079102_87 (sequence is synthesized)
ctcctccaactgctgccgcttcagtaaagcaactggaaaacaaacaaacacaaagttcacaagagaaagaaggaacatttttattcagcatagcgggtagttaattcactgatggatact

SEQ ID NO: 75100 - DNA, 120 bp, Artificial Sequence
  ENSG00000079102_88 (sequence is synthesized)
aaaataactggtagttttggtagaaaagcagattactaagatcccttttacttgggtaagcatattgcttgggcatagtggattctcaataagtttatactaacagtgggcttagcagat

SEQ ID NO: 75101 - DNA, 120 bp, Artificial Sequence
  ENSG00000079102_89 (sequence is synthesized)
tgataaatgtgaaagtttcatttgcactcccctttgaaggtcactttcaaaatgagcactcaaggaagcctctgatttaattatttgccaaggaggatttacctttctgtctggttccta

SEQ ID NO: 75102 - DNA, 120 bp, Artificial Sequence
  ENSG00000079102_90 (sequence is synthesized)
gaactttgtttgggagacaccagaaatataactgatcagatcctgtgtgaaatttcatctatttttaaaactgtatcagacacataaggttcaagtaagtatccagaagcctagaaaggt

SEQ ID NO: 75103 - DNA, 120 bp, Artificial Sequence
  ENSG00000079102_91 (sequence is synthesized)
ttgtctgaaatgagccccaattctgaactttctggatattagtctttcctgttgttattattaaggtgaaatgaaatattctgctttgtgagtacctacaaaccagaaattagatctgtt

SEQ ID NO: 75104 - DNA, 120 bp, Artificial Sequence
  ENSG00000079102_92 (sequence is synthesized)
tgtgtggaaacccagattacaattatattcttttcgttcttttctaagttgtacatttaaggttaaaggtataatgtgttagtgttttctcccaaaatggcttatactataatactatat

SEQ ID NO: 75105 - DNA, 120 bp, Artificial Sequence
  ENSG00000079102_93 (sequence is synthesized)
tcttatttaaaagcaaattgtttgttgaacaatttgaacaagtttgttgagactagaatctttgcctttctcagaaagcgttgttttctgtaaagatttcatcatatgaatgccatttcc

SEQ ID NO: 75106 - DNA, 120 bp, Artificial Sequence
  ENSG00000079102_94 (sequence is synthesized)
ttgcagctcggagcctgtggcggatggtgggactctccggccctgtgcagttatcaaatgataagaactgagcacactggatgaaataatacttgcactgggagcactaagaaaagattg

SEQ ID NO: 75107 - DNA, 120 bp, Artificial Sequence
  ENSG00000079102_95 (sequence is synthesized)
gcttctcgatgtgaacgaaaacgggaagaggcgaactccagacagctattttcccaccagctctttcccagtatttcatatttgaatgtattgtgacttttgactatccttgcacagtct

SEQ ID NO: 75108 - DNA, 120 bp, Artificial Sequence
  ENSG00000079102_96 (sequence is synthesized)
acctaggtgctgcccagctttgagcattgctgtcctgggtcatatgaggtcacattgcttctccaaaggctatcagctcatcccttcatgtatattgatggcggcccttgcagtatctag

SEQ ID NO: 75109 - DNA, 120 bp, Artificial Sequence
  ENSG00000079102_97 (sequence is synthesized)
attttctgagttcccattatatagtgtcctatgtgtgttgctcttttccagtcagactcattagtagtctggtgtggagctagtagctcagagattgcttttatgaggcggttttggaat

SEQ ID NO: 75110 - DNA, 120 bp, Artificial Sequence
  ENSG00000079102_98 (sequence is synthesized)
gagaagaaaatagccagctttagataaagcactataacaaaggcttctagttttatatatcatggtgtccattaaagcttaatagggaagagtccattgaacctggctgggcgcacgcgc

SEQ ID NO: 75111 - DNA, 120 bp, Artificial Sequence
  ENSG00000079102_99 (sequence is synthesized)
gggttgataggtgcaacaaacgaccatggcacacatctacttatgtaacaaacctccacactctgcacctgtatcctggaactcaaaaaaaaaaaaaaagttaaaaggagttcttcagag

SEQ ID NO: 75112 - DNA, 120 bp, Artificial Sequence
  ENSG00000079102_100 (sequence is synthesized)
taaaggaaaatgatataggccagaaacttggctctacataaagaaataaagagcactgaaggaaaaaaaaaatgaatttgaggtacaagtagccagccgtagttcctgtccatgattctc

SEQ ID NO: 75113 - DNA, 120 bp, Artificial Sequence
  ENSG00000079102_101 (sequence is synthesized)
tagaaggctattttttaaggctgttgggcccaaaaattgaggcagctgggacctctcctgtattcagaaatgcttttctacctgatgggttaatcggtgtacatggcacctggttcctac

SEQ ID NO: 75114 - DNA, 120 bp, Artificial Sequence
  ENSG00000079102_102 (sequence is synthesized)
aaatgaaatcttcaagttgcaaagagatttatgtgattgatctttcctggaattaagtgtgattggggatgagtgctgttcactcttcccagtatcttctcctttcctctcccttactgc

SEQ ID NO: 75115 - DNA, 120 bp, Artificial Sequence
  ENSG00000079102_103 (sequence is synthesized)
ccctccccaaacaataataaaaataagagaaagagaaagcaatgacaatctggatttataatgtcaaagtaagttcagagtaaaatgccttcttaggttttcattttaatgcctttacta

SEQ ID NO: 75116 - DNA, 120 bp, Artificial Sequence
  ENSG00000079102_104 (sequence is synthesized)
tgtgtgaaattgcctctttctctcttattacatttgaaattgccagaattaccgatcagcctatcaaccagcccgttctttattcaaggtgctgacctagctgaggaggaagagtgacca

SEQ ID NO: 75117 - DNA, 120 bp, Artificial Sequence
  ENSG00000079102_105 (sequence is synthesized)
tgtgtgtgtgtgtgtgtgtgtgtattcattccttagaataagactgatacaaagaaggcagtttacttttgtagactactagaatatactgctttatgcattaattccatctgggatatg

SEQ ID NO: 75118 - DNA, 120 bp, Artificial Sequence
  ENSG00000079102_106 (sequence is synthesized)
ctgaacttgatgactatggaaaataatctctatgttcatgtctatatttttaagtgtattttcattaagttagtacttgacaaaagatattttctgggattagcctgcttgacctttgtg

SEQ ID NO: 75119 - DNA, 120 bp, Artificial Sequence
  ENSG00000079102_107 (sequence is synthesized)
agtcaccagatacaaaattgagtgtgtcagggaaactattctgaaattaattggactgtgtatatattttttataccctctatcttccctgtggagaacaaaagttcttatgattggagc

SEQ ID NO: 75120 - DNA, 120 bp, Artificial Sequence
  ENSG00000079102_108 (sequence is synthesized)
taggttctcacataccgtagaacatacattcaagtataaagggaccctaaaaataatgtgccacttgcaatgttatcagtgaagaaataaaagagaggtaaagtgatgtacaagggtcag

SEQ ID NO: 75121 - DNA, 120 bp, Artificial Sequence
  ENSG00000079102_109 (sequence is synthesized)
tcacctcacacttagggcaatctgcgcacatggtagcccagtgctgagaattgtgcctgtggttccagcccatggcatgcatttgacctttgatgtagctgcattgcatactcttctcca

SEQ ID NO: 75122 - DNA, 120 bp, Artificial Sequence
  ENSG00000079112_0 (sequence is synthesized)
agtcgtagcaagagtctcgaccactgaatggaagaaaaggacttttaaccaccattttgtgacttacagaaaggaatttgaataaagaaaactatgatacttcaggcccatcttcactcc

SEQ ID NO: 75123 - DNA, 120 bp, Artificial Sequence
  ENSG00000079112_1 (sequence is synthesized)
ctgtgtcttcttatgctttatttggcaactggatatggccaagaggggaagtttagtggacccctgaaacccatgacattttctatttatgaaggccaagaaccgagtcaaattatattc

SEQ ID NO: 75124 - DNA, 120 bp, Artificial Sequence
  ENSG00000079112_2 (sequence is synthesized)
cagtttaaggccaatcctcctgctgtgacttttgaactaactggggagacagacaacatatttgtgatagaacgggagggacttctgtattacaacagagccttggacagggaaacaaga

SEQ ID NO: 75125 - DNA, 120 bp, Artificial Sequence
  ENSG00000079112_3 (sequence is synthesized)
tctactcacaatctccaggttgcagccctggacgctaatggaattatagtggagggtccagtccctatcaccataaaagtgaaggacatcaacgacaatcgacccacgtttctccagtca

SEQ ID NO: 75126 - DNA, 120 bp, Artificial Sequence
  ENSG00000079112_4 (sequence is synthesized)
aagtacgaaggctcagtaaggcagaactctcgcccaggaaagcccttcttgtatgtcaatgccacagacctggatgatccggccactcccaatggccagctttattaccagattgtcatc

SEQ ID NO: 75127 - DNA, 120 bp, Artificial Sequence
  ENSG00000079112_5 (sequence is synthesized)
cagcttcccatgatcaacaatgtcatgtactttcagatcaacaacaaaacgggagccatctctcttacccgagagggatctcaggaattgaatcctgctaagaatccttcctataatctg

SEQ ID NO: 75128 - DNA, 120 bp, Artificial Sequence
  ENSG00000079112_6 (sequence is synthesized)
gtgatctcagtgaaggacatgggaggccagagtgagaattccttcagtgataccacatctgtggatatcatagtgacagagaatatttggaaagcaccaaaacctgtggagatggtggaa

SEQ ID NO: 75129 - DNA, 120 bp, Artificial Sequence
  ENSG00000079112_7 (sequence is synthesized)
aactcaactgatcctcaccccatcaaaatcactcaggtgcggtggaatgatcccggtgcacaatattccttagttgacaaagagaagctgccaagattcccattttcaattgaccaggaa

SEQ ID NO: 75130 - DNA, 120 bp, Artificial Sequence
  ENSG00000079112_8 (sequence is synthesized)
ggagatatttacgtgactcagcccttggaccgagaagaaaaggatgcatatgttttttatgcagttgcaaaggatgagtacggaaaaccactttcatatccgctggaaattcatgtaaaa

SEQ ID NO: 75131 - DNA, 120 bp, Artificial Sequence
  ENSG00000079112_9 (sequence is synthesized)
gttaaagatattaatgataatccacctacatgtccgtcaccagtaaccgtatttgaggtccaggagaatgaacgactgggtaacagtatcgggacccttactgcacatgacagggatgaa

SEQ ID NO: 75132 - DNA, 120 bp, Artificial Sequence
  ENSG00000079112_10 (sequence is synthesized)
gaaaatactgccaacagttttctaaactacaggattgtggagcaaactcccaaacttcccatggatggactcttcctaatccaaacctatgctggaatgttacagttagctaaacagtcc

SEQ ID NO: 75133 - DNA, 120 bp, Artificial Sequence
  ENSG00000079112_11 (sequence is synthesized)
ttgaagaagcaagatactcctcagtacaacttaacgatagaggtgtctgacaaagatttcaagaccctttgttttgtgcaaatcaacgttattgatatcaatgatcagatccccatcttt

SEQ ID NO: 75134 - DNA, 120 bp, Artificial Sequence
  ENSG00000079112_12 (sequence is synthesized)
gaaaaatcagattatggaaacctgactcttgctgaagacacaaacattgggtccaccatcttaaccatccaggccactgatgctgatgagccatttactgggagttctaaaattctgtat

SEQ ID NO: 75135 - DNA, 120 bp, Artificial Sequence
  ENSG00000079112_13 (sequence is synthesized)
catatcataaagggagacagtgagggacgcctgggggttgacacagatccccataccaacaccggatatgtcataattaaaaagcctcttgattttgaaacagcagctgtttccaacatt

SEQ ID NO: 75136 - DNA, 120 bp, Artificial Sequence
  ENSG00000079112_14 (sequence is synthesized)
gtgttcaaagcagaaaatcctgagcctctagtgtttggtgtgaagtacaatgcaagttcttttgccaagttcacgcttattgtgacagatgtgaatgaagcacctcaattttcccaacac

SEQ ID NO: 75137 - DNA, 120 bp, Artificial Sequence
  ENSG00000079112_15 (sequence is synthesized)
cagaaggtctggacataagctattcactgaggggagacacaagaggttggcttaaaattgaccacgtgactggtgagatctttagtgtggctccattggacagagaagccggaagtccat

SEQ ID NO: 75138 - DNA, 120 bp, Artificial Sequence
  ENSG00000079112_16 (sequence is synthesized)
atcgggtacaagtggtggccacagaagtaggggggtcttccttgagctctgtgtcagagttccacctgatccttatggatgtgaatgacaaccctcccaggctagccaaggactacacgg

SEQ ID NO: 75139 - DNA, 120 bp, Artificial Sequence
  ENSG00000079112_17 (sequence is synthesized)
gcttgttcttctgccatcccctcagtgcacctggaagtctcattttcgaggctactgatgatgatcagcacttatttcggggtccccattttacattttccctcggcagtggaagcttac

SEQ ID NO: 75140 - DNA, 120 bp, Artificial Sequence
  ENSG00000079112_18 (sequence is synthesized)
aaaacgactgggaagtttccaaaatcaatggtactcatgcccgactgtctaccaggcacacagagtttgaggagagggagtatgtcgtcttgatccgcatcaatgatgggggtcggccac

SEQ ID NO: 75141 - DNA, 120 bp, Artificial Sequence
  ENSG00000079112_19 (sequence is synthesized)
ccttggaaggcattgtttctttaccagttacattctgcagttgtgtggaaggaagttgtttccggccagcaggtcaccagactgggatacccactgtgggcatggcagttggtatactgc

SEQ ID NO: 75142 - DNA, 120 bp, Artificial Sequence
  ENSG00000079112_20 (sequence is synthesized)
tgaccacccttctggtgattggtataattttagcagttgtgtttatccgcataaagaaggataaaggcaaagataatgttgaaagtgctcaagcatctgaagtcaaacctctgagaagct

SEQ ID NO: 75143 - DNA, 120 bp, Artificial Sequence
  ENSG00000079112_21 (sequence is synthesized)
gaatttgaaaaggaatgtttgaatttatatagcaagtgctatttcagcaacaaccatctcatcctattacttttcatctaacgtgcattataattttttaaacagatattccctcttgtc

SEQ ID NO: 75144 - DNA, 64 bp, Artificial Sequence
  ENSG00000079112_22 (sequence is synthesized)
attttttaaacagatattccctcttgtcctttaatatttgctaaatatttccagctcactgcaa

SEQ ID NO: 75145 - DNA, 120 bp, Artificial Sequence
  ENSG00000079112_23 (sequence is synthesized)
aagtgatctgcctgccttggtctcccaatacaggcatgaaccactgcacccacctacttagatatttcatgtgctatagacattagagagatttttcatttttccatgacatttttcctc

SEQ ID NO: 75146 - DNA, 120 bp, Artificial Sequence
  ENSG00000079112_24 (sequence is synthesized)
cctctctgcaaatggcttagctacttgtgtttttcccttttggggcaagacagactcattaaatattctgtacattttttctttatcaaggagatatatcagtgttgtctcatagaactg

SEQ ID NO: 75147 - DNA, 120 bp, Artificial Sequence
  ENSG00000079112_25 (sequence is synthesized)
cctggattccatttatgttttttctgattccatcctgtgtccccttcatccttgactcctttggtatttcactgaatttcaaacatttgtcagagaagaaaaacgtgaggactcaggaaa

SEQ ID NO: 75148 - DNA, 120 bp, Artificial Sequence
  ENSG00000079112_26 (sequence is synthesized)
aataaataaataaaagaacagccttttcccttagtattaacagaaatgtttctgtgtcattaaccatctttaatcaatgtgacatgttgctctttggctgaaattcttcaacttggaaat

SEQ ID NO: 75149 - DNA, 120 bp, Artificial Sequence
  ENSG00000079112_27 (sequence is synthesized)
gacacagacccacagaaggtgttcaaacacaacctactctgcaaaccttggtaaaggaaccagtcagctggccagatttcctcactacctgccatgcatacatgctgcgcatgttttctt

SEQ ID NO: 75150 - DNA, 120 bp, Artificial Sequence
  ENSG00000079112_28 (sequence is synthesized)
cattcgtatgttagtaaagttttggttattatatatttaacatgtggaagaaaacaagacatgaaaagagtggtgacaaatcaagaataaacactggttgtagtcagttttgtttgttga

SEQ ID NO: 75151 - DNA, 120 bp, Artificial Sequence
  ENSG00000079112_29 (sequence is synthesized)
aatcacggtggaagtatgatattttggctgtggatctgagttgatcaatctgcttagtggacttgagtccccccacccccgcttgtctgattggggctcctgggaggaatttgaataaag

SEQ ID NO: 75152 - DNA, 78 bp, Artificial Sequence
  ENSG00000079112_30 (sequence is synthesized)
agtcgtagcaagagtctcgaccactgaatggaagaaaaggacttttaaccaccattttgtgacttacagaaagatggc

SEQ ID NO: 75153 - DNA, 120 bp, Artificial Sequence
  ENSG00000079134_0 (sequence is synthesized)
gcagtggcgggcacgcgcagccgagaagatgtctccgacgccgccgctcttcagtttgcccgaagcgcggacgcggtttacgaagtctaccagagaggccttgaacaacaaaaacatcaa

SEQ ID NO: 75154 - DNA, 120 bp, Artificial Sequence
  ENSG00000079134_1 (sequence is synthesized)
gccattgttaagtaccttcagccaggtacctggcagtgaaaatgaaaaaaaatgtacccttgaccaagctttcagaggtattctagaagaagaaattataaatcattcatcatgtgaaaa

SEQ ID NO: 75155 - DNA, 120 bp, Artificial Sequence
  ENSG00000079134_2 (sequence is synthesized)
cgttttagctattatttctcttgctattgggggagtaactgaaggtatttgtaccgcatctacaccttttgtattgttgggagatgttttggattgtcttcctttggatcagtgtgacac

SEQ ID NO: 75156 - DNA, 120 bp, Artificial Sequence
  ENSG00000079134_3 (sequence is synthesized)
aatattcacttttgtggaaaaaaatgttgctacttggaaatcaaatacattctattctgctgggaaaaattacttactacgtatgtgcaatgatctcctaagaagattgtctaaatccca

SEQ ID NO: 75157 - DNA, 120 bp, Artificial Sequence
  ENSG00000079134_4 (sequence is synthesized)
gaatacagtcttctgtggacggattcagctctttttggccaggcttttccctctgtctgagaaatcaggtcttaacttgcagagtcagtttaatctggaaaatgtcactgttttcaatac

SEQ ID NO: 75158 - DNA, 120 bp, Artificial Sequence
  ENSG00000079134_5 (sequence is synthesized)
aaatgagcaggaaagcaccctgggtcagaagcacactgaagatagagaagaaggaatggatgtagaagaaggcgaaatgggagacgaggaagctccaacaacgtgctctattccaattga

SEQ ID NO: 75159 - DNA, 120 bp, Artificial Sequence
  ENSG00000079134_6 (sequence is synthesized)
ttacaacctgtatcgaaaattctggtcacttcaggattacttcaggaaccctgtgcaatgctatgagaagatttcatggaaaacttttctcaagtattctgaagaagttttagctgtttt

SEQ ID NO: 75160 - DNA, 120 bp, Artificial Sequence
  ENSG00000079134_7 (sequence is synthesized)
taagagttataaattagatgatactcaggcctcaagaaaaaagatggaagaattgaaaacaggaggagaacatgtatattttgcaaaatttttaacaagtgaaaagctgatggatttaca

SEQ ID NO: 75161 - DNA, 120 bp, Artificial Sequence
  ENSG00000079134_8 (sequence is synthesized)
ggcaggtcaaattcaaaagttcaaactatgttttaactgatgagcaatcactttggattgaagatactacaaaatcagtttatcaactactatctgaaaacccccccgatggagaaagat

SEQ ID NO: 75162 - DNA, 120 bp, Artificial Sequence
  ENSG00000079134_9 (sequence is synthesized)
tttcaaagatggtagagcatatattaaacactgaagaaaactggaactcgtggaaaaatgaaggttgcccaagttttgtgaaagaaagaacatcagataccaaacctacgagaataattc

SEQ ID NO: 75163 - DNA, 120 bp, Artificial Sequence
  ENSG00000079134_10 (sequence is synthesized)
ggaagagaacagcacccgaggacttcctagggaaaggacccaccaaaaaaattctgatgggaaatgaggagttaacaaggctttggaatctttgccctgataatatggaagcctgtaaat

SEQ ID NO: 75164 - DNA, 120 bp, Artificial Sequence
  ENSG00000079134_11 (sequence is synthesized)
cagagacaagggaacacatgcccactttggaggaattctttgaagaagccattgaacaggcagaccctgaaaatatggtggaaaatgaatataaggctgtgaacaattcaaattatggtt

SEQ ID NO: 75165 - DNA, 120 bp, Artificial Sequence
  ENSG00000079134_12 (sequence is synthesized)
ggagagccctgagactattagcacggagaagccctcacttcttccagccaaccaaccagcagtttaaaagtttaccagaatatcttgaaaatatggtaataaagctagccaaggaattac

SEQ ID NO: 75166 - DNA, 120 bp, Artificial Sequence
  ENSG00000079134_13 (sequence is synthesized)
cgcctccttctgaagaaataaaaacaggtgaggatgaagatgaggaagataatgatgctctactgaaggaaaatgaaagtcctgatgttcggcgagacaaacctgtaacaggagaacaaa

SEQ ID NO: 75167 - DNA, 120 bp, Artificial Sequence
  ENSG00000079134_14 (sequence is synthesized)
tagaggtatttgccaacaagctgggtgaacaatggaagattctggctccctacttggaaatgaaagactcagaaattaggcagattgagtgtgacagtgaagacatgaagatgagagcta

SEQ ID NO: 75168 - DNA, 120 bp, Artificial Sequence
  ENSG00000079134_15 (sequence is synthesized)
agcagctcctggttgcctggcaagatcaagagggagttcatgcaacacctgagaatctgattaatgcactgaataagtctggattaagtgaccttgcagaaagtctaactaatgacaatg

SEQ ID NO: 75169 - DNA, 120 bp, Artificial Sequence
  ENSG00000079134_16 (sequence is synthesized)
agacaaatagttagcttcttttttttttctttttattaaaactgtgatagattttgttaccaagcagcatttgataagaggtccactggttttggtaaacaataaacatttttataacaa

SEQ ID NO: 75170 - DNA, 120 bp, Artificial Sequence
  ENSG00000079134_17 (sequence is synthesized)
ttcattaagcataataagaaatggtcttgttttatttccgtttagctgacagcctttctaagttaaactgaatagaaatgtttcttattttactttgggttaaagctgattgattaatgt

SEQ ID NO: 75171 - DNA, 120 bp, Artificial Sequence
  ENSG00000079134_18 (sequence is synthesized)
tagtttgaaagtcccatttcttcctttcagaagtaggactaatttggtttcaaaggtgaaagtagttctacattaagtctgttttgtaaactaattttggaataaatgcagtttaattac

SEQ ID NO: 75172 - DNA, 120 bp, Artificial Sequence
  ENSG00000079134_19 (sequence is synthesized)
tttgtggaaaaaaatgttgctacttggaaatcagtaagtgccttagtttcttttcctgctaactttatctttctatagatccagaattctgagggtagatttttttttttaaatttattt

SEQ ID NO: 75173 - DNA, 120 bp, Artificial Sequence
  ENSG00000079134_20 (sequence is synthesized)
gtagtattgctgaatgccaacaagtttctgcctatgaaaaaattatatactgctctctcgggagagccaaataaaaaccatgtgtggagaaaaacttgaaatacaaaatttgatttaatt

SEQ ID NO: 75174 - DNA, 120 bp, Artificial Sequence
  ENSG00000079134_21 (sequence is synthesized)
ttgaaaatgttatttgcttaaaaaaagtgaaagtggcatagtagattctcagtgcatgttagtgttctttaatatttcactctggcaacttattattgaagaatgtgtaacaagttctga

SEQ ID NO: 75175 - DNA, 120 bp, Artificial Sequence
  ENSG00000079134_22 (sequence is synthesized)
agaagagtgataatttccgtcttaatttcagaatacattctattctgctgggaaaaattacttactacgtatgtgcaatgatctcctaagaagattgtctaaatcccagaatacagtctt

SEQ ID NO: 75176 - DNA, 120 bp, Artificial Sequence
  ENSG00000079134_23 (sequence is synthesized)
gggggagtaactgaaggtaagtatggttccgttttgttttgtttaaagtaatcttggacatgacatgctttatttaaaacgtcttctccccatacttctccacctatctgattttgttta

SEQ ID NO: 75177 - DNA, 120 bp, Artificial Sequence
  ENSG00000079134_24 (sequence is synthesized)
catctctattatgcagtgcacattttggcacttcctttgttctccagttgttttgttcattcagtaaattttcattgagcatctactatgtgcctggtactgagctaggacctggagatt

SEQ ID NO: 75178 - DNA, 120 bp, Artificial Sequence
  ENSG00000079134_25 (sequence is synthesized)
caatggtgaataaaacatattcccctgcttatgtggagctaatggaagaaacagatgtatgcatgccttactatggtgtaagtactatggtcgaagtgggaatgaagtgtagttagaggg

SEQ ID NO: 75179 - DNA, 120 bp, Artificial Sequence
  ENSG00000079134_26 (sequence is synthesized)
aatagagccaacatggctctctaaacttcagtctaaaggagtcaggagaggttttagaaaagaacatgagaactagaatgtgaggtatgaagaatttgttagacatactaagaaaggaat

SEQ ID NO: 75180 - DNA, 120 bp, Artificial Sequence
  ENSG00000079134_27 (sequence is synthesized)
tgaaaaaatggaaatttaggattttctttgtttcagccccaaataggaaaataaggataaagttaagctcaggtacaagaccacaaacactccttggttctctgcctacaaaccactcct

SEQ ID NO: 75181 - DNA, 120 bp, Artificial Sequence
  ENSG00000079134_28 (sequence is synthesized)
atgatgcagaaagttgttgaaagcttagtatattctttctaatcacagctactatctgaaaacccccccgatggagaaagattttcaaagatggtagaggtatgtgttttttatgcttac

SEQ ID NO: 75182 - DNA, 120 bp, Artificial Sequence
  ENSG00000079134_29 (sequence is synthesized)
tttttaagcaaaaaggagttcatttatttggggtttcacaaaacctcattaggctctctactgtctatctaaatacttccatccatttcctcctatcctgtccataactgaaggtggagc

SEQ ID NO: 75183 - DNA, 120 bp, Artificial Sequence
  ENSG00000079134_30 (sequence is synthesized)
ccactgttacttaacggtatttgtgttaaggacactgagcaatgccgtattagttgtataatgacttcactacctgctgggtttgaatcccaggctcgtcatttgctggctgcagtgcag

SEQ ID NO: 75184 - DNA, 120 bp, Artificial Sequence
  ENSG00000079134_31 (sequence is synthesized)
ctctttcagacttgtaattttaaggtagtagcacatggtaaacactcaaaaaatgttatttcttatccttctatctattttggaggtttggtatagcatagtaggaagatgagggacttt

SEQ ID NO: 75185 - DNA, 120 bp, Artificial Sequence
  ENSG00000079134_32 (sequence is synthesized)
gaagtgagacgtgggtttgaattaaatctttatggccttgggcaaatcagtgagacacggtagtctctgtttaatatgtacatgtacttgttccgagaattcaatgaataatgtatgtaa

SEQ ID NO: 75186 - DNA, 120 bp, Artificial Sequence
  ENSG00000079134_33 (sequence is synthesized)
agtgttcagatcctagccatcaatatttattggatgtctttaaatcacctagtgcattatgagagctcagttagtggcagctattaacaatttgggtttgcctgttgccttttctagggt

SEQ ID NO: 75187 - DNA, 120 bp, Artificial Sequence
  ENSG00000079134_34 (sequence is synthesized)
ttgggtgttttattcgttgtattttgaatgaatcttaatgtagcatgccatactgaatgtgcatcatgtatacacatatcttaatatcaaatcagaagttttcgtttcacactcagctta

SEQ ID NO: 75188 - DNA, 120 bp, Artificial Sequence
  ENSG00000079134_35 (sequence is synthesized)
ttttaggaaacatatattgctctgttcatagtgaatctgattgattaattgaatgttttattccctgcatatgcttttatgtcttcagtaccaaccctcttgaggaagaagtgcaagaat

SEQ ID NO: 75189 - DNA, 120 bp, Artificial Sequence
  ENSG00000079134_36 (sequence is synthesized)
tttctcttataatcctctcatttgtgattattcttgtcttggtaatttttgacactatccacagtatagttacatgttacatgccttgtgttttttaaaccttaaagttgcatatgcatt

SEQ ID NO: 75190 - DNA, 120 bp, Artificial Sequence
  ENSG00000079134_37 (sequence is synthesized)
gctgtaactcaagcatgctttcattgctttgttccctagttcaaactatgttttaactgatgagcaatcactttggattgaagatactacaaaatcagtttatcaagtaagttcaacacg

SEQ ID NO: 75191 - DNA, 120 bp, Artificial Sequence
  ENSG00000079134_38 (sequence is synthesized)
gtaaaagttgacttgatgactatacgatttctctaaggattttgatagcacaggtacattttaagggtttggtttaataaatgacaagagccctctccaagtgagataagaaaagttgac

SEQ ID NO: 75192 - DNA, 120 bp, Artificial Sequence
  ENSG00000079134_39 (sequence is synthesized)
atgaggtcttaggaagaactagaggtgaaggtgggctctctcactttcctgtataagcagtgatacatcctgtagtggcgcaaaaggtctagtccaagaatatttagcttaggagctggg

SEQ ID NO: 75193 - DNA, 120 bp, Artificial Sequence
  ENSG00000079134_40 (sequence is synthesized)
aaatcctggaactgtgctttttactgacttcctgcttcccagattgggggtggggagtctttccaactctgaggtcttcccaagttcactccttctgcaggtgaagatagtcccacttag

SEQ ID NO: 75194 - DNA, 120 bp, Artificial Sequence
  ENSG00000079134_41 (sequence is synthesized)
gatccttacctgacactgtcatttaacgctctcaggggtgaggttctggcaccctgtacttggaatctcacaaccgtccttatccaaacaaaatacctgttaccttacttcagaggctgg

SEQ ID NO: 75195 - DNA, 120 bp, Artificial Sequence
  ENSG00000079134_42 (sequence is synthesized)
gggcttccagaaacaagataaatatcttcatggaccagaaatgccaagtagtgagcaaaactgcagcctgggcctgctggactctctatccaaggcaggtggtggtgtccaggaatttgg

SEQ ID NO: 75196 - DNA, 120 bp, Artificial Sequence
  ENSG00000079134_43 (sequence is synthesized)
ctacaagtaacagagactaaatgtgcaccatgtgggacaaggggccagagccagattcacttcttgaagccaaggactagggtggaacttttatccagttttgggaagaaactaagaaaa

SEQ ID NO: 75197 - DNA, 120 bp, Artificial Sequence
  ENSG00000079134_44 (sequence is synthesized)
aatattgccagtcttctgccaagggctatggttttataggaagttgtgagcctagggataacaaagacagctttgtgtccatctgcttgctcagtgaccagatatgtgatatgctcagta

SEQ ID NO: 75198 - DNA, 120 bp, Artificial Sequence
  ENSG00000079134_45 (sequence is synthesized)
tacttatgaaacagctgctccaagaagtcatcataagacttcttctagacttttggactcaggggccctggtagaagcagatgcaaaactgctagacagggaaggatgtacacagagagg

SEQ ID NO: 75199 - DNA, 120 bp, Artificial Sequence
  ENSG00000079134_46 (sequence is synthesized)
gaggggaaaggaagtaaacaaacatcccaaaagaaaaggctcctgttcaaaactctgataaattaaaattccaaaatccataaatctaatgctaagaaggatcaccagcaaaatcaacta

SEQ ID NO: 75200 - DNA, 120 bp, Artificial Sequence
  ENSG00000079134_47 (sequence is synthesized)
ttgggatatatatatatatttattccagatgaaatatatagcctgaccaagactttatgtatgttttggatactcaaaaagataatcgatgagataacatccattgaaaaggaacaagaa

SEQ ID NO: 75201 - DNA, 120 bp, Artificial Sequence
  ENSG00000079134_48 (sequence is synthesized)
atcatgaaacaaaagcaggctgaaatgaagtaggacagtcgatacaactaatcgggagtcttgggaatgaaaaatacaataattgaaaccaaaactcagcacacagaattaaactataca

SEQ ID NO: 75202 - DNA, 120 bp, Artificial Sequence
  ENSG00000079134_49 (sequence is synthesized)
atccagcaagcagcacagacagattttttttttttaagtggaagagcagttaaaagccatggtgaatagattgggaatttccaacatctgtctagtaggatttccaaagaagaaaatgga

SEQ ID NO: 75203 - DNA, 120 bp, Artificial Sequence
  ENSG00000079134_50 (sequence is synthesized)
gggaatggtagagaaactggattgcaaagaattgaaggaaatctcaaatcctcagcttaaaagtgtgtcacaactgccaagcaggataaagaaagataaatctactcttcattacatcat

SEQ ID NO: 75204 - DNA, 120 bp, Artificial Sequence
  ENSG00000079134_51 (sequence is synthesized)
gccataactgtgggcattcagagaaaacctaaaagccactaagggataagaaagacaaatatactgggaaggcacagcagtttgactgttagcagatttctaacatatcaaccattaata

SEQ ID NO: 75205 - DNA, 120 bp, Artificial Sequence
  ENSG00000079134_52 (sequence is synthesized)
ccagaagacagtagagaaatattaaagtgctgaaagaaaaatgacattcaatctagaattttataccgagttaaatatactcaagactgtcgatgaaagaaagacatttttatttaaaga

SEQ ID NO: 75206 - DNA, 120 bp, Artificial Sequence
  ENSG00000079134_53 (sequence is synthesized)
tttgaaaaaaactactcaaggatgttcttcaggaggaaggaaattgaacccataagaatggagtgggatacagaaggcaacgctgatggatttacaactgagtgacagtaactttcgtcg

SEQ ID NO: 75207 - DNA, 120 bp, Artificial Sequence
  ENSG00000079134_54 (sequence is synthesized)
cctggcaggtaaggcattgatatctatgaaaaatacttgcctcaatctttatacataccctgagctgtttgaaaaatgaggatgtcttttgtttttaatagtgaaaatgaaaaaaaatgt

SEQ ID NO: 75208 - DNA, 120 bp, Artificial Sequence
  ENSG00000079134_55 (sequence is synthesized)
tttgttgttctttaaacagtaactttctacttttccattctttcccctgaaacaatactgttattttaaatgttgaatcatagttaatatcaaaccttgttattttttgaagataatctt

SEQ ID NO: 75209 - DNA, 120 bp, Artificial Sequence
  ENSG00000079134_56 (sequence is synthesized)
ttcaaatcacaaagacaatttagcaacattacaaaacatttagaaataagaagggaaaacagtactcttaattcctctacttttaaaagctaccattcatctggtataatggttttagtt

SEQ ID NO: 75210 - DNA, 120 bp, Artificial Sequence
  ENSG00000079134_57 (sequence is synthesized)
tctatagtcttttaagaattttttttattgtcataaccatatgtacatacaattttgaatcctgccttttttcacttagcattatatcataagcatttttccaagttattatagtcgtta

SEQ ID NO: 75211 - DNA, 120 bp, Artificial Sequence
  ENSG00000079134_58 (sequence is synthesized)
taaccatcatttttaattggctgcattatattcttttgaatagcttagtggtgaagaaaacagactgtggagccagactgcctgggttcgtatcccagctctaccacttactggctctat

SEQ ID NO: 75212 - DNA, 120 bp, Artificial Sequence
  ENSG00000079134_59 (sequence is synthesized)
gatcttggtgaagttatttaacctctctgtgtctcagttttcccattctataaaatgcaaataatgatatgctctacctcataggattgtaaggattaaatgtgttagtatatgtaaagt

SEQ ID NO: 75213 - DNA, 120 bp, Artificial Sequence
  ENSG00000079134_60 (sequence is synthesized)
acttagtgtgcctgacatatagtaaatgctctagatcttgtcaagaattattgtcatcattactgagtgcacatatcaaaaattacttaagtatgtcctatttggggacttttaggttgc

SEQ ID NO: 75214 - DNA, 120 bp, Artificial Sequence
  ENSG00000079134_61 (sequence is synthesized)
ttccacttcttgtccttttaaaaccttgttatgagtaacaaagtgtaccttttaagatattcttcagaattatttttcataggctattctactctacagttttttaaacttttaaattgg

SEQ ID NO: 75215 - DNA, 120 bp, Artificial Sequence
  ENSG00000079134_62 (sequence is synthesized)
gacatcttctttaaaattgctgtcactatgtgagcaaaaaactgacttaatcatgtgaaaaaccagtgatccacaagctcccatgttttagaatgagggaaaaacacattggaatataca

SEQ ID NO: 75216 - DNA, 120 bp, Artificial Sequence
  ENSG00000079134_63 (sequence is synthesized)
ttggaatatacatttacaggaaatacatgagttgataaagaagtaactgataattttctgtacagcatgtaatttaaagttcaacagggctgtgggtgcggtggctcacgactgtaatcc

SEQ ID NO: 75217 - DNA, 120 bp, Artificial Sequence
  ENSG00000079150_0 (sequence is synthesized)
gtgacgcaggacaacgcctgccacgcgtcggaactcggccgcgggacatccacggggcgcgagtgacacgcgggagggagagcagtgttctgctggagccgatgccaaaaaccatgcatt

SEQ ID NO: 75218 - DNA, 120 bp, Artificial Sequence
  ENSG00000079150_1 (sequence is synthesized)
tcttattcagattcattgttttcttttatctgtggggcctttttactgctcagagacaaaagaaagaggagagcaccgaagaagtgaaaatagaagttttgcatcgtccagaaaactgct

SEQ ID NO: 75219 - DNA, 120 bp, Artificial Sequence
  ENSG00000079150_2 (sequence is synthesized)
ctaagacaagcaagaagggagacctactaaatgcccattatgacggctacctggctaaagacggctcgaaattctactgcagccggacacaaaatgaaggccaccccaaatggtttgttc

SEQ ID NO: 75220 - DNA, 120 bp, Artificial Sequence
  ENSG00000079150_3 (sequence is synthesized)
ttggtgttgggcaagtcataaaaggcctagacattgctatgacagatatgtgccctggagaaaagcgaaaagtagttatacccccttcatttgcatacggaaaggaaggctatgcagaag

SEQ ID NO: 75221 - DNA, 120 bp, Artificial Sequence
  ENSG00000079150_4 (sequence is synthesized)
gcaagattccaccggatgctacattgatttttgagattgaactttatgctgtgaccaaaggaccacggagcattgagacatttaaacaaatagacatggacaatgacaggcagctctcta

SEQ ID NO: 75222 - DNA, 120 bp, Artificial Sequence
  ENSG00000079150_5 (sequence is synthesized)
aagccgagataaacctctacttgcaaagggaatttgaaaaagatgagaagccacgtgacaagtcatatcaggatgcagttttagaagatatttttaagaagaatgaccatgatggtgatg

SEQ ID NO: 75223 - DNA, 120 bp, Artificial Sequence
  ENSG00000079150_6 (sequence is synthesized)
gcttcatttctcccaaggaatacaatgtataccaacacgatgaactatagcatatttgtatttctactttttttttttagctatttactgtactttatgtataaaacaaagtcacttttc

SEQ ID NO: 75224 - DNA, 120 bp, Artificial Sequence
  ENSG00000079150_7 (sequence is synthesized)
tccaagttgtatttgctatttttcccctatgagaagatattttgatctccccaatacattgattttggtataataaatgtgaggctgttttgcaaacttaacttgcaggaatggtatgac

SEQ ID NO: 75225 - DNA, 120 bp, Artificial Sequence
  ENSG00000079150_8 (sequence is synthesized)
tgtgtttcctactgctttattctgtaaacaagaattgtagcaccatgaaacagacctctgggtcccagtgggcattttttcccctttcaggatgtaggaggacatgtatagtatgtcaaa

SEQ ID NO: 75226 - DNA, 120 bp, Artificial Sequence
  ENSG00000079150_9 (sequence is synthesized)
aactgcaagcttttcccaactttaaccttaccagcatgttaatatccagtttttttatagtttaaaagttaaagtgcctcatattttgaaaatatccattaaggacccaggaattagcat

SEQ ID NO: 75227 - DNA, 120 bp, Artificial Sequence
  ENSG00000079150_10 (sequence is synthesized)
ttcacttgtttatacatttttataacattatgaagacgatataaaaatcctagaactgaagagtcttcctttggtatatgtgcaggaagatagttgtatatctctgttccacaaagaacg

SEQ ID NO: 75228 - DNA, 120 bp, Artificial Sequence
  ENSG00000079150_11 (sequence is synthesized)
agactgtactgcctggcttttgtattccttcagacattattgtaaatgtgcaactcctcttccctcttgtaaacctttataagatgtctgccaccccaagcttttgtcttgatagtttta

SEQ ID NO: 75229 - DNA, 120 bp, Artificial Sequence
  ENSG00000079150_12 (sequence is synthesized)
aattgatgccatgaaatttcttagttttcgttccctttctctagttatctctttccttatgtcacctcatttcccatcattcttgtcactaatgatgaatgatcattacaaattggtatg

SEQ ID NO: 75230 - DNA, 120 bp, Artificial Sequence
  ENSG00000079150_13 (sequence is synthesized)
ctgtcaaattttgataaatgtgccaaacaaaggaggatatacagtgccatggcaattttgtgtcatggtcaagttatgatatcatatgacttgagaatagtatgtaagagatgctgtaga

SEQ ID NO: 75231 - DNA, 120 bp, Artificial Sequence
  ENSG00000079150_14 (sequence is synthesized)
agatcacgttggtaccaaagaaagggcacatgtctatcggaacatagattttgcatactgcatggtatggtcaggctttgtgtccacacccaaatctcatcttgaaattataatccccat

SEQ ID NO: 75232 - DNA, 120 bp, Artificial Sequence
  ENSG00000079150_15 (sequence is synthesized)
aatttccataatccccacatgtcaatggagagaccaggtggaggtaactgaatcatgggggtggttttccccgtgctgttctcatgcaatctgatggttttataagtgtttggtagttcc

SEQ ID NO: 75233 - DNA, 120 bp, Artificial Sequence
  ENSG00000079150_16 (sequence is synthesized)
ctcatgcaatctgatggttttataagtgtttggtagttcctcttgcattcattctcccacccgccaccttgtgaagaaagtccttgcttccccgccttccaccatgattgtaagcttcct

SEQ ID NO: 75234 - DNA, 120 bp, Artificial Sequence
  ENSG00000079150_17 (sequence is synthesized)
ctttatagcagtgtgaaaatggactactacactgcatatataggaaagtatggtcagacagtaaatagctctgttcaaaataattgagttccaaacaagtaaagttttttctaccttctg

SEQ ID NO: 75235 - DNA, 120 bp, Artificial Sequence
  ENSG00000079150_18 (sequence is synthesized)
tgagttccaaacaagtaaagttttttctaccttctgaaacttgctctttccaaaccattgttcatcctttaacttctttacactatcaaaaattctatttaaaaatagagggctttcaga

SEQ ID NO: 75236 - DNA, 120 bp, Artificial Sequence
  ENSG00000079150_19 (sequence is synthesized)
tgagtacatacaaaaacaaacaaaagtatacataggggtaacacaaccatgagattagtaaataatacatatggctagcacataatttgacaccttataaaacaagaatctgtactatct

SEQ ID NO: 75237 - DNA, 120 bp, Artificial Sequence
  ENSG00000079150_20 (sequence is synthesized)
tttccttcctcccaatatttcttcatttctatgctcaattttctaatactttttcacatgcttaatcatttactctttcatcgccttccctcaaaaaaacctgctccgttgaagtaaact

SEQ ID NO: 75238 - DNA, 120 bp, Artificial Sequence
  ENSG00000079150_21 (sequence is synthesized)
aagtaactcaatattctttattttggtttggaacctgtctcaattttttgtatccatattaagaagtcaccctataatctaaactttgtaattctaatttttttgtcccattatcataca

SEQ ID NO: 75239 - DNA, 120 bp, Artificial Sequence
  ENSG00000079150_22 (sequence is synthesized)
aagtgcttttaaacttgtttttaaaaaatgacagataatgccacatgaataggaagatgattcattctaaaacttgtatttacataattaaaaataaatttataatcattctacatacaa

SEQ ID NO: 75240 - DNA, 120 bp, Artificial Sequence
  ENSG00000079150_23 (sequence is synthesized)
tacctggctaaagacggctcgaaattctactgcaggtagtacttgaagaagtctttcttctgcaaaatatccttgtctcatgtcacagaacaaccctgcatgtcttgaaatgcatgtgac

SEQ ID NO: 75241 - DNA, 120 bp, Artificial Sequence
  ENSG00000079156_0 (sequence is synthesized)
gtcggtgctggagatcgcggctcggtgcaggcggcgcccatgcctcctctcctccactagcccgcgcgccagtccgcctgccggggccggctctccgcctcctgcctcccgtcgcagccg

SEQ ID NO: 75242 - DNA, 120 bp, Artificial Sequence
  ENSG00000079156_1 (sequence is synthesized)
cgcagccgccgcagagtccgcggcgccaccgctcgccctccaggttctgccacttgctgggaaaacagcaacagaaggatattaaggagccacccctataatttacccagatagccccag

SEQ ID NO: 75243 - DNA, 120 bp, Artificial Sequence
  ENSG00000079156_2 (sequence is synthesized)
caaggtcaaagacatatcatgtcccaaggagaaaagctgcaggcatctgaggataaatcactgtgaaacagctttgaccataaagctgacttggaagactttgactccaaggtgcaaggt

SEQ ID NO: 75244 - DNA, 120 bp, Artificial Sequence
  ENSG00000079156_3 (sequence is synthesized)
ggtttggacaccctcaatattgcctgctcttttctagtcaaacctgattcatgaaatggaatgaagctgaaaaatcatctacttctttgtttgtggatttgagagaagattgggatggtc

SEQ ID NO: 75245 - DNA, 120 bp, Artificial Sequence
  ENSG00000079156_4 (sequence is synthesized)
ttaagtgcataaaacgagactctaactgcagcgatgagttcagatgagaagggcatttcccctgctcataaaacatccactccaacccatagaagtgcctcctcttcaacatcctcccaa

SEQ ID NO: 75246 - DNA, 120 bp, Artificial Sequence
  ENSG00000079156_5 (sequence is synthesized)
agggacagtaggcagagtattcacatactggagaggactgcttcctctagcaccgagccctctgtaagtcggcaattgctagaaccggagccagtccccctctccaaggaagctgacagc

SEQ ID NO: 75247 - DNA, 120 bp, Artificial Sequence
  ENSG00000079156_6 (sequence is synthesized)
tgggaaattatagaagggctgaaaataggccaaaccaatgtccagaaaccagacaaacatgagggctttatgctgaagaaaagaaaatggcctttaaaaggctggcacaagcgttttttt

SEQ ID NO: 75248 - DNA, 120 bp, Artificial Sequence
  ENSG00000079156_7 (sequence is synthesized)
gtcctggataatggaatgttaaagtattcaaaggcaccactcgatattcagaaaggaaaggtccatgggagcatagatgtgggactctcagtcatgtcaattaaaaagaaagctcgaaga

SEQ ID NO: 75249 - DNA, 120 bp, Artificial Sequence
  ENSG00000079156_8 (sequence is synthesized)
atagaccttgacaccgaagagcacatctatcatttgaaggtgaaatcccaggactggtttgatgcatgggtctccaaactgcgacatcatcggttgtatcgtcagaatgaaattgtgaga

SEQ ID NO: 75250 - DNA, 120 bp, Artificial Sequence
  ENSG00000079156_9 (sequence is synthesized)
tcaccaagagatgctagttttcacatatttccttcaacgtccacagctgaatcctcaccagctgctaatgtttctgtaatggatggaaagatgcaaccaaacagctttccgtggcagtcc

SEQ ID NO: 75251 - DNA, 120 bp, Artificial Sequence
  ENSG00000079156_10 (sequence is synthesized)
cctttaccatgcagcaatagcctccctgcaacgtgcacaactggccagagtaaagtggcagcctggttacaggactcggaagagatggacaggtgtgcagaagatcttgcacattgccag

SEQ ID NO: 75252 - DNA, 120 bp, Artificial Sequence
  ENSG00000079156_11 (sequence is synthesized)
tcaaaccttgtggaacttagcaaactcctgcaaaatttggaaatacttcagagaactcagtcggcacctaactttactgacatgcaggctaactgtgtagatatttcaaagaaagacaag

SEQ ID NO: 75253 - DNA, 120 bp, Artificial Sequence
  ENSG00000079156_12 (sequence is synthesized)
cgggtcacaagacgatggagaacaaaaagtgtcagcaaagatacaaaaatacaactgcaggttcctttcagtgctaccatgtcaccagttcgcttgcattcctccaaccccaacctttgt

SEQ ID NO: 75254 - DNA, 120 bp, Artificial Sequence
  ENSG00000079156_13 (sequence is synthesized)
gcagatattgaatttcagactccccctagccacctcactgaccctctggaaagttcaacagattatacaaagctgcaagaagaattttgtctaatcgcacagaaagtgcattctcttttg

SEQ ID NO: 75255 - DNA, 120 bp, Artificial Sequence
  ENSG00000079156_14 (sequence is synthesized)
aagtctgcatttaatagcatagctatagagaaggagaagctgaagcagatggtttccgagcaggatcacagtaaaggccacagcacgcagatggcacggctccgacagtcactgtctcag

SEQ ID NO: 75256 - DNA, 120 bp, Artificial Sequence
  ENSG00000079156_15 (sequence is synthesized)
gcactcaaccagaatgctgaactaaggagtcggttgaacagaatacattcagagtctattatttgtgatcaggttgtcagtgtaaatattattcctagccctgatgaggctggtgagcaa

SEQ ID NO: 75257 - DNA, 120 bp, Artificial Sequence
  ENSG00000079156_16 (sequence is synthesized)
atccatgtcagtctccccttatcacagcaagtagccaatgagagccgcctctccatgtcagagtctgtttctgagttctttgatgcccaagaggtgctcctctctgcaagttcgtcagag

SEQ ID NO: 75258 - DNA, 120 bp, Artificial Sequence
  ENSG00000079156_17 (sequence is synthesized)
aatgaggcttcagatgatgagtcttacatcagtgatgtgagtgataatatatctgaagacaacaccagtgttgcagacaatatttctcggcaaatcctgaatggggagcttacaggaggg

SEQ ID NO: 75259 - DNA, 120 bp, Artificial Sequence
  ENSG00000079156_18 (sequence is synthesized)
gccttccgaaatgggcgtcgagcatgcctgccagctccttgtcctgacaccagtaacattaacctgtggaatatcttgaggaacaacattggtaaagacctgtctaaagtctctatgcct

SEQ ID NO: 75260 - DNA, 120 bp, Artificial Sequence
  ENSG00000079156_19 (sequence is synthesized)
gtggagctaaacgagccgctcaacaccctgcagcacctctgtgaggaaatggaatacagcgagctcctggacaaggcttcggaaactgatgatccatatgagcgcatggttctcgttgcc

SEQ ID NO: 75261 - DNA, 120 bp, Artificial Sequence
  ENSG00000079156_20 (sequence is synthesized)
gcatttgcagtttcaggatactgctccacctatttcagagcaggaagtaagccattcaacccagtccttggggagacttatgaatgcattagagaagacaagggattccgctttttctca

SEQ ID NO: 75262 - DNA, 120 bp, Artificial Sequence
  ENSG00000079156_21 (sequence is synthesized)
gaacaggttagccatcatccacccatttctgcctgtcactgtgaatcaaagaattttgtgttttggcaagatatcagatggaaaaacaagttctgggggaagtcgatggaaatcctgcct

SEQ ID NO: 75263 - DNA, 120 bp, Artificial Sequence
  ENSG00000079156_22 (sequence is synthesized)
gttggaacactgaatgtcatgcttccaaagtatggagattactatgtgtggaataaagtcaccacttgcatacacaacatcctcagtgggagaagatggatagaacattatggagaagta

SEQ ID NO: 75264 - DNA, 120 bp, Artificial Sequence
  ENSG00000079156_23 (sequence is synthesized)
accatcagaaataccaaaagcagtgtttgcatttgcaaactcacatttgtcaaggtgaattattggaattctaacatgaatgaagtccagggggtggtgatagatcaggaggggaaggcg

SEQ ID NO: 75265 - DNA, 120 bp, Artificial Sequence
  ENSG00000079156_24 (sequence is synthesized)
gtgtaccggctgtttggaaagtggcatgaaggactctactgtggtgtggccccctctgcaaagtgcatttggagaccaggttccatgccaacaaactatgagctgtactatggcttcaca

SEQ ID NO: 75266 - DNA, 120 bp, Artificial Sequence
  ENSG00000079156_25 (sequence is synthesized)
aggtttgctattgagctcaatgagttagatccagtactaaaagatctccttccaccaacagacgcccggttccggccagatcaaagatttttggaagaaggaaatttagaagctgcagca

SEQ ID NO: 75267 - DNA, 120 bp, Artificial Sequence
  ENSG00000079156_26 (sequence is synthesized)
tcagagaagcaaagagtagaggaactccagagatctcggagacgatatatggaagaaaacaatcttgaacatataccaaaattttttaaaaaagttattgatgccaatcaaagagaagcc

SEQ ID NO: 75268 - DNA, 120 bp, Artificial Sequence
  ENSG00000079156_27 (sequence is synthesized)
tgggtttctaacgacacctactgggagcttcgaaaggaccctgggtttagcaaagtagacagccctgttctttggtagactgggaatgtagagctagccaacatatcacattctgaatga

SEQ ID NO: 75269 - DNA, 120 bp, Artificial Sequence
  ENSG00000079156_28 (sequence is synthesized)
ataaataactatgcacaattatgtttcttatagctatgtgtggtttctgggtcaactgaaaacctaccatttgcttttctattcatctttataatggactttcagaagtgcattagacaa

SEQ ID NO: 75270 - DNA, 86 bp, Artificial Sequence
  ENSG00000079156_29 (sequence is synthesized)
attcatctttataatggactttcagaagtgcattagacaaggcccctaaccactttgggatcctttctgttttgctgcaaccatat

SEQ ID NO: 75271 - DNA, 120 bp, Artificial Sequence
  ENSG00000079156_30 (sequence is synthesized)
taaaatccaaagtctgaccagtttgtaaagaaaaacaaatggtaactggtgcttaaagctgatcaagaaagttaacaacaacatagaaaccacacgattgttccactgtctggaagcacc

SEQ ID NO: 75272 - DNA, 120 bp, Artificial Sequence
  ENSG00000079156_31 (sequence is synthesized)
atcccctatcgcaggactcctgggccacaagcagtcggtcagtgcagacttcaagtgtgtctgtttgatgtggtgtgattgtgctggccttgtcgaaaaagatgtgatgcttctcagaac

SEQ ID NO: 75273 - DNA, 120 bp, Artificial Sequence
  ENSG00000079156_32 (sequence is synthesized)
ctgttccatctgtatgccattgttcatgccttaagaaatgcaaagatgtacaataaatcatttttaaaatgtgtgctcataggtttatgtgaagaacagattttttgaatcatggcatga

SEQ ID NO: 75274 - DNA, 120 bp, Artificial Sequence
  ENSG00000079156_33 (sequence is synthesized)
ttcactttctcaatcaggacaattatgagactaacttaaatgggttttttaaaagtgaacaacacgtgctttactctgataagtcagttaccatatggtatgtctgaagggaaagaagga

SEQ ID NO: 75275 - DNA, 120 bp, Artificial Sequence
  ENSG00000079156_34 (sequence is synthesized)
aaagacgtgctaagtagatctctgtatttacgtggctcgttaatttcctgtcctgcgtccagataataaaccatccctcttccacctaacctcacagtgtgccctattatttggaaaaat

SEQ ID NO: 75276 - DNA, 120 bp, Artificial Sequence
  ENSG00000079156_35 (sequence is synthesized)
ctgtctttgatttggacatttggtcatcagtgttaaaaccttaaaaggaaataacaaaaagcatatggaattcctgtgtgggcttagtagtactataaatgtaattgtttttgagtgaag

SEQ ID NO: 75277 - DNA, 120 bp, Artificial Sequence
  ENSG00000079156_36 (sequence is synthesized)
caccatgtaatccatgtctcaatcccatgcccgctccactgacactagtcgaattccactgagaacagaagcaagaataatagtagtttatttgcattgtttaaatgaattctatgcaaa

SEQ ID NO: 75278 - DNA, 120 bp, Artificial Sequence
  ENSG00000079156_37 (sequence is synthesized)
atcatatttcaaattttcatcaagtgattccatatggtacatggctacatattaagcatttaccttgctattggcagagatatgaaacttaagctaaggaatgtatccatcccaaagcag

SEQ ID NO: 75279 - DNA, 120 bp, Artificial Sequence
  ENSG00000079156_38 (sequence is synthesized)
gaaagcagaagtgtgttttgcatacttcaggatttgtttttcctccactaatatacagaggcttttgcagaaaacttgcatcagtattcctgtttctgcacgtaggtgactatataaatg

SEQ ID NO: 75280 - DNA, 120 bp, Artificial Sequence
  ENSG00000079156_39 (sequence is synthesized)
cctgtatgttttttttaaaatatctcctcagagattttcctagggaattataaaattacatatattttattgttagttagatgtttattcttggattcttaccattagaatttaagtgtt

SEQ ID NO: 75281 - DNA, 120 bp, Artificial Sequence
  ENSG00000079156_40 (sequence is synthesized)
atttaaaactctgatacagttacagacactttacattttattatgaggtgttgattttagtggtatttctcctcagcaaagcattcctaataatggctaatacaccatcaaatgaaaaac

SEQ ID NO: 75282 - DNA, 120 bp, Artificial Sequence
  ENSG00000079156_41 (sequence is synthesized)
tgctgatgagagtgtaagagaaagcgctaacgtttccactagatggcgcaatattttatttatccaaaactcctcccttgcatctgagtttttatgttatgtgtacagtctgcattagct

SEQ ID NO: 75283 - DNA, 120 bp, Artificial Sequence
  ENSG00000079156_42 (sequence is synthesized)
tagaatggaatttcattctcaggtaaattttcgaatccatcaccagatctaagcattctgcttcaacaataccctctctattcctctcattcccattttaaatccataggtggcttgccc

SEQ ID NO: 75284 - DNA, 120 bp, Artificial Sequence
  ENSG00000079156_43 (sequence is synthesized)
tgcggcagtaaaatcttccccttgatattgattctttttctgctcattcatcttgatgttctttttctgcatcctgagatacatgtcgttaattttaataagaatcctattgacttcctc

SEQ ID NO: 75285 - DNA, 120 bp, Artificial Sequence
  ENSG00000079156_44 (sequence is synthesized)
aaaatagcctaaacataagaaaacaatcctgcaaagtaaaggtttttacaagcagagatgaaggaaagggagcagcagctgaccatcagatgtggtatcaggtagctggaagaggatcca

SEQ ID NO: 75286 - DNA, 120 bp, Artificial Sequence
  ENSG00000079156_45 (sequence is synthesized)
ggacccatcagggaagcaacgactgtacttagcaatttgggttataattacaaaaaagaaaaaatagtagaaaggatctttaccagacagtaaggtcatggtacaaatcaggtgagtgaa

SEQ ID NO: 75287 - DNA, 120 bp, Artificial Sequence
  ENSG00000079156_46 (sequence is synthesized)
tgttggtcagaggtagcctgacactctgatgaggacttcaagatgagaatgagaaaaatgtctattaaaatcactacatttgataatatctcagatttagaatctcttttgggattcaga

SEQ ID NO: 75288 - DNA, 120 bp, Artificial Sequence
  ENSG00000079156_47 (sequence is synthesized)
tagtctgattattccaattcaagtgttcagttaagttttagttactattcctataatacccaattcactaatatcatatctcctgtggaatattcattggtgcgatggcctcatcccctt

SEQ ID NO: 75289 - DNA, 120 bp, Artificial Sequence
  ENSG00000079156_48 (sequence is synthesized)
ttttactttttattgacatggtggttataaaatgaagagacttactctattggaattttcatctacgtagtatttgggctgtcaagactaaatagcaaaagggtagaatattagatcatt

SEQ ID NO: 75290 - DNA, 120 bp, Artificial Sequence
  ENSG00000079156_49 (sequence is synthesized)
ctcttaataagacctgatttattccttaggatgttatacaaacctttttatttcaggcctactttcttgttttttcctaaaaggatctaggatagaggagaacataatatgcctgtatac

SEQ ID NO: 75291 - DNA, 120 bp, Artificial Sequence
  ENSG00000079156_50 (sequence is synthesized)
ttctcccatggtttattcataagctgcttcatctcattggagatggtcattgaggagagcagtaataagtgacgatgattctgaggacttggctagactgagcggatcaatggcacacac

SEQ ID NO: 75292 - DNA, 120 bp, Artificial Sequence
  ENSG00000079156_51 (sequence is synthesized)
cagcactggtagaggctgaccagaagctcatcgattccatatgctgtcacccagggtgcagatttactctcttttgctgttattttattgtttttcttaaattaagccattgtttttcat

SEQ ID NO: 75293 - DNA, 120 bp, Artificial Sequence
  ENSG00000079156_52 (sequence is synthesized)
ggattatttttaaaatacctaccccataattttcaggcaattgtaaaaataaaccttatttaagataacttttaatggtacatatcaactatatgtggggaaaaaatgcaattttctggg

SEQ ID NO: 75294 - DNA, 120 bp, Artificial Sequence
  ENSG00000079156_53 (sequence is synthesized)
caagagaaaccaaaggattttcaatatatgagatgccaggttgtcaattttctaaaccttttcctctagattattctggccctaggcctttcagcaaccccactaatcaattattagatc

SEQ ID NO: 75295 - DNA, 120 bp, Artificial Sequence
  ENSG00000079156_54 (sequence is synthesized)
ctgccccaaggagcagtggcttgggggctggatttagggaggaaaacctgattaaactgttttgcttagtactggttacagctgtagctggagaagagtttataatcataaagtacattt

SEQ ID NO: 75296 - DNA, 120 bp, Artificial Sequence
  ENSG00000079156_55 (sequence is synthesized)
ttgttattaccttgtggattttaattatccatcttgtctaatcttgttctctgtcatcctagataatgaggtgtttgtgggagcagagctctgcacacaccaggggatgtaataaatgtt

SEQ ID NO: 75297 - DNA, 120 bp, Artificial Sequence
  ENSG00000079156_56 (sequence is synthesized)
tgcacttggcccagtatattatgaatgtggcacagtaaataaagtttgtgtacaaaatactagtttatttctatgggagccattatgttcaggatatataaaatgtatctaattaaacaa

SEQ ID NO: 75298 - DNA, 120 bp, Artificial Sequence
  ENSG00000079156_57 (sequence is synthesized)
ttttgaatctattttgtgctctagaaatgttcttttggggaaagatggaaagaaatgtataaatggagttaagattaaagtatttggggttttttttccccaaaagcttcccagttgttt

SEQ ID NO: 75299 - DNA, 120 bp, Artificial Sequence
  ENSG00000079156_58 (sequence is synthesized)
agaaataatactatccaaagtaggattcggtcctgtaagtcctaactgaatttcttttgtaaaactgatacgtttaaactgtacattgcataatcattctgttaaactaaacctttgttt

SEQ ID NO: 75300 - DNA, 120 bp, Artificial Sequence
  ENSG00000079156_59 (sequence is synthesized)
aatacataattgtaagagcatatatttgttattgaattgaaagactttttttgtagcttttgcttttaaagaagatggcaaattatctaagaaagacttagctttattacgtccaaaatg

SEQ ID NO: 75301 - DNA, 120 bp, Artificial Sequence
  ENSG00000079156_60 (sequence is synthesized)
agatctaaagaaggaggtctttaaaaattgttgtgatggaccaacatgtccaacatcttaagcaaatgaagcttcatgattaaggcagcttacagataagtggaaaagaacttacctgtc

SEQ ID NO: 75302 - DNA, 120 bp, Artificial Sequence
  ENSG00000079156_61 (sequence is synthesized)
atatgcatccttttgttttccaaaacaacatctgatttagttcattttctccagccttgctcctaacatagtgaaaggcatagatacacatgtatgttcttttacactgtgtcattgttt

SEQ ID NO: 75303 - DNA, 120 bp, Artificial Sequence
  ENSG00000079156_62 (sequence is synthesized)
gtaaaatatacagtatttatgtacagtttcagagacattcaatattgaaaaccacttcagttagcctcctagtgaatactattaatttttcatggattacatattaccatatgaccccat

SEQ ID NO: 75304 - DNA, 120 bp, Artificial Sequence
  ENSG00000079156_63 (sequence is synthesized)
aaatacattttattagttactttggtatcttcaaattggtaagaaaaaaacataaaacaaaaatgttcttattttctgcaatttttttttctagccattccttcctcccaaatagaagtg

SEQ ID NO: 75305 - DNA, 120 bp, Artificial Sequence
  ENSG00000079156_64 (sequence is synthesized)
agggcaattgtagagagaggaatattaagttttcataaagcaaagtatcatcttatttgtgttccacctgtttcttctaacacttaattcataaagtgagcaattgaacttcttaatact

SEQ ID NO: 75306 - DNA, 120 bp, Artificial Sequence
  ENSG00000079156_65 (sequence is synthesized)
gttagagaatatgctagaactattacttcttttatcttagacacccactttcccttaattctcatctatttagttttttaataaaattgttgctagaatttttttgtcttttcaagttct

SEQ ID NO: 75307 - DNA, 88 bp, Artificial Sequence
  ENSG00000079156_66 (sequence is synthesized)
ataaaattgttgctagaatttttttgtcttttcaagttctttttttgttaattttattgatattgctgtagtgctctgtcacccaggc

SEQ ID NO: 75308 - DNA, 62 bp, Artificial Sequence
  ENSG00000079156_67 (sequence is synthesized)
gtgtgccacccacctagctaatttttgtattttagttagagacgggggttttgccatgttgg

SEQ ID NO: 75309 - DNA, 76 bp, Artificial Sequence
  ENSG00000079156_68 (sequence is synthesized)
cgcctggactcaagttctttttaaagcttgattaaggtataaccgacatataatacacttcgcatatttgaacagt

SEQ ID NO: 75310 - DNA, 120 bp, Artificial Sequence
  ENSG00000079156_69 (sequence is synthesized)
gtataaccgacatataatacacttcgcatatttgaacagtacttgatacagtttgatgtatgtatatacccttgacataatcaaaatagtgaacatatctatcatccccaaaagtttccc

SEQ ID NO: 75311 - DNA, 120 bp, Artificial Sequence
  ENSG00000079156_70 (sequence is synthesized)
ctgcccctttgtaatccttccccatcctctatcctgaggcaaccattgatctgcttttattatttttaaaagttagcgtattttcttatatgtattgcatatgggatttttctagaaggc

SEQ ID NO: 75312 - DNA, 120 bp, Artificial Sequence
  ENSG00000079156_71 (sequence is synthesized)
cacgtgcatatgcaccctccccttccattaccccagtatccgccatcaagtagtaacatgttgtaacagaaagaatcccattaagtcctagttctggtagcccggtacaaattttagatt

SEQ ID NO: 75313 - DNA, 120 bp, Artificial Sequence
  ENSG00000079156_72 (sequence is synthesized)
ttcccccaaaaatgaaaaaaaattatttaaaaaatttagatttgaaatgcttagaaaacaatcatttatttttttatgtcaaaatgtccaagtaaattaatggattaatttccatgcttc

SEQ ID NO: 75314 - DNA, 120 bp, Artificial Sequence
  ENSG00000079156_73 (sequence is synthesized)
tggtgatgtaacaccacttggtggtggcgctgaggaaaccctgggaagtgtttttctcttctgtgtaatgaaagactcactgacaaagccgtcggtatccagaatgactgctcttgaaat

SEQ ID NO: 75315 - DNA, 120 bp, Artificial Sequence
  ENSG00000079156_74 (sequence is synthesized)
gatattttgatgatgatgatcagggaagtagcctatgctgatttatttatcatccccccaccccaaccccacttttgtgtcacaaacatttgaaacacccagtgctcaagaatgctgctt

SEQ ID NO: 75316 - DNA, 120 bp, Artificial Sequence
  ENSG00000079156_75 (sequence is synthesized)
ttccaattctgctaatatcctctctccccatctggaaacaaagttactaaacctagttttgaaaaagcaatggaaatgaaagtgtccagtgaacttactggcagttgtgcaagttgaaag

SEQ ID NO: 75317 - DNA, 120 bp, Artificial Sequence
  ENSG00000079156_76 (sequence is synthesized)
cttattccttacatcctgagcctaaaagccttattccttatatccggagcctaaaagtttgctcaaaagtagaaaactttccagacaagatcacatacaaaatggttaacatgaaatgct

SEQ ID NO: 75318 - DNA, 120 bp, Artificial Sequence
  ENSG00000079156_77 (sequence is synthesized)
aatgaagaaacaaggcaagaatgaatacaagagaaatggaatctggggaaaaaagtaggttctctaactggggcagggatcttgcttcttgggggcatatggttggatcccaggtgggcc

SEQ ID NO: 75319 - DNA, 120 bp, Artificial Sequence
  ENSG00000079156_78 (sequence is synthesized)
acgaaaatcatcttggatatttgtttacaggctgattcctgagtttccctccaaagattctgagtccacagatctagggtgtggaccgagaatcctcattgtaacaagcaccctctgccc

SEQ ID NO: 75320 - DNA, 120 bp, Artificial Sequence
  ENSG00000079156_79 (sequence is synthesized)
ccgggacattttaaggtagatggagaactaaggtgagagtgtgccagctaaatactctttcctttgtccctgtgcctcagtcttttttgtttgttttttttcatgtgacactcagtagga

SEQ ID NO: 75321 - DNA, 65 bp, Artificial Sequence
  ENSG00000079156_80 (sequence is synthesized)
tcttttttgtttgttttttttcatgtgacactcagtaggaaagtctagttcaagaaccggaaact

SEQ ID NO: 75322 - DNA, 120 bp, Artificial Sequence
  ENSG00000079156_81 (sequence is synthesized)
atgattgcaccactgccctgagcctggacgacagagcaagttcctgtcttaaaaaaaaaagtaataaaaaagacatttaaaaaaaaattagagctcagtgacctgtgactcactttgcca

SEQ ID NO: 75323 - DNA, 120 bp, Artificial Sequence
  ENSG00000079156_82 (sequence is synthesized)
ctttgtcattttcttgacttctgtcccaacgccagccctgtaatatggagataaagagtggggaggacagaactctgaaacctaaaaggcaagatttttgctaaaccggagaacgtaaaa

SEQ ID NO: 75324 - DNA, 120 bp, Artificial Sequence
  ENSG00000079156_83 (sequence is synthesized)
atacattcctagaggcaatctaaccagccagataaccagaagtttactcttcaaagccaagaatcagtacccccacctcaccttccattctctcttaggctttgtctatgtctctaaggg

SEQ ID NO: 75325 - DNA, 120 bp, Artificial Sequence
  ENSG00000079156_84 (sequence is synthesized)
gagtttttcagttgactgatgaggtcctgactggtagggaaagcctgcagggaaatcctgtggcaaagcacactcttgatcacctacttaacaagaaggtctagcaggacattcttgatc

SEQ ID NO: 75326 - DNA, 120 bp, Artificial Sequence
  ENSG00000079156_85 (sequence is synthesized)
caggtcagcttcttccctgaaaataatacatatttttaatttctgtttgaaaaaactccactgtgaaattactctgcttatattagaaggtatgaagacagtagttatgtactgttcgtt

SEQ ID NO: 75327 - DNA, 120 bp, Artificial Sequence
  ENSG00000079156_86 (sequence is synthesized)
tgcatacggtcattttgagatagaaaaattaaatttttttaggaaaagaatttcaagcaactttctacgaaaatacagcttgtggttaaatttcctaatgaaagaggaattattcactga

SEQ ID NO: 75328 - DNA, 120 bp, Artificial Sequence
  ENSG00000079156_87 (sequence is synthesized)
aaaatttgtctaatctgtgccacctcaaaataagaattgtgcctcttcaatgaatgttgtatatgagaatgttacatttgtaacagcacaggaaactcaataaattataaatgaattaca

SEQ ID NO: 75329 - DNA, 120 bp, Artificial Sequence
  ENSG00000079156_88 (sequence is synthesized)
tctacatgccaaattgcaacacgaagacttaatgaacaggcattccccctcccacgccacccccacccctgctaattgttcttttggcagctgattgttcaatacattctattttgtatg

SEQ ID NO: 75330 - DNA, 120 bp, Artificial Sequence
  ENSG00000079156_89 (sequence is synthesized)
atctcttgaggtaaatggttgaaaaaatctgttaggtaaatagttaagagaaaacgtttttcctctttctcaaaccaacagcttgagtccttcttattaaatgtatttaattttttaaaa

SEQ ID NO: 75331 - DNA, 120 bp, Artificial Sequence
  ENSG00000079156_90 (sequence is synthesized)
tttccacttgctgctcaggaggtattgagatcaatgaacactaacctgaggagcatatttttaccaaattaaagagctacagtgaaatatgtgttccaggttcctggttttaagctaaat

SEQ ID NO: 75332 - DNA, 120 bp, Artificial Sequence
  ENSG00000079156_91 (sequence is synthesized)
agccgccgcagagtccgcggcgccaccgctcgccctccagtctctgatcttcactggcatactgggttcctcggaaaagtggaagacatgaagtatggatgtatataatacccgaggaag

SEQ ID NO: 75333 - DNA, 120 bp, Artificial Sequence
  ENSG00000079156_92 (sequence is synthesized)
tctcaaaggttctgccacttgctgggaaaacagcaacagaaggatattaaggagccacccctataatttacccagatagccccagcaaggtcaaagacatatcatgtcccaaggagaaaa

SEQ ID NO: 75334 - DNA, 120 bp, Artificial Sequence
  ENSG00000079215_0 (sequence is synthesized)
agagcacatgcacactgtcagggctagcctgcctgcttacgcgcgctgcggattgttgctccgttgtacctgctggggaattcacctcgttactgcttgatatcttccaccccttacaaa

SEQ ID NO: 75335 - DNA, 120 bp, Artificial Sequence
  ENSG00000079215_1 (sequence is synthesized)
atcagaaaagttgtgttttctaataccaaagaggaggtttggctttctgtgggtgattcccagacactgaagtgcaaagaagagaccctcctagaaaagtaaaatatgactaaaagcaat

SEQ ID NO: 75336 - DNA, 120 bp, Artificial Sequence
  ENSG00000079215_2 (sequence is synthesized)
ggagaagagcccaagatggggggcaggatggagagattccagcagggagtccgtaaacgcacacttttggccaagaagaaagtgcagaacattacaaaggaggatgttaaaagttacctg

SEQ ID NO: 75337 - DNA, 120 bp, Artificial Sequence
  ENSG00000079215_3 (sequence is synthesized)
tttcggaatgcttttgtgctgctcacagtcaccgctgtcattgtgggtacaatccttggatttaccctccgaccatacagaatgagctaccgggaagtcaagtacttctcctttcctggg

SEQ ID NO: 75338 - DNA, 120 bp, Artificial Sequence
  ENSG00000079215_4 (sequence is synthesized)
gaacttctgatgaggatgttacagatgctggtcttaccacttatcatctccagtcttgtcacaggaatggcggcgctagatagtaaggcatcagggaagatgggaatgcgagctgtagtc

SEQ ID NO: 75339 - DNA, 120 bp, Artificial Sequence
  ENSG00000079215_5 (sequence is synthesized)
tattatatgactaccaccatcattgctgtggtgattggcataatcattgtcatcatcatccatcctgggaagggcacaaaggaaaacatgcacagagaaggcaaaattgtacgagtgaca

SEQ ID NO: 75340 - DNA, 120 bp, Artificial Sequence
  ENSG00000079215_6 (sequence is synthesized)
gctgcagatgccttcctggacttgatcaggaacatgttccctccaaatctggtagaagcctgctttaaacagtttaaaaccaactatgagaagagaagctttaaagtgcccatccaggcc

SEQ ID NO: 75341 - DNA, 120 bp, Artificial Sequence
  ENSG00000079215_7 (sequence is synthesized)
aacgaaacgcttgtgggtgctgtgataaacaatgtgtctgaggccatggagactcttacccgaatcacagaggagctggtcccagttccaggatctgtgaatggagtcaatgccctgggt

SEQ ID NO: 75342 - DNA, 120 bp, Artificial Sequence
  ENSG00000079215_8 (sequence is synthesized)
ctagttgtcttctccatgtgcttcggttttgtgattggaaacatgaaggaacaggggcaggccctgagagagttctttgattctcttaacgaagccatcatgagactggtagcagtaata

SEQ ID NO: 75343 - DNA, 120 bp, Artificial Sequence
  ENSG00000079215_9 (sequence is synthesized)
atgtggtatgcccccgtgggtattctcttcctgattgctgggaagattgtggagatggaagacatgggtgtgattggggggcagcttgccatgtacaccgtgactgtcattgttggctta

SEQ ID NO: 75344 - DNA, 120 bp, Artificial Sequence
  ENSG00000079215_10 (sequence is synthesized)
ctcattcacgcagtcatcgtcttgccactcctctacttcttggtaacacggaaaaacccttgggtttttattggagggttgctgcaagcactcatcaccgctctggggacctcttcaagt

SEQ ID NO: 75345 - DNA, 120 bp, Artificial Sequence
  ENSG00000079215_11 (sequence is synthesized)
tctgccaccctacccatcaccttcaagtgcctggaagagaacaatggcgtggacaagcgcgtcaccagattcgtgctccccgtaggagccaccattaacatggatgggactgccctctat

SEQ ID NO: 75346 - DNA, 120 bp, Artificial Sequence
  ENSG00000079215_12 (sequence is synthesized)
gaggctttggctgccattttcattgctcaagttaacaactttgaactgaacttcggacaaattattacaatcagcatcacagccacagctgccagtattggggcagctggaattcctcag

SEQ ID NO: 75347 - DNA, 120 bp, Artificial Sequence
  ENSG00000079215_13 (sequence is synthesized)
gcgggcctggtcactatggtcattgtgctgacatctgtcggcctgcccactgacgacatcacgctcatcatcgcggtggactggttcctggatcgcctccggaccaccaccaacgtactg

SEQ ID NO: 75348 - DNA, 120 bp, Artificial Sequence
  ENSG00000079215_14 (sequence is synthesized)
ggagactccctgggagctgggattgtggagcacttgtcacgacatgaactgaagaacagagatgttgaaatgggtaactcagtgattgaagagaatgaaatgaagaaaccatatcaactg

SEQ ID NO: 75349 - DNA, 120 bp, Artificial Sequence
  ENSG00000079215_15 (sequence is synthesized)
attgcacaggacaatgaaactgagaaacccatcgacagtgaaaccaagatgtagactaacataaagaaacactttcttgagcaccaggtgttaaaaaccattataaaatctttccatctc

SEQ ID NO: 75350 - DNA, 120 bp, Artificial Sequence
  ENSG00000079215_16 (sequence is synthesized)
acacaagggaggattttgggtggccaaagtgtacaattttcatcccacaattgaaatttttaaatcatttcatgttagtcttaccgaataaggtaccaagatcacaaatagtgttgatca

SEQ ID NO: 75351 - DNA, 120 bp, Artificial Sequence
  ENSG00000079215_17 (sequence is synthesized)
gatcttacaagtttatgtggcacacaatcctataaatgtgatttttttatataagttaaagagacaaatagtaggctaaaaacattttaaaatcaacttttgaaatttaaaaatctttca

SEQ ID NO: 75352 - DNA, 120 bp, Artificial Sequence
  ENSG00000079215_18 (sequence is synthesized)
gaatacaattcagttttagtttcaaaatgttaacaacttgaattacaaccggttatcagttggacagtaagattttatccctttctcttctgactggtatacctatttcattagtagcta

SEQ ID NO: 75353 - DNA, 120 bp, Artificial Sequence
  ENSG00000079215_19 (sequence is synthesized)
ggtgcacatatacatctagcacagctgtgaggacagacagaaggcaaagtttccatgtggccttgagcaagtcccatctcacctctaggcctcagtgtcctcatctataaaatgagggac

SEQ ID NO: 75354 - DNA, 120 bp, Artificial Sequence
  ENSG00000079215_20 (sequence is synthesized)
ttccctagaagtcttcatggtctcttccagcccagacatcctgtgatgtcatgaaagcacctgccctctgtttcccctcagaacaccctgtaccatccatggagcacgaggccttcagaa

SEQ ID NO: 75355 - DNA, 120 bp, Artificial Sequence
  ENSG00000079215_21 (sequence is synthesized)
aagacacttcaatgggagtgaacatttctaactaaggacaggatggctgtgtgtggtggtcaccaggtcctgtgagcaaagtgcaggttatgcaagtcgccaggcaggaggccattccag

SEQ ID NO: 75356 - DNA, 120 bp, Artificial Sequence
  ENSG00000079215_22 (sequence is synthesized)
gagtgggattattcatcaaactctttgcccagttcatcccaatgggggaagtattcccttctttcctactctgggaagaatgtctcctgccactcctcaactgatgatagacttcgaaaa

SEQ ID NO: 75357 - DNA, 120 bp, Artificial Sequence
  ENSG00000079215_23 (sequence is synthesized)
cagatgagaagactagcagctagcaagggtgcttgtggtcacactgtggaacactaaagagctaggaaagagttgagcacaggcaacattacaaacaaaggatttgaaaacaccaagagt

SEQ ID NO: 75358 - DNA, 120 bp, Artificial Sequence
  ENSG00000079215_24 (sequence is synthesized)
acaggtcttctttaaggaagaataaaaaagaagaggttcatttttctggctttttttttcacctgaaacactttttctcgagtccaaaatcattccccccgtgaagtctgcttaccaaaa

SEQ ID NO: 75359 - DNA, 120 bp, Artificial Sequence
  ENSG00000079215_25 (sequence is synthesized)
cataagacgacttatatatttgaaagaagtcaaatgaatgagctctctaatagaagtccatgagttgagtgggtatttcttatttgaaagtgtttttctttaatcaaaagtccttagaat

SEQ ID NO: 75360 - DNA, 120 bp, Artificial Sequence
  ENSG00000079215_26 (sequence is synthesized)
gagggaaacaaaatatttatttgttttggaatcccacttatcaaatcattcaaaactttcagctggagtggggtttgcttttgttttgtttgtgtccataagagaaatggtagaagatga

SEQ ID NO: 75361 - DNA, 120 bp, Artificial Sequence
  ENSG00000079215_27 (sequence is synthesized)
atcagtatgaagacactgtcaatgaggttatgagaaaaaaacagcaggggcattagtttcaggcaaggcagctcccaggtttagagattaatttttaccccctaaggaatatccagtcaa

SEQ ID NO: 75362 - DNA, 120 bp, Artificial Sequence
  ENSG00000079215_28 (sequence is synthesized)
agacgctgagtgggagctgtcaggcagtagcagctgtgtttgagtttctggctgaaaatggtgaagaatggacttaattatgctaacaaactgaaaaatctagacatagatcctctgata

SEQ ID NO: 75363 - DNA, 120 bp, Artificial Sequence
  ENSG00000079215_29 (sequence is synthesized)
tacaattagagatatttttatatagaccccaagcattctgtgcataaaagttaacattaggctgtggtgcagtaaccatttaatgtcgaggctctatttcggaaatacactacaaatgtt

SEQ ID NO: 75364 - DNA, 120 bp, Artificial Sequence
  ENSG00000079215_30 (sequence is synthesized)
aaagtacgtggctgtcctcttaagacactagtagagcaaagacttaatcatatcaacttaattctgttacacaatatgtgttttttaatatactaaccatttcttatggaaaggtcctgt

SEQ ID NO: 75365 - DNA, 120 bp, Artificial Sequence
  ENSG00000079215_31 (sequence is synthesized)
ggggagcccatcctctcgccaagccatcacaggctctgcatacacatgcactcagtgtggactgggaagcattactttgtagatgtattttcaataaagaaaaaaatagttttacattaa

SEQ ID NO: 75366 - DNA, 120 bp, Artificial Sequence
  ENSG00000079215_32 (sequence is synthesized)
acactgcaaccttgaggtctggtattgtggctctccagtccttgattcctgctgagattatgcaatttgccaagagcttgcctggtgtggagcagcactgatttctcacccctggaggct

SEQ ID NO: 75367 - DNA, 120 bp, Artificial Sequence
  ENSG00000079215_33 (sequence is synthesized)
gaatgcttttgtgctgctcacagtcaccgctgtcattgtgggtgagtcatttgattaaaaacaaaaaaacctgtatcttgtttctctggggcatctggctgcccggggaatattatcaga

SEQ ID NO: 75368 - DNA, 120 bp, Artificial Sequence
  ENSG00000079215_34 (sequence is synthesized)
atcaaaatggtagcctaggctttcctctgaacttgatgatttttctccataaaaatgactgttttggcttgtttggagcaatatatagtaaacacatcattaggcatcattaggcattat

SEQ ID NO: 75369 - DNA, 120 bp, Artificial Sequence
  ENSG00000079215_35 (sequence is synthesized)
gcaaatcaattgtgtgaggaagaaaaataaataaaatattttcccatttcatgtaaggataaggaagtgatcatttaatcattaggcatgacaaagcaagcatgctagatttggccaaaa

SEQ ID NO: 75370 - DNA, 120 bp, Artificial Sequence
  ENSG00000079215_36 (sequence is synthesized)
tgtaattatatacaatgtcagttgcacttaaaactaatttatacaattagtacacctaaaatgacatgttggttccaaatagtaattatattctaactggtgctgacttgaagctgagta

SEQ ID NO: 75371 - DNA, 120 bp, Artificial Sequence
  ENSG00000079215_37 (sequence is synthesized)
tcaacgcttaggcacagagaccgaatattttatgtgtttgcactctctcacccagcaactgggaaaggtagattggggaaaatgttaacacagatctctttcattcattgctttgcagag

SEQ ID NO: 75372 - DNA, 120 bp, Artificial Sequence
  ENSG00000079215_38 (sequence is synthesized)
cctgccataaccagctatacctttttttgaatcatttccatctcttactaatttagcagggttgacagcaatctgtactaataaaatattattgttttgttttgtttattgatcttaaaa

SEQ ID NO: 75373 - DNA, 120 bp, Artificial Sequence
  ENSG00000079215_39 (sequence is synthesized)
accattccggctccaggtgctcattcaccacactgttctgggtgctataacacccattctggctttactccagcaatttgctgagggtctgcctgaggtagcaacggaagagatggaaaa

SEQ ID NO: 75374 - DNA, 120 bp, Artificial Sequence
  ENSG00000079215_40 (sequence is synthesized)
gagaggtcgaactgaaagcccactggtgagacttggcaattgattcaatgagagaaggtggactgcagaccaatggcccgctttctggtttaggtggcagagtggctgatgatgccacat

SEQ ID NO: 75375 - DNA, 120 bp, Artificial Sequence
  ENSG00000079215_41 (sequence is synthesized)
aaaacaaagccagcaagcctgcttctggtgtgccaagattaatcaatattccagaaacctcggggtttccccctcctccctgtgcggtttccattccccactcctcctttcccgggcaca

SEQ ID NO: 75376 - DNA, 120 bp, Artificial Sequence
  ENSG00000079215_42 (sequence is synthesized)
ggtgtctgtttatgccgggtccgctgttaattcggagttgagtcattcggggtggattgggggcagattgtggcgcgagatctagaaaaggatcaaggttgagcggatctgcttaaaagt

SEQ ID NO: 75377 - DNA, 120 bp, Artificial Sequence
  ENSG00000079215_43 (sequence is synthesized)
atgcttgttctcagaaccaccaggacttgagcgggagccttcttggaagcctcatcaagagcacatctctgacttggagaaggaatttccatagacactgcccgagcaggatgatttctg

SEQ ID NO: 75378 - DNA, 120 bp, Artificial Sequence
  ENSG00000079215_44 (sequence is synthesized)
actgacactgctgatgcctcaccattctagcctcggccttttcccttcaccttgtgagatttggggccaggttctcacaacatgaatggcggcgctagatagtaaggcatcagggaagat

SEQ ID NO: 75379 - DNA, 120 bp, Artificial Sequence
  ENSG00000079215_45 (sequence is synthesized)
tggggcgggatgccaccgaggtgcatatacaatggaagaagcttgctgcaaatcaagatttagaaggtattcctacaacctccaaactgaacgaagacagttctgtctttggatttcaag

SEQ ID NO: 75380 - DNA, 120 bp, Artificial Sequence
  ENSG00000079215_46 (sequence is synthesized)
tgaataaggatcagtgaatcgggctatcctactgcataaatgagtctactctgtaagtgagtctattctcagaacagtttccgtaactctagggccctctccttcatgcttaaaagcact

SEQ ID NO: 75381 - DNA, 120 bp, Artificial Sequence
  ENSG00000079215_47 (sequence is synthesized)
aatctttcagaaatgctgtagtggtgttctgtgcctggacgtaactgaccaagccagttaggtcagccaagcaggttaatcaatgtggtttgctatcagctgctggactgaactgacctg

SEQ ID NO: 75382 - DNA, 120 bp, Artificial Sequence
  ENSG00000079246_0 (sequence is synthesized)
gctatctgccgcttgtccaccggaagcgagttgcgacacggcaggttcccgcccggaagaagcgaccaaagcgcctgaggaccggcaacatggtgcggtcggggaataaggcagctgttg

SEQ ID NO: 75383 - DNA, 120 bp, Artificial Sequence
  ENSG00000079246_1 (sequence is synthesized)
tgctgtgtatggacgtgggctttaccatgagtaactccattcctggtatagaatccccatttgaacaagcaaagaaggtgataaccatgtttgtacagcgacaggtgtttgctgagaaca

SEQ ID NO: 75384 - DNA, 120 bp, Artificial Sequence
  ENSG00000079246_2 (sequence is synthesized)
aggatgagattgctttagtcctgtttggtacagatggcactgacaatcccctttctggtggggatcagtatcagaacatcacagtgcacagacatctgatgctaccagattttgatttgc

SEQ ID NO: 75385 - DNA, 120 bp, Artificial Sequence
  ENSG00000079246_3 (sequence is synthesized)
tggaggacattgaaagcaaaatccaaccaggttctcaacaggctgacttcctggatgcactaatcgtgagcatggatgtgattcaacatgaaacaataggaaagaagtttgagaagaggc

SEQ ID NO: 75386 - DNA, 120 bp, Artificial Sequence
  ENSG00000079246_4 (sequence is synthesized)
atattgaaatattcactgacctcagcagccgattcagcaaaagtcagctggatattataattcatagcttgaagaaatgtgacatctccctgcaattcttcttgcctttctcacttggca

SEQ ID NO: 75387 - DNA, 120 bp, Artificial Sequence
  ENSG00000079246_5 (sequence is synthesized)
aggaagatggaagtggggacagaggagatggcccctttcgcttaggtggccatgggccttcctttccactaaaaggaattaccgaacagcaaaaagaaggtcttgagatagtgaaaatgg

SEQ ID NO: 75388 - DNA, 120 bp, Artificial Sequence
  ENSG00000079246_6 (sequence is synthesized)
tgatgatatctttagaaggtgaagatgggttggatgaaatttattcattcagtgagagtctgagaaaactgtgcgtcttcaagaaaattgagaggcattccattcactggccctgccgac

SEQ ID NO: 75389 - DNA, 120 bp, Artificial Sequence
  ENSG00000079246_7 (sequence is synthesized)
tgaccattggctccaatttgtctataaggattgcagcctataaatcgattctacaggagagagttaaaaagacttggacagttgtggatgcaaaaaccctaaaaaaagaagatatacaaa

SEQ ID NO: 75390 - DNA, 120 bp, Artificial Sequence
  ENSG00000079246_8 (sequence is synthesized)
aagaaacagtttattgcttaaatgatgatgatgaaactgaagttttaaaagaggatattattcaagggttccgctatggaagtgatatagttcctttctctaaagtggatgaggaacaaa

SEQ ID NO: 75391 - DNA, 120 bp, Artificial Sequence
  ENSG00000079246_9 (sequence is synthesized)
tgaaatataaatcggaggggaagtgcttctctgttttgggattttgtaaatcttctcaggttcagagaagattcttcatgggaaatcaagttctaaaggtctttgcagcaagagatgatg

SEQ ID NO: 75392 - DNA, 120 bp, Artificial Sequence
  ENSG00000079246_10 (sequence is synthesized)
aggcagctgcagttgcactttcctccctgattcatgctttggatgacttagacatggtggccatagttcgatatgcttatgacaaaagagctaatcctcaagtcggcgtggcttttcctc

SEQ ID NO: 75393 - DNA, 120 bp, Artificial Sequence
  ENSG00000079246_11 (sequence is synthesized)
atatcaagcataactatgagtgtttagtgtatgtgcagctgcctttcatggaagacttgcggcaatacatgttttcatccttgaaaaacagtaagaaatatgctcccaccgaggcacagt

SEQ ID NO: 75394 - DNA, 120 bp, Artificial Sequence
  ENSG00000079246_12 (sequence is synthesized)
tgaatgctgttgatgctttgattgactccatgagcttggcaaagaaagatgagaagacagacacccttgaagacttgtttccaaccaccaaaatcccaaatcctcgatttcagagattat

SEQ ID NO: 75395 - DNA, 120 bp, Artificial Sequence
  ENSG00000079246_13 (sequence is synthesized)
ttcagtgtctgctgcacagagctttacatccccgggagcctctacccccaattcagcagcatatttggaatatgctgaatcctcccgctgaggtgacaacaaaaagtcagattcctctct

SEQ ID NO: 75396 - DNA, 120 bp, Artificial Sequence
  ENSG00000079246_14 (sequence is synthesized)
tcctctgattgaagccaagaaaaaggatcaagtgactgctcaggaaattttccaagacaaccatgaagatggacctacagctaaaaaattaaagactgagcaagggggagcccacttcag

SEQ ID NO: 75397 - DNA, 120 bp, Artificial Sequence
  ENSG00000079246_15 (sequence is synthesized)
cgtctccagtctggctgaaggcagtgtcacctctgttggaagtgtgaatcctgctgaaaacttccgtgttctagtgaaacagaagaaggccagctttgaggaagcgagtaaccagctcat

SEQ ID NO: 75398 - DNA, 120 bp, Artificial Sequence
  ENSG00000079246_16 (sequence is synthesized)
aaatcacatcgaacagtttttggatactaatgaaacaccgtattttatgaagagcatagactgcatccgagccttccgggaagaagccattaagttttcagaagagcagcgctttaacaa

SEQ ID NO: 75399 - DNA, 120 bp, Artificial Sequence
  ENSG00000079246_17 (sequence is synthesized)
cttcctgaaagcccttcaagagaaagtggaaattaaacaattaaatcatttctgggaaattgttgtccaggatggaattactctgatcaccaaagaggaagcctctggaagttctgtcac

SEQ ID NO: 75400 - DNA, 120 bp, Artificial Sequence
  ENSG00000079246_18 (sequence is synthesized)
agctgaggaagccaaaaagtttctggcccccaaagacaaaccaagtggagacacagcagctgtatttgaagaaggtggtgatgtggacgatttattggacatgatataggtcgtggatgt

SEQ ID NO: 75401 - DNA, 120 bp, Artificial Sequence
  ENSG00000079246_19 (sequence is synthesized)
atggggaatctaagagagctgccatcgctgtgatgctgggagttctaacaaaacaagttggatgcggccattcaaggggagccaaaatctcaagaaattcccagcaggttacctggaggc

SEQ ID NO: 75402 - DNA, 120 bp, Artificial Sequence
  ENSG00000079246_20 (sequence is synthesized)
ggatcatctaattctctgtggaatgaatacacacatatatattacaagggataatttagaccccatacaagtttataaagagtcattgttattttctggttggtgtattattttttctgt

SEQ ID NO: 75403 - DNA, 120 bp, Artificial Sequence
  ENSG00000079246_21 (sequence is synthesized)
ggtcttactgatctttgtatattacatacatgctttgaagtttctggaaagtagatcttttcttgacctagtatatcagtgacagttgcagcccttgtgatgtgattagtgtctcatgtg

SEQ ID NO: 75404 - DNA, 120 bp, Artificial Sequence
  ENSG00000079246_22 (sequence is synthesized)
gaaccatggcatggttattgatgagtttcttaaccctttccagagtcctcctttgcctgatcctccaacagctgtcacaacttgtgttgagcaagcagtagcatttgcttcctcccaaca

SEQ ID NO: 75405 - DNA, 120 bp, Artificial Sequence
  ENSG00000079246_23 (sequence is synthesized)
agcagctgggttaggaaaaccatgggtaaggacggactcacttctctttttagttgaggccttctagttaccacattactctgcctctgtatataggtggttttctttaagtggggtggg

SEQ ID NO: 75406 - DNA, 120 bp, Artificial Sequence
  ENSG00000079246_24 (sequence is synthesized)
aaggggagcacaatttcccttcatactccttttaagcagtgagttatggtggtggtctcatgaagaaaagaccttttggcccaatctctgccatatcagtgaacctttagaaactcaaaa

SEQ ID NO: 75407 - DNA, 120 bp, Artificial Sequence
  ENSG00000079246_25 (sequence is synthesized)
actgagaaatttactacagtagttagaattatatcacttcactgttctctacttgcaagcctcaaagagagaaagtttcgttatattaaaacacttaggtaacttttcggtctttcccat

SEQ ID NO: 75408 - DNA, 120 bp, Artificial Sequence
  ENSG00000079246_26 (sequence is synthesized)
ttctacctaagtcagctttcatctttgtggatggtgtctcctttactaaataagaaaataacaaagcccttattctctttttttcttgtcctcattcttgccttgagttccagttcctct

SEQ ID NO: 75409 - DNA, 120 bp, Artificial Sequence
  ENSG00000079246_27 (sequence is synthesized)
ttggtgtacagacttcttggtacccagtcacctctgtcttcagcaccctcataagtcgtcactaatacacagttttgtacatgtaacattaaaggcataaatgactcatctctctgtgaa

SEQ ID NO: 75410 - DNA, 120 bp, Artificial Sequence
  ENSG00000079246_28 (sequence is synthesized)
ctgtggtcccagctacctgggaggctgagctctggatcgtacaagaagggagacaaggaccactgacaagatatgcgtttcaggcggctcaaacaccacacgctcccgactacggcggaa

SEQ ID NO: 75411 - DNA, 120 bp, Artificial Sequence
  ENSG00000079246_29 (sequence is synthesized)
caggcggctcaaacaccacacgctcccgactacggcggaatggagagaatgtgcgcatgctcggcgggaatctgcgcatgctcggcgggaatctgcgcatgctcggagagaatctgcgca

SEQ ID NO: 75412 - DNA, 120 bp, Artificial Sequence
  ENSG00000079246_30 (sequence is synthesized)
tgctcggccggaatctgcgcgagctcggcgggaatctgcgcaagctcggcgggaatctgcgcatgctcagagttccggggcacggtttccccgcccctttcaggcctagcaggaaacgaa

SEQ ID NO: 75413 - DNA, 120 bp, Artificial Sequence
  ENSG00000079246_31 (sequence is synthesized)
ggacattgaaagcaaaatccaaccaggttctcaacaggctgactgtatcctttttctgccagagaagactttaagaaatttcctttattctgggaatcgtacagcagtttgatgagacac

SEQ ID NO: 75414 - DNA, 120 bp, Artificial Sequence
  ENSG00000079246_32 (sequence is synthesized)
ccccagagtttcagctatgagtatatgggtatattttgctctgaggagggggaggtaatgtgttaatagggtttaatgtgaaattaatcagtttaaaacagtgcctgggctcccagccct

SEQ ID NO: 75415 - DNA, 120 bp, Artificial Sequence
  ENSG00000079246_33 (sequence is synthesized)
tttttcaccattgatcacaaggggcagtcatctgattccagggaatagaagatggaggcttgctctggcgtggttccgctatggaagtgatatagttcctttctctaaagtggatgagga

SEQ ID NO: 75416 - DNA, 120 bp, Artificial Sequence
  ENSG00000079246_34 (sequence is synthesized)
cattgactatatgcagagggttttagtggtgctcgttagaaatgtttggaggcggatagaaaatatttttagaagagcatcctcccaatgttctctcctttttttctggatggaagatgt

SEQ ID NO: 75417 - DNA, 120 bp, Artificial Sequence
  ENSG00000079246_35 (sequence is synthesized)
ttttgtgccagaaatcagattgatacccaaagtgagatttccagtttactccacaggtcccctaattttaagggatcatcactcttgttctttttctaatcagttagtagtgctattcct

SEQ ID NO: 75418 - DNA, 120 bp, Artificial Sequence
  ENSG00000079246_36 (sequence is synthesized)
gatcactgggaagtgctgttgtgttaggagtgacttgcaaatgctacattatggttcgcttcatatttaagaatggactgtggccaccaagaatgggttctagatactattaaatgacat

SEQ ID NO: 75419 - DNA, 120 bp, Artificial Sequence
  ENSG00000079246_37 (sequence is synthesized)
aatttttggttaaatgaatgcaatgtgttagattaccttttgtttatatttcttggttgtttttggcagaatatatagtttgatatatagaatgtatgaatatatgttagtgaactttgg

SEQ ID NO: 75420 - DNA, 120 bp, Artificial Sequence
  ENSG00000079246_38 (sequence is synthesized)
aagaagggcactcaggcaagtactttaagtcatcacatagttcagtgtccacaatttccagcacggtggacttcattggaaagagttgcgtgttcacatgaagagactgtttggtgatat

SEQ ID NO: 75421 - DNA, 120 bp, Artificial Sequence
  ENSG00000079246_39 (sequence is synthesized)
atctgccgcttgtccaccggaagcgagttgcgacacggcaggttcccgcccggaagaagcgaccaaagcgcctgaggaccggcaacatggtgcggtcggggaataagctgctgaaaactt

SEQ ID NO: 75422 - DNA, 120 bp, Artificial Sequence
  ENSG00000079246_40 (sequence is synthesized)
cagatgtccaccatgcttatacaggacactacacactgtctcgacaagccatgttctttcctccctcttcgtgagcactttctctggtgatgagttagtatggactacttgaacctcaaa

SEQ ID NO: 75423 - DNA, 120 bp, Artificial Sequence
  ENSG00000079246_41 (sequence is synthesized)
actgggcctctcacccaaagccaaatgaagtagcgtatgccaggatgatgtttcttttgggccgttggcagtgagactgctaagcaggctgccttaggttttgctgtggcaatgctagca

SEQ ID NO: 75424 - DNA, 120 bp, Artificial Sequence
  ENSG00000079246_42 (sequence is synthesized)
ttattctttgtttaaagttatttctttgagttatagaaatataacagtttgaaaggataatgagaccctaggtcctttagctcatttgttgggtcttaggcaggttgcttctcaggagta

SEQ ID NO: 75425 - DNA, 120 bp, Artificial Sequence
  ENSG00000079246_43 (sequence is synthesized)
cacttgggtgttccatctctgtgagttttaaatgtcttaagtgatagtactcaatacttggctttattttaaagtttgaaactcactagctaggagcatgtttaatatggttgaactaag

SEQ ID NO: 75426 - DNA, 120 bp, Artificial Sequence
  ENSG00000079257_0 (sequence is synthesized)
aaacagcagcttccggagtcggaaggagctgaggaagaagactgactgaaggagcttgcgacttttccgcctcggcaaccggacccagcagcaagcaggacgggcggcgctctgctactg

SEQ ID NO: 75427 - DNA, 120 bp, Artificial Sequence
  ENSG00000079257_1 (sequence is synthesized)
gtcccgttaagccagagtagcccaagccctgaagtcactgctcatccggaatggaaatcccgccgaccaactacccagcctccagggcggccttggtggcacagaactacatcaactacc

SEQ ID NO: 75428 - DNA, 120 bp, Artificial Sequence
  ENSG00000079257_2 (sequence is synthesized)
agcaggggaccccgcacagggtgtttgaggtgcagaaggtcaaacaagccagcatggaggatattccaggaagaggacataagtatcaccttaaatttgctgttgaagaaattatacaaa

SEQ ID NO: 75429 - DNA, 120 bp, Artificial Sequence
  ENSG00000079257_3 (sequence is synthesized)
aacaagttaaggtgaactgcacagctgaagtactttacccttcaacgggacaagaaactgcaccagaagtcaacttcacatttgaaggagaaactggaaagaatccagatgaagaagaca

SEQ ID NO: 75430 - DNA, 120 bp, Artificial Sequence
  ENSG00000079257_4 (sequence is synthesized)
gggttgcctgtggttatataatatggcaaaattctactgaagacacatggtataaaatggtaaaaattcaaactgtcaagcaagtgcaaagaaatgatgactttattgaattagactaca

SEQ ID NO: 75431 - DNA, 120 bp, Artificial Sequence
  ENSG00000079257_5 (sequence is synthesized)
ccattctacttcataatatagcatctcaggagattattccctggcaaatgcaagttctctggcatccacaatacggcactaaagtaaaacataatagccgtctgccaaaggaagtacaac

SEQ ID NO: 75432 - DNA, 120 bp, Artificial Sequence
  ENSG00000079257_6 (sequence is synthesized)
tggaataaacaaaaaccctaacactggaagtgtaaacatgtctattgatgtgtatgccaatttcactggcatctagcttatgaggccaaataatcccaaagtgtcactttatataaatgt

SEQ ID NO: 75433 - DNA, 120 bp, Artificial Sequence
  ENSG00000079257_7 (sequence is synthesized)
cttgattacagtatagaactttatagagtccataatacaaagtatcactacataaaaatgtctttaaaacagtaatagtggtatgtatatccaaaataaaaagcttcaatttcagcctca

SEQ ID NO: 75434 - DNA, 120 bp, Artificial Sequence
  ENSG00000079257_8 (sequence is synthesized)
ccatctttacctttcacctaaacacaagcacagcaattcagactttctctgtccctgcattccaagaaggaaagaaatcttaactgaaatggaaacagttgccaggtgcagtggctcatg

SEQ ID NO: 75435 - DNA, 120 bp, Artificial Sequence
  ENSG00000079257_9 (sequence is synthesized)
cctataatcccagcactgtgggagactgaggcaggatgataatttgagcccaagagtttgagaccagcctgagcaacaaagtgagacctcttctataaaaaataaaaataaaaccagaac

SEQ ID NO: 75436 - DNA, 120 bp, Artificial Sequence
  ENSG00000079257_10 (sequence is synthesized)
acagatacttaacttaagcaactttcagataagcctaactgtcaaaagtccgctgttaccattgttttaatctttcaggtttataagctttattaaataatagcaacaaaacaattaaaa

SEQ ID NO: 75437 - DNA, 120 bp, Artificial Sequence
  ENSG00000079263_0 (sequence is synthesized)
cttttcctctttgactgagcaccgaggggcagttggcagcttcacctcagagctgcaggaaggaacggggcagtgaaaatcgaatcgggtgtgatcctaggccaagctcatggcccagca

SEQ ID NO: 75438 - DNA, 120 bp, Artificial Sequence
  ENSG00000079263_1 (sequence is synthesized)
gggccagcaggggcagatggcaagtggagacagcaatctcaacttcaggatggtcgcagagatccagaacgtagagggtcagaacctgcaggagcaggtttgccctgagcccattttcag

SEQ ID NO: 75439 - DNA, 120 bp, Artificial Sequence
  ENSG00000079263_2 (sequence is synthesized)
gttcttcagagaaaacaaggtggagattgcaagtgcaataacaaggccatttcctttccttatgggcctccgagaccgctccttcatctccgagcagatgtatgaacattttcaagaagc

SEQ ID NO: 75440 - DNA, 120 bp, Artificial Sequence
  ENSG00000079263_3 (sequence is synthesized)
ttttagaaacctggtcccagtgacaagagtgatgtattgtgtactcagtgaactggagaagacatttggctggtcacatctggaagcattgttcagcaggattaacctgatggcctatcc

SEQ ID NO: 75441 - DNA, 120 bp, Artificial Sequence
  ENSG00000079263_4 (sequence is synthesized)
tgatttaaacgagatttacagaagcttccagaatgtatgctatgaacactcacctctccaaatgaataatgtaaacgatttagaagatagacccagattactaccatatggtaaacaaga

SEQ ID NO: 75442 - DNA, 120 bp, Artificial Sequence
  ENSG00000079263_5 (sequence is synthesized)
gaacagcaatgcctgtcatgaaatggatgatatagcagtgcctcaggaagccttgagctcctcgccaaggtgtgagccaggtttctcttcagagtcttgtgagcagttagctctcccaaa

SEQ ID NO: 75443 - DNA, 120 bp, Artificial Sequence
  ENSG00000079263_6 (sequence is synthesized)
ggctggtggaggagatgctgaagatgcacccagcctactaccaggtgggggagtgtcctgtaaacttgctatacaaatagatgaaggagaatcagaagaaatgcccaagttactgcctta

SEQ ID NO: 75444 - DNA, 120 bp, Artificial Sequence
  ENSG00000079263_7 (sequence is synthesized)
tgatacagaagttctagaaagcaacgggatgatagatgcggcaaggacatacagcacagcaccaggggagaaacagggagaggaggaaggcaggaacagtcccagaaaaagaaaccaaga

SEQ ID NO: 75445 - DNA, 120 bp, Artificial Sequence
  ENSG00000079263_8 (sequence is synthesized)
caaggagaagtaccaagagagtccagagggaagagacaaagagacctttgatctaaaaactccccaagtcactaatgaaggagaaccagagaaggggctctgtctactaccaggtgaagg

SEQ ID NO: 75446 - DNA, 120 bp, Artificial Sequence
  ENSG00000079263_9 (sequence is synthesized)
agaagagggcagtgatgactgttcagaaatgtgtgatggagaagagccccaggaagcctctagctccctagcaagatgtgggtcagtttcttgtttatctgcagagacctttgatctaaa

SEQ ID NO: 75447 - DNA, 120 bp, Artificial Sequence
  ENSG00000079263_10 (sequence is synthesized)
gactccccaagtcactaatgaaggagaaccagagaaggagctcagtctactaccaggtgaaggagaagagggcagtgatgactgttcggaaatgtgtgatggagaagagcgccaggaagc

SEQ ID NO: 75448 - DNA, 120 bp, Artificial Sequence
  ENSG00000079263_11 (sequence is synthesized)
ctctagctccctagcaagacgtgggtcagtgtctagtgaactagaaaatcacccaatgaatgaagaaggagaatcagaagagcttgcttctagcctgctatatgataatgtaccaggagc

SEQ ID NO: 75449 - DNA, 120 bp, Artificial Sequence
  ENSG00000079263_12 (sequence is synthesized)
ggagcaatcagcatatgaaaatgagaagtgttcctgtgtcatgtgtttctcagaagaggtgccaggaagcccagaagcaaggacggaaagtgatcaagcgtgtggcacaatggatactgt

SEQ ID NO: 75450 - DNA, 120 bp, Artificial Sequence
  ENSG00000079263_13 (sequence is synthesized)
attgcaaacaactccactttgggaaaacccaagaggaaaagaagaaaaaagagggggcatggctggagcagaatgagaatgagaaggcaggaaaacagccaacaaaatgataatagcaaa

SEQ ID NO: 75451 - DNA, 120 bp, Artificial Sequence
  ENSG00000079263_14 (sequence is synthesized)
gccgacggccaggtggtctccagtgaaaagaaggcgaacgtgaatctgaaagacctttccaagattagggggagaaagagaggcaaacctggaacccgcttcactcagagtgacagagct

SEQ ID NO: 75452 - DNA, 120 bp, Artificial Sequence
  ENSG00000079263_15 (sequence is synthesized)
gcacagaaaagagtccgatcaagagcttcaagaaagcacaaagatgaaactgtggattttaaggctcctttgcttccagtgacctgtggtggggtgaagggaattttacataagaagaaa

SEQ ID NO: 75453 - DNA, 120 bp, Artificial Sequence
  ENSG00000079263_16 (sequence is synthesized)
ttgcagcaaggaatcttggtgaagtgtatacagactgaggatggaaaatggttcacccccacggaatttgaaatcaaaggaggccatgcaagatcaaagaactggaggctgagtgtgcgc

SEQ ID NO: 75454 - DNA, 120 bp, Artificial Sequence
  ENSG00000079263_17 (sequence is synthesized)
tgtggcgggtggcccctacgatggctgatggagaatggatttctgcctgatcctccaagaatacgttacaggaaaaaaaagagaatactgaagtctcaaaacaatagctcagttgaccct

SEQ ID NO: 75455 - DNA, 120 bp, Artificial Sequence
  ENSG00000079263_18 (sequence is synthesized)
tgtatgagaaacctggatgagtgtgaggtgtgccgggacggaggggagctgttctgttgcgacacttgttcaagagtcttccatgaggactgtcacatcccgcctgtggaagctgagagg

SEQ ID NO: 75456 - DNA, 120 bp, Artificial Sequence
  ENSG00000079263_19 (sequence is synthesized)
accccgtggaattgcatcttctgcaggatgaaggagtctccgggaagccaacagtgttgtcaggaatctgaggtcctggagaggcagatgtgtcctgaggaacagttgaaatgtgagttc

SEQ ID NO: 75457 - DNA, 120 bp, Artificial Sequence
  ENSG00000079263_20 (sequence is synthesized)
ctcctcttgaaagtctattgctgttctgagagctccttttttgccaagattccatactattattatattagagaggcgtgtcaaggcctgaaggagcccatgtggttggataaaatcaag

SEQ ID NO: 75458 - DNA, 120 bp, Artificial Sequence
  ENSG00000079263_21 (sequence is synthesized)
aaaaggctgaatgagcacggttacccccaagtggaggggtttgtacaagacatgcgcctcatcttccagaaccacagggcctcttacaagtacaaggattttggccaaatgggatttaga

SEQ ID NO: 75459 - DNA, 120 bp, Artificial Sequence
  ENSG00000079263_22 (sequence is synthesized)
ctggaggctgagtttgagaagaatttcaaggaagtgtttgctattcaggaaacaaatgggaacaattgactggattagtggatgctgaaagcattcagcaaatggcaccctaaaatatgc

SEQ ID NO: 75460 - DNA, 120 bp, Artificial Sequence
  ENSG00000079263_23 (sequence is synthesized)
cgctggtttgccactgacttcaaaatgaggtcacttgggcacagcacatgcagggaggggcttttctctgagcctccttcatctgcccaaagacaaatcctcaaaaggaaattcaatcat

SEQ ID NO: 75461 - DNA, 120 bp, Artificial Sequence
  ENSG00000079263_24 (sequence is synthesized)
catgaatcacaaccccaagtatctcatcagccagggaagagtaagtgggatcacagggaaggatgttggcagcgacaccatcccatacaggctcttacctcttctcctgagggctgctcc

SEQ ID NO: 75462 - DNA, 120 bp, Artificial Sequence
  ENSG00000079263_25 (sequence is synthesized)
agacaacatttattacccagaagaccttttgtctgaaaaccagccaagctttattcaggacacacttcttgccttcactttcccacttccgtggccacctccatgcagaagccctaagcc

SEQ ID NO: 75463 - DNA, 120 bp, Artificial Sequence
  ENSG00000079263_26 (sequence is synthesized)
cacattctttcgatagctcacggtggtgcatgagtgtccatcatctgactcttctcggagtctcatattttgtgggactcctgtgcaaacatatgttattaaaatttttttcctcctgtt

SEQ ID NO: 75464 - DNA, 120 bp, Artificial Sequence
  ENSG00000079263_27 (sequence is synthesized)
tggaggagatgctgaagatgcacccagcctactaccagtgtcctgtaaacttgctatacaaatagatgaaggagaatcagaagaaatgcccaagttactgccttatgatacagaagagac

SEQ ID NO: 75465 - DNA, 120 bp, Artificial Sequence
  ENSG00000079263_28 (sequence is synthesized)
ctgaaatgggccctcgtgagatttgtgatcttaatcccacggggcaagagcacacgctgtcgttagttgccttcaccttgttgtatttctgctggattttatgggaatccacagaaggta

SEQ ID NO: 75466 - DNA, 120 bp, Artificial Sequence
  ENSG00000079263_29 (sequence is synthesized)
gacactgaactatgctggtagcttttccattggtatatttgtcaccagattagagaggcgtgtcaaggcctgaaggagcccatgtggttggataaaatcaagaaaaggctgaatgagcac

SEQ ID NO: 75467 - DNA, 120 bp, Artificial Sequence
  ENSG00000079263_30 (sequence is synthesized)
gtgtgtggtacaagagatttccaaaagtttctaggtgccttcagtgggcaaagtgcaaggtattaaaaaaactgagagggaaggaccctgccaagaaggcggctaccatgagggagagat

SEQ ID NO: 75468 - DNA, 120 bp, Artificial Sequence
  ENSG00000079263_31 (sequence is synthesized)
ggaaggtgaggctgagacccagaggaggtgcaatgccagagggtgcagagaagtaaatggtctcaaccagtgaatggaaaaaggaaagtaacttcaaattttggaaagggattcagaaca

SEQ ID NO: 75469 - DNA, 120 bp, Artificial Sequence
  ENSG00000079263_32 (sequence is synthesized)
caggttgaagatcccggaagatgactgaagctcagccagggggaagccttttgatggtgaagtgtcagagagcaaaggaggaactgtcaacaatggtgattccactaatgaaaatatcca

SEQ ID NO: 75470 - DNA, 120 bp, Artificial Sequence
  ENSG00000079263_33 (sequence is synthesized)
atgtgagctggtggtcctttgcttgttgttctgaggtaagtgaacatgtgatttggccacagtgttttacttccaacctaaaatgactttactgcctctctctttccctggctgatttct

SEQ ID NO: 75471 - DNA, 120 bp, Artificial Sequence
  ENSG00000079263_34 (sequence is synthesized)
attgcggtggttatggatcatgtgacctccagctacatgactcctgaaccataattctaatcttgtatccaatttgttagttttacaaaagtggttttggtcccagagcaaggagggggt

SEQ ID NO: 75472 - DNA, 120 bp, Artificial Sequence
  ENSG00000079263_35 (sequence is synthesized)
ttccacaaatgctgtggtctgttgtagtctgttcatgcttaccagcaagatgctgaaaagtaaacttgaaactccatttaatgagatgggcttgcaaacttgtgggcttcactgagcaaa

SEQ ID NO: 75473 - DNA, 120 bp, Artificial Sequence
  ENSG00000079263_36 (sequence is synthesized)
agagagcctagcacatactggtacactgaggaggagctgcatgtgaaagctatgaagacagaaaagggggttggtgggggcctttccgaaccatgtggttgaattgcagactgtgggagg

SEQ ID NO: 75474 - DNA, 120 bp, Artificial Sequence
  ENSG00000079263_37 (sequence is synthesized)
cagggtgtgagagctgactctggagaaagaagttgaagtggattctggaaggcttgacaccctgtgctaaggaatctggagtttaatttttggaaaataaagaaggaataaagggcattt

SEQ ID NO: 75475 - DNA, 120 bp, Artificial Sequence
  ENSG00000079263_38 (sequence is synthesized)
gcggtggttatggatcatgtgacctccagctacatgactcctgaaccataattctaatcttgtatccaatttgttagttttacaaaagtggttttggtcccagagcaaggagggggatgg

SEQ ID NO: 75476 - DNA, 120 bp, Artificial Sequence
  ENSG00000079263_39 (sequence is synthesized)
aacaggaatgaactttcaataactaaacatctaatttcctgtgcggtacactgtactttcagtaataaacccatttccttaattgttttatgaagctgtactaactagtgagaaatgtat

SEQ ID NO: 75477 - DNA, 120 bp, Artificial Sequence
  ENSG00000079263_40 (sequence is synthesized)
tatgaagtaagtaagaatttccaaatgatgataaaccaggtccatactcaattatgccaaacttcaagatgcaatgagcaggctaaagggcctcctgtgagtggggaccttcaccattct

SEQ ID NO: 75478 - DNA, 120 bp, Artificial Sequence
  ENSG00000079263_41 (sequence is synthesized)
gtaggttaggaggtgacaggagaagcaggcatcacagaaaacctcccttcttctgtagtaaatgttgggggagggccacagtgagggaggtggggcaggagagagaatgggaatgctgta

SEQ ID NO: 75479 - DNA, 120 bp, Artificial Sequence
  ENSG00000079263_42 (sequence is synthesized)
tgggtgcagatcatcctaggtacttgtaaacaatctactaatggtagccataattaaaataaataagtgacctaggcagcattttattccaaagcctacttatttgaaacacttgaaact

SEQ ID NO: 75480 - DNA, 120 bp, Artificial Sequence
  ENSG00000079263_43 (sequence is synthesized)
tcatcgggtactgggacccagcagtgtgatccagagagcagtgggagacgctggcagcaggaggttaatgtcctctgtgctctcagggacacctcctctgatatgctgagggcagtgttg

SEQ ID NO: 75481 - DNA, 120 bp, Artificial Sequence
  ENSG00000079263_44 (sequence is synthesized)
gggacctttgcctacataccggcattgtcctttccttgaagttttgcagctgggtgggttggagacaagaaacaccagttgtttatattttgtgcttattcatacaagacaggaagcacg

SEQ ID NO: 75482 - DNA, 120 bp, Artificial Sequence
  ENSG00000079263_45 (sequence is synthesized)
agctttgggggattcaagcccatttcattcattgattcattcattcactcttcattcatatttgacaaatatttgactgagtgactattacatgccaagcccagggggaatataatgatg

SEQ ID NO: 75483 - DNA, 120 bp, Artificial Sequence
  ENSG00000079277_0 (sequence is synthesized)
gcgatctgcaggtaggggtgcgcgcgaccgctccccggcgggagccagcgaaggtttccatgtcagaggccgatggagaactgaagattgccacctacgcacaaaggccattgagacact

SEQ ID NO: 75484 - DNA, 120 bp, Artificial Sequence
  ENSG00000079277_1 (sequence is synthesized)
tcgtgtagctggaagacaccaacttcctgacaggagctttatttcatttgggatttcaagtttacagatggtatcttctcaaaagttggaaaaacctatagagatgggcagtagcgaacc

SEQ ID NO: 75485 - DNA, 120 bp, Artificial Sequence
  ENSG00000079277_2 (sequence is synthesized)
ccttcccatcgcagatggtgacaggaggaggaagaagaagcggaggggccgggccactgactccttgccaggaaagtttgaagatatgtacaagctgacctctgaattgcttggagaggg

SEQ ID NO: 75486 - DNA, 120 bp, Artificial Sequence
  ENSG00000079277_3 (sequence is synthesized)
agcctatgccaaagttcaaggtgccgtgagcctacagaatggcaaagagtatgccgtcaaaatcatcgagaaacaagcagggcacagtcggagtagggtgtttcgagaggtggagacgct

SEQ ID NO: 75487 - DNA, 120 bp, Artificial Sequence
  ENSG00000079277_4 (sequence is synthesized)
gtatcagtgtcagggaaacaagaacattttggagctgattgagttctttgaagatgacacaaggttttacttggtctttgagaaattgcaaggaggttccatcttagcccacatccagaa

SEQ ID NO: 75488 - DNA, 120 bp, Artificial Sequence
  ENSG00000079277_5 (sequence is synthesized)
gcaaaagcacttcaatgagcgagaagccagccgagtggtgcgggacgttgctgctgcccttgacttcctgcataccaaaggcattgctcatcgtgatctgaaaccagaaaatatattgtg

SEQ ID NO: 75489 - DNA, 120 bp, Artificial Sequence
  ENSG00000079277_6 (sequence is synthesized)
tgaatctccagaaaaggtgtctccagtgaaaatctgtgactttgacttgggcagtgggatgaaactgaacaactcctgtacccccataaccacaccagagctgaccaccccatgtggctc

SEQ ID NO: 75490 - DNA, 120 bp, Artificial Sequence
  ENSG00000079277_7 (sequence is synthesized)
tgcagaatacatggcccctgaggtagtggaggtcttcacggaccaggccacattctacgacaagcgctgtgacctgtggagcctgggcgtggtcctctacatcatgctgagtggctaccc

SEQ ID NO: 75491 - DNA, 120 bp, Artificial Sequence
  ENSG00000079277_8 (sequence is synthesized)
acccttcgtgggtcactgcggggccgactgtggctgggaccggggcgaggtctgcagggtgtgccagaacaagctgtttgaaagcatccaggaaggcaagtatgagtttcctgacaagga

SEQ ID NO: 75492 - DNA, 120 bp, Artificial Sequence
  ENSG00000079277_9 (sequence is synthesized)
ctgggcacacatctccagtgaagccaaagacctcatctccaagctcctggtgcgagatgcaaagcagagacttagcgccgcccaagttctgcagcacccatgggtgcaggggcaagctcc

SEQ ID NO: 75493 - DNA, 120 bp, Artificial Sequence
  ENSG00000079277_10 (sequence is synthesized)
tatctcagcacgaagagaacgaactagcagaggagccagaggcactagctgatggcctctgctccatgaagctttcccctccctgcaagtcacgcctggcccggagacgggccctggccc

SEQ ID NO: 75494 - DNA, 120 bp, Artificial Sequence
  ENSG00000079277_11 (sequence is synthesized)
aggcaggccgtggtgaagacaggagcccgcccacagcactctgaaatgctccagtcacaccttataggccctaggcctggccaggcattgtcccctggaaacctgtgtggctaaagtctg

SEQ ID NO: 75495 - DNA, 120 bp, Artificial Sequence
  ENSG00000079277_12 (sequence is synthesized)
ctgagcaggcagcagcctctgctctgtggctccattcaggctttttcatctacgaaggccctgaggttcccatcaacccccatttccctagggtcctggaggaaaaagctttttccaaag

SEQ ID NO: 75496 - DNA, 120 bp, Artificial Sequence
  ENSG00000079277_13 (sequence is synthesized)
gggttgtctttgaaaaggaaagcaatcacttctcactttgcataattgcctgcagcaggaacatctcttcactgggctccacctgctcacccgcctgcagatctgggatccagcctgctc

SEQ ID NO: 75497 - DNA, 120 bp, Artificial Sequence
  ENSG00000079277_14 (sequence is synthesized)
tcaccgctgtagctgtggcggctggggctgcagcctgcagggagaagcaagaagcatcagttgacagaggctgccgacacgtgcctcttccctctcttctctgtcaccctcctctggcgg

SEQ ID NO: 75498 - DNA, 120 bp, Artificial Sequence
  ENSG00000079277_15 (sequence is synthesized)
tccttccaccttcctctgtcctccggatgtcctctttgcccgtcttctcccttggctgagcaaagccatcccctcaattcagggaagggcaaggagccttcctcattcaggaaatcaaat

SEQ ID NO: 75499 - DNA, 120 bp, Artificial Sequence
  ENSG00000079277_16 (sequence is synthesized)
cagtcttccggtctgcagcacggaaaagcacataatctttctttgctgtgactgaaatgtatccctcgtttatcatcccctttgtttgtgattgctgctaaagtcagtagtatcgttttt

SEQ ID NO: 75500 - DNA, 120 bp, Artificial Sequence
  ENSG00000079277_17 (sequence is synthesized)
ttaaaaaaaaagtttggtgtttttaaccatgctgttccagcaaagatgataccttaaactcccactgcaagcccatgaacttcccagagagtggaacggcttgctcttctttctagaatg

SEQ ID NO: 75501 - DNA, 120 bp, Artificial Sequence
  ENSG00000079277_18 (sequence is synthesized)
tccatgcacttgggttttaatcagcagttccctattattctgattttaagctgttcctgtgatgaacttagagacagcatcggtgtctgctgctgtgtccccaggtcttgtgtgggtggc

SEQ ID NO: 75502 - DNA, 120 bp, Artificial Sequence
  ENSG00000079277_19 (sequence is synthesized)
acagatctgggcagttagatagtgctctgtgcctaaggtgaagccacactagggtgaagcctcacttccctgtttgagcaatgcagtgcctgctgcccgtgtgcatgaaggtacagccat

SEQ ID NO: 75503 - DNA, 120 bp, Artificial Sequence
  ENSG00000079277_20 (sequence is synthesized)
tcagataagtggaactattgagttacataaagaaaatagatttgcatttgtcaggcagacgtttatacaacaccacggtgcttttatacattgtgcttattttaataaaactgaaattct

SEQ ID NO: 75504 - DNA, 120 bp, Artificial Sequence
  ENSG00000079277_21 (sequence is synthesized)
gcaggagggcagccgcggccggcaggacaggcagacggacaggctgacaggagagagaacaggcactgcgggacctgcaggagaaaggcgatcctgtggctgggaatgtgaccccacggc

SEQ ID NO: 75505 - DNA, 120 bp, Artificial Sequence
  ENSG00000079277_22 (sequence is synthesized)
catttgccagcaagagttccatacttcctttagtctgagttcacaataatctgacaccaaatagtccacccatttttcccttagatgggaaataagagagctcagggaataagacacttg

SEQ ID NO: 75506 - DNA, 120 bp, Artificial Sequence
  ENSG00000079277_23 (sequence is synthesized)
ggaagaaatcctcaggggacttcttgttaacctccggagagcaaacatgacctgacaaaaccagctgcggtgtgacagccacggagccatgcacccgtacagccatgcctggctcctctt

SEQ ID NO: 75507 - DNA, 120 bp, Artificial Sequence
  ENSG00000079277_24 (sequence is synthesized)
ttccgcgttctcggaggagcgatctgcaggtaggggtgcgcgcgaccgctccccggcgggagccagcgaaggtaaaagcgagacctgcgaggtttccatgtcagaggccgatggagaact

SEQ ID NO: 75508 - DNA, 90 bp, Artificial Sequence
  ENSG00000079277_25 (sequence is synthesized)
ttgacttcctgcataccaaagacaatatggcgccatcagggctcactgcagccccaacctccctgggctccagtgatcctcccacctcag

SEQ ID NO: 75509 - DNA, 120 bp, Artificial Sequence
  ENSG00000079277_26 (sequence is synthesized)
tgtgtgaatctccagaaaaggtactttgggcctgatttggaatgttatagtttatacttaccgaggaagccacccttgctttcaggatggattgttagcagttccgttggcctcagacac

SEQ ID NO: 75510 - DNA, 120 bp, Artificial Sequence
  ENSG00000079277_27 (sequence is synthesized)
cctcagctattcctggaggggctgctgagagatagaactatataagaggaagagagaaacaccaaaggccatggccgcaaatgaaacttcagtctcctatatgtacaagctgacctctga

SEQ ID NO: 75511 - DNA, 120 bp, Artificial Sequence
  ENSG00000079277_28 (sequence is synthesized)
aagaatgcgcctaaattgagctgtcaggcacttggctgcgtaaccatgctttctggattgtggtgttgaaagtgccatcctgtgtgctctctccggatggctgtcacgtacttgcgtctg

SEQ ID NO: 75512 - DNA, 120 bp, Artificial Sequence
  ENSG00000079277_29 (sequence is synthesized)
agaacagtgtatggacctgcatgagcactaatcagtcttcctagcagacttgctctttctctggtcgtatgccgccagatcctctgagaagagagtgggcctttcccctcaatgggcaaa

SEQ ID NO: 75513 - DNA, 120 bp, Artificial Sequence
  ENSG00000079277_30 (sequence is synthesized)
aatgatggagctcagtctgcagatgccttggtggcatcaggcggctcactggctggccttcctgatctgtatctcatccttccagcctcctgctccagtcccatcacagtctgctctctg

SEQ ID NO: 75514 - DNA, 120 bp, Artificial Sequence
  ENSG00000079277_31 (sequence is synthesized)
tacttaccgttgagtatgtgtgtggacttctgattaagacccagggtggtgatcatccatcatgaatcccagagacttccaaaacgagtcaagctaataaaaaggatgaaggacttaaaa

SEQ ID NO: 75515 - DNA, 82 bp, Artificial Sequence
  ENSG00000079277_32 (sequence is synthesized)
ctcttgcctgtgagacttggacttggccactaagagagagagcccagctcatttctctaaaaacgtggatagcagaggagtg

SEQ ID NO: 75516 - DNA, 120 bp, Artificial Sequence
  ENSG00000079277_33 (sequence is synthesized)
tcctcccacctcagcctcccaagcagctacaggtttccatgtcagaggccgatggagaactgaagattgccacctacgcacaaaggccattgagacacttcgtgtagctggaagacacca

SEQ ID NO: 75517 - DNA, 120 bp, Artificial Sequence
  ENSG00000079277_34 (sequence is synthesized)
ggggacgcttggccacagaagaggaggctatttcttaccatctcctgactccagcatttagctctcactcctgtccccacaaggcaggtacctccttccgcccctttcagtgttagggag

SEQ ID NO: 75518 - DNA, 120 bp, Artificial Sequence
  ENSG00000079277_35 (sequence is synthesized)
agaaaggaaaagcagcagtaacagcaaaggagctattatctcttctgaaatactgtaaatatcatcaattcaagcaagttagaagaatgaactatctgaatcagtggttgttggggggaa

SEQ ID NO: 75519 - DNA, 120 bp, Artificial Sequence
  ENSG00000079277_36 (sequence is synthesized)
atggggttttatttctttcggtacctgtggaaactaggttgactgagtgttgcctggtagaaatctttaaggacttgccttaataccaagatgaggagaactgttaagaatatttgctgc

SEQ ID NO: 75520 - DNA, 120 bp, Artificial Sequence
  ENSG00000079277_37 (sequence is synthesized)
tgtttctgctcctagaatgtttacatatgtgcagataccactaagatcctggaaccttccagatagctgggtccggctcatctctagccccagttcattctgcccaccaccagctccaaa

SEQ ID NO: 75521 - DNA, 120 bp, Artificial Sequence
  ENSG00000079277_38 (sequence is synthesized)
tgagcagctctcccactgtggctttaaatcaggggcacctctaagactccacttccccctctctccctccacggtagggtcagcagggagccagtggcctggtattgatggctttgtcat

SEQ ID NO: 75522 - DNA, 120 bp, Artificial Sequence
  ENSG00000079277_39 (sequence is synthesized)
taagcttggaggattggaggacgggggctgctgttgatttaactccaggcactgcctccacaatcttctttcaaattaggccattttgcccatcttatttggatgccttcacactagtaa

SEQ ID NO: 75523 - DNA, 120 bp, Artificial Sequence
  ENSG00000079277_40 (sequence is synthesized)
aagcctcatatctcccaaagtagtcagcattttttttatgagggacagatttttattttcagccctgcagcttcttagttcagcattagagactctacttggtttattttattttgtaaa

SEQ ID NO: 75524 - DNA, 120 bp, Artificial Sequence
  ENSG00000079277_41 (sequence is synthesized)
agaaaaaaagcccacaacacctccaatatccaggctggtggcttccctactgagttacaagacgaccttgttggcagagcactgaaatactcgggcagacagagagtgctcaccggggaa

SEQ ID NO: 75525 - DNA, 120 bp, Artificial Sequence
  ENSG00000079277_42 (sequence is synthesized)
ggccacaagtgctacagtggccaggaacgcggccgtttcattaagcagcgcttagcagttagggtctagcggtgcccatgttaggccccaagtccatttgacagatgtttccattttctc

SEQ ID NO: 75526 - DNA, 120 bp, Artificial Sequence
  ENSG00000079277_43 (sequence is synthesized)
agtaattatttgctgcttgcctccaggacacacacctagtattcagtgttattagccgcaattgcttccagtcggctgcagattttattcagtttaatgtgaccgggacttttttataac

SEQ ID NO: 75527 - DNA, 120 bp, Artificial Sequence
  ENSG00000079277_44 (sequence is synthesized)
tctacctagtgggttttagggctggggtttgacagcacagacttggtgaaaacaccagagactaaacattatggaaagataaggtgacctgaatcttgctaacaccattggctgcttcca

SEQ ID NO: 75528 - DNA, 120 bp, Artificial Sequence
  ENSG00000079277_45 (sequence is synthesized)
tacgcgggtctttaataagcattctgatttcaagttggtttctgccccactaccaggtgttgtatatttttttcattgtatatttgtaagtagactttaatatataataccatttccccc

SEQ ID NO: 75529 - DNA, 120 bp, Artificial Sequence
  ENSG00000079277_46 (sequence is synthesized)
ttgggagaagggaggccggagggaaggatgataattagcattttgcagagcttagaatgtcacctgtgtgggtattttataaatgccttttcattataataggagtcatatatagataca

SEQ ID NO: 75530 - DNA, 120 bp, Artificial Sequence
  ENSG00000079277_47 (sequence is synthesized)
tttagtcatcgatttatcaatcccgttttgacatgttcactgtttaactacattaattatggggtggaagctctcaaatacattgcgaagtctagaaaggctaaaacagaggagaggagg

SEQ ID NO: 75531 - DNA, 120 bp, Artificial Sequence
  ENSG00000079277_48 (sequence is synthesized)
gtcctattgtttgggacacagacccaggataaaggggaagcctgagaatgtgccatccttcagatggaaagatgccatcacccacacacataatcactggggtgtatacttaagttgctt

SEQ ID NO: 75532 - DNA, 120 bp, Artificial Sequence
  ENSG00000079277_49 (sequence is synthesized)
ttctgacataatgaggtggggtagagaaaccctttcccttcccatcactcccccaatcttaggacacacttgcagggatgtctggaactgcatggagggccacacggaggggcttggtgg

SEQ ID NO: 75533 - DNA, 120 bp, Artificial Sequence
  ENSG00000079277_50 (sequence is synthesized)
ttgagggagcgtgctttagaaaccaacacagctaaagcttatgttatgtctagctgcatcacttactagccatgtgatcttgggcaagtcacttaaccttttctaaacaatattcccttc

SEQ ID NO: 75534 - DNA, 120 bp, Artificial Sequence
  ENSG00000079277_51 (sequence is synthesized)
tataaaatagagatattgatagcacctacctcactgggttgctgtgaagattaaatgagataattcatgtgaaatgcttaggacagtgtctggtaggcactaagggcccaataaatgttg

SEQ ID NO: 75535 - DNA, 120 bp, Artificial Sequence
  ENSG00000079277_52 (sequence is synthesized)
tctggtaggcactaagggcccaataaatgttggctgctaatattattaaaacaatttggtatgctgggggatgtcttagaagtatgtagagtagaccaggtacagtggctcacgcctata

SEQ ID NO: 75536 - DNA, 120 bp, Artificial Sequence
  ENSG00000079277_53 (sequence is synthesized)
ggggccgactgtggctgggaccggggcgaggtctgcagggtgtgccagtgtggcctcaggaggaatcttttgtacctagaacaagctgtttgaaagcatccaggaaggcaagtatgagtt

SEQ ID NO: 75537 - DNA, 120 bp, Artificial Sequence
  ENSG00000079277_54 (sequence is synthesized)
aatggcaaagagtatgccgtcaaagtgagtgtctcagctgaatgccaggctttactttgcaaatagtcattcctagctcatcttgaaccaaataaatgttatattccataagaatgggga

SEQ ID NO: 75538 - DNA, 120 bp, Artificial Sequence
  ENSG00000079277_55 (sequence is synthesized)
aagaattcctaggccaagggaagcagtttcagaaacaactctccaagttccatttccaaggaaagtcttaaccatttgtcccttctggcgtaccctctttcattgaaatccatgcagaat

SEQ ID NO: 75539 - DNA, 120 bp, Artificial Sequence
  ENSG00000079277_56 (sequence is synthesized)
gatgaccaagaagaattcctaggccaagggaagcaggtgagccaaggtgcagctttactgcgggggtcccactccctgaggcagcatttatcccatgagtgtttgcatgatgaattaagg

SEQ ID NO: 75540 - DNA, 120 bp, Artificial Sequence
  ENSG00000079277_57 (sequence is synthesized)
ccccacagacctgctagtggactctgtgatgaaaatagtgtgtggccaggctccacatgggcaactagcgaccccttggtgagattatgacacctctcgcttccccctgtgtaaccaggg

SEQ ID NO: 75541 - DNA, 120 bp, Artificial Sequence
  ENSG00000079277_58 (sequence is synthesized)
ggttgcagtgagccgagatcgtgccactactctccagcctgggtaacagagtgagacttcgtctaaaaaaaaaacttatacttactagagcccaaaaaggcattcttctatgtcccctct

SEQ ID NO: 75542 - DNA, 120 bp, Artificial Sequence
  ENSG00000079308_0 (sequence is synthesized)
cgcgggcctcccgcgccgctcctcccgctagagggggcagcaggacacgggctgctcctccggggctgagcctccgggagacccgggacagggtagggcagggcgcccgccttcctaccc

SEQ ID NO: 75543 - DNA, 120 bp, Artificial Sequence
  ENSG00000079308_1 (sequence is synthesized)
gggcgcccgccttcctaccccgccccaaccccggaactctgcgccaggagcggcgggtccacctcttccgaccctcgcgccccaggcgcccactctcggggtcagcatgactcggctgag

SEQ ID NO: 75544 - DNA, 120 bp, Artificial Sequence
  ENSG00000079308_2 (sequence is synthesized)
ttggtgcttctcctgcgtgatccgatggggcaagtacctcttctcgtgcctcctgcccctgcgcttctgcctccgcagccagccagaggatctggaggcccccaagacacaccgcttcaa

SEQ ID NO: 75545 - DNA, 120 bp, Artificial Sequence
  ENSG00000079308_3 (sequence is synthesized)
ggtgaagaccttcaagaaggtgaagccctgtgggatctgccgccaggtcatcacccaggaaggctgcacctgcaaagtctgcagcttctcctgtcatcggaaatgccaggccaaggtggc

SEQ ID NO: 75546 - DNA, 120 bp, Artificial Sequence
  ENSG00000079308_4 (sequence is synthesized)
tgccccctgcgttcctccatccaaccatgagctggtgcccatcaccactgagaatgcaccaaagaatgtagtggacaagggagaaggagcctcccggggtggaaacacacggaaaagcct

SEQ ID NO: 75547 - DNA, 120 bp, Artificial Sequence
  ENSG00000079308_5 (sequence is synthesized)
cgaggacaacggctccaccagggtcaccccgagtgtccagccccacctccagcccatcagaaacatgagtgtgagccggaccatggaggacagctgtgagctggacctggtgtacgtcac

SEQ ID NO: 75548 - DNA, 120 bp, Artificial Sequence
  ENSG00000079308_6 (sequence is synthesized)
agagaggatcatcgctgtctccttccccagcacagccaatgaggagaacttccggagcaacctccgtgaggtggcgcagatgctcaagtccaaacatggaggcaactacctgctgttcaa

SEQ ID NO: 75549 - DNA, 120 bp, Artificial Sequence
  ENSG00000079308_7 (sequence is synthesized)
cctctctgagcggagacctgacatcacgaagctccatgccaaggtactggaatttggctggcccgacctccacaccccagccctggagaagatctgcagcatctgtaaggccatggacac

SEQ ID NO: 75550 - DNA, 120 bp, Artificial Sequence
  ENSG00000079308_8 (sequence is synthesized)
atggctcaatgcagaccctcacaatgtcgttgttctacacaacaagggaaaccgaggcaggataggagttgtcatcgcggcttacatgcactacagcaacatttctgccagtgcggacca

SEQ ID NO: 75551 - DNA, 120 bp, Artificial Sequence
  ENSG00000079308_9 (sequence is synthesized)
ggctctggaccggtttgcaatgaagcggttctatgaggataagattgtgcccattggccagccatcccaaagaaggtacgtgcattacttcagtggcctgctctccggctccatcaaaat

SEQ ID NO: 75552 - DNA, 120 bp, Artificial Sequence
  ENSG00000079308_10 (sequence is synthesized)
gaacaacaagcccttgtttctgcaccacgtgatcatgcacggcatccccaactttgagtctaaaggaggatgtcggccatttctccgcatctaccaggccatgcaacctgtgtacacatc

SEQ ID NO: 75553 - DNA, 120 bp, Artificial Sequence
  ENSG00000079308_11 (sequence is synthesized)
tggcatctacaacatcccaggagacagccagactagcgtctgcatcaccatcgagccaggactgctcttgaagggagacatcttgctgaagtgctaccacaagaagttccgaagcccagc

SEQ ID NO: 75554 - DNA, 120 bp, Artificial Sequence
  ENSG00000079308_12 (sequence is synthesized)
ccgagacgtcatcttccgtgtgcagttccacacctgtgccatccatgacctgggggttgtctttgggaaggaggaccttgatgatgctttcaaagatgatcgatttccagagtatggcaa

SEQ ID NO: 75555 - DNA, 120 bp, Artificial Sequence
  ENSG00000079308_13 (sequence is synthesized)
agtggagtttgtattttcttatgggccagagaaaattcaaggcatggagcacctggagaacgggccgagcgtgtctgtggactataacacctccgaccccctcatccgctgggactccta

SEQ ID NO: 75556 - DNA, 120 bp, Artificial Sequence
  ENSG00000079308_14 (sequence is synthesized)
cgacaacttcagtgggcatcgagatgacggcatggaggaggtggtgggacacacgcaggggccactagatgggagcctgtatgctaaggtgaagaagaaagactccctgcacggcagcac

SEQ ID NO: 75557 - DNA, 120 bp, Artificial Sequence
  ENSG00000079308_15 (sequence is synthesized)
cggggctgttaatgccacacgtcctacactgtcggccacccccaaccacgtggaacacacgctttctgtgagcagcgactcgggcaactccacagcctccaccaagaccgacaagaccga

SEQ ID NO: 75558 - DNA, 120 bp, Artificial Sequence
  ENSG00000079308_16 (sequence is synthesized)
cgagcctgtccccggggcctccagtgccactgctgccttgagtccccaggagaagcgggagctggaccgcctgctgagtggctttggcttagagcgagagaagcaaggcgccatgtacca

SEQ ID NO: 75559 - DNA, 120 bp, Artificial Sequence
  ENSG00000079308_17 (sequence is synthesized)
cacccagcacctcaggtcccgcccagcagggggctcggctgtgccctcctctggacgccacgttgtcccagcccaggttcatgtcaatggtggggcgttagcatctgagcgggagacaga

SEQ ID NO: 75560 - DNA, 120 bp, Artificial Sequence
  ENSG00000079308_18 (sequence is synthesized)
catcctggacgatgaattgccaaaccaggatggtcacagtgcgggcagcatgggcacactctcttctctggacggggtcaccaacaccagtgaggggggctacccagaggccctgtcccc

SEQ ID NO: 75561 - DNA, 120 bp, Artificial Sequence
  ENSG00000079308_19 (sequence is synthesized)
actgaccaacggtctggacaagtcctaccccatggagcctatggtcaatggaggaggctacccctacgagtctgccagccgggcggggcctgcccatgctggccacacggcccccatgcg

SEQ ID NO: 75562 - DNA, 120 bp, Artificial Sequence
  ENSG00000079308_20 (sequence is synthesized)
gccctcctactctgcacaggagggtttagctggctaccagagggaggggccccacccagcctggccacagccagtgaccacctcccactatgcccatgaccccagcggtatgttccgctc

SEQ ID NO: 75563 - DNA, 120 bp, Artificial Sequence
  ENSG00000079308_21 (sequence is synthesized)
tcaatccttttcggaagctgaaccccagctgcccccagctccggtccgagggggaagcagccgggaggctgtgcaaaggggactgaattcgtggcagcagcagcagcagcagcagcagca

SEQ ID NO: 75564 - DNA, 120 bp, Artificial Sequence
  ENSG00000079308_22 (sequence is synthesized)
gcctcgcccacctccacgccagcaggaaagagcccacttggagagtcttgtagccagcaggcccagccctcagccattggcagagacccccatccccagtctccctgagttcccgcgagc

SEQ ID NO: 75565 - DNA, 120 bp, Artificial Sequence
  ENSG00000079308_23 (sequence is synthesized)
agcctcccagcaggagattgaacagtccatcgaaacactcaatatgctgatgctggacctggagccagcctccgctgctgccccactacacaagtcccagagtgtccccggggcctggcc

SEQ ID NO: 75566 - DNA, 120 bp, Artificial Sequence
  ENSG00000079308_24 (sequence is synthesized)
aggggcttctccactctcctcccagcccctctctggatcctcccgtcagtcccatccactgacccagtccagatctggctatatccccagtgggcattcgttgggaacccctgagccagc

SEQ ID NO: 75567 - DNA, 120 bp, Artificial Sequence
  ENSG00000079308_25 (sequence is synthesized)
cccacgggcctctctggagtctgtccctcctggcaggtcttactcaccttatgactatcagccatgtttggctgggcctaaccaggatttccattcaaagagcccagcctcttcctcctt

SEQ ID NO: 75568 - DNA, 120 bp, Artificial Sequence
  ENSG00000079308_26 (sequence is synthesized)
gcctgccttccttccgaccacccacagccctccagggcctcagcaacccccagcctctctccctggcctcactgctcagcctctgctctcaccaaaggaagcgacttcagacccctcccg

SEQ ID NO: 75569 - DNA, 120 bp, Artificial Sequence
  ENSG00000079308_27 (sequence is synthesized)
gactccagaggaggagccattgaatttagaagggctggtggcccacagggtagcaggggtacaggctcgggagaagcagcctgcagagcccccagcccctctgcggaggcgggcggccag

SEQ ID NO: 75570 - DNA, 120 bp, Artificial Sequence
  ENSG00000079308_28 (sequence is synthesized)
tgatggacagtatgagaaccagtctccagaagccacatcccctcgtagccctggggttcgctcccctgtccagtgtgtctccccggagctggctcttaccatcgctctcaatcctggagg

SEQ ID NO: 75571 - DNA, 120 bp, Artificial Sequence
  ENSG00000079308_29 (sequence is synthesized)
gcggcccaaagagccccatttgcacagctacaaggaggccttcgaggagatggagggaacctccccgagcagcccaccacccagtggggtgcggtcccccccgggtctggccaagacacc

SEQ ID NO: 75572 - DNA, 120 bp, Artificial Sequence
  ENSG00000079308_30 (sequence is synthesized)
cctgtctgctctgggcctgaaacctcacaacccagcggacatcctgttgcaccccacaggagagccccggagctatgtggagtctgtggcacggacagcggtggctggaccccgagctca

SEQ ID NO: 75573 - DNA, 120 bp, Artificial Sequence
  ENSG00000079308_31 (sequence is synthesized)
ggactctgagcccaagagctttagtgctccagccacccaggcctatggccatgagatacccctgaggaacgggaccctgggtggctcctttgtctcccccagccccctctccaccagcag

SEQ ID NO: 75574 - DNA, 120 bp, Artificial Sequence
  ENSG00000079308_32 (sequence is synthesized)
ccccatcctcagtgctgacagcacttcagtggggagtttcccgtcgggagagagcagtgaccagggtccccggacgcccacccagcctctgttggagtctggcttccgctcaggcagcct

SEQ ID NO: 75575 - DNA, 120 bp, Artificial Sequence
  ENSG00000079308_33 (sequence is synthesized)
gggacagcccagcccgtctgcccagagaaactaccagagctcttctcctctcccgactgtgggcagtagctacagcagccccgactactcacttcagcatttcagctcctctccggaaag

SEQ ID NO: 75576 - DNA, 120 bp, Artificial Sequence
  ENSG00000079308_34 (sequence is synthesized)
ccaggctcgagctcagttcagtgtggctggcgtccacacggtgcctgggagccctcaggcgcgccacagaacagtgggcaccaacactccccctagtcctggcttcggctggcgggccat

SEQ ID NO: 75577 - DNA, 120 bp, Artificial Sequence
  ENSG00000079308_35 (sequence is synthesized)
caatcccagcatggctgcccccagcagtcccagtttgagccatcaccagatgatgggtccaccaggcactggcttccatggtagcactgtctccagcccccagagcagtgcagcgaccac

SEQ ID NO: 75578 - DNA, 120 bp, Artificial Sequence
  ENSG00000079308_36 (sequence is synthesized)
cccggggagccccagcctgtgtcggcacccagcaggggtctaccaggtttctggcctccacaacaaagtggccaccaccccggggagtcccagcctgggccggcaccctggggctcacca

SEQ ID NO: 75579 - DNA, 120 bp, Artificial Sequence
  ENSG00000079308_37 (sequence is synthesized)
aggcaacctggcctccggtcttcatagcaatgcaatagccagccctggaagccccagcctgggccgtcacctcggagggtctggatctgtggttcccggcagcccctgcttggaccggca

SEQ ID NO: 75580 - DNA, 120 bp, Artificial Sequence
  ENSG00000079308_38 (sequence is synthesized)
tgtggcctatggtggctattctaccccggaggatcggagacccacactgtcccggcagagcagtgcctctggctaccaggctccttccacgccctccttccctgtctcccctgcctacta

SEQ ID NO: 75581 - DNA, 120 bp, Artificial Sequence
  ENSG00000079308_39 (sequence is synthesized)
ccctggcctgagcagccctgccacctccccgtcaccagactccgcagccttccggcaagggagcccaacaccagccttgccagagaagcgaaggatgtcagtgggagaccgggcaggcag

SEQ ID NO: 75582 - DNA, 120 bp, Artificial Sequence
  ENSG00000079308_40 (sequence is synthesized)
cctccccaactatgccaccatcaatgggaaggtgtcttcgcctgtcgccagcggcatgtccagtcccagtgggggcagcaccgtctccttctcccacactctgcccgacttctccaagta

SEQ ID NO: 75583 - DNA, 120 bp, Artificial Sequence
  ENSG00000079308_41 (sequence is synthesized)
ctccatgccagacaacagcccggagacgcgggctaaagtgaagtttgtccaggacacttctaagtattggtacaagcctgagatctccagggagcaggccatcgcgctcctcaaggacca

SEQ ID NO: 75584 - DNA, 120 bp, Artificial Sequence
  ENSG00000079308_42 (sequence is synthesized)
ggagccgggggccttcatcatccgcgacagtcactccttccgaggcgcgtacgggctggccatgaaggtgtcttcgccacctccaaccatcatgcagcagaataaaaaaggagacatgac

SEQ ID NO: 75585 - DNA, 120 bp, Artificial Sequence
  ENSG00000079308_43 (sequence is synthesized)
ccatgagctggtcaggcattttctgatagagactggccccagaggagtcaagctcaagggctgccccaatgagccaaacttcggatcgctgtctgccctggtctaccagcactccatcat

SEQ ID NO: 75586 - DNA, 120 bp, Artificial Sequence
  ENSG00000079308_44 (sequence is synthesized)
cccattggccctgccttgcaagctggtcattccaaaccgagaccccacagatgaatcgaaagatagctccggccctgccaactcaactgcagacctgctgaaacaaggggcagcctgcaa

SEQ ID NO: 75587 - DNA, 120 bp, Artificial Sequence
  ENSG00000079308_45 (sequence is synthesized)
tgtgctcttcgtcaactctgtggacatggagtcactcactgggccacaggccatctctaaagccacatctgagacgttggctgcagaccccacgccagctgccaccatcgttcacttcaa

SEQ ID NO: 75588 - DNA, 120 bp, Artificial Sequence
  ENSG00000079308_46 (sequence is synthesized)
agtctctgcccagggaatcactctgactgacaaccagagaaagctctttttcagacgccactaccctctcaacactgtcaccttctgtgacctggatccacaggaaagaaagtggatgaa

SEQ ID NO: 75589 - DNA, 120 bp, Artificial Sequence
  ENSG00000079308_47 (sequence is synthesized)
aacagagggtggtgcccctgctaagctcttcggcttcgtggcccggaagcagggcagcaccacggacaacgcctgccacctctttgctgagcttgaccccaaccagccggcctctgccat

SEQ ID NO: 75590 - DNA, 120 bp, Artificial Sequence
  ENSG00000079308_48 (sequence is synthesized)
cgtcaacttcgtctccaaggtcatgctgaatgccggccaaaagagatgaaccctgccccttgcccagggccagtgccatggggaaggggcttgtggggaggggacccatgaatcctgacc

SEQ ID NO: 75591 - DNA, 120 bp, Artificial Sequence
  ENSG00000079308_49 (sequence is synthesized)
actcttgaacccagaaggaggactttgggccaatttcggaggagagaagaaagtgcaacgtggggagagggaagtgaattgcagaggggagggggaaaagagagagagagagagagagag

SEQ ID NO: 75592 - DNA, 120 bp, Artificial Sequence
  ENSG00000079308_50 (sequence is synthesized)
agagagagagaaagatggaggagaagaacttggattcccctgggtagatggaaactgcaaaaacccaaagcctccaaaactaaccaggtccacctaacaccccctccctcccctaagaag

SEQ ID NO: 75593 - DNA, 120 bp, Artificial Sequence
  ENSG00000079308_51 (sequence is synthesized)
atggatgtcctcaaaagagaaggaacaaacctccttgggaatccacattttttgggggaatggaaaagctctgtctccctaactcaactgctttgcaaggggaaatcaagctgggagaat

SEQ ID NO: 75594 - DNA, 120 bp, Artificial Sequence
  ENSG00000079308_52 (sequence is synthesized)
ctttttctggccacctgtggggtaggttgtcaaaccaaacagagccaccgtgggacatcaagtggaagaacttgtttgcttgaaagtatctcagacccaaggcacctcaggtctctttgc

SEQ ID NO: 75595 - DNA, 120 bp, Artificial Sequence
  ENSG00000079308_53 (sequence is synthesized)
tgtgcctccactatattgtcgtgtgggtgtgtgtctgcacccacatcctcacacattgatctagatctgcctttatccactcgaattataaacagctcggcttgtccttgtcccatgtgt

SEQ ID NO: 75596 - DNA, 120 bp, Artificial Sequence
  ENSG00000079308_54 (sequence is synthesized)
ttgtagacacacatgcatactgtccaaagattagggttggtggtggcagtgcagcaggggagggacaaacaaccaagctatgggtgacagaggctctctcctggtgcctgcacctgcact

SEQ ID NO: 75597 - DNA, 120 bp, Artificial Sequence
  ENSG00000079308_55 (sequence is synthesized)
ctagtgaccctgggtgccgccagacccttctcttctacaaagaccccagcaggagtgggagggtctgcaatggcatcgccctgtcctgccttggccagaagcctggagctttggtttgag

SEQ ID NO: 75598 - DNA, 120 bp, Artificial Sequence
  ENSG00000079308_56 (sequence is synthesized)
gaggtagagatatgtgtatccataggaagagatctgtcagaacaggcagctgttgagctcggggtgtcttccccaaggcatgtggctcagcagcaagaaaggcaagttgctcctgctggg

SEQ ID NO: 75599 - DNA, 120 bp, Artificial Sequence
  ENSG00000079308_57 (sequence is synthesized)
gccctggactctgccttagctcccacctctcagccttgttattgggtttcatgcccctggaccagccttatctcagacctgcttacctgcatgatgcctttttgggggctggggattgag

SEQ ID NO: 75600 - DNA, 120 bp, Artificial Sequence
  ENSG00000079308_58 (sequence is synthesized)
tcttgctgctctgcccagccctgttctattctgcagggtccctgtgttggaattctccctggggaacctactttctgctcagtgaggctccggccagaaacctggagtccttatcctccc

SEQ ID NO: 75601 - DNA, 120 bp, Artificial Sequence
  ENSG00000079308_59 (sequence is synthesized)
ctctgtaagtgttttagggtctggcttttgcaggcaccctctgacctcagcagagctcctgggcctgctgcctgcacaccacatcgcctacctacaatgccaaagcctcactgtcaccct

SEQ ID NO: 75602 - DNA, 120 bp, Artificial Sequence
  ENSG00000079308_60 (sequence is synthesized)
ttctgccttggtttccctagctgagccacgctgcccatgcagcagagggcagaaggcttgcacttgggccaaagggcctaaggtccactggacagttgggaaaacacctgaccaccattt

SEQ ID NO: 75603 - DNA, 120 bp, Artificial Sequence
  ENSG00000079308_61 (sequence is synthesized)
aaggactctaagccagaatggaaaattcaccaggactccattcttaagcctatgcgagtcccctagagagaggcattgtactgatatataaatattatataatatatacatgagacatac

SEQ ID NO: 75604 - DNA, 120 bp, Artificial Sequence
  ENSG00000079308_62 (sequence is synthesized)
tgacagaatctgtaagctaataaaatgtaagaaaaggttaaaaaaagaataggtaaattgacaagaagtatttattgtttttccatattgctttattgccttccttggggataaaccaat

SEQ ID NO: 75605 - DNA, 120 bp, Artificial Sequence
  ENSG00000079308_63 (sequence is synthesized)
tcctatccttttttatatgtgtaagtaaagcctgaagtgtagggggcctttgttcttgaagcagccagggtctccttgccctggccttggccttccctagactgtgtggggctcagcatt

SEQ ID NO: 75606 - DNA, 120 bp, Artificial Sequence
  ENSG00000079308_64 (sequence is synthesized)
gggaggggttgcacatgtcccagcctttggcccccttacttttcagcaagccaggggcccagcagtcagctcccaggatgtgtggggagctgtccctgactctgcaggcctgagcgagtg

SEQ ID NO: 75607 - DNA, 120 bp, Artificial Sequence
  ENSG00000079308_65 (sequence is synthesized)
tgtgagcatgcggggacatgggtgtgtatggcacacataggtgcgtgtgtgtcttttgtattttttctcctccaaggagctgtgtcagtgtggacgttctgtttcagggagttggaaagg

SEQ ID NO: 75608 - DNA, 120 bp, Artificial Sequence
  ENSG00000079308_66 (sequence is synthesized)
agggtgtctgcagaaggtggagagcaggggcagaggccccactggccaccccctgcttcccagagtgaaaccttgtgcctggtgaccaaagtccctccaaagtgctcttccttctgggtt

SEQ ID NO: 75609 - DNA, 120 bp, Artificial Sequence
  ENSG00000079308_67 (sequence is synthesized)
attcaagccaaatatctgggtttccccctctcctcattccctagcaaaccccaattatcttccaagataggagatatttcccatccccttcctttgtaaatatctcatctcccactggag

SEQ ID NO: 75610 - DNA, 120 bp, Artificial Sequence
  ENSG00000079308_68 (sequence is synthesized)
agcccaggagcctattcctggcatggatgttctgtccacacttgaggctgggcggtgtatcagacccttcaagcagcctggctggggcccaggactgagtctggggtcagctttcacggt

SEQ ID NO: 75611 - DNA, 120 bp, Artificial Sequence
  ENSG00000079308_69 (sequence is synthesized)
cgcttttcccttcctcaccacccaccacagcccaccttgcatgcatggccagcccctccactccagcctgagccatgtgtgcccctgcgggaggacccattcatgccagaaagctggtaa

SEQ ID NO: 75612 - DNA, 120 bp, Artificial Sequence
  ENSG00000079308_70 (sequence is synthesized)
ctccctcccagcatccctgcggaaggagtcagtttctgagagtgtgacttttcaaggcgaatgatggggaagggttccccagtccccacagtggccccacctctgggccctgcaccagag

SEQ ID NO: 75613 - DNA, 120 bp, Artificial Sequence
  ENSG00000079308_71 (sequence is synthesized)
cccttctgtgtcacggcgggctgtgcacccatgcacacacctacgcacacacaacactccgcactgcagtatattcttgccaaagatttcctttaaaagcaagcacttttactaattatt

SEQ ID NO: 75614 - DNA, 120 bp, Artificial Sequence
  ENSG00000079308_72 (sequence is synthesized)
attttgtaaatgtttatcttcttctgtcttctccctccctgaatctattttactgttgtttattgttgaatctgtgtgtcagccaggagagcgctgtctggccttgaacatgggctggga

SEQ ID NO: 75615 - DNA, 120 bp, Artificial Sequence
  ENSG00000079308_73 (sequence is synthesized)
tgggaaagggtctgggagaagatgggcaacaaagagccagggagtcatggacatcgcagcgacgcagaccccagcaggttcagtcccgtgctgccaccagctgtccagctgggtgtctgg

SEQ ID NO: 75616 - DNA, 120 bp, Artificial Sequence
  ENSG00000079308_74 (sequence is synthesized)
agggaagagggcagaggagggtcatgtcccttcagctgggggaggggcccagtgagctccacgtggctttttcccaaagggagcaagagggaaggattgggcgagaaaacaatggagagg

SEQ ID NO: 75617 - DNA, 120 bp, Artificial Sequence
  ENSG00000079308_75 (sequence is synthesized)
ggacctgcgaaggaaaacagggaggaagtgagcggtttgatcagcctgctatcacggtgttctggctctcttatttagccaggcgcttaagggacagatacatcacatcctaagtttggg

SEQ ID NO: 75618 - DNA, 120 bp, Artificial Sequence
  ENSG00000079308_76 (sequence is synthesized)
aaaggcctttgacccatgtcatctgagcgtctcctccagtagctctgaaagctgtggacaccaatggccaggattccttctcccctggtttttgaggatccctgggtcttctgagactgg

SEQ ID NO: 75619 - DNA, 120 bp, Artificial Sequence
  ENSG00000079308_77 (sequence is synthesized)
ccaggagagggatggtggggccagtggttgtgtgaaagcaggaggggcagccctcctggacaagtgtgatccccctataaacggctctcaggaggttagtgagtaggagattctgccttg

SEQ ID NO: 75620 - DNA, 120 bp, Artificial Sequence
  ENSG00000079308_78 (sequence is synthesized)
ttctgatgagcctgtgcaggggctccaggggagcatgctgtccagggggcacagaagggtggtgagtgtgatcaaatctagtctcactcccactttttagtctcactcctacttttgtcc

SEQ ID NO: 75621 - DNA, 120 bp, Artificial Sequence
  ENSG00000079308_79 (sequence is synthesized)
accacccctgcctcctggatcttctcccactttttttttcagctttaggacctggggagatcctgtgagtcaaggcagacacccaatcctgcccccacactcggggtcctccaagaggtt

SEQ ID NO: 75622 - DNA, 120 bp, Artificial Sequence
  ENSG00000079308_80 (sequence is synthesized)
ggggggcagagtcccagagcagccctttaccccaggtccaggccctggaatcctgagactcgcgtttccttggccagtggtaacacaggacgtgtgtgcgcatgtgcaagtgtggatgta

SEQ ID NO: 75623 - DNA, 120 bp, Artificial Sequence
  ENSG00000079308_81 (sequence is synthesized)
tgtgtgtgcgtgtgttttgctcatttctttagggaacttgggagtcggggttggaggtgctgggcaatggaacttcaaattcaatgtcgcccagcagtgaggggagtcgggaggtgaggc

SEQ ID NO: 75624 - DNA, 120 bp, Artificial Sequence
  ENSG00000079308_82 (sequence is synthesized)
ctgtaggccaaccaattggtggagtctcagcgatagcccaggtgagaagtggttcacccagaggggcagggtgggggcctcgggcagatctgtccctcttggcacctctgtcctcaaatg

SEQ ID NO: 75625 - DNA, 120 bp, Artificial Sequence
  ENSG00000079308_83 (sequence is synthesized)
tccaaaatgttggaggacctctgttcatatcccacgcctgggctcttgccagcagtggagttactgtagagggatgtcccaagcttgttttccaatcagtgttaagctgtttgaaactct

SEQ ID NO: 75626 - DNA, 120 bp, Artificial Sequence
  ENSG00000079308_84 (sequence is synthesized)
cctgtgtctgtgttttgtttgtgcgtgtgtgtgagagcacatcagtgtgtgcaggctgtgtttccccatttctctcctcccttcagacccatcattgagaacaaatgtaagaaatccctt

SEQ ID NO: 75627 - DNA, 120 bp, Artificial Sequence
  ENSG00000079308_85 (sequence is synthesized)
cccaccaccctccctgcctcccaggccctctgcgggggaaacaagatcacccagcatccttccccaccccagctgtgtatttatatagatggaaatatactttatattttgtatcatcgt

SEQ ID NO: 75628 - DNA, 120 bp, Artificial Sequence
  ENSG00000079308_86 (sequence is synthesized)
gcctatagccgctgccaccgtgtataaatcctggtgtatgctccttatcctggacatgaatgtattgtacactgacgcgtccccactcctgtacagctgctttgtttctttgcaatgcat

SEQ ID NO: 75629 - DNA, 120 bp, Artificial Sequence
  ENSG00000079308_87 (sequence is synthesized)
tgtatggctttataaatgataaagttaaagaaaactctgtgccgttatctatctgtgttgttcggacaggggtctgccatgtctctggtgggcaaaaaggggcctctccagagatccagg

SEQ ID NO: 75630 - DNA, 120 bp, Artificial Sequence
  ENSG00000079308_88 (sequence is synthesized)
tgggcttcagcgatgcctctagtggacagctcaaatcctcccagcggcctccccaccatctgcgtggtggttctggttccctgtgtttattcatttggactctttcagctgcaagagaaa

SEQ ID NO: 75631 - DNA, 120 bp, Artificial Sequence
  ENSG00000079308_89 (sequence is synthesized)
aggccggatgggctgcactgtgagcctggtgtgctgcgaagagctgcggcccggaccactctgcggtccccagcccccggggagtccctgggtctcggcgcgggctgagtgctgggagtc

SEQ ID NO: 75632 - DNA, 120 bp, Artificial Sequence
  ENSG00000079308_90 (sequence is synthesized)
ttcagccagaggatctggaggcccccaagacacaccgcttcaaggtgaagaccttcaagaaggtgaagccctgtgggatctgccgccaggtcatcacccaggaaggctgcacctgcaaag

SEQ ID NO: 75633 - DNA, 120 bp, Artificial Sequence
  ENSG00000079308_91 (sequence is synthesized)
aggcagcctgactcccatggtgagcccactgccaccaccacattgccctggggcagccctgcatgtccagccctacaaagcggcagcatcccatggaccgcatggggcctctccaggtgg

SEQ ID NO: 75634 - DNA, 120 bp, Artificial Sequence
  ENSG00000079308_92 (sequence is synthesized)
caggcacacaggagagcccgggagccagcctgtggtgtgtgcccgcagattggcacagcacttgactctgaggcctgtgctagagagcagtgcaaccttcatggggaagcatgagtctgg

SEQ ID NO: 75635 - DNA, 120 bp, Artificial Sequence
  ENSG00000079308_93 (sequence is synthesized)
ggataagaaggcgctggtctaggaaggcatgtgctgttcttggccctggaagcaggattgcttcagtgcttggatgagtctacgggagactgcatcactgccccctgctgtgggaggtca

SEQ ID NO: 75636 - DNA, 120 bp, Artificial Sequence
  ENSG00000079308_94 (sequence is synthesized)
gacactcatgataagggtcaccttctgttgggagagtttagacagttttactgagagctttcaaccacatggtctcattggagtctcacaatagcccaggcaggaaacagggcagggatg

SEQ ID NO: 75637 - DNA, 120 bp, Artificial Sequence
  ENSG00000079308_95 (sequence is synthesized)
gatttattcattcagcaaaatttaaatcatctactatggctccaagcactgagatatctgggtgaacaggaaaaagtcctttcccttggtgagctgatacctaatgagagagatggacat

SEQ ID NO: 75638 - DNA, 120 bp, Artificial Sequence
  ENSG00000079308_96 (sequence is synthesized)
aggctcactcgctgccttcttctgggggaaaccagcttcttgccagccacagctgctgcctccgccactggccaccgcccctgtcctgggagtcccttggcccagacacccacctgactt

SEQ ID NO: 75639 - DNA, 120 bp, Artificial Sequence
  ENSG00000079308_97 (sequence is synthesized)
aaaacaaacataaaaacccaacagaataagtttgccaacctgagtacaggaagacccgtaggagtagttaaattttaactttaaagaaaatttgtctcacctaagaaagaacgaaggtcg

SEQ ID NO: 75640 - DNA, 120 bp, Artificial Sequence
  ENSG00000079308_98 (sequence is synthesized)
agtagccccacttggctcttccctccttcactgctgaggagctgctcattggtccgaggcagctgggactctgggcagagccttcttccggacagctggatggagggtccccctcttagc

SEQ ID NO: 75641 - DNA, 120 bp, Artificial Sequence
  ENSG00000079308_99 (sequence is synthesized)
agagctgctctaacttggggctcagctgggagctggacctcggaacccacctatcctgcctcgtaggcactgcggagccaggagaggggtgcaggggctcctcttcttggagaccccgtg

SEQ ID NO: 75642 - DNA, 120 bp, Artificial Sequence
  ENSG00000079308_100 (sequence is synthesized)
cgagatgacggcatggagggggcccagcaccctcagattggccaagacaccccaccaggcccctccgaccccccaggctgcttgtgaaaagcactcctccatccccgggcgctgagcggc

SEQ ID NO: 75643 - DNA, 120 bp, Artificial Sequence
  ENSG00000079308_101 (sequence is synthesized)
caagcagaaagcagaggctggagcgaatttgttctgaggtttcagtggctgccagcctaattggtcgttgtgctggggatgtttgcatttttaacaagaacatttggcaattggaaagaa

SEQ ID NO: 75644 - DNA, 120 bp, Artificial Sequence
  ENSG00000079308_102 (sequence is synthesized)
caccgcttcaaggtgaagaccttcaagaaggtgaagccctgtgggatctgccgccaggtcatcacccaggaaggctgcacctgcaaagggctggaccaagaatacttgctgaggccctga

SEQ ID NO: 75645 - DNA, 120 bp, Artificial Sequence
  ENSG00000079308_103 (sequence is synthesized)
agtctgcagaggtaggatagcttcccccacgcaggctgctgctcacctcctccgcgctgcgtgcagccatctggcaatcatgaactgagctgtcctctgggtcagatgctgtgccaggtc

SEQ ID NO: 75646 - DNA, 120 bp, Artificial Sequence
  ENSG00000079308_104 (sequence is synthesized)
gccaggtcctggtgctgagagccagccccttacctgggaagacagacacagtcagacaatcatggagcacggtaccaaagctgacacaggtacgtgcgtgcgtgcgtgtgtgtgtgtgtg

SEQ ID NO: 75647 - DNA, 120 bp, Artificial Sequence
  ENSG00000079308_105 (sequence is synthesized)
agatgctggcggagccggagcagccgcggactcagagagcccttctgccagcgccgcggggactctagcttcaggggctcttcacaggccctgggcgtgcctcagtgacgggacccagca

SEQ ID NO: 75648 - DNA, 120 bp, Artificial Sequence
  ENSG00000079308_106 (sequence is synthesized)
cttccctccgtccctccttccctccttccttcccgagcgcggattgcgggctggggtgggaggagatttcgcggagtttccatttcatacctcgcggctaaaactttctttctgtgtctc

SEQ ID NO: 75649 - DNA, 120 bp, Artificial Sequence
  ENSG00000079308_107 (sequence is synthesized)
agaggtcccaaggatggagtcctggaacctcccacattccaaggctacagacaggaggagggaaccagcataggaactggcatggagcagcttgtgaaggagaggaaaggggtacaggct

SEQ ID NO: 75650 - DNA, 120 bp, Artificial Sequence
  ENSG00000079308_108 (sequence is synthesized)
gttggcccgccccctgggctggcctgggagggaacccgactagcagagccctctgctcagttgctcccagcagtggccctgggaccagctctgctccttgcaccccgctccctgcctgga

SEQ ID NO: 75651 - DNA, 120 bp, Artificial Sequence
  ENSG00000079308_109 (sequence is synthesized)
gagccacccagtagtgtctgagtggtgatccactcttgcctgcaatgaggaccaaggcaaaaagagttggctgaatctgcagcaggaaggatgagggttagataccaggaggaaattcct

SEQ ID NO: 75652 - DNA, 120 bp, Artificial Sequence
  ENSG00000079308_110 (sequence is synthesized)
atggaggatgggaacaaacagaataccaatagccagtcaattggaagcatctcaggtggcctggaggatcaatatacctggccagacacacactggccttcccaaagttaggccctccaa

SEQ ID NO: 75653 - DNA, 120 bp, Artificial Sequence
  ENSG00000079308_111 (sequence is synthesized)
aatgtcaagttgccaagccagaatccaaagctttgcactgagaacttcatgttggggctcctgtcccctcctggagccctgcctgggtgacaccccagtccttctattcaggtcctgtgt

SEQ ID NO: 75654 - DNA, 120 bp, Artificial Sequence
  ENSG00000079308_112 (sequence is synthesized)
tcacctctgggaagtgcaggaccctgtggggttttttctttttccttttccaagccaaggaagtgttctggctcctggactctgccctgtggaggggaaagggggagagagagggaaaaa

SEQ ID NO: 75655 - DNA, 120 bp, Artificial Sequence
  ENSG00000079308_113 (sequence is synthesized)
aagatttccaccttattgttcagcagctggaaaattgttgtcatctgttctgccttccatttgctgagaatggaaaaaaaatgtggaaaatttggggaaataaatctcaataccctcata

SEQ ID NO: 75656 - DNA, 120 bp, Artificial Sequence
  ENSG00000079308_114 (sequence is synthesized)
aaccagagaaagtaagactcccctgcctgctcctcggtggggttctccttcctgtgactcatctattcatccgtgtacccacacatttaccacttgattgattccttgcacccaactgct

SEQ ID NO: 75657 - DNA, 120 bp, Artificial Sequence
  ENSG00000079308_115 (sequence is synthesized)
tcactccttccttttatcctgaccctatccccagcacccttccacccctggtctgttccacagtgatcaagttatttttgagaggcaggccatcagtaaaggatctgggtttcagagtgg

SEQ ID NO: 75658 - DNA, 120 bp, Artificial Sequence
  ENSG00000079308_116 (sequence is synthesized)
acccctagctaaacatgaaccagtgacttaatctctggataataaaaataaaaaagcagacagagaggcactgggttggataaactgttctggtcccattaggtcatcagcctgttatat

SEQ ID NO: 75659 - DNA, 120 bp, Artificial Sequence
  ENSG00000079308_117 (sequence is synthesized)
tcagagactgaggtccttggtagatggagggagtggctggcgggcagggggcacacaaaggtgctggatagaagatgtgtatttatgagaactgaggtgattcaacctgaaggctggttt

SEQ ID NO: 75660 - DNA, 120 bp, Artificial Sequence
  ENSG00000079308_118 (sequence is synthesized)
aataataaccttgaagcctctatactggttataagtggagaccagttgttcaccatcttattcgagaatggaatgaaaggagatgaagttaggttatgggcagagggactctggatagac

SEQ ID NO: 75661 - DNA, 120 bp, Artificial Sequence
  ENSG00000079308_119 (sequence is synthesized)
taaagaaaggactgccaagccaggaaggtaactcaccctgacagacttgactaggagctatgctgtctttgagccaggtttttaaaaatttacttatttatttttattttaccttaagtt

SEQ ID NO: 75662 - DNA, 87 bp, Artificial Sequence
  ENSG00000079308_120 (sequence is synthesized)
tttaaaaatttacttatttatttttattttaccttaagttctgggatacacgtgctgaatgtgcagatttgttacataggcatatca

SEQ ID NO: 75663 - DNA, 120 bp, Artificial Sequence
  ENSG00000079308_121 (sequence is synthesized)
caatgctgagctgggttttctgtggatggctgggagattctgccgtgccccctaggtttctgtctggagcggagagcgttttaagagggggcagggccatgcctgggatgaccctttgga

SEQ ID NO: 75664 - DNA, 120 bp, Artificial Sequence
  ENSG00000079308_122 (sequence is synthesized)
ctagtctcttggcactgcctcaggagccccagggacacagaagaaaaagaggcaggtacccagccaggggtcctccccgctttcttccagggggtcttcattcttcagtgcctgtcctga

SEQ ID NO: 75665 - DNA, 120 bp, Artificial Sequence
  ENSG00000079308_123 (sequence is synthesized)
tttacccctatgacccggcatgagccttttcaagaatgtgagaaactagactcccagttctcagtccagcttaagccactggtcccgcccaccacgctcaagaaaatgagaagtccctca

SEQ ID NO: 75666 - DNA, 120 bp, Artificial Sequence
  ENSG00000079308_124 (sequence is synthesized)
gggagcctcttttggggagcttgtgggctttctctgtttttccagctgctgatctcttttccctctctgcactgtctccccgactgccgctgcctttcccatcccacttaggcatggagc

SEQ ID NO: 75667 - DNA, 120 bp, Artificial Sequence
  ENSG00000079308_125 (sequence is synthesized)
ggttggctccttcctgatgttctaggggagaatctgtcccaggcctctctcccagtttcttgtggctgccagcatccttggtgtcccttggcatgtagacgcatcaccccagtctctgcc

SEQ ID NO: 75668 - DNA, 120 bp, Artificial Sequence
  ENSG00000079308_126 (sequence is synthesized)
tgcaccttccatggtgctctcccctgtgtgtatctctgtctcctctccttgtaaggacaccaggcatacaggcatactggattaaggctcaccctaatcctgtgtgacctcatcttaatt

SEQ ID NO: 75669 - DNA, 120 bp, Artificial Sequence
  ENSG00000079308_127 (sequence is synthesized)
gcaaaacgcagtgggaatgtcaagcaggaggcagctcatgtgagctggcagagcggaggaagctttggagaagaggtaccatttgagatggattttgaagtttggcaaggagttttgcgg

SEQ ID NO: 75670 - DNA, 120 bp, Artificial Sequence
  ENSG00000079308_128 (sequence is synthesized)
gacagtcggagggagcttgagtaggacacagacagcacttggagctgcagccatgtaggaattattgggaacttggggcaccaggatcaaatcagagcgggcttccctccgcttcctccc

SEQ ID NO: 75671 - DNA, 80 bp, Artificial Sequence
  ENSG00000079313_0 (sequence is synthesized)
tgagggggccctggggcccgggcggctccgggccggggccccgccgcgggacggaccatgctacgctccactggcttctt

SEQ ID NO: 75672 - DNA, 120 bp, Artificial Sequence
  ENSG00000079313_1 (sequence is synthesized)
ggaccatgctacgctccactggcttcttccgggccattgactgcccctattggtctggggcgcccggggggccctgccggcggccctactgccacttccggcaccgcggggcccggggct

SEQ ID NO: 75673 - DNA, 120 bp, Artificial Sequence
  ENSG00000079313_2 (sequence is synthesized)
ccggcgcgcccggtgacggcggagaggcgccccccgcagcagggctgggttacgacccctacaaccctgagctgcccaagccccccgcgcagagggagaatggcaccctgggcctggggg

SEQ ID NO: 75674 - DNA, 120 bp, Artificial Sequence
  ENSG00000079313_3 (sequence is synthesized)
aggagccgcgcccggatgtgctggagttggagctggtcaaccaggccatcgaggccgtgcgcagtgaggtggagctggagcagcggcgctaccgggagctgctggagacgacccgtgagc

SEQ ID NO: 75675 - DNA, 120 bp, Artificial Sequence
  ENSG00000079313_4 (sequence is synthesized)
accgctccgccgaggcccccgccctggcgccccgcggccccaacgccagccccactgtgggcccggacgaggatgccttcccactggccttcgactacagccccggcagccacggcctat

SEQ ID NO: 75676 - DNA, 120 bp, Artificial Sequence
  ENSG00000079313_5 (sequence is synthesized)
taagccctgatgccggctaccagcccaccccactggccgcccctgccgagccgggcagcaagtactcgctggcgtccctggacaggggtcagggcagaggtggagggggtggcggtgccc

SEQ ID NO: 75677 - DNA, 120 bp, Artificial Sequence
  ENSG00000079313_6 (sequence is synthesized)
tggaatacgtccccaaggctgtgagccagccccggcggcacagccgccccgttcccagtggcaagtacgtggtggacaactccaggccacccacagacctggagtatgaccctctctcca

SEQ ID NO: 75678 - DNA, 120 bp, Artificial Sequence
  ENSG00000079313_7 (sequence is synthesized)
actactcggcccggcacctcagcagggccagctcccgggatgagcgggccgccaagcggccccggggctcccgcggcagtgagccctacacacctgctcccaagaagctctgtgacccct

SEQ ID NO: 75679 - DNA, 120 bp, Artificial Sequence
  ENSG00000079313_8 (sequence is synthesized)
ttggcagttgcgatgcaaggttctcagactcagaagatgaggccgccacggtcccaggtaacgagcccaccacggccagcacccccaaagccagggccgaccctgagatcaaggccaccg

SEQ ID NO: 75680 - DNA, 120 bp, Artificial Sequence
  ENSG00000079313_9 (sequence is synthesized)
ggcagccaccctccaaagagggcctggaggccgaggggggcggcctgcgggagaccaaggagacggccgtgcagtgcgacgtgggggacctccagccgcccccagccaagcccgcctccc

SEQ ID NO: 75681 - DNA, 120 bp, Artificial Sequence
  ENSG00000079313_10 (sequence is synthesized)
cagcccaggtccagtcctcacaggatgggggctgccccaaggagggaaaacccaagaagaaaaaaaccggggccccacctgcccccagctgcaaagacggggcccaggggaaggacaaga

SEQ ID NO: 75682 - DNA, 120 bp, Artificial Sequence
  ENSG00000079313_11 (sequence is synthesized)
ccaaggacaagggccgagggcggcctgtggagaagccccgtgcggacaagaagggcccgcaggccagcagcccccggcgcaaggcagagcggccggaagggaccaagaagaagccatctt

SEQ ID NO: 75683 - DNA, 120 bp, Artificial Sequence
  ENSG00000079313_12 (sequence is synthesized)
tcttcggccactcctgtggccacctcagggaaagggaggcctgaccggccagcgcggcggccgagccccacaagcggggactcccgaccggcggccggcagaggcccaccccgccccctc

SEQ ID NO: 75684 - DNA, 120 bp, Artificial Sequence
  ENSG00000079313_13 (sequence is synthesized)
tgcccgacaggaagagcaccaaggccccgtcggggaagctagtggagcggaaagcccgctcactagacgagggcgcctcccaggacgcccccaagctgaagaagcgggccctgagccacg

SEQ ID NO: 75685 - DNA, 120 bp, Artificial Sequence
  ENSG00000079313_14 (sequence is synthesized)
ccgacctctttggggacgagagtgaggacgaggccgcagggccaggggtgccgagcgtgtggccctctgccctccccagcctcagctcggactcagactccgactcagactccagcctgg

SEQ ID NO: 75686 - DNA, 120 bp, Artificial Sequence
  ENSG00000079313_15 (sequence is synthesized)
gcttcccggaggcgcaggggccgcccaagcggctcaaggcctccccgcccccctcccccgccccatcctcctcctcctcctcctcctcctccacctccagcgcgggggcggatgtggact

SEQ ID NO: 75687 - DNA, 120 bp, Artificial Sequence
  ENSG00000079313_16 (sequence is synthesized)
actcggccctggagaaggaggtggactttgactccgaccccatggaggagtgcctgcggatcttcaacgagtccaccagcgtcaagacggaggacagaggccggctggcccggcagcccc

SEQ ID NO: 75688 - DNA, 120 bp, Artificial Sequence
  ENSG00000079313_17 (sequence is synthesized)
ccaaggaagagaagagtgaggagaaggggctttcgggtctgaccactctgttccccgggcagaagaggaggatctcccacctttccaagcaaggccaggaggtggagcccccgaggaggg

SEQ ID NO: 75689 - DNA, 120 bp, Artificial Sequence
  ENSG00000079313_18 (sequence is synthesized)
gtgcccccggcccggcccccgacggcgcaggaggtgtgctacctgcgggcccagcaggcgcagagggcatcggcgagcttgctgcaggcccccgccaggctggcagagaagtcgccctcc

SEQ ID NO: 75690 - DNA, 120 bp, Artificial Sequence
  ENSG00000079313_19 (sequence is synthesized)
catccccaacccccgcctggctgcagcccccacaggtgccaagaggacccttgcggccagcggcagccagtcctccaacggccctgagccaggtggccagcagctgaaaacacgcacatt

SEQ ID NO: 75691 - DNA, 120 bp, Artificial Sequence
  ENSG00000079313_20 (sequence is synthesized)
gtcggggatggcgtccaagactaccaccaccatcatccctaagcgaatcgcccacagtccatccttacagagtttaaagaaacccattatccccaaagagtttgggggcaaagtccccac

SEQ ID NO: 75692 - DNA, 120 bp, Artificial Sequence
  ENSG00000079313_21 (sequence is synthesized)
cgtcatccgccagcgctatctcaacctgttcatcgaggagtgtctcaagttctgtacctccaaccaggaggccatagagaaggcactgaacgaggagaaggtggcctatgaccgcagccc

SEQ ID NO: 75693 - DNA, 120 bp, Artificial Sequence
  ENSG00000079313_22 (sequence is synthesized)
cagcaagaacatctacctgaatgtggccgtgaacaccctcaagaagctcaggggcctggcccccagcgctgtgcccggcctcagcaaaaccagtggccgcagggttgtgtcccacgaggt

SEQ ID NO: 75694 - DNA, 120 bp, Artificial Sequence
  ENSG00000079313_23 (sequence is synthesized)
ggtgttggggggcaggttggccgccaagaccagcttctcgctcagccgtccaagcagcccccgggtggaggacctgaaaggggctgccctgtacagccgcctcagggagtacctgctcac

SEQ ID NO: 75695 - DNA, 120 bp, Artificial Sequence
  ENSG00000079313_24 (sequence is synthesized)
gagaacggctaccccttcccgcacccagagcggcccgggggcgcaatcatcttcacagctgaggagaagaggcccaaggactcttcctgcaggacctgctgccgctgtggcaccgagtac

SEQ ID NO: 75696 - DNA, 120 bp, Artificial Sequence
  ENSG00000079313_25 (sequence is synthesized)
ctgtggcaccgagtacctcgtgtcctcttcaggccgctgcatccgggacgaggagtgttattaccactggggacggctgcgccggaaccgggtggccggaggctgggagacccagtacat

SEQ ID NO: 75697 - DNA, 120 bp, Artificial Sequence
  ENSG00000079313_26 (sequence is synthesized)
gtgctgctcggctgccgccggctctgtcggctgccaagtcgcaaagcaacacgtgcaggatggccggaaggagcgccttgagggcttcgtgaagacctttgagaaagagctctcaggaga

SEQ ID NO: 75698 - DNA, 120 bp, Artificial Sequence
  ENSG00000079313_27 (sequence is synthesized)
cacccacccggggatctacgccctggactgcgagatgtcctacaccacatatggcctggagctgacgcgcgtcacggtggtcgacacggacgtgcacgtggtttatgacaccttcgtgaa

SEQ ID NO: 75699 - DNA, 120 bp, Artificial Sequence
  ENSG00000079313_28 (sequence is synthesized)
gcctgacaacgagatcgtggactacaacaccaggttttcgggggtgacggaggctgaccttgccgacacaagtgtcacgctgcgtgacgtccaggccgttctgctgagcatgttcagcgc

SEQ ID NO: 75700 - DNA, 120 bp, Artificial Sequence
  ENSG00000079313_29 (sequence is synthesized)
tgacaccatcctcatcggacacagcctggagagcgacctcctggccctgaaggtcatccacagcaccgtggtggacacgtctgtgctcttcccccaccgcctgggcctcccctacaagcg

SEQ ID NO: 75701 - DNA, 120 bp, Artificial Sequence
  ENSG00000079313_30 (sequence is synthesized)
gtccctgcggaacctcatggccgactacctcagacagatcatccaggacaatgtggatgggcacagctccagcgaggacgccggcgcctgcatgcacctggtgatctggaaggttcgaga

SEQ ID NO: 75702 - DNA, 120 bp, Artificial Sequence
  ENSG00000079313_31 (sequence is synthesized)
agacgccaagaccaagcgatgacgcctgcccgcctcccacccgcctctcctgccgtcccgctggtccttagccccatgcctcttccaaaacagtgcaataaatctccggtaacccgtcca

SEQ ID NO: 75703 - DNA, 120 bp, Artificial Sequence
  ENSG00000079313_32 (sequence is synthesized)
cctggccgaggcagcccagagcagcgggatgagctggcggccagagaacgcccagcccagcccacccccgctcacgtcctgccgcacccctccgccggtccccaccctctgccccccagc

SEQ ID NO: 75704 - DNA, 120 bp, Artificial Sequence
  ENSG00000079313_33 (sequence is synthesized)
cctctggcgtctctagaaactgctgctgatggagaccaggacagagcccgcccccacccggcccgcagcccctcctgcccctcctgccaggccctccctcccgggtggtggccggcacct

SEQ ID NO: 75705 - DNA, 120 bp, Artificial Sequence
  ENSG00000079313_34 (sequence is synthesized)
ctgctcctcacgtgggtcgcggggcgggcttgtcccaggtttgtttgagacagtctttttttattttgtattgttatttttattatttttaatttaaacctgatgacttgcacagcatct

SEQ ID NO: 75706 - DNA, 120 bp, Artificial Sequence
  ENSG00000079313_35 (sequence is synthesized)
ttcccaccgggaagagcgggcctgctgccttccctcctgcggggtgggggtgggacagaccccagtgggggccagggccacactcagcgcagtgtgggctggacccgcctctgtgctcca

SEQ ID NO: 75707 - DNA, 120 bp, Artificial Sequence
  ENSG00000079313_36 (sequence is synthesized)
ggggctggccggtcttcgggggcgccggcttccaccactcgccgccccacccctgcactccgtgacctctgagaacccagctggcccctcgttagccccagggtctgccgtctagaggga

SEQ ID NO: 75708 - DNA, 120 bp, Artificial Sequence
  ENSG00000079313_37 (sequence is synthesized)
gcccaccggcctccggacactgtcttcccgctagagccccgtcctcctctgcggggctctccggacccccttccccctcacctccaggcagggacagaataaatgtttgtatggatttta

SEQ ID NO: 75709 - DNA, 120 bp, Artificial Sequence
  ENSG00000079313_38 (sequence is synthesized)
aatgagcaggtgggggcacccgagacccttcggtcctctgtccgggagccagggcctttccctcagacatcgacgccttgggcttggggtcagaacacgtggcagaggcctggaccaccc

SEQ ID NO: 75710 - DNA, 120 bp, Artificial Sequence
  ENSG00000079313_39 (sequence is synthesized)
caccggtgacgtgtcctcagcggcctccgcagcctgacctgtgtcctctgcctcgatggacttgcctgaaggcagctagagcctgatgccattgcgcagccccagcccctcaccctggcc

SEQ ID NO: 75711 - DNA, 120 bp, Artificial Sequence
  ENSG00000079313_40 (sequence is synthesized)
cggccccctgcacgcggagatgcacgtgctgctggcgctgagcggccgcggctgcctggtgctccgccacgtggtgatgggcagccactcgccctgtgcccacaccccctgtgccccgcc

SEQ ID NO: 75712 - DNA, 120 bp, Artificial Sequence
  ENSG00000079313_41 (sequence is synthesized)
agcagtgaaggctgcaccagacgcatctgtacctgccctgtgcggtctgtctgtggcacgggttctgaggattccgagtctgaaggtggtggtgttgaagctgcatgggatggttgcgaa

SEQ ID NO: 75713 - DNA, 120 bp, Artificial Sequence
  ENSG00000079313_42 (sequence is synthesized)
agtgaatgggcgtgatggatggataggatggtcccgaagggctcagagatgtgctgctgctgccacccccgcccccactgcaccccgaagctgccctcacctgccttctccacccccagc

SEQ ID NO: 75714 - DNA, 120 bp, Artificial Sequence
  ENSG00000079313_43 (sequence is synthesized)
tgcctgccctggggccgtccctgcgcaggggccgggtgctcaccgcatctgccccgcagtggatgggcacagctccagcgaggacgccggcgcctgcatgcacctggtgatctggaaggt

SEQ ID NO: 75715 - DNA, 120 bp, Artificial Sequence
  ENSG00000079332_0 (sequence is synthesized)
cctgttactttcacttggagaatagggaggcttggggtgggggcaggactgtggaggaagtcaagtttgctgtcttctatggttgtggtttgtggcacaacaaaacaattatactagtaa

SEQ ID NO: 75716 - DNA, 120 bp, Artificial Sequence
  ENSG00000079332_1 (sequence is synthesized)
taccaaagatcactgatcatagatcatgatgacagatataagaataatgaaaaagtttgaaatattgtgtgagaattaccaaaatgtaacatagagacatgaagggagcacatgctgtta

SEQ ID NO: 75717 - DNA, 120 bp, Artificial Sequence
  ENSG00000079332_2 (sequence is synthesized)
gaagatggtactgatacacttactcaactcagggctgcttccaaccttcaatttgtaaaaaaaccagaaaacctcaggatccacaaagtatcatcaaatgaggtagtaagcattaataat

SEQ ID NO: 75718 - DNA, 120 bp, Artificial Sequence
  ENSG00000079332_3 (sequence is synthesized)
gtctttcatctttgagtggatctacaatggcttcagcagtgtgctccagttcctaggactgtacaagaaatctggaaaacttgtattcttaggtttggataatgcaggcaaaaccactct

SEQ ID NO: 75719 - DNA, 120 bp, Artificial Sequence
  ENSG00000079332_4 (sequence is synthesized)
tcttcacatgctcaaagatgacagattgggccaacatgttccaacactacatccgacatcagaagagctaacaattgctggaatgacctttacaacttttgatcttggtgggcacgagca

SEQ ID NO: 75720 - DNA, 120 bp, Artificial Sequence
  ENSG00000079332_5 (sequence is synthesized)
agcacgtcgcgtttggaaaaattatctcccagcaattaatgggattgtctttctggtggactgtgcagatcattctcgcctcgtggaatccaaagttgagcttaatgctttaatgactga

SEQ ID NO: 75721 - DNA, 120 bp, Artificial Sequence
  ENSG00000079332_6 (sequence is synthesized)
tgaaacaatatccaatgtgccaatccttatcttgggtaacaaaattgacagaacagatgcaatcagtgaagaaaaactccgtgagatatttgggctttatggacagaccacaggaaaggg

SEQ ID NO: 75722 - DNA, 120 bp, Artificial Sequence
  ENSG00000079332_7 (sequence is synthesized)
gaatgtgaccctgaaggagctgaatgctcgccccatggaagtgttcatgtgcagtgtgctcaagaggcaaggttacggcgagggtttccgctggctctcccagtatattgactgatgttt

SEQ ID NO: 75723 - DNA, 120 bp, Artificial Sequence
  ENSG00000079332_8 (sequence is synthesized)
ggacggtgaaaataaaagagttttacttctctggactgatcctattcacagcttcctcatgaacttttctaatagaacaaggaaagctctccaaccatgtctggcgttgagaagccaaga

SEQ ID NO: 75724 - DNA, 120 bp, Artificial Sequence
  ENSG00000079332_9 (sequence is synthesized)
gtctctgtcaactctctcattgcccagtggtgacatgtgctcttctccacactgttgggaggtaatgctgccccacgtgctggtgcaggtcagtatcctgggacttggaagctggcagga

SEQ ID NO: 75725 - DNA, 120 bp, Artificial Sequence
  ENSG00000079332_10 (sequence is synthesized)
tttgccgggtaaagctgtatgccatcatggggcacctgaaaagaaaaacacgtctcaccactgtggttgattcaaaagaaagtgattctattttttaaagaaagcgttgttaatgtaatt

SEQ ID NO: 75726 - DNA, 120 bp, Artificial Sequence
  ENSG00000079332_11 (sequence is synthesized)
ggtatccctcctaactttttgagttcacaatttacttggtccagagttttctattcttttttttttttaaactaatgaatgacatttagatacttcataaaattatgaacagatatggag

SEQ ID NO: 75727 - DNA, 120 bp, Artificial Sequence
  ENSG00000079332_12 (sequence is synthesized)
gccagagctcatttgggtaaacttactcctgctgagttagcaggttggtgagagaagctcccctgagctcacctgtctctctgactgccttggagtaggtggcataaccttgtgcacaga

SEQ ID NO: 75728 - DNA, 120 bp, Artificial Sequence
  ENSG00000079332_13 (sequence is synthesized)
gaggagttaattatagaatgggttattgttgttattcttactcatgaagttacagattttagccagtctttgcttttatacttttgtgaaatttaatttctctctatagcaccttccttt

SEQ ID NO: 75729 - DNA, 120 bp, Artificial Sequence
  ENSG00000079332_14 (sequence is synthesized)
ttcgttttcagttatcaaaagtgactttgacctcataaaagagttgagaacatctctcgtgtcacatactgcaggtgcatcagttacttttgcacagattctagggggacatttttctga

SEQ ID NO: 75730 - DNA, 120 bp, Artificial Sequence
  ENSG00000079332_15 (sequence is synthesized)
ataggaagacaggacaaagttaacagcttaagggctcttaattctgtgagttgaggacttaaaagtattgtagcatttgtttggatccatgaaaaatgtattcagtgggctttaaaattt

SEQ ID NO: 75731 - DNA, 120 bp, Artificial Sequence
  ENSG00000079332_16 (sequence is synthesized)
ccatttgcagaatttggtctctcaggctgtttgggagctcttttttttacattttttctcctttgacacctattttattggtgtttaaagtaaaggttaacatctgtagcttttccaggt

SEQ ID NO: 75732 - DNA, 120 bp, Artificial Sequence
  ENSG00000079332_17 (sequence is synthesized)
ttttttttttttttttttttggtatgaaattgtctttctccattgcagaaataagctagggaaacactaacccaaaaactttctgtagagctgttcctttggaggcagcatcacttattg

SEQ ID NO: 75733 - DNA, 120 bp, Artificial Sequence
  ENSG00000079332_18 (sequence is synthesized)
attggcagtaaagactcagtataaaagcaccggcatccctacttgggtgatggggattaattttatagcattccattttcctagtgccacatgtgaaattggattttgatgatcttaatc

SEQ ID NO: 75734 - DNA, 120 bp, Artificial Sequence
  ENSG00000079332_19 (sequence is synthesized)
tatattctacccttataataaaagatcaaaagatatatctcctatgaacagattggagataggagatgaaaagttgggaggatgtctttattctaatgtgagggtagggaaaatgtggat

SEQ ID NO: 75735 - DNA, 120 bp, Artificial Sequence
  ENSG00000079332_20 (sequence is synthesized)
aacattactggggtgagggaggcattgttctttagttggagttctcattcttattctccagtactgacttgtggggaaagcatactttttcactgccaggtactgaatgcagaggctcag

SEQ ID NO: 75736 - DNA, 120 bp, Artificial Sequence
  ENSG00000079332_21 (sequence is synthesized)
tgaagtatatatgtgggaagtgcatgcatttcgtttattagcaaacatagctggattaagacaaagttgttggtttggaaaggggttaaagccttaagtgaacaaatctagctaacagtg

SEQ ID NO: 75737 - DNA, 120 bp, Artificial Sequence
  ENSG00000079332_22 (sequence is synthesized)
aatgaactaggtaatataacttgcatatttttaatttcctttggttaaaggtcccccatacttctctgttcggagacatgagaagtatgattacttcagtgttagttttcttaatttttt

SEQ ID NO: 75738 - DNA, 120 bp, Artificial Sequence
  ENSG00000079332_23 (sequence is synthesized)
ttttcccctatttgtcccttgtcactttgttgcaagctagaaatctgtgggttatacatagggcagctctttgtgaaagtggtttattccactggagaaaggggattgaaaatcagttag

SEQ ID NO: 75739 - DNA, 120 bp, Artificial Sequence
  ENSG00000079332_24 (sequence is synthesized)
aaccaatgtatttcttgccccacggaacactattcctataagatagctgaaagaagctgctgtgaggagctcagctccaaacacaggatcagcaccttgtataggaattcccatgaatta

SEQ ID NO: 75740 - DNA, 120 bp, Artificial Sequence
  ENSG00000079332_25 (sequence is synthesized)
tgacttctcattctgttttatcagagtgcatatatgtcctacttcaggaaaagtaaaacagtcatttacgaaagaaagtcaatctgtatcctaagcattttaataaaaagttaaaacaaa

SEQ ID NO: 75741 - DNA, 120 bp, Artificial Sequence
  ENSG00000079332_26 (sequence is synthesized)
gtacatccggcgagtagctggcggtcccgggtgctgctggttagtgtgctctgagggagggtccgagccagccgctgttttgccggaggagcccctcaggccgtagtaagcattaataat

SEQ ID NO: 75742 - DNA, 120 bp, Artificial Sequence
  ENSG00000079332_27 (sequence is synthesized)
tctgagctctgagtttgaacaatgccgtttatttggggaggcaaccaaaagttccctgcatagaggaagagacatttagggtgcgtgtgagatacttgaattttgccaccaggaggggga

SEQ ID NO: 75743 - DNA, 120 bp, Artificial Sequence
  ENSG00000079332_28 (sequence is synthesized)
aaaaggctggggtactagaagtaatagatttagtactacttgagagatttggaacatgctgtggacccagggttgttggtcatctctgcaacaggatggggatggcagatgtttgagcaa

SEQ ID NO: 75744 - DNA, 120 bp, Artificial Sequence
  ENSG00000079332_29 (sequence is synthesized)
aatctatattaacatgctagcaaggactagttctagtttagctgtgtttcactcattttacacagaattagaattggccaggtgtggtggctcacgctgtaatcctagcactttgggagg

SEQ ID NO: 75745 - DNA, 89 bp, Artificial Sequence
  ENSG00000079332_30 (sequence is synthesized)
agcctggggaacagggtgaaaccccatcatgtggtacatggagtagctcccagctactctggaggctgaggcggagaatcgcttgaact

SEQ ID NO: 75746 - DNA, 120 bp, Artificial Sequence
  ENSG00000079332_31 (sequence is synthesized)
atggagtagctcccagctactctggaggctgaggcggagaatcgcttgaactaggaggtggagattgaagtgagccgagatcatgccactgtactcctgcctgggtgacagagcaagact

SEQ ID NO: 75747 - DNA, 120 bp, Artificial Sequence
  ENSG00000079332_32 (sequence is synthesized)
aaaaaaaaaaaaaaaaatcaattaaatgctacatttggcaaaatgagaaagaaagaatttcctttactaggcttgtaggaagactgcttttacaaaaacccaaatgagatcataaaacta

SEQ ID NO: 75748 - DNA, 120 bp, Artificial Sequence
  ENSG00000079332_33 (sequence is synthesized)
caaatgagatcataaaactaaagtactgggacaaacagtgggaaacagtgcaatgggttcttttcaaccaagtattaaagtattggagatattgccgggcgcggtggctcacgtctgtaa

SEQ ID NO: 75749 - DNA, 83 bp, Artificial Sequence
  ENSG00000079332_34 (sequence is synthesized)
gggcgcggtggctcacgtctgtaatcctagcgctttgggaggccaaggcgggcgggtcacagagctccgtctctactaaaaat

SEQ ID NO: 75750 - DNA, 61 bp, Artificial Sequence
  ENSG00000079332_35 (sequence is synthesized)
cccatctcaaaaaaaataaaaagtactggaggtgtcctgttgtccttgttactgtgaaagg

SEQ ID NO: 75751 - DNA, 120 bp, Artificial Sequence
  ENSG00000079332_36 (sequence is synthesized)
agtactggaggtgtcctgttgtccttgttactgtgaaaggatgccatgggttgtatgggcaaatgagttgttttgtttgaggcagagtggaaaataagattaggctcagtccatgagcct

SEQ ID NO: 75752 - DNA, 120 bp, Artificial Sequence
  ENSG00000079332_37 (sequence is synthesized)
agcactcaacagatcttactttggcgttctggctgtgacttgggacttctttttaccatggtctgctgtaaacacagaaaaacccaatgcctaacagttcatgctggagtcttgagcgtt

SEQ ID NO: 75753 - DNA, 86 bp, Artificial Sequence
  ENSG00000079332_38 (sequence is synthesized)
aacccaatgcctaacagttcatgctggagtcttgagcgttgagggagaatcactggactcgagagagaaattggtctcactctgtc

SEQ ID NO: 75754 - DNA, 86 bp, Artificial Sequence
  ENSG00000079332_39 (sequence is synthesized)
tgggaccacagggttgcaccaccgtgctcagctagttttcaaaatttttgtagagttaaggtctcatcatgttgcccaggctggtc

SEQ ID NO: 75755 - DNA, 120 bp, Artificial Sequence
  ENSG00000079332_40 (sequence is synthesized)
ggctggtctcaaactcctgggctcaggaaattctcctacctcagcctcccaacgtgctgggattccaagtgtgagcccctgtgctccaccaagagaaaaactctttgattgctaggaagt

SEQ ID NO: 75756 - DNA, 120 bp, Artificial Sequence
  ENSG00000079332_41 (sequence is synthesized)
ttgctaggaagttgggataaagaaattgtgctgtgatcaagccaccttctgtgtcatagaaccaaaagaagaccgcctgctatggcaagatggcctaattttattcctgcctcatactat

SEQ ID NO: 75757 - DNA, 120 bp, Artificial Sequence
  ENSG00000079332_42 (sequence is synthesized)
catggataatcgttttcctttctctagcaggtttgtgtcactgggagtactgggagcattatcctgtgttgtgctggggttataccaagcagtgttaactttatttaaagaattcaggca

SEQ ID NO: 75758 - DNA, 120 bp, Artificial Sequence
  ENSG00000079332_43 (sequence is synthesized)
aactttatttaaagaattcaggcagaaagattagagaatttaagtagcaattgtatatggtaagcaatacagtaaccttaataaaaattaatgatggccgggtacggtggctcacgcctg

SEQ ID NO: 75759 - DNA, 120 bp, Artificial Sequence
  ENSG00000079332_44 (sequence is synthesized)
aaataaataaataaaaaataatgtgtattttatcaattcagtgataaagcagacctttgtaaactgtctagcttgtggtgactgattgagggtatcatgaagctccgcgcccccccactc

SEQ ID NO: 75760 - DNA, 120 bp, Artificial Sequence
  ENSG00000079332_45 (sequence is synthesized)
cccgacatactcgttcatcctcctctgtcctaaagcgtacttctttggaaaagtagagcagtttatgttagtgtacactagagatggtaaactatgccttgtgggtcaaatcgggcctgc

SEQ ID NO: 75761 - DNA, 120 bp, Artificial Sequence
  ENSG00000079332_46 (sequence is synthesized)
tgcctgtgtttgtatggcctgtgagcaaagaaaggtttttacatatttaaatggttggaaaaaatatttaaagaatgctatttttggacacaaaaaattgtatgaaattaaaatttcaat

SEQ ID NO: 75762 - DNA, 120 bp, Artificial Sequence
  ENSG00000079332_47 (sequence is synthesized)
gtctgtatctttttattgggacacagccaccgccattcctttagcttttgtatgcaacagctgcagagttgactatttgagacaagttgtatggtccccccaaactggaactgtttccat

SEQ ID NO: 75763 - DNA, 120 bp, Artificial Sequence
  ENSG00000079332_48 (sequence is synthesized)
tctggccttctacagaaagtatttggaccctggcctagataaatcctggctggtggttatgttatgtgaaatgtgcacactgtaaaatataggcctgtatgattaaaatttttgatttca

SEQ ID NO: 75764 - DNA, 120 bp, Artificial Sequence
  ENSG00000079332_49 (sequence is synthesized)
gggtgtgacgtacatccggcgagtagctggcggtcccgggtgctgctggttagtgtgctctgagggagggtccgagccagccgctgttttgccggaggagcccctcaggccggctgcttc

SEQ ID NO: 75765 - DNA, 120 bp, Artificial Sequence
  ENSG00000079332_50 (sequence is synthesized)
gaagtcccaaaagccaactcatacgagaaagttccctgtaagacacactcaggttatgtactttcagatctaaacctctggaactttgtcattatctgttgtcactggtcctgtaaaggg

SEQ ID NO: 75766 - DNA, 120 bp, Artificial Sequence
  ENSG00000079332_51 (sequence is synthesized)
acacctctcctatacctacttctaagaagtggaaaatagcttggaagaaaagaaacctttggcttttagaatagtttaagaacatttcacccttgtattccttttctttgttgggagtgg

SEQ ID NO: 75767 - DNA, 120 bp, Artificial Sequence
  ENSG00000079332_52 (sequence is synthesized)
acatccggcgagtagctggcggtcccgggtgctgctggttagtgtgctctgagggagggtccgagccagccgctgttttgccggaggagcccctcaggccgttcaagcgtttctcctgcc

SEQ ID NO: 75768 - DNA, 120 bp, Artificial Sequence
  ENSG00000079335_0 (sequence is synthesized)
agagtaactgctgaaaggaggtggcgaaggaggatccggagcagctgctgccagcccgcgggcactgaagtcctcccggctgccgctcgagtagccacgggcgcgatcgggaccagaagt

SEQ ID NO: 75769 - DNA, 120 bp, Artificial Sequence
  ENSG00000079335_1 (sequence is synthesized)
ctcctcctccatgatcactttggaagccgggggaagactttgccctgccctgagagctggtctgcgtttcccaggcgcggcggcggcggagcagcagctgcagcagccgagtccaaatag

SEQ ID NO: 75770 - DNA, 120 bp, Artificial Sequence
  ENSG00000079335_2 (sequence is synthesized)
ccaaataggagcggccacagccaggggcgtgagcgccccgcgcggagcgagctcgggttcccctcggaatgtccccggggcgcccggcgcgctgaccccgaagccgcctccgccttcggc

SEQ ID NO: 75771 - DNA, 120 bp, Artificial Sequence
  ENSG00000079335_3 (sequence is synthesized)
cctccctcggccaggcttgttgttcgggactgtgagcttcctggctcctgggcagtggggaagcccccgggggcgagtgacttcagctggccacgacccagccctcccccgtgcgtatct

SEQ ID NO: 75772 - DNA, 120 bp, Artificial Sequence
  ENSG00000079335_4 (sequence is synthesized)
cgcttaagatggcagcggagtcaggggaactaatcggggcttgtgagttcatgaaagatcggttatattttgctactttaaggaatagaccaaaaagcacagtaaatacccactatttct

SEQ ID NO: 75773 - DNA, 120 bp, Artificial Sequence
  ENSG00000079335_5 (sequence is synthesized)
ccatcgatgaggagctggtctatgaaaatttctatgcagattttggaccgctgaacttggcaatggtgtacagatattgctgcaaactaaacaagaaactaaaatcatacagtttgtcaa

SEQ ID NO: 75774 - DNA, 120 bp, Artificial Sequence
  ENSG00000079335_6 (sequence is synthesized)
gaaagaaaatagtgcactacacctgttttgaccaacggaaaagagcaaatgcagcatttttgataggtgcctatgcagtaatctatttaaagaagacaccagaagaagcctacagagcac

SEQ ID NO: 75775 - DNA, 120 bp, Artificial Sequence
  ENSG00000079335_7 (sequence is synthesized)
tcctgtctggctcaaaccccccctatcttccattcagggatgcttcctttggaaattgcacttacaatctcaccattctcgactgtttgcagggaatcagaaagggattacaacatggat

SEQ ID NO: 75776 - DNA, 120 bp, Artificial Sequence
  ENSG00000079335_8 (sequence is synthesized)
tttttgactttgagacatttgatgtggatgaatatgaacattatgagcgagttgaaaatggtgacttcaactggattgttccaggaaaatttttagcatttagtggaccacatcctaaaa

SEQ ID NO: 75777 - DNA, 120 bp, Artificial Sequence
  ENSG00000079335_9 (sequence is synthesized)
gcaaaattgagaatggttatcctcttcacgcccctgaagcctactttccttatttcaaaaagcataatgtgactgcagttgtgaggctaaacaaaaagatttatgaggcaaagcgcttca

SEQ ID NO: 75778 - DNA, 120 bp, Artificial Sequence
  ENSG00000079335_10 (sequence is synthesized)
cacacccagtgacaacatcgtgcgaaggttcctgaacatctgtgagaacaccgaaggggccatcgccgttcactgcaaagctggtcttggaagaacagggacattgatagcctgttatgt

SEQ ID NO: 75779 - DNA, 120 bp, Artificial Sequence
  ENSG00000079335_11 (sequence is synthesized)
aatgaaacactacaggtttacacatgctgaaataattgcttggattagaatatgccggccaggctctattataggaccccagcagcacttcctggaagaaaaacaagcatcgttgtgggt

SEQ ID NO: 75780 - DNA, 120 bp, Artificial Sequence
  ENSG00000079335_12 (sequence is synthesized)
ccaaggagacattttccgatccaaactgaaaaatcgaccatccagtgaaggaagtattaataaaattctttctggcctagatgatatgtctattggtggaaatctttcaaaaacacaaaa

SEQ ID NO: 75781 - DNA, 120 bp, Artificial Sequence
  ENSG00000079335_13 (sequence is synthesized)
catggaacgatttggagaggataacttagaagatgatgatgtggaaatgaaaaatggtataacccagggagacaaactacgtgccttaaaaagtcagagacagccacgtacctcaccatc

SEQ ID NO: 75782 - DNA, 120 bp, Artificial Sequence
  ENSG00000079335_14 (sequence is synthesized)
ctgtgcatttaggtcagatgatacaaaaggacatccaagagcagtgtcccagcctttcagattaagttcatccctgcaaggatctgcagttactttgaagacatcaaaaatggcactgtc

SEQ ID NO: 75783 - DNA, 120 bp, Artificial Sequence
  ENSG00000079335_15 (sequence is synthesized)
cccttcagcaacggccaagaggatcaacagaacttctttgtcttcgggtgccactgtaagaagcttttccataaactcccggctagccagttctctagggaacttgaatgctgcaacaga

SEQ ID NO: 75784 - DNA, 120 bp, Artificial Sequence
  ENSG00000079335_16 (sequence is synthesized)
tgatccagagaacaaaaagacctcctcatcctctaaggcaggcttcacagccagcccgtttaccaacctcttgaatggcagctcccagccaactaccagaaattaccctgagctcaacaa

SEQ ID NO: 75785 - DNA, 120 bp, Artificial Sequence
  ENSG00000079335_17 (sequence is synthesized)
taatcagtacaacagaagcagcaacagcaacgggggcaacctgaacagccccccaggcccccacagcgccaagacagaggagcacaccaccatcctccgaccctcctacaccgggctttc

SEQ ID NO: 75786 - DNA, 120 bp, Artificial Sequence
  ENSG00000079335_18 (sequence is synthesized)
ttcttcttcagcgagattcctgagccgttctatccctgtaagtgcgcagacaccacctcctggtcctcagaaccctgaatgcaacttctgtgccttgccttcccagccgaggctgccacc

SEQ ID NO: 75787 - DNA, 120 bp, Artificial Sequence
  ENSG00000079335_19 (sequence is synthesized)
aaagaaatttaatagtgccaaggaagccttctgagcgatgccttccctctgtgctgtgaaactgtctatgcactacattctgctagctcctcttcaagtaaacgccaagtcacaactggg

SEQ ID NO: 75788 - DNA, 120 bp, Artificial Sequence
  ENSG00000079335_20 (sequence is synthesized)
ccgttctatcccttcccttcagtctgaatatgttcattactaaggccttgccactccagtgaaagctgttcttctcttagacacaatttcttcatctggacgagcagtggagagggaaag

SEQ ID NO: 75789 - DNA, 120 bp, Artificial Sequence
  ENSG00000079335_21 (sequence is synthesized)
caacttcttgctggaagaatatctctgccttcttaccttaaattaaaaagagcactaagataacaccttcaagagacttgaaaacagaaaactggttaatgactactataaatgcactga

SEQ ID NO: 75790 - DNA, 120 bp, Artificial Sequence
  ENSG00000079335_22 (sequence is synthesized)
aactatgtttatggagatttccatacttttaaagacagttttaatgttgaatttggtattttgaagggttatttttaatgtattttggtaatacatttattattatatttacatgtacag

SEQ ID NO: 75791 - DNA, 80 bp, Artificial Sequence
  ENSG00000079335_23 (sequence is synthesized)
tgtaaaaactacactatattttgatttagattttcctgctgtttgctaccaaaaatttgtattttaaatctgtttagttt

SEQ ID NO: 75792 - DNA, 120 bp, Artificial Sequence
  ENSG00000079335_24 (sequence is synthesized)
aaatttgtattttaaatctgtttagttttagtatggttttgtctctaatgaataaataattccttcttattaagaagaagtaagggagaaagtttttagaaagtgatttttatgctcgca

SEQ ID NO: 75793 - DNA, 120 bp, Artificial Sequence
  ENSG00000079335_25 (sequence is synthesized)
ctataaatatggcaggtcagttcattcttttgggaagtcagtttagttacactgagtttatccaagtttatctctaccaagagtataatggcatgggatggcttatttaggacaattccc

SEQ ID NO: 75794 - DNA, 120 bp, Artificial Sequence
  ENSG00000079335_26 (sequence is synthesized)
tttcctattgtttttgttgctgagccaatttgagttagttttgcatcctggggggctttaaaatacagcatgcagtgaaagatcagaattcactgaatatttcttctgagagcatggttt

SEQ ID NO: 75795 - DNA, 120 bp, Artificial Sequence
  ENSG00000079335_27 (sequence is synthesized)
catggtttttctctatgaaatgactcaatattccaaatgtttttttttccttcctcctttcaaaagagttcttaacccaattaggatatcctgctttgggtatgaggttgttgttgcctg

SEQ ID NO: 75796 - DNA, 120 bp, Artificial Sequence
  ENSG00000079335_28 (sequence is synthesized)
taatcacacatggtttgacatcagttttaaatcaatggagagaaaaaactgaaaaagatgctgctaagtagttctctgtattaaaggagatatttttaaaacagggtacaaccccctgct

SEQ ID NO: 75797 - DNA, 120 bp, Artificial Sequence
  ENSG00000079335_29 (sequence is synthesized)
gcacacgctagcatatctggaacctactatgaaaatgaaaggacccttataggtactcacagccctttcatgtaagtatgatctgatatttaggtcttcagaagcctgtaggtttcattt

SEQ ID NO: 75798 - DNA, 120 bp, Artificial Sequence
  ENSG00000079335_30 (sequence is synthesized)
ctatgaggaatcgaggagcgttacatcctgatatccttccaggctgcttaagaatggactgcttcgacactgaaagtgctagttaaatggattcatatgaagtgctttactcccaaccat

SEQ ID NO: 75799 - DNA, 120 bp, Artificial Sequence
  ENSG00000079335_31 (sequence is synthesized)
tgagttatttataatgtatttattaggggagggtaccttgagtctattatatatgcttcatcaaaacatcttgttcatgttttatgtttttaaaaaaggcatttgaatgaatgtttgact

SEQ ID NO: 75800 - DNA, 120 bp, Artificial Sequence
  ENSG00000079335_32 (sequence is synthesized)
caggtttgttaaattaaccttcagtaactgcagtaccaaaaattacactcaactgatgaaaaaaacgaattgtatgatttaggaatcaaaaactaaaataagtggaattatgtatctttt

SEQ ID NO: 75801 - DNA, 120 bp, Artificial Sequence
  ENSG00000079335_33 (sequence is synthesized)
aaaaaagtaaaatattttattatgagttattataaaaattggttaattgtataggaagatgacagtatttttttcaagttatcataaaaagtaattcagatgacatttgagaagtagggg

SEQ ID NO: 75802 - DNA, 120 bp, Artificial Sequence
  ENSG00000079335_34 (sequence is synthesized)
agtaggggaaagggaatcatgttgacagttttagttctgtgaacactaatttgtgtgaagctattaaaatgattgtaaagttgactactgtaaatttcccataattatgtgtgtatatgt

SEQ ID NO: 75803 - DNA, 120 bp, Artificial Sequence
  ENSG00000079335_35 (sequence is synthesized)
gtcatatgtatgtacatgtatatgtctaaaaattactttacacatgtgcctacatagacacaccaagaagtggatgtatataatatagaaagtatatagcaaagtaattttactctgata

SEQ ID NO: 75804 - DNA, 120 bp, Artificial Sequence
  ENSG00000079335_36 (sequence is synthesized)
tttactctgataataaaaattgtttgacatgtattttgttatgaatagtttatcttccaaaagatattttgctctattttaaagtgtagaagaatacactgctaataaataataaaagtt

SEQ ID NO: 75805 - DNA, 120 bp, Artificial Sequence
  ENSG00000079335_37 (sequence is synthesized)
gcaaatggactttccactcggccagtgccgtcttgtctgctcctcactgtacatgtggctggcaaaaagagaagatggagctgccattttgaacatgcctagtcccagtttctatgcaga

SEQ ID NO: 75806 - DNA, 120 bp, Artificial Sequence
  ENSG00000079335_38 (sequence is synthesized)
aggaatccattgaggatgcctgaatggggttgttggccctgatcacactctagagacaggcatatcatcacaggcaatcagaaatgaagaaggacattaacttgtaccctgtggaattgt

SEQ ID NO: 75807 - DNA, 120 bp, Artificial Sequence
  ENSG00000079335_39 (sequence is synthesized)
gcctactgctagtctttaggaagccctttcttggaagccccctgctctccttaccaatttctcatctttaaataaagacatatattacctcccatgtcttctgtgaagctctccccatcc

SEQ ID NO: 75808 - DNA, 120 bp, Artificial Sequence
  ENSG00000079335_40 (sequence is synthesized)
tgattttattgagtgtctagagagcaacactggctttcctcaagagtaggctgaaaattcagtagataccccatggatattgtgctcactgtgagaagtctttcaaaatttaccaggcac

SEQ ID NO: 75809 - DNA, 120 bp, Artificial Sequence
  ENSG00000079335_41 (sequence is synthesized)
tgaaataactcacctcaggtcttcgatgaaggtcagggaggtgtgcgttggtctttggtgagcacacggtatattatgagggtacaactgtcgctgccattgtgtctgttcagtgtgcct

SEQ ID NO: 75810 - DNA, 120 bp, Artificial Sequence
  ENSG00000079335_42 (sequence is synthesized)
ttgtaaagagcctgggatggcctcttcatggatctgccctctgtctctaagcttacccatggagaagacaaaggctgctgcgcagcttcatgctgaaaaggaaatgttggcaagttgttg

SEQ ID NO: 75811 - DNA, 120 bp, Artificial Sequence
  ENSG00000079335_43 (sequence is synthesized)
aggtttgtacatttaattttttttacaaaacataatttcatgttgattaattttttccccctgtcacactcatgtattgcaaatcgagtgggtgctaaataaaagcattctggagttttc

SEQ ID NO: 75812 - DNA, 120 bp, Artificial Sequence
  ENSG00000079335_44 (sequence is synthesized)
ttttccagagtattcctttcctgagaaagttggaggtaaaacttgtaaaggtcatggctgctcacaggaagacctgctcattttatcgcttttgcagtgagatgaccactgattgctatg

SEQ ID NO: 75813 - DNA, 120 bp, Artificial Sequence
  ENSG00000079335_45 (sequence is synthesized)
atataacatagcagtgtcttttctctggatgccacgagtaccaagtttttagaagtagagccatccgtctatatagcaagaagcagaggaaagaaaccaattgcccttaaaaaaaaaaaa

SEQ ID NO: 75814 - DNA, 120 bp, Artificial Sequence
  ENSG00000079335_46 (sequence is synthesized)
tgcagtaagtaccttcttcatgattattttctataatcaggccagtgaaatgctaacactgtcaaagaaaatccaaaccagtttttcagtgggattgagagacggtggagattattagca

SEQ ID NO: 75815 - DNA, 120 bp, Artificial Sequence
  ENSG00000079335_47 (sequence is synthesized)
gtttgggaattgatctgtagtgagaaatatggactagcagtggtggaatgtttactctttagattttattttctactagttaatgagagaatcttgaaactgcaatatgtagcttgaatt

SEQ ID NO: 75816 - DNA, 120 bp, Artificial Sequence
  ENSG00000079335_48 (sequence is synthesized)
catctgtgatgcttttgcgctcacattggcggcccagatgagagggcgtggagaaccagatgggaaactttttgtcccgtgagaacaaagtacaagttatatcagagtctgatcggttat

SEQ ID NO: 75817 - DNA, 120 bp, Artificial Sequence
  ENSG00000079337_0 (sequence is synthesized)
gttagtcagggctgaggaggagaggagaagggtttaagccgaagctgcatttctgggagacctagtgaatctatagcttcatactgggaggtgggctggccaggtgagagctgctggcag

SEQ ID NO: 75818 - DNA, 120 bp, Artificial Sequence
  ENSG00000079337_1 (sequence is synthesized)
gtgggcctggctgtggaggatagcccagctctgggagcaccgcgggtgggagccctccctgacgtggtgccggaggggacactactcaacatggtgttgagaaggatgcaccggccccga

SEQ ID NO: 75819 - DNA, 120 bp, Artificial Sequence
  ENSG00000079337_2 (sequence is synthesized)
agctgctcctaccagctgctgctggagcaccagcgtccgagctgcatccaggggctgcgctggacaccactcaccaacagcgaggagtccctggatttcagcgagagcctggagcaggcc

SEQ ID NO: 75820 - DNA, 120 bp, Artificial Sequence
  ENSG00000079337_3 (sequence is synthesized)
tccacagagcgggtgctcagggctgggaggcagctgcatcggcatctgctggccacctgcccaaacctcatccgagaccggaagtaccaccttaggctctatcggcagtgctgctctggc

SEQ ID NO: 75821 - DNA, 120 bp, Artificial Sequence
  ENSG00000079337_4 (sequence is synthesized)
cgggagctggtggatgggatcttggccctgggacttggggtccattcccggagccaagttgtgggaatctgccaggtgctgctggatgaaggtgccctctgccatgtgaaacacgactgg

SEQ ID NO: 75822 - DNA, 120 bp, Artificial Sequence
  ENSG00000079337_5 (sequence is synthesized)
gccttccaggaccgagatgcccaattctaccggttccccgggcccgagcccgagcccgtgagaactcatgagatggaggaggagttggccgaagctgtggccctgctctcccagcggggg

SEQ ID NO: 75823 - DNA, 120 bp, Artificial Sequence
  ENSG00000079337_6 (sequence is synthesized)
cctgacgccctgctcactgtggcacttcgaaagcccccaggtcagcgcacggatgaagagctggacctcatctttgaggagctgctgcacatcaaggctgtggcccacctctccaactcg

SEQ ID NO: 75824 - DNA, 120 bp, Artificial Sequence
  ENSG00000079337_7 (sequence is synthesized)
gtgaagcgagaattagcggctgttctgctctttgaaccacacagcaaggcagggaccgtgttgttcagccagggggacaagggcacttcgtggtacattatctggaagggatctgtcaac

SEQ ID NO: 75825 - DNA, 120 bp, Artificial Sequence
  ENSG00000079337_8 (sequence is synthesized)
gtggtgacccatggcaaggggctggtgaccaccctgcatgagggagatgattttggacagctggctctggtgaatgatgcaccccgggcagccaccatcatcctgcgagaagacaactgt

SEQ ID NO: 75826 - DNA, 120 bp, Artificial Sequence
  ENSG00000079337_9 (sequence is synthesized)
catttcctgcgtgtggacaagcaggacttcaaccgtatcatcaaggatgtggaggcaaagaccatgcggctggaagaacatggcaaagtggtgctggtgctggagagagcctctcagggc

SEQ ID NO: 75827 - DNA, 120 bp, Artificial Sequence
  ENSG00000079337_10 (sequence is synthesized)
gccggcccttcccgacccccaaccccaggcaggaaccggtatacagtgatgtctggcaccccagagaagatcctagagcttctgttggaggccatgggaccagattccagtgctcatgac

SEQ ID NO: 75828 - DNA, 120 bp, Artificial Sequence
  ENSG00000079337_11 (sequence is synthesized)
ccaacagagacattcctcagcgacttcctcctgacccacagggtcttcatgcccagcgcccaactctgcgctgcccttctgcaccacttccatgtggagcctgcgggtggcagcgagcag

SEQ ID NO: 75829 - DNA, 120 bp, Artificial Sequence
  ENSG00000079337_12 (sequence is synthesized)
gagcgcagcacctacgtctgcaacaagaggcagcagatcttgcggctggtcagccagtgggtggccctgtatggctccatgctccacactgaccctgtggccaccagcttcctccagaaa

SEQ ID NO: 75830 - DNA, 120 bp, Artificial Sequence
  ENSG00000079337_13 (sequence is synthesized)
ctctcagacctggtgggcagggacacccgactcagcaacctgctgagggagcagtggccagagaggcggcgatgccacaggttggagaatggctgtgggaatgcatctcctcagatgaag

SEQ ID NO: 75831 - DNA, 120 bp, Artificial Sequence
  ENSG00000079337_14 (sequence is synthesized)
gcccggaacttgcctgtttggctccccaaccaggacgagccccttcctggcagcagctgtgccatccaagttggggataaagtcccctatgacatctgccggccagaccactcagtgttg

SEQ ID NO: 75832 - DNA, 120 bp, Artificial Sequence
  ENSG00000079337_15 (sequence is synthesized)
accctgcagctgcctgtgacagcctccgtgagagaggtgatggcagcgttggcccaggaggatggctggaccaaggggcaggtgctggtgaaggtcaattctgcaggtgatgccattggc

SEQ ID NO: 75833 - DNA, 120 bp, Artificial Sequence
  ENSG00000079337_16 (sequence is synthesized)
ctgcagccagatgcccgtggtgtggccacatctctggggctcaatgagcgtctctttgttgtcaacccacaggaagtgcatgagctgatcccacaccctgaccagctggggcccactgtg

SEQ ID NO: 75834 - DNA, 120 bp, Artificial Sequence
  ENSG00000079337_17 (sequence is synthesized)
ggctctgctgaggggctggacctggtgagtgccaaggacctggcaggccagctgacggaccacgactggagcctcttcaacagtatccaccaggtggagctgatccactatgtgctgggc

SEQ ID NO: 75835 - DNA, 120 bp, Artificial Sequence
  ENSG00000079337_18 (sequence is synthesized)
ccccagcatctgcgggatgtcaccaccgccaacctggagcgcttcatgcgccgcttcaatgagctgcagtactgggtggccaccgagctgtgtctctgccccgtgcccggcccccgggcc

SEQ ID NO: 75836 - DNA, 120 bp, Artificial Sequence
  ENSG00000079337_19 (sequence is synthesized)
cagctgctcaggaagttcattaagctggcggcccacctcaaggagcagaagaatctcaattccttctttgccgtcatgtttggcctcagcaactcggccatcagccgcctagcccacacc

SEQ ID NO: 75837 - DNA, 120 bp, Artificial Sequence
  ENSG00000079337_20 (sequence is synthesized)
tgggagcggctgcctcacaaagtccggaagctgtactccgccctcgagaggctgctggatccctcatggaaccaccgggtataccgactggccctcgccaagctctcccctcctgtcatc

SEQ ID NO: 75838 - DNA, 120 bp, Artificial Sequence
  ENSG00000079337_21 (sequence is synthesized)
cccttcatgccccttcttctcaaagacatgaccttcattcatgagggaaaccacacactagtggagaatctcatcaactttgagaagatgagaatgatggccagagccgcgcggatgctg

SEQ ID NO: 75839 - DNA, 120 bp, Artificial Sequence
  ENSG00000079337_22 (sequence is synthesized)
caccactgccgaagccacaaccctgtgcctctctcaccactcagaagccgagtttcccacctccacgaggacagccaggtggcgaggatttccacatgctcggagcagtccctgagcacc

SEQ ID NO: 75840 - DNA, 120 bp, Artificial Sequence
  ENSG00000079337_23 (sequence is synthesized)
ggagctggagcaggcacttgcagccgggaaagccagggtgtgccgggccaagatactcacaggctggccacagctgggcaaggctctccgtggagtggactcgagtccctggagcaggca

SEQ ID NO: 75841 - DNA, 120 bp, Artificial Sequence
  ENSG00000079337_24 (sequence is synthesized)
gtgtggaggcagccatcccctgtgatgactggcagctaaggaggacctcggagtggacccgagccaggaataacgaatgacccaaggccaaggaagggaggacagagaggccccaggagt

SEQ ID NO: 75842 - DNA, 120 bp, Artificial Sequence
  ENSG00000079337_25 (sequence is synthesized)
gggtggagagtggagtgcgctgggacgttgtgtgcaatagagaggtctccacaccagatgtcttccagattctgtgcctctggctttgttgtccagccaggcctgcagtttattttcaca

SEQ ID NO: 75843 - DNA, 120 bp, Artificial Sequence
  ENSG00000079337_26 (sequence is synthesized)
gtggacagagagagagagagaggctgcatgtgtgtaccgtgtgtggcaagggcagggccttggcctggggcaggggccccctgctttctttccacagctttcttccaacagcaggcagtg

SEQ ID NO: 75844 - DNA, 120 bp, Artificial Sequence
  ENSG00000079337_27 (sequence is synthesized)
gggctgcgggcctgtgcggtggtccctgaggagctttattgttactgtcaacatagtagtatgttccaggccagcccagagtgggcgtggcagggaggctgaggccccgccctctgggaa

SEQ ID NO: 75845 - DNA, 120 bp, Artificial Sequence
  ENSG00000079337_28 (sequence is synthesized)
ggagctgtggaggagaagcagccccatgctgggcacgggccagactgggtccaagatcctgatgccacccagatgtgcctccagggctctggccaaagggcgggctggagcctggagccc

SEQ ID NO: 75846 - DNA, 120 bp, Artificial Sequence
  ENSG00000079337_29 (sequence is synthesized)
ctgtcagcagccagccagggtgaccatcagctccccgtggtggtccaataggactttacagtccagatgcaactgacagcttcttcccaactgcaatccccgcttttccacacttgagct

SEQ ID NO: 75847 - DNA, 120 bp, Artificial Sequence
  ENSG00000079337_30 (sequence is synthesized)
cgtcctggcctgttgggccaggcttctggggtcttctgggggtggcttgtgatagaaacaatgctgaagcttccgcggagagcccgtcgcttgttgaggcccaacagacttccaggaaat

SEQ ID NO: 75848 - DNA, 120 bp, Artificial Sequence
  ENSG00000079337_31 (sequence is synthesized)
cagggtttatcatcagtgttgagaatggtcccagcaagctctggtcatacgaagtcctctcttccctgccccttcagcacttcccctaggaaccagctactgccaggacgcctcttgcga

SEQ ID NO: 75849 - DNA, 120 bp, Artificial Sequence
  ENSG00000079337_32 (sequence is synthesized)
ggcagagctcacccaggaagctccagggactccaccctcttgccttgctattgccctgagtcctggcagcaggaggcacttgtctggccagagagagaactcatggcccctggcatgact

SEQ ID NO: 75850 - DNA, 120 bp, Artificial Sequence
  ENSG00000079337_33 (sequence is synthesized)
cctgagtaggtattgaggctgcagggccttgggcgtccagaggcagctggtatggcccctctgcacttcagccccatggatgtggatacacaggcctgctgcttccagaaagggtcagag

SEQ ID NO: 75851 - DNA, 120 bp, Artificial Sequence
  ENSG00000079337_34 (sequence is synthesized)
cctttagcagggaggcagcacagctgggcttagacctcaggtcactaagtgaatctgagcaagtcagtgaacagttctcttccttcatttctccacctgtaagccaggtatgataaacgc

SEQ ID NO: 75852 - DNA, 120 bp, Artificial Sequence
  ENSG00000079337_35 (sequence is synthesized)
catacagcgcttagtgacaaacacataaaactgtagctcctgcctctgtagcagaggtgacagccaagggcagtcctgtgctatccaggcctggtaggggggcagcctcgcctcagttga

SEQ ID NO: 75853 - DNA, 120 bp, Artificial Sequence
  ENSG00000079337_36 (sequence is synthesized)
gggctgagggagagactgaggtgcagcagatggcagtggtaaccaaaccagttcccttgccgtgggtggggacacaggagaagcacggaagcatctggaactgagcaatcaggacaggag

SEQ ID NO: 75854 - DNA, 120 bp, Artificial Sequence
  ENSG00000079337_37 (sequence is synthesized)
gctcaagcctgggtgagtcaggagtccgggggctttcttttcatccaacccattgtctgctggtgtctcggcaaaagccagccagccagccgtggcccttcaccgttcttcagactctag

SEQ ID NO: 75855 - DNA, 120 bp, Artificial Sequence
  ENSG00000079337_38 (sequence is synthesized)
ggtgagcccagcccagcgacacaacagaaaccaagtgccacgggggccggtgtcctccaccagcatttctcctctggtcacatctacgtcctgatgggacttctccctcctccttggacc

SEQ ID NO: 75856 - DNA, 120 bp, Artificial Sequence
  ENSG00000079337_39 (sequence is synthesized)
atcagctttacagtccagaccaccctgcagccacccggtggtctcccagctgccccagtctcgggcaggatggcttttgagcctgttgggagagaccttgccaggagaatggtgcccagg

SEQ ID NO: 75857 - DNA, 120 bp, Artificial Sequence
  ENSG00000079337_40 (sequence is synthesized)
gcaggcaagaggacacagactctgggagctagaagagttgcggcccagggggccaggccactcccagaggacaggaggcccaaaagcggggaaaggctccatgttacggtggccccatgc

SEQ ID NO: 75858 - DNA, 120 bp, Artificial Sequence
  ENSG00000079337_41 (sequence is synthesized)
tgggagtttgtgctgccttctgtctccctgactgcccaagcgtggggtggtgtggggcaggaggcatcctctggtgttccctagcagcccaggctgtgtgcaggggctcccattttgtgt

SEQ ID NO: 75859 - DNA, 120 bp, Artificial Sequence
  ENSG00000079337_42 (sequence is synthesized)
ctcagctgcaagaaggccacaaagggaggaggggctcatgggactgctgagaagaaggtgtgcagaaagggagtgtggccctagatcagtcctttaaaaagcctctgttacctgaaagga

SEQ ID NO: 75860 - DNA, 120 bp, Artificial Sequence
  ENSG00000079337_43 (sequence is synthesized)
ggtcaagcagagaggaatggctgcgtgtgtgtcctaccgggcaggacaggacagagggaggtcattgttacacacacatcccccctcctttcctccttcccctccacttccctgtgaagg

SEQ ID NO: 75861 - DNA, 120 bp, Artificial Sequence
  ENSG00000079337_44 (sequence is synthesized)
cctgaggcaggctgtggccaggctcaggccctgactgtggggtacacaccagggagggccacgcctccccacagacggggtggagtggtcagtggagccagcaccctctgctgcttcagc

SEQ ID NO: 75862 - DNA, 120 bp, Artificial Sequence
  ENSG00000079337_45 (sequence is synthesized)
atctccgcctggagccagctgtcccctctctctcaggctccatccgaacaaaaggaaggcagagcctgagatccggcaccccatccccctccactcagcactgagttagagctgggtggg

SEQ ID NO: 75863 - DNA, 120 bp, Artificial Sequence
  ENSG00000079337_46 (sequence is synthesized)
ggcatgtctgccttcacacgctgccttatggcttctgtgtctccaacagccctcagcctctggctgctctccttcccaatagtcacaagatttaccatgataataataggttaagacttg

SEQ ID NO: 75864 - DNA, 120 bp, Artificial Sequence
  ENSG00000079337_47 (sequence is synthesized)
aggagctgccggtggagagtgagtgctggtcctgtggaggagggagcaagccccgtggtccggagtgcatttccatggatggcttcagagctggccaggatggacagtactccaggcagt

SEQ ID NO: 75865 - DNA, 120 bp, Artificial Sequence
  ENSG00000079337_48 (sequence is synthesized)
gtgccagctggctccttcgtctgagacgaaggcgcaggctcggggctccctgtcgccggtggctgggtggcgtccccccaccacgcccccacccctctactcacccaagaggagcctctc

SEQ ID NO: 75866 - DNA, 120 bp, Artificial Sequence
  ENSG00000079337_49 (sequence is synthesized)
caccgagccctgcatcctgctgccctggcagccagtccagctaggcactggcccagttcactgtacctggacttacccactggaaaagaaacatgaaggtgggctggccaggtgagagct

SEQ ID NO: 75867 - DNA, 120 bp, Artificial Sequence
  ENSG00000079337_50 (sequence is synthesized)
cccttatcaaagctgatgggggtcgctggggaccccccagccttttgctagagcctgcacggctgtgcgagcttgaaaagaaacatgaaggtgggctggccaggtgagagctgctggcag

SEQ ID NO: 75868 - DNA, 120 bp, Artificial Sequence
  ENSG00000079337_51 (sequence is synthesized)
taggtactacaggtatttttactctggttttacagtcaaagaaactgaggcacaggcaggtttgcccaaggtcacataactgcttaatagcagggtagacaggtgaagtaactggatgtg

SEQ ID NO: 75869 - DNA, 120 bp, Artificial Sequence
  ENSG00000079337_52 (sequence is synthesized)
tatcagccatgccctttccccatgcccccggcactccccatgacagctctctgaatcccaacattttattcttttgcaggattagacccaagcatataaattcctttttccctctctcca

SEQ ID NO: 75870 - DNA, 120 bp, Artificial Sequence
  ENSG00000079337_53 (sequence is synthesized)
gtcttattgtctccattttaccagggaagaaagtgaggctgagggaggctcagaccctgcccaggttcttcctgactcactgagaatctttcctcatcctcttggatgtgcttccctggg

SEQ ID NO: 75871 - DNA, 120 bp, Artificial Sequence
  ENSG00000079337_54 (sequence is synthesized)
ctgcgtggctgcgtgggcacatgcacctgtgtattctgagcaccacccaggacttcaaccccgctactaggagaaacaacctctcagcctcccaaacagcacctccaccctggcatccag

SEQ ID NO: 75872 - DNA, 120 bp, Artificial Sequence
  ENSG00000079337_55 (sequence is synthesized)
ccagtagaagaggcgaggatagagttgggggtggaacctcccacctccaggaacttttgaggattttgagggttttgactattctggagagaagcagagaagaggtacttcatcagcata

SEQ ID NO: 75873 - DNA, 120 bp, Artificial Sequence
  ENSG00000079337_56 (sequence is synthesized)
gcctgggagctcttgagagaaaatccacctcgtggggctcaagggattcaaaggagtttactctgcagagagagagagggagggacacagaaagagacagggatagaaagggacagagag

SEQ ID NO: 75874 - DNA, 120 bp, Artificial Sequence
  ENSG00000079337_57 (sequence is synthesized)
tgtgacagagcctgggtgagacctggggctgaggagaggctgagttggggcctctgcacctgctgtgggatgggcatgtggcccctccttggttgggtggggtctgtggtggcttatggt

SEQ ID NO: 75875 - DNA, 120 bp, Artificial Sequence
  ENSG00000079337_58 (sequence is synthesized)
aataaccaacatttaattaaaacccacaccccactgtgtgaatatttgtttgtaagtaatacacatatattactacattaatatcataataaagatagataaaatagaaattgatggagt

SEQ ID NO: 75876 - DNA, 120 bp, Artificial Sequence
  ENSG00000079337_59 (sequence is synthesized)
agaaatgcaaagcaggtagaaaaagtaaacgtaagtagaagagctcatattttccccaggcacatggatgatctgatgtaccttactttggaggccactgctctagggactggggactca

SEQ ID NO: 75877 - DNA, 120 bp, Artificial Sequence
  ENSG00000079337_60 (sequence is synthesized)
agcacagtcccagtccatgaggagctgatgaaaatcaacaccaaggcttatataagacacttcccaattttcaaagggcttttatacatagcatgtacttatagctactatttatataca

SEQ ID NO: 75878 - DNA, 120 bp, Artificial Sequence
  ENSG00000079337_61 (sequence is synthesized)
agtccagaggactctaaggaagtagttctgcctggggcagttgtactgtggcccagccgccccagtcgtgtcccatggctgtccactttcctccccgtgtcacaggtgggctggccaggt

SEQ ID NO: 75879 - DNA, 120 bp, Artificial Sequence
  ENSG00000079337_62 (sequence is synthesized)
ctccgccctcgagaggctgctggtgagtgctccaccctgcccggcctggctctgctaggatcagctgggctcggccctgccctccagacaccctcactcttggcttccctgcagcccctc

SEQ ID NO: 75880 - DNA, 120 bp, Artificial Sequence
  ENSG00000079337_63 (sequence is synthesized)
tactcgtcctttgtcactttcagggttcccaacctcggcccagggcctagctccagcctgtgagtttggggagctggctgaggaaggggtgttcagcactaggataggggttgcacggtg

SEQ ID NO: 75881 - DNA, 120 bp, Artificial Sequence
  ENSG00000079337_64 (sequence is synthesized)
aaggtgctgctgctggggttggggagggcaggggccattcgtccagagaagtgatgtggagagaggagtagggaccagagcagagggcctgtaagaagcagggcaggtaagagatgctgg

SEQ ID NO: 75882 - DNA, 120 bp, Artificial Sequence
  ENSG00000079337_65 (sequence is synthesized)
gctatgacagctggcagtgggaccatagccctgggtgtgtgtgagaaggtgaagcccataaggcacagaaggagttcagtgagaccagtgacttcaggctcagtgtgggagaccagggga

SEQ ID NO: 75883 - DNA, 120 bp, Artificial Sequence
  ENSG00000079337_66 (sequence is synthesized)
aggatgggcatgcagggggcgggggactaggctgtgggggaggcaggatgcatggaaggtagggaaggctgaggaggtggagccaaagtcggaggtgggagaagggctgtgggtccctgt

SEQ ID NO: 75884 - DNA, 120 bp, Artificial Sequence
  ENSG00000079337_67 (sequence is synthesized)
gggaccctcatggggctcaggggctggaatgaaggaggtagatgagagggtctaaagctggaacatcatgagttgagcatgggatgtggcctgttctccaggatgtggaggcaaagacca

SEQ ID NO: 75885 - DNA, 120 bp, Artificial Sequence
  ENSG00000079337_68 (sequence is synthesized)
atggagaggtattgagggaccaggatgtgcctgctgagccagtctcctccctgccctaaggtgggacagggctggctaatggagaaaaatgatgtaattgattattgatgtctgcccagg

SEQ ID NO: 75886 - DNA, 120 bp, Artificial Sequence
  ENSG00000079337_69 (sequence is synthesized)
cccttgggtctctgataggtgttcacggggcccttgctgcatgtggtgccctgggccaggccgtgccaggaggcgcagaggcctaaggtggcctccctcctcgcccactccctgactcaa

SEQ ID NO: 75887 - DNA, 120 bp, Artificial Sequence
  ENSG00000079337_70 (sequence is synthesized)
tgggccttttattccttttgggaggtaattcatgcccacaggtagagcctgggagatgaggaatggtggctggagttggcccctgaggcccacggggctcctggtggccagtgctgtggg

SEQ ID NO: 75888 - DNA, 120 bp, Artificial Sequence
  ENSG00000079337_71 (sequence is synthesized)
ggcgaggcccctccctggaaagtcagagggggccccaggccattctcagctggggcttaaagggaagcaaagaggggatgagaagatgtgactgcagccaggatttggttgaggaatggt

SEQ ID NO: 75889 - DNA, 120 bp, Artificial Sequence
  ENSG00000079337_72 (sequence is synthesized)
gggagaaagaactggaaaggtagattaggttggtggtggggagggctgcactgggaataaaatccaggggcctcaccatccagcaggctccccatggtcccaccctactgtgtgtcccag

SEQ ID NO: 75890 - DNA, 120 bp, Artificial Sequence
  ENSG00000079337_73 (sequence is synthesized)
cccctgcctgctggagactcttactggcttcttctcctccgcaggcgaagcccgttctcccctcagggcctttgcacttatcccttagcctggaagggtctttctctggctctgcctggc

SEQ ID NO: 75891 - DNA, 120 bp, Artificial Sequence
  ENSG00000079337_74 (sequence is synthesized)
aggatccttctcgttctcatctcagccaaatgctgggttcccagacaggccccctcccgtctccctatccggagcaccctcccctttctcccaccacgctctgccttggtgtcctctgtg

SEQ ID NO: 75892 - DNA, 120 bp, Artificial Sequence
  ENSG00000079337_75 (sequence is synthesized)
attttcttcaaagcactctcgccatgtggagttgttttctttgcctacttgctttctgtcctttggtatctctcccatcccactggagagttgacttccctcctgcgggcccccacctcc

SEQ ID NO: 75893 - DNA, 120 bp, Artificial Sequence
  ENSG00000079337_76 (sequence is synthesized)
gcttctccttgctcacatgctgcctggctcttggctgacgctcagaaactgatgtgggctcaccctcgcaggccgggcactgcgctaggtgctgatgctgcacctcattcaaccctggcc

SEQ ID NO: 75894 - DNA, 120 bp, Artificial Sequence
  ENSG00000079337_77 (sequence is synthesized)
tgtggggctgcagtcaggcaaggggcagagcagttcaacaacccgtgatgtgcagtgacacgggacactttccctgaatgtgcactggagtcggctcttccaactgtagtccgctcctga

SEQ ID NO: 75895 - DNA, 120 bp, Artificial Sequence
  ENSG00000079337_78 (sequence is synthesized)
aaacgggaggggaagagccaactccagtgcagattcagggaaagtgtcccgtgtaagcgactactggagttgagagctgcagggggcaagggtggaggaagaagaggattcctggtgggc

SEQ ID NO: 75896 - DNA, 120 bp, Artificial Sequence
  ENSG00000079337_79 (sequence is synthesized)
aaacccaggaggaaagggaacccaggaggaggatccctggaggagcgagagtaagagtaggaccccagagcaggcaggaggtgggcagggccccctgggccaaggacaggggtctgatct

SEQ ID NO: 75897 - DNA, 120 bp, Artificial Sequence
  ENSG00000079337_80 (sequence is synthesized)
ttgtcctaagagcagtgcaaaccattaaaggggtttgagccaaggttggcaaagtctgatttgtgttttgaataggtcagctaaagagcctgggctttctccagcagacaatggacgcca

SEQ ID NO: 75898 - DNA, 120 bp, Artificial Sequence
  ENSG00000079337_81 (sequence is synthesized)
ctgaagtcgagtgcgggagcttcacagggctctggtcaggcagattggaggaggagggctggaggcacctgggagggaggaggaggagcatagttgggccattggagtagataaggagtg

SEQ ID NO: 75899 - DNA, 120 bp, Artificial Sequence
  ENSG00000079337_82 (sequence is synthesized)
aggcctcgtgggcaggtggaactggagttagcctgggcaggggaggagggggcacagaagacccacttcaaagaagaatcttcaaagcaagatgacaagctacggaagtgtggaggagcc

SEQ ID NO: 75900 - DNA, 120 bp, Artificial Sequence
  ENSG00000079337_83 (sequence is synthesized)
tggagctggggagaatggctggggaacagagtggtctgggaggcaggatgcaaggatccgatgggtatatggagtgtgaggtaatggatcattcatgtggaaggatgcagggggtttttg

SEQ ID NO: 75901 - DNA, 120 bp, Artificial Sequence
  ENSG00000079337_84 (sequence is synthesized)
agaccagggtttggaagagagttcagcactgctggtagttttgggaatcacccatgtgcaggcgacacatgaggcagtaaggaactctgcaggggtccctgagatttggaaatgtaggga

SEQ ID NO: 75902 - DNA, 120 bp, Artificial Sequence
  ENSG00000079337_85 (sequence is synthesized)
agagcaatggattgaggtccgaacctggaggatctgctatacgcagagctgggaggagggacagagtcagtaccagagtcggaaaaaagcagggtgggaaggggaacctgagtcaggaga

SEQ ID NO: 75903 - DNA, 120 bp, Artificial Sequence
  ENSG00000079337_86 (sequence is synthesized)
cttgcctggcaggcgctgccctgccagcagaggcctgacagtggtttccatgaactgcatccctgctgtgggctgggacagggccactgacacagtatcggagcacagagggggaaagga

SEQ ID NO: 75904 - DNA, 120 bp, Artificial Sequence
  ENSG00000079337_87 (sequence is synthesized)
gcaggagggattccaactctgccagttagcagctgtgtggctttgggcatgttacttaacctctctgagcctcatttatttcatccataaaatggaaataaaaataatacttttgtcaaa

SEQ ID NO: 75905 - DNA, 120 bp, Artificial Sequence
  ENSG00000079337_88 (sequence is synthesized)
ttcgcctgtgacagagcctgggatccctcatggaaccaccgggtataccgactggccctcgccaagctctcccctcctgtcatccccttcatgccccttcttctcaaagacatgaccttc

SEQ ID NO: 75906 - DNA, 120 bp, Artificial Sequence
  ENSG00000079337_89 (sequence is synthesized)
gcaacatctcagagaagaaagacgctttccagcaagcagccccaccctaatgcctcacagatgagtactagctaacatgtgcatacaactatatgccaggcaatgctttaaacattcgat

SEQ ID NO: 75907 - DNA, 120 bp, Artificial Sequence
  ENSG00000079337_90 (sequence is synthesized)
gtgtagcaactcatttaattctcccaaaacctcatgagtcggtattattagtgctttgtagattttacagttcaggagactcaggtagggagggagaggttaaatcatttgtttcaggtc

SEQ ID NO: 75908 - DNA, 120 bp, Artificial Sequence
  ENSG00000079337_91 (sequence is synthesized)
agaataatgcctggcttgtagcaaatggtagctggaggaaaaggaagagaaaaccaaagtcagcagctgaaggattttcatattagaactgctctggacctatctggcagatgcagaagc

SEQ ID NO: 75909 - DNA, 120 bp, Artificial Sequence
  ENSG00000079337_92 (sequence is synthesized)
acacacacacggaggggcatggatttgccccgcccttagacatgttgtgtcttctcctggatccttggtcccaggtgccttacctgagctcaggtgaatgtggcaagcagagccctctgg

SEQ ID NO: 75910 - DNA, 120 bp, Artificial Sequence
  ENSG00000079385_0 (sequence is synthesized)
agcacagagagtggaaaacagcagaggtgacagagcagccgtgctcgaagcgttcctggagcccaagctctcctccacaggtgaagacagggccagcaggagacaccatggggcacctct

SEQ ID NO: 75911 - DNA, 120 bp, Artificial Sequence
  ENSG00000079385_1 (sequence is synthesized)
cagccccacttcacagagtgcgtgtaccctggcaggggcttctgctcacagcctcacttctaaccttctggaacccgcccaccactgcccagctcactactgaatccatgccattcaatg

SEQ ID NO: 75912 - DNA, 120 bp, Artificial Sequence
  ENSG00000079385_2 (sequence is synthesized)
ttgcagaggggaaggaggttcttctccttgtccacaatctgccccagcaactttttggctacagctggtacaaaggggaaagagtggatggcaaccgtcaaattgtaggatatgcaatag

SEQ ID NO: 75913 - DNA, 120 bp, Artificial Sequence
  ENSG00000079385_3 (sequence is synthesized)
gaactcaacaagctaccccagggcccgcaaacagcggtcgagagacaatataccccaatgcatccctgctgatccagaacgtcacccagaatgacacaggattctacaccctacaagtca

SEQ ID NO: 75914 - DNA, 120 bp, Artificial Sequence
  ENSG00000079385_4 (sequence is synthesized)
taaagtcagatcttgtgaatgaagaagcaactggacagttccatgtatacccggagctgcccaagccctccatctccagcaacaactccaaccctgtggaggacaaggatgctgtggcct

SEQ ID NO: 75915 - DNA, 120 bp, Artificial Sequence
  ENSG00000079385_5 (sequence is synthesized)
tcacctgtgaacctgagactcaggacacaacctacctgtggtggataaacaatcagagcctcccggtcagtcccaggctgcagctgtccaatggcaacaggaccctcactctactcagtg

SEQ ID NO: 75916 - DNA, 120 bp, Artificial Sequence
  ENSG00000079385_6 (sequence is synthesized)
tcacaaggaatgacacaggaccctatgagtgtgaaatacagaacccagtgagtgcgaaccgcagtgacccagtcaccttgaatgtcacctatggcccggacacccccaccatttcccctt

SEQ ID NO: 75917 - DNA, 120 bp, Artificial Sequence
  ENSG00000079385_7 (sequence is synthesized)
cagacacctattaccgtccaggggcaaacctcagcctctcctgctatgcagcctctaacccacctgcacagtactcctggcttatcaatggaacattccagcaaagcacacaagagctct

SEQ ID NO: 75918 - DNA, 120 bp, Artificial Sequence
  ENSG00000079385_8 (sequence is synthesized)
ttatccctaacatcactgtgaataatagtggatcctatacctgccacgccaataactcagtcactggctgcaacaggaccacagtcaagacgatcatagtcactgagctaagtccagtag

SEQ ID NO: 75919 - DNA, 120 bp, Artificial Sequence
  ENSG00000079385_9 (sequence is synthesized)
tagcaaagccccaaatcaaagccagcaagaccacagtcacaggagataaggactctgtgaacctgacctgctccacaaatgacactggaatctccatccgttggttcttcaaaaaccaga

SEQ ID NO: 75920 - DNA, 120 bp, Artificial Sequence
  ENSG00000079385_10 (sequence is synthesized)
gtctcccgtcctcggagaggatgaagctgtcccagggcaacaccaccctcagcataaaccctgtcaagagggaggatgctgggacgtattggtgtgaggtcttcaacccaatcagtaaga

SEQ ID NO: 75921 - DNA, 120 bp, Artificial Sequence
  ENSG00000079385_11 (sequence is synthesized)
accaaagcgaccccatcatgctgaacgtaaactataatgctctaccacaagaaaatggcctctcacctggggccattgctggcattgtgattggagtagtggccctggttgctctgatag

SEQ ID NO: 75922 - DNA, 120 bp, Artificial Sequence
  ENSG00000079385_12 (sequence is synthesized)
cagtagccctggcatgttttctgcatttcgggaagaccggcagggcaagcgaccagcgtgatctcacagagcacaaaccctcagtctccaaccacactcaggaccactccaatgacccac

SEQ ID NO: 75923 - DNA, 120 bp, Artificial Sequence
  ENSG00000079385_13 (sequence is synthesized)
ctaacaagatgaatgaagttacttattctaccctgaactttgaagcccagcaacccacacaaccaacttcagcctccccatccctaacagccacagaaataatttattcagaagtaaaaa

SEQ ID NO: 75924 - DNA, 120 bp, Artificial Sequence
  ENSG00000079385_14 (sequence is synthesized)
aacctgtcctgctcactgcagtgctgatgtatttcaagtctctcaccctcatcactaggagattcctttcccctgtaggggtagaggggtggggacagaaacaactttctcctactcttc

SEQ ID NO: 75925 - DNA, 120 bp, Artificial Sequence
  ENSG00000079385_15 (sequence is synthesized)
cttcctaataggcatctccaggctgcctggtcactgcccctctctcagtgtcaatagatgaaagtacattgggagtctgtaggaaacccaaccttcttgtcattgaaatttggcaaagct

SEQ ID NO: 75926 - DNA, 120 bp, Artificial Sequence
  ENSG00000079385_16 (sequence is synthesized)
gactttgggaaagagggaccagaacttcccctcccttccccttttcccaacctggacttgttttaaacttgcctgttcagagcactcattccttcccacccccagtcctgtcctatcact

SEQ ID NO: 75927 - DNA, 120 bp, Artificial Sequence
  ENSG00000079385_17 (sequence is synthesized)
ctaattcggatttgccatagccttgaggttatgtccttttccattaagtacatgtgccaggaaacaagagagagagaaagtaaaggcagtaatgccttctcctatttctccaaagccttg

SEQ ID NO: 75928 - DNA, 120 bp, Artificial Sequence
  ENSG00000079385_18 (sequence is synthesized)
tgtgaactcaccaaacacaagaaaatcaaatatataaccaatagtgaaatgccacacctttgtccactgtcagggttgtctacctgtaggatcagggtctaagcaccttggtgcttagct

SEQ ID NO: 75929 - DNA, 120 bp, Artificial Sequence
  ENSG00000079385_19 (sequence is synthesized)
agaataccacctaatccttctggcaagcctgtcttcagagaacccactagaagcaactaggaaaatcacttgccaaaatccaaggcaattcctgatggaaaatgcaaaagcacatatatg

SEQ ID NO: 75930 - DNA, 120 bp, Artificial Sequence
  ENSG00000079385_20 (sequence is synthesized)
ttttaatatctttatgggctctgttcaaggcagtgctgagagggaggggttatagcttcaggagggaaccagcttctgataaacacaatctgctaggaacttgggaaaggaatcagagag

SEQ ID NO: 75931 - DNA, 120 bp, Artificial Sequence
  ENSG00000079385_21 (sequence is synthesized)
ctgcccttcagcgattatttaaattattgttaaagaatacacaatttggggtattgggatttttctccttttctctgagacattccaccattttaatttttgtaactgcttatttatgtg

SEQ ID NO: 75932 - DNA, 120 bp, Artificial Sequence
  ENSG00000079385_22 (sequence is synthesized)
aaaagggttatttttacttagcttagctatgtcagccaatccgattgccttaggtgaaagaaaccaccgaaatccctcaggtcccttggtcaggagcctctcaagattttttttgtcaga

SEQ ID NO: 75933 - DNA, 120 bp, Artificial Sequence
  ENSG00000079385_23 (sequence is synthesized)
ggctccaaatagaaaataagaaaaggttttcttcattcatggctagagctagatttaactcagtttctaggcacctcagaccaatcatcaactaccattctattccatgtttgcacctgt

SEQ ID NO: 75934 - DNA, 120 bp, Artificial Sequence
  ENSG00000079385_24 (sequence is synthesized)
gcattttctgtttgcccccattcactttgtcaggaaaccttggcctctgctaaggtgtatttggtccttgagaagtgggagcaccctacagggacactatcactcatgctggtggcattg

SEQ ID NO: 75935 - DNA, 120 bp, Artificial Sequence
  ENSG00000079385_25 (sequence is synthesized)
tttacagctagaaagctgcactggtgctaatgccccttggggaaatggggctgtgaggaggaggattataacttaggcctagcctcttttaacagcctctgaaatttatcttttcttcta

SEQ ID NO: 75936 - DNA, 120 bp, Artificial Sequence
  ENSG00000079385_26 (sequence is synthesized)
tggggtctataaatgtatcttataataaaaaggaaggacaggaggaagacaggcaaatgtacttctcacccagtcttctacacagatggaatctctttggggctaagagaaaggttttat

SEQ ID NO: 75937 - DNA, 120 bp, Artificial Sequence
  ENSG00000079385_27 (sequence is synthesized)
tctatattgcttacctgatctcatgttaggcctaagaggctttctccaggaggattagcttggagttctctatactcaggtacctctttcagggttttctaaccctgacacggactgtgc

SEQ ID NO: 75938 - DNA, 120 bp, Artificial Sequence
  ENSG00000079385_28 (sequence is synthesized)
atactttccctcatccatgctgtgctgtgttatttaatttttcctggctaagatcatgtctgaattatgtatgaaaattattctatgtttttataataaaaataatatatcagacatcga

SEQ ID NO: 75939 - DNA, 120 bp, Artificial Sequence
  ENSG00000079385_29 (sequence is synthesized)
tctggtactaacatgctgggtctggaccatacactctgagggaagtaaattccttaactgatccttaaactccccaccctccaactgccacctccttcagctagaatcacctgaagtcag

SEQ ID NO: 75940 - DNA, 120 bp, Artificial Sequence
  ENSG00000079385_30 (sequence is synthesized)
taattcctggagcatcaacactaagatctggggtacaagctttctggttttcaaataggagcagagaagaaattttcttttgcagcctgtatccaacaggcacaaacaagtccaaattct

SEQ ID NO: 75941 - DNA, 120 bp, Artificial Sequence
  ENSG00000079385_31 (sequence is synthesized)
cccctgaaccctctcaattcatctgtgcagactctcttccctttgtttttctgatttctcacagctgaccttaggtccagcctggaatgtggggagggggttctctcagccccagaaagc

SEQ ID NO: 75942 - DNA, 120 bp, Artificial Sequence
  ENSG00000079385_32 (sequence is synthesized)
cccgtgtagcaggaggggcttcacagagggggaagcagaaagggtcctcaaggtcaatttgcttctgtcactaacatgtccctttctgtaacttcttggccttcttttacctattccatg

SEQ ID NO: 75943 - DNA, 120 bp, Artificial Sequence
  ENSG00000079385_33 (sequence is synthesized)
agatataaggaatatgtgaggttttaaaacagactcacaatagttttccctaaatgagagaaggaaatgcccttcatcagggatgagcagctcagactctgctccctgctctactcccgg

SEQ ID NO: 75944 - DNA, 120 bp, Artificial Sequence
  ENSG00000079385_34 (sequence is synthesized)
cttgcccggtgattggctctgccctgaccccatgtggggtaggacgcaggtgtgtgcagaaggtgtccaggtggcctgtcatgaatccagctaaatcaagatggcagtcaatggctgggc

SEQ ID NO: 75945 - DNA, 80 bp, Artificial Sequence
  ENSG00000079385_35 (sequence is synthesized)
atgaatccagctaaatcaagatggcagtcaatggctgggcgctgtggttcatgcctgtgatcccagtactttggaaggcc

SEQ ID NO: 75946 - DNA, 120 bp, Artificial Sequence
  ENSG00000079385_36 (sequence is synthesized)
tggtgtgcaaaatggataaaactcacaggaggcagaatatcaatgaagagaccattatagcaaacagaattgcaaagtggttaagagctcagctcaggccgggcacagtggctcacgcct

SEQ ID NO: 75947 - DNA, 120 bp, Artificial Sequence
  ENSG00000079385_37 (sequence is synthesized)
gaagacagacaagcaaagagatctagaatgtgaggtcaggtgttgacaagagccctggagggaacagagcagaaaaagcctcacttctaaccttctggaacccgcccaccactgcccagc

SEQ ID NO: 75948 - DNA, 120 bp, Artificial Sequence
  ENSG00000079385_38 (sequence is synthesized)
atctggggtcaggagggaggtgcagccctctccttacaattcatcacctgaacaaagacactcgaccttctgcagagggtcagggctatcccctggttggtgacctttgcacagctcact

SEQ ID NO: 75949 - DNA, 120 bp, Artificial Sequence
  ENSG00000079385_39 (sequence is synthesized)
gtgggacctgagagctggctaaaatctcagggaaaggagcatagccctaggccccaggccccaaccctattctcagtaggttatctcagatactctgcttgtccacagagctaagtccag

SEQ ID NO: 75950 - DNA, 120 bp, Artificial Sequence
  ENSG00000079385_40 (sequence is synthesized)
gccctggttgctctgatagcagtagccctggcatgttttctgcatttcgggaagaccggcagggcaagcgaccagcgtgatctcacagagcacaaaccctcagtctccaaccacaccaca

SEQ ID NO: 75951 - DNA, 120 bp, Artificial Sequence
  ENSG00000079387_0 (sequence is synthesized)
gaggccgttccttctggtctctctctcctgggccgcggagagaccgtctccctgccgttacagcaggccccatcccagcgcccagccgtacttggggaaaggccggttgcgattccgggg

SEQ ID NO: 75952 - DNA, 120 bp, Artificial Sequence
  ENSG00000079387_1 (sequence is synthesized)
ctttcccgccagagctgggtcttctctggggagagctgttttcaccgggaagctcggctttctgtggtaccggcttcatctcccgccttccttgagacccgagtgatatttcttgactac

SEQ ID NO: 75953 - DNA, 120 bp, Artificial Sequence
  ENSG00000079387_2 (sequence is synthesized)
ttctgcgtctcacgtaaacatttctccaactctcctactctgtggtatctccctgagatgtgatatcgctagtgccaccatcagaaagaaacgtctggaccctcctgctcaggactttgt

SEQ ID NO: 75954 - DNA, 120 bp, Artificial Sequence
  ENSG00000079387_3 (sequence is synthesized)
atctttgctaaagtcagtgatgtgaaaagacttgaaatggatgatattgctgataggatgaggatggatgctggagaagtgactttagtgaaccacaactccgtattcaaaacccacctc

SEQ ID NO: 75955 - DNA, 120 bp, Artificial Sequence
  ENSG00000079387_4 (sequence is synthesized)
ctgccacaaacaggttttccagaggaccagctttcgctttctgaccagcagattttatcttccaggcaaggacatttggaccgatcttttacatgttccacaagaagtgcagcttataat

SEQ ID NO: 75956 - DNA, 120 bp, Artificial Sequence
  ENSG00000079387_5 (sequence is synthesized)
ccaagctattactcagataatccttcctcagacagttttcttggctcaggcgatttaagaacctttggccagagtgcaaatggccaatggagaaattctaccccatcgtcaagctcatct

SEQ ID NO: 75957 - DNA, 120 bp, Artificial Sequence
  ENSG00000079387_6 (sequence is synthesized)
ttacaaaaatcaagaaacagccgaagtctttacctcgaaacccgaaagacctcaagtggattatcaaacagttttgcgggaaagtcaaaccatcactgccatgtatctgcatatgaaaaa

SEQ ID NO: 75958 - DNA, 120 bp, Artificial Sequence
  ENSG00000079387_7 (sequence is synthesized)
tcttttcctattaaacctgttccaagtccatcttggagtggttcatgtcgtcgaagtcttttgagccccaagaaaactcagaggcgacatgttagtacagcagaagagacagttcaagaa

SEQ ID NO: 75959 - DNA, 120 bp, Artificial Sequence
  ENSG00000079387_8 (sequence is synthesized)
gaagaaagagagatttacagacagctgctacagatggtcacagggaaacagtttactatagccaaacccaccacacattttcctttacacctgtctcgatgtcttagttccagtaaaaat

SEQ ID NO: 75960 - DNA, 120 bp, Artificial Sequence
  ENSG00000079387_9 (sequence is synthesized)
actttgaaagactcactgtttaaaaatggaaactcttgtgcatctcagatcattggctctgatacttcatcatctggatctgccagcattttaactaaccaggaacagctgtcccacagt

SEQ ID NO: 75961 - DNA, 120 bp, Artificial Sequence
  ENSG00000079387_10 (sequence is synthesized)
gtatattccctatcttcttataccccagatgttgcatttggatccaaagattctggtactcttcatcatccccatcatcaccactctgttccacatcagccagataacttagcagcttca

SEQ ID NO: 75962 - DNA, 120 bp, Artificial Sequence
  ENSG00000079387_11 (sequence is synthesized)
aatacacaatctgaaggatcagactctgtgattttactgaaagtgaaagattcccagactccaactcccagttctactttcttccaggcagagctgtggatcaaagaattaactagtgtt

SEQ ID NO: 75963 - DNA, 120 bp, Artificial Sequence
  ENSG00000079387_12 (sequence is synthesized)
tatgattctcgagcacgagaaagattgcgccagattgaagaacagaaggcattggccttacagcttcaaaaccagagattgcaggagcgggaacattcagtacatgattcagtagaacta

SEQ ID NO: 75964 - DNA, 120 bp, Artificial Sequence
  ENSG00000079387_13 (sequence is synthesized)
catcttcgtgtacctcttgaaaaggagattcctgttactgttgtccaagaaacacaaaaaaaaggtcataaattaactgatagtgaagatgaatttcctgaaattacagaggaaatggag

SEQ ID NO: 75965 - DNA, 120 bp, Artificial Sequence
  ENSG00000079387_14 (sequence is synthesized)
aaagaaataaagaatgtatttcgtaatgggaatcaggatgaagttctcagtgaagcatttcgcctgaccattacacgcaaagatattcaaactctaaaccatctgaattggctcaatgat

SEQ ID NO: 75966 - DNA, 120 bp, Artificial Sequence
  ENSG00000079387_15 (sequence is synthesized)
gagatcatcaatttctacatgaatatgctgatggagcgaagtaaagagaagggcttgccaagtgtgcatgcatttaatacctttttcttcactaaattaaaaacggctggttatcaggca

SEQ ID NO: 75967 - DNA, 120 bp, Artificial Sequence
  ENSG00000079387_16 (sequence is synthesized)
gtgaaacgttggacaaagaaagtagatgtattttctgttgacattcttttggtgcccattcacctgggagtacactggtgtctagctgttgtggactttagaaagaagaatattacctat

SEQ ID NO: 75968 - DNA, 120 bp, Artificial Sequence
  ENSG00000079387_17 (sequence is synthesized)
tacgactccatgggtgggataaacaatgaagcctgcagaatactcttgcaatacctaaagcaagaaagcattgacaagaaaaggaaagagtttgacaccaatggctggcagcttttcagc

SEQ ID NO: 75969 - DNA, 120 bp, Artificial Sequence
  ENSG00000079387_18 (sequence is synthesized)
aagaaaagccaggagattcctcagcagatgaatggaagtgactgtgggatgtttgcctgcaaatatgctgactgtattaccaaagacagaccaatcaacttcacacagcaacacatgcca

SEQ ID NO: 75970 - DNA, 120 bp, Artificial Sequence
  ENSG00000079387_19 (sequence is synthesized)
ttggaaacagctgctcccagccctctgctgttgtaacacccttgatcctggaccaggccctggcgagatgcattcacaagcacatctgcctttccttttgtatctcagatactatttttg

SEQ ID NO: 75971 - DNA, 120 bp, Artificial Sequence
  ENSG00000079387_20 (sequence is synthesized)
caaagaaactttggtgctgtgaaaggggtgagggacatccctaagctgaagagagagactgcttttcacttcttcagttctgccatcttgttttcaaagggctccagcctcactcagtcc

SEQ ID NO: 75972 - DNA, 120 bp, Artificial Sequence
  ENSG00000079387_21 (sequence is synthesized)
ctaattatgggactgagaaaagcttggaaagaatcttggtttcatataaattcttgttgttaggccttactaagaagtaggaaagggcatgggcaaaaggtagggataaaaaccaccagc

SEQ ID NO: 75973 - DNA, 120 bp, Artificial Sequence
  ENSG00000079387_22 (sequence is synthesized)
atatacatggacatacacacacacccacacacacaaacacacacacacacacaattttcacgatgtatggtcaggaatgtgactgtaaactggactttggggcccaggcataagtccctt

SEQ ID NO: 75974 - DNA, 120 bp, Artificial Sequence
  ENSG00000079387_23 (sequence is synthesized)
cctccaggacctttcctatttatatgtccctatacaaaatccatctgcttttatacgtagctgttttatcatctgtagcttcatcctatccggaggcacagcacatgagccctggacagg

SEQ ID NO: 75975 - DNA, 120 bp, Artificial Sequence
  ENSG00000079387_24 (sequence is synthesized)
tcccaaagttccaagcagtcctttccgtgaaagcaggggtttgcatgtgctaccaacacatgatacggggaagacccacccagggagcggtttcagtggcgcaacaaagcaccactttta

SEQ ID NO: 75976 - DNA, 120 bp, Artificial Sequence
  ENSG00000079387_25 (sequence is synthesized)
ctgttgcctacttctgaccaagaagaaaaaggaccttagtatttagcataaaattccagcgctggatgaatgcagatctagtttggtctgtggctagtttaaatatgtttctaaccacag

SEQ ID NO: 75977 - DNA, 120 bp, Artificial Sequence
  ENSG00000079387_26 (sequence is synthesized)
atatatacacatacatatatatatatatatatgtatgtataaaatttcacagggatatgcttttttttttaaagactgaatgtgttcaccatttagcctgtagatttatttccattttcc

SEQ ID NO: 75978 - DNA, 120 bp, Artificial Sequence
  ENSG00000079387_27 (sequence is synthesized)
cctgtagatttatttccattttccaaattccagcacacagagatcccagcccctatgagtagggtgtttgtggactacctaatggaatatttttgaggcctggatgaactttgccatatg

SEQ ID NO: 75979 - DNA, 120 bp, Artificial Sequence
  ENSG00000079387_28 (sequence is synthesized)
ggtagaggttacagagggaggtgatattttcagctaaaaaaaaaaacgggtggagtttggactgatcaacttgagatttaaaaactgctattccttttgttctttctagcatctctcccc

SEQ ID NO: 75980 - DNA, 120 bp, Artificial Sequence
  ENSG00000079387_29 (sequence is synthesized)
accctctgagagctcctcaggcttagatagtgaagtgatcaaatgccagtgtcattttgtacttaagttccaaagtaggaacattttatacttttttctgtattgtaataggtagttttg

SEQ ID NO: 75981 - DNA, 120 bp, Artificial Sequence
  ENSG00000079387_30 (sequence is synthesized)
tatgaaatcttttctcctctcccgttgtaccgcattctttccagcattgtgctttttccctgggcttatttgaaaattttactgttttatacaagctcgtttagtacatttttctatgtt

SEQ ID NO: 75982 - DNA, 120 bp, Artificial Sequence
  ENSG00000079387_31 (sequence is synthesized)
ttaccacaagttacaatttgaaaagaaaactattttttttaaatattccattgttaactgaatgttactgtttccactccagcaactacatgtcctcccttcaactgcctgccttttggg

SEQ ID NO: 75983 - DNA, 120 bp, Artificial Sequence
  ENSG00000079387_32 (sequence is synthesized)
gaaagaccaccttttgtgtgtttgttttttctctctctttctttccctttctctttctatctctctttatttttctttctttttctttgtttttgagttttctataggaaataaatagct

SEQ ID NO: 75984 - DNA, 120 bp, Artificial Sequence
  ENSG00000079387_33 (sequence is synthesized)
ttctatatatgagttgctggggaccttcacattctcttttagaaagctgtggcatgcagtctcattgcaggactcctggaatattgtctggttcttggtatttactgtatgtaagcaaca

SEQ ID NO: 75985 - DNA, 120 bp, Artificial Sequence
  ENSG00000079387_34 (sequence is synthesized)
acttgaaaggtggcaatatggtgtcgatttggactatgaatcaaaagacctttttcaggttctttcactattgtctgggggactcagaacaagattgttctctgtatttattgtttgtcc

SEQ ID NO: 75986 - DNA, 120 bp, Artificial Sequence
  ENSG00000079387_35 (sequence is synthesized)
atttaggtaacatctgtcttaccttcctcacagactttgtacagaccaaagcaacaaatatttattgccatgtatagcagaaaatgaaacatgcaacaaaagcactttgaaaaatatata

SEQ ID NO: 75987 - DNA, 120 bp, Artificial Sequence
  ENSG00000079387_36 (sequence is synthesized)
aggaattgttgagcctgtctgaatttgggccccctttctgactaatgcagttttgcacaaggtagaagttagtgaccctgagaccatcttaccaccctggacctggtccaaatacagact

SEQ ID NO: 75988 - DNA, 120 bp, Artificial Sequence
  ENSG00000079387_37 (sequence is synthesized)
tacacagtggaccattctttcctgagctagccaacaagagcaggagtagtatctggaaactttcccctttgtttaggggtaggctttgatgaccaggaaaaaaaaaaaggtatttctgca

SEQ ID NO: 75989 - DNA, 120 bp, Artificial Sequence
  ENSG00000079387_38 (sequence is synthesized)
tcctttaattaattaattatttgggctcatcataagttttcatcttatgtagtttaaatgccacactcaaaaatacaagcatagctataaactttttagaatcagtaattttagtgtttg

SEQ ID NO: 75990 - DNA, 120 bp, Artificial Sequence
  ENSG00000079387_39 (sequence is synthesized)
gaattctgctctatatattaaaattaagacaaggacgttaagacaaaataggctatgtatgagttctttgagaacagtacgttttagaaaactcattgttcctctgaattttaaaattac

SEQ ID NO: 75991 - DNA, 120 bp, Artificial Sequence
  ENSG00000079387_40 (sequence is synthesized)
gcactgctcagtcttacaacagaggtttgaagagaacacatgaagaagaatttagaaatatgcaagtagtggctgtgcagaatggctgatgctcaagaggcaacatcaaaaagctgtgct

SEQ ID NO: 75992 - DNA, 120 bp, Artificial Sequence
  ENSG00000079387_41 (sequence is synthesized)
attcagtagggtaacggctagccacaagcactgtttaaattaattcaaattcaaattgaaaatttagttactcagtgacactagccacattttaagtattcattagccacatgtggctag

SEQ ID NO: 75993 - DNA, 120 bp, Artificial Sequence
  ENSG00000079387_42 (sequence is synthesized)
tggctaccatattggacagggcaaatatagaacatttctattactacagaaatttctgttagataatgctgttatagaggatataaagttctgtttggaaaagagaaaatacttgtgaca

SEQ ID NO: 75994 - DNA, 82 bp, Artificial Sequence
  ENSG00000079387_43 (sequence is synthesized)
ttatcgtctgcctcagcctcccaaagtgctagtattacagatgatattgctgataggatgaggatggatgctggagaagtga

SEQ ID NO: 75995 - DNA, 120 bp, Artificial Sequence
  ENSG00000079387_44 (sequence is synthesized)
tttgtcatcttagttctcaagcccttcctcagacataagagaaagtgactaaaaggtagatagttattacattgggattttaaaagagtaacaccatttttggactttaaaccttaagga

SEQ ID NO: 75996 - DNA, 120 bp, Artificial Sequence
  ENSG00000079387_45 (sequence is synthesized)
tatgaacaaatccattttacattttcaacttctcatttacttagtgctgaattttgatgatagccagatcttactagaagagagaattttaagtaaatcttggtggatatgagaatattg

SEQ ID NO: 75997 - DNA, 120 bp, Artificial Sequence
  ENSG00000079393_0 (sequence is synthesized)
tgcccagccctgttccgctcaggcagagtcctgcccctgcacccactcccccattcccggccccaggccatgccccaggatggactcactgcagaagcaggacctccggaggcccaagat

SEQ ID NO: 75998 - DNA, 120 bp, Artificial Sequence
  ENSG00000079393_1 (sequence is synthesized)
ccatggggcagtccaggcatctccctaccagccgcccacattggcttcgctgcagcgcttgctgtgggtccgtcaggctgccacactgaaccatatcgatgaggtctggcccagcctctt

SEQ ID NO: 75999 - DNA, 120 bp, Artificial Sequence
  ENSG00000079393_2 (sequence is synthesized)
cctgggagatgcgtacgcagcccgggacaagagcaagctgatccagctgggaatcacccacgttgtgaatgccgctgcaggcaagttccaggtggacacaggtgccaaattctaccgtgg

SEQ ID NO: 76000 - DNA, 120 bp, Artificial Sequence
  ENSG00000079393_3 (sequence is synthesized)
gatacatccgagctgccctcagtgttccccaaggccgcgtgctggtacactgtgccatgggggtaagccgctctgccacacttgtcctggccttcctcatgatctgtgagaacatgacgc

SEQ ID NO: 76001 - DNA, 120 bp, Artificial Sequence
  ENSG00000079393_4 (sequence is synthesized)
tggtagaggccatccagacggtgcaggcccaccgcaatatctgccctaactcaggcttcctccggcagctccaggttctggacaaccgactggggcgggagacggggcggttctgatctg

SEQ ID NO: 76002 - DNA, 120 bp, Artificial Sequence
  ENSG00000079393_5 (sequence is synthesized)
gcaggcagccaggatccctgacccttggcccaaccccaccagcctggccctgggaacagcaggctctgctgtttctagtgaccctgagatgtaaacagcaagtgggggctgaggcagagg

SEQ ID NO: 76003 - DNA, 120 bp, Artificial Sequence
  ENSG00000079393_6 (sequence is synthesized)
cagggatagctgggtggtgacctcttagcgggtggatttccctgacccaattcagagattctttatgcaaaagtgagttcagtccatctctataataaaatattcatcgtcataaagaca

SEQ ID NO: 76004 - DNA, 120 bp, Artificial Sequence
  ENSG00000079393_7 (sequence is synthesized)
actggagaggcagagaggagtgaccacagaggcagaggggtgggcgggctggcccatggctgagacctctctcccagagctggggggagaggacaaagccacgccttgccccagcatcct

SEQ ID NO: 76005 - DNA, 120 bp, Artificial Sequence
  ENSG00000079393_8 (sequence is synthesized)
ggagctggaggagctcctgcgggcagggaagtcttcttgcagccgtgtggacgaagtttggcccaaccttttcataggagatgcggccacggcaaacaaccgctttgagctgtggaagct

SEQ ID NO: 76006 - DNA, 120 bp, Artificial Sequence
  ENSG00000079393_9 (sequence is synthesized)
gggcatcacccacgtgctgaacgccgcccacaagggcctctactgtcagggcggccctgacttctacggcagcagtgtgagctacctgggggtgccagcccacgacctccctgattttga

SEQ ID NO: 76007 - DNA, 120 bp, Artificial Sequence
  ENSG00000079393_10 (sequence is synthesized)
catcagtgcctacttctcctctgcggctgacttcatccaccgtgccctcaacacgcctggggccaaggtcctggtgcactgtgtggtgggcgtgagccgctctgccacgctggtcctggc

SEQ ID NO: 76008 - DNA, 120 bp, Artificial Sequence
  ENSG00000079393_11 (sequence is synthesized)
ctacctcatgctgcaccagcggctgtccctgcgccaggcggtgatcaccgtgaggcagcaccgatgggtcttccccaaccgaggcttcctgcaccagctctgcaggctggaccagcaact

SEQ ID NO: 76009 - DNA, 120 bp, Artificial Sequence
  ENSG00000079393_12 (sequence is synthesized)
gcggggtgccggccagagctgaggggccagagctggtccttactccctgccatggggctctgccactttgccaccctggcactgatcctgctggtgctgctggaggctctggcccaggcg

SEQ ID NO: 76010 - DNA, 120 bp, Artificial Sequence
  ENSG00000079393_13 (sequence is synthesized)
gacacacagaagatggtggaagcccagcgtggggtcggccctagagcctgctactccatctggctcctcctggcgcctacaccccctctcagccactgtcttcagtctccacagaaacag

SEQ ID NO: 76011 - DNA, 120 bp, Artificial Sequence
  ENSG00000079393_14 (sequence is synthesized)
gtttgtgttctgggcagaacctgcccagccctgttccgctcaggcagagtcctgcccctgcacccactcccccattcccggccccaggccatgccccaggtaggtggcaggccactcagc

SEQ ID NO: 76012 - DNA, 120 bp, Artificial Sequence
  ENSG00000079393_15 (sequence is synthesized)
cacctggagaggtcacagtgggggatgaggaggacagcttggtcttcacttccgccttgcccgacagcctcccactgggtgagcctggccaagccggcagcctcctgggtgcctgtttct

SEQ ID NO: 76013 - DNA, 120 bp, Artificial Sequence
  ENSG00000079393_16 (sequence is synthesized)
ttttctggtcctggcactgcctaccaaagggaaaagatgttcttcccagtatgcaccttccctagtcactggtccaggggatcaggggcagttagcaaagacaggaccccctctccaaca

SEQ ID NO: 76014 - DNA, 120 bp, Artificial Sequence
  ENSG00000079393_17 (sequence is synthesized)
cggcaccaggcccatattctggtgccgctgaaaatccagctccgcagggtccctgactccttcagccagcagatgcctgaaacaagctacctgacccgggtggggcctgacatccagtgc

SEQ ID NO: 76015 - DNA, 120 bp, Artificial Sequence
  ENSG00000079393_18 (sequence is synthesized)
ggcagaacctgcccagccctgttccgctcaggcagagtcctgcccctgcacccactcccccattcccggccccaggccatgccccagggtccctgactccttcagccagcagatgcctga

SEQ ID NO: 76016 - DNA, 120 bp, Artificial Sequence
  ENSG00000079432_0 (sequence is synthesized)
gtgccgctaccgctgccactgagaggagccaccggcgacgccagagccaggaatacgggtggacaaaaatgaagccaatgaagaaggcatgcactggcctttcaggtcctggcagtggca

SEQ ID NO: 76017 - DNA, 120 bp, Artificial Sequence
  ENSG00000079432_1 (sequence is synthesized)
gcaagtcccccccagccaccagggccaaggctctgaggcggcgaggggctggggagggtgacaagccagaggaggaggatgacgaggcacagcagccgcaaccacagtccgggcccgaag

SEQ ID NO: 76018 - DNA, 120 bp, Artificial Sequence
  ENSG00000079432_2 (sequence is synthesized)
aggctgaggaaggggaggaggaggaggctgagcggggccctggggctgaaggtcctccactggagctgcaccctggcgacccggctccaggcccagcagaggaccccaaaggggatgggg

SEQ ID NO: 76019 - DNA, 120 bp, Artificial Sequence
  ENSG00000079432_3 (sequence is synthesized)
aggcaggccgctgggagccctcactcagccgcaagacagccacgttcaagtctcgagcgcccaagaagaagtatgtggaggagcacggagctggcagcagtggggtggctggggcccctg

SEQ ID NO: 76020 - DNA, 120 bp, Artificial Sequence
  ENSG00000079432_4 (sequence is synthesized)
aagagcgggtgcggacccctgaggaggccagtggcctgggggtgcctccacggccacccacctccactcgttcctcctccactgacacagccagcgagcactcggcggacctggaggatg

SEQ ID NO: 76021 - DNA, 120 bp, Artificial Sequence
  ENSG00000079432_5 (sequence is synthesized)
agccggctgaggcttgtggtccaggcccttggccccctggcagcaccagtggcagctatgacctgcggcagctgcggtcccagcgggtgctggctcggcgtggtgatggccttttcctgc

SEQ ID NO: 76022 - DNA, 120 bp, Artificial Sequence
  ENSG00000079432_6 (sequence is synthesized)
cggctgtggtgcgccaggtgcgccgaagccaggacctgggcgtgcagttccctggtgaccgagccctgactttctatgagggggtgccaggcgctggtgtggatgtagttttggatgcca

SEQ ID NO: 76023 - DNA, 120 bp, Artificial Sequence
  ENSG00000079432_7 (sequence is synthesized)
cacccccaccaggtgccctggtggtgggcacagctgtctgtacctgtgtggagcccggcgtggctgcctaccgggaaggtgtggtggtggaggtggccaccaagccagctgcctacaagg

SEQ ID NO: 76024 - DNA, 120 bp, Artificial Sequence
  ENSG00000079432_8 (sequence is synthesized)
tccgtctcagccctggccccagctcccagccaggcctaccaggcagcctcccgcagcccccacagccactgcaccgtgagccagaggaggctgtgtgggtggcccgctccagcctacgcc

SEQ ID NO: 76025 - DNA, 120 bp, Artificial Sequence
  ENSG00000079432_9 (sequence is synthesized)
tgctgcgccccccctgggaacctgagaccatgctgaggaagccccctacaggccctgaggaagagcaggcagagcctggggccaccctgccaccctgccctgctgccctggaccccaaac

SEQ ID NO: 76026 - DNA, 120 bp, Artificial Sequence
  ENSG00000079432_10 (sequence is synthesized)
agcccgaggatgctgaggtctctaagatcagctttggtggcaacctgggtactcactgtgaggagggcgaggagaagcaccctccagccctgggtaccccagccctgctcccactgcccc

SEQ ID NO: 76027 - DNA, 120 bp, Artificial Sequence
  ENSG00000079432_11 (sequence is synthesized)
caccccagctcctgtcaccaccacccaagtctccagcctttgtgggccccggccgccctggcgagcagccctcgccctgccaggaggggagccagggcggcagccgcagcagcagcgtgg

SEQ ID NO: 76028 - DNA, 120 bp, Artificial Sequence
  ENSG00000079432_12 (sequence is synthesized)
cctccctggaaaaggggacagcaccggcagcccgggcccgcacgccactgacagccgcccagcagaagtacaagaagggcgatgtggtctgcacacccagcggaatacgaaagaagttca

SEQ ID NO: 76029 - DNA, 120 bp, Artificial Sequence
  ENSG00000079432_13 (sequence is synthesized)
acggcaagcagtggcgccggctgtgctcacgagatggctgcatgaaggagtcacagcggcgaggctactgctcacgccacctgtccatgcgaaccaaagagatggaaggcctggcagaca

SEQ ID NO: 76030 - DNA, 120 bp, Artificial Sequence
  ENSG00000079432_14 (sequence is synthesized)
gtgggcctggcggggcgggccggcccgcggccgtggcagcccgtgagggcagcacggagtttgactggggtgatgagacgtcgagggacagtgaggccagcagtgtggcggctcgtggag

SEQ ID NO: 76031 - DNA, 120 bp, Artificial Sequence
  ENSG00000079432_15 (sequence is synthesized)
actcacggccacgcctggtggcccctgctgacttgtcacgctttgagttcgacgagtgtgaggcggccgtgatgctggtgtcgctgggcagctcgcgctcaggcacgccctccttctcac

SEQ ID NO: 76032 - DNA, 120 bp, Artificial Sequence
  ENSG00000079432_16 (sequence is synthesized)
ccgtctccactcaatcgcccttctcgccagccccatcaccctcaccctcaccactcttcggcttccgccctgccaactttagccccatcaatgcctcaccagtcatccagcgcactgcag

SEQ ID NO: 76033 - DNA, 120 bp, Artificial Sequence
  ENSG00000079432_17 (sequence is synthesized)
tccgcagtcgccacctgagcgccagcacccctaaggcaggcgtgctgacgccaccagacctgggcccccacccaccgccacctgccccccgagagcgccactcctctggaatcctaccca

SEQ ID NO: 76034 - DNA, 120 bp, Artificial Sequence
  ENSG00000079432_18 (sequence is synthesized)
ccttccagaccaacctgaccttcaccgtgcccatcagccctgggcgacggaagacagagctgttgccgcatccaggggccttgggggcccctggcgcagggggtggaggagccgccccag

SEQ ID NO: 76035 - DNA, 120 bp, Artificial Sequence
  ENSG00000079432_19 (sequence is synthesized)
actttcccaagagtgacagcttagactctggtgtggactcagtgtcccacacacctacaccctccacgccggctggcttccgggccgtgtcccctgctgtgcccttctctcgctcccgcc

SEQ ID NO: 76036 - DNA, 120 bp, Artificial Sequence
  ENSG00000079432_20 (sequence is synthesized)
agccctcaccattgctgctgttgccaccccctgccggcctgacctcggatccagggccctctgtgcgcagggtgcctgctgtgcagcgggactcacctgttattgtccgcaaccctgatg

SEQ ID NO: 76037 - DNA, 120 bp, Artificial Sequence
  ENSG00000079432_21 (sequence is synthesized)
tgccactgccctccaaattccctggggaggtgggcactgctggtgaggtgcgggctgggggacctgggcggggctgccgtgaaaccccagtgccccctggggtggccagtgggaagcctg

SEQ ID NO: 76038 - DNA, 120 bp, Artificial Sequence
  ENSG00000079432_22 (sequence is synthesized)
gcctgcccccacctctgccagcccccgtgcccatcaccgtgcctccagctgcaccaactgccgtggcccagccgatgcccgcctttggcctggcttcttcaccctttcagcctgtggcct

SEQ ID NO: 76039 - DNA, 120 bp, Artificial Sequence
  ENSG00000079432_23 (sequence is synthesized)
tccacccctcacctgctgccctgttgcccgttttggtgcccagcagctataccagccaccctgcccccaagaaggaagtcatcatgggccggcctggaacagtgtggacgaatgtggaac

SEQ ID NO: 76040 - DNA, 120 bp, Artificial Sequence
  ENSG00000079432_24 (sequence is synthesized)
ctcgctctgtggctgtgttcccttggcactccttagtccccttcctggcacccagccagcctgacccctccgtgcagccgagcgaggcccagcaacctgccagccacccagtggcctcca

SEQ ID NO: 76041 - DNA, 120 bp, Artificial Sequence
  ENSG00000079432_25 (sequence is synthesized)
accagagcaaagaacctgctgagtcggcagctgttgctcatgaacggccaccaggtgggacagggagtgctgaccctgagcggccccctggagccacatgccctgagagcccaggacccg

SEQ ID NO: 76042 - DNA, 120 bp, Artificial Sequence
  ENSG00000079432_26 (sequence is synthesized)
gacccccacaccctttgggggtggtggaatctggtaagggtccgcctcccaccacggaggaggaggcctccggccccccaggagagccccggctggacagtgagacagagagtgaccatg

SEQ ID NO: 76043 - DNA, 120 bp, Artificial Sequence
  ENSG00000079432_27 (sequence is synthesized)
atgatgccttcctctccatcatgtctcctgagatccagttgcctctaccgcccggaaaacgtcggacccagtccctcagtgccctacccaaggaacgggactcatcttctgagaaggatg

SEQ ID NO: 76044 - DNA, 120 bp, Artificial Sequence
  ENSG00000079432_28 (sequence is synthesized)
gacgcagccccaacaagcgggagaaggaccacatccggcggcccatgaatgccttcatgatcttcagcaagcggcaccgggccctggtccaccagcgtcatcccaaccaggacaaccgga

SEQ ID NO: 76045 - DNA, 120 bp, Artificial Sequence
  ENSG00000079432_29 (sequence is synthesized)
ccgtcagcaagatcctgggcgagtggtggtatgccctggggcccaaggagaagcagaagtaccacgacctggccttccaggtgaaggaggcccacttcaaggcccacccagattggaagt

SEQ ID NO: 76046 - DNA, 120 bp, Artificial Sequence
  ENSG00000079432_30 (sequence is synthesized)
aagtccagctcagaggccaagcccacgagcctggggctggcaggagggcacaaggagacgcgggagcggagcatgtcggagacgggcactgctgctgcccctggggtgtcctctgagctc

SEQ ID NO: 76047 - DNA, 120 bp, Artificial Sequence
  ENSG00000079432_31 (sequence is synthesized)
ctggggtgtcctctgagctcctgtccgttgcagcccagacactcctgagctcagacaccaaggctccggggagcagctcctgtggggcagaacggctacacacagttgggggacctggct

SEQ ID NO: 76048 - DNA, 120 bp, Artificial Sequence
  ENSG00000079432_32 (sequence is synthesized)
cagcccggccccgagctttctcccacagcggggtacacagcctggacggcggagaagtagacagtcaggcgctacaggaactgacgcagatggtgtctggccctgcatcgtactctggcc

SEQ ID NO: 76049 - DNA, 120 bp, Artificial Sequence
  ENSG00000079432_33 (sequence is synthesized)
caaagccttctacccagtatggagctccaggaccctttgcagcccctggtgagggaggtgccttggcggccactgggcggcccccgctgctgcccacccgagcttctcgttctcagcgtg

SEQ ID NO: 76050 - DNA, 120 bp, Artificial Sequence
  ENSG00000079432_34 (sequence is synthesized)
ggatgatgatgtcattgctgacgatggcttcggcaccactgacattgatctcaagtgcaaggagcgggtgaccgacagcgagagtggggacagctctggggaggacccagagggcaacaa

SEQ ID NO: 76051 - DNA, 120 bp, Artificial Sequence
  ENSG00000079432_35 (sequence is synthesized)
gggctttggtcggaaggtgttttcacctgtgatccgttcctcctttacccactgccgccccccactggaccctgagcccccagggcccccggatcctcctgtagcctttggcaaaggcta

SEQ ID NO: 76052 - DNA, 120 bp, Artificial Sequence
  ENSG00000079432_36 (sequence is synthesized)
tggttccgccccatcctcctctgcgtcctcgcctgcttcctcctcagcctcggcagccacctccttctcactgggctcaggaaccttcaaggcccaggagtctggtcagggcagcacagc

SEQ ID NO: 76053 - DNA, 120 bp, Artificial Sequence
  ENSG00000079432_37 (sequence is synthesized)
gggccccctacggcccccaccccctggggctgggggtccagcgacaccttccaaggcaacccggttcctcccaatggatcctgccaccttccggcgcaagagacccgaaagtgtgggtgg

SEQ ID NO: 76054 - DNA, 120 bp, Artificial Sequence
  ENSG00000079432_38 (sequence is synthesized)
cctggagccaccaggcccctcagtcatcgcggcccctcccagcggaggaggaaacatcctgcagacactggtgctgcccccaaacaaggaggagcaagagggcggcggagccagagtgcc

SEQ ID NO: 76055 - DNA, 120 bp, Artificial Sequence
  ENSG00000079432_39 (sequence is synthesized)
ctccgcccccgccccatcactggcctatggggccccagcagctcccctgtcccgtcctgccgccaccatggtcaccaatgtggtgcggcctgtcagcagcactcctgtgcccatcgcctc

SEQ ID NO: 76056 - DNA, 120 bp, Artificial Sequence
  ENSG00000079432_40 (sequence is synthesized)
taagcccttccccacctctggccgggctgaggcgtctccaaatgacacagcaggtgccaggactgaaatgggcactgggtctcgggtgcctgggggctccccgctgggtgtcagcttagt

SEQ ID NO: 76057 - DNA, 120 bp, Artificial Sequence
  ENSG00000079432_41 (sequence is synthesized)
gtattcggacaagaagtcggcagcagccacctcaccagccccacacttggtggctggacccctgctgggcactgtggggaaggcgcctgccactgtcactaacctactggtgggcacccc

SEQ ID NO: 76058 - DNA, 120 bp, Artificial Sequence
  ENSG00000079432_42 (sequence is synthesized)
ggggtatggggcccctgcgccccctgctgtccagttcattgcccagggggcccctggtggtgggaccactgcgggctcaggagcaggtgctgggagtggccccaatgggccagtacccct

SEQ ID NO: 76059 - DNA, 120 bp, Artificial Sequence
  ENSG00000079432_43 (sequence is synthesized)
gggcatcctgcaaccaggtgccctgggcaaggctgggggaatcacccaggtacagtacatcctgcccacgctgccccagcagcttcaggtggcacctgccccagcaccagcccctgggac

SEQ ID NO: 76060 - DNA, 120 bp, Artificial Sequence
  ENSG00000079432_44 (sequence is synthesized)
tgcacccaccaccagcatccgtttcaccctcccaccgggcacttccaccaacggcaaagtcctggctgccactgcacccactcctggcatccccatcctgcagtctgtaccctccgcccc

SEQ ID NO: 76061 - DNA, 120 bp, Artificial Sequence
  ENSG00000079432_45 (sequence is synthesized)
cctgcagtctgtaccctccgccccaccccccaaagcccagtcagtttctcccgtgcaggccccgcccccgggtggctcagcccagctgctgcctgggaaggtcctagtgcctctggccgc

SEQ ID NO: 76062 - DNA, 120 bp, Artificial Sequence
  ENSG00000079432_46 (sequence is synthesized)
ccctagcatgtcagtgcggggtggaggggccggccagccactgccactggtgagcccgcccttctcagtacctgtgcagaatggtgcccagccccccagcaagatcatccagctgacccc

SEQ ID NO: 76063 - DNA, 120 bp, Artificial Sequence
  ENSG00000079432_47 (sequence is synthesized)
ggtgcctgtgagcacacccagcggcctggtgccgcccctgagcccagccacactccctggacccacctctcagcctcagaaggtcctgttgccctcctccaccagaatcacctatgtgca

SEQ ID NO: 76064 - DNA, 120 bp, Artificial Sequence
  ENSG00000079432_48 (sequence is synthesized)
gtcagcgggcgggcacgcgctgcccctgggtaccagccctgcgtccagccaggctggaacagtcacctcgtacgggcccacgagctctgtagctctaggcttcacctcgctggggcccag

SEQ ID NO: 76065 - DNA, 120 bp, Artificial Sequence
  ENSG00000079432_49 (sequence is synthesized)
cggccccgccttcgtgcagcccctgctctcaggccaagccccactgctggctcccggtcaggtgggcgtgtcacctgtgcccagtccccagctgccgcctgcctgtgcagcccccggagg

SEQ ID NO: 76066 - DNA, 120 bp, Artificial Sequence
  ENSG00000079432_50 (sequence is synthesized)
tcctgtcataacagcattttactctggcagccctgcacccacctcctcagcacccctggcccagccatcccaggcccccccaagcctggtctacactgtggccaccagcacaaccccacc

SEQ ID NO: 76067 - DNA, 120 bp, Artificial Sequence
  ENSG00000079432_51 (sequence is synthesized)
tgcagccaccattctgcccaagggcccgccagcccctgccactgccaccccagccccgactagccctttccccagcgccacaggttccatgacctacagcttagtggcccccaaggccca

SEQ ID NO: 76068 - DNA, 120 bp, Artificial Sequence
  ENSG00000079432_52 (sequence is synthesized)
gcggcccagcccgaaggccccccagaaagtgaaggcagccatcgccagcattcccgtggggtcctttgaggcaggtgcctctgggcggcctggccctgcaccccggcagcctctggagcc

SEQ ID NO: 76069 - DNA, 120 bp, Artificial Sequence
  ENSG00000079432_53 (sequence is synthesized)
tggcccagtccgagagccaactgccccagagtctgagcttgaggggcagcccacaccaccagcccctccacccctgccagagacctggactcccacggcccggagcagccccccactgcc

SEQ ID NO: 76070 - DNA, 120 bp, Artificial Sequence
  ENSG00000079432_54 (sequence is synthesized)
cccacctgctgaggagcggaccagcgccaagggccctgagaccatggccagcaaattccccagctcatcttcagactggcgcgtccctgggcagggcctggagaatcgtggggagcctcc

SEQ ID NO: 76071 - DNA, 120 bp, Artificial Sequence
  ENSG00000079432_55 (sequence is synthesized)
cactcctcccagcccggccccagctccagctgtagcccctggtggcagcagcgagagcagcagtgggcgggcagccggggacaccccggagcgcaaggaggcggctggtactggcaagaa

SEQ ID NO: 76072 - DNA, 120 bp, Artificial Sequence
  ENSG00000079432_56 (sequence is synthesized)
ggtgaaggtgcggcccccgcccctgaagaagacctttgactctgtggacaaggtcctgtcagaagtggacttcgaagagcgctttgctgagttgcctgagtttcggcctgaggaggtgct

SEQ ID NO: 76073 - DNA, 120 bp, Artificial Sequence
  ENSG00000079432_57 (sequence is synthesized)
gccctcccccaccctgcagtctctggccacctcaccccgggccatcctgggctcttaccgcaagaagaggaagaactccacggacctggattcagcacccgaggaccccacctcgcccaa

SEQ ID NO: 76074 - DNA, 120 bp, Artificial Sequence
  ENSG00000079432_58 (sequence is synthesized)
gcgcaagatgagaagacgctccagctgcagctcggagcccaacacccccaagagtgccaagtgcgagggggacatcttcacctttgaccgtacaggtacagaagccgaggacgtgcttgg

SEQ ID NO: 76075 - DNA, 120 bp, Artificial Sequence
  ENSG00000079432_59 (sequence is synthesized)
ggagctagagtatgacaaggtgccatactcctccctgcggcgcaccctggaccagcgccgggccctggtcatgcagctctttcaggaccatggcttcttcccgtcagcccaggccacagc

SEQ ID NO: 76076 - DNA, 120 bp, Artificial Sequence
  ENSG00000079432_60 (sequence is synthesized)
cgccttccaggcccgctatgcagacatctttccctccaaggtttgtctgcagttgaagatccgtgaggtgcgccagaagatcatgcaggctgccactcccacggagcagccccctggagc

SEQ ID NO: 76077 - DNA, 120 bp, Artificial Sequence
  ENSG00000079432_61 (sequence is synthesized)
tgaggctcctctccctgtaccgccccccactggcaccgctgctgcccctgcccccactcccagccccgcagggggccctgaccccacctcacccagctcggactctggcacggcccaggc

SEQ ID NO: 76078 - DNA, 120 bp, Artificial Sequence
  ENSG00000079432_62 (sequence is synthesized)
tgccccgccactgcctccacccccagagtcggggcctggacagcctggctgggagggggctccccagccctcccccccacccccaggtccctccacagctgccacaggcaggtgagggac

SEQ ID NO: 76079 - DNA, 120 bp, Artificial Sequence
  ENSG00000079432_63 (sequence is synthesized)
ccctgagaagatgccaggacttatagtaccccctcaggacatggacagtatgtgggggcaggaaggttatctcctcccgggtaaagccatttcgtcctctccagtttggggcggaatgag

SEQ ID NO: 76080 - DNA, 120 bp, Artificial Sequence
  ENSG00000079432_64 (sequence is synthesized)
gcctgctcctcttgtaaatacccccttccctcgaagctccctcccggtgctggggggcagctgaggggctgcaggggcagtctccctcctccaagcccctgtacataacctggagcgtgt

SEQ ID NO: 76081 - DNA, 120 bp, Artificial Sequence
  ENSG00000079432_65 (sequence is synthesized)
gaccttcagagcttttcactttatgcaaaatggctcctgtgagggctgcaagctggagggtggtgcaggccttgggccacagggaggcgcctgtggaatagggggagttcatgcacccct

SEQ ID NO: 76082 - DNA, 120 bp, Artificial Sequence
  ENSG00000079432_66 (sequence is synthesized)
tttttccccagaggggctggactcaggttagtttgggggtgggggctcctgcactttgccacaggcacggggagggttttctcctcaccccctctgccctcccaacttgggttgtacttt

SEQ ID NO: 76083 - DNA, 120 bp, Artificial Sequence
  ENSG00000079432_67 (sequence is synthesized)
ctaagaaggtgattccccctgcccttgcccccttccccagaacaaaacatgttgatcatgtgcaatatttcttactgtgccgagaagccgcaatgagcgagattaaagctgtttaacaca

SEQ ID NO: 76084 - DNA, 120 bp, Artificial Sequence
  ENSG00000079432_68 (sequence is synthesized)
ggaggtgcgagcccctgccgggtcccccctgcgccggaccatgtattcggcccacaggcccctgatgcccgcgtccagcgcggcctcccgtggcctcggcatgttcgtgtggacgaatgt

SEQ ID NO: 76085 - DNA, 120 bp, Artificial Sequence
  ENSG00000079432_69 (sequence is synthesized)
aggggagcgcgtagtagtggcggggcggggaggcggtggtggttcggcgcggggctcgctcggagcgcacggacgcacgcacgctggtccgtctgcccgcccggggccggaggtcgaccc

SEQ ID NO: 76086 - DNA, 80 bp, Artificial Sequence
  ENSG00000079432_70 (sequence is synthesized)
gcggggcggcggcgccggcagccgggacgcgcggggccagagccgttacccgccggagctgcgagggagggagggaacga

SEQ ID NO: 76087 - DNA, 80 bp, Artificial Sequence
  ENSG00000079432_71 (sequence is synthesized)
gcgagggagggagggaacgagcgagccagcgagcggggaagggagggggccgcccccgcgcacgcgcgtcgcgccccgcc

SEQ ID NO: 76088 - DNA, 80 bp, Artificial Sequence
  ENSG00000079432_72 (sequence is synthesized)
gactccgcgagggaggagggagagggagggggcggtgccgatggcccccgtgccgcgcgccccgtgacggcccccgcgcg

SEQ ID NO: 76089 - DNA, 120 bp, Artificial Sequence
  ENSG00000079432_73 (sequence is synthesized)
ggctgctccagctgttgcaggtccattcaccattttgtgtgttggagtaaaaaaaaaagggagaatcgagagggagagccggagggggggcggggagggaccggaccggaccgagccggg

SEQ ID NO: 76090 - DNA, 120 bp, Artificial Sequence
  ENSG00000079432_74 (sequence is synthesized)
gggttggggggtacgtcccggagcccccggtgcccgggtattaatggctccattagtggccgggagggaggcgcattagcggcggcgacggcgtctggctcccattaccaccggcggcag

SEQ ID NO: 76091 - DNA, 120 bp, Artificial Sequence
  ENSG00000079432_75 (sequence is synthesized)
aggttgccctgtgactgtgggcaggacccctctctgactcccctgtgaaatagaatgcagtgagggcttgggtgggcactcagacggtggcaggaaggccctgccgctgctgcagccttg

SEQ ID NO: 76092 - DNA, 120 bp, Artificial Sequence
  ENSG00000079435_0 (sequence is synthesized)
attcctaatcctcccaccaaagaaagaggcacagagttcattacttagtgggggccagctgtgatcggccaactgccagctgccttaaaaaggaagaccagtgatgctaggatggagtga

SEQ ID NO: 76093 - DNA, 120 bp, Artificial Sequence
  ENSG00000079435_1 (sequence is synthesized)
aacccaagaggaagtgccatcatgaggaatcaatgagagatctgtgaagagagagggctgggtgggagcccagaaggatagaacctggaagatcaatatctcccgtgagggaaataacaa

SEQ ID NO: 76094 - DNA, 120 bp, Artificial Sequence
  ENSG00000079435_2 (sequence is synthesized)
tggagccaggttctaagtcagtgtctaggtcagactggcaacctgaaccacaccagaggcctataaccccgctagagcctgggccagaaaagacacccatagcccagccagaatcgaaga

SEQ ID NO: 76095 - DNA, 120 bp, Artificial Sequence
  ENSG00000079435_3 (sequence is synthesized)
ctctgcagggatccaatacccaacagaagcctgcttcaaaccaaagacccctcacccagcaggagacccctgcacaacatgatgctgaatcccagaaggaacctagagcccaacaaaaat

SEQ ID NO: 76096 - DNA, 120 bp, Artificial Sequence
  ENSG00000079435_4 (sequence is synthesized)
ctgcttcacaagaggaatttcttgccccacagaagcccgcaccacagcaatcaccttacatccaaagggtgctgctcactcaacaggaagctgcctcccagcagggacctgggctaggaa

SEQ ID NO: 76097 - DNA, 120 bp, Artificial Sequence
  ENSG00000079435_5 (sequence is synthesized)
aagaatctataactcaacaggagccagcattgagacaaagacatgtagcccagccagggcctgggccaggagagccacctccagctcaacaagaagctgaatcaacacctgcggcccagg

SEQ ID NO: 76098 - DNA, 120 bp, Artificial Sequence
  ENSG00000079435_6 (sequence is synthesized)
ctaaacctggagccaaaagggagccatctgccccgactgaatctacgtcccaagagacacctgaacagtcagacaagcaaacaacgccagtccagggagccaaatccaagcagggatctt

SEQ ID NO: 76099 - DNA, 120 bp, Artificial Sequence
  ENSG00000079435_7 (sequence is synthesized)
tgacagagctgggatttctaacaaaacttcaggaactatccatacagcgatcagccctagagtggaaggcactttctgagtgggtcacagattctgagtcagaatcagatgtgggatcat

SEQ ID NO: 76100 - DNA, 120 bp, Artificial Sequence
  ENSG00000079435_8 (sequence is synthesized)
cttcagacacagattctccagccacgatgggtggaatggtggcccagggagtgaagctaggcttcaaaggaaaatctggttataaagtgatgtcaggatacagtgggacgtcgccacatg

SEQ ID NO: 76101 - DNA, 120 bp, Artificial Sequence
  ENSG00000079435_9 (sequence is synthesized)
agaaaaccagtgctcggaatcacagacactaccaggatacagcctcaaggctcatccacaacatggacctgcgcacaatgacacagtcgctggtgactctggcggaggacaacatagcct

SEQ ID NO: 76102 - DNA, 120 bp, Artificial Sequence
  ENSG00000079435_10 (sequence is synthesized)
tcttctcgagccagggtcctggggaaacggcccagcggctgtcaggcgtttttgccggtgtacgggagcaggcgctggggctggagccggccctgggccgcctgctgggtgtggcgcacc

SEQ ID NO: 76103 - DNA, 120 bp, Artificial Sequence
  ENSG00000079435_11 (sequence is synthesized)
tctttgacctggacccagagacaccggccaacgggtaccgcagcctagtgcacacagcccgctgctgcctggcgcacctcctgcacaaatcccgctatgtggcctccaaccgccgcagca

SEQ ID NO: 76104 - DNA, 120 bp, Artificial Sequence
  ENSG00000079435_12 (sequence is synthesized)
tcttcttccgcaccagccacaacctggccgagctggaggcctacctggctgccctcacccagctccgcgctctggtctactacgcccagcgcctgctggttaccaatcggccgggggtac

SEQ ID NO: 76105 - DNA, 120 bp, Artificial Sequence
  ENSG00000079435_13 (sequence is synthesized)
tcttctttgagggcgacgaggggctcaccgccgacttcctccgggagtatgtcacgctgcataagggatgcttctatggccgctgcctgggcttccagttcacgcctgccatccggccat

SEQ ID NO: 76106 - DNA, 120 bp, Artificial Sequence
  ENSG00000079435_14 (sequence is synthesized)
tcctgcagaccatctccattgggctggtgtccttcggggagcactacaaacgcaacgagacaggcctcagtgtggccgccagctctctcttcaccagcggccgctttgccatcgaccccg

SEQ ID NO: 76107 - DNA, 120 bp, Artificial Sequence
  ENSG00000079435_15 (sequence is synthesized)
acttctggaaagccttctggaacatcaccgagatggaagtgctatcgtctctggccaacatggcatcggccaccgtgagggtaagccgcctgctcagcctgccacccgaagcctttgaga

SEQ ID NO: 76108 - DNA, 120 bp, Artificial Sequence
  ENSG00000079435_16 (sequence is synthesized)
tgccactgactgccgaccccacgctcacggtcaccatctcacccccactggcccacacaggccctgggcccgtcctcgtcaggctcatctcctatgacctgcgtgaaggacaggacagtg

SEQ ID NO: 76109 - DNA, 120 bp, Artificial Sequence
  ENSG00000079435_17 (sequence is synthesized)
aggagctcagcagcctgataaagtccaacggccaacggagcctggagctgtggccgcgcccccagcaggcaccccgctcgcggtccctgatagtgcacttccacggcggtggctttgtgg

SEQ ID NO: 76110 - DNA, 120 bp, Artificial Sequence
  ENSG00000079435_18 (sequence is synthesized)
cccagacctccagatcccacgagccctacctcaagagctgggcccaggagctgggcgcccccatcatctccatcgactactccctggcccctgaggcccccttcccccgtgcgctggagg

SEQ ID NO: 76111 - DNA, 120 bp, Artificial Sequence
  ENSG00000079435_19 (sequence is synthesized)
agtgcttcttcgcctactgctgggccatcaagcactgcgccctccttggctcaacaggggaacgaatctgccttgcgggggacagtgcaggcgggaacctctgcttcaccgtggctcttc

SEQ ID NO: 76112 - DNA, 120 bp, Artificial Sequence
  ENSG00000079435_20 (sequence is synthesized)
gggcagcagcctacggggtgcgggtgccagatggcatcatggcagcctacccggccacaatgctgcagcctgccgcctctccctcccgcctgctgagcctcatggaccccttgctgcccc

SEQ ID NO: 76113 - DNA, 120 bp, Artificial Sequence
  ENSG00000079435_21 (sequence is synthesized)
tcagtgtgctctccaagtgtgtcagcgcctatgctggtgcaaagacggaggaccactccaactcagaccagaaagccctcggcatgatggggctggtgcggcgggacacagccctgctcc

SEQ ID NO: 76114 - DNA, 120 bp, Artificial Sequence
  ENSG00000079435_22 (sequence is synthesized)
tccgagacttccgcctgggtgcctcctcatggctcaactccttcctggagttaagtgggcgcaagtcccagaagatgtcggagcccatagcagagccgatgcgccgcagtgtgtctgaag

SEQ ID NO: 76115 - DNA, 120 bp, Artificial Sequence
  ENSG00000079435_23 (sequence is synthesized)
cagcactggcccagccccagggcccactgggcacggattccctcaagaacctgaccctgagggacttgagcctgaggggaaactccgagacgtcgtcggacacccccgagatgtcgctgt

SEQ ID NO: 76116 - DNA, 120 bp, Artificial Sequence
  ENSG00000079435_24 (sequence is synthesized)
cagctgagacacttagcccctccacaccctccgatgtcaacttcttattaccacctgaggatgcaggggaagaggctgaggccaaaaatgagctgagccccatggacagaggcctgggcg

SEQ ID NO: 76117 - DNA, 120 bp, Artificial Sequence
  ENSG00000079435_25 (sequence is synthesized)
tccgtgccgccttccccgagggtttccacccccgacgctccagccagggtgccacacagatgcccctctactcctcacccatagtcaagaaccccttcatgtcgccgctgctggcacccg

SEQ ID NO: 76118 - DNA, 120 bp, Artificial Sequence
  ENSG00000079435_26 (sequence is synthesized)
acagcatgctcaagagcctgccacctgtgcacatcgtggcgtgcgcgctggaccccatgctggacgactcggtcatgctcgcgcggcgactgcgcaacctgggccagccggtgacgctgc

SEQ ID NO: 76119 - DNA, 120 bp, Artificial Sequence
  ENSG00000079435_27 (sequence is synthesized)
gcgtggtggaggacctgccgcacggcttcctgaccctagcggcgctgtgccgcgagacgcgccaggccgcagagctgtgcgtggagcgcatccgcctcgtcctcactcctcccgccggag

SEQ ID NO: 76120 - DNA, 120 bp, Artificial Sequence
  ENSG00000079435_28 (sequence is synthesized)
ccgggccgagcggggagacgggggctgcgggggtagacgggggctgcggggggcgacactaaaagcctgttgttcccatctgcgccggcctccgtcatgaatgccttccgggccgggcgg

SEQ ID NO: 76121 - DNA, 120 bp, Artificial Sequence
  ENSG00000079435_29 (sequence is synthesized)
aaggggacgcgggctgtgccttacttaagtcgggggtggcaagggggcggggcgggggcccgaaagctgagaccctcgccacggggagggggacgcgcacacacaccggtcaccgagacg

SEQ ID NO: 76122 - DNA, 120 bp, Artificial Sequence
  ENSG00000079435_30 (sequence is synthesized)
gctggacctgcacgccaccgctgccttttgctgctgctgctgcggcgaccgccgcagggacggggactggccctcccttgcaggtcggtttggtttgttgtaaataaaagtatttaatta

SEQ ID NO: 76123 - DNA, 68 bp, Artificial Sequence
  ENSG00000079435_31 (sequence is synthesized)
atttttgtgtttcgccttggcctcccaaagtactgggactacaggcgtgagccactgcgcccagcctc

SEQ ID NO: 76124 - DNA, 120 bp, Artificial Sequence
  ENSG00000079435_32 (sequence is synthesized)
gcgtgagccactgcgcccagcctccttatcccttttgaagcgattggatattctcgggtccctgggaccacagatgcctgaagttctgggcgttaaaactgggcccagaaaggggaaaac

SEQ ID NO: 76125 - DNA, 120 bp, Artificial Sequence
  ENSG00000079435_33 (sequence is synthesized)
gggtttattgccccaggctgctactggcacaagccacagaccagcagtcccagcccagggaagctcggaagatgcctaggagggcctcaaggctcatccacaacatggacctgcgcacaa

SEQ ID NO: 76126 - DNA, 120 bp, Artificial Sequence
  ENSG00000079435_34 (sequence is synthesized)
agggactagctgacgcccggatcggcttgggagcagagtccggaatgcgagcttcgtggaccagggttcccgctcggattccgtattcgctgtgtgaccaagggcaacggatgccctcag

SEQ ID NO: 76127 - DNA, 120 bp, Artificial Sequence
  ENSG00000079435_35 (sequence is synthesized)
tgtttcccacctggggaatgcttcaagcgccgatgttcagggctccagcgctcttgagaggataagggggaaggaggttagcaggtgttactcaaagaggaagtctagcgttcacgcctg

SEQ ID NO: 76128 - DNA, 120 bp, Artificial Sequence
  ENSG00000079435_36 (sequence is synthesized)
agacaggagagggaaagcggggctccctcctccaacggctctcaggcacagccacgcctccagcgctggcgccccgcctcgtctttgagttggcagaggacctggcccgcccccacccca

SEQ ID NO: 76129 - DNA, 120 bp, Artificial Sequence
  ENSG00000079435_37 (sequence is synthesized)
ggcagaggctcagaggcgccccactttcccccttcaaaaggcgggccgggccgcgtgctagggcatccctccctgggaaggtgagtgggatggcgagactgagccagcacatgggaggct

SEQ ID NO: 76130 - DNA, 120 bp, Artificial Sequence
  ENSG00000079435_38 (sequence is synthesized)
tcccagcacgtgggaagatcgggacttccctgctggggtgctccccgcggggctccgcactagtcctgcccgaaggacgcttttcgccacccccggggttgcctttttgttggccgcgag

SEQ ID NO: 76131 - DNA, 120 bp, Artificial Sequence
  ENSG00000079435_39 (sequence is synthesized)
ccctttaatgcgcggtagggggcggagccagatcttaaattctggcggttgggggcggagcacggcagcggagggagaccagaattggttagggagctggacccagagaagagcaagctc

SEQ ID NO: 76132 - DNA, 120 bp, Artificial Sequence
  ENSG00000079435_40 (sequence is synthesized)
gggattgggtaataggggggcccgacagtagtgtgtagcgaggattggccctccgggcagggcctcgcggctggaattggcccccgcgggaggaccgcggggaattgatggagttggccg

SEQ ID NO: 76133 - DNA, 120 bp, Artificial Sequence
  ENSG00000079459_0 (sequence is synthesized)
gaagcacctactccacaggtccagccggccggtgagcgcctggggaccgcagaggtgagagtcgcgcccgggagtccgccgcctgcgccaggatggagttcgtgaaatgccttggccacc

SEQ ID NO: 76134 - DNA, 120 bp, Artificial Sequence
  ENSG00000079459_1 (sequence is synthesized)
ccgaagagttctacaacctggtgcgcttccggatcgggggcaagcggaaggtgatgcccaagatggaccaggactcgctcagcagcagcctgaaaacttgctacaagtatctcaatcaga

SEQ ID NO: 76135 - DNA, 120 bp, Artificial Sequence
  ENSG00000079459_2 (sequence is synthesized)
ccagtcgcagtttcgcagctgttatccaggcgctggatggggaaatgcgcaacgcagtgtgcatattttatctggttctccgagctctggacacactggaagatgacatgaccatcagtg

SEQ ID NO: 76136 - DNA, 120 bp, Artificial Sequence
  ENSG00000079459_3 (sequence is synthesized)
tggaaaagaaggtcccgctgttacacaactttcactctttcctttaccaaccagactggcggttcatggagagcaaggagaaggatcgccaggtgctggaggacttcccaacgatctccc

SEQ ID NO: 76137 - DNA, 120 bp, Artificial Sequence
  ENSG00000079459_4 (sequence is synthesized)
ttgagtttagaaatctggctgagaaataccaaacagtgattgccgacatttgccggagaatgggcattgggatggcagagtttttggataagcatgtgacctctgaacaggagtgggaca

SEQ ID NO: 76138 - DNA, 120 bp, Artificial Sequence
  ENSG00000079459_5 (sequence is synthesized)
agtactgccactatgttgctgggctggtcggaattggcctttcccgtcttttctcagcctcagagtttgaagaccccttagttggtgaagatacagaacgtgccaactctatgggcctgt

SEQ ID NO: 76139 - DNA, 120 bp, Artificial Sequence
  ENSG00000079459_6 (sequence is synthesized)
ttttgcagaaaacaaacatcatccgtgactatctggaagaccagcaaggaggaagagagttctggcctcaagaggtttggagcaggtatgttaagaagttaggggattttgctaagccgg

SEQ ID NO: 76140 - DNA, 120 bp, Artificial Sequence
  ENSG00000079459_7 (sequence is synthesized)
agaatattgacttggccgtgcagtgcctgaatgaacttataaccaatgcactgcaccacatcccagatgtcatcacctacctttcgagactcagaaaccagagtgtgtttaacttctgtg

SEQ ID NO: 76141 - DNA, 120 bp, Artificial Sequence
  ENSG00000079459_8 (sequence is synthesized)
caccaatatgccagctgtcaaagccatcatatatcagtatatggaagagatttatcatagaatccccgactcagacccatcttctagcaaaacaaggcagatcatctccaccatccggac

SEQ ID NO: 76142 - DNA, 120 bp, Artificial Sequence
  ENSG00000079459_9 (sequence is synthesized)
gcagaatcttcccaactgtcagctgatttcccgaagccactactcccccatctacctgtcgtttgtcatgcttttggctgccctgagctggcagtacctgaccactctctcccaggtaac

SEQ ID NO: 76143 - DNA, 120 bp, Artificial Sequence
  ENSG00000079459_10 (sequence is synthesized)
agaagactatgttcagactggagaacactgatcccaaatttgtccatagctgaagtccaccataaagtggatttactttttttctttaaggatggatgttgtgttctctttatttttttc

SEQ ID NO: 76144 - DNA, 120 bp, Artificial Sequence
  ENSG00000079459_11 (sequence is synthesized)
ctactactttaatccctaaaagaacgctgtgtggctgggacctttaggaaagtgaaatgcaggtgagaagaacctaaacatgaaaggaaagggtgcctcatcccagcaacctgtccttgt

SEQ ID NO: 76145 - DNA, 120 bp, Artificial Sequence
  ENSG00000079459_12 (sequence is synthesized)
gggtgatgatcactgtgctgcttgtggctcatggcagagcattcagtgccacggtttaggtgaagtcgctgcatatgtgactgtcatgagatcctacttagtatgatcctggctagaatg

SEQ ID NO: 76146 - DNA, 120 bp, Artificial Sequence
  ENSG00000079459_13 (sequence is synthesized)
ataattaaaagtatttaatttgaagcaccatttgaatgttcgtaatagtagaaaatgatgtgaattttctttctgttcggctcctatttttctcatcattttgttttctttaattgggtt

SEQ ID NO: 76147 - DNA, 120 bp, Artificial Sequence
  ENSG00000079459_14 (sequence is synthesized)
gaatggagtagatagaaatatttatggtttaggtaacagttagatgtttcctaagaatgcaaactgccttttccacacaaaggctgggaataaaattctgggtattctcgtattctcatt

SEQ ID NO: 76148 - DNA, 120 bp, Artificial Sequence
  ENSG00000079459_15 (sequence is synthesized)
taaaggagtttagctttcagagagaaacagcaggattgcttttgaccttttagaagattggtctccagtaaaggtggacatttttgagatttttataataaagaatttaattgctctgca

SEQ ID NO: 76149 - DNA, 120 bp, Artificial Sequence
  ENSG00000079459_16 (sequence is synthesized)
aaaaacggtggcaacacgctgggtttgctttacaacgcttgggaagctttgttgtttgcaataaattttaatacttgtctgtttcggtctgcactgcctttatgagctgtaacactcaca

SEQ ID NO: 76150 - DNA, 120 bp, Artificial Sequence
  ENSG00000079459_17 (sequence is synthesized)
gggtaggtttgcagcttcactcctgaagccagtaagacaacgaacccactgggagaaacaaacaactccagacgcgccgacttaagagctgtaatactcgctgtgacggtctgcagcttc

SEQ ID NO: 76151 - DNA, 120 bp, Artificial Sequence
  ENSG00000079459_18 (sequence is synthesized)
gtgggcggtttcattcctgaagtcagtgagaccaagaaccaaccaattccggacacacttggactcgacagactctaaggctctacagagagcggctgcagagctcacccggctggcagg

SEQ ID NO: 76152 - DNA, 120 bp, Artificial Sequence
  ENSG00000079459_19 (sequence is synthesized)
agccaccgaggccggacacgtgggcgacttattgaccaagtggggaggaagcagccccgcactgctctcccgactgcggaccaccgttgggctcctgcgcatcctaagccccaccgcctc

SEQ ID NO: 76153 - DNA, 80 bp, Artificial Sequence
  ENSG00000079459_20 (sequence is synthesized)
cgattcccatggccgcagccgcctgcggcaccaaggccatggccctcttcaagcgcaccttggtgctgagtcccgccgcg

SEQ ID NO: 76154 - DNA, 120 bp, Artificial Sequence
  ENSG00000079459_21 (sequence is synthesized)
gctgcttgcctcctgccgcctggccctgcaaggactggcctcggggagagggcggcaggctgtggagccgcctgccccagtcccactcccactcccactcccactcccactcccactcct

SEQ ID NO: 76155 - DNA, 120 bp, Artificial Sequence
  ENSG00000079459_22 (sequence is synthesized)
aattgatggcgggggagccggatgtcagtggatggaaaattattacgaggaaacacaggggtgtgcattcttgctgaaggcaggccagagttatcagacatcacctgagggatggagggg

SEQ ID NO: 76156 - DNA, 120 bp, Artificial Sequence
  ENSG00000079459_23 (sequence is synthesized)
gatgtggaacctaatcggctgtctagggtgatcagatactgaagttgggggattctggtcaaatcaatttagcaggattcttggtaaaactgggcgatgcaaagacagatgcgttgagta

SEQ ID NO: 76157 - DNA, 120 bp, Artificial Sequence
  ENSG00000079459_24 (sequence is synthesized)
caaagtccaggccttattgggaagaggatttcagcggagcccgagtagagtttggtctagggagactctgtcactgggaggacgagcgagccgctcggaagtgcgctgggttcccttagc

SEQ ID NO: 76158 - DNA, 120 bp, Artificial Sequence
  ENSG00000079459_25 (sequence is synthesized)
ttcaccacctcttccggagctctccccgccttgctgccttccatcgcttcatcctcggtgcttcctgagttttaaaatcgcctatctacgcttccaagttccaatgagttatctaacgtc

SEQ ID NO: 76159 - DNA, 120 bp, Artificial Sequence
  ENSG00000079459_26 (sequence is synthesized)
atctggggcaaggggcgcggcgagcagggccgacgcctgggtgttcccgtccccctttcctcgagccttccccctgtagggcccgggtggacgcggccgtcctggctgacctgtccctgc

SEQ ID NO: 76160 - DNA, 120 bp, Artificial Sequence
  ENSG00000079459_27 (sequence is synthesized)
ccccgcaagccgccctgggcatgagcgacttttgcgtggttcccggtggttgcgctccccgtttcgtcccctccgtgagcatcggcgcttaccggtattttaacccgagggttacacatc

SEQ ID NO: 76161 - DNA, 120 bp, Artificial Sequence
  ENSG00000079459_28 (sequence is synthesized)
gcacattacacccatgaacttagaccagttgcctttatgtatgatcgtatttatactgagaagttactgtgttttttgactttcttttctatttgctacatattagttcggtctaaacgt

SEQ ID NO: 76162 - DNA, 120 bp, Artificial Sequence
  ENSG00000079459_29 (sequence is synthesized)
ttggtcttctggtctccatagttctacattggttaaatgcaactcacttctgggagtagtggtgacattcaactagtaggctttttaataaactacagaagttcattactctcatgtaag

SEQ ID NO: 76163 - DNA, 120 bp, Artificial Sequence
  ENSG00000079459_30 (sequence is synthesized)
gaaggaaaactaatgtaactttcgttaagtatgaaaagcgttggatatccttatagttctttagagttaagggtgagatgggtttagaaagtggccaggcacaagttattttaaaataaa

SEQ ID NO: 76164 - DNA, 120 bp, Artificial Sequence
  ENSG00000079459_31 (sequence is synthesized)
ggggttacgcatcttgtctacggactgttgtgttcataattgctaacgtggttgtccggtagcctccatacatgtggagaaaggttaaataagcattctgagggcagcataatgtgaggg

SEQ ID NO: 76165 - DNA, 120 bp, Artificial Sequence
  ENSG00000079459_32 (sequence is synthesized)
aataccaaacagtgattgccgacatttgccggagaatgggcattgggatggcagagtttttggataagcatgtgacctctgaacaggagtgggacaagtgctttaaaaatcgtctcttac

SEQ ID NO: 76166 - DNA, 120 bp, Artificial Sequence
  ENSG00000079459_33 (sequence is synthesized)
gtttttatttaactacttggataatttgtagctacttttatgatttagtaatgtcactgtttaaccaggtttggatattagatgatcctaacaattcactatcctgtggcctaaagagac

SEQ ID NO: 76167 - DNA, 120 bp, Artificial Sequence
  ENSG00000079459_34 (sequence is synthesized)
aatcagcgcccgtcagcccaccccacgaggccgcagctagccccgctggcggccgaggccggttgaagtgggcggagcggcgggcggggcgtcgccgtactaggcctgccccctgtccgg

SEQ ID NO: 76168 - DNA, 120 bp, Artificial Sequence
  ENSG00000079459_35 (sequence is synthesized)
gtttttattccaacaagaaaattattcgtacgcgattattgaatgaatagacaaattcagccaagttcttctggtctggaccagcctggctgatttctgtaacttttttgggccaacagg

SEQ ID NO: 76169 - DNA, 120 bp, Artificial Sequence
  ENSG00000079459_36 (sequence is synthesized)
acagtagcaaatgtgactcaggccgaggcttgataggtgcctgaacatcggagtctttctttcagtgtccatgtgcttcagtaaacacactagaaaataaatttctggtttttgtcccca

SEQ ID NO: 76170 - DNA, 120 bp, Artificial Sequence
  ENSG00000079462_0 (sequence is synthesized)
cgggaagcgccgggcgagcccactgtgcggccgtcgtgggggaagcgaaggttcctgattccacctacctcctaagtgaaggcttccgtccctggagaggaggcggcgccctgtatcggc

SEQ ID NO: 76171 - DNA, 120 bp, Artificial Sequence
  ENSG00000079462_1 (sequence is synthesized)
cttcgtcctccgcgggtgtgctagcgttgggacggtcctttgttgccgcgaggggtaggagtgggcgtggcggagccagctccgttcggaacactcccgggccgacccgactcgctcatc

SEQ ID NO: 76172 - DNA, 120 bp, Artificial Sequence
  ENSG00000079462_2 (sequence is synthesized)
ctgcaggagctgcggcgccaagatgagtggagaggagaacccagccagcaagcccacgccggtgcaggacgtacagggcgacgggcgctggatgtccctgcaccatcggttcgtggctga

SEQ ID NO: 76173 - DNA, 120 bp, Artificial Sequence
  ENSG00000079462_3 (sequence is synthesized)
cagcaaagataaggaacccgaagtcgtcttcatcggggactccttggtccagctcatgcaccagtgcgagatctggcgcgagctcttctctcctctgcatgcacttaactttggcattgg

SEQ ID NO: 76174 - DNA, 120 bp, Artificial Sequence
  ENSG00000079462_4 (sequence is synthesized)
gagctggaacacatccggcccaagattgtggtggtctgggtgggcaccaacaaccacggacacacagcagagcaggtgactggtggcatcaaggccattgtgcaactggtgaatgagcga

SEQ ID NO: 76175 - DNA, 120 bp, Artificial Sequence
  ENSG00000079462_5 (sequence is synthesized)
cagccccaggcccgggttgtggtgctgggcctgcttccgcgaggccaacatcccaacccacttcgggagaagaaccgacaggtgaacgagctggtacgggcggcactggctggccaccct

SEQ ID NO: 76176 - DNA, 120 bp, Artificial Sequence
  ENSG00000079462_6 (sequence is synthesized)
cgggcccacttcctagatgccgaccctggctttgtgcactcagatggcaccatcagccatcatgacatgtatgattacctgcatctgagccgcctgggctacacacctgtttgccgggct

SEQ ID NO: 76177 - DNA, 120 bp, Artificial Sequence
  ENSG00000079462_7 (sequence is synthesized)
ctgcactccctgcttctgcgtctgctggcccaagaccagggccaaggtgctcccctgctggagcccgcaccctaagcatcctgctgccttcccacaacattaaactctccttcctcagtg

SEQ ID NO: 76178 - DNA, 120 bp, Artificial Sequence
  ENSG00000079462_8 (sequence is synthesized)
tcactctgtacagcaaatggtttcttcccatttgctagacagagggctagattttccccgcccactctcgactcttcaggtagttcgcccctccccgtgaccggtgggtggtttctccct

SEQ ID NO: 76179 - DNA, 120 bp, Artificial Sequence
  ENSG00000079482_0 (sequence is synthesized)
aaggaagtcttccgctcgctccggagcgaggagcctgtagagaggctgttcccagctccagctctaacctcgcctacaccttgggcgggcccaagtgtcacgtttgcaattgctcaggaa

SEQ ID NO: 76180 - DNA, 120 bp, Artificial Sequence
  ENSG00000079482_1 (sequence is synthesized)
ggatccggcccgtctccggaggcaagtcgggctgcggtttttgctgcttatctgggaaggcgatgcctaagggacatgctgcttgctaggcagcaccctgccgggatccgactgcgatag

SEQ ID NO: 76181 - DNA, 120 bp, Artificial Sequence
  ENSG00000079482_2 (sequence is synthesized)
ttagctctccctggccctgaagccatcgccggggcgcctgttctctgtccggaccagccagcgctcctcaggagtctcactgaaacagaaccatgggtcatcccccgctggagttcagcg

SEQ ID NO: 76182 - DNA, 120 bp, Artificial Sequence
  ENSG00000079482_3 (sequence is synthesized)
actgctacctggacagccccgatttccgcgagaggctcaagtgttatgagcaggaactggagaggaccaacaaattcatcaaagacgtaatcaaagacggcaacgcgcttatcagcgcta

SEQ ID NO: 76183 - DNA, 120 bp, Artificial Sequence
  ENSG00000079482_4 (sequence is synthesized)
tgagaaattattcttctgctgttcagaaattttcccagacgctgcagtcatttcagtttgatttcattggagacactctgactgatgatgaaattaacatcgctgaatccttcaaggaat

SEQ ID NO: 76184 - DNA, 120 bp, Artificial Sequence
  ENSG00000079482_5 (sequence is synthesized)
ttgctgaattgctcaacgaggtagaaaatgagaggatgatgatggtacacaatgctagtgatttgctgattaaacccttggaaaatttccggaaggaacaaataggcttcaccaaggagc

SEQ ID NO: 76185 - DNA, 120 bp, Artificial Sequence
  ENSG00000079482_6 (sequence is synthesized)
ggaaaaagaaatttgaaaaggatggtgagaggttttattctttactggatcggcacttacacctgtcttcaaaaaagaaagaatctcagttacaagaggcagacctacaggtggacaagg

SEQ ID NO: 76186 - DNA, 120 bp, Artificial Sequence
  ENSG00000079482_7 (sequence is synthesized)
agaggcacaattttttcgagtcctctcttgattatgtttatcaaatccaggaagttcaggagtccaagaagttcaatattgtggagcctgtcttggcctttcttcatagtctgttcattt

SEQ ID NO: 76187 - DNA, 120 bp, Artificial Sequence
  ENSG00000079482_8 (sequence is synthesized)
ctaacagcctgactgtggagctcacacaggatttcctcccatacaaacaacagctccaactcagtttacagaatacaagaaatcatttctccagtacccgggaagagatggaagaactta

SEQ ID NO: 76188 - DNA, 120 bp, Artificial Sequence
  ENSG00000079482_9 (sequence is synthesized)
agaaaaggatgaaagaagctccccagacatgcaaacttccaggacagccaactattgaaggctatctctatacacaagagaaatgggctttaggaatatcctgggtgaaatactattgcc

SEQ ID NO: 76189 - DNA, 120 bp, Artificial Sequence
  ENSG00000079482_10 (sequence is synthesized)
agtatgagaaagagaccaaaacactgaccatgacgcctatggagcagaagccaggtgctaagcaggggcccttggacttaacactgaagtactgtgtgagaaggaagacggagtctatcg

SEQ ID NO: 76190 - DNA, 120 bp, Artificial Sequence
  ENSG00000079482_11 (sequence is synthesized)
acaagaggttctgttttgacatagaaactaatgaaaggccaggaaccatcactctgcaggccctttcagaagctaacagaaggctatggatggaagccatggatgggaaagaacctatct

SEQ ID NO: 76191 - DNA, 120 bp, Artificial Sequence
  ENSG00000079482_12 (sequence is synthesized)
accacagccctataacaaaacagcaagaaatggagctaaatgaagtgggcttcaagtttgtcaggaagtgcatcaatattattgagaccaaagggatcaagacagaagggttgtaccgca

SEQ ID NO: 76192 - DNA, 120 bp, Artificial Sequence
  ENSG00000079482_13 (sequence is synthesized)
ctgtgggcagcaatattcaggttcagaagctgctgaatgccttttttgatcctaaatgcccaggagatgttgattttcataatagtgactgggacattaagacaatcaccagctccttga

SEQ ID NO: 76193 - DNA, 120 bp, Artificial Sequence
  ENSG00000079482_14 (sequence is synthesized)
aattctacctcaggaatctttctgaacctgtcatgacctatagacttcacaaagagctggtctctgctgccaagtctgacaacctggattaccgcctaggagctattcactccctggtat

SEQ ID NO: 76194 - DNA, 120 bp, Artificial Sequence
  ENSG00000079482_15 (sequence is synthesized)
ataagctaccagaaaagaaccgagagatgctggaacttctgataagacacttggtcaatgtgtgtgagcacagcaaagagaatcttatgaccccctccaacatgggagtaatctttgggc

SEQ ID NO: 76195 - DNA, 120 bp, Artificial Sequence
  ENSG00000079482_16 (sequence is synthesized)
ccaccctgatgagagctcaggaggacactgtggccgccatgatgaacatcaaattccagaacatagtggtggaaatactaatcgagcactttggcaagatctatttaggtccacctgagg

SEQ ID NO: 76196 - DNA, 120 bp, Artificial Sequence
  ENSG00000079482_17 (sequence is synthesized)
aaagcgctgcaccgccagtgcctccgcctcgggtgacagcaagaaggcacaaaccaatcacgatttcaaagcgcttgctgcgagaaaggacggttttctatacttcttccctggatgaaa

SEQ ID NO: 76197 - DNA, 120 bp, Artificial Sequence
  ENSG00000079482_18 (sequence is synthesized)
gcgaagatgaaatccaacatcaaacaccgaatggtactatcaccagcagcatagaaccccccaagccaccacaacaccccaaactacctattcagaggagtggggaaactgatcctggga

SEQ ID NO: 76198 - DNA, 120 bp, Artificial Sequence
  ENSG00000079482_19 (sequence is synthesized)
ggaagtccccaagcaggcctattttggatggcaagttggagccctgcccagaggtggacgtggggaagttggtgtctaggctgcaggatggagggaccaagatcaccccaaaggccacca

SEQ ID NO: 76199 - DNA, 120 bp, Artificial Sequence
  ENSG00000079482_20 (sequence is synthesized)
atggacccatgccaggctctgggcccaccaagaccccctctttccacataaagagaccagctccccggcccctggcccaccacaaggagggggatgctgacagtttcagcaaagtgcggc

SEQ ID NO: 76200 - DNA, 120 bp, Artificial Sequence
  ENSG00000079482_21 (sequence is synthesized)
ctccaggagaaaagccaaccatcatccgccccccagtgaggcccccagatcctccctgccgggcagctactccccaaaagccagaaccaaagccagatattgtggctggcaatgcggggg

SEQ ID NO: 76201 - DNA, 120 bp, Artificial Sequence
  ENSG00000079482_22 (sequence is synthesized)
aaatcacatcatctgtggtggcttccaggaccaggttttttgaaacagcttcccggaaaacaggaagttctcaaggcagacttcctggagatgaaagttgaggctacaggttttaaaagc

SEQ ID NO: 76202 - DNA, 120 bp, Artificial Sequence
  ENSG00000079482_23 (sequence is synthesized)
cttggcctcagaggaccctttccaggttctgaaagagtctttcttcttcaaacctttgtgtgcggagtcattttgtgttgaagagcagctccttcctagccttgcactttcagactctct

SEQ ID NO: 76203 - DNA, 120 bp, Artificial Sequence
  ENSG00000079482_24 (sequence is synthesized)
ctgggaggccataaaataaggagcatatgtcctagacaggtgtttatatctcctttgtattctgtcttcatcccctcagaaggtctgttttgagttcctataacactgtgaagagctgga

SEQ ID NO: 76204 - DNA, 120 bp, Artificial Sequence
  ENSG00000079482_25 (sequence is synthesized)
ctccctcaagccagactctgccaaaaccaagatatccacttacctgagttgaagaggggagctcagttttcaactcttccctgaacttcctgcttcctcagagggccattgaactctgag

SEQ ID NO: 76205 - DNA, 120 bp, Artificial Sequence
  ENSG00000079482_26 (sequence is synthesized)
agatttggggctaaagactgatctcaggggtcttaccttgaactgaaggccacttgagttggggccattgcttaccttggttggaagggaatagaaatgtttgctgaacattggagaatc

SEQ ID NO: 76206 - DNA, 120 bp, Artificial Sequence
  ENSG00000079482_27 (sequence is synthesized)
tcaacatgtctcctactgaggatatggacactggtgccatgtcagcgctctggtgctgcagtatgttgccaagagcccgtctgctcctgcgaggctatgagtgggatgagtgatgccccc

SEQ ID NO: 76207 - DNA, 120 bp, Artificial Sequence
  ENSG00000079482_28 (sequence is synthesized)
acagcacctccatgtggacttaggaaggtggccttcctgctgttacatgcagccacttaggacaaatctgcaaagcatgttttgcatgtaaaagcctaggtctatttggattattctttc

SEQ ID NO: 76208 - DNA, 120 bp, Artificial Sequence
  ENSG00000079482_29 (sequence is synthesized)
tccttttttttgacagcttcctgtcaagcaatcaagaaacaaacaaaagctgaacacatttctttttaaaaaaaggagactgtgtttggtcctgtaggagttctattttggggtcaaatg

SEQ ID NO: 76209 - DNA, 120 bp, Artificial Sequence
  ENSG00000079482_30 (sequence is synthesized)
ctagaaaaattgttaaggtggattgaggccaggcagctgtcactgctgcttcatgtttgccttctgcacataaactcttttatctcctgaaaaaagcagttcttaacccagtgtccatgg

SEQ ID NO: 76210 - DNA, 120 bp, Artificial Sequence
  ENSG00000079482_31 (sequence is synthesized)
ctccatgatgcccctgagatggtatgcacaattccatgacaatatgccctttctggggagatagtccataatgttctgctaaatttcaaatgggctcgtgacccaaaaaagtcaagaacc

SEQ ID NO: 76211 - DNA, 120 bp, Artificial Sequence
  ENSG00000079482_32 (sequence is synthesized)
acagcacttgagtaaaatactctttttacaatccatataagcccttgattggaagggcttttcaaaatcatttagtctaacaactgcccagtttccagtcgggggaactgaggcagagca

SEQ ID NO: 76212 - DNA, 120 bp, Artificial Sequence
  ENSG00000079482_33 (sequence is synthesized)
aggtagtgatcacaccagtacaagatctcaggtcccaggctcctatgcaagttttttttccccattatatcacacttatctagcaagggaccttgtggtttgtggctttagtggccatca

SEQ ID NO: 76213 - DNA, 120 bp, Artificial Sequence
  ENSG00000079482_34 (sequence is synthesized)
tttctgggggttggcttttaccctttttcttgaatatttgccaccaagtgaaaaatgttaggacataaacccttgccaggtccctttcatttgctatctctattattggaaaggacctaa

SEQ ID NO: 76214 - DNA, 120 bp, Artificial Sequence
  ENSG00000079482_35 (sequence is synthesized)
aaattggtgtaatggggcagaaatctgaggaatggacatttctaattcctgtttgttgaagggaagttgctggaaagagcatcagtacttgtttctatgcagatgcctgggccgtagctt

SEQ ID NO: 76215 - DNA, 120 bp, Artificial Sequence
  ENSG00000079482_36 (sequence is synthesized)
gtctgtagcgtctgtataattataatgttgcccagtgtgagggaaagagctttcctacttgcactcttctaccaaggccctgttagtgcactgattatagtactgacagataaacctaga

SEQ ID NO: 76216 - DNA, 120 bp, Artificial Sequence
  ENSG00000079482_37 (sequence is synthesized)
taaagagatagagagtgagtacatgcacactcatgtgcaaacccactcagagatgcatttggaacagtgctactgaaaggcagtagtcattttcaagactgaattccaaacatggtttat

SEQ ID NO: 76217 - DNA, 120 bp, Artificial Sequence
  ENSG00000079482_38 (sequence is synthesized)
tggtgagttaggaacatgtaaggccaagtacactgagagcctttttgaaagtaattgagtggaaacttgatgccattctaaatcaaggcatatccaggtggcccggttgaactcactcca

SEQ ID NO: 76218 - DNA, 120 bp, Artificial Sequence
  ENSG00000079482_39 (sequence is synthesized)
ctgtacccagtctcaaaggccaggttgctaagaaaccaggagtaaaagagtcaagtgaccatcatttcacctgctgcttgcccccaatagtagtctctgtgaggccttactgacctcacc

SEQ ID NO: 76219 - DNA, 120 bp, Artificial Sequence
  ENSG00000079482_40 (sequence is synthesized)
taggaagtgatttttgagcccttgtttcagggctgtggcctccctgctctatcctgaataaagcagacaggtgtgcagattttggccatgaaagcatggctaatagggccacagtccctt

SEQ ID NO: 76220 - DNA, 120 bp, Artificial Sequence
  ENSG00000079482_41 (sequence is synthesized)
taaagaaacatggtttgactctggttttcttgggggaaaataccacaatcaccgatgcaaacattggaagattattgagagccctagaaagctgctgtgatcccagtagaaaatatgtcc

SEQ ID NO: 76221 - DNA, 120 bp, Artificial Sequence
  ENSG00000079482_42 (sequence is synthesized)
cagaaatgtcatgagattgctgtgtgttgcctgggacacagatcaagggcctatcttggagagctggggaccagcagtctgcctggaggccagggagcagtggctgagtagctctgcctt

SEQ ID NO: 76222 - DNA, 120 bp, Artificial Sequence
  ENSG00000079482_43 (sequence is synthesized)
tgctctggtctataccttaagaatgccaaagaatgaatttcaacgcctgcctttggcactctgacttaaagtgcaaaaagcttctgtggcgaggcatgctatcatggaatgagactggct

SEQ ID NO: 76223 - DNA, 120 bp, Artificial Sequence
  ENSG00000079482_44 (sequence is synthesized)
tgccctaggcttaatggatgggcagtcattttgcagaggctatgggaagagggtgataatagaagagtggcagctataggaaattatcaacataccttggccagcaagttagagaatctg

SEQ ID NO: 76224 - DNA, 120 bp, Artificial Sequence
  ENSG00000079482_45 (sequence is synthesized)
gcaatggatgaactgaaagtgatgaactggcagggataacaaagaacctaacatttattaagcacgtatttattaactgctcagtgtttcatattcatgcaagtattctcattttacaga

SEQ ID NO: 76225 - DNA, 120 bp, Artificial Sequence
  ENSG00000079482_46 (sequence is synthesized)
gaaagaaattatggcccagggggctaaagtaaacaactcaagggcacatagaaagtaaataaaaggactgtgatttgaatccaggccactcttagcccatgctgttttccctttgccaca

SEQ ID NO: 76226 - DNA, 120 bp, Artificial Sequence
  ENSG00000079482_47 (sequence is synthesized)
ctgtggtaggtgtttgaacagaggccacattactagagttggcatgactcttgactcttgcctgcctaacaaaatattgaaaggcaaacatttgaaggagggagggggtgcaggttcagt

SEQ ID NO: 76227 - DNA, 120 bp, Artificial Sequence
  ENSG00000079482_48 (sequence is synthesized)
ttatatggaaatgcaaactgggctggaagatattcctgagttaggctttctcttcatattcagcttgcacatttggtaatgtttttaagatgatcatctaattttattttgtgaagtgaa

SEQ ID NO: 76228 - DNA, 120 bp, Artificial Sequence
  ENSG00000079482_49 (sequence is synthesized)
ggatttgtgttttagttggcagttgttaagtccttggcttgccatttttcaaaaagtaaaaaggtcctcacaggtgtctccatacttcgccaaggttgtagcatgggcagtttcagtttc

SEQ ID NO: 76229 - DNA, 120 bp, Artificial Sequence
  ENSG00000079482_50 (sequence is synthesized)
agcctaagagactggtgacatccacaaatgcagttttagaagcagaaaaggtcttggtgcctctgcagtacttgatgtattggggtcaaatctctacaaatttttctgtggtgatagcaa

SEQ ID NO: 76230 - DNA, 120 bp, Artificial Sequence
  ENSG00000079482_51 (sequence is synthesized)
aatcaagagatggcttacaaaaagaaatattgaatttttatttttgaagtttttgttttttaaaaggttgggggtgttcagccactgagggacaaaacttagcatctaatttcaattata

SEQ ID NO: 76231 - DNA, 120 bp, Artificial Sequence
  ENSG00000079482_52 (sequence is synthesized)
gtgtcatgcagagtatttctaaagtaattggttatcatgggaaagtattctcttttcaagaagttctttgattctgtaataactagaacaaataaagtagtaaaagaagaaatagttctg

SEQ ID NO: 76232 - DNA, 120 bp, Artificial Sequence
  ENSG00000079482_53 (sequence is synthesized)
tgactaggaaaaaattgcttttgagagaacatagatcaattatactacttctaaggtagctgcagataagtggccttgacacattacaagcctggaaaaaaacatcagaaataataaaaa

SEQ ID NO: 76233 - DNA, 120 bp, Artificial Sequence
  ENSG00000079482_54 (sequence is synthesized)
tttgagaagtgtctgttcatgtccttcgcgaaggacaagataccttaaagataagttttcgataaagaaaagccttcattttcctgggggaaatgaagcacttgatgccaaggacattag

SEQ ID NO: 76234 - DNA, 120 bp, Artificial Sequence
  ENSG00000079482_55 (sequence is synthesized)
tagagggctagaaagattgcctgtgtgaaagacatatgctatatccaaataataaaacaaacgagatcctggggctcattcatgtgactttcaataaagtatgtagactgtctaatataa

SEQ ID NO: 76235 - DNA, 120 bp, Artificial Sequence
  ENSG00000079482_56 (sequence is synthesized)
gtgactggaagagaaaggagacactgctaaaatgtggtagaatagttgaaaaaagtattttctaaagtaaaacatacacatacttgcccaccctgggcagagtcaatcgtaccttgaaaa

SEQ ID NO: 76236 - DNA, 120 bp, Artificial Sequence
  ENSG00000079482_57 (sequence is synthesized)
gcaaacggaaagactacatctcccaggccgccacgctttccagctggagtcctagggcgctgactgctccccagtttccgtagggaagcgctgggctaccgcggctattgtgcgtcgcgc

SEQ ID NO: 76237 - DNA, 120 bp, Artificial Sequence
  ENSG00000079482_58 (sequence is synthesized)
cgctgcagtgtctatggagcgaggctacgtttcattgccgccctggcttaacccttccggcgcctaaaaggacggccggccggccggctcccttgcaccaggaagaagtcttagcagcca

SEQ ID NO: 76238 - DNA, 120 bp, Artificial Sequence
  ENSG00000079482_59 (sequence is synthesized)
gcgggccctggtcaggaaactctaagaaccatgggtcatcccccgctggagttcagcgactgctacctggacagccccgatttccgcgagaggctcaagtgttatgagcaggaactggag

SEQ ID NO: 76239 - DNA, 120 bp, Artificial Sequence
  ENSG00000079557_0 (sequence is synthesized)
actttcttttgtaaatgtggtttctacaaagatgaaactactaaaacttacaggttttatttttttcttgttttttttgactgaatccctaaccctgcccacacaacctcgggatataga

SEQ ID NO: 76240 - DNA, 120 bp, Artificial Sequence
  ENSG00000079557_1 (sequence is synthesized)
gaacttcaatagtactcaaaaatttatagaagataatattgaatacatcaccatcattgcatttgctcagtatgttcaggaagcaacctttgaagaaatggaaaagctggtgaaagacat

SEQ ID NO: 76241 - DNA, 120 bp, Artificial Sequence
  ENSG00000079557_2 (sequence is synthesized)
ggtagaatacaaagacagatgtatggctgacaagacgctcccagagtgttcaaaattacctaataatgttttacaggaaaaaatatgtgctatggaggggctgccacaaaagcataattt

SEQ ID NO: 76242 - DNA, 120 bp, Artificial Sequence
  ENSG00000079557_3 (sequence is synthesized)
ctcacactgctgcagtaaggttgatgctcaaagaagactctgtttcttctataacaagaaatctgatgtgggatttctgcctcctttccctaccctggatcccgaagagaaatgccaggc

SEQ ID NO: 76243 - DNA, 120 bp, Artificial Sequence
  ENSG00000079557_4 (sequence is synthesized)
ttatgaaagtaacagagaatcccttttaaatcactttttatatgaagttgccagaaggaacccatttgtcttcgcccctacacttctaactgttgctgttcattttgaggaggtggccaa

SEQ ID NO: 76244 - DNA, 120 bp, Artificial Sequence
  ENSG00000079557_5 (sequence is synthesized)
atcatgttgtgaagaacaaaacaaagtcaactgccttcaaacaagggcaatacctgtcacacaatatttaaaagcattttcttcttatcaaaaacatgtctgtggggcacttttgaaatt

SEQ ID NO: 76245 - DNA, 120 bp, Artificial Sequence
  ENSG00000079557_6 (sequence is synthesized)
tggaaccaaagttgtacactttatatatattgcgatactcagtcaaaaattccccaagattgaatttaaggagcttatttctcttgtagaagatgtttcttccaactatgatggatgctg

SEQ ID NO: 76246 - DNA, 120 bp, Artificial Sequence
  ENSG00000079557_7 (sequence is synthesized)
tgaaggggatgttgtgcagtgcatccgtgacacgagcaaggttatgaaccatatttgttcaaaacaagattctatctccagcaaaatcaaagagtgctgtgaaaagaaaataccagagcg

SEQ ID NO: 76247 - DNA, 120 bp, Artificial Sequence
  ENSG00000079557_8 (sequence is synthesized)
gtgaaaatgtgtgtcaagaacgagatgctgacccagacaccttctttgcgaagtttacttttgaatactcaaggagacatccagacctgtctataccagagcttttaagaattgttcaaa

SEQ ID NO: 76248 - DNA, 120 bp, Artificial Sequence
  ENSG00000079557_9 (sequence is synthesized)
tatacaaagatctcctgagaaattgctgcaacacagaaaaccctccaggttgttaccgttacgcggaagacaaattcaatgagacaactgagaaaagcctcaagatggtacaacaagaat

SEQ ID NO: 76249 - DNA, 120 bp, Artificial Sequence
  ENSG00000079557_10 (sequence is synthesized)
gtaaacatttccagaatttggggaaggatggtttgaaataccattacctcatcaggctcacgaagatagctccccaactctccactgaagaactggtgtctcttggcgagaaaatggtga

SEQ ID NO: 76250 - DNA, 120 bp, Artificial Sequence
  ENSG00000079557_11 (sequence is synthesized)
cagctttcactacttgctgtacgctaagtgaagagtttgcctgtgttgataatttggcagatttagtttttggagagttatgtggagtaaatgaaaatcgaactatcaaccctgctgtgg

SEQ ID NO: 76251 - DNA, 120 bp, Artificial Sequence
  ENSG00000079557_12 (sequence is synthesized)
accactgctgtaaaacaaactttgccttcagaaggccctgctttgagagtttgaaagctgataaaacatatgtgcctccacctttctctcaagatttatttacctttcacgcagacatgt

SEQ ID NO: 76252 - DNA, 120 bp, Artificial Sequence
  ENSG00000079557_13 (sequence is synthesized)
gtcaatctcagaatgaggagcttcagaggaagacagacaggtttcttgtcaacttagtgaagctgaagcatgaactcacagatgaagagctgcagtctttgtttacaaatttcgcaaatg

SEQ ID NO: 76253 - DNA, 120 bp, Artificial Sequence
  ENSG00000079557_14 (sequence is synthesized)
tagtggataagtgctgcaaagcagagagtcctgaagtctgctttaatgaagagagtccaaaaattggcaactgaagccagctgctggagatatgtaaagaaaaaagcaccaaagggaagg

SEQ ID NO: 76254 - DNA, 120 bp, Artificial Sequence
  ENSG00000079557_15 (sequence is synthesized)
cttcctatctgtgtggtgatgaatcgcatttcctgagaacaaaataaaaggatttttctgtaactgtcacctgaaataatacattgcagcaagcaataaacacaacattttgtaaagtta

SEQ ID NO: 76255 - DNA, 120 bp, Artificial Sequence
  ENSG00000079557_16 (sequence is synthesized)
agagaacttttgtaaaatgatctatagccaaaatgtcctcttaaattactctgtgaccaagacagaggagaaaattagcttttgaaagcagagtcagtattagatctgactggattacaa

SEQ ID NO: 76256 - DNA, 120 bp, Artificial Sequence
  ENSG00000079616_0 (sequence is synthesized)
ggaattcgaatgggagaggcgggcccaaggagggagtggaatggccgcgggcggctcgacgcagcagaggcgacgcgagatggcggcagcttcagcggcggcgatctcaggagctggtcg

SEQ ID NO: 76257 - DNA, 120 bp, Artificial Sequence
  ENSG00000079616_1 (sequence is synthesized)
ctgtcggctaagcaagattggagctactcgtcgtccacctccagctcgcgtaagggtggctgtgcgactgcggccatttgtggatggaacagcgggagcaagtgatcccccctgtgtgcg

SEQ ID NO: 76258 - DNA, 120 bp, Artificial Sequence
  ENSG00000079616_2 (sequence is synthesized)
gggcatggacagctgctctctagagattgctaactggaggaaccaccaggagactctcaaataccagtttgatgccttctatggggagaggagtactcagcaggacatctatgcaggttc

SEQ ID NO: 76259 - DNA, 120 bp, Artificial Sequence
  ENSG00000079616_3 (sequence is synthesized)
agtgcagcccatcctaaggcacttgctggaagggcagaatgccagtgtgcttgcctatggacccacaggagctgggaagacgcacacaatgctgggcagcccagagcaacctggggtgat

SEQ ID NO: 76260 - DNA, 120 bp, Artificial Sequence
  ENSG00000079616_4 (sequence is synthesized)
cccgcgggctctcatggacctcctgcagctcacaagggaggagggtgccgagggccggccatgggccctttctgtcaccatgtcttacctagagatctaccaggagaaggtattagacct

SEQ ID NO: 76261 - DNA, 120 bp, Artificial Sequence
  ENSG00000079616_5 (sequence is synthesized)
cctggaccctgcttcgggagacctggtaatccgagaagactgccgggggaatatcctgattccgggtctctcccagaagcccatcagtagctttgctgattttgagcggcacttcctgcc

SEQ ID NO: 76262 - DNA, 120 bp, Artificial Sequence
  ENSG00000079616_6 (sequence is synthesized)
agccagtcgaaatcggactgtaggagccacccggctcaaccagcgctcctcccgcagtcatgctgtgctcctggtcaaggtggaccagcgggaacgtttggccccatttcgccagcgaga

SEQ ID NO: 76263 - DNA, 120 bp, Artificial Sequence
  ENSG00000079616_7 (sequence is synthesized)
gggaaaactctacctgattgacttggctgggtcagaggacaaccggcgcacaggcaacaagggccttcggctaaaagagagtggagccatcaacacctccctgtttgtcctgggcaaagt

SEQ ID NO: 76264 - DNA, 120 bp, Artificial Sequence
  ENSG00000079616_8 (sequence is synthesized)
tctctgggtggctcagcccacagtatccttattgccaacattgcccctgagagacgcttctacctagacacagtctccgcactcaactttgctgccaggtccaaggaggtgatcaatcgg

SEQ ID NO: 76265 - DNA, 120 bp, Artificial Sequence
  ENSG00000079616_9 (sequence is synthesized)
ccttttaccaatgagagcctgcagcctcatgccttgggacctgttaagctgtctcagaaagaattgcttggtccaccagaggcaaagagagcccgaggccctgaggaagaggagatcggg

SEQ ID NO: 76266 - DNA, 120 bp, Artificial Sequence
  ENSG00000079616_10 (sequence is synthesized)
agccctgagcccatggcagctccagcctctgcctcccagaaactcagccccctacagaagctaagcagcatggacccggccatgctggagcgcctcctcagcttggaccgtctgcttgcc

SEQ ID NO: 76267 - DNA, 120 bp, Artificial Sequence
  ENSG00000079616_11 (sequence is synthesized)
tcccaggggagccagggggcccctctgttgagtaccccaaagcgagagcggatggtgctaatgaagacagtggaagagaaggacctagagattgagaggcttaagacgaagcaaaaagaa

SEQ ID NO: 76268 - DNA, 120 bp, Artificial Sequence
  ENSG00000079616_12 (sequence is synthesized)
ctggaggccaagatgttggcccagaaggctgaggaaaaggagaaccattgtcccacaatgctccggcccctttcacatcgcacagtcacaggggcaaagcccctgaaaaaggctgtggtg

SEQ ID NO: 76269 - DNA, 120 bp, Artificial Sequence
  ENSG00000079616_13 (sequence is synthesized)
atgcccctacagctaattcaggagcaggcagcatccccaaatgccgagatccacatcctgaagaataaaggccggaagagaaagctggagtccctggatgccctagagcctgaggagaag

SEQ ID NO: 76270 - DNA, 120 bp, Artificial Sequence
  ENSG00000079616_14 (sequence is synthesized)
gctgaggactgctgggagctacagatcagcccggagctactggctcatgggcgccaaaaaatactggatctgctgaacgaaggctcagcccgagatctccgcagtcttcagcgcattggc

SEQ ID NO: 76271 - DNA, 120 bp, Artificial Sequence
  ENSG00000079616_15 (sequence is synthesized)
ccgaagaaggcccagctaatcgtgggctggcgggagctccacggccccttcagccaggtggaggacctggaacgcgtggagggcataacggggaaacagatggagtccttcctgaaggca

SEQ ID NO: 76272 - DNA, 120 bp, Artificial Sequence
  ENSG00000079616_16 (sequence is synthesized)
aacatcctgggtctcgccgccggccagcgctgtggcgcctcctgaccgtcgtctcctcactccgccttttcaaatttttgtataaccccgtgttgtgtaaatacagtttttgctccggtg

SEQ ID NO: 76273 - DNA, 120 bp, Artificial Sequence
  ENSG00000079616_17 (sequence is synthesized)
gggttaaacgaactggatgatggccgccagctactaacagacctcaacttgcttacccctggaatgtggtgatggatggttccttgcagggcatttagggtggaaggcagtgatgtggat

SEQ ID NO: 76274 - DNA, 120 bp, Artificial Sequence
  ENSG00000079616_18 (sequence is synthesized)
gtacctcgcagagcggatgttccactgtgtagcctggcttctaccctctacaagcttaagagggaaaacttagggaactatgacctaagcagtcaagcaagaaaccacacatatgcacat

SEQ ID NO: 76275 - DNA, 120 bp, Artificial Sequence
  ENSG00000079616_19 (sequence is synthesized)
acccagaatcgaacaccactagaactacccaaaaactgagatggttgggggaggtatcatttattcatattactttctcccatgtactttttgaaagacagcttattctttcccttttag

SEQ ID NO: 76276 - DNA, 120 bp, Artificial Sequence
  ENSG00000079616_20 (sequence is synthesized)
gaccagatttaagagcttattttgtgctttacattcattaactcacttgatctccacagcaactccatgagaagggtgctaatattaccactgggtactgagtagtacctctctttcact

SEQ ID NO: 76277 - DNA, 120 bp, Artificial Sequence
  ENSG00000079616_21 (sequence is synthesized)
agttgcataataagaattaacccagagagtgacctgagggcgggattttggacacacttgacaagagaggaagaggctggagcgcaggaggtagctggtgctgggctcctagtcttggca

SEQ ID NO: 76278 - DNA, 120 bp, Artificial Sequence
  ENSG00000079616_22 (sequence is synthesized)
tggcgggagctccacggccccttcagccaggtagcagcccactggactgggggagggcgggggcgggggagaccgggtacccccgagaccctgtcccctatcgatcctgtcccgccaggt

SEQ ID NO: 76279 - DNA, 120 bp, Artificial Sequence
  ENSG00000079616_23 (sequence is synthesized)
ggaggacctggaacgcgtggagggcataacggggaaacagatggagtccttcctgaaggtgaagtcacggccctgcccctcctctgcctgtcctgcgccccgcgcccctctctaacgtcg

SEQ ID NO: 76280 - DNA, 120 bp, Artificial Sequence
  ENSG00000079616_24 (sequence is synthesized)
ctgtctccctccctcctgtgttgcaggcaaacatcctgggtctcgccgccggccagcgctgtggcgcctcctgaccgtcgtctcctcactccgccttttcaaatttttgtataaccccgt

SEQ ID NO: 76281 - DNA, 120 bp, Artificial Sequence
  ENSG00000079616_25 (sequence is synthesized)
agaggcgggcccaaggagggagtggaatggccgcgggcggctcgacgcagcagaggcgacgcgagatggcggcagcttcagcggcggcgatctcagcaaatacttcttgagggcctactc

SEQ ID NO: 76282 - DNA, 120 bp, Artificial Sequence
  ENSG00000079616_26 (sequence is synthesized)
gtgtggggtcgcgagccggtcgccccgcctggctcctgccttctccctgtttcctgctctccccttgggtcagtagactcgggtctccggtccaggctcttggcttgaaccccgcgcact

SEQ ID NO: 76283 - DNA, 120 bp, Artificial Sequence
  ENSG00000079616_27 (sequence is synthesized)
ttttctttgtgagcttcggtttcttcgtctgtgaaacgggggtcatggcctcatccctggagatcacctgaataagcaagagaagagtggcggacgctctagccacgaggacgagaagaa

SEQ ID NO: 76284 - DNA, 120 bp, Artificial Sequence
  ENSG00000079616_28 (sequence is synthesized)
gggagccggaggcgtgtattgggaagggttctgtgtgggacatggtgtttgggtgcagagacatccctgagagatgcaagaggacgggctgaggaacagacccggctgctgctgggtttg

SEQ ID NO: 76285 - DNA, 120 bp, Artificial Sequence
  ENSG00000079616_29 (sequence is synthesized)
agttggcagcgtaagatgctctgcgattacaggaaaacgaaataaaagactaaaatttcctttcactctagcatggaagtgaatgctattttagggttggaaaggctgttaggacaccca

SEQ ID NO: 76286 - DNA, 120 bp, Artificial Sequence
  ENSG00000079616_30 (sequence is synthesized)
agacctagaaagacagagactggggtagcagatggtacaactccgagaatagaacagagaaaggaaactgatccccaggaagaaacagcctctctatggagaattgcccttccccttcac

SEQ ID NO: 76287 - DNA, 120 bp, Artificial Sequence
  ENSG00000079616_31 (sequence is synthesized)
cctccctcgtgtaccttatcgggacagcaagctcactcgcctattgcaggtcaggcccacctgtctcagggaagaaggggctgcagaaggaggttctcaggcctgctgtggggtggggaa

SEQ ID NO: 76288 - DNA, 120 bp, Artificial Sequence
  ENSG00000079616_32 (sequence is synthesized)
tggggccttgggtgtatccccttcctgatgtatggcttagcagcagagctgcaatgcccgtcagatccttgagcagagagctgtgatcttgttcctctcccattaaattcaccctaggcc

SEQ ID NO: 76289 - DNA, 120 bp, Artificial Sequence
  ENSG00000079616_33 (sequence is synthesized)
gggaattcgaatgggagaggcgggcccaaggagggagtggaatggccgcgggcggctcgacgcagcagaggcgacgcgagatggcggcagcttcagcggcggcgatctcaggtacttgag

SEQ ID NO: 76290 - DNA, 120 bp, Artificial Sequence
  ENSG00000079616_34 (sequence is synthesized)
cccggcctgggcaaggcgggtaccgacgtctggagtttagtgggagttatgtgtcggagtgtggtccaggctctgcgggttgtcgcggagaggcggccatggcgcaggggcggggagagg

SEQ ID NO: 76291 - DNA, 120 bp, Artificial Sequence
  ENSG00000079689_0 (sequence is synthesized)
gctgagggctgagggacggctcagcgacgccacggccagcagcgctcgcgtcctccccagcaacagttactcaaagctaatcagatagcgaaagaagcaggagagcaagtcaagaaatac

SEQ ID NO: 76292 - DNA, 120 bp, Artificial Sequence
  ENSG00000079689_1 (sequence is synthesized)
ggtgaaggagtccttcccaaagttgtctaggtccttccgcgccggtgcctggtcttcgtcgtcaacaccatggacagctcccgggaaccgactctggggcgcttggacgccgctggcttc

SEQ ID NO: 76293 - DNA, 120 bp, Artificial Sequence
  ENSG00000079689_2 (sequence is synthesized)
tggcaggtctggcagcgctttgatgcggatgaaaaaggttacatagaagagaaggaactcgatgctttctttctccacatgttgatgaaactgggtactgatgacacggtcatgaaagca

SEQ ID NO: 76294 - DNA, 120 bp, Artificial Sequence
  ENSG00000079689_3 (sequence is synthesized)
aatttgcacaaggtgaaacagcagtttatgactacccaagatgcctctaaagatggtcgcattcggatgaaagagcttgctggtatgttcttatctgaggatgaaaactttcttctgctc

SEQ ID NO: 76295 - DNA, 120 bp, Artificial Sequence
  ENSG00000079689_4 (sequence is synthesized)
tttcgccgggaaaacccactggacagcagcgtggagtttatgcagatttggcgcaaatatgacgctgacagcagtggctttatatcagctgctgagctccgcaacttcctccgagacctc

SEQ ID NO: 76296 - DNA, 120 bp, Artificial Sequence
  ENSG00000079689_5 (sequence is synthesized)
tttcttcaccacaaaaaggccatttctgaggctaaactggaagaatacactggcaccatgatgaagatttttgacagaaataaagatggtcggttggatctaaatgacttagcaaggatt

SEQ ID NO: 76297 - DNA, 120 bp, Artificial Sequence
  ENSG00000079689_6 (sequence is synthesized)
aatttaaaatggatgcttgttctactgaagaaaggaaaagggactttgagaaaatctttgcctactatgatgttagtaaaacaggagccctggaaggcccagaagtggatgggtttgtca

SEQ ID NO: 76298 - DNA, 120 bp, Artificial Sequence
  ENSG00000079689_7 (sequence is synthesized)
aagacatgatggagcttgtccagcccagcatcagcggggtggaccttgataagttccgcgagattctcctgcgtcactgcgacgtgaacaaggatggaaaaattcagaagtctgagctgg

SEQ ID NO: 76299 - DNA, 120 bp, Artificial Sequence
  ENSG00000079689_8 (sequence is synthesized)
ctttgtgtcttgggctgaaaatcaacccataatcccagactgctttgccttttgctcttactatgtttctgtgatcttgctggtagaattgtatctgtgcattgatgttgggaacacagt

SEQ ID NO: 76300 - DNA, 120 bp, Artificial Sequence
  ENSG00000079689_9 (sequence is synthesized)
gggcaaactcacaaatggtgtgctattcttgggcaagaacagggacgctagggccttccttccaccggcgtgatctatccctgtctcactgaaagcccctgtgtagtgtctgtgttgttt

SEQ ID NO: 76301 - DNA, 120 bp, Artificial Sequence
  ENSG00000079689_10 (sequence is synthesized)
tcccttgaccctgggctttcctatcctcccaaagactcagctcccctgttagatggctctgcctgtccttccccagtcaccagggtgggggggacaggggcagctgagtgcattcatttt

SEQ ID NO: 76302 - DNA, 120 bp, Artificial Sequence
  ENSG00000079689_11 (sequence is synthesized)
gtgcttttcttgtgggctttctgcttagtctgaaaggtgtgtggcattcatggcaatcctgtaacttcaacatagatttttttgtgtgtgtggaaataaatctgcaattggaaacaaaaa

SEQ ID NO: 76303 - DNA, 120 bp, Artificial Sequence
  ENSG00000079691_0 (sequence is synthesized)
gccctctcccacgccttccgctttcacctagggctgtaggtgcggcgcggaggctgggcgggagctacgccggcccaagccccgccggggaccagcgagccgggaggaggagcaggcgcc

SEQ ID NO: 76304 - DNA, 120 bp, Artificial Sequence
  ENSG00000079691_1 (sequence is synthesized)
acagccgccccgcgccccgcgcccgcttgtaatccggtccgctccttattcagccgccgggaactgcgaggaggcgtcatgtagcagcagcagcaaatccgcctcgcatttgcaactctt

SEQ ID NO: 76305 - DNA, 120 bp, Artificial Sequence
  ENSG00000079691_2 (sequence is synthesized)
ttttttttttttggtggggcggggggcgcgcggcaaaattctgtctccgcccccccttttcttgcccacttccatttgcaagctgcatctgcctctctaaaaaaattgaggagttcgggg

SEQ ID NO: 76306 - DNA, 120 bp, Artificial Sequence
  ENSG00000079691_3 (sequence is synthesized)
aagggcagggggccataaatcagagttggacctgcaataacccccacacctacagggcaaccatgaccgaggagagctctgacgttcccagggagttgatagaaagcataaaggatgtta

SEQ ID NO: 76307 - DNA, 120 bp, Artificial Sequence
  ENSG00000079691_4 (sequence is synthesized)
ttggcagaaagataaaaatttcagtgaagaagaaagtaaagttggaagttaagggagacaaagttgaaaacaaagtgctggtccttacatcatgccgagccttccttgtaacagcgcgaa

SEQ ID NO: 76308 - DNA, 120 bp, Artificial Sequence
  ENSG00000079691_5 (sequence is synthesized)
tccccaccaagctcgagttaaccttcagctacttggagattcatggcgtcgtttgcagcaagtcagctcagatgattgtggaaactgagaagtgcagcatttccatgaagatggcgtcac

SEQ ID NO: 76309 - DNA, 120 bp, Artificial Sequence
  ENSG00000079691_6 (sequence is synthesized)
ccgaggacgtgagtgaggtgctggctcacataggcacctgcctgaggaagatatttcctggcctctctccagtgagaatcatgaaaaaagtctccatggagccatctgagcgcctggcta

SEQ ID NO: 76310 - DNA, 120 bp, Artificial Sequence
  ENSG00000079691_7 (sequence is synthesized)
gtctccaggcgctgtgggacagccagaccgtggctgagcagggcccctgtggtggattttctcagatgtatgcctgtgtttgtgactggcttggattttcatacagggaagaagtacaat

SEQ ID NO: 76311 - DNA, 120 bp, Artificial Sequence
  ENSG00000079691_8 (sequence is synthesized)
gggatgtggatacaatttatcttacccaagacaccagggaattgaatttacaagattttagtcatcttgaccacagggacctaatacctatcattgctgctctggaatataatcagtggt

SEQ ID NO: 76312 - DNA, 120 bp, Artificial Sequence
  ENSG00000079691_9 (sequence is synthesized)
tcacaaaactgtcctctaaggatctaaaactgtccactgatgtctgtgaacagatcttgagggtggtgagtaggtccaatcgactggaagaattggtgttggaaaatgctggacttagaa

SEQ ID NO: 76313 - DNA, 120 bp, Artificial Sequence
  ENSG00000079691_10 (sequence is synthesized)
cagattttgcacaaaaactggccagtgctctagcacataatcccaactcaggactccacacaattaaccttgctggcaacccactggaggatagaggtgtgtcctctttaagtattcaat

SEQ ID NO: 76314 - DNA, 120 bp, Artificial Sequence
  ENSG00000079691_11 (sequence is synthesized)
ttgccaaactcccaaagggattaaagcacttaaatttatctaaaacctcattatcacctaaaggggtgaacagcctttctcagtcactcagtgccaatccattgaccgcctctacccttg

SEQ ID NO: 76315 - DNA, 120 bp, Artificial Sequence
  ENSG00000079691_12 (sequence is synthesized)
tccacctcgacctctcagggaacgtccttcgtggagatgacctctcacacatgtataattttttggcccagccaaatgccattgttcatctggatttatccaatacagaatgttccctgg

SEQ ID NO: 76316 - DNA, 120 bp, Artificial Sequence
  ENSG00000079691_13 (sequence is synthesized)
acatggtctgtggagctcttctccgtggatgccttcaatatttagctgtgctcaacctctccagaactgtcttctctcaccggaaaggaaaagaagtacctccatctttcaagcaatttt

SEQ ID NO: 76317 - DNA, 120 bp, Artificial Sequence
  ENSG00000079691_14 (sequence is synthesized)
ttagtagttctctggctttgatgcacatcaacctttcaggcacaaaactgtctcctgagcccttaaaagcactgttattgggcctggcttgtaatcataacttgaaaggggtttctctgg

SEQ ID NO: 76318 - DNA, 120 bp, Artificial Sequence
  ENSG00000079691_15 (sequence is synthesized)
atctcagcaactgtgagctgagatcaggaggtgctcaagtattagaaggttgcattgctgaaatacacaacatcaccagcttagacatctctgacaatggtttagaatctgacctatcta

SEQ ID NO: 76319 - DNA, 120 bp, Artificial Sequence
  ENSG00000079691_16 (sequence is synthesized)
ccttaatagtgtggctcagtaaaaacagatcaatacaacacctggcgttaggcaaaaattttaataatatgaaatccaaaaatctgacacctgtattggacaacttagtacagatgattc

SEQ ID NO: 76320 - DNA, 120 bp, Artificial Sequence
  ENSG00000079691_17 (sequence is synthesized)
aagatgaagaatcacctctgcagtccttgtccctggctgactcgaaactcaagactgaggtcaccatcatcatcaatgccctgggaagcaacacctccctgaccaaagtggacattagcg

SEQ ID NO: 76321 - DNA, 120 bp, Artificial Sequence
  ENSG00000079691_18 (sequence is synthesized)
gcaacggaatgggggacatgggagcgaagatgctggccaaagcactgcagatcaacactaagctcaggactgtaatatgggacaagaacaacatcactgcacaaggctttcaggatatag

SEQ ID NO: 76322 - DNA, 120 bp, Artificial Sequence
  ENSG00000079691_19 (sequence is synthesized)
ctgttgctatggaaaagaactacacattaagatttatgccaattcctatgtatgatgcttctcaagccctaaaaacaaaccctgaaaaaacagaagacgctctgcaaaagatagaaaact

SEQ ID NO: 76323 - DNA, 120 bp, Artificial Sequence
  ENSG00000079691_20 (sequence is synthesized)
acctgctacgaaatcacgagactagaaaataccttcaagagcaggcctaccgcctgcagcagggtattgtcaccagcaccacccagcagatgattgacagaatatgtgtgaaagtacaag

SEQ ID NO: 76324 - DNA, 120 bp, Artificial Sequence
  ENSG00000079691_21 (sequence is synthesized)
atcatctcaactccttacgaaattgtgggggagacgctatccaggaagatttaaaatcagcagagcggctcatgcgtgatgctaagaactctaaaacgttgttaccaaatttataccatg

SEQ ID NO: 76325 - DNA, 120 bp, Artificial Sequence
  ENSG00000079691_22 (sequence is synthesized)
aagagtagtagatgaacaactaaaggcgttgcttgagtccatggttgatgctgctgagaatctttgtcccaatgtgatgaaaaaagcccacattcgacaagacttgattcatgccagcac

SEQ ID NO: 76326 - DNA, 120 bp, Artificial Sequence
  ENSG00000079691_23 (sequence is synthesized)
cgaaaagatttctattccacgtacctttgttaaaaatgtcctgttggagcagtctggaattgatatccttaacaaaattagtgaagtaaaattgacagtggcctcgttcctgtctgatag

SEQ ID NO: 76327 - DNA, 120 bp, Artificial Sequence
  ENSG00000079691_24 (sequence is synthesized)
aattgtggatgaaatcctggatgcactctcacattgccatcataaactggctgaccatttcagcagacgtggcaagacccttcctcaacaagaatccttagagatcgagctggctgagga

SEQ ID NO: 76328 - DNA, 120 bp, Artificial Sequence
  ENSG00000079691_25 (sequence is synthesized)
gaagccagttaaacgttccatcatcacagtggaggagctaacagagatagagcgtttggaagatctggatacctgtatgatgacccctaaatccaaaaggaagagtatccatagccgaat

SEQ ID NO: 76329 - DNA, 120 bp, Artificial Sequence
  ENSG00000079691_26 (sequence is synthesized)
gctgcggcctgtttctagggcttttgaaatggagtttgatctagataaagcgctggaagaggtaccaattcacatcgaagacccgcccttcccatccctcagacaggagaagcggagctc

SEQ ID NO: 76330 - DNA, 120 bp, Artificial Sequence
  ENSG00000079691_27 (sequence is synthesized)
gggatttatctctgagttgccctctgaagaggggaagaagctggaacactttaccaagttaaggccaaaaaggaataagaagcagcaacccacccaagcagcggtctgtgctgccaacat

SEQ ID NO: 76331 - DNA, 120 bp, Artificial Sequence
  ENSG00000079691_28 (sequence is synthesized)
agtctcacaagatggtgaacagaatggtctcatggggagagtggatgaaggtgtagatgaattttttaccaagaaggtgaccaaaatggattccaagaaatggtcaacaagaggctcaga

SEQ ID NO: 76332 - DNA, 120 bp, Artificial Sequence
  ENSG00000079691_29 (sequence is synthesized)
gtcccatgagcttaatgaaggaggagatgaaaagaaaaagcgagattctcggaaaagtagtggctttctcaatttaatcaaatcccggtccaaatccgagcgaccaccaacgatcttgat

SEQ ID NO: 76333 - DNA, 120 bp, Artificial Sequence
  ENSG00000079691_30 (sequence is synthesized)
gacagaagaaccctcctcaccaaaaggggcagtcagaagtccacctgtggactgtcccaggaaggacacaaaggccgccgagcacaatggcaattctgaacggatagaggagataaaaac

SEQ ID NO: 76334 - DNA, 120 bp, Artificial Sequence
  ENSG00000079691_31 (sequence is synthesized)
acctgactcctttgaagagagtcaaggggaagaaatagggaaggtggaacggagtgacagcaagagcagcccacaggcagggcggaggtatggggtccaggtgatgggcagtggtctgct

SEQ ID NO: 76335 - DNA, 120 bp, Artificial Sequence
  ENSG00000079691_32 (sequence is synthesized)
ggcagagatgaaagccaagcaagagaagagagctgcgtgtgcgcagaagaagcttgggaatgatgccgtatcccaggattcttccagcccagctttgagcggcgtagaacggtcggatgg

SEQ ID NO: 76336 - DNA, 120 bp, Artificial Sequence
  ENSG00000079691_33 (sequence is synthesized)
aggtggggcagtgcctaaactgcacccaggtcttccagagaaccgctttggtttgggaacaccagaaaagaataccaaagcagaacccaaagcggaagcaggctccaggtctcggagctc

SEQ ID NO: 76337 - DNA, 120 bp, Artificial Sequence
  ENSG00000079691_34 (sequence is synthesized)
atccagcacacctacgagcccgaagcccctcctgcagtcccccaaacccagtctggcagcacggcccgtcatcccgcagaaaccaagaaccgcctcacggcctgatgacattccagactc

SEQ ID NO: 76338 - DNA, 120 bp, Artificial Sequence
  ENSG00000079691_35 (sequence is synthesized)
tccatctagcccgaaagttgcccttcttccacctgtcctgaaaaaagttccttcagacaaagagagagatggccagagtagcccccagcccagccccaggacattttcacaggaagtttc

SEQ ID NO: 76339 - DNA, 120 bp, Artificial Sequence
  ENSG00000079691_36 (sequence is synthesized)
aaggagaagctggggccagcaggcccaggagtatcaagaacaaaagcaacggtcctccagtaaagatggccatcaaggcagcaaatctaatgactccggggaagaagcagaaaaagagtt

SEQ ID NO: 76340 - DNA, 120 bp, Artificial Sequence
  ENSG00000079691_37 (sequence is synthesized)
tatttttgtgtaaaggtcacccacgcagaagtcttcctgtgcagggtgctttggtagccatcagagaggaaccaagggcaacatcttttcttcccaggcgttcttctctgggtgctttat

SEQ ID NO: 76341 - DNA, 82 bp, Artificial Sequence
  ENSG00000079691_38 (sequence is synthesized)
aacagatccatttcttggtaatcaaagcacatttgtttggtcttcctccaaccctttgcatttgatttctaaacattccttc

SEQ ID NO: 76342 - DNA, 120 bp, Artificial Sequence
  ENSG00000079691_39 (sequence is synthesized)
ttcctccaaccctttgcatttgatttctaaacattccttcatatgcctttaatgaaagccagcaattatcccatgggccctacttgaatttatctgaggcagctacagattgccctgcaa

SEQ ID NO: 76343 - DNA, 120 bp, Artificial Sequence
  ENSG00000079691_40 (sequence is synthesized)
gatgagtttttggagataaatgaaataactggacacacactcacacaagtaacaccacagcagacctcggagtactgctaagtgtacctgtgtcaaatccgcacaggactcaatatagca

SEQ ID NO: 76344 - DNA, 120 bp, Artificial Sequence
  ENSG00000079691_41 (sequence is synthesized)
atttattcttgatgtatgcaattgcacattgtaattatattaacagagcacactaataatttgtatagattatatatattagatcttgggtatggtttttaccttctcccatggggaact

SEQ ID NO: 76345 - DNA, 120 bp, Artificial Sequence
  ENSG00000079691_42 (sequence is synthesized)
tcttccttcctgatgtggaattgtacatttaaagcttggtcggtgacctttgcataccatcaacgagcacagctaagaacagagtgagagaggcccatggctgattttaccatgtgccca

SEQ ID NO: 76346 - DNA, 120 bp, Artificial Sequence
  ENSG00000079691_43 (sequence is synthesized)
gattaatgtatatagttgattggaatgaggttttatgaatattcatgtttttgaaggcctttaatttctgtctgcatattagcttttaatgtgtgattttaagagagaatactttgacac

SEQ ID NO: 76347 - DNA, 120 bp, Artificial Sequence
  ENSG00000079691_44 (sequence is synthesized)
ctgtaaaaatcaaaatactactctttataagacatttcacaaatattcacttacattacaggctggaagtattttattcatatgtatatttataccaataaaatgattttacaagtggaa

SEQ ID NO: 76348 - DNA, 120 bp, Artificial Sequence
  ENSG00000079691_45 (sequence is synthesized)
tttatgaaggagagatctaaagaaataagacttgttattggtatggacttagaggtaggatttctctcagagcaaggaggtttttcaagcaaattctgataccaacctctttcctttgga

SEQ ID NO: 76349 - DNA, 120 bp, Artificial Sequence
  ENSG00000079691_46 (sequence is synthesized)
agtaggaaacagagtccctagagacaatttacttcaacttttgggaactttgaagatcagtctttgagaacttagttgttgtctagtggccaactagatgttgtgtttctgaataataga

SEQ ID NO: 76350 - DNA, 120 bp, Artificial Sequence
  ENSG00000079691_47 (sequence is synthesized)
gaggatagaggtactgcagagttctcattatcattgatgccagaattgtaagaggattagagaattttaatttagccatgcctgaagagctgtatcaagctaagttgtaattataagtgc

SEQ ID NO: 76351 - DNA, 120 bp, Artificial Sequence
  ENSG00000079691_48 (sequence is synthesized)
acaaagagagagatggccagagtagcccccagcccagccccaggacattttcacaggaagtgcaaagaggagattattacaaaagacattcagatcatgacagtggcaagccttccagta

SEQ ID NO: 76352 - DNA, 120 bp, Artificial Sequence
  ENSG00000079691_49 (sequence is synthesized)
ttttgcggtttgggagggaggctgcgaggaggggcgcggtgcccgccgccgccaccgcagcaccgcacagcgtctctcctgggggtgcgacctacgccggggacccagcgctcgggcacc

SEQ ID NO: 76353 - DNA, 120 bp, Artificial Sequence
  ENSG00000079691_50 (sequence is synthesized)
ggatatacctcctctttgcacagcctgggactacggaagatggtgaagcaggctcagctgtgtctgtagttgtggctgatgggcctaaagcctccagttctcaggcaatttttttttttt

SEQ ID NO: 76354 - DNA, 120 bp, Artificial Sequence
  ENSG00000079691_51 (sequence is synthesized)
cctgcttagagcagttctccttcttcctataagtgaggcaactttatactttcaaatttagacaagatgtttcctgtgtagctcataaaaaagtgaactgagaaagaaaaagggaaaata

SEQ ID NO: 76355 - DNA, 120 bp, Artificial Sequence
  ENSG00000079691_52 (sequence is synthesized)
ttttactttgtaagtattttccaataaaacaagaaaattgcacgtggaataagatagaagtttacagtcctccagtgtttggtctcagcgtttttggtccctttacaatcttaaaaatga

SEQ ID NO: 76356 - DNA, 120 bp, Artificial Sequence
  ENSG00000079691_53 (sequence is synthesized)
tcgatctttggtttttgtgggtcaaaacattggtatttacaatattataaattaaaactaaaatttgaaatatttattaattaaaaagtgacactaataaagcaaaccattacgtactaa

SEQ ID NO: 76357 - DNA, 120 bp, Artificial Sequence
  ENSG00000079739_0 (sequence is synthesized)
agagcagctgcagcctcagccggccgcccctccgccagccaagtccgccgctctgacccccggcagcaagtcgccaccatggtgaagatcgtgacagttaagacccaggcgtaccaggac

SEQ ID NO: 76358 - DNA, 120 bp, Artificial Sequence
  ENSG00000079739_1 (sequence is synthesized)
cagaagccgggcacgagcgggctgcggaagcgggtgaaggtgttccagagcagcgccaactacgcggagaacttcatccagagtatcatctccaccgtggagccggcgcagcggcaggag

SEQ ID NO: 76359 - DNA, 120 bp, Artificial Sequence
  ENSG00000079739_2 (sequence is synthesized)
gccacgctggtggtgggcggggacggccggttctacatgaaggaggccatccagctcatcgctcgcatcgctgccgccaacgggatcggtcgcttggttatcggacagaatggaatcctc

SEQ ID NO: 76360 - DNA, 120 bp, Artificial Sequence
  ENSG00000079739_3 (sequence is synthesized)
tccacccctgctgtatcctgcatcattagaaaaatcaaagccattggtgggatcattctgacagccagtcacaacccagggggccccaatggagattttggaatcaaattcaatatttct

SEQ ID NO: 76361 - DNA, 120 bp, Artificial Sequence
  ENSG00000079739_4 (sequence is synthesized)
aatggaggtcctgctccagaagcaataactgataaaattttccaaatcagcaagacaattgaagaatatgcagtttgccctgacctgaaagtagaccttggtgttctgggaaagcagcag

SEQ ID NO: 76362 - DNA, 120 bp, Artificial Sequence
  ENSG00000079739_5 (sequence is synthesized)
tttgacttggaaaataagttcaaacccttcacagtggaaattgtggattcggtagaagcttatgctacaatgctgagaagcatctttgatttcagtgcactgaaagaactactttctggg

SEQ ID NO: 76363 - DNA, 120 bp, Artificial Sequence
  ENSG00000079739_6 (sequence is synthesized)
ccaaaccgactgaagatccgtattgatgctatgcatggagttgtgggaccgtatgtaaagaagatcctctgtgaagaactcggtgcccctgcgaactcggcagttaactgcgttcctctg

SEQ ID NO: 76364 - DNA, 120 bp, Artificial Sequence
  ENSG00000079739_7 (sequence is synthesized)
gaggactttggaggccaccaccctgaccccaacctcacctatgcagctgacctggtggagaccatgaagtcaggagagcatgattttggggctgcctttgatggagatggggatcgaaac

SEQ ID NO: 76365 - DNA, 120 bp, Artificial Sequence
  ENSG00000079739_8 (sequence is synthesized)
atgattctgggcaagcatgggttctttgtgaacccttcagactctgtggctgtcattgctgccaacatcttcagcattccgtatttccagcagactggggtccgcggctttgcacggagc

SEQ ID NO: 76366 - DNA, 120 bp, Artificial Sequence
  ENSG00000079739_9 (sequence is synthesized)
gagaccccaactggctggaagttttttgggaatttgatggacgcgagcaaactgtccctttgtggggaggagagcttcgggaccggttctgaccacatccgtgagaaagatggactgtgg

SEQ ID NO: 76367 - DNA, 120 bp, Artificial Sequence
  ENSG00000079739_10 (sequence is synthesized)
gctgtccttgcctggctctccatcctagccacccgcaagcagagtgtggaggacattctcaaagatcattggcaaaagtatggccggaatttcttcaccaggtatgattacgaggaggtg

SEQ ID NO: 76368 - DNA, 120 bp, Artificial Sequence
  ENSG00000079739_11 (sequence is synthesized)
gaagctgagggcgcaaacaaaatgatgaaggacttggaggccctgatgtttgatcgctcctttgtggggaagcagttctcagcaaatgacaaagtttacactgtggagaaggccgataac

SEQ ID NO: 76369 - DNA, 120 bp, Artificial Sequence
  ENSG00000079739_12 (sequence is synthesized)
tttgaatacagcgacccagtggatggaagcatttcaagaaatcagggcttgcgcctcattttcacagatggttctcgaatcgtcttccgactgagcggcactgggagtgccggggccacc

SEQ ID NO: 76370 - DNA, 120 bp, Artificial Sequence
  ENSG00000079739_13 (sequence is synthesized)
attcggctgtacatcgatagctatgagaaggacgttgccaagattaaccaggacccccaggtcatgttggccccccttatttccattgctctgaaagtgtcccagctgcaggagaggacg

SEQ ID NO: 76371 - DNA, 120 bp, Artificial Sequence
  ENSG00000079739_14 (sequence is synthesized)
ggacgcactgcacccactgtcatcacctaagaagacaggcctgatgtggtacgtccctccacccccggacccatccaagtcatctgattgaagagcatgacagaaacaaaatgtattcac

SEQ ID NO: 76372 - DNA, 120 bp, Artificial Sequence
  ENSG00000079739_15 (sequence is synthesized)
caagcattttaggatttgactttttcactaaccagttgacgagcagtgcatttacaaggcactgccaaacaagatgcccttgggagctgtgagggaaagaggacctgcgggcttagatca

SEQ ID NO: 76373 - DNA, 120 bp, Artificial Sequence
  ENSG00000079739_16 (sequence is synthesized)
atctcaattccttttcatgccctcctgcattgctgctgcgtgggtatttgtctccttagccatcaggtacagtttacactacaatgtaagctataggtggagcatcagcagtgagtgagg

SEQ ID NO: 76374 - DNA, 120 bp, Artificial Sequence
  ENSG00000079739_17 (sequence is synthesized)
ccattcttcatccttaggatgtggcaatgaaatgatggtgcaagttcctttctcttttgtgaatctttccccccatttcctgtttacatgtaacccaacaaaatgcaatttctagtgcct

SEQ ID NO: 76375 - DNA, 120 bp, Artificial Sequence
  ENSG00000079739_18 (sequence is synthesized)
tctgtccaatcagttctttcctctgagtgagacgtacttggctacagatttctgccttgttttgcgacattgtcccattcacacagatattttgggataataaaggaaaataagctacaa

SEQ ID NO: 76376 - DNA, 120 bp, Artificial Sequence
  ENSG00000079739_19 (sequence is synthesized)
tgtttacagctgaagttggctgcatgcagcactccttggagctatctctaccctaacggggaaatgagacaaaaataattgaagggtatttggcttggttaagtgggcagaagtgtcctc

SEQ ID NO: 76377 - DNA, 120 bp, Artificial Sequence
  ENSG00000079739_20 (sequence is synthesized)
atcaaaacaactttgaagacctgctttgtgtgtgggtgcgagtgggtgtgtggcccttaacttgttcacaagggacaacaacaacaaggaattaaccaagctttctcattgagagtgatc

SEQ ID NO: 76378 - DNA, 120 bp, Artificial Sequence
  ENSG00000079739_21 (sequence is synthesized)
gtccatgcaaaccctctattttagttactcatacgacactgttgcagcttcaggttggacagacctattttggagtcccttgactgctttctggacaccctcactgagccagtcggtgga

SEQ ID NO: 76379 - DNA, 120 bp, Artificial Sequence
  ENSG00000079739_22 (sequence is synthesized)
agtgaaggatgagtgattttgaagaatggatttctgggacatatagaaaaatggaagaaggtcctctccctctgttgacttttgctacagctccctaccacgatcagaaaccaggaacaa

SEQ ID NO: 76380 - DNA, 120 bp, Artificial Sequence
  ENSG00000079739_23 (sequence is synthesized)
gtggattacggaagaaaacctattattttgaggaaaagccatgctatctggagaatttcatccagagtatattcttttccatagacctaaaagatcgccagggatcatcactggtggttg

SEQ ID NO: 76381 - DNA, 120 bp, Artificial Sequence
  ENSG00000079739_24 (sequence is synthesized)
gacatttgccctaaccttgcagccttggaagatacgattacggcgcagagtgctgtcgccttaagcaggaaaggagcatacaatcttttgggggagataagacagaagaaacacatagac

SEQ ID NO: 76382 - DNA, 120 bp, Artificial Sequence
  ENSG00000079739_25 (sequence is synthesized)
aattagaaaacatgctgagctcagcgagagagagaacattttggattgggaaagaagaggtgcctgcacctaaaaccaattatgtcttgaagagcggatagtgtgcgatagaagatgggg

SEQ ID NO: 76383 - DNA, 120 bp, Artificial Sequence
  ENSG00000079739_26 (sequence is synthesized)
ctacccttcaggaaggggacctgccgagagaagtgagaaagagagaataggcaggactcttttttagagccggacacttagtcactaaacaatctttgttacataaaatacttaaatcag

SEQ ID NO: 76384 - DNA, 90 bp, Artificial Sequence
  ENSG00000079739_27 (sequence is synthesized)
ccttacctgagtagctcggattacaggtcatgttggccccccttatttccattgctctgaaagtgtcccagctgcaggagaggacgggac

SEQ ID NO: 76385 - DNA, 120 bp, Artificial Sequence
  ENSG00000079739_28 (sequence is synthesized)
gctcggggccggccgcttccgcgcgctgccgcctcggtttccacctcccgctcctccctctccttcgcgctcgctcttctggcctggaggcccgacggaggtcgccgggctggggaaagt

SEQ ID NO: 76386 - DNA, 120 bp, Artificial Sequence
  ENSG00000079739_29 (sequence is synthesized)
ggccacgggacccggcagacctgctcgcctgactcccggggcgccgggaggtgcgggcgcggagcctcccaaggtcacgcccgactctccgtctctagccgctgccttccctctccccgt

SEQ ID NO: 76387 - DNA, 120 bp, Artificial Sequence
  ENSG00000079739_30 (sequence is synthesized)
cccccgcccctcccgaggcgtctgacatttgccctaaccttgcagccttggaagatacgattacggcgcagagtgctgtcgccttaagcaggaaagatcggtcgcttggttatcggacag

SEQ ID NO: 76388 - DNA, 120 bp, Artificial Sequence
  ENSG00000079739_31 (sequence is synthesized)
gactaaatgttagatagcatctttcaaaagcctttgaaacatcttagagctttattctgtagaaatgccaagatgggtgttttctgcttattcagaagctcataacccttccctgaaatc

SEQ ID NO: 76389 - DNA, 120 bp, Artificial Sequence
  ENSG00000079739_32 (sequence is synthesized)
ctccaaacccttcctttcatccctggcctgttccatccccagtgactgacaggcctgtattttttttgccagcttcttctgaagttagatagttttgcgggagggccaaacaaatgatga

SEQ ID NO: 76390 - DNA, 120 bp, Artificial Sequence
  ENSG00000079785_0 (sequence is synthesized)
actgccacgccgtgtcagtcgggagggagggagcgagcaggcgaagccgcggaggacggggtgaagatggcggccttctccgagatgggtgtaatgcctgagattgcacaagctgtggaa

SEQ ID NO: 76391 - DNA, 120 bp, Artificial Sequence
  ENSG00000079785_1 (sequence is synthesized)
gagatggattggctcctcccaactgatatccaggctgaatctatcccattgatcttaggaggaggtgatgtacttatggctgcagaaacaggaagtggcaaaactggtgcttttagtatt

SEQ ID NO: 76392 - DNA, 120 bp, Artificial Sequence
  ENSG00000079785_2 (sequence is synthesized)
ccagttatccagatagtttatgaaactctgaaagaccaacaggaaggcaaaaaaggaaaaacaacaattaaaactggtgcttcagtgctgaacaaatggcagatgaacccatatgacaga

SEQ ID NO: 76393 - DNA, 120 bp, Artificial Sequence
  ENSG00000079785_3 (sequence is synthesized)
ggatctgcttttgcaattgggtcagatggtctttgttgtcaaagcagagaagtaaaggaatggcatgggtgtagagctactaaaggattaatgaaagggaaacactactatgaagtatcc

SEQ ID NO: 76394 - DNA, 120 bp, Artificial Sequence
  ENSG00000079785_4 (sequence is synthesized)
tgtcatgaccaagggttatgcagggtcgggtggtctaccatgcaggcctctttggacctaggtactgacaagtttggatttggctttggtggaacaggaaagaaatcccataacaaacaa

SEQ ID NO: 76395 - DNA, 120 bp, Artificial Sequence
  ENSG00000079785_5 (sequence is synthesized)
tttgataattatggagaggaattcactatgcatgataccattggatgttacctggatatagataagggacatgtcaagttctccaaaaatggaaaagatcttggtctggcatttgaaata

SEQ ID NO: 76396 - DNA, 120 bp, Artificial Sequence
  ENSG00000079785_6 (sequence is synthesized)
ccaccacatatgaaaaaccaagccctctttcctgcctgtgttttgaagaatgctgaactgaaatttaacttcggtgaagaggaatttaagtttccaccaaaagatggctttgttgctctt

SEQ ID NO: 76397 - DNA, 120 bp, Artificial Sequence
  ENSG00000079785_7 (sequence is synthesized)
tccaaggcaccggatggttacattgtcaaatcacagcactcaggtaatgcacaggtgacacaaacaaagtttctccccaatgctccgaaagctctcattgttgaaccttcccgggagtta

SEQ ID NO: 76398 - DNA, 120 bp, Artificial Sequence
  ENSG00000079785_8 (sequence is synthesized)
gctgaacaaactttgaacaacatcaagcagtttaagaaatacattgataatcctaaattaagggagcttctgataattggaggtgttgcagcccgggatcagctctctgttttggaaaat

SEQ ID NO: 76399 - DNA, 120 bp, Artificial Sequence
  ENSG00000079785_9 (sequence is synthesized)
ggagtagatatagttgtaggtactccgggaagactagatgacttggtgtcaactggaaagctgaacttatctcaagttagattcctggtcctggatgaagctgatgggcttctttctcaa

SEQ ID NO: 76400 - DNA, 120 bp, Artificial Sequence
  ENSG00000079785_10 (sequence is synthesized)
tctgccactttgcattctttcgatgtaaagaaactgtccgagaagataatgcattttcctacatgggttgacttaaaaggagaagactctgttccagatactgtacaccatgttgttgtc

SEQ ID NO: 76401 - DNA, 120 bp, Artificial Sequence
  ENSG00000079785_11 (sequence is synthesized)
ccagtaaatcccaaaactgacagactctgggaaaggcttggaaagagccacattagaactgatgatgtacatgcaaaagataacacaagacctggtgctaatagtccagagatgtggtct

SEQ ID NO: 76402 - DNA, 120 bp, Artificial Sequence
  ENSG00000079785_12 (sequence is synthesized)
gaagctattaaaatcctgaaaggggagtatgctgtccgggcaatcaaggaacataagatggatcaagcaattatcttctgtagaaccaaaattgactgtgataacttggagcagtacttt

SEQ ID NO: 76403 - DNA, 120 bp, Artificial Sequence
  ENSG00000079785_13 (sequence is synthesized)
atacaacaaggaggaggacctgataaaaaaggacaccagttctcatgtgtttgtcttcatggtgacagaaagcctcatgagagaaagcaaaacttggaaagatttaagaaaggagatgta

SEQ ID NO: 76404 - DNA, 120 bp, Artificial Sequence
  ENSG00000079785_14 (sequence is synthesized)
agattcttgatttgcacagatgtagctgctagaggaattgatatccacggtgttccttatgttataaatgtcactctgcccgatgaaaagcaaaactacgtacatcgaattggcagagta

SEQ ID NO: 76405 - DNA, 120 bp, Artificial Sequence
  ENSG00000079785_15 (sequence is synthesized)
ggaagagctgaaaggatgggtctggcaatttccctggtggcaacagaaaaagaaaaggtttggtaccatgtatgtagcagccgtggaaaagggtgttataacacaagactcaaggaagat

SEQ ID NO: 76406 - DNA, 120 bp, Artificial Sequence
  ENSG00000079785_16 (sequence is synthesized)
ggaggctgtaccatatggtacaacgagatgcagttactatctgagatagaagaacacctgaactgtaccatttctcaggttgagccggatataaaggtaccagtggatgaatttgatggg

SEQ ID NO: 76407 - DNA, 120 bp, Artificial Sequence
  ENSG00000079785_17 (sequence is synthesized)
aaagttacctacggtcagaaaagggctgctggtggtggaagctataaaggccatgtggatattttggcacctactgttcaagagttggctgcccttgaaaaggaggcgcagacatctttc

SEQ ID NO: 76408 - DNA, 120 bp, Artificial Sequence
  ENSG00000079785_18 (sequence is synthesized)
ctgcatcttggctaccttcctaaccagctgttcagaaccttctgatttttacatttactgaataagatttgagtaatgaaagtctgtagtcttaaaactctaaaacagttgtactgcttc

SEQ ID NO: 76409 - DNA, 120 bp, Artificial Sequence
  ENSG00000079785_19 (sequence is synthesized)
caagcagcagtatttatagtaacgtaagctattaatgctaactcttgcatgtcaagaaacattagtcttaggaattcttcaaaaaatggcatcccaatgaaaataaatttgatgactata

SEQ ID NO: 76410 - DNA, 120 bp, Artificial Sequence
  ENSG00000079785_20 (sequence is synthesized)
ggctcagatcccacgctgccattcggtagatatgtgtctttagataagtgacttaactttcccgaattttagagtcctcatctaaagattctaataccttcctgacagactgtgaccctg

SEQ ID NO: 76411 - DNA, 120 bp, Artificial Sequence
  ENSG00000079785_21 (sequence is synthesized)
ataccgcgtggtgtgctccgaacacatggtgcccagaacgaaggcggcgtccagaagccctaggtcccagaggtccgctcagcggcaggcgcataaggcggggccggcgcgggcctttcc

SEQ ID NO: 76412 - DNA, 120 bp, Artificial Sequence
  ENSG00000079785_22 (sequence is synthesized)
ttttgaaaatgaaatttataccttacctattctcatgaaggatgtgaggtgacctgcaaaattaaaacaggaaatttggaaataaaggcaacaaaaataataaaaaagaaatggggaaaa

SEQ ID NO: 76413 - DNA, 120 bp, Artificial Sequence
  ENSG00000079785_23 (sequence is synthesized)
ggggaaaagctgatactagtcaacttagaggaatatgaatcattgaatttatttttaattttttgagacagagtcatgttcttgtcacccaagctggagtgcaatggcacagtctcagct

SEQ ID NO: 76414 - DNA, 120 bp, Artificial Sequence
  ENSG00000079785_24 (sequence is synthesized)
ggcattggtgctcagggcaatgaatccagtccatctctccgggtcattcacacaccaaggccctgctcacctttggaaagctgggggactgagtggggagggcacggtgtggtgtcagcc

SEQ ID NO: 76415 - DNA, 120 bp, Artificial Sequence
  ENSG00000079785_25 (sequence is synthesized)
cggaagcgcgcgccgccactgccacgccgtgtcagtcgggagggagggagcgagcaggcgaagccgcggaggacggggtgaagatggcggccttctccgtgctgaacaaatggcagatga

SEQ ID NO: 76416 - DNA, 120 bp, Artificial Sequence
  ENSG00000079785_26 (sequence is synthesized)
aatggtaaattatacattctctatcagcataacactactataacaggaattttcaatttcagaaattttagttaaattatttcaggtagatatttttaggagaagtatcattggatagtt

SEQ ID NO: 76417 - DNA, 120 bp, Artificial Sequence
  ENSG00000079785_27 (sequence is synthesized)
aagccatgtctatgtgccttaaaaacagtctccagcaatagccataaggaacttaatttgtagattaattaagacaggtatcagaatatggctatgtagaattaaaggtattttgatact

SEQ ID NO: 76418 - DNA, 120 bp, Artificial Sequence
  ENSG00000079785_28 (sequence is synthesized)
atatccacggtgttccttatggtaaaaagcaactttttatgcctgtagtgtgattgttacggaatctaaagtaaagccttctaatatgtttgaaaaatttagaaactactggcaattgtt

SEQ ID NO: 76419 - DNA, 120 bp, Artificial Sequence
  ENSG00000079785_29 (sequence is synthesized)
aataatggtttttatttatagttataaatgtcactctgcccgatgaaaagcaaaactacgtacatcgaattggcagagtaggaagagctgaaaggtacttctgcaattttttttccccca

SEQ ID NO: 76420 - DNA, 80 bp, Artificial Sequence
  ENSG00000079805_0 (sequence is synthesized)
gcggcgaccgtgaggccgagccgggagcgggcgtcttgccgaggcccgggcgggcggggagcaacggctacagacgccgc

SEQ ID NO: 76421 - DNA, 120 bp, Artificial Sequence
  ENSG00000079805_1 (sequence is synthesized)
agggcgctcgggccgggggccgccggcgccatgggcaaccgcgggatggaagagctgatcccgctggtcaacaaactgcaggacgccttcagctccatcggccagagctgccacctggac

SEQ ID NO: 76422 - DNA, 120 bp, Artificial Sequence
  ENSG00000079805_2 (sequence is synthesized)
ctgccgcagatcgctgtagtgggcggccagagcgccggcaagagctcggtgctggagaacttcgtgggccgggacttccttccccgcggttcaggaatcgtcacccggcggcctctcatt

SEQ ID NO: 76423 - DNA, 120 bp, Artificial Sequence
  ENSG00000079805_3 (sequence is synthesized)
ctgcagctcatcttctcaaaaacagaacatgccgagtttttgcactgcaagtccaaaaagtttacagactttgatgaagtccggcaggagattgaagcagagaccgacagggtcacgggg

SEQ ID NO: 76424 - DNA, 120 bp, Artificial Sequence
  ENSG00000079805_4 (sequence is synthesized)
accaacaaaggcatctccccagtgcccatcaaccttcgagtctactcgccacacgtgttgaacttgaccctcatcgacctcccgggtatcaccaaggtgcctgtgggcgaccagcctcca

SEQ ID NO: 76425 - DNA, 120 bp, Artificial Sequence
  ENSG00000079805_5 (sequence is synthesized)
gacatcgagtaccagatcaaggacatgatcctgcagttcatcagccgggagagcagcctcattctggctgtcacgcccgccaacatggacctggccaactccgacgccctcaagctggcc

SEQ ID NO: 76426 - DNA, 120 bp, Artificial Sequence
  ENSG00000079805_6 (sequence is synthesized)
aaggaagtcgatccccaaggcctacggaccatcggtgtcatcaccaagcttgacctgatggacgagggcaccgacgccagggacgtcttggagaacaagttgctcccgttgagaagaggc

SEQ ID NO: 76427 - DNA, 120 bp, Artificial Sequence
  ENSG00000079805_7 (sequence is synthesized)
tacattggcgtggtgaaccgcagccagaaggatattgagggcaagaaggacatccgtgcagcactggcagctgagaggaagttcttcctctcccacccggcctaccggcacatggccgac

SEQ ID NO: 76428 - DNA, 120 bp, Artificial Sequence
  ENSG00000079805_8 (sequence is synthesized)
cgcatgggcacgccacatctgcagaagacgctgaatcagcaactgaccaaccacatccgggagtcgctgccggccctacgtagcaaactacagagccagctgctgtccctggagaaggag

SEQ ID NO: 76429 - DNA, 120 bp, Artificial Sequence
  ENSG00000079805_9 (sequence is synthesized)
gtggaggagtacaagaactttcggcccgacgaccccacccgcaaaaccaaagccctgctgcagatggtccagcagtttggggtggattttgagaagaggatcgagggctcaggagatcag

SEQ ID NO: 76430 - DNA, 120 bp, Artificial Sequence
  ENSG00000079805_10 (sequence is synthesized)
gtggacactctggagctctccgggggcgcccgaatcaatcgcatcttccacgagcggttcccatttgagctggtgaagatggagtttgacgagaaggacttacgacgggagatcagctat

SEQ ID NO: 76431 - DNA, 120 bp, Artificial Sequence
  ENSG00000079805_11 (sequence is synthesized)
gccattaagaacatccatggagtcaggaccgggcttttcaccccggacttggcattcgaggccattgtgaaaaagcaggtcgtcaagctgaaagagccctgtctgaaatgtgtcgacctg

SEQ ID NO: 76432 - DNA, 120 bp, Artificial Sequence
  ENSG00000079805_12 (sequence is synthesized)
gttatccaggagctaatcaatacagttaggcagtgtaccagtaagctcagttcctacccccggttgcgagaggagacagagcgaatcgtcaccacttacatccgggaacgggaggggaga

SEQ ID NO: 76433 - DNA, 120 bp, Artificial Sequence
  ENSG00000079805_13 (sequence is synthesized)
acgaaggaccagattcttctgctgatcgacattgagcagtcctacatcaacacgaaccatgaggacttcatcgggtttgccaatgcccagcagaggagcacgcagctgaacaagaagaga

SEQ ID NO: 76434 - DNA, 120 bp, Artificial Sequence
  ENSG00000079805_14 (sequence is synthesized)
tcctggtacaaggatgaggaggagaaagagaagaagtacatgctgcctctggacaacctcaagatccgtgatgtggagaagggcttcatgtccaacaagcacgtcttcgccatcttcaac

SEQ ID NO: 76435 - DNA, 120 bp, Artificial Sequence
  ENSG00000079805_15 (sequence is synthesized)
acggagcagagaaacgtctacaaggacctgcggcagatcgagctggcctgtgactcccaggaagacgtggacagctggaaggcctcgttcctccgagctggcgtctaccccgagaaggac

SEQ ID NO: 76436 - DNA, 120 bp, Artificial Sequence
  ENSG00000079805_16 (sequence is synthesized)
caggcagaaaacgaggatggggcccaggagaacaccttctccatggacccccaactggagcggcaggtggagaccattcgcaacctggtggactcatacgtggccatcatcaacaagtcc

SEQ ID NO: 76437 - DNA, 120 bp, Artificial Sequence
  ENSG00000079805_17 (sequence is synthesized)
atccgcgacctcatgccaaagaccatcatgcacctcatgatcaacaatacgaaggccttcatccaccacgagctgctggcctacctatactcctcggcagaccagagcagcctcatggag

SEQ ID NO: 76438 - DNA, 120 bp, Artificial Sequence
  ENSG00000079805_18 (sequence is synthesized)
gagtcggctgaccaggcacagcggcgggacgacatgctgcgcatgtaccatgccctcaaggaggcgctcaacatcatcggtgacatcagcaccagcactgtgtccacgcctgtacccccg

SEQ ID NO: 76439 - DNA, 120 bp, Artificial Sequence
  ENSG00000079805_19 (sequence is synthesized)
cctgtcgatgacacctggctccagagcgccagcagccacagccccactccacagcgccgaccggtgtccagcatacacccccctggccggcccccagcagtgaggggccccactccaggg

SEQ ID NO: 76440 - DNA, 120 bp, Artificial Sequence
  ENSG00000079805_20 (sequence is synthesized)
ccccccctgattcctgttcccgtgggggcagcagcctccttctcggcgcccccaatcccatcccggcctggaccccagagcgtgtttgccaacagtgacctcttcccagccccgcctcag

SEQ ID NO: 76441 - DNA, 120 bp, Artificial Sequence
  ENSG00000079805_21 (sequence is synthesized)
atcccatctcggccagttcggatccccccagggattcccccaggagtgcccagcagaagaccccctgctgcgcccagccggcccaccattatccgcccagccgagccatccctgctcgac

SEQ ID NO: 76442 - DNA, 120 bp, Artificial Sequence
  ENSG00000079805_22 (sequence is synthesized)
taggcctcgaggggggcgtgctctcgggggggcctcacgcacccgcggcgcaggagcttcagtggtctggggccctccgccgcccctatgctgggaccaggctcccagtgggcagccctg

SEQ ID NO: 76443 - DNA, 120 bp, Artificial Sequence
  ENSG00000079805_23 (sequence is synthesized)
gcctcttccttaacgctggccccggtccagggccggcccctgtgcctggctggacaccgcactgcgcaaaggggccctggagctccaggcagggggcgctggggtgttgcactttggggg

SEQ ID NO: 76444 - DNA, 120 bp, Artificial Sequence
  ENSG00000079805_24 (sequence is synthesized)
atggagtctcagggtggcagaggggggaccagaacccttgacaccatcctgaatgaggggtccagcctgggggggactctaccaaggtcttcttgggctgggaaagcccatgtagggcag

SEQ ID NO: 76445 - DNA, 120 bp, Artificial Sequence
  ENSG00000079805_25 (sequence is synthesized)
gccttctataagtgcgggcaccaagggcgcctacatccccaggccttgctggggtgcaggggtatatcaacttcccattagcaggagctccccagcggcaagcctggcccagtgggctcg

SEQ ID NO: 76446 - DNA, 120 bp, Artificial Sequence
  ENSG00000079805_26 (sequence is synthesized)
gtagtgcccagctggcaggcctgaggtgtacatagtccttcccggccatattaaccacacagcctgagcctggcccagcctcggctgccagaggtgcctttgctaggcccggagccgttg

SEQ ID NO: 76447 - DNA, 120 bp, Artificial Sequence
  ENSG00000079805_27 (sequence is synthesized)
gcccgggccggccttgccctattcctctcctcctcctcctcctgggtcccccagggtggctgggcttgggctatgtgggtggtggtggcggggggtcttgggggcctctcagctcccgcc

SEQ ID NO: 76448 - DNA, 120 bp, Artificial Sequence
  ENSG00000079805_28 (sequence is synthesized)
catgcctccctgatgggtgggcccagggcggcctctctctgaggagacctcacccactcctcgctcagtttgaccactgtaagtgcctgcactctgtattctattaataaactaaaataa

SEQ ID NO: 76449 - DNA, 120 bp, Artificial Sequence
  ENSG00000079805_29 (sequence is synthesized)
cacccccgacatggcctttgaagccattgtgaaaaaacagattgtaaaactcaaagagccgagtttgaagtgtgttgatctcgtggtctcagagctggccacggtcataaaaaagtgtgc

SEQ ID NO: 76450 - DNA, 120 bp, Artificial Sequence
  ENSG00000079805_30 (sequence is synthesized)
gccatccccaatcagggggagatcctggtgatccgcaggggctggctgaccatcaacaacatcagcctgatgaaaggcggctccaaggagtactggtttgtgctgactgccgagtcactg

SEQ ID NO: 76451 - DNA, 120 bp, Artificial Sequence
  ENSG00000079805_31 (sequence is synthesized)
atcccatctcggccagttcggatccccccagggattcccccaggagtgcccagaagaccccctgctgcgcccagccggcccaccattatccgcccagccgagccatccctgctcgactag

SEQ ID NO: 76452 - DNA, 120 bp, Artificial Sequence
  ENSG00000079805_32 (sequence is synthesized)
gcgccattgcactccagcctggacaacaaaagcgaaactccgtctcaaaaaaaaaaaataaataataataataataataaagttctggtggacagtgctgctctgggctttcctgaaaat

SEQ ID NO: 76453 - DNA, 120 bp, Artificial Sequence
  ENSG00000079805_33 (sequence is synthesized)
gggctttcctgaaaatgccccagtgggagcttcccagccacagttggtgtcgagggtcacatgcccacctctgggggcccaggaaaagagaagagtcagctgatccaacagaaacaaaga

SEQ ID NO: 76454 - DNA, 120 bp, Artificial Sequence
  ENSG00000079805_34 (sequence is synthesized)
aactcagacacttgccgagcttgtgcacagcgctcttctgtgtaggcgtcactcacggtgacccctcagcatgaccaggtgaagcctgggttgggtttgggttcctgatcagtcagaaag

SEQ ID NO: 76455 - DNA, 120 bp, Artificial Sequence
  ENSG00000079805_35 (sequence is synthesized)
ttcccccaggagtgcccaggcgaccacctccatcggctcccgcacgacctttcttctgagcttcgtgggaggcccctcccacctgtctggctgccccctcgggggccggtctgtcctggc

SEQ ID NO: 76456 - DNA, 120 bp, Artificial Sequence
  ENSG00000079805_36 (sequence is synthesized)
tggtgtccctgagccccaatcagcaggctcttgtgattttctgaccataatttattgactccaatgcccaggccacaccaccctttgttataggaggcttctgcctagactttggccggg

SEQ ID NO: 76457 - DNA, 120 bp, Artificial Sequence
  ENSG00000079805_37 (sequence is synthesized)
ccatccctcatgcctgtgtggggcccctgcaggagaggggccggggcaggtggtcttccaggcccccttcctggcattctgttaccagacctcaacctggcttggagggcccaggtttcc

SEQ ID NO: 76458 - DNA, 120 bp, Artificial Sequence
  ENSG00000079805_38 (sequence is synthesized)
ttgttaggccctgccccgcaccaggcaacgctaacacaggatgggaggcttaggctaaggcacatttacagtagaggggccaggaaatccgaggctcacgttccaacgctgcagtgccca

SEQ ID NO: 76459 - DNA, 120 bp, Artificial Sequence
  ENSG00000079805_39 (sequence is synthesized)
ccatgtgagatttccaggaccgtcggtgcagccactgagccgtcccttctacaagccagaggtgttccctgcccgctgaggacggaaggagactcatggggccagaccgcaggccctgac

SEQ ID NO: 76460 - DNA, 120 bp, Artificial Sequence
  ENSG00000079805_40 (sequence is synthesized)
tgcacactcccgttttggcaggaaactaaaattggggagggacccccaagtctcatatgcacacaccctgctgcccctcctttgtcccgttcttccttccatggcaggggctacgtgggc

SEQ ID NO: 76461 - DNA, 120 bp, Artificial Sequence
  ENSG00000079805_41 (sequence is synthesized)
accgggcgcttgtcctggaagaagcgcttgagcgtgcagacctgcagcacagccaccagcagcagcaccgccacgttgacagctgaccagaagttgacccgctccaagttgccctcttgc

SEQ ID NO: 76462 - DNA, 120 bp, Artificial Sequence
  ENSG00000079805_42 (sequence is synthesized)
aggttgcggtcacgtgcctcgaaggcccgcagtagcgtgagcatctggatgctgcgctccagccgggtccgcatggtctcaatggactcctacagggcagcgggaggggaagggtcaggc

SEQ ID NO: 76463 - DNA, 120 bp, Artificial Sequence
  ENSG00000079805_43 (sequence is synthesized)
ctccctccacccatcagggagcagagaccaaaaaaaccgggggatacggagggaggctgtattaaccctgggaggtacagctgcaaacacagacttgttcaggctaagttcaaatcctca

SEQ ID NO: 76464 - DNA, 120 bp, Artificial Sequence
  ENSG00000079805_44 (sequence is synthesized)
ccctgccactcactggctgtgaccatgagcaacttaattaacctatctgagcctgtttcctcttctataagcttccaaattgctgtgaacatttaatgcctaaataaatgtacaaggatg

SEQ ID NO: 76465 - DNA, 120 bp, Artificial Sequence
  ENSG00000079805_45 (sequence is synthesized)
aagagagatctggcgaggatgaagagcagtcacatcccacaagaccctacaggatagatgaccggcacctctcccttgcttctcaagagaaacatgcacaaccccactacaaagaaaagg

SEQ ID NO: 76466 - DNA, 120 bp, Artificial Sequence
  ENSG00000079805_46 (sequence is synthesized)
ctaaactaagaatgctcactgcagatttgcctggggaggggcggggcggcactgaatcagggttttgggaagccagcatgagtccccatcatggcttcctcgtgagcctcttgggtcccc

SEQ ID NO: 76467 - DNA, 120 bp, Artificial Sequence
  ENSG00000079805_47 (sequence is synthesized)
tccttattctaacaaaggtagttgctccaggtgtctgcccttccatcgccgtggggtcctcgggtcaccctgagggtttccgggcagtggactcaggcatccgaccccacacatgacaca

SEQ ID NO: 76468 - DNA, 120 bp, Artificial Sequence
  ENSG00000079805_48 (sequence is synthesized)
atatgataccctcttctctatgcatggcaggcatgactagtcaatcaggagcctctttcctagatgctgcctcttgtcctccagataaattgatgaggctcttctgttccacttaccctt

SEQ ID NO: 76469 - DNA, 120 bp, Artificial Sequence
  ENSG00000079805_49 (sequence is synthesized)
tctcctatccttggcctgtgacaggcaacactaattgatcctagcaccgtttcctgccacgcccagaattctcaccacagtgcttcaggtatcttgtaccagtcgattgacatggctccc

SEQ ID NO: 76470 - DNA, 120 bp, Artificial Sequence
  ENSG00000079805_50 (sequence is synthesized)
gagatgaatcatatttgctgtccatccctgctgtgggtaacacctccttcctttgtgcagaaccctcagctggggcccagtgtggggcgtgagatgggcgtgaggcccagtccagcccag

SEQ ID NO: 76471 - DNA, 120 bp, Artificial Sequence
  ENSG00000079805_51 (sequence is synthesized)
cccagcgggaagcagcctgctactcatagctgagaactgaacccagctcaaggagctcacctctaggcagccggcctcagcccggctcttacacttggacagcacagcctgggcctccag

SEQ ID NO: 76472 - DNA, 120 bp, Artificial Sequence
  ENSG00000079805_52 (sequence is synthesized)
tcctagcaggggctcccttttgctggacattctcccactgccagccaccaaggcgctggtcatccctgccactgccctctggcggggctcttctggcaatcccagggtctttcttgtagc

SEQ ID NO: 76473 - DNA, 120 bp, Artificial Sequence
  ENSG00000079805_53 (sequence is synthesized)
tgagccgatcctatgccagggcctcgctgctcccagggcctgggtgtgcagatagggccatgggtggggcagtgacgggaggaattagttggcctcgggcttgtggttttcaggttcctc

SEQ ID NO: 76474 - DNA, 120 bp, Artificial Sequence
  ENSG00000079805_54 (sequence is synthesized)
atgtgttccccccagtccctttgaatttgccaggccaagaccaggaacctgcttctcccttgtaccccaagaggtttaggggttcctcttttcctaccagaggccacatagcccagcccc

SEQ ID NO: 76475 - DNA, 120 bp, Artificial Sequence
  ENSG00000079805_55 (sequence is synthesized)
gtcatgagcgtggccgtggcctctgggtctcccatctgtggttcccatctctacccgggagactcaggccaggaccctcacccaggaaagagactggagcagcctgccagaggatccctg

SEQ ID NO: 76476 - DNA, 120 bp, Artificial Sequence
  ENSG00000079805_56 (sequence is synthesized)
ctttgccgccccctgcctgccctgccacccataccgccccatgtgcctgcctgcctgtcactgtgcaccctagcccgcaacggcctgccgcctcttctgtctctcccacccctacttcct

SEQ ID NO: 76477 - DNA, 120 bp, Artificial Sequence
  ENSG00000079805_57 (sequence is synthesized)
tctaagcccagtcccattgggatgtgtcccttggatgcaaacctgactttctgctgaggcctggctgctccctttctctggctcacaagtggtggatggctaacgggcctttgtttgcca

SEQ ID NO: 76478 - DNA, 120 bp, Artificial Sequence
  ENSG00000079805_58 (sequence is synthesized)
cccacagcttgcagctccctagggtgggattttgtctctgaacccgtgtggagaagggcacctcagggcttctgccagacgtcctgccccaaggcttggtgtgccatccccagcatggcc

SEQ ID NO: 76479 - DNA, 120 bp, Artificial Sequence
  ENSG00000079805_59 (sequence is synthesized)
ccgatcagtgccctggccctgtggccatgcaccccaaagtgtagcgtgggccctgtgctccagctctgaccaacactaaccccggctggaggcaggagagccaggccaccgaggggtgtg

SEQ ID NO: 76480 - DNA, 120 bp, Artificial Sequence
  ENSG00000079805_60 (sequence is synthesized)
cgggcacatccctctccttagaaaccgggccaggcctaggagtatggaggcctcacatttctctgggggagcaccgacagcctgtctccctgttttccctcacctggttgtcattcagtc

SEQ ID NO: 76481 - DNA, 120 bp, Artificial Sequence
  ENSG00000079805_61 (sequence is synthesized)
atggaaccagggtctactaagcactcgttctgtgcccagctctgggctgagacaaggcagtgcccccaccccgctccccccgggtgaatggaggcattcccagactgccagacctttggt

SEQ ID NO: 76482 - DNA, 120 bp, Artificial Sequence
  ENSG00000079805_62 (sequence is synthesized)
gctaacaccaggacgtcctggacagaccaggaagagctcgtcactgcgttcccagaggggatgctgtgacctcacaggggctgctggcctcagccccctcacccaccaccaggcagcccg

SEQ ID NO: 76483 - DNA, 120 bp, Artificial Sequence
  ENSG00000079805_63 (sequence is synthesized)
tgaatggccagatgccaggggtcactgcctgctccaaacaactgtgagagtcctgtctgctcatcccagggagggataagtctgtacccttggccttaacaaggggcgcccggtggcatc

SEQ ID NO: 76484 - DNA, 120 bp, Artificial Sequence
  ENSG00000079805_64 (sequence is synthesized)
tcatgctgtccccagcctgggcagtgacttctgcatggtccaggggtccctgggtactctttagccacctccgtcttcatggccacctggggcttagcactcacatccagccaccaagga

SEQ ID NO: 76485 - DNA, 120 bp, Artificial Sequence
  ENSG00000079805_65 (sequence is synthesized)
taggacagcatctgggccccagagggattcctggaggccccatctctggcgctcctgccgtgccgtgccctgccatgccctgcactgggggatgcaggccagcccttcgcagctgtccat

SEQ ID NO: 76486 - DNA, 120 bp, Artificial Sequence
  ENSG00000079805_66 (sequence is synthesized)
ggccatgctcagcccaccctttgtagcttggccaagtctgtcagtgcctgggtcccaggccgccctgtgcgtgcctccgtgtgcttcctgcagctcccagggccctcgtcctgagtgggg

SEQ ID NO: 76487 - DNA, 120 bp, Artificial Sequence
  ENSG00000079805_67 (sequence is synthesized)
tggggggctctgcccacacatgcctccagcggccagggagcatgggagcacagcccccaggctgcctgccgttagttgtcaggtgagtccctgcgcaggcctgggttctgacccccacgc

SEQ ID NO: 76488 - DNA, 120 bp, Artificial Sequence
  ENSG00000079805_68 (sequence is synthesized)
agatgacagctacagccacacaatccccatccatggggtctcccagcctgaaaccctgatgtgtcagtcaaaaggatgaccaccaggcttgcagccagcttgggacatgagccgcgctcc

SEQ ID NO: 76489 - DNA, 120 bp, Artificial Sequence
  ENSG00000079805_69 (sequence is synthesized)
ttcaatgtccttggggagggcccctgggctcacacctttgaccctagccctctgtgtggatgctacccttggaaccttatctcacgcaaacaagtgcagttcctcagatgtcacatttca

SEQ ID NO: 76490 - DNA, 120 bp, Artificial Sequence
  ENSG00000079805_70 (sequence is synthesized)
tgtgccacagccccacacacaagccccagggactcctcccatgggcccctttccatcaggcctctgtgagtctataccccatcagcccctggcccagtgagtctgtctgtccgcccacct

SEQ ID NO: 76491 - DNA, 120 bp, Artificial Sequence
  ENSG00000079805_71 (sequence is synthesized)
gcccaggtggcgcctcatgttggtttcctgctggaaatgcttgggacagggtggaactgggtttcctgggctttggggctggaggtgtctctattgcggtccctggcttcccactgagct

SEQ ID NO: 76492 - DNA, 120 bp, Artificial Sequence
  ENSG00000079805_72 (sequence is synthesized)
cccaggacaggtcattttcaggccatgttagccaggagtctctgaaatcatgtagcagatgcccacttgagcaagcaaaggagaaattgggggtactttgtcatcagggcccagaaagtt

SEQ ID NO: 76493 - DNA, 120 bp, Artificial Sequence
  ENSG00000079805_73 (sequence is synthesized)
ccctcacggaagccagtgaccggggcacacaggggatggggtcccacttgctttgttctcttctcttttccccttccatcctgaggtagagtgaacatggccacccttggccccaatatt

SEQ ID NO: 76494 - DNA, 71 bp, Artificial Sequence
  ENSG00000079805_74 (sequence is synthesized)
ctgaggtagagtgaacatggccacccttggccccaatattaaaatgccttgccgggcacggtgggtggttc

SEQ ID NO: 76495 - DNA, 90 bp, Artificial Sequence
  ENSG00000079805_75 (sequence is synthesized)
gtcccaaggttgggtgtggtggcttacacctgcaatcccaacactttgggaggcaatgtgggcagatcctttgggcccaggagttcgaaa

SEQ ID NO: 76496 - DNA, 120 bp, Artificial Sequence
  ENSG00000079805_76 (sequence is synthesized)
aggcaatgtgggcagatcctttgggcccaggagttcgaaaacagcctgggcaatgttgcaaaacccttctctccaaaaaatacaaacatacccaggcatggtggcgcacccctgtaatcc

SEQ ID NO: 76497 - DNA, 120 bp, Artificial Sequence
  ENSG00000079805_77 (sequence is synthesized)
cgcacccctgtaatcccatctactccagggcgctgaggtgggaggatcacttgagctctccctgggaggttgaggctgcggtgaactgtgtttgtgccactgcactgcagcctgggtgac

SEQ ID NO: 76498 - DNA, 120 bp, Artificial Sequence
  ENSG00000079805_78 (sequence is synthesized)
ctgggcagaggactccctgcaggggctccggagcaggcccgggccccaggggcggtgtcacgggccagggcgccgtaggacaggagggacttccttccccgcggttcaggaatcgtcacc

SEQ ID NO: 76499 - DNA, 120 bp, Artificial Sequence
  ENSG00000079805_79 (sequence is synthesized)
tcacccacacctctgagtccctaatcgttaggccttaagagggctcttggatggttttctgtagctgcgagcccctccctgagggtctccaagggcacatgagggtggatgtgtcttagt

SEQ ID NO: 76500 - DNA, 120 bp, Artificial Sequence
  ENSG00000079805_80 (sequence is synthesized)
cctgcgtccattgcaggcttcagggctgtctgcagctcctgatcaaatagggcttagttcctgcccagtcggttggtgtgaacctcatgctaaactaagaatgctcactgcagatttgcc

SEQ ID NO: 76501 - DNA, 120 bp, Artificial Sequence
  ENSG00000079805_81 (sequence is synthesized)
actgttactatactgagcagctggtgacctgtgcccagcagaggagcacgcagctgaacaagaagagagccatccccaatcaggtgatccgcaggggctggctgaccatcaacaacatca

SEQ ID NO: 76502 - DNA, 120 bp, Artificial Sequence
  ENSG00000079805_82 (sequence is synthesized)
tctctcaaggctgtgtggtgtggtggccgcatagtggcaccctggtgttggcccttggttggggggagtgtgtctgccactccctggtatcctgcccatgccaccctttctgatctctga

SEQ ID NO: 76503 - DNA, 70 bp, Artificial Sequence
  ENSG00000079805_83 (sequence is synthesized)
tctcaagagaaacatgcacaaccccactacaaagaaaagggagcactggcgggcagatcatgaggtcagg

SEQ ID NO: 76504 - DNA, 120 bp, Artificial Sequence
  ENSG00000079805_84 (sequence is synthesized)
agtacatgctgggctctggggtgctggagccgcaggtcctggccccatcaatacaatccaaagtgagctggctctgatgaggaagaggccaagatgccccactcagggaagtcttcctgg

SEQ ID NO: 76505 - DNA, 120 bp, Artificial Sequence
  ENSG00000079805_85 (sequence is synthesized)
tgcctgctcttccctgatttacccacaaccctaactttgcatattcaaagggggagatcctggtaagtacatgcttagtgtggtagcaaacattagagaatctagtggtgatggagaccc

SEQ ID NO: 76506 - DNA, 120 bp, Artificial Sequence
  ENSG00000079805_86 (sequence is synthesized)
cgcccacccctaatattccctgttccccatcccctccaaataacaaaaatactaaaaatcgagctaacctggaaaccccatgccgcagccggcgctggactgcacgttgccctgggtata

SEQ ID NO: 76507 - DNA, 120 bp, Artificial Sequence
  ENSG00000079805_87 (sequence is synthesized)
agtcgactcacacaggcactaactggaccgccacccttgaaggcgcacttctgcagccagttcctggcaggttttcctggtttcctgtaggtcagggatggcaaatacttacacaccgcc

SEQ ID NO: 76508 - DNA, 120 bp, Artificial Sequence
  ENSG00000079805_88 (sequence is synthesized)
cctgcctcccctcacatccctggctgtggaagatctcgcttaagccagaccagaattcattcttggcactgcccctcctccttctatctcctatgcagatgtcactcatggatcagagca

SEQ ID NO: 76509 - DNA, 120 bp, Artificial Sequence
  ENSG00000079805_89 (sequence is synthesized)
tatttttccacatggcagaaatcttgccctcttgtgcccatggcagacatggctagttgatctagcactctttgccttgtgccgctcctctagcacacgcccatggcagacattgctaag

SEQ ID NO: 76510 - DNA, 120 bp, Artificial Sequence
  ENSG00000079805_90 (sequence is synthesized)
cattccccacccccctccgcattttctacctgtgtggttcatgttgcttcccgtgccacgaggaccccgccaatgcgaccactctgcttgttcccccagctcagttcctacccccggttg

SEQ ID NO: 76511 - DNA, 120 bp, Artificial Sequence
  ENSG00000079805_91 (sequence is synthesized)
taggtacttttagagactggctggtcgggcggcaccaatcctcactctcagatccaaggaggtgactgagttgggattctctgagagggcaggtgtcagacagtctctgtcgggggtcct

SEQ ID NO: 76512 - DNA, 120 bp, Artificial Sequence
  ENSG00000079805_92 (sequence is synthesized)
ggggtgaaggcagagccaactgagaatatctggaagctctcctgggctgatagtggtccactgtccccaaccaacacgccttctgtgaggcatccccatggttagtttagggagagggca

SEQ ID NO: 76513 - DNA, 120 bp, Artificial Sequence
  ENSG00000079805_93 (sequence is synthesized)
ctgggctcaagcaatcctcccatctcagcttcccaaaatgctgggatgacaggggtgagcccctgcgcccgaccaggctccaatctcttattgctccaagtaggtgcccacttggtgctg

SEQ ID NO: 76514 - DNA, 120 bp, Artificial Sequence
  ENSG00000079805_94 (sequence is synthesized)
caagtaggtgcccacttggtgctgggccttagctgatctccagggaggcagcgtgagcacctggcatggtcccagcccccgagcccagcctaacatgccgagtttttgcactgcaagtcc

SEQ ID NO: 76515 - DNA, 120 bp, Artificial Sequence
  ENSG00000079805_95 (sequence is synthesized)
aatgttcagaacagctttatttgtaataaattcaagctaggaagaccccaaatgtccatccaatggtgactagacgaacagactgtagtccatcagtgcaatggacagattcgaccacga

SEQ ID NO: 76516 - DNA, 120 bp, Artificial Sequence
  ENSG00000079805_96 (sequence is synthesized)
aaaggaatgaacgtcagacacacgaagcagacaggatgtctgtgattgcatcacatgctgctcctgtgttgttttatcgttgacatcttccacttgcacacttcaaaaatagtcattgaa

SEQ ID NO: 76517 - DNA, 120 bp, Artificial Sequence
  ENSG00000079805_97 (sequence is synthesized)
gattcagtgtctagccagcgccgcatggtttctgagatgctgcatttgtcttttttttttttttgagacagagtcgcccaaattgcaagacagagttgctccaccacatgtggtcacact

SEQ ID NO: 76518 - DNA, 120 bp, Artificial Sequence
  ENSG00000079805_98 (sequence is synthesized)
tcctgcccctcgatccggacgcaagagtaatttctgtccctctccccccctcacagggacttccttccccgcggttcaggaatcgtcacccggcggcctctcattctgcagctcatcttc

SEQ ID NO: 76519 - DNA, 120 bp, Artificial Sequence
  ENSG00000079805_99 (sequence is synthesized)
aaagtctggcatgtgagtctggctgcctggttccagccccatctcgtgtctgcccctgactgggcggacttgggtggggcaggtggtccttcctgggcccgtttcctggtccttgcgttg

SEQ ID NO: 76520 - DNA, 120 bp, Artificial Sequence
  ENSG00000079805_100 (sequence is synthesized)
gggaatggcctgaggttccgggggaaccttttgcagctcagacacctagattcagcttgctggggaagcctgtggcagccgggcaggcagaacctccatttctcacctaacatgcgtgag

SEQ ID NO: 76521 - DNA, 120 bp, Artificial Sequence
  ENSG00000079805_101 (sequence is synthesized)
gcaccctggggtctctcctcctgtctcacttcctcccagtgagctctcactacgtgcccagctgctggagtggaggaatcgtcctcatccctatttggcttgcgaggaaacaggcccaga

SEQ ID NO: 76522 - DNA, 120 bp, Artificial Sequence
  ENSG00000079819_0 (sequence is synthesized)
aatttgaaacctagcggagggaggaggcaggcgcggctgccggcggctgggactgaagagggacgggtcccgcggcgagcgagctcctgagcataagctgtggccatgactactgaagta

SEQ ID NO: 76523 - DNA, 120 bp, Artificial Sequence
  ENSG00000079819_1 (sequence is synthesized)
ggctctgtgtctgaagtgaagaaggactctagccagttaggaacagatgcaaccaaggaaaaacctaaagaagtagcagaaaatcagcagaatcagtcttccgatccagaggaggaaaaa

SEQ ID NO: 76524 - DNA, 120 bp, Artificial Sequence
  ENSG00000079819_2 (sequence is synthesized)
ggttcccagccacctcctgcagctgaaagccaaagtagtctacgccgccagaagagagagaaggaaacatcggagagcaggggtatttctcggttcataccgccatggcttaagaagcaa

SEQ ID NO: 76525 - DNA, 120 bp, Artificial Sequence
  ENSG00000079819_3 (sequence is synthesized)
aagtcatataccttagtagtggccaaagatggaggagataaaaaagagcctacccaagctgttgttgaagaacaggtcttagataaagaggaaccccttccagaagaacagagacaggct

SEQ ID NO: 76526 - DNA, 120 bp, Artificial Sequence
  ENSG00000079819_4 (sequence is synthesized)
aagggtgatgctgaagaaatggctcagaagaaacaagagattaaagttgaagtcaaggaagaaaaaccctcagtgagcaaggaagaaaaaccctcagtgagcaaagtggagatgcagcct

SEQ ID NO: 76527 - DNA, 120 bp, Artificial Sequence
  ENSG00000079819_5 (sequence is synthesized)
actgaattagtaagtaaggagagagaagagaaggtaaaagaaacacaggaagacaaattagaaggaggagcagcaaaaagggagaccaaggaagtgcagaccaatgagctgaaagcagag

SEQ ID NO: 76528 - DNA, 120 bp, Artificial Sequence
  ENSG00000079819_6 (sequence is synthesized)
aaggcatctcaaaaagtcaccaagaagaccaaaactgtccagtgtaaagtgaccctcttagatggcaccgaatacagctgtgacctggagaaacatgccaagggacaagtgttatttgac

SEQ ID NO: 76529 - DNA, 120 bp, Artificial Sequence
  ENSG00000079819_7 (sequence is synthesized)
aaagtgtgtgaacacctcaatctcttggagaaagactactttggacttttgtttcaggaaagccctgagcagaaaaactggttagatcctgctaaagaaataaagagacaactgagaaac

SEQ ID NO: 76530 - DNA, 120 bp, Artificial Sequence
  ENSG00000079819_8 (sequence is synthesized)
cttccatggctattcacttttaatgtgaagttttatcctcctgatccttctcaattgactgaagatatcaccagatacttcttgtgccttcagctccggcaggacattgcctctggccgc

SEQ ID NO: 76531 - DNA, 120 bp, Artificial Sequence
  ENSG00000079819_9 (sequence is synthesized)
ctgccctgctcttttgtgactcatgctctcctgggatcctacaccctgcaggctgaacttggtgactatgacccagaagaacatggcagcatcgacctcagtgaattccagtttgcccct

SEQ ID NO: 76532 - DNA, 120 bp, Artificial Sequence
  ENSG00000079819_10 (sequence is synthesized)
actcagactaaggagctggaagagaaggtggcagagctgcacaaaacccacaggggcttatcgccagcacaagctgattcccagttcttagaaaatgcaaagaggctttccatgtatggt

SEQ ID NO: 76533 - DNA, 120 bp, Artificial Sequence
  ENSG00000079819_11 (sequence is synthesized)
gttgacctacatcatgccaaggactcagaaggtgtggacatcaagctgggcgtgtgtgctaatggacttctcatttacaaagacagactgcgaatcaatcgttttgcttggccgaaaatc

SEQ ID NO: 76534 - DNA, 120 bp, Artificial Sequence
  ENSG00000079819_12 (sequence is synthesized)
ttaaaaatttcctataaacgcagtaacttctacattaaagtcagaccggcagagctggaacagtttgagagtaccattggattcaaactgccaaaccaccgggcagcgaaaagactatgg

SEQ ID NO: 76535 - DNA, 120 bp, Artificial Sequence
  ENSG00000079819_13 (sequence is synthesized)
aaagtgtgcgtggagcatcatactttctacaggcttgtttctccagagcagccaccaaaagccaagttcctgaccttggggtccaaatttcgctatagtggccgcacccaagcacagacc

SEQ ID NO: 76536 - DNA, 120 bp, Artificial Sequence
  ENSG00000079819_14 (sequence is synthesized)
cgccaggccagcaccctcatagataggccagcaccacactttgagcgcacttctagtaaacgggtctccaggagtctagatggagctccgattggtgtcatggaccaaagtcttatgaag

SEQ ID NO: 76537 - DNA, 120 bp, Artificial Sequence
  ENSG00000079819_15 (sequence is synthesized)
gattttcctggcgctgctggggagatttcagcctatggacctggacttgtcagcattgccgtggtacaagatggggacggcaggagggaagtgagaagcccaactaaagccccacatttg

SEQ ID NO: 76538 - DNA, 120 bp, Artificial Sequence
  ENSG00000079819_16 (sequence is synthesized)
cagctcattgaaggaaagaaaaattccttgagagtagaaggggataatatttatgtcagacatagcaatttaatgttggaggaactggataaggcccaggaggacatactgaaacatcag

SEQ ID NO: 76539 - DNA, 120 bp, Artificial Sequence
  ENSG00000079819_17 (sequence is synthesized)
gctagcattagtgaactcaagcgcaattttatggaatccacacctgagccgcgccctaatgaatgggaaaaacgacgtatcacacctctgtccctacagacacaagggagttcacatgag

SEQ ID NO: 76540 - DNA, 120 bp, Artificial Sequence
  ENSG00000079819_18 (sequence is synthesized)
acagaagaaatgaatggtaaagagatatcacctgggagtggtcctggggagattcgtaaggtggagcctgtgacacaaaaagactccacctccctgtcttctgagagcagcagcagcagc

SEQ ID NO: 76541 - DNA, 120 bp, Artificial Sequence
  ENSG00000079819_19 (sequence is synthesized)
agtgagagtgaggaggaagacgtgggagagtaccgtccccaccaccgagtgaccgagggcaccatcagggaggaacaggagtatgaagaagaggtggaggaagaaccccgcccggcagcc

SEQ ID NO: 76542 - DNA, 120 bp, Artificial Sequence
  ENSG00000079819_20 (sequence is synthesized)
aaggtagtagagagggaggaagcagtgcccgaagccagcccagtcacacaagcaggtgccagtgtaatcacagtagaaacagtgatccaggaaaatgtaggtgcccaaaagatacccgga

SEQ ID NO: 76543 - DNA, 120 bp, Artificial Sequence
  ENSG00000079819_21 (sequence is synthesized)
gagaagagtgtacacgaaggcgctcttaagcaagacatgggagaagaagcagaggaagagccacagaaagttaacggagaggtgtcccatgttgacattgatgttttgccacaaattatt

SEQ ID NO: 76544 - DNA, 120 bp, Artificial Sequence
  ENSG00000079819_22 (sequence is synthesized)
tgttgttcagagccaccagtggtaaaaacagagatggtaacaatttctgatgcctcacaaaggacagaaatctccaccaaggaagtccccattgtccaaactgagaccaaaaccatcaca

SEQ ID NO: 76545 - DNA, 120 bp, Artificial Sequence
  ENSG00000079819_23 (sequence is synthesized)
tatgagtctccacagattgatggcggggctggtggtgattcgggcacgttactgaccgcacaaaccatcacatctgagtccgtgtcaacaacgacaaccacacacatcaccaagactgta

SEQ ID NO: 76546 - DNA, 120 bp, Artificial Sequence
  ENSG00000079819_24 (sequence is synthesized)
aaaggtggaatttctgaaacaagaattgagaaacgcattgtgatcacaggagatggagatattgatcatgaccaggcactggctcaggcgatcagggaagccagagagcagcaccctgac

SEQ ID NO: 76547 - DNA, 120 bp, Artificial Sequence
  ENSG00000079819_25 (sequence is synthesized)
atgtcggtcacaagagtggtggtacacaaagaaacagagttggctgaggaaggggaagattaagtaagaaagtcattttttaaacaacactcaactttgtgaacccctgaagattttttg

SEQ ID NO: 76548 - DNA, 120 bp, Artificial Sequence
  ENSG00000079819_26 (sequence is synthesized)
accgttccaagtcttaatgccacaccactattccagcgaatttatgctacaactggtaacaatgaccagaagcctgaagaattaaaatgccaacaccaaacctttccttaccagctctgg

SEQ ID NO: 76549 - DNA, 120 bp, Artificial Sequence
  ENSG00000079819_27 (sequence is synthesized)
tctatattgctcccatgcatttaatatattattttgttttataaccacttctaaatattctcagttctttctttttgttgttgttaattaaggggttttggttttgttttctgtttactt

SEQ ID NO: 76550 - DNA, 120 bp, Artificial Sequence
  ENSG00000079819_28 (sequence is synthesized)
tgtgtgcaactacctgcttttaatgactcactttgatcaaatgacagtgaacaaagccagcccaagctggtaaggtgctgttcacttgaacaggtgctgttgcgcagaaaggaaactctg

SEQ ID NO: 76551 - DNA, 120 bp, Artificial Sequence
  ENSG00000079819_29 (sequence is synthesized)
tgactaatttagatagtggctttccttcttctggattcttttcattgaattctcacagtaaatatttacggagttttcaaattgcagcaaatatactgtatgagaaaatattaatacaga

SEQ ID NO: 76552 - DNA, 120 bp, Artificial Sequence
  ENSG00000079819_30 (sequence is synthesized)
ttaaaagcctttcttacatcttgaaaattttctaatatttgagaatttcacagggatgttttttatattggacccttttgactttccagtcctgtgactttctacttttagtagagagtc

SEQ ID NO: 76553 - DNA, 120 bp, Artificial Sequence
  ENSG00000079819_31 (sequence is synthesized)
agaatctctggactggagaataatgaagaagttcactgactgtgcactgtgcttagagaccctgccgcaccacagtgccaatgcttgtcagacacatgcccttcggcagcattccagaac

SEQ ID NO: 76554 - DNA, 120 bp, Artificial Sequence
  ENSG00000079819_32 (sequence is synthesized)
aggagggaagagaaagagaaaactttcttcccttctactaaaagattcaggcagcttaaaaccttagtgctttctttcttaacatacccacatttcaattctttccattatttgaacact

SEQ ID NO: 76555 - DNA, 120 bp, Artificial Sequence
  ENSG00000079819_33 (sequence is synthesized)
tgggtagaactcttgctttgtattaaacctctttgtctacacatgtaaaacttaccttttgttattgagcaggcctatctctttcagatagttttatgattcacacaggtttgaggatgc

SEQ ID NO: 76556 - DNA, 120 bp, Artificial Sequence
  ENSG00000079819_34 (sequence is synthesized)
tggggagagggggagggggctgtggtggtgttctgttggttacaagaaagttataccatttaaagctggcaccagagacccgatagggacttattaactatattgaacattttttccttt

SEQ ID NO: 76557 - DNA, 120 bp, Artificial Sequence
  ENSG00000079819_35 (sequence is synthesized)
gcctttgaccctatgtatagttacgatgccagattagatttatagcagcctcaagttgtattaaatgatattttgcttcctgtaatactattataaaataaagtttgtttattctctaaa

SEQ ID NO: 76558 - DNA, 120 bp, Artificial Sequence
  ENSG00000079819_36 (sequence is synthesized)
actgtacttaaggcgtttatcctaatccaggcgtccttggattgcacggtgccagcaagcaaggtggtaacagtgatcacagcctgggctgcaggtgtgagttctgaggagatctatggt

SEQ ID NO: 76559 - DNA, 120 bp, Artificial Sequence
  ENSG00000079819_37 (sequence is synthesized)
gtgcattttctagctgaggaatgaagtgacttggaaccaaactgggcttttctactgagcatgtccctctccagcagggtctggcttgggtggagccagtcttgctcgttaagcttttgg

SEQ ID NO: 76560 - DNA, 120 bp, Artificial Sequence
  ENSG00000079819_38 (sequence is synthesized)
taaattatgtaattatatataagagtcactatagggtattttataaggaaggtactattctgttgtctttaacaaatgtatgtgaaaagtgaaacatggctttttgaaaatttagactat

SEQ ID NO: 76561 - DNA, 120 bp, Artificial Sequence
  ENSG00000079819_39 (sequence is synthesized)
ataacactaagattgggcctcatagtgctcctttatttaaaattaggtgtttggtttgaggatttttacccctatataaggcaaatttttttcaagtatcctacctctgtgctactaagt

SEQ ID NO: 76562 - DNA, 120 bp, Artificial Sequence
  ENSG00000079819_40 (sequence is synthesized)
cagcattaacatgtacaatatatttttgattattttgttaaatgtggcctggtgatttagtgcctcatattctatggatcctaccaatacatacagtaaatcacaaaatttagagcaaac

SEQ ID NO: 76563 - DNA, 120 bp, Artificial Sequence
  ENSG00000079819_41 (sequence is synthesized)
ctaaagaaaaatgtaaagataattgcagtgagtatgcattgtaggacaattgttaaaagtttacctgaggaatgtcaaagatcaacattttagggaattaaatgttgaccaaggagttgg

SEQ ID NO: 76564 - DNA, 120 bp, Artificial Sequence
  ENSG00000079819_42 (sequence is synthesized)
aagatgtttcttaacagattattgaatgtctgtgtctcatttttcacatctgataaagactctgagctccttgcttacctctgaaaaatactatgaatggttaaaaaggtaagccgtttg

SEQ ID NO: 76565 - DNA, 120 bp, Artificial Sequence
  ENSG00000079819_43 (sequence is synthesized)
aactctcagatttgacactatcatcctaattaagaaggaaaaggatatatattaggaattaacctataaaggttaaatgatttgcctttgataagggagtcaatatttttattctcacca

SEQ ID NO: 76566 - DNA, 120 bp, Artificial Sequence
  ENSG00000079819_44 (sequence is synthesized)
ttttttcccttgagtcaaaattcagtcagtatttgttagttttaaacttctacattcattcttttgaatcatcagatattgagaaatgtccaactatgaaaaactgttcttatttaaaga

SEQ ID NO: 76567 - DNA, 120 bp, Artificial Sequence
  ENSG00000079819_45 (sequence is synthesized)
attttatgtaagtggttatatttcaaagattatttttaaatacccaccattttaatatgaaactagttaaataagccaatccccctcccccagccagaaaagaaatccatatttaacaaa

SEQ ID NO: 76568 - DNA, 120 bp, Artificial Sequence
  ENSG00000079819_46 (sequence is synthesized)
ctgaatcataggttgaacatttgttccccaatataaagctaaaaacgaattttacatcattatactttaccccatcactagttgctttagacatttcaaattagaacagattgaattatg

SEQ ID NO: 76569 - DNA, 120 bp, Artificial Sequence
  ENSG00000079819_47 (sequence is synthesized)
ccatttttgcactctcatattcttgttcctgagtacaaaatattcaaaagcagagcataatctagggactgagaaagagtgaagcttccatcctccattccacctttgcaaaggatcatt

SEQ ID NO: 76570 - DNA, 120 bp, Artificial Sequence
  ENSG00000079819_48 (sequence is synthesized)
tccatcattcgtacaacactgtaggtgaagaaagaccaaagaggcttaatattctgcatcttctgagggcctcacagtaaaggcgaagatggaagaagaggaaacgcagctggaagagaa

SEQ ID NO: 76571 - DNA, 120 bp, Artificial Sequence
  ENSG00000079819_49 (sequence is synthesized)
acgcgcggtgcgggtcgggcccgctgtaggctcgcgtccgcgcccccagctgccgcctgcgccgtctgggagctgcggagagggacgcgtgtttcgtgctccgatccttacaattcccac

SEQ ID NO: 76572 - DNA, 120 bp, Artificial Sequence
  ENSG00000079819_50 (sequence is synthesized)
aggtgatcagtgtgtgtgtgttttgccattgtgaggtggaggctgttccccagctcacagccgttctctgtcctgaccctggcaggcactggctcaggcgatcagggaagccagagagca

SEQ ID NO: 76573 - DNA, 120 bp, Artificial Sequence
  ENSG00000079819_51 (sequence is synthesized)
gatattttatccgtgaaggagaagtacctgatgccgacaatatggacagttgaagaaaaagctcaggagacggacaagacacgtgctcccgagtcagaagggccttgcactggagccagg

SEQ ID NO: 76574 - DNA, 120 bp, Artificial Sequence
  ENSG00000079819_52 (sequence is synthesized)
tctcatccaccgtacttcatctttttccccaaacctattgcctgtccctgaaatggacttgctttcagacatttcagaggaagacccctttggggaggctgaccagatcacactagacag

SEQ ID NO: 76575 - DNA, 120 bp, Artificial Sequence
  ENSG00000079819_53 (sequence is synthesized)
cttagagcacctttccacaggtgaaatatcggagcagggggattctgaagttgctatgcctgatttggtcttggattctgccatagccccttctcagcctgactgtccttctcccatcca

SEQ ID NO: 76576 - DNA, 120 bp, Artificial Sequence
  ENSG00000079819_54 (sequence is synthesized)
tgggaagactcttaaagcagctgacgacagtgattctgagtttggttacttctccttcagtttctccaaatgttttccctccggcttcccctcccttcttgatgaagatggatatcttgc

SEQ ID NO: 76577 - DNA, 120 bp, Artificial Sequence
  ENSG00000079819_55 (sequence is synthesized)
tttccccagcctccccaaggtctgggtctccttcctccccgctggtgtgcagcactatgtcccaatcacctccccttcattcattccttcccttatcctcatctttgggctacttctgtc

SEQ ID NO: 76578 - DNA, 120 bp, Artificial Sequence
  ENSG00000079819_56 (sequence is synthesized)
tgcttctcagtcagttcctttttctcttgccttttcccttcctctggctctatccctctgctatctggaggctaaagccgcctcctttaatgtttcttatgactgtgacttgaatgacaa

SEQ ID NO: 76579 - DNA, 120 bp, Artificial Sequence
  ENSG00000079819_57 (sequence is synthesized)
gctcgaggaagaggaagtagttgctggcatgcctacgtaagctcagtttgtggagtcaacacaatacactttatcttaaacccttcctaatatagagtgtaaatgtgtgcatacatttca

SEQ ID NO: 76580 - DNA, 120 bp, Artificial Sequence
  ENSG00000079819_58 (sequence is synthesized)
ccactgattaccctcaacatagtagtacctgcacattttcacacacacaatattttagtgcatgagaaataagtgtagacacttctccttcattgataccattgaccagttccacacatt

SEQ ID NO: 76581 - DNA, 120 bp, Artificial Sequence
  ENSG00000079819_59 (sequence is synthesized)
ctaagttaggagcgaaattgtaggattattttacaaatatctagatcaaagtagatttgtaacagaaggtgtgggggaggagggaaggaggagggaacctgtattgcccgtaacaatcca

SEQ ID NO: 76582 - DNA, 120 bp, Artificial Sequence
  ENSG00000079819_60 (sequence is synthesized)
tacagggtctctccattttgcaaacagatattaatgctgttcctttaggatgacatctttttgttttgatatagaatttaggatgcagtggacataactgttcctgatgtatattagtag

SEQ ID NO: 76583 - DNA, 120 bp, Artificial Sequence
  ENSG00000079819_61 (sequence is synthesized)
aattccttagtactgttatttctcttgttggaaacccaagtgtgttctagcatctatgaggatgtatctgtaacctttactcctgacatttgtaagtctaatctcaaaagctccttatct

SEQ ID NO: 76584 - DNA, 120 bp, Artificial Sequence
  ENSG00000079819_62 (sequence is synthesized)
atgaaagccaccttcacttcagccaccacttggacagcagagggcgctgttgtgagcgctaatgcaccttctgaaaagctttcttcctcgcccttctcacacttgcttgagacacgtgct

SEQ ID NO: 76585 - DNA, 120 bp, Artificial Sequence
  ENSG00000079819_63 (sequence is synthesized)
aagtcatagtctgagtttcaaatccaggtactggaaggaagtgttattagccattttgatgatcagttccatgtcatctttctgataatgtaaataattattcctttaaaaatcctaaat

SEQ ID NO: 76586 - DNA, 120 bp, Artificial Sequence
  ENSG00000079819_64 (sequence is synthesized)
agagaagaaatcagaaccctttaaaatgtaaatcattgaagaagtacgcattgactttattttcaaattttgatgaattcatgaacttactcatagataataatatggctttagagactt

SEQ ID NO: 76587 - DNA, 120 bp, Artificial Sequence
  ENSG00000079819_65 (sequence is synthesized)
gtttgcttctccatgtgcacctagccttttgcctctactcggtttcaaataccagccgctctcctggatggtaattactactgcaaacacgcaaaccacatggattttaaaagatgcata

SEQ ID NO: 76588 - DNA, 120 bp, Artificial Sequence
  ENSG00000079819_66 (sequence is synthesized)
ttatagctcttattccctttgtagttagctatttaaatgccctgctctcacactgctggagccacattttatacaggtctgtgtcctcagcagctatcagcaagcacaaagcaattcctc

SEQ ID NO: 76589 - DNA, 120 bp, Artificial Sequence
  ENSG00000079819_67 (sequence is synthesized)
aggatatcctcgcttctcattctatcctgatgtcaattctggagtatttgccagatgattatatgttttgtggattatctatacattggacatgaatctttttcttttcaaagaagagaa

SEQ ID NO: 76590 - DNA, 120 bp, Artificial Sequence
  ENSG00000079819_68 (sequence is synthesized)
ctttttggtcactaagtgcagtgtctctcatttgggagttaggctgagggagggtttatttccttgggaatatttcttgattttaatattaaatgcccacagtacagagatttattttgt

SEQ ID NO: 76591 - DNA, 120 bp, Artificial Sequence
  ENSG00000079819_69 (sequence is synthesized)
tctcttcgatgggatggaaaatgttgaagtgactttgtcttaaaataattaagtggattttaaccatgttacttttaaacttctgtttcactttagagaagatttttcaagagtctttga

SEQ ID NO: 76592 - DNA, 120 bp, Artificial Sequence
  ENSG00000079819_70 (sequence is synthesized)
acactttgaactattctgtatttaacatatcgttactcctctttaaataattatgcctgttgagaatgttctctcaaagaaagtactgcagtattttggtagtagtatagtctggtgttg

SEQ ID NO: 76593 - DNA, 120 bp, Artificial Sequence
  ENSG00000079819_71 (sequence is synthesized)
cattaatattaagcatgcatactcggcagactaaaatgttaataagccgttgaatatttcctttaatgttttaaattgttcaaagcattggtgtaacattgatggagtaattttagatag

SEQ ID NO: 76594 - DNA, 120 bp, Artificial Sequence
  ENSG00000079819_72 (sequence is synthesized)
agcattttaacttaggtaatacagaagaaacactgcaaattttagacaggtataactgaaaacagtaatacttgaagacatcctttctgaaaatggtgtgtctgttaacaataaggcaga

SEQ ID NO: 76595 - DNA, 120 bp, Artificial Sequence
  ENSG00000079819_73 (sequence is synthesized)
aaaggtattgtgggcagaagaacaaatcttagcctacctagctggcatgccagttaaaggcagtgagccttcacacaaactatgtggtcctttaaattataataaaaatagagacaagtc

SEQ ID NO: 76596 - DNA, 120 bp, Artificial Sequence
  ENSG00000079819_74 (sequence is synthesized)
taaattataataaaaatagagacaagtcacttcacatagttcattctattttcttttcaatttattattacttgcccaaagctaaggagggaggaggagagagagagagagagagagaga

SEQ ID NO: 76597 - DNA, 120 bp, Artificial Sequence
  ENSG00000079819_75 (sequence is synthesized)
gtgtgtgtgtcactatacactaggcttgacataaaagtagtttgggaccatcttaatttaaagagtaacataatttaggaagccatcatgtcaacttatttttcatatatgtgtatgtac

SEQ ID NO: 76598 - DNA, 120 bp, Artificial Sequence
  ENSG00000079819_76 (sequence is synthesized)
acatacacacattcatatatatgtacgtatctatgtgcacatgtatgtatgtgtatatatgatatatttgaaggaaaatttttcttttatttcttttgtttgttttaggttgtttgcttt

SEQ ID NO: 76599 - DNA, 120 bp, Artificial Sequence
  ENSG00000079819_77 (sequence is synthesized)
tactcttttcttttgtgcatgagtgtgtgtttggatatgtttcttactattatttgtgaaggttccattaaacacttttactttattacctctagaatttatttttcccttccttttcca

SEQ ID NO: 76600 - DNA, 120 bp, Artificial Sequence
  ENSG00000079819_78 (sequence is synthesized)
aaagagtaatcacagaagaaatgaatgcagcagcagcagtgagagtgaggaggaagacgtgggagagtaccgtccccaccaccgagtgaccgagggcaccatcagggaggaacaggagta

SEQ ID NO: 76601 - DNA, 120 bp, Artificial Sequence
  ENSG00000079819_79 (sequence is synthesized)
aatttgaaacctagcggagggaggaggcaggcgcggctgccggcggctgggactgaagagggacgggtcccgcggcgagcgagctcctgagaaacatgccaagggacaagtgttatttga

SEQ ID NO: 76602 - DNA, 120 bp, Artificial Sequence
  ENSG00000079819_80 (sequence is synthesized)
tttgaaacctagcggagggaggaggcaggcgcggctgccggcggctgggactgaagagggacgggtcccgcggcgagcgagctcctgaggtacggcgtcgggaaacatgccaagggacaa

SEQ ID NO: 76603 - DNA, 120 bp, Artificial Sequence
  ENSG00000079841_0 (sequence is synthesized)
atgtcctcggccgtggggccccgcggtcctcgcccacccacggtgcctccccccatgcaagagctgcccgacctgagccacctgaccgaagaggagaggaacattatcatggcagtgatg

SEQ ID NO: 76604 - DNA, 120 bp, Artificial Sequence
  ENSG00000079841_1 (sequence is synthesized)
gaccggcagaaggaagaggaggaaaaagaagaagccatgctcaagtgtgttgtcagggacatggcgaagcctgctgcctgcaaaacaccaagaaatgctgaaaaccagccccaccaacct

SEQ ID NO: 76605 - DNA, 120 bp, Artificial Sequence
  ENSG00000079841_2 (sequence is synthesized)
tcaccgagattgcatcaacagtttgaaagctataaggaacaagtgagaaaaataggggaagaagcgcggcgttaccagggcgagcacaaagacgatgctccgacttgtggaatctgtcat

SEQ ID NO: 76606 - DNA, 120 bp, Artificial Sequence
  ENSG00000079841_3 (sequence is synthesized)
aaaacaaagtttgctgatgggtgcggtcatctctgctcctattgtcgcactaagttctgtgcgcgctgcggaggccgcgtgtctctacggtcaaacaacgaggacaaagtggttatgtgg

SEQ ID NO: 76607 - DNA, 120 bp, Artificial Sequence
  ENSG00000079841_4 (sequence is synthesized)
gtatgcaatttatgtcgaaagcaacaagaaatcttaaccaaatctggggcatggttctttggaagtggccctcagcagacaagtcaggatggaaccctgagtgatacagctacaggtgct

SEQ ID NO: 76608 - DNA, 120 bp, Artificial Sequence
  ENSG00000079841_5 (sequence is synthesized)
ggctctgaggtaccaagagaaaagaaagcacgactccaagagcgatcgcggtctcagacacccctaagcacagcagctgcctcctcccaggatgctgctcctcccagcgcaccaccagac

SEQ ID NO: 76609 - DNA, 120 bp, Artificial Sequence
  ENSG00000079841_6 (sequence is synthesized)
aggagcaaaggggctgagccctcgcagcaagccttggggcctgaacagaagcaggcttcatccaggtctagaagtgaacctcctagagagagaaagaagaccccagggctttccgagcag

SEQ ID NO: 76610 - DNA, 120 bp, Artificial Sequence
  ENSG00000079841_7 (sequence is synthesized)
aatggcaaaggagccctgaagagcgagcggaaacgcgtgccaaagacctcagcgcagcccgtggagggggccgtcgaagaacgggagcgcaaagaaaggcgggaaagccgaaggcttgag

SEQ ID NO: 76611 - DNA, 120 bp, Artificial Sequence
  ENSG00000079841_8 (sequence is synthesized)
aaagggcgatcacaggattacccagacacgccggaaaaacgggatgagggcaaagcggcggatgaggaaaagcaaagaaaagaggaggattatcagaccaggtaccgcagcgacccgaac

SEQ ID NO: 76612 - DNA, 120 bp, Artificial Sequence
  ENSG00000079841_9 (sequence is synthesized)
ctagctcggtacccggtgaaaccgccgcctgaggagcagcagatgcgcatgcacgcccgggtgtcccgcgccaggcacgagcggcgccacagcgacgtggcgctcccgcgcaccgaggcg

SEQ ID NO: 76613 - DNA, 120 bp, Artificial Sequence
  ENSG00000079841_10 (sequence is synthesized)
ccgaggcgggcgcggcgctgccggagggcaaggccggcaaacgcgcgccggcggcagccagggcctcgccgccggactcgccgcgggcttactcggctgagagaactgcggagaccaggg

SEQ ID NO: 76614 - DNA, 120 bp, Artificial Sequence
  ENSG00000079841_11 (sequence is synthesized)
gccaagcagctaacgaaccacagcccgccggcgcccagacatgggccggttcccgcagaagccccggagctcaaagcccaggagcccctcaggaagcagagccgcctggaccccagctcg

SEQ ID NO: 76615 - DNA, 120 bp, Artificial Sequence
  ENSG00000079841_12 (sequence is synthesized)
gcggtcctcatgcggaaggccaagcgcgagaaggtggagaccatgctgcggaacgactctttgagctcagaccagtccgagtcggtgcggccgtccccgcccaagccgcaccggtccaag

SEQ ID NO: 76616 - DNA, 120 bp, Artificial Sequence
  ENSG00000079841_13 (sequence is synthesized)
agaggcggcaagaagcggcagatgtcggtgagcagctctgaggaggagggcgtgtcgacgcccgagtacaccagctgcgaggacgtggagctggagagcgagagcgtcagcgagaaaggt

SEQ ID NO: 76617 - DNA, 120 bp, Artificial Sequence
  ENSG00000079841_14 (sequence is synthesized)
gatttggattattactggttggatcctgccacgtggcacagccgggagacatcacctattagttcgcatcctgtaacgtggcaaccatctaaagagggggaccgattaattggacgtgtt

SEQ ID NO: 76618 - DNA, 120 bp, Artificial Sequence
  ENSG00000079841_15 (sequence is synthesized)
attcttaacaagagaacaaccatgcccaaagactcaggtgcattgctgggtctgaaagttgttggaggaaaaatgactgacttaggacgacttggtgctttcatcaccaaagtaaagaag

SEQ ID NO: 76619 - DNA, 120 bp, Artificial Sequence
  ENSG00000079841_16 (sequence is synthesized)
ggtagcctagcagatgtagttggacacctaagagcaggggatgaagttctagaatggaatggtaaacccctgccgggagctacaaatgaagaagtttacaacattattttagaatcaaaa

SEQ ID NO: 76620 - DNA, 120 bp, Artificial Sequence
  ENSG00000079841_17 (sequence is synthesized)
tcagaacctcaagttgaaattattgtttcaaggcctattggtgacattccccggattcctgagagctcccaccctccactggagtccagttcaagttcctttgaatctcagaagatggaa

SEQ ID NO: 76621 - DNA, 120 bp, Artificial Sequence
  ENSG00000079841_18 (sequence is synthesized)
aggccttccatttctgttatttctccaacaagtcctggagctctaaaagatgccccacaagtcttaccagggcaactttctgtgaagttgtggtatgataaagtgggacaccagctgatt

SEQ ID NO: 76622 - DNA, 120 bp, Artificial Sequence
  ENSG00000079841_19 (sequence is synthesized)
gtaaatgttctgcaagcaacagatctacctgctagagtagatggacgtcctcgaaatccctatgtaaaaatgtattttcttccagatagaagtgataaaagtaaaaggaggaccaaaaca

SEQ ID NO: 76623 - DNA, 120 bp, Artificial Sequence
  ENSG00000079841_20 (sequence is synthesized)
gtaaagaaaatactagaaccaaaatggaatcaaacttttgtctattcacatgtacatcgtagagattttagagaacgaatgttagaaataactgtgtgggaccaaccaagagtgcaagaa

SEQ ID NO: 76624 - DNA, 120 bp, Artificial Sequence
  ENSG00000079841_21 (sequence is synthesized)
gagacagcgcttttagatgatgaaccgcattggtataaacttcagacacatgatgagtcttcactacctctgcctcagccatcacctttcatgccaaggcgacatattcatggagaaagc

SEQ ID NO: 76625 - DNA, 120 bp, Artificial Sequence
  ENSG00000079841_22 (sequence is synthesized)
tctagcaaaaagctacaaagatctcagcgaatcagtgatagtgacatctcagattatgaggttgatgatggtattggcgtagttcctccagtaggctataggtctagtgctagagaaagt

SEQ ID NO: 76626 - DNA, 120 bp, Artificial Sequence
  ENSG00000079841_23 (sequence is synthesized)
aaatctacaacattaactgtgccagaacagcaaagaacaactcatcaccgctcacgttcagtatctcctcatcgcggcaatgatcagggaaagccgcgttcacgtttaccaaatgtgcca

SEQ ID NO: 76627 - DNA, 120 bp, Artificial Sequence
  ENSG00000079841_24 (sequence is synthesized)
ttacagaggagtttagatgaaattcatccaacaagaaggtcacgttctccaaccagacaccatgatgcctcccgaagtccagttgatcatagaaccagagatgtggatagtcagtattta

SEQ ID NO: 76628 - DNA, 120 bp, Artificial Sequence
  ENSG00000079841_25 (sequence is synthesized)
tcagaacaagacagtgagcttcttatgctgcccagagcaaaacgaggacgaagtgcagaatgcctacatactaccagacatcttgttaggcactataaaacattacctcccaagatgcct

SEQ ID NO: 76629 - DNA, 120 bp, Artificial Sequence
  ENSG00000079841_26 (sequence is synthesized)
ttattacagagcagttctcactggaatatttacagctcaattctgcctgcacatactaagaccaaatcagtgactagacaggacatttcccttcatcatgaatgctttaactcaacagta

SEQ ID NO: 76630 - DNA, 120 bp, Artificial Sequence
  ENSG00000079841_27 (sequence is synthesized)
ttgagatttactgatgaaatactggttagtgaactgcagccctttcttgacagggctaggagtgctagtaccaactgcttgagaccagatactagtttgcattcaccagaacgagaaagg

SEQ ID NO: 76631 - DNA, 120 bp, Artificial Sequence
  ENSG00000079841_28 (sequence is synthesized)
ggtagatggtccccctccctagataggagacgacctcctagtcccaggattcaaatccagcatgcgtctccggagaatgacaggcactccagaaagtctgaaagatctagcatccaaaaa

SEQ ID NO: 76632 - DNA, 120 bp, Artificial Sequence
  ENSG00000079841_29 (sequence is synthesized)
cagactaggaaaggcactgcctctgatgcagaaagggttctcccaacatgtctttctagaaggggacacgcagccccaagagcaactgatcagccagtcattaggggaaaacatcctgct

SEQ ID NO: 76633 - DNA, 120 bp, Artificial Sequence
  ENSG00000079841_30 (sequence is synthesized)
cgctcaaggtcgagtgagcactctagtatcagaacactgtgttctatgcaccaccttgtccctggagggtcggcgccaccttctccgcttctgacaagaatgcaccgacagagaagtcca

SEQ ID NO: 76634 - DNA, 120 bp, Artificial Sequence
  ENSG00000079841_31 (sequence is synthesized)
acacaatctcctccagcagacacatcgttcagcagtcgcaggggaagacagctcccacaagtgccagtgagaagcggcagtatagaacaagcaagcttagtagtggaggagcgaacaaga

SEQ ID NO: 76635 - DNA, 120 bp, Artificial Sequence
  ENSG00000079841_32 (sequence is synthesized)
cagatgaaaatgaaagtgcatcgatttaagcagacaacagggtctggttctagtcaagaacttgatcgcgagcaatattccaagtataacatacataaagatcagtacagaagctgtgat

SEQ ID NO: 76636 - DNA, 120 bp, Artificial Sequence
  ENSG00000079841_33 (sequence is synthesized)
aacgtctctgccaaatcatcagatagtgatgtcagtgatgtttccgccatttcccgaaccagcagtgcctcacgcctcagcagcacaagctttatgtcagagcaatctgagcgccccagg

SEQ ID NO: 76637 - DNA, 120 bp, Artificial Sequence
  ENSG00000079841_34 (sequence is synthesized)
ggtagaatcagttcatttacccccaaaatgcaaggcagacggatggggacttcaggaagatccatcatgaagagcaccagtgtcagtggagagatgtacacactggagcataatgacggc

SEQ ID NO: 76638 - DNA, 120 bp, Artificial Sequence
  ENSG00000079841_35 (sequence is synthesized)
agccagtcagacacagctgtgggtacagttggagcaggtggaaagaaacggagatccagccttagtgccaaagtggttgccatagtgtctcgaaggagtagaagcacatcccagcttagt

SEQ ID NO: 76639 - DNA, 120 bp, Artificial Sequence
  ENSG00000079841_36 (sequence is synthesized)
caaacagagtcgggccacaaaaagttaaaaagtaccatccagagaagcacagaaacaggcatggcagctgaaatgagaaagatggtaaggcagccgagccgagagtctactgatggcagc

SEQ ID NO: 76640 - DNA, 120 bp, Artificial Sequence
  ENSG00000079841_37 (sequence is synthesized)
atcaacagttacagctctgagggcaatttaatatttcctggagtgcgactgggagctgacagtcaattcagtgattttcttgatggattgggaccagcccagcttgttggccgccaaacc

SEQ ID NO: 76641 - DNA, 120 bp, Artificial Sequence
  ENSG00000079841_38 (sequence is synthesized)
cttgccacccctgcaatgggtgatatacaaataggaatggaggacaaaaagggccaattagaagtggaagtcattagagcacgaagcctcacacaaaagcctggttccaaatctacacct

SEQ ID NO: 76642 - DNA, 120 bp, Artificial Sequence
  ENSG00000079841_39 (sequence is synthesized)
gctccatatgtcaaagtatatcttttggaaaatggggcctgtatagccaagaagaagacaagaattgcacgaaaaacccttgatcctttgtatcagcagtctctggtttttgatgaaagt

SEQ ID NO: 76643 - DNA, 120 bp, Artificial Sequence
  ENSG00000079841_40 (sequence is synthesized)
ccacagggtaaagttcttcaggtgattgtctggggagactatggcagaatggaccacaaatgctttatgggtgtggctcagatcttgttggaagaactcgacctgtccagcatggtgatc

SEQ ID NO: 76644 - DNA, 120 bp, Artificial Sequence
  ENSG00000079841_41 (sequence is synthesized)
ggatggtacaaattgttcccaccgtcctcactggtggatcccacactcactcccctcacccggcgggcttcccagtcatctctggaaagttcaactgggcctccctgtattcgatcatag

SEQ ID NO: 76645 - DNA, 120 bp, Artificial Sequence
  ENSG00000079841_42 (sequence is synthesized)
actctacttttcaggataataatctgaaccagatatttcatgatcgaaagcattgttggagacagacaatcaacttgtgttttgcctgtagtagtttttcaataatatgtcccaattgtt

SEQ ID NO: 76646 - DNA, 120 bp, Artificial Sequence
  ENSG00000079841_43 (sequence is synthesized)
atttaaaacatggcttcatatgacagaacaaggcaatctatcaaatttacaggaagaatcaacatgctggtgagagtcactgatgcttctaacaaatagaaaaagaggaaactttaaatc

SEQ ID NO: 76647 - DNA, 120 bp, Artificial Sequence
  ENSG00000079841_44 (sequence is synthesized)
cacgcatacacgtacacacacacatgcacacacacacacaccaaattgaacaaactggaaactctcactctgtgaaaagttgtattctacacatttctgcacagaccacaagcagtgtta

SEQ ID NO: 76648 - DNA, 120 bp, Artificial Sequence
  ENSG00000079841_45 (sequence is synthesized)
tttccctgatgtttgagttgttttgttcttttgtgtgttttgtttatttgtgtgttgtttgttggttttcgtttcttgagtttttgttttgttttcaccacatctgttatttccactagt

SEQ ID NO: 76649 - DNA, 120 bp, Artificial Sequence
  ENSG00000079841_46 (sequence is synthesized)
ttttttttggctgtgtcatgacaggcctcatgatgctaacagagattcttcccttcttttttccaaaagcaccaaaaaaaagggctgaagtagtctctgtagcatctccccaaagtgtta

SEQ ID NO: 76650 - DNA, 120 bp, Artificial Sequence
  ENSG00000079841_47 (sequence is synthesized)
aacagctacataaggtgaagccaaggaagggtttcactagctttcattttataattatttaaagtcttatgtgtggatacccaagagacaaaaagttatcttccaaaataaataatcaca

SEQ ID NO: 76651 - DNA, 120 bp, Artificial Sequence
  ENSG00000079841_48 (sequence is synthesized)
gaagtacttttttaatgaagagcctatctgtttgcattctagaaaattaatttatggtttccattgttttgcatggaagacttttaaagaagtcaatctgcaactaatgctggggactaa

SEQ ID NO: 76652 - DNA, 120 bp, Artificial Sequence
  ENSG00000079841_49 (sequence is synthesized)
aactaactgcataattgtactttgaaaacactccttgtaatgcctttttcttcctgatattaaaaaaatgctcatgtgtataaaccatactttgacttcccaaaaatggtgactaggaat

SEQ ID NO: 76653 - DNA, 120 bp, Artificial Sequence
  ENSG00000079841_50 (sequence is synthesized)
ggatttgagcctaagacactttgagctatgcccaggcttctcagccatacctcagtgtagacacatccatctgccctggaaagagcatggtatgagctgttcaatattccactggaaatt

SEQ ID NO: 76654 - DNA, 120 bp, Artificial Sequence
  ENSG00000079841_51 (sequence is synthesized)
ccagttgaaatattctgcactaaactattgtttttattgaattttagtttacatttctttgagattgatgcaagcacaaagcttgattttttaatgcaaagtatcttactttttgggggg

SEQ ID NO: 76655 - DNA, 120 bp, Artificial Sequence
  ENSG00000079841_52 (sequence is synthesized)
aaaataaacaaaatgaactttcaatttgcattttcatttagtttctcttggccttgaatttcccttgtgacattctgtacatgtgctacaaactgcagtctctgcaggtgcattgatatg

SEQ ID NO: 76656 - DNA, 120 bp, Artificial Sequence
  ENSG00000079841_53 (sequence is synthesized)
ttctccctccttttatgagtcactccacttttgtgattacacaaatagagcagcatgacttggaactgttcagagctgcatgcacattttgtaaaaaaaaaaaattttaaaaagaaaaga

SEQ ID NO: 76657 - DNA, 120 bp, Artificial Sequence
  ENSG00000079841_54 (sequence is synthesized)
aacaaaaggttatttaataatgtatgttagttccacataggccagcttgtatgttgcatgtacttgtacagtttgcttgttaattactataccgaaataaccaagaaatctaagccatcc

SEQ ID NO: 76658 - DNA, 120 bp, Artificial Sequence
  ENSG00000079841_55 (sequence is synthesized)
acttttgttatagacattttgcaggttttagccagactcagtctctgggtctgtggtgaaatgtctatagatggactttattttttaccctccggaaaacgtgatgtagtacggaccaaa

SEQ ID NO: 76659 - DNA, 120 bp, Artificial Sequence
  ENSG00000079841_56 (sequence is synthesized)
ttccttctaataaatattttggtgtagattcctactgtggggctgtaacacatgtagacactgtgtacacactaggttttaattcatagacatactgcctgcaccaagtgaattatttat

SEQ ID NO: 76660 - DNA, 120 bp, Artificial Sequence
  ENSG00000079841_57 (sequence is synthesized)
tattatttacacatgccagaattatctgcccatcattccacagggcacagattgaccactgctcaccatgctgagtaggaggaactgaagcattggtgcacttctactagattccgttct

SEQ ID NO: 76661 - DNA, 120 bp, Artificial Sequence
  ENSG00000079841_58 (sequence is synthesized)
gtcttagtggccaacaatcaactgattataattgggtagtatctttctattttgaccacttgtcttaacactcccctgtgcttttaaatgaaattccaattcatgtatgtaaacatgttt

SEQ ID NO: 76662 - DNA, 120 bp, Artificial Sequence
  ENSG00000079841_59 (sequence is synthesized)
aataaaatttacttttcatgtcagtcagtagccatatgtgttctatgtcttgccagatttccattgtgggttctatggtgcaaaatgggagccaggccatgggaaggggaggctggggtt

SEQ ID NO: 76663 - DNA, 120 bp, Artificial Sequence
  ENSG00000079841_60 (sequence is synthesized)
tgttgtctgctgcgggcatttgacttgacttgtcactgcactatattatgtcttaatcgatggcccaaagggtactttgcatcacatacaagttttcacttcgtcagcctgtctaagtga

SEQ ID NO: 76664 - DNA, 120 bp, Artificial Sequence
  ENSG00000079841_61 (sequence is synthesized)
gcacatgactatacttctgaaaagtggcattattaaaaataataaatctcagtaagaatcaaatggaaggttgttttctgctgctgtttgaatgtgctaataaaagagacaactctattg

SEQ ID NO: 76665 - DNA, 120 bp, Artificial Sequence
  ENSG00000079841_62 (sequence is synthesized)
agtaaatgctaccagtccccacaccaccaggcccaccgaagcttgtctacagtattttatccaagcagtcctttgggtaactgcacagtgcctgcagtgacctgagtcagtcatgcaagg

SEQ ID NO: 76666 - DNA, 120 bp, Artificial Sequence
  ENSG00000079841_63 (sequence is synthesized)
agactttcttgttctcacaccaatgttttatttcagtttccattttctgctggtcctgttgttcaatgatataagcagagtgatgaaggaggcgcttcacactcttcttagataagatct

SEQ ID NO: 76667 - DNA, 120 bp, Artificial Sequence
  ENSG00000079841_64 (sequence is synthesized)
tgagcagcagagagtggtttaaacagcaaggcttaaatctctcaagctggatttatttccaagtttgctgtcatgtgtgcacctgggattcatgtctcttcagaagggtgggaagaagtg

SEQ ID NO: 76668 - DNA, 120 bp, Artificial Sequence
  ENSG00000079841_65 (sequence is synthesized)
gtgttagctttaaggaccacaacgtttcatctctctggcttcaggaaggtagcagcttctgtgcattgttttaggaaatggttaattgaggagctaaaagagctttagtgtatgctacac

SEQ ID NO: 76669 - DNA, 120 bp, Artificial Sequence
  ENSG00000079841_66 (sequence is synthesized)
tgggagccactttagtacagcacagagcactatagattaatgctgtaatcaatgagaatctgttcactgcagagatctgttttgatgacagcagcacttatggccttgtttagtgtcact

SEQ ID NO: 76670 - DNA, 120 bp, Artificial Sequence
  ENSG00000079841_67 (sequence is synthesized)
gttgtataatgttggacactgcaggcttttttggctttgatttagaatgcaaggaccacagggaattttatttaaaatgttgtattttggtggattttttaattgtgttgtgcatttgct

SEQ ID NO: 76671 - DNA, 120 bp, Artificial Sequence
  ENSG00000079841_68 (sequence is synthesized)
gccattgctagctgaaatttaatgatttgatgccagtggcatttagttaaccactccgatgctgctgttatgtttgctgggtttctgcagtttctactacttcatacattgcactcagga

SEQ ID NO: 76672 - DNA, 120 bp, Artificial Sequence
  ENSG00000079841_69 (sequence is synthesized)
ttcttatcatttgtactagtgatttttttcagtcactttgttttgtttcatgacagccttacaggtttattcattcatgtatactttgctaactgtctacatttccccttcccttattat

SEQ ID NO: 76673 - DNA, 120 bp, Artificial Sequence
  ENSG00000079841_70 (sequence is synthesized)
acatgtctatttagagatatgcgtatgtggataaacccaagggtacacatacacatatttctatgaatgttgttgcaaatggcgtggtgtaatttgtaactgcttctggctgctgctttt

SEQ ID NO: 76674 - DNA, 120 bp, Artificial Sequence
  ENSG00000079841_71 (sequence is synthesized)
agttcacaggcagctcagacagatattccagccagccaccgcacaagttatttaaaccaggtcaaagcttctttggcattcagttttccccagagaacaatttaatgctgatacttaatt

SEQ ID NO: 76675 - DNA, 120 bp, Artificial Sequence
  ENSG00000079841_72 (sequence is synthesized)
gcctccgcctgcccgcccccgccggccgaggctgggctgcgggaggcggccgggcggccccgagcttcgctagggcgaccaaaacaaaggcagcatccggggctgggtggatgcaaacaa

SEQ ID NO: 76676 - DNA, 120 bp, Artificial Sequence
  ENSG00000079841_73 (sequence is synthesized)
ggatgcaaacaaccatgaaagactgggttctcgctctccccggctctgctgctgctgctgctgccgccgccgccgctgctcctcctcctgccgccgccgctagggctccgctgtgagggg

SEQ ID NO: 76677 - DNA, 120 bp, Artificial Sequence
  ENSG00000079841_74 (sequence is synthesized)
caggtaaatacagggatttggtaatggtgactgtgtgtgatgactctctttccattctattattcttccgtctctcccttagtggtattattacaagcaagtcaaataaatttcccaagt

SEQ ID NO: 76678 - DNA, 120 bp, Artificial Sequence
  ENSG00000079841_75 (sequence is synthesized)
atttgaaatttgttttgttttatattgaggttatggaaaaggttccaaatatatttcagttccgattcaggctgactgctttgccatctgtagattcaaaaatccagagactagtgggcc

SEQ ID NO: 76679 - DNA, 120 bp, Artificial Sequence
  ENSG00000079841_76 (sequence is synthesized)
tctctgggactgtttgcgttcctaaaactgaggaaccagtttctgcaattaaaattctaaatgctcactgtgagtgcccccaactttcccacacatattcctgtctagtcacaagaggtc

SEQ ID NO: 76680 - DNA, 120 bp, Artificial Sequence
  ENSG00000079841_77 (sequence is synthesized)
taatctgtgtatggcagtgtcattgtttcataattgtaagtttgctctgttttagccttttttaatttccttttagaatttattgttgtttatattctgtttgcttttgataaaatcttt

SEQ ID NO: 76681 - DNA, 120 bp, Artificial Sequence
  ENSG00000079841_78 (sequence is synthesized)
aacagttcacttttaatggctgagcttcagcttctttcttgatgaaaagtgaagatattcaacctgatcttaactatcctagcccaccagttgtcagaaatgctgcagtacaaactttcc

SEQ ID NO: 76682 - DNA, 120 bp, Artificial Sequence
  ENSG00000079841_79 (sequence is synthesized)
cacaaaggcatataacagtatgaatgcctctttagaagcgacaaaagatataatttttgcttctaaattggagcttagagcctgatgctttatgttaatctcattacatctttaatttca

SEQ ID NO: 76683 - DNA, 120 bp, Artificial Sequence
  ENSG00000079841_80 (sequence is synthesized)
tatccaagtaaaacttcttacagattactcatggaacatattctataaatacttaatgtatatttgaaatgaatatagaagttaaggaagtagtaagtcagtgaaacaaactaacacaaa

SEQ ID NO: 76684 - DNA, 120 bp, Artificial Sequence
  ENSG00000079841_81 (sequence is synthesized)
ataatcgaactcaaatattttagccaataaaaagcaagaggaaagagaaagaaagaggtattaccgcagtacttgggatgcaaagacaaatgcatgatttattatgtctgtgtgtaatat

SEQ ID NO: 76685 - DNA, 120 bp, Artificial Sequence
  ENSG00000079841_82 (sequence is synthesized)
gtagttctgcccaataatgcaaacaaaattgggctaataaaaattgtttgaactttttacagtctgaagttatactactcataactactgccatgtttgcttggagtgccacaggaaaaa

SEQ ID NO: 76686 - DNA, 120 bp, Artificial Sequence
  ENSG00000079841_83 (sequence is synthesized)
atcgaggaaatattagttctgcttgctgagaaaaaaatgtaaaatcatgcatattgtaaaaacctactgaaggtcaaagcatgaactatccaggtttattattacttgttcttgacaaac

SEQ ID NO: 76687 - DNA, 120 bp, Artificial Sequence
  ENSG00000079841_84 (sequence is synthesized)
agtttcttaaaataatggtttatttactaattctgaaagttttctcacactcctcttgatgtgactaaagcttcaaaagaaataaaaaacatgcacacaaaacaaacacaaaaaaaatcc

SEQ ID NO: 76688 - DNA, 120 bp, Artificial Sequence
  ENSG00000079841_85 (sequence is synthesized)
ttatattttaagctacttagtgtgtgcctggcactcagtgtgtgaatatttctaggatactcacaccagtggtctaaatataataactaaaaatatttttctttcccttattttgtactt

SEQ ID NO: 76689 - DNA, 120 bp, Artificial Sequence
  ENSG00000079841_86 (sequence is synthesized)
ttatatacttatataatattatataatagttgcatcattttatataatcttatacttaagattggtgctttgctaataattctgagctccacaagtcctatttaatagtctctgtatgtt

SEQ ID NO: 76690 - DNA, 120 bp, Artificial Sequence
  ENSG00000079841_87 (sequence is synthesized)
tgtatgttgactttgcatttcctgatttaagcaaataatcatatttgtatgtatacaatttaaaaataaatgagtattcagcgaggcagataacatcctgtggacaggtactacgacaat

SEQ ID NO: 76691 - DNA, 120 bp, Artificial Sequence
  ENSG00000079841_88 (sequence is synthesized)
aagatagggagtggaaggaagctgagctagccaaatgtgtcagtgcgaaacatatgtcaccagtgtcttttctccttcctgtctttcattctctaatgtgtaatgctaaaagtatggaga

SEQ ID NO: 76692 - DNA, 120 bp, Artificial Sequence
  ENSG00000079841_89 (sequence is synthesized)
tagagacaacatgagttcaaaaatacgtgcatgtatgtatatataatctcttctgtgtttatattcatgtatttataaaaacattaatttatatctgtataaaaatgaatgtcaaaatgt

SEQ ID NO: 76693 - DNA, 120 bp, Artificial Sequence
  ENSG00000079841_90 (sequence is synthesized)
gtacatataaataaccacaactttatatggatatatcaataatatagtttggtttcatataaactatggacacttattatttctataactatccatggctaaaatctaaagctttcaaaa

SEQ ID NO: 76694 - DNA, 120 bp, Artificial Sequence
  ENSG00000079841_91 (sequence is synthesized)
tacatcataccatgttcacttaggacttataaaaataaaatctgaggatttactagtctctagtaaacataaggaaaataacatttatttaataacaagcacagtgttaaatatttaatg

SEQ ID NO: 76695 - DNA, 120 bp, Artificial Sequence
  ENSG00000079841_92 (sequence is synthesized)
tactttgtcaatttcctgacaataattatatgttatgaatattattatcctgattttagagatgaggaaaaaagctacgaaagtttattttacgactaatagagtaaggattcaaaatca

SEQ ID NO: 76696 - DNA, 120 bp, Artificial Sequence
  ENSG00000079841_93 (sequence is synthesized)
gatctatttgatatcttctgtttaactagtttttccaaaaatatgaaaacttgtcctatgagatgtttcaccaataagagtttttgtgagtcaaatacattttggaaactttgcaactga

SEQ ID NO: 76697 - DNA, 120 bp, Artificial Sequence
  ENSG00000079841_94 (sequence is synthesized)
aagtgtctaccttgaaatttaatacacacagcatattaaagtcatgttctaaagaaatctgtatgtttagtttcttttctcccaaattgtttaatttcccaacctttttttagtaaaacg

SEQ ID NO: 76698 - DNA, 120 bp, Artificial Sequence
  ENSG00000079841_95 (sequence is synthesized)
tgtctcgaggaagtggtagtatagagaaaatgctatagttgccttactgtatcctactgtgtcctaaatattgtgtacatgttaccacacacccctgttaagtggaagttatttcccaca

SEQ ID NO: 76699 - DNA, 120 bp, Artificial Sequence
  ENSG00000079841_96 (sequence is synthesized)
ttttgtggatgtagaaacaggcttggagacttaatcgaattacccaggtcacagccaataagtggcaaagccaaggcaggaacttgaacattcagactataaattttgtgctattttcta

SEQ ID NO: 76700 - DNA, 120 bp, Artificial Sequence
  ENSG00000079841_97 (sequence is synthesized)
gctgtttcccattctatgttgatcccattcttgaaaaaaaaatcacttttgaagcaatgcttagaaaagttttatagcaacctattactaaagatatttgcctgaggttaggagttgaaa

SEQ ID NO: 76701 - DNA, 120 bp, Artificial Sequence
  ENSG00000079841_98 (sequence is synthesized)
taggagttgaaaagaagagtcgactgtctagaaaggaggctaaatccttagtttcagtaaaatttgtcctcaacttgtacttaataaggaggaagctgaagcgggcagatcacttgaggt

SEQ ID NO: 76702 - DNA, 120 bp, Artificial Sequence
  ENSG00000079841_99 (sequence is synthesized)
tagtttgcattcaccagaacgagaaaggcactccagaaagtctgaaagatctagcatccaaaaacagactaggaaaggcactgcctctgatgcagaaagaatgcaccgacagagaagtcc

SEQ ID NO: 76703 - DNA, 120 bp, Artificial Sequence
  ENSG00000079841_100 (sequence is synthesized)
agaaaagcctgaagaagcacttttgcctgtgttcccaacaatcaattgtgtatactcttggtttatgctttctggtgccagttgtcattgagctgagtaagattcctcagttagggaaac

SEQ ID NO: 76704 - DNA, 120 bp, Artificial Sequence
  ENSG00000079931_0 (sequence is synthesized)
ctggaggccggtaccggcgggcaggaggcgcccgaggatgtgctgctggccgctgctcctgctgtgggggctgctccccgggacggcggcggggggctcgggccgaacctatccgcaccg

SEQ ID NO: 76705 - DNA, 120 bp, Artificial Sequence
  ENSG00000079931_1 (sequence is synthesized)
ctatccgcaccggaccctcctggactcggagggcaagtactggctgggctggagccagcggggcagccagatcgccttccgcctccaggtgcgcactgcaggctacgtgggcttcggctt

SEQ ID NO: 76706 - DNA, 120 bp, Artificial Sequence
  ENSG00000079931_2 (sequence is synthesized)
ctcgcccaccggggccatggcgtccgccgacatcgtcgtgggcggggtggcccacgggcggccctacctccaggattattttacaaatgcaaatagagagttgaaaaaagatgctcagca

SEQ ID NO: 76707 - DNA, 120 bp, Artificial Sequence
  ENSG00000079931_3 (sequence is synthesized)
agattaccatctagaatatgccatggaaaatagcacacacacaataattgaatttaccagagagctgcatacatgtgacataaatgacaagagtataacggatagcactgtgagagtgat

SEQ ID NO: 76708 - DNA, 120 bp, Artificial Sequence
  ENSG00000079931_4 (sequence is synthesized)
ctgggcctaccaccatgaagatgcaggagaagctggtcccaagtaccatgactccaataggggcaccaagagtttgcggttattgaatcctgagaaaactagtgtgctatctacagcctt

SEQ ID NO: 76709 - DNA, 120 bp, Artificial Sequence
  ENSG00000079931_5 (sequence is synthesized)
accatactttgatctggtaaatcaggacgtccccatcccaaacaaagatacaacatattggtgccaaatgtttaagattcctgtgttccaagaaaagcatcatgtaataaaggttgagcc

SEQ ID NO: 76710 - DNA, 120 bp, Artificial Sequence
  ENSG00000079931_6 (sequence is synthesized)
agtgatacagagaggccatgagagtctggtgcaccacatcctgctctatcagtgcagcaacaactttaacgacagcgttctggagtccggccacgagtgctatcaccccaacatgcccga

SEQ ID NO: 76711 - DNA, 120 bp, Artificial Sequence
  ENSG00000079931_7 (sequence is synthesized)
tgcattcctcacctgtgaaactgtgatttttgcctgggctattggtggagagggcttttcttatccacctcatgttggattatcccttggcactccattagatccgcattatgtgctcct

SEQ ID NO: 76712 - DNA, 120 bp, Artificial Sequence
  ENSG00000079931_8 (sequence is synthesized)
agaagtccattatgataatcccacttatgaggaaggcttaatagataattctggactgaggttattttacacaatggatataaggaaatatgatgctggggtgattgaggctggcctctg

SEQ ID NO: 76713 - DNA, 120 bp, Artificial Sequence
  ENSG00000079931_9 (sequence is synthesized)
ggtgagcctcttccataccatccctccagggatgcctgagttccagtctgagggtcactgcactttggagtgcctggaagaggctctggaagccgaaaagccaagtggaattcatgtgtt

SEQ ID NO: 76714 - DNA, 120 bp, Artificial Sequence
  ENSG00000079931_10 (sequence is synthesized)
tgctgttcttctccatgctcacctggctggcagaggcatcaggctgcgtcattttcgaaaagggaaggaaatgaaattacttgcctatgatgatgattttgacttcaatttccaggagtt

SEQ ID NO: 76715 - DNA, 120 bp, Artificial Sequence
  ENSG00000079931_11 (sequence is synthesized)
tcagtatctaaaggaagaacaaacaatcttaccaggagataacctaattactgagtgtcgctacaacacgaaagatagagctgagatgacttggggaggactaagcaccaggagtgaaat

SEQ ID NO: 76716 - DNA, 120 bp, Artificial Sequence
  ENSG00000079931_12 (sequence is synthesized)
ccagtcacgacctggcctttcattatcaaaagtcccaagcaatataaaaacctttctttcatggatgctatgaataagtttaaatggactaaaaaggaaggtctctccttcaacaagctg

SEQ ID NO: 76717 - DNA, 120 bp, Artificial Sequence
  ENSG00000079931_13 (sequence is synthesized)
gtcctcagcctgccagtgaatgtgagatgttccaagacagacaatgctgagtggtcgattcaaggaatgacagcattacctccagatatagaaagaccctataaagcagaacctttggtg

SEQ ID NO: 76718 - DNA, 120 bp, Artificial Sequence
  ENSG00000079931_14 (sequence is synthesized)
tgtggcacgtcttcttcctcttccctgcacagagatttctccatcaacttgcttgtttgccttctgctactcagctgcacgctgagcaccaagagcttgtgatcaaaattctgttggact

SEQ ID NO: 76719 - DNA, 120 bp, Artificial Sequence
  ENSG00000079931_15 (sequence is synthesized)
tgacaatgttttctatgatctgaacctgtcatttgaagtacaggttaaagactgtgtccactttgggcatgaagagtgtggagacttttcttccccattttccctccctcctttttcctt

SEQ ID NO: 76720 - DNA, 120 bp, Artificial Sequence
  ENSG00000079931_16 (sequence is synthesized)
tccatgttacatgagagacatcaatcaggttctcttctctttcttagaaatatctgatgttatatatacatggtcaataaaataaaactggcctgacttaagataaccattttaaaaaat

SEQ ID NO: 76721 - DNA, 120 bp, Artificial Sequence
  ENSG00000079931_17 (sequence is synthesized)
tgggctgtcatgtgggaataaaagaattctttctttcctactacattctgttttatttaaatactcattgttgctatttcactttttgacttgacttttatatttctttaaaaaattcct

SEQ ID NO: 76722 - DNA, 120 bp, Artificial Sequence
  ENSG00000079931_18 (sequence is synthesized)
tccttttaaaaaatataaaagggactactgttcattccagttttcttcttctttgttgttcttctagtgtgacttttcaagtgtaacagccattcttcctgactttaatattgtccagtt

SEQ ID NO: 76723 - DNA, 120 bp, Artificial Sequence
  ENSG00000079931_19 (sequence is synthesized)
ctggtcttttctgtgaattaccactgggccccttacctcaatgctttttgttgatgcccactctggttcccttgtttatctgagtctgttggtaccccaaatgaccccacacccatctta

SEQ ID NO: 76724 - DNA, 120 bp, Artificial Sequence
  ENSG00000079931_20 (sequence is synthesized)
aagtactttttttcaccttccctgtttagtactggccagatgagttttttctagagctctgtcactatctgaaaagaaagaggctatgggaaacatagaaatggtatgtattaataactg

SEQ ID NO: 76725 - DNA, 120 bp, Artificial Sequence
  ENSG00000079931_21 (sequence is synthesized)
atcataggctgaggagaaaaaatgtagctggctgcaaacccagtgctgtgaggtgacttatatgaggttccagatcaaagacaggccgtgtgagccagtccaggagggtgtaagttctga

SEQ ID NO: 76726 - DNA, 120 bp, Artificial Sequence
  ENSG00000079931_22 (sequence is synthesized)
atggttccttgctgactttgggtgacacatgtaccacatactggctcagtttaagtcatggttctattgtagatttatttttatattagttaataaatgactttaaattgtcaccaattg

SEQ ID NO: 76727 - DNA, 120 bp, Artificial Sequence
  ENSG00000079931_23 (sequence is synthesized)
aaaatcttgtcactcttttggttttctttatatagctcagccaaatcttgttttatgtcctgtcctcatctcttaagctaaatctgtttggatcatattaataaactaaatgaaattaca

SEQ ID NO: 76728 - DNA, 120 bp, Artificial Sequence
  ENSG00000079931_24 (sequence is synthesized)
tcagcagcagggtaattgctgccgggccacttgctgaggaagtgcttggaactgatttgaaatcacagaaaacagtgagcattctttgtggttaacgatgtgcttcttttaagcacaccc

SEQ ID NO: 76729 - DNA, 120 bp, Artificial Sequence
  ENSG00000079931_25 (sequence is synthesized)
cagccaacggcgacaaagaaatgtttggaaagcaaattgaaaggctgtaagggagagatgaagagagtgtgcaaccctgacacagctcagctggtgctttgttaagagatatttataagt

SEQ ID NO: 76730 - DNA, 120 bp, Artificial Sequence
  ENSG00000079931_26 (sequence is synthesized)
cttcagattatgccccccaatttccaggcaacgaagagacttctccaagtgtcgtgctttgtgcattagtaataaggacacatgctccacagtaatgctggaacacaggatgatgctctt

SEQ ID NO: 76731 - DNA, 120 bp, Artificial Sequence
  ENSG00000079931_27 (sequence is synthesized)
cagctgtgtgcttcttcctggcggagcagatgatttcataattagcctgaggaaacaggcagacctaacagccaaggaaacaatgcacctgaattgacaaacgaagttcaaggctttagg

SEQ ID NO: 76732 - DNA, 120 bp, Artificial Sequence
  ENSG00000079931_28 (sequence is synthesized)
caaccaatggcatatttctagagtgttggaaggagaggcaagagtctacttcaaagaaactgaatggtggtttattgatttttcatttgtaatagagccatattaaaataaagttactgg

SEQ ID NO: 76733 - DNA, 120 bp, Artificial Sequence
  ENSG00000079931_29 (sequence is synthesized)
tgaaggggatgaattcattacacattgtcatgtttctggaagtatttgatccatacgtaatacaaaaaaactgcgtatggatgactcacaatgctttttattgtaacttaaaaaaaactg

SEQ ID NO: 76734 - DNA, 120 bp, Artificial Sequence
  ENSG00000079931_30 (sequence is synthesized)
tccaggaagcttcttctaaatctatttctttttaacttgttaaatttcagtagaaaaaaaaagctgttcataaggacaccatatagcatatacgcaaaaatgtctgcaaaaataatttca

SEQ ID NO: 76735 - DNA, 120 bp, Artificial Sequence
  ENSG00000079931_31 (sequence is synthesized)
aatggataatttttattaactgtaagctagggattgtatatctgagtatcatacaaataatgtatagatcagatttaatttattatgaaggtctatcttattcatctaatttagccaaac

SEQ ID NO: 76736 - DNA, 120 bp, Artificial Sequence
  ENSG00000079931_32 (sequence is synthesized)
attgtgagaaaatcttgacgccattctttcttttatgagctaaatattgatttttgcatatttactcgctgcctcttaagagctcatatttcggttgattcccctcaaacctcctactct

SEQ ID NO: 76737 - DNA, 120 bp, Artificial Sequence
  ENSG00000079931_33 (sequence is synthesized)
tccttgcctctcccctcaatgtttcaggtgagaaaactaaaccttaggtaactattaaatggcgtattgggccatacagatcagcagcctggatttattcctctgagtcccagtttggta

SEQ ID NO: 76738 - DNA, 120 bp, Artificial Sequence
  ENSG00000079931_34 (sequence is synthesized)
ctcttcttctcctgaaagcaaactgtagcttacataaaaacatatgttaattttcctcctaaatagtgaaagaacatgtataatcagatacattttaaacaaattgataaaatgaaatca

SEQ ID NO: 76739 - DNA, 120 bp, Artificial Sequence
  ENSG00000079931_35 (sequence is synthesized)
tggcatttctcttactgcttttattccactataaatggcacactgacacatttccataatatgatttttatgatttttcattcatcatatgccataccttgtgataagtccttacagtgt

SEQ ID NO: 76740 - DNA, 120 bp, Artificial Sequence
  ENSG00000079931_36 (sequence is synthesized)
gttctcatgcaattctcgtgatagtcctgtgaggtcaatatcttattactctcattttgtaggtgtataaatgtgggccttcatgtcacaaagcatggaaattgtctgtggctgtcatat

SEQ ID NO: 76741 - DNA, 120 bp, Artificial Sequence
  ENSG00000079931_37 (sequence is synthesized)
gactgtttcaggaaagtactcagaatgttggaatgttcatttactgaatattcactgaatgtttattgaacacttcgagatgctggggacacaacattgaatgagataaaaccattggta

SEQ ID NO: 76742 - DNA, 120 bp, Artificial Sequence
  ENSG00000079931_38 (sequence is synthesized)
tcacggagcccgtattgtggtggtgggggtagcattaaacaaataaataagcaagagaaacatcagaaagtactaagtgctaagtgctgtgcagataattaaaacggagtgatgtgataa

SEQ ID NO: 76743 - DNA, 120 bp, Artificial Sequence
  ENSG00000079931_39 (sequence is synthesized)
tttccaaggaaggaaaggcacacaatggtatcaaatgttcattcattccatctcttgatgctctacgatattatcagtctacactatgctttcctgaaaggccagaagttcaaagatgga

SEQ ID NO: 76744 - DNA, 120 bp, Artificial Sequence
  ENSG00000079931_40 (sequence is synthesized)
ctagtttcccagggacctgattccccagttggaatactccagccccttggaaattcccgggatttataaaataactctagacaacaagactttgtctttaaaggtcctatgaattctttt

SEQ ID NO: 76745 - DNA, 120 bp, Artificial Sequence
  ENSG00000079950_0 (sequence is synthesized)
gcactgggcgtccccacgccaccgcccatcagctgagaattgcagctgagggctccggggtaggtgggtgacggcggtcggaggtgtaggagggagccgtggaggtccaggtgactgctt

SEQ ID NO: 76746 - DNA, 120 bp, Artificial Sequence
  ENSG00000079950_1 (sequence is synthesized)
agaaaactgcacagcatctgatgaaattagcgaataagaacatcaaccatgtcttacactccaggagttggtggtgaccccgcccagttggcccagaggatctcttctaacatccagaag

SEQ ID NO: 76747 - DNA, 120 bp, Artificial Sequence
  ENSG00000079950_2 (sequence is synthesized)
atcacacagtgttctgtggaaatacaaagaactctgaatcaacttggaacacctcaagattcacctgaattgaggcaacagttgcaacagaagcagcagtatactaaccagcttgccaaa

SEQ ID NO: 76748 - DNA, 120 bp, Artificial Sequence
  ENSG00000079950_3 (sequence is synthesized)
gaaacagataagtacattaaagagtttggatctctgcccaccacccccagtgaacagcgtcaaaggaaaatacagaaggatcgcttagtggcagagttcacaacatcactgacaaacttc

SEQ ID NO: 76749 - DNA, 120 bp, Artificial Sequence
  ENSG00000079950_4 (sequence is synthesized)
cagaaggtccagaggcaggctgctgagcgagagaaagagtttgttgctcgagtaagagccagttccagagtgtctggcagttttcctgaggacagctcaaaagaaaggaatcttgtatcc

SEQ ID NO: 76750 - DNA, 120 bp, Artificial Sequence
  ENSG00000079950_5 (sequence is synthesized)
tgggaaagccaaactcaacctcaagtgcaggtgcaggatgaagaaattacagaggatgacctccgtcttattcatgagagagaatcttctatcaggcaacttgaagctgatattatggat

SEQ ID NO: 76751 - DNA, 120 bp, Artificial Sequence
  ENSG00000079950_6 (sequence is synthesized)
attaatgaaatatttaaagatttgggaatgatgattcatgaacaaggagatgtaatagatagcatagaagccaatgtggaaaatgcagaggtgcacgttcagcaagcaaatcagcagctg

SEQ ID NO: 76752 - DNA, 120 bp, Artificial Sequence
  ENSG00000079950_7 (sequence is synthesized)
tcaagggcagcagattatcagcgcaaatccagaaaaaccctgtgcatcatcattcttatccttgtcattggagttgcgattatcagtctcatcatatggggattgaaccactgaagttat

SEQ ID NO: 76753 - DNA, 120 bp, Artificial Sequence
  ENSG00000079950_8 (sequence is synthesized)
aaaggagcacactgtcgcactacattgtctaaattatgtaggaagattcctgtaatcatgtttttttaattattattttaaagctattgtataaaggatggttcccatactttgttattt

SEQ ID NO: 76754 - DNA, 120 bp, Artificial Sequence
  ENSG00000079950_9 (sequence is synthesized)
ttattgggggggttggggtggttcctttggattaaatctgatattttctaatactgaaagattttctaaatgtcactgctgacataactcccttggtcttcaatttaatagttgttaagt

SEQ ID NO: 76755 - DNA, 120 bp, Artificial Sequence
  ENSG00000079950_10 (sequence is synthesized)
ttttgcccacattgcatatgcctttcatttataatttatttaccctgcttgacttagttttgggaattcgtaaatttaaaggtgtgtgtattctgtttgcatctccctgtcactgtgaca

SEQ ID NO: 76756 - DNA, 120 bp, Artificial Sequence
  ENSG00000079950_11 (sequence is synthesized)
cacctagatgtgtgttacttcaattaaaattctcaaatttaattttgatttgcttcagcagggaaaatattctcaataatgtaaaataattaaggtctatacatgggttgtatttttctg

SEQ ID NO: 76757 - DNA, 120 bp, Artificial Sequence
  ENSG00000079950_12 (sequence is synthesized)
gttcacaacagcacaaagtgtctttcatttttttgttggttttcttttaagatcttttttaccctgaagtcggtgaatacttttctagtttatttgatactctttctgtgtatatattaa

SEQ ID NO: 76758 - DNA, 120 bp, Artificial Sequence
  ENSG00000079950_13 (sequence is synthesized)
gcttttgctgtagattgcctagtaaaattactaaggataggttgtttttacatatggtctatttaagtctgatgtttacgggggaaagtgtagttactaaaaatgtttaacataatttgg

SEQ ID NO: 76759 - DNA, 120 bp, Artificial Sequence
  ENSG00000079950_14 (sequence is synthesized)
aagaagagtatgaacaaccaataccaatacctattgcgtttggattcttaagaccccagtttgttattccactaaactagttatcttaaccatatcatctggttttgtgggccattattt

SEQ ID NO: 76760 - DNA, 120 bp, Artificial Sequence
  ENSG00000079950_15 (sequence is synthesized)
accttcccttatgtcttatagaataatggttaatatttttaggtcaaaattacttttggaaagtaactttcccacaattaactgtttttgagcacctgacaaaatttagtgtttaccttg

SEQ ID NO: 76761 - DNA, 120 bp, Artificial Sequence
  ENSG00000079950_16 (sequence is synthesized)
cgtgccattttgtgtcatccttcattaaaaaagcaattggaggtttgccagttatctcacttccctttttaaatcaatgttgttttaatgcactaatctgaattctgtaaagaggattat

SEQ ID NO: 76762 - DNA, 120 bp, Artificial Sequence
  ENSG00000079950_17 (sequence is synthesized)
cttagtttatactttgtattttataatgttcttgtatagcagctcggtactgaaggcggtgtttaacttggcaagctctgagacttcaaatgggaacaaatagtaagtagctaagtaaac

SEQ ID NO: 76763 - DNA, 120 bp, Artificial Sequence
  ENSG00000079950_18 (sequence is synthesized)
cacatctttgcaaccaaaataaagatgagttaaaaggtatctggttaggcctatttcatgaggactatgctctggtgggaccacaggtcacctgatacttagtgctgtgctgcctgaaac

SEQ ID NO: 76764 - DNA, 120 bp, Artificial Sequence
  ENSG00000079950_19 (sequence is synthesized)
ctcagcatggagacatcaccacatgcactgtggccattcagcatctttctggagcaccagttcactccaggtttttattttagggtgtcatcgattttacctactttgtcagactggtag

SEQ ID NO: 76765 - DNA, 120 bp, Artificial Sequence
  ENSG00000079950_20 (sequence is synthesized)
aagttgctttgcatatcagaaaaactccatttttttccacaaaagggattacagaaaactcttttgtgagtgagtgattggaacttagagactcctgttgccagaatcagactgccctag

SEQ ID NO: 76766 - DNA, 120 bp, Artificial Sequence
  ENSG00000079950_21 (sequence is synthesized)
aacagaatggacaatgcagggaggagaattcacacaaacagcacctgttctgaggcctgtgccagcccaccaggcctgctcaaatgtggtctttacttcaagtgcacagaggcacatgag

SEQ ID NO: 76767 - DNA, 120 bp, Artificial Sequence
  ENSG00000079950_22 (sequence is synthesized)
gtttctggtgataaaccagcgtcttaccgctgttttaaagtcccatccccatggctttcacaatcagttccgttttttttgctgtacttgataaaatgtttattctcatacaggtcaagt

SEQ ID NO: 76768 - DNA, 120 bp, Artificial Sequence
  ENSG00000079950_23 (sequence is synthesized)
acatttacttctattcacagtgagtacccaataacaacaaaagcgcttacaaatttggggggcgtgattttagtacctttatttgaagtgtaatcattttaaattattattattttaact

SEQ ID NO: 76769 - DNA, 120 bp, Artificial Sequence
  ENSG00000079950_24 (sequence is synthesized)
ggggcagttatcagtggtttaaacaggaactttagtggcttcaatttgtttaagaaacatattaagtttgagggaaaaatttcccatgaaatatttggaacgtaagagtagtattgatta

SEQ ID NO: 76770 - DNA, 120 bp, Artificial Sequence
  ENSG00000079950_25 (sequence is synthesized)
gagaaaattaaataagaaacatagtatggtagccaaattttttaaaaaatcttgaacttttctgtaggtcagttttagaactgctgtgaaaagtgaaggttgccctgtggagattaaaat

SEQ ID NO: 76771 - DNA, 120 bp, Artificial Sequence
  ENSG00000079950_26 (sequence is synthesized)
tagagttgttttcataactgacagcatggtgaatccatttgagtcaaagtgaagaatttcctcatcaagtgactatacatttgtttttgtgtgctcaaaagaaatactcaaacacagact

SEQ ID NO: 76772 - DNA, 120 bp, Artificial Sequence
  ENSG00000079950_27 (sequence is synthesized)
gatattaaccagccaggtaaattgaacgacaatgtggcattaggtatttggctgtttattggtcgttaaatactatggttttgcaatatgattgatggtaaaagagtgatgtcatattga

SEQ ID NO: 76773 - DNA, 120 bp, Artificial Sequence
  ENSG00000079950_28 (sequence is synthesized)
tactagagtagcttgtttttttagtaggtgtgggaccatctcttttacaagtgcaactcagtctaggacagccatggatgcagtgtctggagttggaccctctgagcccgctggctgccc

SEQ ID NO: 76774 - DNA, 120 bp, Artificial Sequence
  ENSG00000079950_29 (sequence is synthesized)
cagtagcatctgcattggtgaccaaggacactgcactttgaagaggtcgccactgggttatttagtgtcttcactgcttttgttaaaaattgtaaaattttgtacacaaaaagttgtgtt

SEQ ID NO: 76775 - DNA, 120 bp, Artificial Sequence
  ENSG00000079950_30 (sequence is synthesized)
tttgaatatcaattgtttagacacacctacaatgataaataagtgcctttaaaggcccctctttccatgaaatacatctgtggtttagcaaggaaagtacaaaatagtttatgtagttgg

SEQ ID NO: 76776 - DNA, 120 bp, Artificial Sequence
  ENSG00000079950_31 (sequence is synthesized)
tataatttttatttgtgtcttcatgtagaaaaaatgaatgtcataataaaatataaaacttacgtaaagaaaataaagtcattgtccaccttaatagctaaggtccacaagggtaactta

SEQ ID NO: 76777 - DNA, 120 bp, Artificial Sequence
  ENSG00000079950_32 (sequence is synthesized)
tgcagcatttattttttttgaaagtcaaaattgaatttatttctttcacatggctggtttgctgcaatatgaagtttcagaatgggctgaagtaagttgattgagggatttgagttgaat

SEQ ID NO: 76778 - DNA, 120 bp, Artificial Sequence
  ENSG00000079950_33 (sequence is synthesized)
gacattttcaagttcatttaaatatgataaaaattcattggtggtaaataacatctgtctttcctggaaaaaaaaaagttgtgtattttcatgattcagttaaaacaaaaaatgagcctg

SEQ ID NO: 76779 - DNA, 120 bp, Artificial Sequence
  ENSG00000079950_34 (sequence is synthesized)
tgaatcccaggcctttttagtcctccataacatttgaacagtttgacttgtcagcaaagaaatacacttatcaaattttaaaccaatgggagcctgaaagtgttacagtgtactgcttct

SEQ ID NO: 76780 - DNA, 120 bp, Artificial Sequence
  ENSG00000079950_35 (sequence is synthesized)
ttgacaaaattctgtttaacaactaccctaacataatttataaatcaattaagataaaaccatttttttctgagtatttaggaatttgtgtcctcaaaatactgtgacatgaaagatagg

SEQ ID NO: 76781 - DNA, 120 bp, Artificial Sequence
  ENSG00000079950_36 (sequence is synthesized)
aaagaaattacctggttgccagacatgcacgattatctttcctcatttcagctggattttccaaagtcagtagattggataaagcagcatctcattcactgaggtcacaagataggtagg

SEQ ID NO: 76782 - DNA, 120 bp, Artificial Sequence
  ENSG00000079950_37 (sequence is synthesized)
aaacttctttaatgtgaattttgcatattttaacaattcagttagaaaaacagaaaccacttgatggattataagtgtaaagtgttttaacatagggaattagacatcaaaagggtgggt

SEQ ID NO: 76783 - DNA, 120 bp, Artificial Sequence
  ENSG00000079950_38 (sequence is synthesized)
gaggaaggtgtctgcggccccaaagtgggtggatctcaggagctggcccaggcactgctgtgactcttgagaacatccagaaggctgtgctgttggcgtgcagcactgacagtgtgtctc

SEQ ID NO: 76784 - DNA, 120 bp, Artificial Sequence
  ENSG00000079950_39 (sequence is synthesized)
agggagctgtccccagctgtcagctgttaatagctccaaagccagtgccttgcaagagattttgaaactgctgtgaaactcatgtcctctgcccgcctacacttctgtctgcagtggcct

SEQ ID NO: 76785 - DNA, 120 bp, Artificial Sequence
  ENSG00000079950_40 (sequence is synthesized)
ctgaggaaagatggtctctccttttctcatggtcaactctcaacttagaaccagagacagaaggagtttgtgggaagtgtggtttctggtctacctgcactgcagaggacattctagaaa

SEQ ID NO: 76786 - DNA, 120 bp, Artificial Sequence
  ENSG00000079950_41 (sequence is synthesized)
gagaagtgagttgacagtctagcataattgtgaaacaaacactgagatgtacagttcaaaccacgtgaagtggaagcctcagaattttcctcactttcattaaagattctttgatggaaa

SEQ ID NO: 76787 - DNA, 120 bp, Artificial Sequence
  ENSG00000079950_42 (sequence is synthesized)
aatttagaagcattggctctagatggtaagcaagtcatttttttccaaccaaaataaaaaatacatatactaagcttctggggccccaggacttaacacagtttccttccttccttccct

SEQ ID NO: 76788 - DNA, 120 bp, Artificial Sequence
  ENSG00000079950_43 (sequence is synthesized)
tcttccttccctcccgtagtagttgcttaataaatacttaatttggcacttatttggggccggctttttgccaggctactacatgcctgggcatagtgttctaagagtgaaccaaaagaa

SEQ ID NO: 76789 - DNA, 120 bp, Artificial Sequence
  ENSG00000079950_44 (sequence is synthesized)
taagcttcctgccctcagggagtttatgttttgttatttggcatataaaaagaacttggtgtgttaaaagaagggaaatagctgtgtgaaaggaatgaggcaaggaagaaagggaatgtc

SEQ ID NO: 76790 - DNA, 120 bp, Artificial Sequence
  ENSG00000079950_45 (sequence is synthesized)
taaatataaatctccgtttggaccagcctcctgtttatccagttttccttactaagtaactgaatttcattttcttttcttaattgacagactaccagaaaattgctagttttctaaaga

SEQ ID NO: 76791 - DNA, 120 bp, Artificial Sequence
  ENSG00000079950_46 (sequence is synthesized)
gaaactactgatttgagtgatgatctgtgtgtaatggctccaaaaaggagccgttctcttggtggcagcagttggattcagagcttgggcatcctgatcatcaggacagacatttacagg

SEQ ID NO: 76792 - DNA, 120 bp, Artificial Sequence
  ENSG00000079950_47 (sequence is synthesized)
atatgtatagaattactgccccaaatagagggcaaagcactagacagaagggtgagatccaaggggaatttggaatctatatttcatcagaatgcactcaaagcaaaaacagtaagtatg

SEQ ID NO: 76793 - DNA, 120 bp, Artificial Sequence
  ENSG00000079950_48 (sequence is synthesized)
ctccatataaagaaatgtttcttaaaatgtttttaatttaaccctacccatcccttggcaaatctttttcttttaaatcaaataggaataaagaagaaaatcttcctattggcccatttt

SEQ ID NO: 76794 - DNA, 120 bp, Artificial Sequence
  ENSG00000079950_49 (sequence is synthesized)
ctcattattcaaataccatatcaatacaccaattttaattctttgtttttgtaatcatttggttaacatgaatattatgtaatatttttctccaaataatcctaattttaaatgcagaaa

SEQ ID NO: 76795 - DNA, 120 bp, Artificial Sequence
  ENSG00000079950_50 (sequence is synthesized)
tagagctaaataacacactaaataggtttttgtagacactgtagcttctggcaagtttttaagaggttggtcacttaattgcttagagtgggattcccgtaggttttgtgtagtgatggc

SEQ ID NO: 76796 - DNA, 120 bp, Artificial Sequence
  ENSG00000079950_51 (sequence is synthesized)
atttatgcttaaaatgtaagtggtggaaggcaaaaccagatttcctgtccagtcgttacacgcacaacacctctacttgttgacgagggagttttctagaactgaattgaatctttaaat

SEQ ID NO: 76797 - DNA, 120 bp, Artificial Sequence
  ENSG00000079950_52 (sequence is synthesized)
aaacttgaaagggcattaattcccactttggccaacccaaagtacaaatttttaagtgtttactgtaagtatcgttaggcagtagttactaactccaacacctaatagcattggtagaaa

SEQ ID NO: 76798 - DNA, 120 bp, Artificial Sequence
  ENSG00000079950_53 (sequence is synthesized)
gcttataaatgcagttatttagcctcgactaagatttttctgatacctagtttcactttttaatgccctctgaaagttttttgatcagttgtttaatgggagatctgaaatgttaaactc

SEQ ID NO: 76799 - DNA, 120 bp, Artificial Sequence
  ENSG00000079950_54 (sequence is synthesized)
agaccagaaagaagagaacctgttttctagaaattaggtttttaatccaagtaagatgcaagcttttgcttttttaataacttgtatagctaaaaacttgacggtgaaaagctctcagat

SEQ ID NO: 76800 - DNA, 120 bp, Artificial Sequence
  ENSG00000079950_55 (sequence is synthesized)
caaagctgatccttctgtcagtaatgattctaaaaataagcaagattttaatggggaatatattttatttcattcttatctcaaacctaggtactgtggtcgttttgagttcatttcgag

SEQ ID NO: 76801 - DNA, 120 bp, Artificial Sequence
  ENSG00000079950_56 (sequence is synthesized)
gcattttcaatgtgcctcaggccacatccaacctcttcccagggccagatttaatgttcagcctcataaaggttatcatagttttaacatttaagtactattttgcagtgggtatatacc

SEQ ID NO: 76802 - DNA, 120 bp, Artificial Sequence
  ENSG00000079950_57 (sequence is synthesized)
aaaatttgctaatagtaagataaccttagttatatatcattcacgttagttctatcttggaggcaataaacatttcttgttcaagaaattcatgttctatcttggaggcaataaacaaac

SEQ ID NO: 76803 - DNA, 120 bp, Artificial Sequence
  ENSG00000079950_58 (sequence is synthesized)
attttttgttcaaaattagggctaccctattgtccttatgtcttttcctgatctgtggtcaaacatttttcttagtcatttagaaattttctatgttgttttaaattttctttaaatcta

SEQ ID NO: 76804 - DNA, 120 bp, Artificial Sequence
  ENSG00000079950_59 (sequence is synthesized)
gaatggagtatgtgaccaatactttcctttggaatggtatggacatttgaaatagagcccattctttataaagtataaaatatgtttaatgctagtatttttaactaaacttttgagaaa

SEQ ID NO: 76805 - DNA, 120 bp, Artificial Sequence
  ENSG00000079950_60 (sequence is synthesized)
ctagattcacatgctgttgtaagaaataatacagagacctctttcgtgtacctttcactttgtttcccacacagtgaacatctttcaaaactgtcatacaatatcatacccaggatactg

SEQ ID NO: 76806 - DNA, 120 bp, Artificial Sequence
  ENSG00000079950_61 (sequence is synthesized)
acactggtatagctaagatagagaacgtttccacacagaactttttctagcacagggatccctcatcttgcttttgatgaccatacccacttcactcccatccctactcccttcttaacc

SEQ ID NO: 76807 - DNA, 120 bp, Artificial Sequence
  ENSG00000079950_62 (sequence is synthesized)
cttggcaaccataatctgttctccatttttatagtttttttttttttcatttcaataaagctgtataactggaatcataataatatgtaaccttttgggattggctttttttcatttagc

SEQ ID NO: 76808 - DNA, 120 bp, Artificial Sequence
  ENSG00000079950_63 (sequence is synthesized)
atgattttctggaggttaatccagcttattatgtgtatcaagtctattgacaggtactttttagtgtgaatagaatcccatagtatagatgtaccacagtttgtttaactgttcacctgc

SEQ ID NO: 76809 - DNA, 120 bp, Artificial Sequence
  ENSG00000079950_64 (sequence is synthesized)
tgagagacattgggccagtttttggctactataaataaagttgctataaacatttgtgtacaagtttttgtgtgaacataatctagttttctgggtcaaatgcccagcagttatatagta

SEQ ID NO: 76810 - DNA, 120 bp, Artificial Sequence
  ENSG00000079950_65 (sequence is synthesized)
gttgggtcatatagtagttgaatgtttagtttttaagaaattgccaaacttataccaagtagctgtactattttatatacccaccagtggtgtatgagtgatctagttgcttcatgtcct

SEQ ID NO: 76811 - DNA, 120 bp, Artificial Sequence
  ENSG00000079950_66 (sequence is synthesized)
gcatttggtggtgtctcttttttattttagtcattctgataagtgtatagtgacagctcattgcagttttgatttaccattttcccttcgctaatggcaatgatgttgagcatctttgtt

SEQ ID NO: 76812 - DNA, 120 bp, Artificial Sequence
  ENSG00000079950_67 (sequence is synthesized)
tcatatgcttatttgccacctgtatctcttctttagtgacatgtttcttcatgtcttttctaattggattttttttctgttgagttttgagggcttttaaataatgtgtgtgtgtgcctc

SEQ ID NO: 76813 - DNA, 120 bp, Artificial Sequence
  ENSG00000079950_68 (sequence is synthesized)
tgtgtgtgtgtgtgtgtatttttttctagatactagtcctttgttggatgtgtgatttgcaaatatttcctcccagtcagtagcatgtcttttcatttctcttttctgggcctttcacag

SEQ ID NO: 76814 - DNA, 120 bp, Artificial Sequence
  ENSG00000079950_69 (sequence is synthesized)
agcagaagtgtttaattttgatgaagtccactctatccatttttctttttatggatcatgcttctggtatcaagaactttgcctctctccttagatcccccaaattttctcttttatgtt

SEQ ID NO: 76815 - DNA, 120 bp, Artificial Sequence
  ENSG00000079950_70 (sequence is synthesized)
gttttctaaaagtattatagtttacgttttacttttaagtctatattccattttcagttaattttgtataaaatgtgagacttaggtctgggttcattttttttgttgttgcctatggat

SEQ ID NO: 76816 - DNA, 120 bp, Artificial Sequence
  ENSG00000079950_71 (sequence is synthesized)
attcaattactccaacatgatatttgtcgaaaaggctcttttttgtccattgaattgtttttgcacctctgtcaaaaatcagttgagcaaaaatgagttaatgagaaatcagttgggcac

SEQ ID NO: 76817 - DNA, 120 bp, Artificial Sequence
  ENSG00000079950_72 (sequence is synthesized)
attcgtgtgggtctatatctgggttttctattcttttccattagactatgtgtctatacctccaccaacaccaaaatcttgattactgtagtaagtcttgaaatcaaataggctggttta

SEQ ID NO: 76818 - DNA, 120 bp, Artificial Sequence
  ENSG00000079950_73 (sequence is synthesized)
ttccactttctttttcaaaattgttttagccacttagttcctttgtcttcccgtataaactttggaataatcttgtctgtatctattcaaatatcttactgggattttgacaggaactat

SEQ ID NO: 76819 - DNA, 120 bp, Artificial Sequence
  ENSG00000079950_74 (sequence is synthesized)
gttatacctatacatcaatttggggagatttgacatctttaccatgttaagccttcccgatcatgatcacaggatcacttcacttcatttcagttaaattttgttttccttcatcagtat

SEQ ID NO: 76820 - DNA, 120 bp, Artificial Sequence
  ENSG00000079950_75 (sequence is synthesized)
tgtgtggttttcagcatacaaggtctgtacatgttttgttagatttatacctaagcaatttaatttttgagagagattgtaaatggcattgtattttgaatttcctgttcacatgtctat

SEQ ID NO: 76821 - DNA, 120 bp, Artificial Sequence
  ENSG00000079950_76 (sequence is synthesized)
tctaagtacatagaaataaagtgaatttttctattttgtatactgagaccttattgagcccacttactcattttaggggattttgattgattccttgggattttttttttatatagatag

SEQ ID NO: 76822 - DNA, 120 bp, Artificial Sequence
  ENSG00000079950_77 (sequence is synthesized)
tcatgtcatctgcaaataatgaatagttttatctcttcatttctgacctatattccttttttttttcctttcagtcccttaatgcagtgggtagaaattccagcagaaataaaagcagtg

SEQ ID NO: 76823 - DNA, 120 bp, Artificial Sequence
  ENSG00000079950_78 (sequence is synthesized)
agagtagagatccttggcttgtttctggtcttaggcagaaaggattcagtgtttcaccatgaagtataatgttagctgtaggtttttaaagtagatgctcttgctaaagttaaggaagtt

SEQ ID NO: 76824 - DNA, 120 bp, Artificial Sequence
  ENSG00000079950_79 (sequence is synthesized)
atcttttattcctttttttctgcaagtttttattatgaattttatgttgaattttgtcaaatgctttttctgccttaatttacataatgccatttttcttctttagcccattcatgtggt

SEQ ID NO: 76825 - DNA, 120 bp, Artificial Sequence
  ENSG00000079950_80 (sequence is synthesized)
agatacattgattgatttttgaatgttgagccattgttacatccctgagataaactccacttggtcgtggtgtatctttgtatatatagcttaattcttttggctaatattttgttaagg

SEQ ID NO: 76826 - DNA, 120 bp, Artificial Sequence
  ENSG00000079950_81 (sequence is synthesized)
atttttgcatctgttttaatgcgacatactggttggtggtatcagggtaatactagcttcaaaatgaactggaaagtattcctttctcttctgttttctaaagcggattgtatagaattg

SEQ ID NO: 76827 - DNA, 120 bp, Artificial Sequence
  ENSG00000079950_82 (sequence is synthesized)
gtgtcagcgctttttaaaacatttgatagaactttccaatgaaatcatctgggcctggagattttgggggagggagttctttttattgtaatttccacttttacaatagttatatggctg

SEQ ID NO: 76828 - DNA, 120 bp, Artificial Sequence
  ENSG00000079950_83 (sequence is synthesized)
tttaatttatctatttcatattgagttgtgacagtttgtatttttagatgaattagtccatttcatctaagctctcagatttatatgtagagtttttggttgtattttttgttagacttt

SEQ ID NO: 76829 - DNA, 120 bp, Artificial Sequence
  ENSG00000079950_84 (sequence is synthesized)
tgatgtctgatattccaaaactccttcatttatcatttcctttctgtttagagcactcctttagccttattattattattgtagttccattggcaacaaattctctcagttttctttcat

SEQ ID NO: 76830 - DNA, 120 bp, Artificial Sequence
  ENSG00000079950_85 (sequence is synthesized)
ctgaaaatgtcttgattttcccttgatatctgaagaatatttacattagacatagacttgtaggtttatagttcttttctttcagcacttgaaaattgttctgccacttccagccaagag

SEQ ID NO: 76831 - DNA, 120 bp, Artificial Sequence
  ENSG00000079950_86 (sequence is synthesized)
cagtctgagcaacagaacgagactccttgtcaaaaaaaaaaaaaaggaaagaaaatttcatggttccccatgagaaatccagttttttaaattgttttggtccctatagataggtgtcat

SEQ ID NO: 76832 - DNA, 120 bp, Artificial Sequence
  ENSG00000079950_87 (sequence is synthesized)
ttgtcttttttctttttctttttttcctttgtgtttagtttttagttgtttaaccatgatgtatcttgtagatttggggggtttattatatttgaggtcttctcaccatctatatgttta

SEQ ID NO: 76833 - DNA, 120 bp, Artificial Sequence
  ENSG00000079950_88 (sequence is synthesized)
tgtcttttgccaattttggggagttttcagctgtcatttttttcaagaactttttcagtcttccttctttcttctttcttttgagactctgatgacacaaatgttagatttattgtagtt

SEQ ID NO: 76834 - DNA, 120 bp, Artificial Sequence
  ENSG00000079950_89 (sequence is synthesized)
ccgtaagtccctgaggttctgttcatctttgttctgcctgttttcttctgttgttcagactgtgtaatttctatcattttatcttcagatttattcattctttctgcagtagcttccatt

SEQ ID NO: 76835 - DNA, 120 bp, Artificial Sequence
  ENSG00000079950_90 (sequence is synthesized)
ctgctattgagcctatcaattaagtgtttcatattgattcctgcatttttcaattttaaaatttctggccctttaccgaaaatgttggttgacccctggagtataaacctatactataga

SEQ ID NO: 76836 - DNA, 120 bp, Artificial Sequence
  ENSG00000079950_91 (sequence is synthesized)
agagagtatcaatttttttttttttgagaggatcaatttaaacaaaagttggtctctttaaataaataaagtacacataacttggtgaaaccgatttggaaaaaaacagaagacataaaa

SEQ ID NO: 76837 - DNA, 120 bp, Artificial Sequence
  ENSG00000079950_92 (sequence is synthesized)
taggaatgaaagtacagataaataaccaaacatagattttaaaataataagacactataaacaactttatgccaatatatcacaaaacagaaaatgaataatttatatgaaaaatgcaaa

SEQ ID NO: 76838 - DNA, 120 bp, Artificial Sequence
  ENSG00000079950_93 (sequence is synthesized)
caaattaccaaaatcaactacgaagtagatgatttctgcttcctgccatatggttgactaggtatactcaaggatcctcctgctaaaatacagttagttcttggataaaatacaacacac

SEQ ID NO: 76839 - DNA, 120 bp, Artificial Sequence
  ENSG00000079950_94 (sequence is synthesized)
ataatattagttcatttcctggctcattagaaagaaagataatcactaaaggctattaccaatgagagtgggctaaaattaaagtagttgagaaacaggaaaactgtgcctctgagactt

SEQ ID NO: 76840 - DNA, 120 bp, Artificial Sequence
  ENSG00000079950_95 (sequence is synthesized)
aagccatggactccaggcaaagtaaagaaagtgaacctaagattccttcataaaaccaggaatgctttaaagcattaaagtagtcctaagtcagtggactctggtggttactctaagaag

SEQ ID NO: 76841 - DNA, 120 bp, Artificial Sequence
  ENSG00000079950_96 (sequence is synthesized)
tggatgaaaatcccctccgaaggaaagcctccctaattaatgcttctagattaatcaaacatgcaaggaaacacaccatttgcattgagaaacagtagatttagatattcaaggaattca

SEQ ID NO: 76842 - DNA, 120 bp, Artificial Sequence
  ENSG00000079950_97 (sequence is synthesized)
ggtattgcaattagcagaagtagaataacagttatatgtttaaataatgtatgaattaaaacgaacatgaaatgagagatgtgttaaaaggcagatattaaaaagaaccaaagacaactt

SEQ ID NO: 76843 - DNA, 120 bp, Artificial Sequence
  ENSG00000079950_98 (sequence is synthesized)
aggtatgaaatttaattattgaaatatataacataatgaatggtttaagagcagattcaccacaactaaaggaattgttgactatcaagttttaactgaggaaacaacatattgcagcaa

SEQ ID NO: 76844 - DNA, 120 bp, Artificial Sequence
  ENSG00000079950_99 (sequence is synthesized)
aaacaggtaaagggatagaaaataagaattagagattatgagacctgaaggatagaatgggaaggtttaatatgtgctgattggagtctaagaagtaaaaaatagaaaaaaattgaggta

SEQ ID NO: 76845 - DNA, 120 bp, Artificial Sequence
  ENSG00000079950_100 (sequence is synthesized)
attgctgacaaatttccagagctaagaaaagcctgggacctggtatggtggcttatgcctgtaatcacagcattttgggaggccaaagcagaaggatcacttgaagccaggagtttgaga

SEQ ID NO: 76846 - DNA, 120 bp, Artificial Sequence
  ENSG00000079950_101 (sequence is synthesized)
tcaacctgggaaatgaagcaagagcccccactccatctctacaaaaaaaattaagaattagccagatgtggtgacatgaaccagtagtcccagctacttgggaggctcaagtgggaggat

SEQ ID NO: 76847 - DNA, 120 bp, Artificial Sequence
  ENSG00000079950_102 (sequence is synthesized)
ccagtagtcccagctacttgggaggctcaagtgggaggatcacttgagcccaagagtttaagaccagcctgagcaacatggtgaaactccatctgtacaaaaaatacaaaaattagccag

SEQ ID NO: 76848 - DNA, 120 bp, Artificial Sequence
  ENSG00000079950_103 (sequence is synthesized)
gcagtgagctatgatggtgccactgtaccctgtctaaaaaaaaaaaaagtggatccacatatacaagaagcaaaatgtatatcaaccaggaaaaggaagccaatgtatattcattatact

SEQ ID NO: 76849 - DNA, 120 bp, Artificial Sequence
  ENSG00000079950_104 (sequence is synthesized)
atcaaccaggaaaaggaagccaatgtatattcattatactcaaacttcagaacaataaaggcaaagatatcttaaaagcagccagaataacttatccacttttaaaggaataacgaattg

SEQ ID NO: 76850 - DNA, 73 bp, Artificial Sequence
  ENSG00000079950_105 (sequence is synthesized)
tgagacagagtcttgctctgtcacccatgatggagtgcagtggtgtgatttctgctcactgcaacctccattt

SEQ ID NO: 76851 - DNA, 120 bp, Artificial Sequence
  ENSG00000079950_106 (sequence is synthesized)
tgccttggcctcccaaaatgctgggattagaggcatgagccactgcacctggccaacagtagacttttcagtgccaaaactggaaggcaaaagacagtggaataacatcattaaggtact

SEQ ID NO: 76852 - DNA, 120 bp, Artificial Sequence
  ENSG00000079950_107 (sequence is synthesized)
aataacatcattaaggtactgagagaataactcaatagaatgagtgcccagtgaaattatctttcaaaatcaagggtatattaaaaacacttttttctcaaaatgagaatttacaaacaa

SEQ ID NO: 76853 - DNA, 120 bp, Artificial Sequence
  ENSG00000079950_108 (sequence is synthesized)
gggactttcacttaagaataaagatgaattttagagtacagcaaaatgactaggaggaaagtctgagatgcaagaaggtatggtgagctaaaaaatcagtaatcatgggaaatgtaaata

SEQ ID NO: 76854 - DNA, 120 bp, Artificial Sequence
  ENSG00000079950_109 (sequence is synthesized)
aatactgtctatattaagaagtatttactctgtggagtaaaaaagagcgtaattaaaatactagcaacattttacataactcaggaaatgtatatgtggggaaagtgtccgggagcactt

SEQ ID NO: 76855 - DNA, 120 bp, Artificial Sequence
  ENSG00000079950_110 (sequence is synthesized)
agaagttagtgtgagtgctccaagatcctgatactctttaggatggaagttaagataatgaatgactttagatgttgttaatctaagtacttaacagaaaattttcagataacctttaaa

SEQ ID NO: 76856 - DNA, 120 bp, Artificial Sequence
  ENSG00000079950_111 (sequence is synthesized)
gaatagcaatacaatataactttcaaaccagtagagaggaaacattctgaaataagggaaaaacactttagaaatcccaactttgatagaccacaaaaatgcaagaaggaagaaaaagca

SEQ ID NO: 76857 - DNA, 120 bp, Artificial Sequence
  ENSG00000079950_112 (sequence is synthesized)
tagaaaaagcaaagaaatggcatagtatataataaatggttacaataaatataaattgcctatctcaccagattaataaaaaaaaaagtctaccttgttcaatatatacagtttacaaaa

SEQ ID NO: 76858 - DNA, 120 bp, Artificial Sequence
  ENSG00000079950_113 (sequence is synthesized)
gacagtacaaggacagagaaagacaaaaagtagaattagggaaaataaaacaagcaaatatacctggttaggatagctgtatcagtattagccttacaaatattaaagtgaaaagcatta

SEQ ID NO: 76859 - DNA, 120 bp, Artificial Sequence
  ENSG00000079950_114 (sequence is synthesized)
ataaggataaggagactctcaaaaataataaaaatttcaactgaagtaggtataacagttctaaacaaagttattaaagtaaaaatgtagagggcaaaacggaaaaaaaaactattatgt

SEQ ID NO: 76860 - DNA, 120 bp, Artificial Sequence
  ENSG00000079950_115 (sequence is synthesized)
tgtatttgaagtcactcaatttttagctcgagcagcaaaaaagtaaatagaacaacatggtaaccaaagttgattcaattaatacataaaggatcatgttcccccaatttagagcatgtg

SEQ ID NO: 76861 - DNA, 120 bp, Artificial Sequence
  ENSG00000079950_116 (sequence is synthesized)
catatttcttaagcatgtataaaagatttagaaggaaaatgataaaggaatgttttggggacctctgatagggaaagatttcttagaaaatctgcaaaagatattaaccataatctacat

SEQ ID NO: 76862 - DNA, 120 bp, Artificial Sequence
  ENSG00000079950_117 (sequence is synthesized)
aaagtcaactgttttatttcaagcctctctggaaatagttttgttgactgataagaaacgctctatgtcagtcagctaatcaatgtctagtgagtctaactctttccactacacagtaag

SEQ ID NO: 76863 - DNA, 120 bp, Artificial Sequence
  ENSG00000079950_118 (sequence is synthesized)
ttccatcttagggtgttttacttaaaagcctggtgtcaaatgttacacgcacaaaaacttattagtatctttttaaccaatgtatcttaggagatacggaattatttctaacacactggt

SEQ ID NO: 76864 - DNA, 120 bp, Artificial Sequence
  ENSG00000079950_119 (sequence is synthesized)
tgtatttactaattttccgctgagccatcataaaaatagaagtcacatcgtcactatttcttgcttgtccaacccagtgtctatggtaccctcggcagttattcatggctcctaggcctt

SEQ ID NO: 76865 - DNA, 120 bp, Artificial Sequence
  ENSG00000079950_120 (sequence is synthesized)
cttttagagtactgtctctcttctattggctttggatggaattgactccatcctaactgcagaaatgataggcactgctttacataaatcagtcagcctaatagcattctttttgcctca

SEQ ID NO: 76866 - DNA, 120 bp, Artificial Sequence
  ENSG00000079950_121 (sequence is synthesized)
gagattggttcagagatggggaaaaacccactctaggcaatcagcttgtgacttactttcctccaattggtgatccaattagggcagtgtgtggaatgtgctgctctgtatgtgcagcca

SEQ ID NO: 76867 - DNA, 120 bp, Artificial Sequence
  ENSG00000079950_122 (sequence is synthesized)
gatgctcatgttcataaaaaacattttaatactgtgatggaagatacagcttcgagacaaagacacaagcttgggtagagtcattcattcatttagtaagcatttgctgagtgcttaata

SEQ ID NO: 76868 - DNA, 120 bp, Artificial Sequence
  ENSG00000079950_123 (sequence is synthesized)
aatgctgggccctgagaaaaagcaaaatcttattcagcacattctgacattggggacaatgcgatagttgatagcttccacacttaattagaaacaaagattatctcttaaaacctcatt

SEQ ID NO: 76869 - DNA, 120 bp, Artificial Sequence
  ENSG00000079950_124 (sequence is synthesized)
cttgtatctaggaagacttttgttttcccaatcagaaattgtggttccagaaaaagaacaagacaatgaaaacattgtataaaaggtttctttcaaacttttttcaattgacagtttttc

SEQ ID NO: 76870 - DNA, 120 bp, Artificial Sequence
  ENSG00000079950_125 (sequence is synthesized)
accccaatcatcttgatgcagagaggcttcagaaacacaagtgactctgtgttcagaccaagtacttggcctcgagaagatgaatgatcagaccaactcaccatatgattataagggtca

SEQ ID NO: 76871 - DNA, 120 bp, Artificial Sequence
  ENSG00000079950_126 (sequence is synthesized)
ggtagtttaaaaagaaattacaatctgaattgaaccatggatgaacagtgttgctattgagcttcgaatcccagctaataagcataaccttgtaaagagaggttactgtttgggaaactg

SEQ ID NO: 76872 - DNA, 120 bp, Artificial Sequence
  ENSG00000079950_127 (sequence is synthesized)
catgttcttgcaggagggcaaagcttttgcaatataaatagttgtaagggtactagctttcatctttaataccttaaccctctgtgtttagagtttttgtatccagggctgaattgagaa

SEQ ID NO: 76873 - DNA, 120 bp, Artificial Sequence
  ENSG00000079950_128 (sequence is synthesized)
ttttagaaaccttgaacactgaagagattgtaataacaaccccatgtgtaatttataaaatcttcaaaagaaaatttactttttcaaaatgttataaaactctgaatactgaaatgaaaa

SEQ ID NO: 76874 - DNA, 120 bp, Artificial Sequence
  ENSG00000079950_129 (sequence is synthesized)
gtagtatattatgtttactggaagaaaaaatggaaaaacaatggagtttttctgctaccttatccatacatttgtaccaagcttttgtgtagatttttccctgtctggagtaggcaggtg

SEQ ID NO: 76875 - DNA, 85 bp, Artificial Sequence
  ENSG00000079950_130 (sequence is synthesized)
gcttttgtgtagatttttccctgtctggagtaggcaggtgtttttatattaaagatctggaagactgaggtgggcagatcacaag

SEQ ID NO: 76876 - DNA, 120 bp, Artificial Sequence
  ENSG00000079950_131 (sequence is synthesized)
agttgtgctgcgggcatgcgcactgggcgtccccacgccaccgcccatcagctgagaattgcagctgagggctccggggagttggtggtgaccccgcccagttggcccagaggatctctt

SEQ ID NO: 76877 - DNA, 120 bp, Artificial Sequence
  ENSG00000079950_132 (sequence is synthesized)
ggtacaaacgccattaaagaaatctacaactgaaccaggaatgaagaacggaacaaaattcttaaccattcggttttcaatgacagcattatgattttgtttgctctgtggttttgtttg

SEQ ID NO: 76878 - DNA, 120 bp, Artificial Sequence
  ENSG00000079974_0 (sequence is synthesized)
gctgcgaggacgcgggccgagccggaagtggagtgcgctgcggcgcgagctgggccggcgggcgtggttcgagagcgcgcagagtccagactggcggcagggcccgaggggccgacccgc

SEQ ID NO: 76879 - DNA, 120 bp, Artificial Sequence
  ENSG00000079974_1 (sequence is synthesized)
agcgtccctggtctctccagccctcactcggaaccgcactgacaataccctcccctcccttgggctggacccctctctacagctaggagccaatggcagaagacaaaaccaaaccgagtg

SEQ ID NO: 76880 - DNA, 120 bp, Artificial Sequence
  ENSG00000079974_2 (sequence is synthesized)
agttggaccaagggaagtatgatgctgatgacaacgtgaagatcatctgcctgggagacagcgcagtgggcaaatccaaactcatggagagatttctcatggatggctttcagccacagc

SEQ ID NO: 76881 - DNA, 120 bp, Artificial Sequence
  ENSG00000079974_3 (sequence is synthesized)
agctgtccacgtacgccctgaccctgtacaagcacacagccacggtagatggaaggaccatccttgtggacttttgggacacggcaggccaggagcggttccagagcatgcatgcctcct

SEQ ID NO: 76882 - DNA, 120 bp, Artificial Sequence
  ENSG00000079974_4 (sequence is synthesized)
actaccacaaggcccacgcctgcatcatggtgtttgatgtacagaggaaagtcacctataggaacctgagcacctggtatacagagcttcgggagttcaggccagagatcccatgcatcg

SEQ ID NO: 76883 - DNA, 120 bp, Artificial Sequence
  ENSG00000079974_5 (sequence is synthesized)
tggtggccaataaaattgatgacataaacgtgacccaaaaaagcttcaattttgccaagaagttctccctgcccctgtatttcgtctcggctgctgatggtaccaatgttgtgaagctct

SEQ ID NO: 76884 - DNA, 120 bp, Artificial Sequence
  ENSG00000079974_6 (sequence is synthesized)
tcaatgatgcaattcgattagctgtgtcttacaaacagaactcccaggacttcatggatgagatttttcaggagctcgagaacttcagcttggagcaggaagaggaggacgtgccagacc

SEQ ID NO: 76885 - DNA, 120 bp, Artificial Sequence
  ENSG00000079974_7 (sequence is synthesized)
aggaacagagcagcagcatcgagaccccatcagaggaggcggcctctccccacagctgaggggctggggctaggggtgggtggagcccttttaaaatacccttcccttcaacaactctcc

SEQ ID NO: 76886 - DNA, 120 bp, Artificial Sequence
  ENSG00000079974_8 (sequence is synthesized)
agctctgaatggagaaactctctaggccatcccctcttctacctcctgcaacccacccatcctattagcctcccacattctaggcccgtgatacagggatgaggtcagcaccagcaaact

SEQ ID NO: 76887 - DNA, 120 bp, Artificial Sequence
  ENSG00000079974_9 (sequence is synthesized)
tggaagaattccccaccagatctccttgaagcagaagtagggatcagcatcattaacaccttccccaccccctccccgcaggcagacagtgaagagaatcagaaaacatgattatgtgtc

SEQ ID NO: 76888 - DNA, 120 bp, Artificial Sequence
  ENSG00000079974_10 (sequence is synthesized)
actttaatacaggaaatttaggtgttttttggtgtttttgtttttgtttttgttttctttccaaagctcacctcggggacaattccttgggcttctcctgaggtaatgatttaccccccc

SEQ ID NO: 76889 - DNA, 120 bp, Artificial Sequence
  ENSG00000079974_11 (sequence is synthesized)
acccacagctgagtctgtgaggccccatcctttccctacgttttctcccatcttttttcctcttcagtctcccagtcatctggtttgtttgtttctttgttcgttctgagacggagtctc

SEQ ID NO: 76890 - DNA, 63 bp, Artificial Sequence
  ENSG00000079974_12 (sequence is synthesized)
ttgtttgtttctttgttcgttgctgcaacctctgactccctggttcaaacgattctcctgcct

SEQ ID NO: 76891 - DNA, 120 bp, Artificial Sequence
  ENSG00000079974_13 (sequence is synthesized)
accgcgcccggccccaatcatctgtttttaaacaatcgtttttgagcagatagctattcattccagattttcgtgtacccattctgtttcaggagctcttctaggtaaagctgagatcac

SEQ ID NO: 76892 - DNA, 120 bp, Artificial Sequence
  ENSG00000079974_14 (sequence is synthesized)
aggaacagcaggtgacaggcctagctatagttaggaatacacaagccgtaaaatcgagtccttacagccataccacaaggtacgtccatttggactacaagaagagcttcctttaaagtt

SEQ ID NO: 76893 - DNA, 120 bp, Artificial Sequence
  ENSG00000079974_15 (sequence is synthesized)
cctatttcagcataaagaggctgtccttttttttgaggaatagtttggaccttgtgcctcctgtgggaggctgaggactgcaagaggagagctagcagatatgcctgttcacccctctct

SEQ ID NO: 76894 - DNA, 120 bp, Artificial Sequence
  ENSG00000079974_16 (sequence is synthesized)
ggtacttgtggcttgctagtatgtttttatgataatctcgggcattgtttgcattgtgtttattaatagggttttgtttttgttgtttccttttttacagtaaaggctgaattacataaa

SEQ ID NO: 76895 - DNA, 120 bp, Artificial Sequence
  ENSG00000079974_17 (sequence is synthesized)
cagccctcactcggaaccgcacggtacaggtgaaagggggcagacccctcatcatgctttccaggcatctgccacttcccaggaattgtctccctggataaacaaggcgaagtccctggc

SEQ ID NO: 76896 - DNA, 81 bp, Artificial Sequence
  ENSG00000079974_18 (sequence is synthesized)
gcggtggctcacgcctatagtccagggatgccgaggagggaggatcgcttgagtccaggagttggaggctgcagtgagccg

SEQ ID NO: 76897 - DNA, 120 bp, Artificial Sequence
  ENSG00000079974_19 (sequence is synthesized)
cttgcattcttcccaccttataaagaagccagctaagccgacctgccctctttccaagacacagatccctattaactgagctctttctaggacctgtttcccaatcatccctgcctatcc

SEQ ID NO: 76898 - DNA, 120 bp, Artificial Sequence
  ENSG00000079974_20 (sequence is synthesized)
gggccatccctgcacctgggtgttagcaattcactggggacctgccctcatacatttcctcctccattccccgggcaggcaaccttcagtgattggtcctccctcccacgataagataca

SEQ ID NO: 76899 - DNA, 120 bp, Artificial Sequence
  ENSG00000079974_21 (sequence is synthesized)
attacaggtgtgagccactgcactgggccaagaataagatttttaaaaacattttcgcatctggaggctccagggggcttccctgagaaacggcagcctctgcggtcagagaggctgcaa

SEQ ID NO: 76900 - DNA, 120 bp, Artificial Sequence
  ENSG00000079974_22 (sequence is synthesized)
ttcagagcgttcccacaaacagcaccatgtgctcgtgcttacctgcttgggtgtgtgagtcacctggagatggggtgcagaaacattgacatacctgagctatctttcttcctctgccct

SEQ ID NO: 76901 - DNA, 120 bp, Artificial Sequence
  ENSG00000079974_23 (sequence is synthesized)
tgactgcttcctgcatctgctgcatctccgtgggctcccctcagaccctcttctgaaggcctggggtgtctctcctgccaccatgcctgtgtctgcaggtgcctgccaccagccccagtc

SEQ ID NO: 76902 - DNA, 120 bp, Artificial Sequence
  ENSG00000079974_24 (sequence is synthesized)
tgctgcacgggccctggcgagtagaaagcacttgccttctgaccacacggggagctgagggtcagagacggaaccagggctcgaccctccaccttgaaaccttgagatggggatgctcct

SEQ ID NO: 76903 - DNA, 120 bp, Artificial Sequence
  ENSG00000079974_25 (sequence is synthesized)
cattctagccagctcctcctcagctctcaaaacaaggaacagatgctcaggaaaccagacctggacaaaaggcatctgagcctggtgtgaggcagattccagaagtttagttacagacat

SEQ ID NO: 76904 - DNA, 120 bp, Artificial Sequence
  ENSG00000079974_26 (sequence is synthesized)
cctttataaggagtcttcatcgggaattcaagacaacctggtgattcattgaaatttgcctgtgaaagagaatctacatagacttcctgccacctcttgagatgtgacagttgctgaccc

SEQ ID NO: 76905 - DNA, 120 bp, Artificial Sequence
  ENSG00000079974_27 (sequence is synthesized)
tcccgccaccacacagggcgagcccctagccctgagcttgaaccgtgttgcttgcacaaatagctgggtgatttagaagtgaggtcagctgtgccagcggttacagggtggtggttgtct

SEQ ID NO: 76906 - DNA, 120 bp, Artificial Sequence
  ENSG00000079974_28 (sequence is synthesized)
gttgtctttcagagttctgcccttaagagctggtttgcagtgctcatccttcttgctgatattttaaaataggtagaaacaggctgggcgcggtgactcatgcctttaatcccagtactt

SEQ ID NO: 76907 - DNA, 120 bp, Artificial Sequence
  ENSG00000079974_29 (sequence is synthesized)
acataaataaataaaaataaaataggtaaaaacaaattataaagtaatacaattatgaactgcaaataataaaacataaaaattactttaaaaaaatttaaagaggccgggcacagtggc

SEQ ID NO: 76908 - DNA, 88 bp, Artificial Sequence
  ENSG00000079974_30 (sequence is synthesized)
gcctgtaatcccagaaaaccgggagtccaagaccagcctcgttaatataatgagagcttatctctacaaaaaataaacaaaattagcc

SEQ ID NO: 76909 - DNA, 120 bp, Artificial Sequence
  ENSG00000079974_31 (sequence is synthesized)
ctgcactccagcctggctgacagagtaagaccctatctcaaaaaacaaaaagcagaaagaacaaagaagtaaacagaagcttaaaagtaaatcagccaggtgcagtagctcatgcctgta

SEQ ID NO: 76910 - DNA, 69 bp, Artificial Sequence
  ENSG00000079974_32 (sequence is synthesized)
acaaagaagtaaacagaagcttaaaagtaaatcagccaggtgcagtagcaggtcaagagtttgagacca

SEQ ID NO: 76911 - DNA, 120 bp, Artificial Sequence
  ENSG00000079974_33 (sequence is synthesized)
gttggtattttctacccctgacccgtgtgcatacttctgtcgtagctctcaccacagtagactctgctatcattgtgtcttccatcctctgaaccctgtgcaaggtctgctcatggtgaa

SEQ ID NO: 76912 - DNA, 120 bp, Artificial Sequence
  ENSG00000079974_34 (sequence is synthesized)
tgcccatgacaataccctcccctcccttgggctggacccctctctacagctaggagccaatggcagaagacaaaaccaaaccgagtgagttggaccaagggaagtatgatgctgatgaca

SEQ ID NO: 76913 - DNA, 120 bp, Artificial Sequence
  ENSG00000079974_35 (sequence is synthesized)
atgtatcagtgtcccactgcccacacctttgtaccagcagcccaggaaggaggattgggtaagtgaacgcacaggttttgttccgcacttgtttcttgccgattgacccacatggcattg

SEQ ID NO: 76914 - DNA, 120 bp, Artificial Sequence
  ENSG00000079974_36 (sequence is synthesized)
cacaatcagtgctgtatattttggaccttactcatatttggattgttttatattaagagggcagtagaatggcaaacagcaaatggtttggatctaatgcctggattcaaaccccacctc

SEQ ID NO: 76915 - DNA, 120 bp, Artificial Sequence
  ENSG00000079999_0 (sequence is synthesized)
cttttcgggcgtcccgaggccgctccccaaccgacaaccaagaccccgcaggccacgcagccctggagccgaggccccccgacggcggaggcgcccgcgggtcccctacagccaaggtcc

SEQ ID NO: 76916 - DNA, 120 bp, Artificial Sequence
  ENSG00000079999_1 (sequence is synthesized)
ctgagtgccagaggtggtggtgttgcttatcttctggaaccccatgcagccagatcccaggcctagcggggctggggcctgctgccgattcctgcccctgcagtcacagtgccctgaggg

SEQ ID NO: 76917 - DNA, 120 bp, Artificial Sequence
  ENSG00000079999_2 (sequence is synthesized)
ggcaggggacgcggtgatgtacgcctccactgagtgcaaggcggaggtgacgccctcccagcatggcaaccgcaccttcagctacaccctggaggatcataccaagcaggcctttggcat

SEQ ID NO: 76918 - DNA, 120 bp, Artificial Sequence
  ENSG00000079999_3 (sequence is synthesized)
catgaacgagctgcggctcagccagcagctgtgtgacgtcacactgcaggtcaagtaccaggatgcaccggccgcccagttcatggcccacaaggtggtgctggcctcatccagccctgt

SEQ ID NO: 76919 - DNA, 120 bp, Artificial Sequence
  ENSG00000079999_4 (sequence is synthesized)
cttcaaggccatgttcaccaacgggctgcgggagcagggcatggaggtggtgtccattgagggtatccaccccaaggtcatggagcgcctcattgaattcgcctacacggcctccatctc

SEQ ID NO: 76920 - DNA, 120 bp, Artificial Sequence
  ENSG00000079999_5 (sequence is synthesized)
catgggcgagaagtgtgtcctccacgtcatgaacggtgctgtcatgtaccagatcgacagcgttgtccgtgcctgcagtgacttcctggtgcagcagctggaccccagcaatgccatcgg

SEQ ID NO: 76921 - DNA, 120 bp, Artificial Sequence
  ENSG00000079999_6 (sequence is synthesized)
catcgccaacttcgctgagcagattggctgtgtggagttgcaccagcgtgcccgggagtacatctacatgcattttggggaggtggccaagcaagaggagttcttcaacctgtcccactg

SEQ ID NO: 76922 - DNA, 120 bp, Artificial Sequence
  ENSG00000079999_7 (sequence is synthesized)
ccaactggtgaccctcatcagccgggacgacctgaacgtgcgctgcgagtccgaggtcttccacgcctgcatcaactgggtcaagtacgactgcgaacagcgacggttctacgtccaggc

SEQ ID NO: 76923 - DNA, 120 bp, Artificial Sequence
  ENSG00000079999_8 (sequence is synthesized)
gctgctgcgggccgtgcgctgccactcgttgacgccgaacttcctgcagatgcagctgcagaagtgcgagatcctgcagtccgactcccgctgcaaggactacctggtcaagatcttcga

SEQ ID NO: 76924 - DNA, 120 bp, Artificial Sequence
  ENSG00000079999_9 (sequence is synthesized)
ggagctcaccctgcacaagcccacgcaggtgatgccctgccgggcgcccaaggtgggccgcctgatctacaccgcgggcggctacttccgacagtcgctcagctacctggaggcttacaa

SEQ ID NO: 76925 - DNA, 120 bp, Artificial Sequence
  ENSG00000079999_10 (sequence is synthesized)
gcggagcggcctggccggctgcgtggtgggcgggctgttgtacgccgtgggcggcaggaacaactcgcccgacggcaacaccgactccagcgccctggactgttacaaccccatgaccaa

SEQ ID NO: 76926 - DNA, 120 bp, Artificial Sequence
  ENSG00000079999_11 (sequence is synthesized)
tcagtggtcgccctgcgcccccatgagcgtgccccgtaaccgcatcggggtgggggtcatcgatggccacatctatgccgtcggcggctcccacggctgcatccaccacaacagtgtgga

SEQ ID NO: 76927 - DNA, 120 bp, Artificial Sequence
  ENSG00000079999_12 (sequence is synthesized)
gaggtatgagccagagcgggatgagtggcacttggtggccccaatgctgacacgaaggatcggggtgggcgtggctgtcctcaatcgtctcctttatgccgtggggggctttgacgggac

SEQ ID NO: 76928 - DNA, 120 bp, Artificial Sequence
  ENSG00000079999_13 (sequence is synthesized)
aaaccgccttaattcagctgagtgttactacccagagaggaacgagtggcgaatgatcacagcaatgaacaccatccgaagcggggcaggcgtctgcgtcctgcacaactgtatctatgc

SEQ ID NO: 76929 - DNA, 120 bp, Artificial Sequence
  ENSG00000079999_14 (sequence is synthesized)
tgctgggggctatgatggtcaggaccagctgaacagcgtggagcgctacgatgtggaaacagagacgtggactttcgtagcccccatgaagcaccggcgaagtgccctggggatcactgt

SEQ ID NO: 76930 - DNA, 120 bp, Artificial Sequence
  ENSG00000079999_15 (sequence is synthesized)
ccaccaggggagaatctacgtccttggaggctatgatggtcacacgttcctggacagtgtggagtgttacgacccagatacagacacctggagcgaggtgacccgaatgacatcgggccg

SEQ ID NO: 76931 - DNA, 120 bp, Artificial Sequence
  ENSG00000079999_16 (sequence is synthesized)
gagtggggtgggcgtggctgtcaccatggagccctgccggaagcagattgaccagcagaactgtacctgttgaggcacttttgtttcttgggcaaaaatacagtccaatggggagtatca

SEQ ID NO: 76932 - DNA, 120 bp, Artificial Sequence
  ENSG00000079999_17 (sequence is synthesized)
ttgtttttgtacaaaaaccgggactaaaagaaaagacagcactgcaaataacccatcttccgggaagggaggccaggatgcctcagtgttaaaatgacatctcaaaagaagtccaaagcg

SEQ ID NO: 76933 - DNA, 120 bp, Artificial Sequence
  ENSG00000079999_18 (sequence is synthesized)
ggaatcatgtgcccctcagcggagccccgggagtgtccaagacagcctggctgggaaagggggtgtggaaagagcaggcttccaggagagaggcccccaaaccctctggccgggtaatag

SEQ ID NO: 76934 - DNA, 120 bp, Artificial Sequence
  ENSG00000079999_19 (sequence is synthesized)
gcctgggtcccactcacccatgccggcagctgtcaccatgtgatttattcttggatacctgggagggggccaatgggggcctcagggggaggccccctctggaaatgtggttcccaggga

SEQ ID NO: 76935 - DNA, 120 bp, Artificial Sequence
  ENSG00000079999_20 (sequence is synthesized)
tgggcctgtacatagaagccaccggatggcacttccccaccggatggacagttattttgttgataagtaaccctgtaattttccaaggaaaataaagaacagactaactagtgtctttca

SEQ ID NO: 76936 - DNA, 120 bp, Artificial Sequence
  ENSG00000079999_21 (sequence is synthesized)
gtgggcgggggtggggagcggcccctcagcggtccctaccgcctgaggccagggcccggggacttttattgtgacacggcgggcgcccggctctgcttagtcatggtgacctgcgcgcgc

SEQ ID NO: 76937 - DNA, 120 bp, Artificial Sequence
  ENSG00000079999_22 (sequence is synthesized)
ggtgcagcagctggaccccagcaatgccatcggcatcgccaacttcgctgagcagattggctgtgtggagttgcaccagcgtgcccgggagtacatctacatgcattttggggagagtct

SEQ ID NO: 76938 - DNA, 120 bp, Artificial Sequence
  ENSG00000079999_23 (sequence is synthesized)
ccgcgagcgcccctgcggccgtgcccggagaccaggaaaacgggcgccacggcccagggcgcctccgagttccccgccaggactcggagggccaggagggcgcgacctgggtggatattt

SEQ ID NO: 76939 - DNA, 120 bp, Artificial Sequence
  ENSG00000079999_24 (sequence is synthesized)
gggccaggagggcgcgacctgggtggatatttttgttggacggcgcaactcttggggtggcccgggagcggcggaaaccgagcgagagaaccaggaggcgctgcgcagaaggaggcccgg

SEQ ID NO: 76940 - DNA, 120 bp, Artificial Sequence
  ENSG00000079999_25 (sequence is synthesized)
atagcagatggtggcgcgcagccccgcgaggagacatccagcaacgaaatcgggagatggaagggacagtgagaaggggggcctggctgtgcgcccccgcccgatgccccactcctcgcc

SEQ ID NO: 76941 - DNA, 120 bp, Artificial Sequence
  ENSG00000079999_26 (sequence is synthesized)
gacgggcgccgggcacctgcgggaagggcgggagaatcgccgctcctttcccgccgcgccctttccgccctctccccgcctccttttcgggcgtcccgaggccgctccccaaccgacaac

SEQ ID NO: 76942 - DNA, 120 bp, Artificial Sequence
  ENSG00000080007_0 (sequence is synthesized)
acgctactcttacgacgtcacggtcaggtggtgcagagctggacggcaacgacgtcggacgcgccccttcttggaacaatgtcccaccacggaggagctcccaaggcctctacgtgggtc

SEQ ID NO: 76943 - DNA, 120 bp, Artificial Sequence
  ENSG00000080007_1 (sequence is synthesized)
gttgctagtcggcgaagctcgacagtgtcccgagcgccagagaggaggccggcggaggagttgaatcgaacaggtcctgagggatatagtgtcggcagaggtggtcgctggagaggcacc

SEQ ID NO: 76944 - DNA, 120 bp, Artificial Sequence
  ENSG00000080007_2 (sequence is synthesized)
tctaggcccccggaggccgtggccgctggtcacgaggaactgccgctgtgttttgctttgaagagccactttgttggcgcggtaatcggtcgtggtgggtcaaaaataaagaatatacaa

SEQ ID NO: 76945 - DNA, 120 bp, Artificial Sequence
  ENSG00000080007_3 (sequence is synthesized)
agtacaacaaacaccacaatccaaataatacaagaacaaccagaatcattagtcaaaatttttggcagcaaggcaatgcaaacgaaagcaaaagcagtgatagacaattttgttaaaaag

SEQ ID NO: 76946 - DNA, 120 bp, Artificial Sequence
  ENSG00000080007_4 (sequence is synthesized)
ctagaagaaaattacaattcagaatgcggaattgatactgcattccaaccttctgttggaaaagatggaagcacagataacaatgttgttgcaggagatcggccattgatagattgggat

SEQ ID NO: 76947 - DNA, 120 bp, Artificial Sequence
  ENSG00000080007_5 (sequence is synthesized)
caaattagagaggaaggtttgaaatggcaaaaaacaaagtgggcagatttaccaccaattaagaaaaacttttataaagagtccactgccacaagtgccatgtcaaaagtagaagcagat

SEQ ID NO: 76948 - DNA, 120 bp, Artificial Sequence
  ENSG00000080007_6 (sequence is synthesized)
agttggaggaaagaaaattttaatataacgtgggatgacttgaaggatggggagaaacgacctatccccaatcctacctgcacatttgatgacgcctttcaatgttatcctgaggttatg

SEQ ID NO: 76949 - DNA, 120 bp, Artificial Sequence
  ENSG00000080007_7 (sequence is synthesized)
gaaaacattaaaaaggcaggttttcaaaagccaacacctattcagtcacaggcatggcccattgtgttgcaaggaatagatcttataggagtagcccagactggaacaggaaagacattg

SEQ ID NO: 76950 - DNA, 120 bp, Artificial Sequence
  ENSG00000080007_8 (sequence is synthesized)
tgttatttaatgcctggatttattcatctggtccttcaacccagccttaaaggtcaaaggaatagacccggcatgttagttctaactcccactcgggaattagcacttcaagtagaagga

SEQ ID NO: 76951 - DNA, 120 bp, Artificial Sequence
  ENSG00000080007_9 (sequence is synthesized)
gaatgttgcaaatattcatataaagggcttcggagtgtttgtgtatatggtggtggaaatagagatgaacaaatagaagagcttaaaaaaggtgtagatatcataattgcaactcccgga

SEQ ID NO: 76952 - DNA, 120 bp, Artificial Sequence
  ENSG00000080007_10 (sequence is synthesized)
gtcaatctgaagaatataacctacttggttttagatgaagcagacaagatgttggacatgggatttgaaccccagataatgaagattttgttagatgtgcgcccagataggcagacagtt

SEQ ID NO: 76953 - DNA, 120 bp, Artificial Sequence
  ENSG00000080007_11 (sequence is synthesized)
atgaccagtgctacatggcctcattcagttcatcgcctcgcacaatcttatttgaaagaaccaatgattgtctatgttggtacattggatctagttgctgtaagttcagtgaagcaaaat

SEQ ID NO: 76954 - DNA, 120 bp, Artificial Sequence
  ENSG00000080007_12 (sequence is synthesized)
ataattgtaaccaccgaggaagagaaatggagtcacatgcaaacttttctacagagtatgtcatccacagacaaagtcattgtcttcgtttctcgaaaagctgttgcggatcacttatca

SEQ ID NO: 76955 - DNA, 120 bp, Artificial Sequence
  ENSG00000080007_13 (sequence is synthesized)
agtgacctaatacttggaaatatatcagtagagtctctgcatggagatagagaacagagagatcgggagaaagcattagagaactttaaaacaggcaaagtgagaatactaattgcaact

SEQ ID NO: 76956 - DNA, 120 bp, Artificial Sequence
  ENSG00000080007_14 (sequence is synthesized)
gatctagcctctagaggacttgatgtccatgacgttacacatgtctataattttgactttccacggaatattgaagaatacgtacaccgaatagggcgcacgggaagagcagggaggact

SEQ ID NO: 76957 - DNA, 120 bp, Artificial Sequence
  ENSG00000080007_15 (sequence is synthesized)
ggtgtttccattacaactttgactagaaatgattggagggttgcctctgaattgattaatattctggaaagagcaaatcagagtattccagaggagcttgtatcaatggctgagaggttt

SEQ ID NO: 76958 - DNA, 120 bp, Artificial Sequence
  ENSG00000080007_16 (sequence is synthesized)
aaggcacatcaacagaaaagggaaatggaaagaaaaatggaaagacctcaaggaaggcccaagaagtttcattaatgtcttctgtactagtggggtagagaattcaagattttttagaaa

SEQ ID NO: 76959 - DNA, 120 bp, Artificial Sequence
  ENSG00000080007_17 (sequence is synthesized)
tatagtaagacggaagtattggacatgttggcagtatgaagagaccggactgatttgactgattcttaaaataatagtgtttgaaaatatagaatccagtgttttatactttctttaata

SEQ ID NO: 76960 - DNA, 120 bp, Artificial Sequence
  ENSG00000080007_18 (sequence is synthesized)
aaaatagaagtatttaaacttggaagttgtttcctggatttttattaaggagtgtagcattagaatgtttttcttttaatcttttaaactgtctcctgtaattttgctgtatgtcataag

SEQ ID NO: 76961 - DNA, 120 bp, Artificial Sequence
  ENSG00000080007_19 (sequence is synthesized)
gccagtctttcagaatttaatgttcagattttgtcatggcagtgaaaaagatgttttcaaacaaagaatcagcacctgaaaaaatactgttaataaatgttcgtttctgtgataaaaaga

SEQ ID NO: 76962 - DNA, 120 bp, Artificial Sequence
  ENSG00000080007_20 (sequence is synthesized)
atccaagtaagccatctgtgtttttcggcccttaagagagcatcatgcatttctaagggagcacctaactctacttttctttttaagacagcctcattctgtctcccaggctggagtgca

SEQ ID NO: 76963 - DNA, 120 bp, Artificial Sequence
  ENSG00000080031_0 (sequence is synthesized)
gagtgtaaagtccagcaggtggaaggactaggcctgggactcctgggtccccggcagtgtctggaggcatggctggggctggcgggggcctcggggtctgggggaacctggtgctgctgg

SEQ ID NO: 76964 - DNA, 120 bp, Artificial Sequence
  ENSG00000080031_1 (sequence is synthesized)
gcctgtgcagctggacaggggccagggcgcctgcccccaacccagggaggaacctgacagtggagactcagaccaccagctccatctccctgagctgggaggtccccgatggcctagact

SEQ ID NO: 76965 - DNA, 120 bp, Artificial Sequence
  ENSG00000080031_2 (sequence is synthesized)
cacagaactccaactactgggttcagtgtactggagacggcggcacaacagagactcgaaacacaacagccaccaacgtcaccgtggatggccttggacccgggtcattgtatacgtgtt

SEQ ID NO: 76966 - DNA, 120 bp, Artificial Sequence
  ENSG00000080031_3 (sequence is synthesized)
ctgtgtgggtggagaaagacggagtaaatagctctgtggggactgtcactactgccacagctcccaacccagtgaggaacctgagagtggaggctcagaccaacagctccatcgccctga

SEQ ID NO: 76967 - DNA, 120 bp, Artificial Sequence
  ENSG00000080031_4 (sequence is synthesized)
cctgggaggtccccgacggcccagacccacagaactccacctacggggttgagtacactggagatggtggcagagcagggactcgaagcacagcacacactaacatcaccgtggatggac

SEQ ID NO: 76968 - DNA, 120 bp, Artificial Sequence
  ENSG00000080031_5 (sequence is synthesized)
ttgaacccgggtgtttgtatgcgttttccatgtgggtgggaaagaatggaatcaacagctcccgggagactcgaaatgccaccacagctcacaacccagtgaggaacctgagagtggagg

SEQ ID NO: 76969 - DNA, 120 bp, Artificial Sequence
  ENSG00000080031_6 (sequence is synthesized)
ctcagaccaccagctccatctccctgagctgggaggtccccgatggcacagacccacagaactcgacctactgcgttcagtgcactggagatggtggcagaacagagactcgaaacacaa

SEQ ID NO: 76970 - DNA, 120 bp, Artificial Sequence
  ENSG00000080031_7 (sequence is synthesized)
cagacaccagagtcaccgtggatggccttggacccgggtcattgtatacgtgttctgtgtgggtggagaaagacggagtaaatagctctgtggagattgtcactagtgccacagctccca

SEQ ID NO: 76971 - DNA, 120 bp, Artificial Sequence
  ENSG00000080031_8 (sequence is synthesized)
acccagtgagaaacctgacagtggaggctcagaccaacagctccatcgccctgacctgggaggtccccgatggcccagacccacagaactccacctacggggttgagtacactggagatg

SEQ ID NO: 76972 - DNA, 120 bp, Artificial Sequence
  ENSG00000080031_9 (sequence is synthesized)
gtggcagagcagggactcgaagcacagcacacaccaacatcaccgtggatagacttgaacccgggtgtttgtatgtgttttccgtgtgggtggggaagaatggaatcaacagctcccggg

SEQ ID NO: 76973 - DNA, 120 bp, Artificial Sequence
  ENSG00000080031_10 (sequence is synthesized)
agactcgaaatgccaccacagcccccaacccagtgagaaacctccatatggagactcagaccaacagctccatcgccctatgctgggaagtccccgatggcccataccctcaggactaca

SEQ ID NO: 76974 - DNA, 120 bp, Artificial Sequence
  ENSG00000080031_11 (sequence is synthesized)
cctactgggtagagtacactggagacggtggtggcacagagacccgaaacacaacaaataccagtgtgacagctgagagacttgagcccggaaccttgtacacattctctgtatgggcag

SEQ ID NO: 76975 - DNA, 120 bp, Artificial Sequence
  ENSG00000080031_12 (sequence is synthesized)
aaaaaaatggagcacgtggctccaggcagaatgtcagcatctccacagtccccaacgcagtgacaagcctcagcaagcaggactggaccaacagcaccattgctttgcgctggacagctc

SEQ ID NO: 76976 - DNA, 120 bp, Artificial Sequence
  ENSG00000080031_13 (sequence is synthesized)
cccagggcccaggccagtcttcctacagctactgggtctcatgggtcagggaaggcatgactgaccccaggacccaaagcacctcaggtactgacatcaccctaaaggaactggaagctg

SEQ ID NO: 76977 - DNA, 120 bp, Artificial Sequence
  ENSG00000080031_14 (sequence is synthesized)
gcagcctgtaccacctcaccgtctgggccgagaggaatgaggtcagaggctataacagcaccctcactgcagccactgctcccaatgaggtcacagatctccagaatgaaactcagacta

SEQ ID NO: 76978 - DNA, 120 bp, Artificial Sequence
  ENSG00000080031_15 (sequence is synthesized)
agaactcagtcatgctgtggtggaaggcccctggagacccccactctcagttgtacgtatactgggtccagtgggccagcaagggacatccccggagggggcaagatccccaagcgaatt

SEQ ID NO: 76979 - DNA, 120 bp, Artificial Sequence
  ENSG00000080031_16 (sequence is synthesized)
tgggcagagaggaatgacgtagccagttccacgcagagcctctgtgcgtccacatacccagacacagtcaccatcacttcctgtgtcagcacctcagcgggctatggagtcaacttgatc

SEQ ID NO: 76980 - DNA, 120 bp, Artificial Sequence
  ENSG00000080031_17 (sequence is synthesized)
tggtcctgcccccagggaggctacgaggcctttgagttggaggtgggaggacagcggggctcccaggacagatcttcatgtggggaggctgtgtctgtgttgggtctcgggccggctcgg

SEQ ID NO: 76981 - DNA, 120 bp, Artificial Sequence
  ENSG00000080031_18 (sequence is synthesized)
tcctacccagccaccatcacgaccatctgggacggaatgaaggtcgtgtctcactctgtggtctgccacaccgagagtgcaggggtcattgccggagcctttgtgggcatcctcctgttt

SEQ ID NO: 76982 - DNA, 120 bp, Artificial Sequence
  ENSG00000080031_19 (sequence is synthesized)
ctcatcctcgtgggcctgctgattttcttcctgaagaggaggaataagaagaagcagcagaaaccagaactcagggatctggtctttagctccccaggggacatcccagctgaagacttc

SEQ ID NO: 76983 - DNA, 120 bp, Artificial Sequence
  ENSG00000080031_20 (sequence is synthesized)
gctgaccacgtcaggaagaatgagagggacagcaactgtggttttgcagacgagtaccagcaactctccctggtgggccacagccagtctcagatggtggcttcggcttcagagaacaac

SEQ ID NO: 76984 - DNA, 120 bp, Artificial Sequence
  ENSG00000080031_21 (sequence is synthesized)
gccaagaaccgctacagaaatgtgctgccctatgactggtcccgggtgcccctgaagcccatccatgaggagccaggctctgactacatcaatgccagcttcatgcccggtctctggagc

SEQ ID NO: 76985 - DNA, 120 bp, Artificial Sequence
  ENSG00000080031_22 (sequence is synthesized)
ccccaggagttcattgcaacccagggtcccctgccacagacagtgggtgacttctggcgcctggtgtgggaacagcagagccacaccctggtcatgctgaccaactgcatggaggccggc

SEQ ID NO: 76986 - DNA, 120 bp, Artificial Sequence
  ENSG00000080031_23 (sequence is synthesized)
cgggtgaagtgtgagcattactggcctctggactcgcagccctgcacccatgggcacctgcgggtaaccctggtaggtgaggaagtgatggagaactggacggtgcgggaactgctgctc

SEQ ID NO: 76987 - DNA, 120 bp, Artificial Sequence
  ENSG00000080031_24 (sequence is synthesized)
ctccaggtggaggagcagaagacactgtctgtgcgccaattccactaccaggcctggccggatcacggcgttccctcctccccagacaccttgctggctttctggaggatgcttcggcag

SEQ ID NO: 76988 - DNA, 120 bp, Artificial Sequence
  ENSG00000080031_25 (sequence is synthesized)
tggctggatcagaccatggagggaggcccacccattgtgcactgcagtgctggcgtgggtcgcacaggaaccctcattgccctggacgtcctgctccggcagctgcagtccgagggtctc

SEQ ID NO: 76989 - DNA, 120 bp, Artificial Sequence
  ENSG00000080031_26 (sequence is synthesized)
cttgggcccttcagctttgtaaggaagatgagagagagtcggccgttgatggtgcagactgaggctcagtacgtattcctgcatcagtgcatcctgcggttcctccaacagtcagcccag

SEQ ID NO: 76990 - DNA, 120 bp, Artificial Sequence
  ENSG00000080031_27 (sequence is synthesized)
gccccagccgagaaggaagtcccgtatgaggatgtcgaaaacctcatctacgagaacgtggccgccatccaggcccacaagttggaggtctaagtgacgagggggctgggtcggcagccc

SEQ ID NO: 76991 - DNA, 120 bp, Artificial Sequence
  ENSG00000080031_28 (sequence is synthesized)
aggcatcctcaagctctggacacccacttgagcccagattcctggaagagcagagggctgggctcccagactcctgggtgctgtgggaggagggggctggtatcccaaactctggtttcc

SEQ ID NO: 76992 - DNA, 120 bp, Artificial Sequence
  ENSG00000080031_29 (sequence is synthesized)
ccaggagagagtggtctggtgggcttcagatgagtcctatgggagctggggatctggattcctggttccctgaaggaggagagggatgatagcttggattccctaggtctttccaggatg

SEQ ID NO: 76993 - DNA, 120 bp, Artificial Sequence
  ENSG00000080031_30 (sequence is synthesized)
cagaaagaaacaggctggggcctggattctgaggcaggaaggaatttgggtctggagttctggctacttgaggaccaaaggcaggaaggatcctgccttgattttacttcagaaaccaaa

SEQ ID NO: 76994 - DNA, 120 bp, Artificial Sequence
  ENSG00000080031_31 (sequence is synthesized)
tcagtcttctataatctggggtcggagggagtccctgtgcccaaggtctctctgcaccccaccatccacatgtatttttccttctatcccataatttattaaatcactgttctccccaga

SEQ ID NO: 76995 - DNA, 120 bp, Artificial Sequence
  ENSG00000080031_32 (sequence is synthesized)
atgggccataggcttgagcctaccctaagacgagacatctaatgacagatcttgggagaactgtgccatcagagcctgagagcacccatagacaccaccagatcagccaggcgcggtggc

SEQ ID NO: 76996 - DNA, 120 bp, Artificial Sequence
  ENSG00000080031_33 (sequence is synthesized)
ccagcccctcggcctcactgggcggaggagtggttgagaggctgactccgttttctctgggttccctccagggcctgtgcagctggacaggggccagggcgcctgaccttccttcccaat

SEQ ID NO: 76997 - DNA, 120 bp, Artificial Sequence
  ENSG00000080031_34 (sequence is synthesized)
cctgtgcagctggacaggggccagggcgcctggtgagtgacccctgcctgaactcactgcccactcgaagagaccttccttcccaattctcagcccccaacccagggaggaacctgacag

SEQ ID NO: 76998 - DNA, 120 bp, Artificial Sequence
  ENSG00000080031_35 (sequence is synthesized)
ggttgagaggctgactccgttttctctgggttccctccagggcctgtgcagctggacaggggccagggcgcctggtgagtgacccctgcctgaactcactgcccactcgaagagccccca

SEQ ID NO: 76999 - DNA, 120 bp, Artificial Sequence
  ENSG00000080166_0 (sequence is synthesized)
aactgagttcaaggcaattaaagtcaagagctaaggagggagggagagggtttagaaataccagcataataagtagtatgactgggtgctctgtaaattaactcaattagacaaagcctg

SEQ ID NO: 77000 - DNA, 120 bp, Artificial Sequence
  ENSG00000080166_1 (sequence is synthesized)
acttaacgggggaagatggtgagaagcgctaccctcattaaatttggttgttagaggcgcttctaaggaaattaagtctgttagttgtttgaatcacataaaattgtgtgtgcacgttca

SEQ ID NO: 77001 - DNA, 120 bp, Artificial Sequence
  ENSG00000080166_2 (sequence is synthesized)
tgtacacatgtgcacacatgtaacctctgtgattcttgtgggtatttttttaagaagaaaggaatagaaagcaaagaaaaataaaaaatactgaaaagaaaagactgaaagagtagaaga

SEQ ID NO: 77002 - DNA, 120 bp, Artificial Sequence
  ENSG00000080166_3 (sequence is synthesized)
taaggagaaaagtacgacagagacaaggaaagtaagagagagagagagctctcccaattataaagccatgagccccctttggtgggggtttctgctcagttgcttgggctgcaaaatcct

SEQ ID NO: 77003 - DNA, 120 bp, Artificial Sequence
  ENSG00000080166_4 (sequence is synthesized)
gccaggagcccagggtcagttcccccgagtctgcatgacggtggacagcctagtgaacaaggagtgctgcccacgcctgggtgcagagtcggccaatgtctgtggctctcagcaaggccg

SEQ ID NO: 77004 - DNA, 120 bp, Artificial Sequence
  ENSG00000080166_5 (sequence is synthesized)
ggggcagtgcacagaggtgcgagccgacacaaggccctggagtggtccctacatcctacgaaaccaggatgaccgtgagctgtggccaagaaaattcttccaccggacctgcaagtgcac

SEQ ID NO: 77005 - DNA, 120 bp, Artificial Sequence
  ENSG00000080166_6 (sequence is synthesized)
aggaaactttgccggctataattgtggagactgcaagtttggctggaccggtcccaactgcgagcggaagaaaccaccagtgattcggcagaacatccattccttgagtcctcaggaaag

SEQ ID NO: 77006 - DNA, 120 bp, Artificial Sequence
  ENSG00000080166_7 (sequence is synthesized)
agagcagttcttgggcgccttagatctcgcgaagaagagagtacaccccgactacgtgatcaccacacaacactggctgggcctgcttgggcccaatggaacccagccgcagtttgccaa

SEQ ID NO: 77007 - DNA, 120 bp, Artificial Sequence
  ENSG00000080166_8 (sequence is synthesized)
ctgcagtgtttatgatttttttgtgtggctccattattattctgttagagatacattattaggaccaggacgcccctacagggccatagatttctcacatcaaggacctgcatttgttac

SEQ ID NO: 77008 - DNA, 120 bp, Artificial Sequence
  ENSG00000080166_9 (sequence is synthesized)
ctggcaccggtaccatttgttgtgtctggaaagagatctccagcgactcattggcaatgagtcttttgctttgccctactggaactttgccactgggaggaacgagtgtgatgtgtgtac

SEQ ID NO: 77009 - DNA, 120 bp, Artificial Sequence
  ENSG00000080166_10 (sequence is synthesized)
agaccagctgtttggggcagcgagaccagacgatccgactctgattagtcggaactcaagattctccagctgggaaactgtctgtgatagcttggatgactacaaccacctggtcacctt

SEQ ID NO: 77010 - DNA, 120 bp, Artificial Sequence
  ENSG00000080166_11 (sequence is synthesized)
gtgcaatggaacctatgaaggtttgctgagaagaaatcaaatgggaagaaacagcatgaaattgccaaccttaaaagacatacgagattgcctgtctctccagaagtttgacaatcctcc

SEQ ID NO: 77011 - DNA, 120 bp, Artificial Sequence
  ENSG00000080166_12 (sequence is synthesized)
cttcttccagaactctaccttcagtttcaggaatgctttggaagggtttgataaagcagatgggactctggattctcaagtgatgagccttcataatttggttcattccttcctgaacgg

SEQ ID NO: 77012 - DNA, 120 bp, Artificial Sequence
  ENSG00000080166_13 (sequence is synthesized)
gacaaacgctttgccacattcagccgccaatgatcccatttttgtggttcttcattcctttactgatgccatctttgatgagtggatgaaaagatttaatcctcctgcagatgcctggcc

SEQ ID NO: 77013 - DNA, 120 bp, Artificial Sequence
  ENSG00000080166_14 (sequence is synthesized)
tcaggagctggcccctattggtcacaatcggatgtacaacatggttcctttcttccctccagtgactaatgaagaactctttttaacctcagaccaacttggctacagctatgccatcga

SEQ ID NO: 77014 - DNA, 120 bp, Artificial Sequence
  ENSG00000080166_15 (sequence is synthesized)
tctgccagtttcagttgaagaaactccaggttggcccacaactctcttagtagtcatgggaacactggtggctttggttggtctttttgtgctgttggcttttcttcaatatagaagact

SEQ ID NO: 77015 - DNA, 120 bp, Artificial Sequence
  ENSG00000080166_16 (sequence is synthesized)
tcgaaaaggatatacacccctaatggagacacatttaagcagcaagagatacacagaagaagcctagggtgctcatgccttacctaagagaagaggctggccaagccacagttctgacgc

SEQ ID NO: 77016 - DNA, 120 bp, Artificial Sequence
  ENSG00000080166_17 (sequence is synthesized)
tgacaataaaggaactaatcctcactgttccttcttgagttgaagatctttgacataggttcttctatagtgatgatgatctcattcagaagatgcttagctgtagtttccgctttgctt

SEQ ID NO: 77017 - DNA, 120 bp, Artificial Sequence
  ENSG00000080166_18 (sequence is synthesized)
gcttgtttaacaaacccaactaaagtgcttgaggctacctctaccttcaaataaagatagacctgacaatttgtgatatctaataataaccccccccccaatattgattaagcctcctcc

SEQ ID NO: 77018 - DNA, 120 bp, Artificial Sequence
  ENSG00000080166_19 (sequence is synthesized)
ttttctgaaagcatttaaaaaaaaacaaaaaaaatcccaaaacattgatccaggggagtcatttaaatttgcaggtcagtgcaatgtgagacctggccaagaccatacatcaatctttct

SEQ ID NO: 77019 - DNA, 120 bp, Artificial Sequence
  ENSG00000080166_20 (sequence is synthesized)
tagccccagtgtctttattggtaatgccatggaggtgggagttggtaggtgctagatgagtctccaagatcccttttagctataaacatctctgcttctaggcaccctcctgattatctt

SEQ ID NO: 77020 - DNA, 120 bp, Artificial Sequence
  ENSG00000080166_21 (sequence is synthesized)
ttcctctccagcttagaagatgagaataagccttgttttctttacaggatggaaaatgactaaatgaaggatcaattccactctattgtgtaaactagattttacggattttacttaaaa

SEQ ID NO: 77021 - DNA, 120 bp, Artificial Sequence
  ENSG00000080166_22 (sequence is synthesized)
tctgcagttttaaacagtagacctatattacaggattcaatagctggatacacattgattctatagtgataaatagagaagataataaaattatagagtttcctggttagttgatatgct

SEQ ID NO: 77022 - DNA, 120 bp, Artificial Sequence
  ENSG00000080166_23 (sequence is synthesized)
actgtaaacctattaacaaatacagaattactctttccaaggaaggctgactgaaggctggtgaggctgtaaacctgaacatgagacaatttgacttgagtcccattactctgaggtctc

SEQ ID NO: 77023 - DNA, 120 bp, Artificial Sequence
  ENSG00000080166_24 (sequence is synthesized)
tttggctgatcctctaccaatttctttactaggtagcctcagatgaaaaattattcccacataatgcactgggcttatttttaagcattgatgttagattgattaatgttgccgaatact

SEQ ID NO: 77024 - DNA, 120 bp, Artificial Sequence
  ENSG00000080166_25 (sequence is synthesized)
cacagttacttatgaatgctgatcaattaagtcttatcatttgaaagcaaaccatctgtacaaaacatgacaattcagaattaagtggttatattctgctatgcaatcatcagatcatga

SEQ ID NO: 77025 - DNA, 120 bp, Artificial Sequence
  ENSG00000080166_26 (sequence is synthesized)
ggaataagaatgagacaatctttactacgatgttcagacttatcatgatggaccccacttcagagaagttaatggctcttgagatttccaggcaaatttcatctgctcatatctggtttc

SEQ ID NO: 77026 - DNA, 120 bp, Artificial Sequence
  ENSG00000080166_27 (sequence is synthesized)
tgtgcatcaggagtgagactgaagttctagggcgtggcttgtctgtcgaggcccctctctactggaatgaatgaatgtaaagaatgggtgttaagaggtccctggagctgccttcaacat

SEQ ID NO: 77027 - DNA, 120 bp, Artificial Sequence
  ENSG00000080166_28 (sequence is synthesized)
aaggggtcctagagggtgcaagactcatcaagaaccagtttaccccatgcaaaaggactgctaaagccagagaaatggacaaagcccagttggaactgaatttgaatctcataaagctac

SEQ ID NO: 77028 - DNA, 120 bp, Artificial Sequence
  ENSG00000080166_29 (sequence is synthesized)
aggtgcatctgagagcaggctcagtggtgaagatcaagatagcccggtaaagccctgcttgggctttttagcctcagccacatggatacctctcagttcctgccattaacaatattcatg

SEQ ID NO: 77029 - DNA, 120 bp, Artificial Sequence
  ENSG00000080166_30 (sequence is synthesized)
gaaaatacagcactgtgtctttcacatgctccactctggaaggtttatgctctgagctcaggatagttggggaacacatttttaaatcttggttttaaacaaaaagagaaatttattaaa

SEQ ID NO: 77030 - DNA, 120 bp, Artificial Sequence
  ENSG00000080166_31 (sequence is synthesized)
atggagatataattgtgcatggtacatatatttctgaaaagttatgtataaatcaattatgttaaaagcgccagaagttactttttataagtgaactattacgaataatttcataaagca

SEQ ID NO: 77031 - DNA, 120 bp, Artificial Sequence
  ENSG00000080166_32 (sequence is synthesized)
aataaccacctctagcttatctgtcaggtatatcagaattctcatatatcatagtctcataagacttggttaaagcagatctatcttaggtaggaaaaaatagtaatcgattatacttag

SEQ ID NO: 77032 - DNA, 120 bp, Artificial Sequence
  ENSG00000080166_33 (sequence is synthesized)
ctgcttttatctgtagtgtgggtgactttttataactattatgttttataatgtcttcctgagagaatttcctaattttgtagttcatataagagaaatacaattttctagcattttctg

SEQ ID NO: 77033 - DNA, 120 bp, Artificial Sequence
  ENSG00000080166_34 (sequence is synthesized)
accttacaataaatcaattatgaatgcattttaacaaatattaaggtaggataaaccaacagaataaaaagttggtatttacttacattgaatatcatgcaaataaactcagaaaatgtc

SEQ ID NO: 77034 - DNA, 120 bp, Artificial Sequence
  ENSG00000080166_35 (sequence is synthesized)
accaaatactgtgggctatatttctcaatgatagggggaagaattcaaccttggagaaaatgaccagatcactttactgcttatatcttcagtattagaaaaactgcatgtatgatttta

SEQ ID NO: 77035 - DNA, 120 bp, Artificial Sequence
  ENSG00000080166_36 (sequence is synthesized)
atagaaatgctttttataaagctaacattcagaaatgggataaaatgcaataacatctttcctttgtgcattaaattcccttctaattctaaaattgacatttgtatcttgcttaggatt

SEQ ID NO: 77036 - DNA, 120 bp, Artificial Sequence
  ENSG00000080166_37 (sequence is synthesized)
attgttaattataatacttttaatgactagttttaatctcattattaagaagtagaaaacttactaaaaaggaaactaaaaataaatgttgttttgcagattattgtttgtcttttgagg

SEQ ID NO: 77037 - DNA, 120 bp, Artificial Sequence
  ENSG00000080166_38 (sequence is synthesized)
gaggattattgttttttaagtagtgtgcatcaattcccatcttttgggcactcagcatgtatattgaaatatatatacatgtaaaatatataataacaacctcagtctgaaaaataatct

SEQ ID NO: 77038 - DNA, 120 bp, Artificial Sequence
  ENSG00000080166_39 (sequence is synthesized)
cttaaactgatatgctattttctggtgagtttccaaacaattgctattttctgaatctgtttgaacaggtaggaaaaggagagccagcctttcctcaggtgaagttacttttgatattcc

SEQ ID NO: 77039 - DNA, 120 bp, Artificial Sequence
  ENSG00000080166_40 (sequence is synthesized)
ccacagtttagtgactaatcctggggtggaagcaggtggctgcttcaagtgactgaccagggaagagaggtcctgcagtagctaacttggtgatctcccagataagccttcaagatgggt

SEQ ID NO: 77040 - DNA, 120 bp, Artificial Sequence
  ENSG00000080166_41 (sequence is synthesized)
caatttgttggagactctaaggttgaagctcttcctatttctatagtgccttacttatcctgagtattttataaatattctttgaatgaataagtgaatgaataaactaatttcaaagta

SEQ ID NO: 77041 - DNA, 120 bp, Artificial Sequence
  ENSG00000080166_42 (sequence is synthesized)
atttttgtgaaaagagaaagcgaccaaggaactcccttccctgcatgtgctggtaaccatgagcctgggaggctctactcagactttcttttgctggcataacagcaagaattcaagtga

SEQ ID NO: 77042 - DNA, 120 bp, Artificial Sequence
  ENSG00000080166_43 (sequence is synthesized)
agtcaaaggaaagccatagacaccaatgtattccaggagggcttgactccatcctagattcttcccatagcagttcttgaatgcatggctgcacgtgcacctctccccatttttggggtc

SEQ ID NO: 77043 - DNA, 120 bp, Artificial Sequence
  ENSG00000080166_44 (sequence is synthesized)
cttcattggggtcaggatgaatgaagacatcaagctcactttgaagagcaagattctgatttggacaggttcatccttctgctcatcacttgttccccttcaattgataccctctcgttg

SEQ ID NO: 77044 - DNA, 120 bp, Artificial Sequence
  ENSG00000080166_45 (sequence is synthesized)
gatttttttgtgtggctccattattattctgttagagatacattattaggtgggttttttccttggctgaaggtatattattacaggtttgtgattgggttgagggtatggcagtgggaa

SEQ ID NO: 77045 - DNA, 120 bp, Artificial Sequence
  ENSG00000080166_46 (sequence is synthesized)
gtaatttcatgcaagttaattaagagagcaaccacaaggcagccttaggtttatgaaagtcgtagaattatcaaataccgcctggagttagaaggaagcagtttcttcctgtgcattgga

SEQ ID NO: 77046 - DNA, 120 bp, Artificial Sequence
  ENSG00000080166_47 (sequence is synthesized)
tgcagacactttaaatgttctctcctctaccgtatgttcttggttcaaagtgtaaacttttctctgtgaagctgttaatcatcaaagatgtgagttggtgaggtggaggcgaattccttt

SEQ ID NO: 77047 - DNA, 120 bp, Artificial Sequence
  ENSG00000080166_48 (sequence is synthesized)
tgatttcagaagaaaatatttgcgaatctggccatggaagccctctctgaccttttctccaaattagaggaattaactgaacatgtgctaaggcacatgaagcttctttgtgcggaatta

SEQ ID NO: 77048 - DNA, 120 bp, Artificial Sequence
  ENSG00000080166_49 (sequence is synthesized)
gagtgctcatgttgggagtgggcatcttgttaaactcacaggatagatcaactttggatggattttagacagtctatcacatgatagactttcagataatcatttatggtactcctgcat

SEQ ID NO: 77049 - DNA, 120 bp, Artificial Sequence
  ENSG00000080166_50 (sequence is synthesized)
ggtccggaatccccaggtttcttggagctttattgtcaaggaaaagtacaagcttagccacagcaatgtagagtttctgctgcttagctctttgcaacacagtcatgttggatgcttgag

SEQ ID NO: 77050 - DNA, 120 bp, Artificial Sequence
  ENSG00000080166_51 (sequence is synthesized)
acatcagggacagcagtgcttttctcagtgtgagtcttttaaaacttgccttacaggtaagcatctgtctgtctttatcgatagataaggaggctcttttggctataaacctttatagtt

SEQ ID NO: 77051 - DNA, 120 bp, Artificial Sequence
  ENSG00000080166_52 (sequence is synthesized)
ttcctgttatcactctgaggaattattgctttatgagagagtactctctcaagaggaaaagaaagtcctagtttctggtcatagctacgaattaaatttatattcacgtctgttcagctc

SEQ ID NO: 77052 - DNA, 120 bp, Artificial Sequence
  ENSG00000080166_53 (sequence is synthesized)
tctgaagttgttataggtattttggacaagaactaaagttagctaaagtttccacataaccatcaaagctgttatgaaaaagggaagaaggatggaccaggcagtaaggaggtcattaaa

SEQ ID NO: 77053 - DNA, 120 bp, Artificial Sequence
  ENSG00000080166_54 (sequence is synthesized)
tcgtccagagcttttcactaaaattggcagttccagtgtccagcctaaatggcttgaatgtatttttctctcttctggtctcagcgaacatgcttgtcagctagtagttataacagattg

SEQ ID NO: 77054 - DNA, 120 bp, Artificial Sequence
  ENSG00000080166_55 (sequence is synthesized)
atgggtgaggcaaaatacgcgaaagttctttttggttacataaatactgcattaggactaagtgcagttgaagttacaatattattaattaatccctcccttttaaatttatatctttgt

SEQ ID NO: 77055 - DNA, 120 bp, Artificial Sequence
  ENSG00000080166_56 (sequence is synthesized)
gaagcataggttagcaaatgcctttaaaaaatatatttcctttaggtcttaatgatctattcttttggatagtctatttcacctgaatggattgttgcttacaaattaaatatgtatcag

SEQ ID NO: 77056 - DNA, 120 bp, Artificial Sequence
  ENSG00000080166_57 (sequence is synthesized)
gggctcccaatcctgaaagtcacctgaatttcctggatctctgctagaaatcaaccttttaagagataaaggagggtttatcctaaaagtactagttacttctgaaattcatgtcattac

SEQ ID NO: 77057 - DNA, 120 bp, Artificial Sequence
  ENSG00000080166_58 (sequence is synthesized)
tattgcttttggagatataaataacaacaaaacttttttttcttactactataaaacatcatggacttattggctctatagatacagcccaggtaagatttaacattttaaaaaattcta

SEQ ID NO: 77058 - DNA, 120 bp, Artificial Sequence
  ENSG00000080166_59 (sequence is synthesized)
acatggaggagaagtcactttatagtgctgtttcttatgcatgtggtgtcctatttacatgtttctaaaaacagttttcctctgggaggtgggatttcaaaaattcaaagctctttaatt

SEQ ID NO: 77059 - DNA, 120 bp, Artificial Sequence
  ENSG00000080189_0 (sequence is synthesized)
gagattccggcctggagctcccagggccgaggtcactttggtggcagttcatggagaatagcttgaggtgacaagacagcagacacgacgtgggtctctgggactgcctgtgccgttgtg

SEQ ID NO: 77060 - DNA, 120 bp, Artificial Sequence
  ENSG00000080189_1 (sequence is synthesized)
ggcagcccctccagagccctgagtcacgcagccttcagaggcacccatggctacgagaagcacagtctctgcctgaggctccagagcggccctttttccccagcagcagaccttgggacc

SEQ ID NO: 77061 - DNA, 120 bp, Artificial Sequence
  ENSG00000080189_2 (sequence is synthesized)
tgtgagcgctgcatccaattaaccatgggaagggtcagcaccagccaccagccccttaggtgaggactctgcctggggctctgctgatggttccgaatcatggagctgcagagagctcct

SEQ ID NO: 77062 - DNA, 120 bp, Artificial Sequence
  ENSG00000080189_3 (sequence is synthesized)
ccagcctggagacgttcttggtgaaagctgtggtctaactccaccggctcttcctgcacattgtattcaagaggggtgcctgcccccgctgactcaggagctccggtgctgcagccgcca

SEQ ID NO: 77063 - DNA, 120 bp, Artificial Sequence
  ENSG00000080189_4 (sequence is synthesized)
cgaatggggaggtgggccctcgatgtggcctttttgtggaaggcggtgttgaccctggggctggtgcttctctactactgcttctccatcggcatcaccttctacaacaagtggctgaca

SEQ ID NO: 77064 - DNA, 120 bp, Artificial Sequence
  ENSG00000080189_5 (sequence is synthesized)
aagagcttccatttccccctcttcatgacgatgctgcacctggccgtgatcttcctcttctccgccctgtccagggcgctggttcagtgctccagccacagggcccgtgtggtgctgagc

SEQ ID NO: 77065 - DNA, 120 bp, Artificial Sequence
  ENSG00000080189_6 (sequence is synthesized)
tgggccgactacctcagaagagtggctcccacagctctggcgacggcgcttgacgtgggcttgtccaactggagcttcctgtatgtcaccgtctcgctgtacacaatgaccaaatcctca

SEQ ID NO: 77066 - DNA, 120 bp, Artificial Sequence
  ENSG00000080189_7 (sequence is synthesized)
gctgtcctcttcatcttgatcttctctctgatcttcaagctggaggagctgcgcgcggcactggtcctggtggtcctcctcatcgccgggggtctcttcatgttcacctacaagtccaca

SEQ ID NO: 77067 - DNA, 120 bp, Artificial Sequence
  ENSG00000080189_8 (sequence is synthesized)
cagttcaacgtggagggcttcgccttggtgctgggggcctcgttcatcggtggcattcgctggaccctcacccagatgctcctgcagaaggctgaactcggcctccagaatcccatcgac

SEQ ID NO: 77068 - DNA, 120 bp, Artificial Sequence
  ENSG00000080189_9 (sequence is synthesized)
accatgttccacctgcagccactcatgttcctggggctcttccctctctttgctgtatttgaaggtctccatttgtccacatctgagaaaatcttccgtttccaggacacagggctgctc

SEQ ID NO: 77069 - DNA, 120 bp, Artificial Sequence
  ENSG00000080189_10 (sequence is synthesized)
tttgggcttctctgagttcctcctggtctccagaacctccagcctcactctctccattgccggcatttttaaggaagtctgcactttgctgttggcagctcatctgctgggcgatcagat

SEQ ID NO: 77070 - DNA, 120 bp, Artificial Sequence
  ENSG00000080189_11 (sequence is synthesized)
cagcctcctgaactggctgggcttcgccctctgcctctcgggaatatccctccacgttgccctcaaagccctgcattccagaggtgatggtggccccaaggccttgaaggggctgggctc

SEQ ID NO: 77071 - DNA, 120 bp, Artificial Sequence
  ENSG00000080189_12 (sequence is synthesized)
cagccccgacctggagctgctgctccggagcagccagcgggaggaaggtgacaatgaggaggaggagtactttgtggcccaggggcagcagtgaccagccagggcaaatggcttagaagc

SEQ ID NO: 77072 - DNA, 120 bp, Artificial Sequence
  ENSG00000080189_13 (sequence is synthesized)
aggccactccccagcctgctgccagcactcactgtgctcaagccgccagggctcatcatggtagctgggagctgtggacgggagtcaccaggtggtggggccaagccagggactcatgac

SEQ ID NO: 77073 - DNA, 120 bp, Artificial Sequence
  ENSG00000080189_14 (sequence is synthesized)
ttttgcccctcccttcagagcctggtcacacaaggggcgagcaccaggccagcctgggactggccagagctgggcccaagctgcgctggaatcgcagcaggagaggggagtgggctggtt

SEQ ID NO: 77074 - DNA, 120 bp, Artificial Sequence
  ENSG00000080189_15 (sequence is synthesized)
cttcccaccacttcccaggctctgacagccgagactcatttccaaggcacagcagctttctaaagggactgagtttggactgggttttggacctccaggggctggagcttcatcacctgg

SEQ ID NO: 77075 - DNA, 120 bp, Artificial Sequence
  ENSG00000080189_16 (sequence is synthesized)
gcagtgtcttttctcagagagcaggtttctttatagtttggaaataaatggttcacggtccactggccgccttgtgttgctggagacgtgggggcagggaggggacagtgtgggcctggc

SEQ ID NO: 77076 - DNA, 120 bp, Artificial Sequence
  ENSG00000080189_17 (sequence is synthesized)
ctctcctttcctttccctgcctggagccttcttcaaatgtctggtcttaagccaggcctccttcattttctcgctcctgttagaacaccagtcccctccccagtggggccccactgcacc

SEQ ID NO: 77077 - DNA, 120 bp, Artificial Sequence
  ENSG00000080189_18 (sequence is synthesized)
tgctggcaggaaataaatgaatgtttactgagtactgcattctggagaccttacatgttttcacagcctagtttgaatactggctttgtcactagctgtgtgaccctaagcaaatgacct

SEQ ID NO: 77078 - DNA, 120 bp, Artificial Sequence
  ENSG00000080189_19 (sequence is synthesized)
aacctgtctgtgccgtagttttttaatctgtgaaatggggataatgtctatctcagagtccttttgaagattgagtcattattagtaacagattaaatgttatataagcatttcttttaa

SEQ ID NO: 77079 - DNA, 120 bp, Artificial Sequence
  ENSG00000080189_20 (sequence is synthesized)
tttaacaactaagagactaaagcctggaaaagataaagagctgcttaagtggccgggctgaggttcacatccaagtctgtgtacgtctgtgtgtgcacgtgctgcacgtgacatccacac

SEQ ID NO: 77080 - DNA, 120 bp, Artificial Sequence
  ENSG00000080189_21 (sequence is synthesized)
agcctcctggaacttcatgggcccctggggcttgggctttccactcctccttggccaagtcccacgtcttctctagactgcaggcctctctcaaatgaggaagggagggggcaagacccc

SEQ ID NO: 77081 - DNA, 120 bp, Artificial Sequence
  ENSG00000080189_22 (sequence is synthesized)
agctctgatgtgctgtggactgagtctactcctgtaaactggttcccgggccatgggagacccccccggcccttggggacaaagctttccaggcgaagtgctcctaggcactcacagcag

SEQ ID NO: 77082 - DNA, 120 bp, Artificial Sequence
  ENSG00000080189_23 (sequence is synthesized)
gtggcgccattgcaccacactggctcccagagcccagctgccctgccacggctatccagacaccggcagaaaaggggtgcttggaagaggacagtgggtatccatgggtggggacaagga

SEQ ID NO: 77083 - DNA, 120 bp, Artificial Sequence
  ENSG00000080189_24 (sequence is synthesized)
tagggcttgttctaaaattgtttccatcaggttggagtcactaaagctcgttcggttaagcccaggagaactttaatactttaaaaatgggtctgcaaacttcctgtaaagggccagata

SEQ ID NO: 77084 - DNA, 120 bp, Artificial Sequence
  ENSG00000080189_25 (sequence is synthesized)
acaaaagcagccatagatgacacagacccagggtgtggctgtcccagtgaaaccccatttacaaaagtaggatccagcttgctggctgaagtttaccagcaggagaaccctcaagaattc

SEQ ID NO: 77085 - DNA, 120 bp, Artificial Sequence
  ENSG00000080189_26 (sequence is synthesized)
tcgagtccaacttccacttctgcagcaggagactgaagccaggagggggcggtgactagcccgaggccctcagagcctccgtgctcaggagtcagaccgagatctgcctctaattcagat

SEQ ID NO: 77086 - DNA, 120 bp, Artificial Sequence
  ENSG00000080189_27 (sequence is synthesized)
tcccagcacagactcagcaggcggaggtggagcaccaagggcgcttggaagcggcctcttatctggctcctgcacctctgccccccttggattccgcaagctcagaggccaagattaaag

SEQ ID NO: 77087 - DNA, 120 bp, Artificial Sequence
  ENSG00000080189_28 (sequence is synthesized)
gaggctcgtgctccagctggatgatgtgggaagagccagccaaggaggggggccagggcctcctccgtcttagaggctgcttgggatgcaggctgcttgggcggcagggggagtctgcca

SEQ ID NO: 77088 - DNA, 120 bp, Artificial Sequence
  ENSG00000080189_29 (sequence is synthesized)
gagccccgctggctcaggtggatgagagcttcctgtctgctcccccactgcccgcctcccagcacagggagcaagcgttgctgtctggtgcagtaattacaaggtgcagagcgggggccc

SEQ ID NO: 77089 - DNA, 120 bp, Artificial Sequence
  ENSG00000080189_30 (sequence is synthesized)
ttacctcgcacatgttgggttcaatgacagcccttcatttagcagcaattaccagctgaacctaaaggagggctccctctcctcccccacccagcccacccaatcgcctggcctcccagg

SEQ ID NO: 77090 - DNA, 120 bp, Artificial Sequence
  ENSG00000080189_31 (sequence is synthesized)
ccagacagcgtccacctcggcattgagccctagaaccacccatgctgtctgcagccattgcatctcagggctgcagcatcaccatggcaacgcggtgcttgcacaggttgaggggaagct

SEQ ID NO: 77091 - DNA, 120 bp, Artificial Sequence
  ENSG00000080189_32 (sequence is synthesized)
gaggatgtgacttgtctctccaaggctgtggtgtctgtccccacacagccccagctccgaggcttctgcagaaggggcggagagaggactgacctgcaggttcgagtttcaagtgcttac

SEQ ID NO: 77092 - DNA, 120 bp, Artificial Sequence
  ENSG00000080189_33 (sequence is synthesized)
ctgcccaccacctctcccaggggcccacagtggaaggaaggttaatggctccaatatgtgaggacgtccacagttggtgttgtggtggcggtgagaatgggctgcagtttgcctgtggga

SEQ ID NO: 77093 - DNA, 120 bp, Artificial Sequence
  ENSG00000080189_34 (sequence is synthesized)
gggacctgagccatcaggcagggcccggcataccttcatcttcactccggtacccttttctgccttgagggctcaagggattgtctccatctgtttctgctttatcctgctgtgaaaaac

SEQ ID NO: 77094 - DNA, 120 bp, Artificial Sequence
  ENSG00000080189_35 (sequence is synthesized)
ctgaaaatcccagtggcttgagagtagttacatggcaccaagagaattctcctcatggtacttgctgcagcttcctgcatcacacactagtgatggactgagggtggggactcccaggcc

SEQ ID NO: 77095 - DNA, 120 bp, Artificial Sequence
  ENSG00000080189_36 (sequence is synthesized)
atccatttaggtcgacagcattcagtgagtactggctacatggcagacactgccggacttggggacagagacattcatttttggagtcagccttcctcccagcccaggaaagtgatgagg

SEQ ID NO: 77096 - DNA, 120 bp, Artificial Sequence
  ENSG00000080189_37 (sequence is synthesized)
cagtgggctggggaatggggaagaaagaacagaaaagaccgttcactgggcaccatctaggcctttgccataggttatttaatctgtaacagcccggtgcagtaaggactgattgtattt

SEQ ID NO: 77097 - DNA, 120 bp, Artificial Sequence
  ENSG00000080189_38 (sequence is synthesized)
ctttcctagctgtggaaactaagttccaagtggttaagcataacgatggctaaggatacaacctgcagacgccgtagagtgagagacgtgtctctctttgctgtgattagctgcgtgctt

SEQ ID NO: 77098 - DNA, 120 bp, Artificial Sequence
  ENSG00000080189_39 (sequence is synthesized)
ttggacacgttgctgatcttctccgagcctgtttccttgtctctacagaaggaataataatacatacacctgaaggaagctactgtgaaggtgaaataaaataatgtaggtaaagcacac

SEQ ID NO: 77099 - DNA, 120 bp, Artificial Sequence
  ENSG00000080189_40 (sequence is synthesized)
agtgctcggctcatagtcatcaccactcaggaaatggagcaggaaggacgtcacataactcgcccagatgagaggaggagccagcgttggagctctggccttccaagatccccatctctg

SEQ ID NO: 77100 - DNA, 120 bp, Artificial Sequence
  ENSG00000080189_41 (sequence is synthesized)
ctctggccttccaagatccccatctctgctgcagtgtctggtactgagcatgcacttaacagatgcttttttttttttttttttgacatggagtttttgctcttattgcccaggctggag

SEQ ID NO: 77101 - DNA, 120 bp, Artificial Sequence
  ENSG00000080189_42 (sequence is synthesized)
ctgagatgcctttcagagttgtcccaagttggggtgagaggttcatggctttacgccacagcattttttgtatttttagtattttgtatttttgtatttcagtacatgttggccaggccg

SEQ ID NO: 77102 - DNA, 75 bp, Artificial Sequence
  ENSG00000080189_43 (sequence is synthesized)
cagatgcttgttttttgaaggaatttccactagcggaaactaaagtggggattttacaggttctaacttccaaat

SEQ ID NO: 77103 - DNA, 120 bp, Artificial Sequence
  ENSG00000080189_44 (sequence is synthesized)
gaaactaaagtggggattttacaggttctaacttccaaatgacttgccctgtaagaaggggctgctccctcccaccaccgcccattcctgccagcctccggtctcccagccatcccatgg

SEQ ID NO: 77104 - DNA, 120 bp, Artificial Sequence
  ENSG00000080189_45 (sequence is synthesized)
agttttcaccctaactgcacagccctgacatcagccacgtcccttcacccctgctttgtagtaaccaattagcttaacgtctgttcccatggttatttagtttcgttggcaactaacata

SEQ ID NO: 77105 - DNA, 120 bp, Artificial Sequence
  ENSG00000080189_46 (sequence is synthesized)
cttcccagaaacaggccagcatctcccagtcccaccaccatcctgctggtggggccgtcctcttctggatgtcagatgagaactctcctgctggggaacaacagaaggacagaacataga

SEQ ID NO: 77106 - DNA, 120 bp, Artificial Sequence
  ENSG00000080189_47 (sequence is synthesized)
accagaggaaaatgcattcaaatgcattccatcagtgtttctggacagtctacaatgtgccctggccggtgatcgctgctggagatatcgaagtcattaaaacatggtctctgtcctcaa

SEQ ID NO: 77107 - DNA, 120 bp, Artificial Sequence
  ENSG00000080189_48 (sequence is synthesized)
cggcgcactcccagaggctggggggccggggctggagaagggaagcgggctccccacccgggatctgcgcgggttgacatggggcacgccacgcccctgcccctccccgggcctcagttt

SEQ ID NO: 77108 - DNA, 120 bp, Artificial Sequence
  ENSG00000080189_49 (sequence is synthesized)
ccccgggcctcagtttcgccgtctgtggagggggcaggggtctccaagcgccctcctgcaaggcacctgccggacgccggctcatctggtatttcctgagcacctgcgacgtcctgggtg

SEQ ID NO: 77109 - DNA, 120 bp, Artificial Sequence
  ENSG00000080189_50 (sequence is synthesized)
attttatcagtaaggaaactgaggtccagaaaggggacacatctcagcccaagtcccacagctctgtactagcaagacctagattaaaatgaacgtttgtagggatagaattttgtccct

SEQ ID NO: 77110 - DNA, 120 bp, Artificial Sequence
  ENSG00000080189_51 (sequence is synthesized)
gtttgtaggtgaactggctgaaatgtagaccaaggagttccctgagtgggctggggcactgttggtccttcgtcacttggtagccgccctaccttctttagcccagtagttaccacagct

SEQ ID NO: 77111 - DNA, 120 bp, Artificial Sequence
  ENSG00000080189_52 (sequence is synthesized)
ccaaagaccccatgaagtcagcagccatgagcccctccccacagaccagtaagggaatactgtccaaaggtgcagggcacttccatccgtctttccatgcagggccacccccctctactt

SEQ ID NO: 77112 - DNA, 120 bp, Artificial Sequence
  ENSG00000080189_53 (sequence is synthesized)
caccccagaggctcagacgagccctccccatcattccgctaggatccccatcatcccactaggatctccatcatcccgctaggatctccttcatcccactgggatctccttcatcccgct

SEQ ID NO: 77113 - DNA, 120 bp, Artificial Sequence
  ENSG00000080189_54 (sequence is synthesized)
aggatcccatcatcatcccactaggatccccatcattccactaggatcccatcgtcatcccgctaggatcccatcgtcatcccgctaggatcccatcgtcatcccgctaggatcccatca

SEQ ID NO: 77114 - DNA, 120 bp, Artificial Sequence
  ENSG00000080189_55 (sequence is synthesized)
tcatcccgctaggatcccatcatcccgctaggatccccatcatcccgctaggatcccatcatcctgctaggatccccatcatcccgctagggtcccatcatcccgctaggatccgcatca

SEQ ID NO: 77115 - DNA, 120 bp, Artificial Sequence
  ENSG00000080189_56 (sequence is synthesized)
tcctgctaggatctggcttgtattgcccccaggcgctctggcagccatcactgcttccctggtttccccaggtctcaggccatctgtgtgggatcactttataccttccatgctttttct

SEQ ID NO: 77116 - DNA, 120 bp, Artificial Sequence
  ENSG00000080189_57 (sequence is synthesized)
ctgggctgcagacagttagcaggtctcagtaagaactcactactacagtggaagatcttgtgtggttggcattgggctggccaaggcagcccaggacccggcctcccactctctctccct

SEQ ID NO: 77117 - DNA, 120 bp, Artificial Sequence
  ENSG00000080189_58 (sequence is synthesized)
tctgttcttctccctgtgactcttagtgattctgatgcaggaagtgtgcccggtggctctgctgccgtcactcctctaggaagatgtgggggtcatctccagagtgggtgggtggggcct

SEQ ID NO: 77118 - DNA, 120 bp, Artificial Sequence
  ENSG00000080189_59 (sequence is synthesized)
gggtgactcagcacacatgcaaatcagagcaaaccaagaaaaccacgactgggcctgtaactgtggtctctctctatcccaaggtgatggtggccccaaggccttgaaggggctgggctc

SEQ ID NO: 77119 - DNA, 120 bp, Artificial Sequence
  ENSG00000080200_0 (sequence is synthesized)
ggcgtgaggagctgccgcgcgaggagcgcgtcgcgtccgcacttctcctgcccgagagagactgagccgcgctggcagctcgcgtcgagtcggtctgccctagccgcatcccgcggcgcc

SEQ ID NO: 77120 - DNA, 120 bp, Artificial Sequence
  ENSG00000080200_1 (sequence is synthesized)
cggtcgggctccgggcaccaggcaacacctaggccgttcccttcagacagccccgggccagcggccccctcgggaaatgtccagcggccgcagaaggggcagcgccccctggcacagctt

SEQ ID NO: 77121 - DNA, 120 bp, Artificial Sequence
  ENSG00000080200_2 (sequence is synthesized)
ctcccggttcttcgctccccgaagtccttcccgggacaaggaagaggaagaggaggagaggccggggacgagcccgcctccagctccaggccggtccgctgccagtgttgaaaatgagcc

SEQ ID NO: 77122 - DNA, 120 bp, Artificial Sequence
  ENSG00000080200_3 (sequence is synthesized)
catgagcacaagtcagaaaaaggaaaatgtactttcatcagaagcagtaaagattcgccaaagtgaggacaaaaggaaccatgctgagaagccagtcactcttccagtgcaggaagatcc

SEQ ID NO: 77123 - DNA, 120 bp, Artificial Sequence
  ENSG00000080200_4 (sequence is synthesized)
caaaaaggcatatgatctttccagttccacttcagataccaaaataggagaaagtgacagacagccaaaagaaagcttttttcagtttcttggtaacttattcaatatctcggggaaatc

SEQ ID NO: 77124 - DNA, 120 bp, Artificial Sequence
  ENSG00000080200_5 (sequence is synthesized)
atctctaggtgaagctaagcagtcttctttcaaagatgaccaggataaaactgagaaggatttacaaaatcccagtgaccatcatgaagacgggatcaaaagggagagagagattttcag

SEQ ID NO: 77125 - DNA, 120 bp, Artificial Sequence
  ENSG00000080200_6 (sequence is synthesized)
tggctccctaagaacccagacacatccaacagaagaacaagactctaactcatccgaactctcagatgctttttctttggatacaacacaagacagtgaccaagaaaccactaatttgct

SEQ ID NO: 77126 - DNA, 120 bp, Artificial Sequence
  ENSG00000080200_7 (sequence is synthesized)
aaaacaaatcgatggtaaaccagagaagccttcagtaacatatgcaacatatcgaggcccaagacacattgggaaatatttaaagcaacagacaggcttggcaactgtgaataccttgga

SEQ ID NO: 77127 - DNA, 120 bp, Artificial Sequence
  ENSG00000080200_8 (sequence is synthesized)
cagagaaaatgaaagttctgactctagtacaaacagacacattgaccctggaagtgagattgaggctggggtactgccactgttgttatcagctagtacagactcatctatgaaaggaaa

SEQ ID NO: 77128 - DNA, 120 bp, Artificial Sequence
  ENSG00000080200_9 (sequence is synthesized)
tctacttgaaggcccattagaagactctgattgtagcaaaacaagtttcaacaaggaaaattctttgacaaataacccagaactgcagaatattgcctcttccaataatcttttaaataa

SEQ ID NO: 77129 - DNA, 120 bp, Artificial Sequence
  ENSG00000080200_10 (sequence is synthesized)
aaatgcttgggggagtattgagagaaataggtcatccccttcttctgtgactaactccagctacgatggagaatctgactcacagcaccatttaagttgtgaaccggtttctcagactaa

SEQ ID NO: 77130 - DNA, 120 bp, Artificial Sequence
  ENSG00000080200_11 (sequence is synthesized)
cagaaatttggtatgttcagcattgttaacaggaagtaaccatcgcaaagtcccttgcagcccagattttcagagagtaactacaacagaaaatacgataaaagaaaacagcactgtgat

SEQ ID NO: 77131 - DNA, 120 bp, Artificial Sequence
  ENSG00000080200_12 (sequence is synthesized)
gagtaataggacattggtgcaaagagaggagcttgttgagcctcagggccctgctatttctgatttctcttgtagtaaatctgatgggagtgacactactgagcaggaaagtacaaattt

SEQ ID NO: 77132 - DNA, 120 bp, Artificial Sequence
  ENSG00000080200_13 (sequence is synthesized)
gccaagtccaaataaatcaattaggcatgaacatctgcagttgccagagagtgagtgttctgacaagcaaaccatagatagctcatcaaagcaagctgccactcacaccaatatcattgc

SEQ ID NO: 77133 - DNA, 120 bp, Artificial Sequence
  ENSG00000080200_14 (sequence is synthesized)
tcttcagagacatgctgtgacagacacagaatttgtaaatgaaggaaagagattgtctgcccaagactcacagaaaaatgtggctgttagagaaatcaggcgagaaacagaaagtgcctc

SEQ ID NO: 77134 - DNA, 120 bp, Artificial Sequence
  ENSG00000080200_15 (sequence is synthesized)
agctggtgaatccatagcttcaagtcatgtaaaagctccagaagataaaattgagtcattacccaaagatactgaccaatactttgaaaccaaagccaaaaagcttgattttaggtcaca

SEQ ID NO: 77135 - DNA, 120 bp, Artificial Sequence
  ENSG00000080200_16 (sequence is synthesized)
tgataaaattcctcatattagaatgaataaaaaagacctggcctctttaaattacatcagtgaatcagcagttgtagcaagcttaggaaatgaaaatgcacctgagttgaaatttgaact

SEQ ID NO: 77136 - DNA, 120 bp, Artificial Sequence
  ENSG00000080200_17 (sequence is synthesized)
taatagaagtcacatttcagaaactcctcttgactctgagagtcctcaacaagctgaagtatcacctgatgctaaaacatctcttagccttgactgtaaaaaactaaatttcagtatttc

SEQ ID NO: 77137 - DNA, 120 bp, Artificial Sequence
  ENSG00000080200_18 (sequence is synthesized)
acctcctacctttgtttctggagttgggatgctgagcaagttggatattcctgatttaatgaatgagggttctcctgtgcccattgaaactgggaatgtcaacattgttggtatttccta

SEQ ID NO: 77138 - DNA, 120 bp, Artificial Sequence
  ENSG00000080200_19 (sequence is synthesized)
tcagcctaggaagtgtaaagaagaaaatgtgaaaaaccatgttgaggctgcaggcaggaagagtcctcctccttccttttgccttgaatatacatctgcaatttttgaattcaaagaagt

SEQ ID NO: 77139 - DNA, 120 bp, Artificial Sequence
  ENSG00000080200_20 (sequence is synthesized)
tctttctaatagtgaaaaatgccaggttcttccaggttctgaagccagtggccctcacttaactgggttggagctattgagctttgactctggaaacctctctaaggattgcagttccat

SEQ ID NO: 77140 - DNA, 120 bp, Artificial Sequence
  ENSG00000080200_21 (sequence is synthesized)
tttatctcaagaccctaatagagtagagttagtgtcttcaaacactaaagcaaatatgagcataatagagaagtctgattctctttccttggaagccaaaactgctaacattgtatcaaa

SEQ ID NO: 77141 - DNA, 120 bp, Artificial Sequence
  ENSG00000080200_22 (sequence is synthesized)
agctgaaattgatggtcagaacaatgttcttgtggagtcacattctggaagaggaaaaactatatccttgtccaaggtatctctttcaaaagtggagcccagaaacatttctcaggataa

SEQ ID NO: 77142 - DNA, 120 bp, Artificial Sequence
  ENSG00000080200_23 (sequence is synthesized)
aatgtcttcttttccattgaaaattacccatgttccagaaaagcctattttgtcagaattaacctttctagaagttgaacagggcaaacgttttcaatcaattaatcataatgagatagg

SEQ ID NO: 77143 - DNA, 120 bp, Artificial Sequence
  ENSG00000080200_24 (sequence is synthesized)
agagaaatgttcagatgctggccttaaagagaattgccaagctgagctttctcctgctgcctccaaatatgaagataagccagaaccagaggtagatgccttaggctctcctcctgctct

SEQ ID NO: 77144 - DNA, 120 bp, Artificial Sequence
  ENSG00000080200_25 (sequence is synthesized)
tcttaaaagtaatatatcttggattttaccacctattcatgatgaaaaaatcagtaggcaaatggcgcagaattgtgaagctcacacttgtgtgtttcatcaatctttggatatttgtgg

SEQ ID NO: 77145 - DNA, 120 bp, Artificial Sequence
  ENSG00000080200_26 (sequence is synthesized)
gactaaaaagatttctggtcactcagaaatggcggaactcagcttaactaatatttcccctaaattccaagaaactggcagcatgaaagtaaattcaccttttctggattctgattccag

SEQ ID NO: 77146 - DNA, 120 bp, Artificial Sequence
  ENSG00000080200_27 (sequence is synthesized)
tttggaaaaaaattcttctgcatctgaggactcaagcttccttaaagtaccttctgtgctgaaattggaaaagaaatcctcatcttacagaaagaaagagaacatccattttttaaatgg

SEQ ID NO: 77147 - DNA, 120 bp, Artificial Sequence
  ENSG00000080200_28 (sequence is synthesized)
tggtattgatagtgtgtcatcttcctctagttaccctgaagaagttagcatgatagtaaattcacataagccccaaaataatttggattctatacaagttaccaaagatctcacacatga

SEQ ID NO: 77148 - DNA, 120 bp, Artificial Sequence
  ENSG00000080200_29 (sequence is synthesized)
aggtacctctgtaactaacctgttgtaccctactacctcttatttggaatttgaaacgtctgtctcaattgggacagaagtaaccccatttcaggaacattttgggatttatactgggaa

SEQ ID NO: 77149 - DNA, 120 bp, Artificial Sequence
  ENSG00000080200_30 (sequence is synthesized)
gatatccattgatttcccaactgctgcccaatttgacaatctcgtggaagcagagactggagcagttgctgggcctgcagcgtcagttaacagctcaggccaacagtgttctgaagcctc

SEQ ID NO: 77150 - DNA, 120 bp, Artificial Sequence
  ENSG00000080200_31 (sequence is synthesized)
tgctgagcacatagaagccaggagaagagcacatgaccaacttttggacctcaaaagtagtttactcaaaaaggccgatacattgattggtgagatttttaattctgtcagggaagaact

SEQ ID NO: 77151 - DNA, 120 bp, Artificial Sequence
  ENSG00000080200_32 (sequence is synthesized)
aaaattcaaacacacagtgagtacctgccaggagcatatagccatagaaggtataatgaatctgggtaccctgaaagaagacatctctgagaaaaacccatcagaagtgacactaacaga

SEQ ID NO: 77152 - DNA, 120 bp, Artificial Sequence
  ENSG00000080200_33 (sequence is synthesized)
aatacaacagacagagggtttggaagagcaaggcatggaaaacatgtcagaagtcaaagagaagccctgtgtttcaccaacagttggtgagaagaatcttcttgttgatcctaatagtat

SEQ ID NO: 77153 - DNA, 120 bp, Artificial Sequence
  ENSG00000080200_34 (sequence is synthesized)
gaatgtatcttgtttgttagaagataaagctagggaattagtcaatgagattatttatgtagcccaagaaaaattgagaaatgatacttttgaagatactgaggatacttgggattctga

SEQ ID NO: 77154 - DNA, 120 bp, Artificial Sequence
  ENSG00000080200_35 (sequence is synthesized)
acttcaggctaatacttcaaaaattctgaacagtgatagtgttaagccacatgatgtagttagagagttcttggtttcagaacagccagtaaatcaaagcacacaaattagtgaaaataa

SEQ ID NO: 77155 - DNA, 120 bp, Artificial Sequence
  ENSG00000080200_36 (sequence is synthesized)
agtattaaatgaattcttctccctaagtaacttagctagtggcacagagtcaattaagggaggagaaattgttctctaccaaaaatccctattttctggaaatggatctggactgtctga

SEQ ID NO: 77156 - DNA, 120 bp, Artificial Sequence
  ENSG00000080200_37 (sequence is synthesized)
tagtataaatttgcaggaatcagatacggttttactagctgaagacatgtcacataaacggttagatgatagggtaaaaacacatttatttcgcagtgaggactgtaatgagacaatgga

SEQ ID NO: 77157 - DNA, 120 bp, Artificial Sequence
  ENSG00000080200_38 (sequence is synthesized)
aatagagaatgtggataataacaaaactgagacagaggacagaagaactcttgtattaaatttcaaatggcctccacttgtgaatgatgacatccatgcacctggtacatctaaaagcag

SEQ ID NO: 77158 - DNA, 120 bp, Artificial Sequence
  ENSG00000080200_39 (sequence is synthesized)
tttgtctgatagccttgtatgtatatctgaaaaaaacttgccaggacacagtaaaaacacacctcttgcaatgtcagatgtagggaaagtacacaagaaggataatgaaataaatatagg

SEQ ID NO: 77159 - DNA, 120 bp, Artificial Sequence
  ENSG00000080200_40 (sequence is synthesized)
gaaaattgaacttataccttccatgttagaaacagggaaaacaaacaaaaaggatgctgaattgaatattctgaaatatgaggcagtccctcctatgatagaaatgggaagaatacataa

SEQ ID NO: 77160 - DNA, 120 bp, Artificial Sequence
  ENSG00000080200_41 (sequence is synthesized)
aatggatgctgaattgaatgtcacgaaaactgagccaaaagctaatgtttttaaaatgggagaagtataccaaatggatgccgagagctgtattgaaaaaactgagggatcagctgtcat

SEQ ID NO: 77161 - DNA, 120 bp, Artificial Sequence
  ENSG00000080200_42 (sequence is synthesized)
tttaggaatggaaaaagcttataagatgaaggatactgaaggggatattggcaaaattgaggtgatacctatgatgccagaagtgaaaaatatccaccaaaaggatgctgaaggggatat

SEQ ID NO: 77162 - DNA, 120 bp, Artificial Sequence
  ENSG00000080200_43 (sequence is synthesized)
tgtaaagactgagatgacacctgttacagtagacatggaaaatatttaccaaacgcatgctgaaggggatattggcaagactgggacgatagccttgtcagaagtggaaaatatccacca

SEQ ID NO: 77163 - DNA, 120 bp, Artificial Sequence
  ENSG00000080200_44 (sequence is synthesized)
ggctgaagtgatgcctgtgaggttagaaatggaaaatacttacccaaaggatactgaaagagacggtggcaaaactgaggtgatgccccttgcattagaggtagtaaatacttaccaaaa

SEQ ID NO: 77164 - DNA, 120 bp, Artificial Sequence
  ENSG00000080200_45 (sequence is synthesized)
aaatgccaaaggttttaccgggaacactgaagggtctgtgttgaaaatggaagctacttaccgaaagactgctgaagaggtcattaagaatactgaaatagtaccgtgtgtgttaaaagt

SEQ ID NO: 77165 - DNA, 120 bp, Artificial Sequence
  ENSG00000080200_46 (sequence is synthesized)
gaaggaagcacacgagacagcacctgcccccttagaaatggaaaaagcatgcaagagagatgttaaagagactattggagcaactgtgtccacaccctctgtgatagaaatggaaaaaat

SEQ ID NO: 77166 - DNA, 120 bp, Artificial Sequence
  ENSG00000080200_47 (sequence is synthesized)
atccccagaagatcgtggtgagaatattgggaaacacaaagtgttacccgcagtggtagacattgagaaaatacatggaacaggactagaattgaccactaaacaaggggaggccatgct

SEQ ID NO: 77167 - DNA, 120 bp, Artificial Sequence
  ENSG00000080200_48 (sequence is synthesized)
tcctgcatttgaaagtaaaacaccacaagagtatgctgaagggagtgttgaagaaacaaaggaagagcctacagaaataaaggaaggcttgatagcacatgaaaatagacttcctacata

SEQ ID NO: 77168 - DNA, 120 bp, Artificial Sequence
  ENSG00000080200_49 (sequence is synthesized)
tttcaggggatatgaatcccctacattaagtaaggattatgagggctacccagccccagcaatgccagattttcaacctggggataccacagtaagactagacaaaagaatgtctcttac

SEQ ID NO: 77169 - DNA, 120 bp, Artificial Sequence
  ENSG00000080200_50 (sequence is synthesized)
tgcaatatatgacaagaggagagagacagattatagtgacaaaggatataatttagcttttgtttctcaagatgaacaagaaaattcttcctttactatattatacgaagagccccttca

SEQ ID NO: 77170 - DNA, 120 bp, Artificial Sequence
  ENSG00000080200_51 (sequence is synthesized)
agaggaggacaagtatgcttccgcagaagcaagacaaacacagtctgtcttgtttcatgatacgtccgctgacagcatgcctgttctggcatgtgaaaggtctgagagtagaactgacct

SEQ ID NO: 77171 - DNA, 120 bp, Artificial Sequence
  ENSG00000080200_52 (sequence is synthesized)
tgtccatcactttgaaaaaggtactaaattaggtgagacatttgatagtgatagttcagaaatgttcttatcagtggaggccaaaaggtacaaaatttatcctttagcattgtctcccat

SEQ ID NO: 77172 - DNA, 120 bp, Artificial Sequence
  ENSG00000080200_53 (sequence is synthesized)
ttatgaggatgacagctcacaggaggacattctatctagtgaggtttcacctggtcaccatggccccaggaaatcaagagacagtgaaaaccagtcctcttctgttttatcccttctcca

SEQ ID NO: 77173 - DNA, 120 bp, Artificial Sequence
  ENSG00000080200_54 (sequence is synthesized)
gtcagtgtcagaacgtttaaagatgaattttgatgaagatgacagagaggcagctgatgaggaagaagaggaggaggaggcagcagtattgcataaaggagatctgagagctggaagtgg

SEQ ID NO: 77174 - DNA, 120 bp, Artificial Sequence
  ENSG00000080200_55 (sequence is synthesized)
ggagcgtgttaccttccagttgccagatccttccatcacattttaccctgatgaccaggagagcgttggaatttctaagaattcatatgtgatgccaaatgaacctactacctccaatct

SEQ ID NO: 77175 - DNA, 120 bp, Artificial Sequence
  ENSG00000080200_56 (sequence is synthesized)
gcaagttggtctgtggccagaaaagacctcgtttctccagaaatctgaccttacttctaaactacattcttctttaaagagtgcttatcatcagtatctgcagacttcccaaagtcattc

SEQ ID NO: 77176 - DNA, 120 bp, Artificial Sequence
  ENSG00000080200_57 (sequence is synthesized)
ctcagaaaaaggagccagatttggtggaatttttcaggaaccagtgtcaaaatatttccgtgttcaagacagcccaggcagattgagcccatttatagagaatgttgacaaacaaactct

SEQ ID NO: 77177 - DNA, 120 bp, Artificial Sequence
  ENSG00000080200_58 (sequence is synthesized)
gagatgtaacccaagacctgggaagatggttatctatgatctccatgaaagtacatataaacaagaagtctactgtaatattcctgatgctacatcatggtcttttccaaatggagttct

SEQ ID NO: 77178 - DNA, 120 bp, Artificial Sequence
  ENSG00000080200_59 (sequence is synthesized)
aataaaagttgtaaggggctgctggattttatatgagaaaccacatttccgaggtcagaaatgtgtgctagaagaaggggaaaaggtgttaaatcgtgactggattcttcagaacagaag

SEQ ID NO: 77179 - DNA, 120 bp, Artificial Sequence
  ENSG00000080200_60 (sequence is synthesized)
gcatccacaaagaaactttatattgggttctctcaaacgtgtcttaaaggactgcagcattccagaaatagagcttttcccacaatctgacccagcctgttgtcctgtctacatacagag

SEQ ID NO: 77180 - DNA, 120 bp, Artificial Sequence
  ENSG00000080200_61 (sequence is synthesized)
agcagtccccaatttggaagaactgaatatctccaaatctgtgtccttcactgtgaagtcaggagtttggcttgcctacccagatattaattttaagggacaagctacagttctggagga

SEQ ID NO: 77181 - DNA, 120 bp, Artificial Sequence
  ENSG00000080200_62 (sequence is synthesized)
agaccatgggctctttgagatttctacagcagaaatgaaatcattacatccgcttcaaatgggtggactgaaagtggaaatgcccatgaacttaaaggttattatttatgaaaaacctca

SEQ ID NO: 77182 - DNA, 120 bp, Artificial Sequence
  ENSG00000080200_63 (sequence is synthesized)
cttccatggacaggctaaagagtttagtgaacatatagattctgttcctaattttttgaaaaataatggagattttcacagaattggatcaattcgtgtcattggtggagtgtgggttgc

SEQ ID NO: 77183 - DNA, 120 bp, Artificial Sequence
  ENSG00000080200_64 (sequence is synthesized)
ctatgaaaaagaacattttaaaggccagcagtttctgcttgaagaaggagactttgaagacagtaatgcttgtggtgcattaagtagccctatcttgtctttccggtacttacaagctaa

SEQ ID NO: 77184 - DNA, 120 bp, Artificial Sequence
  ENSG00000080200_65 (sequence is synthesized)
ttttatagaatcttctgtcacactatttgaatctgacctagaaagtgggaagtttattgacattacaaatcaggaaatttctgatttggaagaaattggctttggcagtaaaacaagatc

SEQ ID NO: 77185 - DNA, 120 bp, Artificial Sequence
  ENSG00000080200_66 (sequence is synthesized)
cattcatgttaaaagtggagtatgggttgcctaccagcaaaagttcttctgtggagaacaatacattttagaaaaagggaaatacaaatgcttttttgactggggaggatcaaataatat

SEQ ID NO: 77186 - DNA, 120 bp, Artificial Sequence
  ENSG00000080200_67 (sequence is synthesized)
aatcatgtcgatacggccaatccaactggaaccacttgggataaatgaacctccgcatttgctcaaagcattcagcaaaccagggttccaaggtgaatgtatagattttacagaagaaac

SEQ ID NO: 77187 - DNA, 120 bp, Artificial Sequence
  ENSG00000080200_68 (sequence is synthesized)
ttctgatttgacttcactcatgccatgttcttttaaagttcttcgaggttgctggctcctctattaccaagaagacatgtttgttaatcactgtgtgttagaagaaggcctctatgctga

SEQ ID NO: 77188 - DNA, 120 bp, Artificial Sequence
  ENSG00000080200_69 (sequence is synthesized)
ccttacttcctgcggttgcccagcatctaaagtcaaatctctcaagcccattgactatgtttttgaagaaccctccatcagcctttttgctctggagcattgtgagggaagagagttaca

SEQ ID NO: 77189 - DNA, 120 bp, Artificial Sequence
  ENSG00000080200_70 (sequence is synthesized)
tctagaagaggctgtgaactctgttctgaacaaggacctacacttctacacccagtctgtgtgggtaaaaagtggactatggatagcttatgaaggatccaatttcttgggaagacaaat

SEQ ID NO: 77190 - DNA, 120 bp, Artificial Sequence
  ENSG00000080200_71 (sequence is synthesized)
cctactcaggcctaatgagatcccaaactggacagcattcagcagatggaaaacaattggttccctccgtcctatgaagcagcctgcagtgtacatcagaataaagaaccgtgcccaggg

SEQ ID NO: 77191 - DNA, 120 bp, Artificial Sequence
  ENSG00000080200_72 (sequence is synthesized)
tgaatatctgacagtcactggaagtctagcagacaccagggcaacatctgtgtgcatttctccctatagtggaaagaatactcagatctggtactactgccgaggactctttaaatccaa

SEQ ID NO: 77192 - DNA, 120 bp, Artificial Sequence
  ENSG00000080200_73 (sequence is synthesized)
ggccagtgatacatgtcttgatgtgattggtggccgggacacacctggagctaaagtagctctatggactgaacatgggcaattcaggcagaagtggagactgaataaaaatggaactat

SEQ ID NO: 77193 - DNA, 120 bp, Artificial Sequence
  ENSG00000080200_74 (sequence is synthesized)
cagctcttatctcagtgatcaacttgtccttgatgttaaaggaggaaattattgtgacaagactcatgtaattgtaaatcagcccctggagggagaagaaacacagaaatgggacattga

SEQ ID NO: 77194 - DNA, 120 bp, Artificial Sequence
  ENSG00000080200_75 (sequence is synthesized)
aatattgtgagagaatcaacatccctagaaagatccctagaaagagcaaagaaggaaacacatctgtcattgtcttgtggacgtggaaaggaagctactgtcctcacactcctggatcac

SEQ ID NO: 77195 - DNA, 120 bp, Artificial Sequence
  ENSG00000080200_76 (sequence is synthesized)
tgagcagaatgaacattttctccagcctctgagactatcgctcttaaccatggaaaagctcaaaatattcttgccattactcagtgttcctataaagaaaatattatgatatcttggaaa

SEQ ID NO: 77196 - DNA, 120 bp, Artificial Sequence
  ENSG00000080200_77 (sequence is synthesized)
ggttctattcctgatctccagctgtggtgagcaagtttcctgaagtgtttattttctctcatatccaccaaacgtgaatcctgttcctgatggcccgttattggacactggtgatgctat

SEQ ID NO: 77197 - DNA, 120 bp, Artificial Sequence
  ENSG00000080200_78 (sequence is synthesized)
tatcctgtattatttattaatatcctacctagatgcttgtatgagtacaaagcataaagaaacagatttctataggtcaagtcatacttttgcaaacagatgagtaattttttagcaaca

SEQ ID NO: 77198 - DNA, 120 bp, Artificial Sequence
  ENSG00000080200_79 (sequence is synthesized)
cctgaaaatatactaaactttcctagataaactttaaggtttctatactgaggcttttataatgaacgcacctcgttaagtatttatacttgtaactaaccccaggcagggacctcagct

SEQ ID NO: 77199 - DNA, 120 bp, Artificial Sequence
  ENSG00000080200_80 (sequence is synthesized)
ttgttaggaataaggcacaagaagtattttctgtagctattgtttcctcagtccttcaaactaaaaaagtacaaataaataacctatggccaaacttgcactgttacgtgttaaccaaga

SEQ ID NO: 77200 - DNA, 120 bp, Artificial Sequence
  ENSG00000080200_81 (sequence is synthesized)
catccctttaggtgacaagactctataacagtggttacctgtctccatgttgacacttcatcctagatttaaggagaggcatcaatttttttttttttttgcctcaagagaaatttcaaa

SEQ ID NO: 77201 - DNA, 120 bp, Artificial Sequence
  ENSG00000080200_82 (sequence is synthesized)
tatccaaattaaaacacagtagcatttgaaccttgaccttaccatctctttaagtaaacgtggagttgatttctctactaaataacagaaacctcagtttttcactcccattgtaagtaa

SEQ ID NO: 77202 - DNA, 120 bp, Artificial Sequence
  ENSG00000080200_83 (sequence is synthesized)
cttttatttaagtaagtaaaatcaggtaggaaatcacctttgacttagcttccagtagtcattaccaccttttactgcacaattcacaagcatgttttcctggtgaattggactgaaaat

SEQ ID NO: 77203 - DNA, 120 bp, Artificial Sequence
  ENSG00000080200_84 (sequence is synthesized)
tacattttgacaactttttttccttttatccccaacttttgccagaaagcagaaaaatgctctatttttataaagaaagattaaattctccaatgatattttaaaaaatatcaacctaca

SEQ ID NO: 77204 - DNA, 120 bp, Artificial Sequence
  ENSG00000080200_85 (sequence is synthesized)
tgcactttagaatgtaaaataacaatgactattttaaactcgaagacccactattttgagtattttttatagactttaaatactgggtttttttcctccttcaatctcaggcttttctcc

SEQ ID NO: 77205 - DNA, 120 bp, Artificial Sequence
  ENSG00000080200_86 (sequence is synthesized)
atcttttaagcagcctctgtaactcccttttgtccataggtgttgcgtgcctctcatctgtggggaagtattatttaataaaatttatgttacaggataactttattttaatgggcatgg

SEQ ID NO: 77206 - DNA, 120 bp, Artificial Sequence
  ENSG00000080200_87 (sequence is synthesized)
gcttgtctatacacaaaggtatgtatattttcattataaaaaaccagtttaaaattttttcttattttaattgtttgaaatttttctagagccaaagaagctctttaaagaagttgtttc

SEQ ID NO: 77207 - DNA, 120 bp, Artificial Sequence
  ENSG00000080200_88 (sequence is synthesized)
ttccaaagaacaaagccaggttaatgacattcaattctaaatgatacattggaattgtgccttttctaccacactggattaaataaacttgtcaaaatatggttttgtcattttctgaga

SEQ ID NO: 77208 - DNA, 120 bp, Artificial Sequence
  ENSG00000080200_89 (sequence is synthesized)
aattgacccattccatggaaaaagatagttagaatcctactttactccaaacacaaaaataagttccagatggattaataacaagctaaatgtgaaaagcaaactttacaacttagaaga

SEQ ID NO: 77209 - DNA, 120 bp, Artificial Sequence
  ENSG00000080200_90 (sequence is synthesized)
aaatataggaatctaccctgatgatactgcagtaggatggatttcttcaaacagaaaaagcacaaatgaataagaaaaaggtttttgaagaaccctccatcagcctttttgctctggagc

SEQ ID NO: 77210 - DNA, 120 bp, Artificial Sequence
  ENSG00000080224_0 (sequence is synthesized)
aagtgaatagtcctcgcgcaagcgggacactgtggtggatgcaattcccctcgcctccagccgcgaggagctccccggcgccgcaggcagcgtcctcctccgaagcagctgcacctgcaa

SEQ ID NO: 77211 - DNA, 120 bp, Artificial Sequence
  ENSG00000080224_1 (sequence is synthesized)
ctgggcagcctggaccctcgtgccctgttcccgggacctcgcgcagggggcgccccgggacaccccctgcgggccgggtggaggaggaagaggaggaggaggaagaagacgtggacaagg

SEQ ID NO: 77212 - DNA, 120 bp, Artificial Sequence
  ENSG00000080224_2 (sequence is synthesized)
acccccatcctacccagaacacctgcctgcgctgccgccacttctctttaagggagaggaaaagagagcctaggagaaccatggggggctgcgaagtccgggaatttcttttgcaatttg

SEQ ID NO: 77213 - DNA, 120 bp, Artificial Sequence
  ENSG00000080224_3 (sequence is synthesized)
gtttcttcttgcctctgctgacagcgtggccaggcgactgcagtcacgtctccaacaaccaagttgtgttgcttgatacaacaactgtactgggagagctaggatggaaaacatatccat

SEQ ID NO: 77214 - DNA, 120 bp, Artificial Sequence
  ENSG00000080224_4 (sequence is synthesized)
taaatgggtgggatgccatcactgaaatggatgaacataataggcccattcacacataccaggtatgtaatgtaatggaaccaaaccaaaacaactggcttcgtacaaactggatctccc

SEQ ID NO: 77215 - DNA, 120 bp, Artificial Sequence
  ENSG00000080224_5 (sequence is synthesized)
gtgatgcagctcagaaaatttatgtggaaatgaaattcacactaagggattgtaacagcatcccatgggtcttggggacttgcaaagaaacatttaatctgttttatatggaatcagatg

SEQ ID NO: 77216 - DNA, 120 bp, Artificial Sequence
  ENSG00000080224_6 (sequence is synthesized)
agtcccacggaattaaattcaagccaaaccagtatacaaagatcgacacaattgctgctgatgagagttttacccagatggatttgggtgatcgcatcctcaaactcaacactgaaattc

SEQ ID NO: 77217 - DNA, 120 bp, Artificial Sequence
  ENSG00000080224_7 (sequence is synthesized)
gtgaggtggggcctatagaaaggaaaggattttatctggcttttcaagacattggggcgtgcattgccctggtttcagtccgtgttttctacaagaaatgccccttcactgttcgtaact

SEQ ID NO: 77218 - DNA, 120 bp, Artificial Sequence
  ENSG00000080224_8 (sequence is synthesized)
tggccatgtttcctgataccattccaagggttgattcctcctctttggttgaagtacggggttcttgtgtgaagagtgctgaagagcgtgacactcctaaactgtattgtggagctgatg

SEQ ID NO: 77219 - DNA, 120 bp, Artificial Sequence
  ENSG00000080224_9 (sequence is synthesized)
gagattggctggttcctcttggaaggtgcatctgcagtacaggatatgaagaaattgagggttcttgccatgcttgcagaccaggattctataaagcttttgctgggaacacaaaatgtt

SEQ ID NO: 77220 - DNA, 120 bp, Artificial Sequence
  ENSG00000080224_10 (sequence is synthesized)
ctaaatgtcctccacacagtttaacatacatggaagcaacttctgtctgtcagtgtgaaaagggttatttccgagctgaaaaagacccaccttctatggcatgtaccaggccaccttcag

SEQ ID NO: 77221 - DNA, 120 bp, Artificial Sequence
  ENSG00000080224_11 (sequence is synthesized)
ctcctaggaatgtggtttttaacatcaatgaaacagcccttattttggaatggagcccaccaagtgacacaggagggagaaaagatctcacatacagtgtaatctgtaagaaatgtggct

SEQ ID NO: 77222 - DNA, 120 bp, Artificial Sequence
  ENSG00000080224_12 (sequence is synthesized)
tagacaccagccagtgtgaggactgtggtggaggactccgcttcatcccaagacatacaggcctgatcaacaattccgtgatagtacttgactttgtgtctcacgtgaattacacctttg

SEQ ID NO: 77223 - DNA, 120 bp, Artificial Sequence
  ENSG00000080224_13 (sequence is synthesized)
aaatagaagcaatgaatggagtttctgagttgagtttttctcccaagccattcacagctattacagtgaccacggatcaagatgcaccttccctgataggtgtggtaaggaaggactggg

SEQ ID NO: 77224 - DNA, 120 bp, Artificial Sequence
  ENSG00000080224_14 (sequence is synthesized)
catcccaaaatagcattgccctatcatggcaagcacctgctttttccaatggagccattctggactacgagatcaagtactatgagaaagaacatgagcagctgacctactcttccacaa

SEQ ID NO: 77225 - DNA, 120 bp, Artificial Sequence
  ENSG00000080224_15 (sequence is synthesized)
ggtccaaagcccccagtgtcatcatcacaggtcttaagccagccaccaaatatgtatttcacatccgagtgagaactgcgacaggatacagtggctacagtcagaaatttgaatttgaaa

SEQ ID NO: 77226 - DNA, 120 bp, Artificial Sequence
  ENSG00000080224_16 (sequence is synthesized)
acttctgacatggcagcagaacaaggacagattctcgtgatagccaccgccgctgttggcggattcactctcctcgtcatcctcactttattcttcttgatcactgggagatgtcagtgg

SEQ ID NO: 77227 - DNA, 120 bp, Artificial Sequence
  ENSG00000080224_17 (sequence is synthesized)
tacataaaagccaagatgaagtcagaagagaagagaagaaaccacttacagaatgggcatttgcgcttcccgggaattaaaacttacattgatccagatacatatgaagacccatcccta

SEQ ID NO: 77228 - DNA, 120 bp, Artificial Sequence
  ENSG00000080224_18 (sequence is synthesized)
gcagtccatgaatttgcaaaggagattgatccctcaagaattcgtattgagagagtcattggggcaggtgaatttggagaagtctgtagtgggcgtttgaagacaccagggaaaagagag

SEQ ID NO: 77229 - DNA, 120 bp, Artificial Sequence
  ENSG00000080224_19 (sequence is synthesized)
atcccagttgccattaaaactttgaaaggtggccacatggatcggcaaagaagagattttctaagagaagctagtatcatgggccagtttgaccatccaaacatcattcgcctagaaggg

SEQ ID NO: 77230 - DNA, 120 bp, Artificial Sequence
  ENSG00000080224_20 (sequence is synthesized)
gttgtcaccaaaagatccttcccggccattggggtggaggcgttttgccccagcttcctgagggcagggtttttaaatagcatccaggccccgcatccagtgccagggggaggatctttg

SEQ ID NO: 77231 - DNA, 120 bp, Artificial Sequence
  ENSG00000080224_21 (sequence is synthesized)
ccccccaggattcctgctggcagaccagtaatgattgtggtggaatatatggagaatggatccctagactcctttttgcggaagcatgatggccacttcacagtcatccagttggtcgga

SEQ ID NO: 77232 - DNA, 120 bp, Artificial Sequence
  ENSG00000080224_22 (sequence is synthesized)
atgctccgaggcattgcatcaggcatgaagtatctttctgatatgggttatgttcatcgagacctagcggctcggaatatactggtcaatagcaacttagtatgcaaagtttctgatttt

SEQ ID NO: 77233 - DNA, 120 bp, Artificial Sequence
  ENSG00000080224_23 (sequence is synthesized)
ggtctctccagagtgctggaagatgatccagaagctgcttatacaacaactggtggaaaaatccccataaggtggacagccccagaagccatcgcctacagaaaattctcctcagcaagc

SEQ ID NO: 77234 - DNA, 120 bp, Artificial Sequence
  ENSG00000080224_24 (sequence is synthesized)
gatgcatggagctatggcattgtcatgtgggaggtcatgtcctatggagagagaccttattgggaaatgtctaaccaagatgtcattctgtccattgaagaagggtacagacttccagct

SEQ ID NO: 77235 - DNA, 120 bp, Artificial Sequence
  ENSG00000080224_25 (sequence is synthesized)
cccatgggctgtccagcatctctacaccagctgatgctccactgctggcagaaggagagaaatcacagaccaaaatttactgacattgtcagcttccttgacaaactgatccgaaatccc

SEQ ID NO: 77236 - DNA, 120 bp, Artificial Sequence
  ENSG00000080224_26 (sequence is synthesized)
agtgcccttcacaccctggtggaggacatccttgtaatgccagagtcccctggtgaagttccggaatatcctttgtttgtcacagttggtgactggctagattctataaagatggggcaa

SEQ ID NO: 77237 - DNA, 120 bp, Artificial Sequence
  ENSG00000080224_27 (sequence is synthesized)
tacaagaataacttcgtggcagcagggtttacaacatttgacctgatttcaagaatgagcattgatgacattagaagaattggagtcatacttattggacaccagagacgaatagtcagc

SEQ ID NO: 77238 - DNA, 120 bp, Artificial Sequence
  ENSG00000080224_28 (sequence is synthesized)
agcatacagactttacgtttacacatgatgcacatacaggagaagggatttcatgtatgaaagtaccacaagcacctgtgttttgtgcctcagcatttctaaaatgaacgatatcctctc

SEQ ID NO: 77239 - DNA, 120 bp, Artificial Sequence
  ENSG00000080224_29 (sequence is synthesized)
tactactctctcttctgattctccaaacatcacttcacaaactgcagtcttctgttcagactataggcacacaccttatgtttatgcttccaaccaggattttaaaatcatgctacataa

SEQ ID NO: 77240 - DNA, 120 bp, Artificial Sequence
  ENSG00000080224_30 (sequence is synthesized)
atccgttctgaataacctgcaactaaaaccctggcccactgcagattattgctacgcaatggtaaataactcagcatggatgtgtaattttgtataagccgtatatgggaagtgttcacg

SEQ ID NO: 77241 - DNA, 120 bp, Artificial Sequence
  ENSG00000080224_31 (sequence is synthesized)
gacttaacctaaaaaaatttatccaggtggggcttccttagtgatgtatgtagagtgtgatggtagatgagaaagaactagttgacctttctttcatgttttgtgatcaagtagcttcca

SEQ ID NO: 77242 - DNA, 120 bp, Artificial Sequence
  ENSG00000080224_32 (sequence is synthesized)
aactgacagaaatgtttcatttttagataattatattcagctctattggttgtattattactttattttttaatactttaactgttggtgcctgatattgttagaattatttgcagaaat

SEQ ID NO: 77243 - DNA, 120 bp, Artificial Sequence
  ENSG00000080224_33 (sequence is synthesized)
agacccacaaatcacaacaaagagcaatcagaactggttaaagaagatggtctggaaagcttgtgtgagcagtgcgagtccagctctggttatggtactggactggtcctcatgtggaag

SEQ ID NO: 77244 - DNA, 120 bp, Artificial Sequence
  ENSG00000080224_34 (sequence is synthesized)
agaaacagaagggccatgggagccagtggccagaccagaaagcaatgtgacaagagagataaccctccaacagacctcttccaaactctaacacttaacctctgctattctgcataaatt

SEQ ID NO: 77245 - DNA, 120 bp, Artificial Sequence
  ENSG00000080224_35 (sequence is synthesized)
ctgagaaaagccaaattttctgtcggtctaagaagacatagcctacacccaactggagataattataaaaaataatgaagcagcatgaggggaaggtatttaatgtgtattttaaagttg

SEQ ID NO: 77246 - DNA, 120 bp, Artificial Sequence
  ENSG00000080224_36 (sequence is synthesized)
ggagagattctccttcacctaatttaggtgtttgtgaattggcttgactttttgaagttaatttttaagccttgaacatgtccaactttaagaactttaagaataaatattttaacacaa

SEQ ID NO: 77247 - DNA, 120 bp, Artificial Sequence
  ENSG00000080224_37 (sequence is synthesized)
gcataaatatccctcatgggcatgtatttattgcaggtgctatgcagtcatatacgttatacactgcagaggtaatgcactggttgttgttcttgttctttcctaaaactcagaaagata

SEQ ID NO: 77248 - DNA, 120 bp, Artificial Sequence
  ENSG00000080224_38 (sequence is synthesized)
tttttatattacttctcagcagtatgaataataagatgaaatgcttccctccactgtttatgtactcatgtattttgtataatcatataacaatatatcttaatgagtaagtccatatta

SEQ ID NO: 77249 - DNA, 120 bp, Artificial Sequence
  ENSG00000080224_39 (sequence is synthesized)
cttaccaatagaagtcagaaatcaataaaatgttattaaatgaattgaatttcaattgccccacttatgctgccatcctttttgcatgtcaaataaagcaaatagtaagaatttttaaaa

SEQ ID NO: 77250 - DNA, 120 bp, Artificial Sequence
  ENSG00000080224_40 (sequence is synthesized)
ggccgctgcttctagttggccatcttggccccaccccgaaacagtaacctttgaagaataaaagaaaaagcaaaagagtagcattactaaaatattaaacggttacatttacagccaaaa

SEQ ID NO: 77251 - DNA, 120 bp, Artificial Sequence
  ENSG00000080224_41 (sequence is synthesized)
acaaacaaaactacaatggaagaagaaaacgtcctcaactagacatctgccaaaaatatcatccagaatgccctggcaagttcacttccatttagtgaagtgagataatttggcaattca

SEQ ID NO: 77252 - DNA, 120 bp, Artificial Sequence
  ENSG00000080224_42 (sequence is synthesized)
agagtggaacttcccagcctcagaaaggcagaaaccaggaaagctaagacaaacaaaactacaatggaagaagaaaacgtcctcaactagacatctgccaaaaatgaacatgagcagctg

SEQ ID NO: 77253 - DNA, 120 bp, Artificial Sequence
  ENSG00000080224_43 (sequence is synthesized)
tgtcaccaaaaagccactggaaatgatgacatatatcctcagggcaaaaggggaagcaggctttctaaagaagtaaatcaaggcacactagccacatttccagtgctcaatagccacata

SEQ ID NO: 77254 - DNA, 120 bp, Artificial Sequence
  ENSG00000080224_44 (sequence is synthesized)
tggctggtggctactgtattggacaacacaaacatagaatattttcatcattgctgaaaattggagtgaacagctttgatcttggtgatatggatgaagacccagagaggggttatgact

SEQ ID NO: 77255 - DNA, 120 bp, Artificial Sequence
  ENSG00000080224_45 (sequence is synthesized)
cctctgtgctgtcgtatagctggctcagaagagaccaactttcctgagctgtgaaaaatgacagttccttaaggaagagatgccacaatagatgaaagacctttttacccatggatcctt

SEQ ID NO: 77256 - DNA, 120 bp, Artificial Sequence
  ENSG00000080224_46 (sequence is synthesized)
gcccttcctactatacaccccatgagagcagagatcttgtattgattgacgatatgtctccagaactcagaagagtacttgctacctagcagaccagtaatgattgtggtggaatatatg

SEQ ID NO: 77257 - DNA, 120 bp, Artificial Sequence
  ENSG00000080224_47 (sequence is synthesized)
tggaaaacaaatccaaatccgatccttgaaaagcaaaggctctaaagaagctcttcagaagagacggtaaagaatgaattcttttacttatcacccaaccacatttcttaaaaatgtgtt

SEQ ID NO: 77258 - DNA, 120 bp, Artificial Sequence
  ENSG00000080224_48 (sequence is synthesized)
ttggtgtcttttcctaccaaatttctgctctacaaggcagtcagttaaatctctcatttcataattttcactgtgctagttctttcttttctcctcttttaataaattttctaaaacttt

SEQ ID NO: 77259 - DNA, 120 bp, Artificial Sequence
  ENSG00000080224_49 (sequence is synthesized)
acaggaaaaaagaatgcagcttaacagcctccaaataggaaatgcaatagaattgagtagtgttaaaaaggacagaagtcactgtatggataaccagacccaatattgactacagtgtaa

SEQ ID NO: 77260 - DNA, 120 bp, Artificial Sequence
  ENSG00000080224_50 (sequence is synthesized)
tcaatcacaagaatgccagagtcccctggtgaagttccggaatatcctttgtttgtcacagttggtgactggctagattctataaagatggggcaatacaagaataacttcgtggcagca

SEQ ID NO: 77261 - DNA, 120 bp, Artificial Sequence
  ENSG00000080293_0 (sequence is synthesized)
gaccccgcgccagtccctgccgggtggaggaggcgcgccggcaaagccgcgtcctgatcaatggggcgggcggcttagcgcgcgcggccacctggtccgaggaggagcagtcccggggcc

SEQ ID NO: 77262 - DNA, 80 bp, Artificial Sequence
  ENSG00000080293_1 (sequence is synthesized)
cagcggccggccggagcccgggaccctgcgcggggcgctgagctcccgagcgggcagagggcacgggcaggcggacgtcg

SEQ ID NO: 77263 - DNA, 120 bp, Artificial Sequence
  ENSG00000080293_2 (sequence is synthesized)
gggcgccctcggggaacgtgcgggcaccatgcgtccccacctgtcgccgccgctgcagcagctactactgccggtgctgctcgcctgcgccgcgcactcgactggagcccttccccgact

SEQ ID NO: 77264 - DNA, 120 bp, Artificial Sequence
  ENSG00000080293_3 (sequence is synthesized)
atgtgacgtgctacaagtgctgtgggaagagcaagaccagtgcctgcaggaactctccagagagcagacaggagacctgggcacggagcagccagtgccaggttgtgaggggatgtggga

SEQ ID NO: 77265 - DNA, 120 bp, Artificial Sequence
  ENSG00000080293_4 (sequence is synthesized)
caacataagctgctggccctcttctgtgccgggccggatggtggaggtggaatgcccgagattcctccggatgctcaccagcagaaatggttccttgttccgaaactgcacacaggatgg

SEQ ID NO: 77266 - DNA, 120 bp, Artificial Sequence
  ENSG00000080293_5 (sequence is synthesized)
ctggtcagaaaccttccccaggcctaatctggcctgtggcgttaatgtgaacgactcttccaacgagaagcggcactcctacctgctgaagctgaaagtcatgtacaccgtgggctacag

SEQ ID NO: 77267 - DNA, 120 bp, Artificial Sequence
  ENSG00000080293_6 (sequence is synthesized)
ctcctccctggtcatgctcctggtcgcccttggcatcctctgtgctttccggaggctccactgcactcgcaactacatccacatgcacctgttcgtgtccttcatccttcgtgccctgtc

SEQ ID NO: 77268 - DNA, 120 bp, Artificial Sequence
  ENSG00000080293_7 (sequence is synthesized)
cgggctgcaagctggtcatggtgctgttccagtactgcatcatggccaactactcctggctgctggtggaaggcctctaccttcacacactcctcgccatctccttcttctctgaaagaa

SEQ ID NO: 77269 - DNA, 120 bp, Artificial Sequence
  ENSG00000080293_8 (sequence is synthesized)
agtacctccagggatttgtggcattcggatggggttctccagccatttttgttgctttgtgggctattgccagacactttctggaagatgttgggtgctgggacatcaatgccaacgcat

SEQ ID NO: 77270 - DNA, 120 bp, Artificial Sequence
  ENSG00000080293_9 (sequence is synthesized)
ccatctggtggatcattcgtggtcctgtgatcctctccatcctgattaatttcatccttttcataaacattctaagaatcctgatgagaaaacttagaacccaagaaacaagaggaaatg

SEQ ID NO: 77271 - DNA, 120 bp, Artificial Sequence
  ENSG00000080293_10 (sequence is synthesized)
aagtcagccattataagcgcctggccaggtccactctcctgctgatccccctctttggcatccactacatcgtcttcgccttctccccagaggacgctatggagatccagctgttttttg

SEQ ID NO: 77272 - DNA, 120 bp, Artificial Sequence
  ENSG00000080293_11 (sequence is synthesized)
aactagcccttggctcattccagggactggtggtggccgtcctctactgcttcctcaatggggaggtgcagctggaggttcagaagaagtggcagcaatggcacctccgtgagttcccac

SEQ ID NO: 77273 - DNA, 120 bp, Artificial Sequence
  ENSG00000080293_12 (sequence is synthesized)
tgcaccccgtggcctccttcagcaacagcaccaaggccagccacttggagcagagccagggcacctgcaggaccagcatcatctgagaggctggagcagggtcacccacggacagagacc

SEQ ID NO: 77274 - DNA, 120 bp, Artificial Sequence
  ENSG00000080293_13 (sequence is synthesized)
aagagaggtcctgcgaaggctgggcactgctgtgggacagccagtcttcccagcagacaccctgtgtcctccttcagctgaagatgcccctccccaggccttggactcttccgaagggat

SEQ ID NO: 77275 - DNA, 120 bp, Artificial Sequence
  ENSG00000080293_14 (sequence is synthesized)
gtgaggcactgtggggcaggacaagggcctgggatttggttcgtttgctcttctgggaagagaagttcaggggtcccagaaagggacagggaaataaatggtgcctgggatgagattcaa

SEQ ID NO: 77276 - DNA, 120 bp, Artificial Sequence
  ENSG00000080293_15 (sequence is synthesized)
cttaaaatctttcagttttcagaagtgggccacgcatctggctctgagcttcctagcagccaaatcaaagaggaaaccagcttcaaatgtagtgtctatgtatactagtcgttcacaata

SEQ ID NO: 77277 - DNA, 120 bp, Artificial Sequence
  ENSG00000080293_16 (sequence is synthesized)
agttcagcttctcactgcattgagacctggttctccttccagaggggcctcatcaagggaactcaagtgatgtagaaagcaacatcctcaataatattcttgcagcaaatacagtggtga

SEQ ID NO: 77278 - DNA, 120 bp, Artificial Sequence
  ENSG00000080293_17 (sequence is synthesized)
cacttgtggagctgtgtccataggccagggcagtggctctgagtgtggtcccaggacaaacagcatcagcatcacttgggaacttgttagaaatgcagatactcaggccccaccccagac

SEQ ID NO: 77279 - DNA, 120 bp, Artificial Sequence
  ENSG00000080293_18 (sequence is synthesized)
ttactgagcaatctgtgttttaataatccctctgggtgactctgatgcaagctgaagtttgagaatcatgggacaagagttctcaaccctgcagtcaaacgttagaattacctgtaaggc

SEQ ID NO: 77280 - DNA, 120 bp, Artificial Sequence
  ENSG00000080293_19 (sequence is synthesized)
tttcaaaggacatgatgcctgggcccacccaaaccaattcatgcaggatccctgtgtgccacgccggctaggtctatttctaaagctccccaggtagtcgtaccatgaagctagaaggga

SEQ ID NO: 77281 - DNA, 120 bp, Artificial Sequence
  ENSG00000080293_20 (sequence is synthesized)
gacccattgctgcttagttgtttaatgcaaactgattggccaacagatgtgccatctgctccagagaaatccagacctttacttgcaaagcttataggagagggcgccttccttctttcc

SEQ ID NO: 77282 - DNA, 120 bp, Artificial Sequence
  ENSG00000080293_21 (sequence is synthesized)
ttcttcccttcctccctccctttcttacttccttctatcttcaacactgagcactaccgtgtacatggcagagtccaagggtgcattagacaggataggttcctgatcctgaggagtcag

SEQ ID NO: 77283 - DNA, 120 bp, Artificial Sequence
  ENSG00000080293_22 (sequence is synthesized)
cacctaatgagagctttgaaagtagtctagtgggaattccaggcaggcaagggtgtcggtgatgtggacaggatggtagggcagccctcggtccatcccccatccttgtctgatgctgct

SEQ ID NO: 77284 - DNA, 120 bp, Artificial Sequence
  ENSG00000080293_23 (sequence is synthesized)
ggatacacagcaccgatggagagggctactgggactacctgcctgaggcttaaatagcctcccagggggttcatcctcaggacggtccccagatgcctgagtgtaccacagatcctcctt

SEQ ID NO: 77285 - DNA, 120 bp, Artificial Sequence
  ENSG00000080298_0 (sequence is synthesized)
tctctctctctctccctctctctctctcttttgtgagttatagcaaccgttgccttgtgaatcaagcgccatagtcaccgtagtcctggcgactgttacccatcaacaacaactactcct

SEQ ID NO: 77286 - DNA, 120 bp, Artificial Sequence
  ENSG00000080298_1 (sequence is synthesized)
cctcctcctcttcctcctcctcctccccaccaccaccatctccatcacccaccaacaacaccacaataatccacagccaaggccacttggtcattctggcattttatggtagagaatacg

SEQ ID NO: 77287 - DNA, 120 bp, Artificial Sequence
  ENSG00000080298_2 (sequence is synthesized)
acttggtcattctggcattttatggtagagaatacgttgagtttggctctggaaggaatatgagagaccatcatgcagacatcagagactgggtcggacacaggctcgacagtgacctta

SEQ ID NO: 77288 - DNA, 120 bp, Artificial Sequence
  ENSG00000080298_3 (sequence is synthesized)
caaacatctgtggctagtcaagcagcagtgcctacgcaggtggtacagcaagtaccagtacaacaacaggtacagcaggtacagactgtgcagcaggtacaacatgtctatcccgctcag

SEQ ID NO: 77289 - DNA, 120 bp, Artificial Sequence
  ENSG00000080298_4 (sequence is synthesized)
gtgcagtatgtggaaggaagcgatactgtctataccaatggagcaatccgaacaacaacgtatccttacacagagacacagatgtacagccaaaatactggagggaattactttgatact

SEQ ID NO: 77290 - DNA, 120 bp, Artificial Sequence
  ENSG00000080298_5 (sequence is synthesized)
caagggagttccgcccaggtgactaccgtggtctcatcccacagtatggtgggcactggtgggattcagatgggcgtcacaggaggacaactcatcagcagctctggaggaacctatctg

SEQ ID NO: 77291 - DNA, 120 bp, Artificial Sequence
  ENSG00000080298_6 (sequence is synthesized)
atcggcaactcaatggagaattctggtcactcagtgacacacacaactcgggcctccccagcgacaattgaaatggcgattgagacgctgcaaaagtctgacggtctgtccactcacaga

SEQ ID NO: 77292 - DNA, 120 bp, Artificial Sequence
  ENSG00000080298_7 (sequence is synthesized)
agctctcttctcaacagccatctccagtggctgttggacaattatgagacagcagaaggagtgagccttcccagaagcactctgtacaaccactaccttcgacactgtcaggaacacaaa

SEQ ID NO: 77293 - DNA, 120 bp, Artificial Sequence
  ENSG00000080298_8 (sequence is synthesized)
ctggacccagtcaatgctgcctcttttggaaaattaataagatcaatttttatggggctacgaaccaggagattgggcactagaggaaactccaaataccactactatgggattcgtgtc

SEQ ID NO: 77294 - DNA, 120 bp, Artificial Sequence
  ENSG00000080298_9 (sequence is synthesized)
aagccagattcccctcttaatcgtctgcaagaagacatgcagtatatggctatgagacaacaacccatgcaacagaaacaaaggtacaagcctatgcagaaagtggatggggttgcagat

SEQ ID NO: 77295 - DNA, 120 bp, Artificial Sequence
  ENSG00000080298_10 (sequence is synthesized)
ggtttcacaggaagtggtcaacagacaggcacatctgttgagcaaactgtaattgcccaaagccaacatcatcaacagtttttagatgcatctcgagcacttccagagtttggagaagtt

SEQ ID NO: 77296 - DNA, 120 bp, Artificial Sequence
  ENSG00000080298_11 (sequence is synthesized)
gaaatctcttctctgccagatggtactacctttgaggatatcaagtcactgcagagtctttatagagagcactgtgaggcaatattggacgttgttgtgaatcttcaatttagcctgata

SEQ ID NO: 77297 - DNA, 120 bp, Artificial Sequence
  ENSG00000080298_12 (sequence is synthesized)
gaaaaattgtggcaaacattctggcgctattctccctctactccaactgatggcactaccattaccgaatcgagcaatctgagtgaaatagaaagtcgacttccgaaagcaaagctgata

SEQ ID NO: 77298 - DNA, 120 bp, Artificial Sequence
  ENSG00000080298_13 (sequence is synthesized)
actctgtgcaaacatgagtctatcctgaaatggatgtgtaactgtgaccatgggatgtaccaggctttggtggagattctcatccccgacgtccttagacctattcctagtgccttgacc

SEQ ID NO: 77299 - DNA, 120 bp, Artificial Sequence
  ENSG00000080298_14 (sequence is synthesized)
caagccattcgaaattttgcaaaaagccttgaaggttggctttccaatgccatgaacaatattccacagagaatgatacaaaccaaggttgccgctgtaagtgcctttgcccagactctg

SEQ ID NO: 77300 - DNA, 120 bp, Artificial Sequence
  ENSG00000080298_15 (sequence is synthesized)
cgaagatacacgtcgcttaatcacctggcccaggcagctcgtgcagtgcttcagaacacttcccaaatcaaccagatgcttagtgacctcaaccgtgtcgactttgccaatgtccaggag

SEQ ID NO: 77301 - DNA, 120 bp, Artificial Sequence
  ENSG00000080298_16 (sequence is synthesized)
caggcttcctgggtgtgccagtgtgatgacaacatggttcagagactagaaacagacttcaagatgactcttcagcagcagagcaccctggagcagtgggctgcgtggcttgacaatgtg

SEQ ID NO: 77302 - DNA, 120 bp, Artificial Sequence
  ENSG00000080298_17 (sequence is synthesized)
atgatgcaagcactgaaaccctatgaaggaagacccagttttcctaaagccgccaggcagtttctgctaaaatggtctttctacagctcaatggttattcgggacttaaccttacgcagt

SEQ ID NO: 77303 - DNA, 120 bp, Artificial Sequence
  ENSG00000080298_18 (sequence is synthesized)
gctgctagctttggctccttccacctgatccgtctactctacgacgaatatatgttttacttagtagaacatcgtgttgctcaggcaacaggagagactcctatagcagtcatgggcgag

SEQ ID NO: 77304 - DNA, 120 bp, Artificial Sequence
  ENSG00000080298_19 (sequence is synthesized)
tttggtgatttaaatgccgtgtctcctggaaatctggataaagatgaaggcagtgaagtagaaagtgaaatggatgaagaactggatgactcttcagagcctcaagccaaaagagagaaa

SEQ ID NO: 77305 - DNA, 120 bp, Artificial Sequence
  ENSG00000080298_20 (sequence is synthesized)
acagagctgagccaggcatttccagtgggctgcatgcagcctgttctcgagactggcgtgcaaccaagcctcctgaatccaattcacagcgagcacattgtcacaagtactcagactatc

SEQ ID NO: 77306 - DNA, 120 bp, Artificial Sequence
  ENSG00000080298_21 (sequence is synthesized)
agacagtgcagcgctacaggaaatacctacactgcagtctaaagaatattaaagcgtatttttccagcttacattaaccctgttgatattgggcttaagttgaaaatttaataagcctga

SEQ ID NO: 77307 - DNA, 120 bp, Artificial Sequence
  ENSG00000080298_22 (sequence is synthesized)
aggtcgactgttgtcaaattctatctgtgctgaacattaactttttggagttgtgaaatggaatgggtgtatgtattttgccagatctttttttttaacgtaaacaaattatttgcttct

SEQ ID NO: 77308 - DNA, 120 bp, Artificial Sequence
  ENSG00000080298_23 (sequence is synthesized)
taataatgaattttttcccttagtttcaggtgtcaagaaggatttttacaacacttaatgtcaatgttttgttttcttataattaaaaagtaatttacattttttgtagcttaaaatatt

SEQ ID NO: 77309 - DNA, 120 bp, Artificial Sequence
  ENSG00000080298_24 (sequence is synthesized)
ttattgttgattgttagtcttggtgtatgatttcatgtgtaagttttttaattagatgcacttctgtgaaatatcaaaagaaatgatttttttgatttacactggaggcatgcccatttg

SEQ ID NO: 77310 - DNA, 120 bp, Artificial Sequence
  ENSG00000080298_25 (sequence is synthesized)
gcagcagatgcatcaaatttgcttttgaaaggtgcttttcattggacagaaccataagacactattttgataacattttgagtatggagagagaatacagagcatttttattatagtgct

SEQ ID NO: 77311 - DNA, 120 bp, Artificial Sequence
  ENSG00000080298_26 (sequence is synthesized)
agagggtttggaaggtcatctatttttctctgaggaaaaaatgagctgtacatttatcagttcagagtaaatgacagaattgcaagagattatgctaatatgtacataatttgtgtacat

SEQ ID NO: 77312 - DNA, 120 bp, Artificial Sequence
  ENSG00000080298_27 (sequence is synthesized)
aattattaaaccatgttaacaatgcaagcttccgttaaacattgaattttaactattatttgcataccaattcctctgtttaaagactactgattctgtatttgggaccactgcacagat

SEQ ID NO: 77313 - DNA, 120 bp, Artificial Sequence
  ENSG00000080298_28 (sequence is synthesized)
gcattctgctgttaagtgggggctgttatagttagatactgaagcagaaaaaaaagacttgactttttttttttaagtgtacatgctacttatgctgagctggacatacaggaaaccatt

SEQ ID NO: 77314 - DNA, 120 bp, Artificial Sequence
  ENSG00000080298_29 (sequence is synthesized)
ccatttggatgactttcttttattccaggtctttttcctaatagtagttcaatatgctgctattataaacgagaatttatagaatgcaaggaatgtagcaacctacataacgttatttcc

SEQ ID NO: 77315 - DNA, 120 bp, Artificial Sequence
  ENSG00000080298_30 (sequence is synthesized)
ttcaaaactatttcctggtttctaaagtatgtggatttaaattgtaaacagaacctgaaggcagtgtaactggcacacctcactgttacttatccccaattctgtaggatttggataggt

SEQ ID NO: 77316 - DNA, 120 bp, Artificial Sequence
  ENSG00000080298_31 (sequence is synthesized)
ggctggatggaccattgccattgaagaatgtacatcagggatcatcgtacctcggctattacatggtgccttaaaacagaactgaagctaaggtttagtaaggtttattttgttcatgtg

SEQ ID NO: 77317 - DNA, 120 bp, Artificial Sequence
  ENSG00000080298_32 (sequence is synthesized)
actaactcttcaatccatttgacaaagtgtgcctgtcattttcagattcctgaagtaaggacaggtgacatgttcttcaaaggaaatttagggaaaacaaaggaaaacaaaaagacaaaa

SEQ ID NO: 77318 - DNA, 120 bp, Artificial Sequence
  ENSG00000080298_33 (sequence is synthesized)
atcagtttccctctttgagtgaccgtggatctattttttattcttagagctgaatattacttgattacaaatcagattgcttaagggtgtggaatagcaggctagttttaataccaactt

SEQ ID NO: 77319 - DNA, 120 bp, Artificial Sequence
  ENSG00000080298_34 (sequence is synthesized)
gttaacataaaatcatatatgttttagaccattcttatttagttacaattttagaaagttaacaaagtaagcaggtacttatcgaagtgcatcttttcagtctaaatgtttgtctgtgtg

SEQ ID NO: 77320 - DNA, 120 bp, Artificial Sequence
  ENSG00000080298_35 (sequence is synthesized)
tctaggtgctggtgagtccacatggacacatgagtgcccatggggcaggagtctgctataaagtcagaaggtgagatcctagagagttacacccagccccattttaatttgcatgaaaag

SEQ ID NO: 77321 - DNA, 120 bp, Artificial Sequence
  ENSG00000080298_36 (sequence is synthesized)
ccaaggttcttttaagcactcaaattatttaatgattaaaacacaagaaaggcacatctgttcatttaaatagttgtaaaaaactaatcagcaaaaataaatagataataaagccaaaaa

SEQ ID NO: 77322 - DNA, 120 bp, Artificial Sequence
  ENSG00000080298_37 (sequence is synthesized)
aaaggaaagcacaaaatgattgacagattatcaaatgaggcctatattaaacccaagatgtttatctttccagtggtattggggtaaggggggtggggggttggaaagacgaggtgagcc

SEQ ID NO: 77323 - DNA, 120 bp, Artificial Sequence
  ENSG00000080298_38 (sequence is synthesized)
ttaattgcctcagactactcaaataacatcaacaacatttcttaagtaaaatttaaatattttagatgtaattttaaaaactgatccaaattttttattatacaactcactcatatattt

SEQ ID NO: 77324 - DNA, 120 bp, Artificial Sequence
  ENSG00000080298_39 (sequence is synthesized)
gaaagtcttcactagcatagtagcatcaccttcatctaaatgtcatttaaattactgtccccctttttcctcccaaaaagacaatggatttgtaccaaaacacacacaaaaaaggcaaac

SEQ ID NO: 77325 - DNA, 120 bp, Artificial Sequence
  ENSG00000080298_40 (sequence is synthesized)
aaaacatgataatctgcaaaagttcatgtatctacttcattgtgcataggaagtgtttacaggtaaaattaaaatcaaaaattgaaaaaacactcttcattttggctctcctttctgaat

SEQ ID NO: 77326 - DNA, 120 bp, Artificial Sequence
  ENSG00000080298_41 (sequence is synthesized)
tttttcagtttcctgtctctacccgccatcctttgagtgatactatatctgtattggaccaaatgtatttactggtttcattttgtttattgaatgactttaaatgtatttattatcatt

SEQ ID NO: 77327 - DNA, 120 bp, Artificial Sequence
  ENSG00000080298_42 (sequence is synthesized)
gtttaatttaatgttggatatatttgtatcattacaggaatctggtaataatgggcaaatttagattgatgaggcttagggatcggggatgctccaggattcaacatttcttccaattgt

SEQ ID NO: 77328 - DNA, 120 bp, Artificial Sequence
  ENSG00000080298_43 (sequence is synthesized)
tcatggtttgttctaaattaggacagattaagaactaataaaacattattacatttgaacttgactcaataaaaatattctgatctcctttatgaatattaggaatattctttgtgatta

SEQ ID NO: 77329 - DNA, 120 bp, Artificial Sequence
  ENSG00000080298_44 (sequence is synthesized)
gtgtaagtagtttggatcaaaacataaaaagaagacctatggtttatgctacttctagttatttgtagttcacagtaaaacatgcacagacatacacacaaacattttcatcaatttcga

SEQ ID NO: 77330 - DNA, 120 bp, Artificial Sequence
  ENSG00000080298_45 (sequence is synthesized)
atttgaattgtgaaaaatatataagaaaataaaaacaatttatacatttgagcaaattgagcaatcacatttattgcatttatttccctttttcccttttttcactcattgaaagtgtgg

SEQ ID NO: 77331 - DNA, 120 bp, Artificial Sequence
  ENSG00000080298_46 (sequence is synthesized)
gttttctaaataatattagacactaacactcaacagatttattcacaaatgacacaagtacacattttaagacttctttgtatttcttgcaattataaccaatcactagtcatgaaatat

SEQ ID NO: 77332 - DNA, 120 bp, Artificial Sequence
  ENSG00000080298_47 (sequence is synthesized)
acctacataaaccaagtcctacactttcagtgaggaagaatgtaaggaaggtatgttgactgttttcaagtttcagaaaagatattttcatatgataggattgagtatcatgggtatagt

SEQ ID NO: 77333 - DNA, 120 bp, Artificial Sequence
  ENSG00000080298_48 (sequence is synthesized)
ttgatcttgacatatagtttgaaaatcatactcaaaagatttgcattcatgaaaccagtgaacaatagggtggaatggatgaaccatctccttggaagacagggcccaattttcaatttt

SEQ ID NO: 77334 - DNA, 120 bp, Artificial Sequence
  ENSG00000080298_49 (sequence is synthesized)
ttctttggctatcaagttgctagtcacttattcaggattttcatccaaactgtgtttggactgactgtataagtcttactgccttttcagaaatctgctttcctttgtgtgatttttctt

SEQ ID NO: 77335 - DNA, 120 bp, Artificial Sequence
  ENSG00000080298_50 (sequence is synthesized)
gtactgtatagcacggtttatgcacctctctttagatggtgtactttaaaaacaaaagtaaaatttagaaaatggttttaacactgcatacctaaaattagtagtgtgcagcattgactg

SEQ ID NO: 77336 - DNA, 120 bp, Artificial Sequence
  ENSG00000080298_51 (sequence is synthesized)
cctttgatttgtagtagacaagtaaaaatgaatacgttcttgtagaatgctgtaaaagttattcaggaatgaatacggttttagtgccgtaatcatgaatctttttatatgaatgcactg

SEQ ID NO: 77337 - DNA, 120 bp, Artificial Sequence
  ENSG00000080298_52 (sequence is synthesized)
tctaaaagtgctaaatgcattttcaaatttttaaaaattcctcagatgatatatttgaaatgtctaaaataatgctgtgcttgaaacattagtgtaaaaggaaaaaaaaaatagtgtcac

SEQ ID NO: 77338 - DNA, 120 bp, Artificial Sequence
  ENSG00000080298_53 (sequence is synthesized)
tgtgatgttggtcctccctgtgtggacacaagtagaaagaaaaaacttggcaagtcacctttgtgtacaatttgaggcagtggttatatacaataaattgacctttattatatcccccag

SEQ ID NO: 77339 - DNA, 120 bp, Artificial Sequence
  ENSG00000080298_54 (sequence is synthesized)
acacacacattcttggtgagaaaagaacaaccatccagaaattgagatgagaacttttgtgatctgtatgaatcacagcagatcatgggggaggaggattggcatgcagtgctgttgaaa

SEQ ID NO: 77340 - DNA, 120 bp, Artificial Sequence
  ENSG00000080298_55 (sequence is synthesized)
attgggcttgttgttagatcagaacaacctccatgtatatggttagaacgaatcaattaatggaatcctagtatttctgcaagtttggtgatttttaaaaactggaatagaagcattaat

SEQ ID NO: 77341 - DNA, 120 bp, Artificial Sequence
  ENSG00000080298_56 (sequence is synthesized)
tcagtgcttagttctagtattagaaaacccctttgatgtaatgccttgtattaaccctttgagcattgtaagatatacaatgggggacaaaagcctttcagatcatttatttagacttag

SEQ ID NO: 77342 - DNA, 120 bp, Artificial Sequence
  ENSG00000080298_57 (sequence is synthesized)
accggtaaagtatactctatatccaaatgtctaattatgctgtttttttaaaggggggggtaggaagagaaagtgtttccacgccgaacacttgcattttatatacaactcttaattttt

SEQ ID NO: 77343 - DNA, 120 bp, Artificial Sequence
  ENSG00000080298_58 (sequence is synthesized)
cttcaagagggcttgatatatttattcccaaatattcactgccatctaagtaagtgtactgtttacagaaaaaaaaaatcaacttttctagtatcacaccatagtctctagaaaaggagg

SEQ ID NO: 77344 - DNA, 120 bp, Artificial Sequence
  ENSG00000080298_59 (sequence is synthesized)
acaaatacatgggcctggatagacctatgtcataactgatttctgcacattgaaggtacctagattgcctttaaaaggtataaagaaagggttaagtttcttttttttttgtcttttttt

SEQ ID NO: 77345 - DNA, 120 bp, Artificial Sequence
  ENSG00000080298_60 (sequence is synthesized)
tcccaaaatgaatcaaaagatctcatttatttagctttagaaagtacaagtgtaagtaaagccttaggaagaaaggagttcgagtggattaagagaatctgaactctttgggggcagtta

SEQ ID NO: 77346 - DNA, 120 bp, Artificial Sequence
  ENSG00000080298_61 (sequence is synthesized)
ggctatttggagttagatcgctcataaaatattgtttgcgaatttcacacagggcataattttatctatgctccaaaactttaatacgttgtcaaaaaattatatatagatagaatggag

SEQ ID NO: 77347 - DNA, 120 bp, Artificial Sequence
  ENSG00000080298_62 (sequence is synthesized)
agcaaagcacttgattttaagctcatctgtcaggagatgctatgactactgcttctgatatctctaaatgtcagtctgcttacaccattgctgattttgttcaagggaatctcttcgtgc

SEQ ID NO: 77348 - DNA, 120 bp, Artificial Sequence
  ENSG00000080298_63 (sequence is synthesized)
acttgattccctctgttccctgcgtgatcgaacatgaaagcagtgttgtctgcagatgtgcttgcgctgccctagctgggtgcaaataagagtgtaacctattctgatgtctggtgaaag

SEQ ID NO: 77349 - DNA, 120 bp, Artificial Sequence
  ENSG00000080298_64 (sequence is synthesized)
gacatccatagcatagtgcaagtatgccgtaaacgttgctttttaggcagtttaggaagtcagaccatgcaaattactcatgtgttaacatgcaatactcaaagggttttaatttaactc

SEQ ID NO: 77350 - DNA, 120 bp, Artificial Sequence
  ENSG00000080298_65 (sequence is synthesized)
tcttcttttgaattcttcatgatgatttactgtaaatgcttctcagtttgcatgccttgatcattgctgctagtgattttatgtgccagtagacctgagtttagtttaccaattttactt

SEQ ID NO: 77351 - DNA, 120 bp, Artificial Sequence
  ENSG00000080298_66 (sequence is synthesized)
aaatagtaaaagccacttacaaagtgactgcctaggatttttttttcctttcatttgaaataattgataatatgtttttttaaaaagaaaaatgtgttttgtctcttcttttatttggtt

SEQ ID NO: 77352 - DNA, 120 bp, Artificial Sequence
  ENSG00000080298_67 (sequence is synthesized)
ctggtttgattctttttctcccctctttcctttgttttttttttttaaataaattatgatgttgggattggaagccctgagtaatgaaaatctttggtaagaattgtttatgtagctcaa

SEQ ID NO: 77353 - DNA, 120 bp, Artificial Sequence
  ENSG00000080298_68 (sequence is synthesized)
taacgaggacaacaaatattctttagaagaattttgattctggggaggaaagaaaatataaaaactcccattgactgttgataaccaagtaaatttttccttcagtaaattagtattttt

SEQ ID NO: 77354 - DNA, 120 bp, Artificial Sequence
  ENSG00000080298_69 (sequence is synthesized)
gaagaaacgatcgccttgttttaacttgctaaacaacaattttaaatgacccaataaagaatctattgaactttattcgtttaaaaagcatcttttgtaccaaagcaaatttttttctct

SEQ ID NO: 77355 - DNA, 120 bp, Artificial Sequence
  ENSG00000080298_70 (sequence is synthesized)
actcatttccatcatcaatttggacctatggtggtgaccaatgcattggttacagaaactttaagtgagtgccttgagaaaacttggaaatttgtgcctgaggtggtaaacttttaatta

SEQ ID NO: 77356 - DNA, 120 bp, Artificial Sequence
  ENSG00000080298_71 (sequence is synthesized)
ggttaattgtagtgcttaccaatcagtaacttcactatcactcagggctttcgtaccttctaggtaaaacttctttcattgtgtttttttaagatactgtatttttttttaagtgccatc

SEQ ID NO: 77357 - DNA, 120 bp, Artificial Sequence
  ENSG00000080298_72 (sequence is synthesized)
atttaaatttcacttagtaagtggcagattacattattcagtcccacaagcacagaaacatagtaacactaggagatatttgaacatttattttacaatcgactgaatatattatgtaaa

SEQ ID NO: 77358 - DNA, 120 bp, Artificial Sequence
  ENSG00000080298_73 (sequence is synthesized)
tgaggtaagcaacttttgtagagattgtatgtgtgagataatgtaatgttcttttccagtttttggactacagttgaataaactttttaattatttaaaaacatctttaccgaataacat

SEQ ID NO: 77359 - DNA, 120 bp, Artificial Sequence
  ENSG00000080298_74 (sequence is synthesized)
gtgatggttttttgtataatgtatttgattttgtaaatacgtatttcctgatgtgatttttgtgagaaatgctaaatcttttagtatatcatgtcctctcaaaattggcaggagctaaat

SEQ ID NO: 77360 - DNA, 120 bp, Artificial Sequence
  ENSG00000080298_75 (sequence is synthesized)
aatagtttgtgggcgatttgtattgtgtactgtacaataactggggaacttttataattataaaaatatatattaacttttagtgtgttgtttaaacaaatgactggaacatactaaaga

SEQ ID NO: 77361 - DNA, 120 bp, Artificial Sequence
  ENSG00000080298_76 (sequence is synthesized)
tattagtaggatttttctgaatatttcagacttgaactcaggctagctttcttgtgtttttcaaaacaaaatggtgtcttgtcttttaaaatcaataaatttgtttccttgttacaaata

SEQ ID NO: 77362 - DNA, 120 bp, Artificial Sequence
  ENSG00000080298_77 (sequence is synthesized)
aatcttcaccataaacttaaactactgttggcatttataccaaatgaaaaagacgcctgccacttcgacctttatgctctcagggaaaataaatggctttgtagacactgctagaggtca

SEQ ID NO: 77363 - DNA, 120 bp, Artificial Sequence
  ENSG00000080298_78 (sequence is synthesized)
gaaatgaaactcctcagacagattaccatgaaccgtctgtttcctacactaaatcataaattgactgaaggttctgggcctcattttcaaagcatttaataaaatgggactttgaatgac

SEQ ID NO: 77364 - DNA, 120 bp, Artificial Sequence
  ENSG00000080298_79 (sequence is synthesized)
cagaaaatacaaatgtgcatagacagctctgggggagtgttttatatatctgtctgtctctctcggtatatatagccagctgtatggcaccagtgcaatggtggtatagttctaacctca

SEQ ID NO: 77365 - DNA, 120 bp, Artificial Sequence
  ENSG00000080298_80 (sequence is synthesized)
gtaatatttggtaaacttaaactatttttaaagtccattttcttttttatcctcatttgccatctattcatttgctacatttattcacaccagcaatctgagtgaaatagaaagtcgact

SEQ ID NO: 77366 - DNA, 120 bp, Artificial Sequence
  ENSG00000080298_81 (sequence is synthesized)
actctactactcaataatagttttgttatgtaggaagatgcagcagcttgtttgtgtgaacttctgcttccactacaaacagtactttaaagacaggccttccactgccattcagaaagc

SEQ ID NO: 77367 - DNA, 120 bp, Artificial Sequence
  ENSG00000080298_82 (sequence is synthesized)
agccatggaggatactctagtttctttgggaagataaacactcaatctgctagttaagagacaaagctcaagagaaataagctgaagctgtaacctccatttcaaacttgtggttctgca

SEQ ID NO: 77368 - DNA, 120 bp, Artificial Sequence
  ENSG00000080298_83 (sequence is synthesized)
actggaatatgaaaaatattttaagtgggaaaaagattggtgctcctgataaagcaaagggctgggaatacaatggaaaggattaaatatgtattttgtagactctttcccggtctccaa

SEQ ID NO: 77369 - DNA, 120 bp, Artificial Sequence
  ENSG00000080298_84 (sequence is synthesized)
gaacaaagtaaatgattctattttagaaggataaaaatggtaatgatgataactaacattttttggacacttactatgtgcgaggcacagttctatgttttttacatgtaataaagcact

SEQ ID NO: 77370 - DNA, 120 bp, Artificial Sequence
  ENSG00000080298_85 (sequence is synthesized)
tattaaaaataagccagaattacacttcagtctaaatacattattgattaaaaccatggttcctaaccaagtcagcctcagagccaggagggactgtggagttattgcaagagttcctta

SEQ ID NO: 77371 - DNA, 120 bp, Artificial Sequence
  ENSG00000080298_86 (sequence is synthesized)
aattcctctgttcttatgtgcttaatcaaaagattctaaaattgtggattatatcatgtgaaagttcatggaatgtgtctctatattatacaggtacctatgtaaaagaaaaacttgaga

SEQ ID NO: 77372 - DNA, 120 bp, Artificial Sequence
  ENSG00000080298_87 (sequence is synthesized)
agatttttttttcaaacacagtctgattttcaaacccatatgcttctaaccactaatgatgtaagggggaaaattctcttcttcagaatttctgaatagtcatcaaaatggcttatcaaa

SEQ ID NO: 77373 - DNA, 120 bp, Artificial Sequence
  ENSG00000080298_88 (sequence is synthesized)
aagcttaaactctgaatataacaagggctggttaatataatgaggaatagatgcaaatgctcagatggttcagcactggcttattttgttatattgaatgcaggaggcgggggtagttta

SEQ ID NO: 77374 - DNA, 120 bp, Artificial Sequence
  ENSG00000080298_89 (sequence is synthesized)
taccttgtcgaatcataccagattattaaatgtgacaaattacccaaggcggtaaaaaagacatgttcacttttaagctatgtgtatgtgcttatataaataaaaaagagtgaaaacaga

SEQ ID NO: 77375 - DNA, 120 bp, Artificial Sequence
  ENSG00000080345_0 (sequence is synthesized)
tgagtaaacagccggagctgggaaagtcgagctctggcagcgtctgggtgctgaggggcagaggcggagagaaccctgtcctgatcttcctaggtgggataaatatcggggtgacagtgg

SEQ ID NO: 77376 - DNA, 120 bp, Artificial Sequence
  ENSG00000080345_1 (sequence is synthesized)
taggccgcggggaaccctcagtctgcccaccctccgccccctcgcggcgagatgcctcgttccccgggcttctcccgccctccgccgatctcctccctctgttgaaagctgcccgggaaa

SEQ ID NO: 77377 - DNA, 120 bp, Artificial Sequence
  ENSG00000080345_2 (sequence is synthesized)
gtggtggcgggagcgggcccaggcccgaatgtggcgtgggctcaggtgtctggtgtcgggcgccggaggaggttcgcgctggggtttggtgattcggaggcctggggtgcagacgcggcg

SEQ ID NO: 77378 - DNA, 120 bp, Artificial Sequence
  ENSG00000080345_3 (sequence is synthesized)
tggctgtgaggcccgggcgggcgtgcgggtgtgagggccggactcacactgggccgccgcggggctgtttccatcggtcactggattttctcctcttccggttcgggcctcagggtggcc

SEQ ID NO: 77379 - DNA, 120 bp, Artificial Sequence
  ENSG00000080345_4 (sequence is synthesized)
gacatgacggccaggggtcagagccccctcgcgccgctgttggagactttggaagacccttctgcctcccatggagggcagactgacgcttacctgactctgaccagtcgtatgactgga

SEQ ID NO: 77380 - DNA, 120 bp, Artificial Sequence
  ENSG00000080345_5 (sequence is synthesized)
gaagaaggaaaagaagtaattacagaaattgagaaaaaacttcctcggctgtacaaagttttaaagactcacatttccagtcaaaactcggagctgagtagtgctgctctacaagccctg

SEQ ID NO: 77381 - DNA, 120 bp, Artificial Sequence
  ENSG00000080345_6 (sequence is synthesized)
gggttttgcttatataatcccaaaattacctcagaattatcagaggcaaatgctctagaattgctttcaaaattgaatgataccattaagaattcagacaaaaatgtacgtactagagca

SEQ ID NO: 77382 - DNA, 120 bp, Artificial Sequence
  ENSG00000080345_7 (sequence is synthesized)
ctttgggtgatatctaagcagacatttccctctgaagtggttggcaaaatggtatccagtataattgattcattagaaatactgtttaacaaaggagagacgcattctgctgttgttgat

SEQ ID NO: 77383 - DNA, 120 bp, Artificial Sequence
  ENSG00000080345_8 (sequence is synthesized)
tttgaagcattaaatgttatcgtaaggctaattgaacaagccccaattcaaatgggagaagaggcagtgaggtgggcaaaactggtcatacctttagtggttcattcagcacaaaaggta

SEQ ID NO: 77384 - DNA, 120 bp, Artificial Sequence
  ENSG00000080345_9 (sequence is synthesized)
catttgcggggagcaactgctctggagatgggaatgccattattgcttcagaaacagcaagaaatagcatctattacggagcagcttatgactactaaattaatctcagaacttcagaag

SEQ ID NO: 77385 - DNA, 120 bp, Artificial Sequence
  ENSG00000080345_10 (sequence is synthesized)
ctatttatgagtaaaaatgagacttacgtgttaaaattatggcctttgtttgtcaaactacttggaaggaccttgcatcgaagtgggagtttcatcaattctctcttgcaactagaagaa

SEQ ID NO: 77386 - DNA, 120 bp, Artificial Sequence
  ENSG00000080345_11 (sequence is synthesized)
cttggatttcgtagtggagcacccatgattaaaaagatagcttttattgcttggaagagtttaatagataattttgctttaaatccagatatactatgtagtgcaaaaagactcaagttg

SEQ ID NO: 77387 - DNA, 120 bp, Artificial Sequence
  ENSG00000080345_12 (sequence is synthesized)
ttaatgcagcctttgagttccatccatgtgagaacagaaactctagcattaacaaaactagaagtctggtggtatttactgatgagacttggacctcatcttcctgctaattttgaacag

SEQ ID NO: 77388 - DNA, 120 bp, Artificial Sequence
  ENSG00000080345_13 (sequence is synthesized)
gtttgtgtgcctctgattcaaagtacaataagcattgattctaatgcctcacctcagggcaattcgtgtcatgtagctacatctccaggtttaaatcctatgactcctgtacacaaaggt

SEQ ID NO: 77389 - DNA, 120 bp, Artificial Sequence
  ENSG00000080345_14 (sequence is synthesized)
gcttcctccccgtacggagccccgggaactccccgaatgaacctgagttcgaatttaggtggaatggccacaatcccatccattcaacttttgggacttgaaatgttgcttcatttcttg

SEQ ID NO: 77390 - DNA, 120 bp, Artificial Sequence
  ENSG00000080345_15 (sequence is synthesized)
ttgggtccagaagccttgagttttgctaagcaaaataaacttgtgctgagcttagagccattggaacatccgttaatcagcagcccttcctttttttccaaacatgcaaatacacttatc

SEQ ID NO: 77391 - DNA, 120 bp, Artificial Sequence
  ENSG00000080345_16 (sequence is synthesized)
actgctgttcatgatagctttgttgcagttggaaaagatgcccccgatgtggttgtcagtgctatctggaaggagctaattagcttggtgaagtcagttactgaatcaggtaacaaaaaa

SEQ ID NO: 77392 - DNA, 120 bp, Artificial Sequence
  ENSG00000080345_17 (sequence is synthesized)
gagaaaccaggttctgaagttttgactctcttattaaagtctttggaaagcatagtaaagtctgaagtatttcctgtatcaaaaacgctggtcctcatggaaattacaattaaaggactt

SEQ ID NO: 77393 - DNA, 120 bp, Artificial Sequence
  ENSG00000080345_18 (sequence is synthesized)
cctcagaaagtattaggttcaccagcatatcaggttgctaatatggatattcttaatggaactccagctttgttcttaattcaattaattttcaacaatttcttggaatgtggtgtatca

SEQ ID NO: 77394 - DNA, 120 bp, Artificial Sequence
  ENSG00000080345_19 (sequence is synthesized)
gatgaaaggttctttctcagtttggaatcacttgtaggctgtgttctttctggtccaacttcaccactagctttcagtgactcagttttaaatgttattaatcaaaatgcaaagcagttg

SEQ ID NO: 77395 - DNA, 120 bp, Artificial Sequence
  ENSG00000080345_20 (sequence is synthesized)
gaaaataaggagcatctctggaaaatgtggagtgttatagtcaccccattaactgaattgattaatcagaccaatgaagtaaatcaaggtgatgccttagaacataattttagtgccatc

SEQ ID NO: 77396 - DNA, 120 bp, Artificial Sequence
  ENSG00000080345_21 (sequence is synthesized)
tatggtgcattgactttaccagtaaaccacattttttcagaacagagatttccagtggccaccatgaagactttgcttagaacttggtcagaattatatagagcatttgctcgttgtgct

SEQ ID NO: 77397 - DNA, 120 bp, Artificial Sequence
  ENSG00000080345_22 (sequence is synthesized)
gctttggtggcaacagcagaagagaacttgtgctgtgaggaactttcttccaagataatgtccagtttggaagatgaaggcttttctaatttgttgttcgtggatagaattatttatatt

SEQ ID NO: 77398 - DNA, 120 bp, Artificial Sequence
  ENSG00000080345_23 (sequence is synthesized)
attactgtaatggttgattgcattgacttctcaccatataatattaaatatcagcccaaagttaaatcaccacagagaccttcagattggtccaaaaagaagaatgagcccctagggaaa

SEQ ID NO: 77399 - DNA, 120 bp, Artificial Sequence
  ENSG00000080345_24 (sequence is synthesized)
ttgacttctttatttaaacttattgtgaaagtgatctattctttccacacactgagcttcaaggaagcacattctgataccctcttcactattggcaactcaatcaccggcattatttcc

SEQ ID NO: 77400 - DNA, 120 bp, Artificial Sequence
  ENSG00000080345_25 (sequence is synthesized)
agtgtacttgggcatatttctttgccttctatgatccgaaaaatatttgcaactttaacaagacctctggcattattttatgaaaactcaaagcttgatgaagttcctaaagtatatagt

SEQ ID NO: 77401 - DNA, 120 bp, Artificial Sequence
  ENSG00000080345_26 (sequence is synthesized)
tgtctgaacaacaagttagaaaagctactgggagaaattattgcttgtctgcaattcagctacaccggaacttatgatagtgaacttcttgaacaactctccccactattatgcataata

SEQ ID NO: 77402 - DNA, 120 bp, Artificial Sequence
  ENSG00000080345_27 (sequence is synthesized)
tttctgcacaagaataaacagattcgaaaacagagtgctcagttctggaatgccacttttgccaaagtgatgatgttggtttatcctgaagagttaaaaccagtactaacacaagccaaa

SEQ ID NO: 77403 - DNA, 120 bp, Artificial Sequence
  ENSG00000080345_28 (sequence is synthesized)
caaaaatttctgctcctgttgcctggtttggaaactgttgaaatgatggaggaatccagtggaccatattctgatggaacagaaaattcacaactaaatgtgaagataagtggcatggag

SEQ ID NO: 77404 - DNA, 120 bp, Artificial Sequence
  ENSG00000080345_29 (sequence is synthesized)
agaaaatcaaatggaaaaagagattcatttttggcacaaacaaagaataaaaaagaaaatatgaaaccagcagccaaactgaaacttgaatcttcgtctttaaaagtaaagggtgaaatt

SEQ ID NO: 77405 - DNA, 120 bp, Artificial Sequence
  ENSG00000080345_30 (sequence is synthesized)
cttttggaagaggaaaagtctactgactttgtgtttatacctccagaaggaaaagatgcaaaggaaagaatattaactgatcatcaaaaagaagttctcaaaacaaagcggtgtgatatt

SEQ ID NO: 77406 - DNA, 120 bp, Artificial Sequence
  ENSG00000080345_31 (sequence is synthesized)
cctgccatgtataataatctggatgtttcccaagataccttatttactcagtatagtcaggaagagcctatggaaattcctactttaaccagaaaaccaaaggaggattctaagatgatg

SEQ ID NO: 77407 - DNA, 120 bp, Artificial Sequence
  ENSG00000080345_32 (sequence is synthesized)
attacggaggagcaaatggacagtgacattgtcattcctcaagatgtcacggaagactgtggtatggctgaacatcttgaaaagtcctccctttcgaataatgagtgtggttctcttgac

SEQ ID NO: 77408 - DNA, 120 bp, Artificial Sequence
  ENSG00000080345_33 (sequence is synthesized)
aaaaccagtccagaaatgtcaaacagtaataatgatgaaagaaaaaaagctttaatttcatcaaggaaaacatcaactgaatgtgcatctagtacagaaaattctttcgttgtcagcagt

SEQ ID NO: 77409 - DNA, 120 bp, Artificial Sequence
  ENSG00000080345_34 (sequence is synthesized)
agttcagtttctaataccactgttgctggaactcccccataccctacaagtcggaggcaaacctttattactttggagaagtttgatggttcagaaaatagaccttttagtccatccccc

SEQ ID NO: 77410 - DNA, 120 bp, Artificial Sequence
  ENSG00000080345_35 (sequence is synthesized)
ttgaataatatttcatcaactgttacagtgaaaaataaccaggaaaccatgattaaaacagattttctaccaaaagcaaagcaaagagaagggactttttcaaaatctgattctgaaaaa

SEQ ID NO: 77411 - DNA, 120 bp, Artificial Sequence
  ENSG00000080345_36 (sequence is synthesized)
atagtgaatggaactaagagatcaagccggagagctggtaaagctgaacaaacagggaataaaaggtctaagcccttaatgagatctgagccggagaaaaatactgaggaatctgttgaa

SEQ ID NO: 77412 - DNA, 120 bp, Artificial Sequence
  ENSG00000080345_37 (sequence is synthesized)
ggcattgtagtcttagaaaataacccacctggtttgcttaatcaaacagaatgtgtgtcagataatcaggttcatctttctgaatctacaatggagcatgacaatacaaagcttaaagca

SEQ ID NO: 77413 - DNA, 120 bp, Artificial Sequence
  ENSG00000080345_38 (sequence is synthesized)
gcaacagtggaaaatgctgtattattggaaactaatactgtagaggagaaaaatgtagaaattaatttggaatccaaagagaatacacccccagtagtaatatcagcagatcaaatggta

SEQ ID NO: 77414 - DNA, 120 bp, Artificial Sequence
  ENSG00000080345_39 (sequence is synthesized)
aatgaggatagtcaggttcagataactccaaatcagaaaacccttagacggtcttcaaggcgacgttcagaagtagtagagtctaccactgaaagccaagataaggaaaatagtcatcaa

SEQ ID NO: 77415 - DNA, 120 bp, Artificial Sequence
  ENSG00000080345_40 (sequence is synthesized)
aaaaaggaacgacgtaaggaagaagaaaaacctcttcagaagagtccattgcatataaaagatgatgtgttacctaaacaaaaactgattgctgaacaaactctacaggagaatttaatt

SEQ ID NO: 77416 - DNA, 120 bp, Artificial Sequence
  ENSG00000080345_41 (sequence is synthesized)
gagaaaggaagtaatttacatgagaagactcttggggaaactagtgctaatgcagaaactgaacaaaataaaaaaaaggcagaccctgagaacattaagtctgagggggatggtacccag

SEQ ID NO: 77417 - DNA, 120 bp, Artificial Sequence
  ENSG00000080345_42 (sequence is synthesized)
gacattgtagataagtcctctgagaaactagtcagaggccgaacacggtatcaaactagaagagcatctcagggtttgctttccagcattgaaaactcagaatctgatagttcggaggca

SEQ ID NO: 77418 - DNA, 120 bp, Artificial Sequence
  ENSG00000080345_43 (sequence is synthesized)
aaagaagaaggttctaggaagaagagatctggaaaatggaaaaacaaaagcaatgaaagtgttgacattcaagatcaagaagagaaagtggtgaaacaggaatgtataaaagctgaaaat

SEQ ID NO: 77419 - DNA, 120 bp, Artificial Sequence
  ENSG00000080345_44 (sequence is synthesized)
cagtcacatgattataaagcaacttctgaagaagatgtaagcataaaatctccgatttgcgaaaaacaagatgaaagtaatactgtaatatgtcaggattctacagtaacttcagatttg

SEQ ID NO: 77420 - DNA, 120 bp, Artificial Sequence
  ENSG00000080345_45 (sequence is synthesized)
ttgcaagttcctgatgatttaccaaatgtgtgtgaggaaaaaaatgaaactagcaaatatgcagaatattcctttacaagtctacctgtgccagaatcaaatctaaggactagaaatgcc

SEQ ID NO: 77421 - DNA, 120 bp, Artificial Sequence
  ENSG00000080345_46 (sequence is synthesized)
attaagagattacataagcgagactcttttgataattgtagtttgggagaatcctcaaaaatagggatatcagatatttcttcgctttcagaaaaaacttttcaaacacttgaatgccaa

SEQ ID NO: 77422 - DNA, 120 bp, Artificial Sequence
  ENSG00000080345_47 (sequence is synthesized)
cacaagagaagtaggagggtgaggagatctaaaggttgtgattgctgtggggaaaaatcacaacctcaggaaaagtcactcattgggttaaagaatacagaaaataatgacgtagagatt

SEQ ID NO: 77423 - DNA, 120 bp, Artificial Sequence
  ENSG00000080345_48 (sequence is synthesized)
agtgaaacaaaaaaggcagatgtgcaagcacctgtaagcccatcagaaacttctcaagctaatccatattctgaaggacaatttttagatgaacatcatagtgtgaattttcatttgggt

SEQ ID NO: 77424 - DNA, 120 bp, Artificial Sequence
  ENSG00000080345_49 (sequence is synthesized)
ctcaaagaggataatgatactattaatgattcattaattgtttctgaaaccaaatcaaaagaaaacactatgcaagaatctcttccttctggaatagtaaactttagagaggaaatttgt

SEQ ID NO: 77425 - DNA, 120 bp, Artificial Sequence
  ENSG00000080345_50 (sequence is synthesized)
gatatggattctagtgaagcaatgtctcttgaaagccaggagtcacctaatgaaaattttaaaactgttggcccgtgtttaggagactcgaaaaatgtttcacaggaatctttggagaca

SEQ ID NO: 77426 - DNA, 120 bp, Artificial Sequence
  ENSG00000080345_51 (sequence is synthesized)
aaagaagaaaaaccagaagaaaccccaaaaatggaactgagtctagagaatgttactgttgaaggaaatgcatgtaaagtaacagaatccaatctagagaaagcaaaaactatggaattg

SEQ ID NO: 77427 - DNA, 120 bp, Artificial Sequence
  ENSG00000080345_52 (sequence is synthesized)
aatgtaggaaatgaagctagctttcatggacaagagagaaccaaaactggtatttctgaagaagcagcaatagaagaaaataaaagaaatgatgactctgaagcagacacagctaaactg

SEQ ID NO: 77428 - DNA, 120 bp, Artificial Sequence
  ENSG00000080345_53 (sequence is synthesized)
aatgccaaagaagtagcaactgaggaatttaattcagatattagtctttctgataatactacacctgtaaaattgaatgctcaaactgagatttctgaacaaacagcagctggggaacta

SEQ ID NO: 77429 - DNA, 120 bp, Artificial Sequence
  ENSG00000080345_54 (sequence is synthesized)
gatggaggaaatgatgtatctgatctacactcatctgaagaaacgaataccaaaatgaaaaataatgaagaaatgatgatcggcgaggcaatggctgaaactggccatgatggtgaaaca

SEQ ID NO: 77430 - DNA, 120 bp, Artificial Sequence
  ENSG00000080345_55 (sequence is synthesized)
gagaatgagggcataactaccaaaacctcaaagcctgatgaagctgaaacaaacatgttgactgcagaaatggacaactttgtttgtgacacagttgaaatgagcactgaagaaggaatc

SEQ ID NO: 77431 - DNA, 120 bp, Artificial Sequence
  ENSG00000080345_56 (sequence is synthesized)
attgacgctaataaaactgaaacaaatactgagtatagtaaatctgaagaaaaattagataacaatcaaatggtaatggaaagtgatattttacaggaagatcaccatacttcacagaaa

SEQ ID NO: 77432 - DNA, 120 bp, Artificial Sequence
  ENSG00000080345_57 (sequence is synthesized)
gtggaggaaccatcacagtgtctggcatctggaacagctatctctgagctaataatagaagacaataatgcatctcctcaaaaactaagggaacttgatccttcacttgtgtcagcaaat

SEQ ID NO: 77433 - DNA, 120 bp, Artificial Sequence
  ENSG00000080345_58 (sequence is synthesized)
gacagtcctagtggcatgcagacacgctgtgtctggtctcctttggcttctccgtctacgagcattttaaagagaggactaaaaagatcccaagaagatgaaatctcatcacctgttaat

SEQ ID NO: 77434 - DNA, 120 bp, Artificial Sequence
  ENSG00000080345_59 (sequence is synthesized)
aaggttcgccgtgtctcctttgcagatccaatataccaagcaggattggcagatgacattgatagacggtgctctattgttaggtcccattcttccaatagttctcccataggaaaaagt

SEQ ID NO: 77435 - DNA, 120 bp, Artificial Sequence
  ENSG00000080345_60 (sequence is synthesized)
gttaaaacttctcctactacacaatctaagcataataccacttcagccaaaggatttctgtccccaggatcacgtagccctaaatttaagagctcaaagaagtgtttaatttcagaaatg

SEQ ID NO: 77436 - DNA, 120 bp, Artificial Sequence
  ENSG00000080345_61 (sequence is synthesized)
gccaaagaatccataccatgcccaacagaaagtgtttacccaccattggtgaactgtgtggcaccagttgacatcattttacctcagattacatcaaacatgtgggcaagaggcctggga

SEQ ID NO: 77437 - DNA, 120 bp, Artificial Sequence
  ENSG00000080345_62 (sequence is synthesized)
ctcattagagctaagaatataaaaactattggtgatttgagtactcttacagcatctgaaataaaaactcttcctatccgttctccaaaagtgtccaatgtaaaaaaggctctcagaata

SEQ ID NO: 77438 - DNA, 120 bp, Artificial Sequence
  ENSG00000080345_63 (sequence is synthesized)
tatcatgagcagcaggtgaagactcgtggactagaagagattccagtttttgatatttctgaaaaaacagtaaatggaatagaaaataaatctttgtcacctgatgaagaaagacttgtc

SEQ ID NO: 77439 - DNA, 120 bp, Artificial Sequence
  ENSG00000080345_64 (sequence is synthesized)
tcagatataattgatcctgttgctttagaaattccattatccaaaaaccttctggcacagattagtgctcttgctcttcagctggattcagaagatcttcataattattcaggaagccaa

SEQ ID NO: 77440 - DNA, 120 bp, Artificial Sequence
  ENSG00000080345_65 (sequence is synthesized)
ctatttgaaatgcacgagaaactaagttgtatggcaaactctgtaataaaaaatctacagtcacgttggagatcaccatcccatgaaaattctatttagtattttcagagaaaattgaag

SEQ ID NO: 77441 - DNA, 120 bp, Artificial Sequence
  ENSG00000080345_66 (sequence is synthesized)
gtttttttaaacatcactggatttcttgattgaggaaacaagttctgaaataatagcacaatttcaaagaagagactctttgcaaagttgataacatttcaaaccctgaaggacagtgac

SEQ ID NO: 77442 - DNA, 120 bp, Artificial Sequence
  ENSG00000080345_67 (sequence is synthesized)
ttattatgtaagttcaattttgtaagttcattatgtaagatccttttttttttcataatatgtattcttggctgctatgcgtggtttttcaggaaatttaattatcttactgagatgtga

SEQ ID NO: 77443 - DNA, 120 bp, Artificial Sequence
  ENSG00000080345_68 (sequence is synthesized)
aagcaaaactagtaacagaacttacattttatttcatgctttcttaaacccgtgcatattctggtgaaacatgtaaaatactttaagtaaaattgaacatttttatttgaatttttgctg

SEQ ID NO: 77444 - DNA, 120 bp, Artificial Sequence
  ENSG00000080345_69 (sequence is synthesized)
aactgataaaggtgtttatatttttgtttgttggtttgtttaattcatgtttgttgggactgaggtttaggaagtttgttactggttaaaaacctcaaatgaaatgcgaaagaatttgaa

SEQ ID NO: 77445 - DNA, 120 bp, Artificial Sequence
  ENSG00000080345_70 (sequence is synthesized)
tttttcctgcatatgtcaactttggacagctttcaagaaaaatgagaaaagtttcaacttctggcggttaaaatattaatgcagaatttactaagattttattcatttgcattagcaaat

SEQ ID NO: 77446 - DNA, 120 bp, Artificial Sequence
  ENSG00000080345_71 (sequence is synthesized)
attcatgcagcagcagttgactgaaaatttattcttatgagacgtatagtattcatttttaaatgcatgattgtacattatgtatagacgacaatgtttttaatttataaatttcattct

SEQ ID NO: 77447 - DNA, 120 bp, Artificial Sequence
  ENSG00000080345_72 (sequence is synthesized)
ttgttaattgcatgggtttttctgcagcttattgtgaataccttggttctgttcaatagaaacattttgtatatattaaatactgaaatatcagtatcgacggtggaagtgcttcatggg

SEQ ID NO: 77448 - DNA, 120 bp, Artificial Sequence
  ENSG00000080345_73 (sequence is synthesized)
cttgctgcacatatttgtaggatactgtatctgcaaatgcaacaacaaatagttttgtacttggttaacagtcttagttaaaacatgagtttattttctaaaagtatccagaataagtaa

SEQ ID NO: 77449 - DNA, 120 bp, Artificial Sequence
  ENSG00000080345_74 (sequence is synthesized)
aattatagaaataagaaaatgttacacaactttgctgttcatacccttaccttcttactacttttggtttggaggagggtatcaccactagaaagtgtgcctccttaagatttcttaaag

SEQ ID NO: 77450 - DNA, 120 bp, Artificial Sequence
  ENSG00000080345_75 (sequence is synthesized)
gaaagttagtttcagtatttcacagcaagttggactacaaaatctagagttgatctgctttttaaaccttcatttaaaagcaaacttggaagaaatttgaaactgatgtttttaatatat

SEQ ID NO: 77451 - DNA, 120 bp, Artificial Sequence
  ENSG00000080345_76 (sequence is synthesized)
gtctgtgttgcctaggttttctttttttaaagaggtatgtaattaaaacctttgtaaaatttgccaactaatattagtgcctgacttcccatatttgtttcatctttttaactgacagta

SEQ ID NO: 77452 - DNA, 120 bp, Artificial Sequence
  ENSG00000080345_77 (sequence is synthesized)
tatctcacttcttctttgaatagaatgagtgagtgatctcagttttcacattttattcagaagctaatccctacttagcaaggcacacattctacagcaagtcatagaaagtttaatcct

SEQ ID NO: 77453 - DNA, 120 bp, Artificial Sequence
  ENSG00000080345_78 (sequence is synthesized)
tgtgcctccttagctctcgtatattcagggatctctataaaagttggtgtcttttttcatcatcataaattcatcataatcacagatatttttgggtctaagatattcatataccaagga

SEQ ID NO: 77454 - DNA, 120 bp, Artificial Sequence
  ENSG00000080345_79 (sequence is synthesized)
tggttttgtaaagaattctgggatcattgaattaaggattgtggcttgaagtaactaaagaaaaatactaatttccttaaaaggaattataattatgatttacattttacatcattaatt

SEQ ID NO: 77455 - DNA, 120 bp, Artificial Sequence
  ENSG00000080345_80 (sequence is synthesized)
tcccaaattatatttaaccgtaaggaggtgcacatgagtttttagcaaacaggtatgaataagcagctatgtatatgtgtttggggcagaggggagcagattactttaacacacttcaga

SEQ ID NO: 77456 - DNA, 120 bp, Artificial Sequence
  ENSG00000080345_81 (sequence is synthesized)
attaaaatcagttcgtttcatgactctgtgccttaacgtttgtgtgaactaaacttgctgattgaatgaaattcttgggaagccgaacagtaatagcagaaaatgtgaccaaatgagtat

SEQ ID NO: 77457 - DNA, 120 bp, Artificial Sequence
  ENSG00000080345_82 (sequence is synthesized)
catgtacttaaatcactgaattttatataagcacaagtattaattttaaaaacattatagtttaataaagctgcatttaaaaatatttgggagcaaagacaagcatgctaaatcttcatt

SEQ ID NO: 77458 - DNA, 120 bp, Artificial Sequence
  ENSG00000080345_83 (sequence is synthesized)
ttgctatggctataagcatatatttttggcaacttatttgcaatattcttgccttaaagtttcctgcaaatttcccccttagtaattcccgaatagcaaaacattaatattccatgatta

SEQ ID NO: 77459 - DNA, 120 bp, Artificial Sequence
  ENSG00000080345_84 (sequence is synthesized)
gctctactgtgttgtctcactattaaaatggaattcgttttttcagatcttttctaatggttaataaaacaaatgtcagatcataataacactcaaatgtgtcttaattgtcttatgcat

SEQ ID NO: 77460 - DNA, 87 bp, Artificial Sequence
  ENSG00000080345_85 (sequence is synthesized)
tcataataacactcaaatgtgtcttaattgtcttatgcatatttaagaagaaaaaactagtggcatacaggattgtcatgtagtatc

SEQ ID NO: 77461 - DNA, 63 bp, Artificial Sequence
  ENSG00000080345_86 (sequence is synthesized)
attttcttttttttttgaggtggagttttcgcccttgctgcccaggctggagtgcagtggtac

SEQ ID NO: 77462 - DNA, 70 bp, Artificial Sequence
  ENSG00000080345_87 (sequence is synthesized)
agattatccacctgcctcagcctcctaaaatggtggcattacaggcgtgagccaccgctcctggcccatc

SEQ ID NO: 77463 - DNA, 120 bp, Artificial Sequence
  ENSG00000080345_88 (sequence is synthesized)
tggtggcattacaggcgtgagccaccgctcctggcccatcatttccatatctatgaaatctattttggattttagagtggatttaaattttcaatatttcagtgacctcattgttaaagc

SEQ ID NO: 77464 - DNA, 120 bp, Artificial Sequence
  ENSG00000080345_89 (sequence is synthesized)
tgctttgccacttgtacaagtttgaaaaccattgttgaatcatatggagctttactctaattccaaatagttaaaggatgaatcaggttaaataatgctgttggataatacaggcaaaaa

SEQ ID NO: 77465 - DNA, 120 bp, Artificial Sequence
  ENSG00000080345_90 (sequence is synthesized)
aaaacaggatttaaacccgcacattaaaagcatgactgaaggcccggcaggtggatcactttggcccaggagttcaaaactgacctgaacaatgtggcgaaatcctgtctctactaaaaa

SEQ ID NO: 77466 - DNA, 79 bp, Artificial Sequence
  ENSG00000080345_91 (sequence is synthesized)
aatcctgtctctactaaaaatacaaaaaccagccaggcatgttggcgcatacttgtaatcttttaggcggaggttgcag

SEQ ID NO: 77467 - DNA, 120 bp, Artificial Sequence
  ENSG00000080345_92 (sequence is synthesized)
gacagagcaagtctctgtctcgcaaaaaaaaaaaaaaagtttaattctaacattgcccatggatttttttttttctgtacagcttgaagataagatagttaaagactctgttacaattta

SEQ ID NO: 77468 - DNA, 120 bp, Artificial Sequence
  ENSG00000080345_93 (sequence is synthesized)
aacatcataaaaatgtgaagagtaagtggtgaggcaagaaacaaaattgggggaaatggtggggatcgtgaatatataagtgaagttttatttttttaaggtgtaaaggagtgagaatag

SEQ ID NO: 77469 - DNA, 120 bp, Artificial Sequence
  ENSG00000080345_94 (sequence is synthesized)
agtaattgctttttaaaaagaaagtataaatgggttaatttttttcttccaactttgactttaattcagtaagaaaggcctaggtttcatctcatattcttcataattgattttcaagaa

SEQ ID NO: 77470 - DNA, 120 bp, Artificial Sequence
  ENSG00000080345_95 (sequence is synthesized)
gttaatttgtcattcagcctaggaggctataaaacagcagttagttggcattattagactaaaacttgggtggggggaggagactgtttcctcattgctgcaacccatggtctatcctat

SEQ ID NO: 77471 - DNA, 120 bp, Artificial Sequence
  ENSG00000080345_96 (sequence is synthesized)
tcctaagccattagaaagaccttgtactttgtatagaaacattagagtgaggttttgatttttaacatagtactctcaaactttgatgtgcatatgaacaagtggattctgattcagtag

SEQ ID NO: 77472 - DNA, 120 bp, Artificial Sequence
  ENSG00000080345_97 (sequence is synthesized)
atctgcattgggccccgtgagtctttttaaacacagtcccaggtgattcatgcagatgcctgtgaactgcgctggtagatgggcctaagaggcttcaggctgtgttttaggttttggtaa

SEQ ID NO: 77473 - DNA, 120 bp, Artificial Sequence
  ENSG00000080345_98 (sequence is synthesized)
gccaggcagattcaagtccttttataactgtcaattttgtgaattggggatgcagactggttttgaaggcttaaagttcaaaaattataagaaagttaagaattttgcttaagagccttt

SEQ ID NO: 77474 - DNA, 120 bp, Artificial Sequence
  ENSG00000080345_99 (sequence is synthesized)
taaaaatatggacgatttattttttaagtaggcagactaagaatttcaagttataaagaatcttattgataaggcaaagtagacaaagtattttctcatgagtatttgtgggttatgttt

SEQ ID NO: 77475 - DNA, 120 bp, Artificial Sequence
  ENSG00000080345_100 (sequence is synthesized)
ttgttaatataaaagttgatttctaagtattagaatatatttagtctctaaataaatcttgccttctattatggatcatcgttattaataaacatggaaaatcaacactacccctaatat

SEQ ID NO: 77476 - DNA, 120 bp, Artificial Sequence
  ENSG00000080345_101 (sequence is synthesized)
taatctggcagttaaatttagtagtgctataatgaataagtcagtctagcagatatgccctgtcattatactgcggacctctggtcacttaattttctgttatattatgtggttgaaaat

SEQ ID NO: 77477 - DNA, 120 bp, Artificial Sequence
  ENSG00000080345_102 (sequence is synthesized)
tcctgtttcatcgtaaagtgaaatttgaaagatggagttgaataatatgattctcgaaaagtgagtttttcttggaattctgttaaggtgttagattttcctcacatatttaaataatct

SEQ ID NO: 77478 - DNA, 120 bp, Artificial Sequence
  ENSG00000080345_103 (sequence is synthesized)
gtaagaactaccctgaaagcactaaggaaaatgtagccgaaagttaagtaataggttttaaaaatttatcaaaatttattgatagtttgatctgtaaaacaaattgggtttcgtgctttc

SEQ ID NO: 77479 - DNA, 120 bp, Artificial Sequence
  ENSG00000080345_104 (sequence is synthesized)
tgatgtccagttaataagtatattatgtgccaggctttacatattgctctttgcaagtagccgttaaagtgtaagtcattgaagtttgaagatctataaatatttaatatagtagtctaa

SEQ ID NO: 77480 - DNA, 120 bp, Artificial Sequence
  ENSG00000080345_105 (sequence is synthesized)
acagttgtgagaatttactcagttctgaaatagaatgttaaattttccgatgtggtcctaatcatttttttctttacatactaagccttcctttctccaaagaacagttaaaaccaaatg

SEQ ID NO: 77481 - DNA, 120 bp, Artificial Sequence
  ENSG00000080345_106 (sequence is synthesized)
tgttatggtaagctgtaaataccgttggaataaaagataaccgttcatcttacctaaaaaattgaagacaatattttccattgttgatgtcacaagtaagaaaaaaactctaacttttgt

SEQ ID NO: 77482 - DNA, 120 bp, Artificial Sequence
  ENSG00000080345_107 (sequence is synthesized)
actctacttgtagcagagggaatatttttggccacagtgtgccaatttataattgtagataaagctgaatttactgggcagcaagcttatatgctgatagaagttgatgcactgagaagt

SEQ ID NO: 77483 - DNA, 120 bp, Artificial Sequence
  ENSG00000080345_108 (sequence is synthesized)
gatgagttgaagagaatggaaaaggcagattgagctggaattttaatgcatagtacatttagtagagagacaagctgtcctatatactcctgtatacttcagaaatagctgatagcctat

SEQ ID NO: 77484 - DNA, 120 bp, Artificial Sequence
  ENSG00000080345_109 (sequence is synthesized)
agtctctgagagctattctgtacatagcacagtattataattgatgttcataaataccctgagagattatgttaaaatacattattaatactcccacaaaagcagtaagttaataagtat

SEQ ID NO: 77485 - DNA, 120 bp, Artificial Sequence
  ENSG00000080345_110 (sequence is synthesized)
ttccaacaaaaggcagctttgtttcttaaacggataaacaacatataactaggaagatcatcttcaaaataaagtgtcatggaactgaaaatagagtatagtctaacaattattttgata

SEQ ID NO: 77486 - DNA, 120 bp, Artificial Sequence
  ENSG00000080345_111 (sequence is synthesized)
cactattgaatagctaacaagtgtctaaagaattttttatttttatagaataggaagtttctaaaagaaaacaattaagagcaaaattggttttgagtatagaaactgaaggatggcagt

SEQ ID NO: 77487 - DNA, 120 bp, Artificial Sequence
  ENSG00000080345_112 (sequence is synthesized)
cttaactcctaagttttttacagagcacagattggtaaactagcatgccacctgttttttgtactatctgtgagctgagactggtttttacattttttaatggtgaaaaaagtcaaaaga

SEQ ID NO: 77488 - DNA, 120 bp, Artificial Sequence
  ENSG00000080345_113 (sequence is synthesized)
aggacattttgtgacacatgaaaacatattaaattaaaatttcagtatccagaaataaagttttattggaacagctgtgcttattgtctttagctgctttcctggtacagtggctgagtt

SEQ ID NO: 77489 - DNA, 120 bp, Artificial Sequence
  ENSG00000080345_114 (sequence is synthesized)
tagtagtatagcagagtctgtatggcttccaacagtcaaaatactgcctggccttttaaagagtttgtcaatcccttttatggaggaaggttttgctcatgcatggcatgttagtcaatt

SEQ ID NO: 77490 - DNA, 120 bp, Artificial Sequence
  ENSG00000080345_115 (sequence is synthesized)
tagttatttgcttctagctggcagaatgtggtcttgattacttaatttctgttacccctgtgttttccagaatggcttctcctgattttacttacgtgttttactattgctcaaattaca

SEQ ID NO: 77491 - DNA, 120 bp, Artificial Sequence
  ENSG00000080345_116 (sequence is synthesized)
gatactaggaaacactactactttataagtacacttctttttcctacttaaactctcaaactacagttacgtatttgccatgatgttaagggaccttgatggtctgtgaattatcagttg

SEQ ID NO: 77492 - DNA, 120 bp, Artificial Sequence
  ENSG00000080345_117 (sequence is synthesized)
ctttctgcactacctcctgtagatagacctgactgatagcacttacaaaaagactgatagatgccaaatcagtcatttattaaccctctaatattgttgtcccgatcatttggtaaacgc

SEQ ID NO: 77493 - DNA, 120 bp, Artificial Sequence
  ENSG00000080345_118 (sequence is synthesized)
taagagagcttagttttacattcacaaagtatttgtatttgataagtcttaaaaatgatttaagttgaagcctaacagaagtacttgttcattcctcagttacctgcaaataatggaaat

SEQ ID NO: 77494 - DNA, 120 bp, Artificial Sequence
  ENSG00000080345_119 (sequence is synthesized)
aatggtgcagtcagttttatttgattgtgtaatgctttatactaggggtctcaaacccctgggtggcattagattcttacaggagcgtgaaccctattgtgaactgcacatgcaagagat

SEQ ID NO: 77495 - DNA, 120 bp, Artificial Sequence
  ENSG00000080345_120 (sequence is synthesized)
ctaggttgtgcgctcattatgagaatctaatacccgatgatctgaggtggaacagtctcatcctgaaaccatctaccccaacacctgtgtctgtggaaattgtctccacgaaaccggtcc

SEQ ID NO: 77496 - DNA, 120 bp, Artificial Sequence
  ENSG00000080345_121 (sequence is synthesized)
ctgttgaaaaaaggttaggggaccactgctttatacagtgtttgaagtaggcacacttacagttactatttctggttctttatgactgttgagggggggcagaattctatgtttgattca

SEQ ID NO: 77497 - DNA, 120 bp, Artificial Sequence
  ENSG00000080345_122 (sequence is synthesized)
cagtaaaacttttcatgaatcattgagggttaactgttatcacttgccaatggaaactggatattgaaacatttttttaagaaatgcacttttacctgaaataaaactataaaaactaaa

SEQ ID NO: 77498 - DNA, 120 bp, Artificial Sequence
  ENSG00000080345_123 (sequence is synthesized)
agccgccatcttggtctaggagggagcgcgccgcacgcgtgagtaaacagccggagctgggaaagtcgagctctggcagcgtctgggtgctgaggggcagaggcggagagaaccctgtcc

SEQ ID NO: 77499 - DNA, 120 bp, Artificial Sequence
  ENSG00000080345_124 (sequence is synthesized)
ttttgcagcacttaaactctcatagacatatcagtaaaactgtaggccctcagacaaagcaaagggtttcccctaccctctttttctttgctatcctctatgctctgcctcttgctttag

SEQ ID NO: 77500 - DNA, 120 bp, Artificial Sequence
  ENSG00000080345_125 (sequence is synthesized)
tttcatacaacattcagcttatcattaaggaataaggtttttggctcttatatcactatcatggcgaatcagtggaaaatgagaaacatagtaacacatcatgataaatcctcaacctcg

SEQ ID NO: 77501 - DNA, 120 bp, Artificial Sequence
  ENSG00000080345_126 (sequence is synthesized)
gtatctcccctcagtgtcattcttggaaacgtgggagatttaggaaatgacattgaagaggaagaattctgttgaaatagtgattctcaacgtggggtccttggacagcaaggatgagga

SEQ ID NO: 77502 - DNA, 120 bp, Artificial Sequence
  ENSG00000080345_127 (sequence is synthesized)
gtggaagctgttgttgggatagggaatctgcaccctctagagaagcagggacttcagctgctgaggaagggctgtcagagttatccatgttattttttttcatttttgtgagtacggtgc

SEQ ID NO: 77503 - DNA, 120 bp, Artificial Sequence
  ENSG00000080345_128 (sequence is synthesized)
ctcctaaacaatcacatgaggatttgagactgttagaactcggtgttgttatccacacaaatggaaacattcattatttttaaaacatgtttgtttgtaaatatcagatgaagtaaaaaa

SEQ ID NO: 77504 - DNA, 120 bp, Artificial Sequence
  ENSG00000080345_129 (sequence is synthesized)
ttgacattaactgtattatagaaatgggaaagtatatccttttgtaatataagatgtattagaagcaaagaagggaaatgggcttcaaacaaaaataaataaatgtaaagatcagtttaa

SEQ ID NO: 77505 - DNA, 120 bp, Artificial Sequence
  ENSG00000080345_130 (sequence is synthesized)
ctctgtttttcagatctaatctctccctcatgaaaaccgccaaggcactgcactgaatatgagatgactctagccactgtgtggtggtggtacacaggcacctattttagcaatataagc

SEQ ID NO: 77506 - DNA, 120 bp, Artificial Sequence
  ENSG00000080345_131 (sequence is synthesized)
tgtttctggtgacagaggctttgagtgcaactcataggtcattgtaaattatcaaagggaggcagaaaatattgcaagtgcattcactgtgtctttaccgagctaatgtggtcctgtgtt

SEQ ID NO: 77507 - DNA, 120 bp, Artificial Sequence
  ENSG00000080345_132 (sequence is synthesized)
taaaacctgggcattcagaatcaggacagtgttaacacagaagaaaagaaaacccagcagttcctggagaaagactaggacacatggcttttgtgaaaacaagacactagacgatgttcc

SEQ ID NO: 77508 - DNA, 120 bp, Artificial Sequence
  ENSG00000080345_133 (sequence is synthesized)
caggtcacactggtattggagctatgaagaaagagtaaacatcttgttaagatttcaacattgctttgttttctttatttgtcctatattatgtgaagaaaattaaaatcctgtatcttt

SEQ ID NO: 77509 - DNA, 120 bp, Artificial Sequence
  ENSG00000080345_134 (sequence is synthesized)
ccaacaagcacaagcagatggcaggaagattagaacattggatattgattgccagtttttaagtgtcattcttggaaacgtgggagatttaggaaatgacattgaagaggaagaattctg

SEQ ID NO: 77510 - DNA, 120 bp, Artificial Sequence
  ENSG00000080345_135 (sequence is synthesized)
ttgaaatagtgattctcaacgtggggtccttggacagcaagtgatggggattggaatcccttttccaacgttttctttatacaacacctgtatgacacaagaaagcatccagaaaaaaca

SEQ ID NO: 77511 - DNA, 120 bp, Artificial Sequence
  ENSG00000080345_136 (sequence is synthesized)
agagcagtcaaaacagccctttcatctaccttgtggggaacctggtataaaactacagacgtcagacagaaaagacagattcaacaagtcaacctctctgttcaggcacagatctggttt

SEQ ID NO: 77512 - DNA, 120 bp, Artificial Sequence
  ENSG00000080345_137 (sequence is synthesized)
taatgatgaactctacaatgctaattctggaaatgaaaaagtacaatggaaagcattaagttatataacgctgaggaatcttgttaattctacttatagtatttcaaatctagtcaagtc

SEQ ID NO: 77513 - DNA, 120 bp, Artificial Sequence
  ENSG00000080345_138 (sequence is synthesized)
attttctccccaataccaccaacgaagtaacagatgagtctttcatgctgtgatttgggattaagatacaaggtgagcccagagatgaattgggcacacatttcctggggcaggatggga

SEQ ID NO: 77514 - DNA, 120 bp, Artificial Sequence
  ENSG00000080345_139 (sequence is synthesized)
gttgtggagggctgcacaacagccccactgcaagcctgggatatccagaggcatcttcctcagcacccctaggtgcctgtgggctgtgccttacatttaataaaaacttacaaggctgaa

SEQ ID NO: 77515 - DNA, 120 bp, Artificial Sequence
  ENSG00000080345_140 (sequence is synthesized)
caaattattaaaaccacaatgagataccccttcacacatgccagaatggtgatgataaaaaagacagacaataacagacattagaaaggatgtggagaaattgggtccttcataaaccac

SEQ ID NO: 77516 - DNA, 120 bp, Artificial Sequence
  ENSG00000080345_141 (sequence is synthesized)
tggtggaagtggaaaagagtgcagccaccttggaaaagaatttggcagttatcacatgttaaatacagcattaccctatggcccagcaaattccactcctaggtgtatacccaagaagaa

SEQ ID NO: 77517 - DNA, 120 bp, Artificial Sequence
  ENSG00000080345_142 (sequence is synthesized)
tgaagacataggtctgcacaataatttgtacatccatgtccgtagcagcattactcataatagccaaaaagtggaaacaacttaaatgcccaccaactgatgaatgcataagcaagatct

SEQ ID NO: 77518 - DNA, 120 bp, Artificial Sequence
  ENSG00000080345_143 (sequence is synthesized)
ggtatatccatacagatctattattgggtagtaacaagaatggggtagtaacaagaatgaagtactgacacatgatacaacatggatgaacttcaaaagtaaaggacgccatgcaccaag

SEQ ID NO: 77519 - DNA, 120 bp, Artificial Sequence
  ENSG00000080345_144 (sequence is synthesized)
ttggaaggacacccaaagtggcaaagaattggagtcacacaacgtgcatgtttccagctgaggtcaagcaaggttacgctctgcctttttgttttagttctcataccttaaacaggtgtc

SEQ ID NO: 77520 - DNA, 120 bp, Artificial Sequence
  ENSG00000080345_145 (sequence is synthesized)
tttcactgtttaaatttggaacctaaagcttgggtccaggtgctttctagtttgtgttcctaagcaaaggaaggctgtgatatacccaatggtgaaaataaactttgttcaggcatgatt

SEQ ID NO: 77521 - DNA, 120 bp, Artificial Sequence
  ENSG00000080345_146 (sequence is synthesized)
tatagagctactggctgtgagtttgatgttagtgattcatttgtataaaatatcttctaatagacgttaagcaggttatatattgaacagctgacaaaagtgttgtgtccagagaaccta

SEQ ID NO: 77522 - DNA, 120 bp, Artificial Sequence
  ENSG00000080345_147 (sequence is synthesized)
accctgtatttcccatgggagtgatcactcagtatttgccaatttagtgttcaaggctactttatataatagaaaaccataactactatgaataatgagagagaatcaactgtatgttca

SEQ ID NO: 77523 - DNA, 120 bp, Artificial Sequence
  ENSG00000080371_0 (sequence is synthesized)
gtaggaggaaggagacgccattagagggaggcagagagggatcgttcttcgcttttcctccggtgcctgacgtggtgggctggggcccttcattctcggactttccctcagcccttccag

SEQ ID NO: 77524 - DNA, 120 bp, Artificial Sequence
  ENSG00000080371_1 (sequence is synthesized)
ttctcggactttccctcagcccttccaggcctcgcccgaggagggcgtggggacagcgcccgggtcggcggggccggggcggtgggggctgagccggccgtggctgtgaaggcgctgccg

SEQ ID NO: 77525 - DNA, 120 bp, Artificial Sequence
  ENSG00000080371_2 (sequence is synthesized)
ccgggaagcgacgggatggctgcggccggcggcggcggcggcggggcggcggcggcgggccgagcctactcgttcaaggtggtgctgctgggggaaggctgcgtggggaagacgtcgctg

SEQ ID NO: 77526 - DNA, 120 bp, Artificial Sequence
  ENSG00000080371_3 (sequence is synthesized)
aagacgtcgctggtgctgcgctactgcgagaacaagtttaacgacaagcacatcaccactctgcaggcatcattcttaacaaagaagttaaatattggtgggaaaagagtaaaccttgcc

SEQ ID NO: 77527 - DNA, 120 bp, Artificial Sequence
  ENSG00000080371_4 (sequence is synthesized)
atatgggatacggcaggtcaagagagattccatgcattgggtccaatttactacagagattcaaatggagcgattttagtttatgacataacagatgaagattcttttcagaaggtaaaa

SEQ ID NO: 77528 - DNA, 120 bp, Artificial Sequence
  ENSG00000080371_5 (sequence is synthesized)
aactgggtcaaagaattacggaaaatgttgggaaatgaaatctgtttatgtatagttggtaataaaatagacttggaaaaggagagacatgtttccattcaagaagcagagtcgtatgca

SEQ ID NO: 77529 - DNA, 120 bp, Artificial Sequence
  ENSG00000080371_6 (sequence is synthesized)
gaatctgtgggagcaaaacattatcatacttcagccaaacagaacaaaggaattgaggaactctttcttgacctttgtaaaaggatgatagaaacagcacaagtggatgagagagcaaaa

SEQ ID NO: 77530 - DNA, 120 bp, Artificial Sequence
  ENSG00000080371_7 (sequence is synthesized)
ggcaatggctctagtcagccgggaactgcaaggcgaggtgtacagattattgatgatgaacctcaagcccagaccagtggtggagggtgctgttcttctggataactgttcacgcctaag

SEQ ID NO: 77531 - DNA, 120 bp, Artificial Sequence
  ENSG00000080371_8 (sequence is synthesized)
aaattaaaagacagaacaaaactgtggatcattgccctcaacatgaagactgccatattccaagtcacattattttaccaatggaattatagaattaacagtattttaaattacgtttat

SEQ ID NO: 77532 - DNA, 120 bp, Artificial Sequence
  ENSG00000080371_9 (sequence is synthesized)
aacagtattttaaattacgtttataacactgcagagaccttaagtgctaaacttagtggagtttgtgaccagagaattggcattttctacaaatgtttttttttgttttttttttgtttt

SEQ ID NO: 77533 - DNA, 120 bp, Artificial Sequence
  ENSG00000080371_10 (sequence is synthesized)
aggcgtgagccaccgtgcccggcctacaaatgttaacaaagcaattaccaatggcctttttacatattttttctttaatgaggaataatatgcatgtagaaaagacctacttaaagtctt

SEQ ID NO: 77534 - DNA, 120 bp, Artificial Sequence
  ENSG00000080371_11 (sequence is synthesized)
aaagtcttcatttatattctttcaaatcaaatctttatttaataacttatatatgttgttggaatggttacatttttgcagccctttgtattttgtggtagttgaaattgtatcacttct

SEQ ID NO: 77535 - DNA, 120 bp, Artificial Sequence
  ENSG00000080371_12 (sequence is synthesized)
aaacagcaaactgtttttgtttttaattagcagatatctgaagtactatttttgcagggtttgcacaggcccgtaactgtctactactttgatataatctgtatacatcctgtatgctga

SEQ ID NO: 77536 - DNA, 120 bp, Artificial Sequence
  ENSG00000080371_13 (sequence is synthesized)
gctggtaaaatacattgtaaattacatattaaatattttatctgcttttacaagcgcaaggtgcaaaaatatatacaatagtctcattgatgactgtaaagtgaattaacatttggtgat

SEQ ID NO: 77537 - DNA, 120 bp, Artificial Sequence
  ENSG00000080371_14 (sequence is synthesized)
tatgcctagcttttttgactaatataaagatcatagctccccttcacttctgtcttaacttgaacatggcgtgtttaaattttcatacatactttacttgaattattgctgttgtcacat

SEQ ID NO: 77538 - DNA, 120 bp, Artificial Sequence
  ENSG00000080371_15 (sequence is synthesized)
atttttgcctctgtgagttcatctgatgattgagcagtagcatttgccttttgggttttttgtttgttattatagaagagatgacttctgctgattttgctttagaatggttaccttaga

SEQ ID NO: 77539 - DNA, 120 bp, Artificial Sequence
  ENSG00000080371_16 (sequence is synthesized)
agaatttgggtggctcatgttgaatttcacttctgcaatagctttcattttctcataggctttataagagatgggttcagtggtatgagcagaggaagagatcccagatagtagccagtt

SEQ ID NO: 77540 - DNA, 120 bp, Artificial Sequence
  ENSG00000080371_17 (sequence is synthesized)
aaccaagactcattcatatagcacgtagtttatgttcctgaggcagcacttttagatcctttgtgagcaagttctatttgttcattgcttgccagagatgaacacagaatgttctgtttc

SEQ ID NO: 77541 - DNA, 120 bp, Artificial Sequence
  ENSG00000080371_18 (sequence is synthesized)
attttacaagaactatcctgagtttctgtggatggaaacattacatgtaatgcagatatagtgaacactggaaagatttattaaagaattatatttgtgtatactttataaattagtccc

SEQ ID NO: 77542 - DNA, 120 bp, Artificial Sequence
  ENSG00000080371_19 (sequence is synthesized)
tcattagatttttttttcttaagcataagactgaacttaaatgtgttaattttagtagaatcaggcactgctcgcagaaggaacacagattgtagagattaacataaattgttcttgttc

SEQ ID NO: 77543 - DNA, 120 bp, Artificial Sequence
  ENSG00000080371_20 (sequence is synthesized)
taatatatatattttttcatttctgtcgtgcttggaaaactagtaaatattatgtctaagataaaatggaatggcccctggatttacttcttataagaagcagtagtatgtaataaagct

SEQ ID NO: 77544 - DNA, 120 bp, Artificial Sequence
  ENSG00000080371_21 (sequence is synthesized)
attagcatgagcaattaagaggctataaagagattatagttacaaaagaaatactgccatatttttaagttaataacttaaaccttctcaaatgggttaaaagttgaatgaattgacacc

SEQ ID NO: 77545 - DNA, 120 bp, Artificial Sequence
  ENSG00000080371_22 (sequence is synthesized)
ctgatgttatgatgttggaattttaacttaaactgggaggcattctgtgagccttcactttaccttctttaattattgtccttgctaaactcaacacagacttttctgttatgtgttttt

SEQ ID NO: 77546 - DNA, 120 bp, Artificial Sequence
  ENSG00000080371_23 (sequence is synthesized)
gaggaagttggggtgggaagagtcagggagataagctaaaattgtcttcttttatggggtaattgtactctgtagtctcttggtttcctgtgaagttagtatttatgtgggggtggggga

SEQ ID NO: 77547 - DNA, 120 bp, Artificial Sequence
  ENSG00000080371_24 (sequence is synthesized)
aggtagcaagaatcatgggtatcacggtactttgtttttgacctcctggctctttcagacagagtgaagaaagcttttccattcttactgttgtagaagtagataggaaataagcttttc

SEQ ID NO: 77548 - DNA, 120 bp, Artificial Sequence
  ENSG00000080371_25 (sequence is synthesized)
tcattacagtgaaatatgttttaaaaactagagtagctgggcacagaggcatgcatttgtagggccagctacttgggagagtgaggcaggaggatcacttgaggccaggatttcaaatcc

SEQ ID NO: 77549 - DNA, 120 bp, Artificial Sequence
  ENSG00000080371_26 (sequence is synthesized)
agcctaggtaacactgagacctccatctcgtaaaaggcacaaaaactagttagagatgaaattgagctttattttaaaaaaacgttctaaagcctgataattggagagctatacttcagc

SEQ ID NO: 77550 - DNA, 120 bp, Artificial Sequence
  ENSG00000080371_27 (sequence is synthesized)
ttttcatcctactttaatgaaacagctagataggaacctctgctccagaattgccagataattattggtgggtcataactattcttcatattttttttttcttttttctcctttggtttc

SEQ ID NO: 77551 - DNA, 120 bp, Artificial Sequence
  ENSG00000080371_28 (sequence is synthesized)
tgtgttatctttcttaacctcacgtatttctttatcctttttagtgggggcctgtaattgaggctaattcaatagcaacaatagacaacatgatatggctgctgtcactttgaaacccaa

SEQ ID NO: 77552 - DNA, 120 bp, Artificial Sequence
  ENSG00000080371_29 (sequence is synthesized)
aaggtctttgggtaggaatagagtaatgaaagaggaccagtcaacttcagtatatatacaaaggaaagacaaagagatgataaaccaaggctgaggaaatttttctgatgctttcttcat

SEQ ID NO: 77553 - DNA, 120 bp, Artificial Sequence
  ENSG00000080371_30 (sequence is synthesized)
ttctctaatataccttttgcattctttttctgataattgtgctattaggcagaagacacaagttaccacgttgtgtattaaaagcagtaggtaggttgtgccagtattttttcagccagt

SEQ ID NO: 77554 - DNA, 120 bp, Artificial Sequence
  ENSG00000080371_31 (sequence is synthesized)
aagcatatacagttaacttatataattaaaaattggtttaagatagtgattaaaaatacctgaatattatgttaaaagtatacaatcattgtttctgtaatgatgatgggtattctgctt

SEQ ID NO: 77555 - DNA, 120 bp, Artificial Sequence
  ENSG00000080371_32 (sequence is synthesized)
cttgtttttcattgtaattacaggggaagattgtttttgaaaatgtatattgccatgcttttggggtaagcagtaatgtgaaaagaaaaaagcattatgttattgtatgaaatataagtg

SEQ ID NO: 77556 - DNA, 120 bp, Artificial Sequence
  ENSG00000080371_33 (sequence is synthesized)
ttcagatttgttttgtctggggtgttgcctaagaataccctaaagctatggctgttactgcattgaaatcttttttttttttaatagtagccatatgttattagtggagtactttatatt

SEQ ID NO: 77557 - DNA, 120 bp, Artificial Sequence
  ENSG00000080371_34 (sequence is synthesized)
tgacattaaagtgaagaagaagagtagtacttcacttttaggtttttagtagtgaaagataaaattggaaaaatagggaaagagcatagggaggaatagaatggaagtcaagtaaataaa

SEQ ID NO: 77558 - DNA, 120 bp, Artificial Sequence
  ENSG00000080371_35 (sequence is synthesized)
aaactacaacctgacagttttttaaatcactttgaaaagtacattacttttatcaaagagtttctaattaaggcaaactatgcattatgccaaatattaagaacattttaaaaatggatt

SEQ ID NO: 77559 - DNA, 120 bp, Artificial Sequence
  ENSG00000080371_36 (sequence is synthesized)
gtgatactgtttatttctttaattatataatttgcaattttctgtattataagtgctaccaggattctagatagttgatcttacatattcagatagtatagtttactcttataattaccc

SEQ ID NO: 77560 - DNA, 120 bp, Artificial Sequence
  ENSG00000080371_37 (sequence is synthesized)
gttacgttatctctaaaagtagtttgatctgtgcctttaacttttagaattcatcttttgacttgtttgccactgtagagttttcagttttctctgtagattcagtgtgacaaagaggga

SEQ ID NO: 77561 - DNA, 120 bp, Artificial Sequence
  ENSG00000080371_38 (sequence is synthesized)
atacataatttgtgaccatttaagatgctgatattttctggaaaaggatatagatagtagtagtgacccgcaggagcctcacaataatgtctaaagatataaactgagtagatccctaag

SEQ ID NO: 77562 - DNA, 120 bp, Artificial Sequence
  ENSG00000080371_39 (sequence is synthesized)
tactcttctctaaattataaaatgcattacctaggctttaatagttaaaagctggaatttattgaaccgcatctacttgatttcataatatgcattgattttagtatgttgctgttctgt

SEQ ID NO: 77563 - DNA, 120 bp, Artificial Sequence
  ENSG00000080371_40 (sequence is synthesized)
tatctgtaatcaactataacagagtaatatatttggtgttctggaccaaaattcgtgctacacatatgtctgatggcctttaccttttcaagaaaacagttgcaattttgagcaaaattt

SEQ ID NO: 77564 - DNA, 120 bp, Artificial Sequence
  ENSG00000080371_41 (sequence is synthesized)
tcctagttgtaatattttaatagtgttatgtattggaaaaaatttagaaatactcctaagagttttcaatttcaagcagaaatgcttctcttctaaataaataccacttaattgatagac

SEQ ID NO: 77565 - DNA, 120 bp, Artificial Sequence
  ENSG00000080371_42 (sequence is synthesized)
ctttagcagttcttgtgctatctaggatttatacatttttgcttttctggaaaactgctttggcgcattaacctttctactgcaacattttctcttcagtagatatatgagtaaacatga

SEQ ID NO: 77566 - DNA, 120 bp, Artificial Sequence
  ENSG00000080371_43 (sequence is synthesized)
tgagttaatgttacacagcatacccagttaggtctcttattcttaaagcatctttctttagaagtctgcacatattttcaaatgcatcatattaaaggcacaagtcaagaggaggtggag

SEQ ID NO: 77567 - DNA, 120 bp, Artificial Sequence
  ENSG00000080371_44 (sequence is synthesized)
ttgcctacttcagtggcctttattcccactataccagttctcagtcttgattttgatactttctggcaactgtatcatctcttcactatcacgtattttaagaaaaagctaaggtgattt

SEQ ID NO: 77568 - DNA, 120 bp, Artificial Sequence
  ENSG00000080371_45 (sequence is synthesized)
ctttacatttgaacatgtgtagatcaatgagagaatggtgagggatagcaaggataaagtataatgttgaaaagtagaaagaagtggtatctgctaaactctagctttagtagcaagcta

SEQ ID NO: 77569 - DNA, 120 bp, Artificial Sequence
  ENSG00000080371_46 (sequence is synthesized)
ttttaaggaaatcattgtatgtggtacttcctagaaatatgaaagttcctcattttgtatttaattatgtaagaaaatgttctaggaaaagaataaaaaacatatattgtcaaagtgccc

SEQ ID NO: 77570 - DNA, 120 bp, Artificial Sequence
  ENSG00000080371_47 (sequence is synthesized)
tttggtagtgctcccaaatggtagtaactattggtctctagtatatactcctcaaatatctttttgctatgtattaatatatctatatgtttacatatagaaatacatagtgttgtgggt

SEQ ID NO: 77571 - DNA, 120 bp, Artificial Sequence
  ENSG00000080371_48 (sequence is synthesized)
tttaaattttcacataaattgtgtcttacccatgtgttttgccatttgccttttctcttgccaacgtgtctaggagctctttggtaaatacagactttttcattttatttcctcccacat

SEQ ID NO: 77572 - DNA, 120 bp, Artificial Sequence
  ENSG00000080371_49 (sequence is synthesized)
ttttttttctttctttttttcttttttaaaatagcctctgactccatgaaacctgaaaaggaatctggtctgttaggtggatttcattagtatccaaatttatttatttttttatttcat

SEQ ID NO: 77573 - DNA, 85 bp, Artificial Sequence
  ENSG00000080371_50 (sequence is synthesized)
gtctcgctgtgtcacccaggctggagtgtggtggctcagtgatagttcactgcatccttgaactcatggactcaagcaatctgtg

SEQ ID NO: 77574 - DNA, 120 bp, Artificial Sequence
  ENSG00000080371_51 (sequence is synthesized)
cttgaactcctggcctcaaccattcctcccacttcagcctcccaaagtactgagattacagatgtgagccactaggcccagtcagtatcatagaatttaaatgcaagccaatgcttagac

SEQ ID NO: 77575 - DNA, 120 bp, Artificial Sequence
  ENSG00000080371_52 (sequence is synthesized)
agaatcagggtctgctttaagcatgtgaatcaggaaactagaaggcctcttgtaatgtatttgaagttcattacttttggctgacggttgactgcttagtgtataaaatctaggagttaa

SEQ ID NO: 77576 - DNA, 120 bp, Artificial Sequence
  ENSG00000080371_53 (sequence is synthesized)
ctttagcagattcttttatcagaatacgttttttattggagggaagaaggaaaaagaggaaaggtataactgatggggaaaagtacaagataaactaaaacaagtctttatacaactctg

SEQ ID NO: 77577 - DNA, 120 bp, Artificial Sequence
  ENSG00000080371_54 (sequence is synthesized)
acagcaactcccataacaggacatgatgctaccaaaaattcaaacttgtatttgatctgtgcctttaatatagagtaaaaacaaaagttcctttttagatctcccttccctcatcatccc

SEQ ID NO: 77578 - DNA, 120 bp, Artificial Sequence
  ENSG00000080371_55 (sequence is synthesized)
acatccctttttagaggtaaccattgttaacagtttggtttgtgtctttattatgcagttttatatttatatttggcctttgtaaattttccattccctgaatggaacttctaccctata

SEQ ID NO: 77579 - DNA, 120 bp, Artificial Sequence
  ENSG00000080371_56 (sequence is synthesized)
tcaaattccaccctcaactgaccaatttaccaaggccaactagaatcatacttctttttctggaagttttttttgagacagggtcttgctttgccgcacagactagaatgcagtagcatg

SEQ ID NO: 77580 - DNA, 120 bp, Artificial Sequence
  ENSG00000080371_57 (sequence is synthesized)
tgggcttaagcaatcctcccacctcagacttcgaagtagctggtattacaggtgcataacaccaccacccacgcctggctaattgttttgttttttttgtggagatggctctcactttgt

SEQ ID NO: 77581 - DNA, 120 bp, Artificial Sequence
  ENSG00000080371_58 (sequence is synthesized)
ttttttgtggagatggctctcactttgttgcccaggctggtttttgaactagtttcaaagtgatcctcctgccttggcctctcaaagtactaggataacagtcatgagccaccatgccca

SEQ ID NO: 77582 - DNA, 120 bp, Artificial Sequence
  ENSG00000080371_59 (sequence is synthesized)
ccctagaatcatactcttttaaagcaagttaaatcagcagtaatagttctggaactagaagttaactacttactggacttttgagatgtaagtttaccatacatcaagcttaaaaacttg

SEQ ID NO: 77583 - DNA, 120 bp, Artificial Sequence
  ENSG00000080371_60 (sequence is synthesized)
tagcgttctgggaaagtcaagtcaaactcttgaatgctatcctctgtggaaatagggttgggaaagagcaatgtacaagtccaagctccttaatacacataaaactctgggttgggctca

SEQ ID NO: 77584 - DNA, 120 bp, Artificial Sequence
  ENSG00000080371_61 (sequence is synthesized)
tatagcttagcatatgtgtgctatgacacaaggttaaacgtgtgccccagaacaaatgcatttattcatgtttgactttaaatgaaaattcagaaagcaggttaagcatatatgtgagtt

SEQ ID NO: 77585 - DNA, 120 bp, Artificial Sequence
  ENSG00000080371_62 (sequence is synthesized)
taataattgtttctgtattttaaaaaattttaaaacattcagctttttatgactttggttagtttcactcatttgttgagtgccttctgtatgcccagtgcacaaactgctatgtgccca

SEQ ID NO: 77586 - DNA, 120 bp, Artificial Sequence
  ENSG00000080371_63 (sequence is synthesized)
gtgtacatacatgggagaaccagatagccaaagtgccttcctttatcgttggaacctagagatgagctgatacctgttgcacatagtccaagatataagtaatttatctggggatataag

SEQ ID NO: 77587 - DNA, 120 bp, Artificial Sequence
  ENSG00000080371_64 (sequence is synthesized)
gtcacctgtgcacacatgttcacattctgtgtttgatcagatatgtacctgccaaacttttggagtgagataattagaatgacagtagttgaagctgacagtgaatttgaggtaaagctg

SEQ ID NO: 77588 - DNA, 120 bp, Artificial Sequence
  ENSG00000080371_65 (sequence is synthesized)
gaaagaatgtttttgaattttgcaaataatacattttcaagccagattaaaattgaataacttactttctagcttcaagggggtaattaagtgatcctctaacccaaattgcttttccaa

SEQ ID NO: 77589 - DNA, 120 bp, Artificial Sequence
  ENSG00000080371_66 (sequence is synthesized)
attttgtggtagcagtgaataaactgatgcctcctgcttatttagacagcagccatttttgtttggtttggtttggttttgcggtgattttttttaacctagaaaaaatacaatttaaaa

SEQ ID NO: 77590 - DNA, 120 bp, Artificial Sequence
  ENSG00000080371_67 (sequence is synthesized)
agcaatcatgttgttttctttgcctttgacagatgtggccttgtcaccacacagtaagccagaacacaatccattcctgagtcatagtaggatagtttgtgtaattctaaatgcactctc

SEQ ID NO: 77591 - DNA, 120 bp, Artificial Sequence
  ENSG00000080371_68 (sequence is synthesized)
cagtttaagagtgtgggtccctttttttctatctgaaattgaagatacaggtcagaaagatggtttaatgaatatgaattttctaaacatcttttcagtgtcttttaaggatatttttga

SEQ ID NO: 77592 - DNA, 120 bp, Artificial Sequence
  ENSG00000080371_69 (sequence is synthesized)
tattacaatataataaagttaaatcatctagtcctcctggcccttctggttagaaaatagagcgaaatcatccgtttaaacacacacacacaaactatcccattagttggttatacacaa

SEQ ID NO: 77593 - DNA, 120 bp, Artificial Sequence
  ENSG00000080371_70 (sequence is synthesized)
gttactttcattcttactagttcacaaaaggttagtaaatttagtgatttaatgagttcttcaaaacataaaagtcctgtaaaggaaaagctagaggatgtgagaggagtaattcatccc

SEQ ID NO: 77594 - DNA, 120 bp, Artificial Sequence
  ENSG00000080371_71 (sequence is synthesized)
catcaaaagattttagccaaaagtagtggcataagaaatttatttatgcgaaagacataattttgggtgaactttcttgaagatggtcagaaagggcattgttaaaggaaggagatggta

SEQ ID NO: 77595 - DNA, 120 bp, Artificial Sequence
  ENSG00000080371_72 (sequence is synthesized)
gattttgggttctgggttctaggttctaggctaataatttactactttggtatgttgccttgaggctgacatttgctgctctgctaagactaaagctggccctttccaatcaaaagtgtt

SEQ ID NO: 77596 - DNA, 120 bp, Artificial Sequence
  ENSG00000080371_73 (sequence is synthesized)
cactttgggaggctgaggtgggtggatggatcccttaaacccaggaattcaagaccagtgtagacaacatggcgaaaccccatctctatccaaaaatatacaaaaattagccaggtgtgg

SEQ ID NO: 77597 - DNA, 73 bp, Artificial Sequence
  ENSG00000080371_74 (sequence is synthesized)
aggattgcttgagcctgggagttagaggatgcaagccctgtctcaaaaaaagaaaaaagaaaaaaaaaagtta

SEQ ID NO: 77598 - DNA, 120 bp, Artificial Sequence
  ENSG00000080371_75 (sequence is synthesized)
agagtgagactctgtctcaaaaaaaaagttaaaagttgttaactagatgtcgaattattttcatagtaatcaccatgtgtaagcaattctcatctgtggaatgtttgacagggataagat

SEQ ID NO: 77599 - DNA, 120 bp, Artificial Sequence
  ENSG00000080371_76 (sequence is synthesized)
ctcatctgtggaatgtttgacagggataagattattgaaaattggggggaattttcttaaatatggaactaagagctaaagagttcaatgatgattaagaccactagtctggcaagtgac

SEQ ID NO: 77600 - DNA, 120 bp, Artificial Sequence
  ENSG00000080371_77 (sequence is synthesized)
ttttatttgtccttttctattgataatgaattctaggaatatggatggatttcattagagaaataaaaatgagcaagatttgtgattcagaatattaaaagttaagaatccatgaatagc

SEQ ID NO: 77601 - DNA, 120 bp, Artificial Sequence
  ENSG00000080371_78 (sequence is synthesized)
cccttaaaaatattgtcaaagcatcatggtatttgtagtggtgcttaaaaaagaagcagcagcagctgttctaagccaagcactgcttgaaaacaaaacaaaacagaacaaaaccttata

SEQ ID NO: 77602 - DNA, 120 bp, Artificial Sequence
  ENSG00000080371_79 (sequence is synthesized)
tttaataaaatggagaaatttgggaatgtccctagcgtaataatgccttctactgacatttaaagtcagcttaaacatcattagggaagactatgactgtttctatgacctctagtcaca

SEQ ID NO: 77603 - DNA, 120 bp, Artificial Sequence
  ENSG00000080371_80 (sequence is synthesized)
aatttaactaatttaaggttaactaatacctctttcagagttgggcaaaagaagaaaaaaaaagcctttatttgtgatcagtaaattataaattacacagaagcttccagctacctggta

SEQ ID NO: 77604 - DNA, 120 bp, Artificial Sequence
  ENSG00000080371_81 (sequence is synthesized)
tttgcatgaagaattctaaattttttatatgccataatttttagtaatgctgtccttgaattcacttacatctctgctctggttttttgaagctcattaggatgatacctgtcatctctt

SEQ ID NO: 77605 - DNA, 120 bp, Artificial Sequence
  ENSG00000080371_82 (sequence is synthesized)
ggaaacactggaactagagaactggaggtgttcacccccattttttgctacattgttgaaaactgagtagaattttgtgtccaaaaatccttagtctgtgatggaattttttaaagtata

SEQ ID NO: 77606 - DNA, 120 bp, Artificial Sequence
  ENSG00000080371_83 (sequence is synthesized)
tgtgaagttttttacttcttcagtttttcaagataattttgctgtttttgctttttatttatttgcaactagaaattgcatgtgccagttacttaatttaatacatctaatgggagattc

SEQ ID NO: 77607 - DNA, 120 bp, Artificial Sequence
  ENSG00000080371_84 (sequence is synthesized)
aaagcaaaccattaaaactaccatataaactcaaatgaaattttatgacattctaatgtacatactcgccaagaaatgctacaaggagcctctctgcaaatgcctgatggggcactctga

SEQ ID NO: 77608 - DNA, 120 bp, Artificial Sequence
  ENSG00000080371_85 (sequence is synthesized)
gaattaaacaggaaatggacaggaaaagaggcaaagcatagaatagcctctgtggtatacacacagacaatgtaaaatccaagaaatataaggtccaaggaggaattggttattgaagta

SEQ ID NO: 77609 - DNA, 120 bp, Artificial Sequence
  ENSG00000080371_86 (sequence is synthesized)
gagaacctcatcatgagatttgagaatagctttagagttactcttgggatagtgtctcatggccctgtgagggaactctacaaattttatccattttgctgggcagttttaagagctact

SEQ ID NO: 77610 - DNA, 120 bp, Artificial Sequence
  ENSG00000080371_87 (sequence is synthesized)
ttttgtctgtactttccttaattttcatattatttctagcttttacttcatcttatgaaagattaacttagaggttagaatgcttacatttgcaaatagcctgaggaataaatatgtgct

SEQ ID NO: 77611 - DNA, 120 bp, Artificial Sequence
  ENSG00000080371_88 (sequence is synthesized)
ttatcaaagtggaacttctgattttctgtaatattaggatggacatgtgtctggcttatccttcctatctaggaaactggtgtcattaggaaatacgttaacataagatccctgactata

SEQ ID NO: 77612 - DNA, 120 bp, Artificial Sequence
  ENSG00000080371_89 (sequence is synthesized)
aagtaagacttattatcttgtatagtttgtagcatttaatcttctatttcagtgattggtttggatctacttaattttaagctttactggtcatttgtccccctcatgttgtacctaata

SEQ ID NO: 77613 - DNA, 120 bp, Artificial Sequence
  ENSG00000080371_90 (sequence is synthesized)
agtgtgtagtttttaagtgaaatcatacataatttcaaggaaactgctagagacaatgttgagtatcatcaagaacatttaatcaaacctgttgactaagagctttagtttggcttacaa

SEQ ID NO: 77614 - DNA, 120 bp, Artificial Sequence
  ENSG00000080371_91 (sequence is synthesized)
tttcatatgtaaatccaagaaaaagacttgtaagctaaaaagcctgtttcgttcggaaaaaaaagtacataacattttaaagatttgtgagaggaaaaaagcattagatgcgatagaatg

SEQ ID NO: 77615 - DNA, 120 bp, Artificial Sequence
  ENSG00000080371_92 (sequence is synthesized)
gaataatctctttttagaagtaaattagtttttatttcatttgtgggtggtattgagaaaagtggtggaaataaatacattgagcagattcagaatttaatagacacttcgtgtttccat

SEQ ID NO: 77616 - DNA, 120 bp, Artificial Sequence
  ENSG00000080371_93 (sequence is synthesized)
tttcataatgggggttagtcataaaccattctatgtggagcattttacaggggctctgaaaggtatacaaaatgtactactataattaatgtcctcaaggaacttaaaaacctattggaa

SEQ ID NO: 77617 - DNA, 120 bp, Artificial Sequence
  ENSG00000080371_94 (sequence is synthesized)
gatttatttaacagaggtaagagaatttggacccattaaaaatggaggaaaaggtaaagttagtatttgtagatgatagtgcaaagcttaaaagggtcaactgaaagtctcttaaaacga

SEQ ID NO: 77618 - DNA, 120 bp, Artificial Sequence
  ENSG00000080371_95 (sequence is synthesized)
atacagtcactgggtataaaattcatcacagaaataaaaagctttcatttataaaaacaacagccagttagaagatataatagaagaaaaggccccatttaaagtaagaccaaaggagag

SEQ ID NO: 77619 - DNA, 120 bp, Artificial Sequence
  ENSG00000080371_96 (sequence is synthesized)
aagatacctaggaataaacaagttatatgcgtgaccacaaaaccaaaactttgtatttcacatgaaaataaattcaaacacatggagatgcatatcatattcttggataggaagacaaca

SEQ ID NO: 77620 - DNA, 120 bp, Artificial Sequence
  ENSG00000080371_97 (sequence is synthesized)
tacacatttcagttctctaaattgaatgcaatcccaataaaaatataaggattaaaaaaaaaaaaaactagatcgctgattccaaagtttctttgaggaaaaaaaaaaaaaaaagcaaga

SEQ ID NO: 77621 - DNA, 120 bp, Artificial Sequence
  ENSG00000080371_98 (sequence is synthesized)
ctagccaggaaaactgaaaaaacaatgaggaaagactggccttatgaaatatttaaacaagagagctccaataattaaaacagtctggaactggcatatgactagacagatcattcaagc

SEQ ID NO: 77622 - DNA, 120 bp, Artificial Sequence
  ENSG00000080371_99 (sequence is synthesized)
agaaggaaaatgaacccagatatgggaatttagtggaggagaagtgatgtttcagctcagtggggaaaatatggtttattcattaaaggtagtaggacacttgggtagctatagagaaca

SEQ ID NO: 77623 - DNA, 120 bp, Artificial Sequence
  ENSG00000080371_100 (sequence is synthesized)
aagctggattcatacctcataaaccaaaatgcattccagtttaaatatgaaaactgaaatgtttaaagtacccaaagaggttgtcagagaatttttaaagattttagtgtggtaaaggat

SEQ ID NO: 77624 - DNA, 120 bp, Artificial Sequence
  ENSG00000080371_101 (sequence is synthesized)
gtggtaaaggatttcctgaatttgatataaaatttggaatagaatttacaataagaaatgataatgttttcactataaatttgtaacaataaattattattatttttgagatggagtctc

SEQ ID NO: 77625 - DNA, 63 bp, Artificial Sequence
  ENSG00000080371_102 (sequence is synthesized)
agatggagtctcactctattgcccaggctagagtcctaccttagcctcccaagtagctgggac

SEQ ID NO: 77626 - DNA, 74 bp, Artificial Sequence
  ENSG00000080371_103 (sequence is synthesized)
gttggccaggccaaagtgctgggattataggtgtgaggcaccatgcccaacatataacaataaattatatcact

SEQ ID NO: 77627 - DNA, 120 bp, Artificial Sequence
  ENSG00000080371_104 (sequence is synthesized)
gaggcaccatgcccaacatataacaataaattatatcactatataaaataaattcctcacagcaaaaaaccaccataagcatagtctaaagaaaaatgacaaatttggaaaaaatatttt

SEQ ID NO: 77628 - DNA, 120 bp, Artificial Sequence
  ENSG00000080371_105 (sequence is synthesized)
caaatcatatcatgcattgcttaatttataaagaacacctagaaatgaaaaagtccaatgatccaaaaagaaaaaggtacaaaattgtaaacagttttcacagaaaagaataaaatgatt

SEQ ID NO: 77629 - DNA, 120 bp, Artificial Sequence
  ENSG00000080371_106 (sequence is synthesized)
caagccggaaaaaaagttcaactttattactaagagaagtataagacaaaactatactgagataccagttttttaacctattaatcaagaaagactttttagttttataaaacattgtaa

SEQ ID NO: 77630 - DNA, 120 bp, Artificial Sequence
  ENSG00000080371_107 (sequence is synthesized)
tattctagatattattggtaagaatggagggaacaagtatttttgctgatagaggggtaaactggaacaaccgctaaggatgacagtgaattctgaatttatttacccaatgtactcttc

SEQ ID NO: 77631 - DNA, 120 bp, Artificial Sequence
  ENSG00000080371_108 (sequence is synthesized)
aagttgcagaggctgagaaattattaaactgttacccagaactttttatgcagatgggggggcagtctgaatgctaattaagttttctcaactatatgctctctcctcatgatttgaaag

SEQ ID NO: 77632 - DNA, 120 bp, Artificial Sequence
  ENSG00000080371_109 (sequence is synthesized)
gcaaaagtgaagcagaggccaagttttgaagttcttgaatgttacgaggtagtgaaaaacgtttccatgcagcagtgatcaagtgtctatcgttcagcttcctgaatatggataggctgt

SEQ ID NO: 77633 - DNA, 120 bp, Artificial Sequence
  ENSG00000080371_110 (sequence is synthesized)
ggtggtggcagcagcttcttaatctgacattccaacccctagattgtggtgttacatcttctttctccagcttcccaggagtgaaaggttgtagtggctggcctctggttcccagcaggg

SEQ ID NO: 77634 - DNA, 120 bp, Artificial Sequence
  ENSG00000080371_111 (sequence is synthesized)
ctccatggtgaccagaggttgtagttcccccagtgaatcatgtttgtgtcactgtgggattcattcccataggctcaacttagattcctaaaccctgctccttcaacccttccagtaact

SEQ ID NO: 77635 - DNA, 120 bp, Artificial Sequence
  ENSG00000080371_112 (sequence is synthesized)
ttataagcaccaaattccatttaaaaagtgccttcctgtttaaaatatctataatggcttctgtttcctgcattgaaagctgactgatctggagggcaattgggcaacagcaatcaaaat

SEQ ID NO: 77636 - DNA, 120 bp, Artificial Sequence
  ENSG00000080371_113 (sequence is synthesized)
tgtcttttcttttgacctagcagtttcacttcttggaatatatcctgtaaatatgcttatgtatgaaggaaatgagtttgtacaacgtttttcaatgcagtattgtttgtaaattgacac

SEQ ID NO: 77637 - DNA, 120 bp, Artificial Sequence
  ENSG00000080371_114 (sequence is synthesized)
cagtaggggaatagtaaaatcaattactatgcatgcatataataaaattttaggtagctataaaaaagagaatgagaaagctttgcatatttaaaagaaaccatcaacaggaatattaag

SEQ ID NO: 77638 - DNA, 120 bp, Artificial Sequence
  ENSG00000080371_115 (sequence is synthesized)
tttttaaaaaaagccagggcagaacagtctgtatactgtatattttaaaattgaacaagtatagtagacaattgaagtatagtaaagataaaattaattgcacaggccaggcacagtggt

SEQ ID NO: 77639 - DNA, 69 bp, Artificial Sequence
  ENSG00000080371_116 (sequence is synthesized)
tcccagcattttgggaggccaagatgggcggatcatatgaggtcaggagttcaggaccagcctggcaaa

SEQ ID NO: 77640 - DNA, 120 bp, Artificial Sequence
  ENSG00000080371_117 (sequence is synthesized)
tatctcaaaaaaaaaaaaaaaaaaattaattgcacatgaagtatacaagttcgatctgtgaaaccaccatcacagtgaagataattaacacatccatcattccacaaaatttccttacac

SEQ ID NO: 77641 - DNA, 120 bp, Artificial Sequence
  ENSG00000080371_118 (sequence is synthesized)
tccacaaaatttccttacactttcttgtaatcccttctccctcccattcctgctttctttaaactatagtttagtttgaattttctataattttatataaataaaatcatataacatgta

SEQ ID NO: 77642 - DNA, 120 bp, Artificial Sequence
  ENSG00000080371_119 (sequence is synthesized)
gtttccttaatgttttattgaagacaagtaatttttgttttaaagttatatgagaaaggaagaatggcatattaatataaatattttagaataatttaggatttagcctggtgcagtggc

SEQ ID NO: 77643 - DNA, 120 bp, Artificial Sequence
  ENSG00000080371_120 (sequence is synthesized)
taaatagctatataaacttaatttcactaaacttgagtaaattaatatgtcactaaaactgttactataaaaaagcagttaagacaaaatcatgaataatattttacatcaatcaccgat

SEQ ID NO: 77644 - DNA, 120 bp, Artificial Sequence
  ENSG00000080493_0 (sequence is synthesized)
gcgcttcggtggcggcggcggccgcggtggcagcgaaggcggcggcggcggcggcagtggcagtggccgctgcagccccacactccgccgccaaactggaggagcgacggaagccagacc

SEQ ID NO: 77645 - DNA, 120 bp, Artificial Sequence
  ENSG00000080493_1 (sequence is synthesized)
cgacggaagccagaccccaggaggatggaggatgaagctgtcctggacagaggggcttccttcctcaagcatgtgtgtgatgaagaagaagtagaaggccaccataccatttacatcgga

SEQ ID NO: 77646 - DNA, 120 bp, Artificial Sequence
  ENSG00000080493_2 (sequence is synthesized)
gtccatgtgccgaagagttacaggagaaggagacgtcacaagagaaagacagggcacaaagaaaagaaggaaaaggagagaatctctgagaactactctgacaaatcagatattgaaaat

SEQ ID NO: 77647 - DNA, 120 bp, Artificial Sequence
  ENSG00000080493_3 (sequence is synthesized)
gctgatgaatccagcagcagcatcctaaaacctctcatctctcctgctgcagaacgcatccgattcatcttgggagaggaggatgacagcccagctccccctcagctcttcacggaactg

SEQ ID NO: 77648 - DNA, 120 bp, Artificial Sequence
  ENSG00000080493_4 (sequence is synthesized)
gatgagctgctggccgtggatgggcaggagatggagtggaaggaaacagccaggtggatcaagtttgaagaaaaagtggaacagggtggggaaagatggagcaagccccatgtggccaca

SEQ ID NO: 77649 - DNA, 120 bp, Artificial Sequence
  ENSG00000080493_5 (sequence is synthesized)
ttgtcccttcatagtttatttgagctgaggacatgtatggagaaaggatccatcatgcttgatcgggaggcttcttctctcccacagttggtggagatgattgttgaccatcagattgag

SEQ ID NO: 77650 - DNA, 120 bp, Artificial Sequence
  ENSG00000080493_6 (sequence is synthesized)
acaggcctattgaaacctgaacttaaggataaggtgacctatactttgctccggaagcaccggcatcaaaccaagaaatccaaccttcggtccctggctgacattgggaagacagtctcc

SEQ ID NO: 77651 - DNA, 120 bp, Artificial Sequence
  ENSG00000080493_7 (sequence is synthesized)
agtgcaagtaggatgtttaccaaccctgataatggtagcccagccatgacccataggaatctgacttcctccagtctgaatgacatttctgataaaccggagaaggaccagctgaagaat

SEQ ID NO: 77652 - DNA, 120 bp, Artificial Sequence
  ENSG00000080493_8 (sequence is synthesized)
aagttcatgaaaaaattgccacgtgatgcagaagcttccaacgtgcttgttggggaggttgactttttggatactcctttcattgcctttgttaggctacagcaggctgtcatgctgggt

SEQ ID NO: 77653 - DNA, 120 bp, Artificial Sequence
  ENSG00000080493_9 (sequence is synthesized)
gccctgactgaagttcctgtgcccacaaggttcttgttcattctcttaggtcctaaggggaaagccaagtcctaccacgagattggcagagccattgccaccctgatgtctgatgaggtg

SEQ ID NO: 77654 - DNA, 120 bp, Artificial Sequence
  ENSG00000080493_10 (sequence is synthesized)
ttccatgacattgcttataaagcaaaagacaggcacgacctgattgctggtattgatgagttcctagatgaagtcatcgtccttccacctggggaatgggatccagcaattaggatagag

SEQ ID NO: 77655 - DNA, 120 bp, Artificial Sequence
  ENSG00000080493_11 (sequence is synthesized)
cctcctaagagtcttccatcctctgacaaaagaaagaatatgtactcaggtggagagaatgttcagatgaatggggatacgccccatgatggaggtcacggaggaggaggacatggggat

SEQ ID NO: 77656 - DNA, 120 bp, Artificial Sequence
  ENSG00000080493_12 (sequence is synthesized)
tgtgaagaattgcagcgaactggacggttctgtggtggactaattaaagacataaagaggaaagcgccattttttgccagtgatttttatgatgctttaaatattcaagctctttcggca

SEQ ID NO: 77657 - DNA, 120 bp, Artificial Sequence
  ENSG00000080493_13 (sequence is synthesized)
attctcttcatttatctggcaactgtaactaatgctatcacttttggaggactgcttggggatgccactgacaacatgcagggcgtgttggagagtttcctgggcactgctgtctctgga

SEQ ID NO: 77658 - DNA, 120 bp, Artificial Sequence
  ENSG00000080493_14 (sequence is synthesized)
gccatcttttgcctttttgctggtcaaccactcactattctgagcagcaccggacctgtcctagtttttgagaggcttctatttaatttcagcaaggacaataattttgactatttggag

SEQ ID NO: 77659 - DNA, 120 bp, Artificial Sequence
  ENSG00000080493_15 (sequence is synthesized)
tttcgcctttggattggcctgtggtccgccttcctatgtctcattttggtagccactgatgccagcttcttggttcaatacttcacacgtttcacggaggagggcttttcctctctgatt

SEQ ID NO: 77660 - DNA, 120 bp, Artificial Sequence
  ENSG00000080493_16 (sequence is synthesized)
agcttcatctttatctatgatgctttcaagaagatgatcaagcttgcagattactaccccatcaactccaacttcaaagtgggctacaacactctcttttcctgtacctgtgtgccacct

SEQ ID NO: 77661 - DNA, 120 bp, Artificial Sequence
  ENSG00000080493_17 (sequence is synthesized)
gacccagctaatatctcaatatctaatgacaccacactggccccagagtatttgccaactatgtcttctactgacatgtaccataatactacctttgactgggcatttttgtcgaagaag

SEQ ID NO: 77662 - DNA, 120 bp, Artificial Sequence
  ENSG00000080493_18 (sequence is synthesized)
gagtgttcaaaatacggaggaaacctcgtcgggaacaactgtaattttgttcctgatatcacactcatgtcttttatcctcttcttgggaacctacacctcttccatggctctgaaaaaa

SEQ ID NO: 77663 - DNA, 120 bp, Artificial Sequence
  ENSG00000080493_19 (sequence is synthesized)
ttcaaaactagtccttattttccaaccacagcaagaaaactgatcagtgattttgccattatcttgtccattctcatcttttgtgtaatagatgccctagtaggcgtggacaccccaaaa

SEQ ID NO: 77664 - DNA, 120 bp, Artificial Sequence
  ENSG00000080493_20 (sequence is synthesized)
ctaattgtgccaagtgagttcaagccaacaagtccaaaccgaggttggttcgttccaccgtttggagaaaacccctggtgggtgtgccttgctgctgctatcccggctttgttggtcact

SEQ ID NO: 77665 - DNA, 120 bp, Artificial Sequence
  ENSG00000080493_21 (sequence is synthesized)
atactgattttcatggaccaacaaattacagctgtgattgtaaacaggaaagaacataaactcaagaaaggagcagggtatcacttggatctcttttgggtggccatcctcatggttata

SEQ ID NO: 77666 - DNA, 120 bp, Artificial Sequence
  ENSG00000080493_22 (sequence is synthesized)
tgctccctcatggctcttccgtggtatgtagctgctacggtcatctccattgctcacatcgacagtttgaagatggagacagagacttctgcacctggagaacaaccaaagtttctagga

SEQ ID NO: 77667 - DNA, 120 bp, Artificial Sequence
  ENSG00000080493_23 (sequence is synthesized)
gtgagggaacaaagagtcactggaacccttgtgtttattctgactggtctgtcagtctttatggctcccatcttgaagtttatacccatgcctgtactctatggtgtgttcctgtatatg

SEQ ID NO: 77668 - DNA, 120 bp, Artificial Sequence
  ENSG00000080493_24 (sequence is synthesized)
ggagtagcatcccttaatggtgtgcagttcatggatcgtctgaagctgcttctgatgcctctgaagcatcagcctgacttcatctacctgcgtcatgttcctctgcgcagagtccacctg

SEQ ID NO: 77669 - DNA, 120 bp, Artificial Sequence
  ENSG00000080493_25 (sequence is synthesized)
ttcactttcctgcaggtgttgtgtctggccctgctttggatcctcaagtcaacggtggctgctatcatttttccagtaatgatcttggcacttgtagctgtcagaaaaggcatggactac

SEQ ID NO: 77670 - DNA, 120 bp, Artificial Sequence
  ENSG00000080493_26 (sequence is synthesized)
ctcttctcccagcacgacctcagcttcctggatgatgtcattccagaaaaggacaagaaaaagaaggaggatgagaagaaaaagaaaaagaagaagggaagtctggacagtgacaatgat

SEQ ID NO: 77671 - DNA, 120 bp, Artificial Sequence
  ENSG00000080493_27 (sequence is synthesized)
gattctgactgcccatactcagaaaaagttccaagtattaaaattccaatggacatcatggaacagcaacctttcctaagcgatagcaaaccttctgacagagaaagatcaccaacattc

SEQ ID NO: 77672 - DNA, 120 bp, Artificial Sequence
  ENSG00000080493_28 (sequence is synthesized)
cttgaacgccacacatcatgctgataaaattcctttccttcagtcactcggtatgccaagtcctcctagaactccagtaaaagttgtgcctcaaattagaatagaacttgaacctgaaga

SEQ ID NO: 77673 - DNA, 120 bp, Artificial Sequence
  ENSG00000080493_29 (sequence is synthesized)
caatgattatttctggaggagcaagggaacagaaactacattgtaacctgtttgtctttcttaaaactgacatttgttgttaatgtcatttgtttttgtttggctgtttgtttatttttt

SEQ ID NO: 77674 - DNA, 120 bp, Artificial Sequence
  ENSG00000080493_30 (sequence is synthesized)
aacttttatttcgtctcagtttttggtcacaggccaaataatacagcgctctctctgcttctctcttgcatagacacaatcaagacaatagtgcaccgttccttaaaaacagcatctgag

SEQ ID NO: 77675 - DNA, 120 bp, Artificial Sequence
  ENSG00000080493_31 (sequence is synthesized)
gaatcccccttttgttcttaaactttcagatgtgtcctttgataaccaaattctgtcactcaagacacagacacgcacagaccctgtcctttgcctctattaagcagaggatggaagtat

SEQ ID NO: 77676 - DNA, 120 bp, Artificial Sequence
  ENSG00000080493_32 (sequence is synthesized)
ggaacttaaaactttagctttggagctgtgcttactggcttgtctttgtctggtagaacaaaccttgacctccagacagagtcccttctcacttatagagctctccaggactggaaaaag

SEQ ID NO: 77677 - DNA, 120 bp, Artificial Sequence
  ENSG00000080493_33 (sequence is synthesized)
tgctgctattttaacttgctcttgcttgtaaatcctaatcttagagttatcaaaagaagaaaaaactgaaggtactttactccctatagagaaaccattgccatcattgtagcaagtgct

SEQ ID NO: 77678 - DNA, 120 bp, Artificial Sequence
  ENSG00000080493_34 (sequence is synthesized)
ggaatgtcccttttttcctatgcaactttttttaaccctttaatgaacttatctgttgagtacattgaagaatatttttcttcctagattttgttgtttaaattatggggcctaacctgc

SEQ ID NO: 77679 - DNA, 120 bp, Artificial Sequence
  ENSG00000080493_35 (sequence is synthesized)
cacttattttttgtcaatttttaaaacttttttttaattactgtaaagaaaatgaattttttcctgcagcaggaaacatagttttgagtagttctacctcttatttgtagctgccaggct

SEQ ID NO: 77680 - DNA, 120 bp, Artificial Sequence
  ENSG00000080493_36 (sequence is synthesized)
ttctgtaaaaattgtattgtatataatgtgatttttacacatacatacacacacaaatacacaatctctagggtaagccagaaggcaagatcagattaaaaacaccatgtttctaagcat

SEQ ID NO: 77681 - DNA, 120 bp, Artificial Sequence
  ENSG00000080493_37 (sequence is synthesized)
ccatttttccctttctttaaaagaaacttaactgttctatgaaggagattgagggagaagagacaaactcctatgtcatgagaataaccgatgttctgataatagtagcatctaggtaca

SEQ ID NO: 77682 - DNA, 120 bp, Artificial Sequence
  ENSG00000080493_38 (sequence is synthesized)
gatgctggttgtattaccacgtcaatgtcctatgcagtattgttagacattttctcattttgaaatatttgtgtgtttgtgtatgtgctctgtgccatggctggtgtatatatgtgcaat

SEQ ID NO: 77683 - DNA, 120 bp, Artificial Sequence
  ENSG00000080493_39 (sequence is synthesized)
gttagaaggcaaaagagtgatggtaggcagagggcaaagtcattgaatctcttatgccagttttcataaaacccaaaccacatatgaaaaaatccattaagggtccaagaagtctgtcca

SEQ ID NO: 77684 - DNA, 120 bp, Artificial Sequence
  ENSG00000080493_40 (sequence is synthesized)
tatgaaaatgagggtaaatatagtttatttcccaggtatcagtcattataattgatataatagctctaacatgcaatataaaattcataggagtattaatagcccatttacacatctata

SEQ ID NO: 77685 - DNA, 120 bp, Artificial Sequence
  ENSG00000080493_41 (sequence is synthesized)
aaatgtaatgggattgcagagctgcagagtacagtgtaacagtactctcatgcaatttttttcaggatgcaaaggcaattattctttgtaagcgggacatttagaatatatttgtgtaca

SEQ ID NO: 77686 - DNA, 120 bp, Artificial Sequence
  ENSG00000080493_42 (sequence is synthesized)
cgggacatttagaatatatttgtgtacatattatatgtatgtatatttcaaagtaccacactgaaaattagacatttattaaccaaatttaacgtggtatttaaaggtaatatttttaat

SEQ ID NO: 77687 - DNA, 120 bp, Artificial Sequence
  ENSG00000080493_43 (sequence is synthesized)
ctaaaaaaacattttaaatgttaaaattataatttcagattcatataaccacaactgtgatatatcctaactataaccagttgttgaggggtatactagaagcagaatgaaaccacattt

SEQ ID NO: 77688 - DNA, 120 bp, Artificial Sequence
  ENSG00000080493_44 (sequence is synthesized)
tttggtttgataatatgcacttattgactcccactcattgttatgttaattaagttattattctgtctccttgtaattttgattacaaaaattttattatcctgagttagctgttacttt

SEQ ID NO: 77689 - DNA, 120 bp, Artificial Sequence
  ENSG00000080493_45 (sequence is synthesized)
tacagtacctgatactcctaaaacttttaacttatacaaattagtcaataatgaccccaattttttcattaaaataatagtggtgaattatatgttattgtgttaaaacctcacttgcca

SEQ ID NO: 77690 - DNA, 120 bp, Artificial Sequence
  ENSG00000080493_46 (sequence is synthesized)
aattctggcttcacatttgtatttagggctatccttaaaatgatgagtctatattatctagctttctattaccctaatataaactggtataagaagactttccttttttctttatgcatg

SEQ ID NO: 77691 - DNA, 120 bp, Artificial Sequence
  ENSG00000080493_47 (sequence is synthesized)
gaagcatcaataaattgtttaaaaaccatgtatagtaaattcagcttaacccgtgatcttcttaagttaaaggtacttttgttttataaaagctctagataaaactttcttttctgatca

SEQ ID NO: 77692 - DNA, 120 bp, Artificial Sequence
  ENSG00000080493_48 (sequence is synthesized)
tgaatcaagtatctgtggtttcatgcccctctctatacctttcaaagaactcctgaagcaacttaactcatcatttcagcctctgagtagaggtaaaacctatgtgtacttctgtttatg

SEQ ID NO: 77693 - DNA, 120 bp, Artificial Sequence
  ENSG00000080493_49 (sequence is synthesized)
atccatattgatatttatgacatgaacacagaatagtaccttacatttgctaaacagacagttaatatcaaatcctttcaatattctgggaacccagggaagtttttaaaaatgtcatta

SEQ ID NO: 77694 - DNA, 120 bp, Artificial Sequence
  ENSG00000080493_50 (sequence is synthesized)
ctttcaaaggaacagaagtagttaaccaaactaacaagcaaaacctgaggtttacctagtgacaccaaattatcggtattttaactgaatttacccattgactaagaatgaaccagattt

SEQ ID NO: 77695 - DNA, 120 bp, Artificial Sequence
  ENSG00000080493_51 (sequence is synthesized)
ggtggtggttttgtttctatgcaaactggacacaaattacaacagtaaatttttttataagtgcttctcccttctccatgatgtgacttccggagataaaggattcaaaagataaagaca

SEQ ID NO: 77696 - DNA, 120 bp, Artificial Sequence
  ENSG00000080493_52 (sequence is synthesized)
aagtacgctcagagttgttaaccagaaagtcctggctgtggttgcagaaacactgttggaagaaaagagatgactaagtcaagtgtctgccttatcaaaagagcaaaaatgcctctggtt

SEQ ID NO: 77697 - DNA, 120 bp, Artificial Sequence
  ENSG00000080493_53 (sequence is synthesized)
ttgtgtttgggagaaaagtatcttggacgcactgttttccttgataaaagtcatcttctctactgtgtgaaatgaatacttggaattctaattgttttgtgtgccaggggcagtaatgtc

SEQ ID NO: 77698 - DNA, 120 bp, Artificial Sequence
  ENSG00000080493_54 (sequence is synthesized)
cctgcctcttctcccaatcaaggttgaggagtggggctggggagaggacttaactgacttaagaagtaggaaaacaaaaacctctctcctcagccttccacctccaagagaggaggaaaa

SEQ ID NO: 77699 - DNA, 120 bp, Artificial Sequence
  ENSG00000080493_55 (sequence is synthesized)
acagttgtctgctgtctgtaattcagtttgcgtgtattttatgctcatgcaccaacccatacagagtaaatcttttatcaactgtatactggtgtttaatagagaatgattgtcttccga

SEQ ID NO: 77700 - DNA, 120 bp, Artificial Sequence
  ENSG00000080493_56 (sequence is synthesized)
gttttttggttccttttttaactgtgttaaagtacttgaaatgtattgactgctgactatattttaaaaacaaaatgaaataatttgagttgtattacagaggttgacattgttcaggga

SEQ ID NO: 77701 - DNA, 120 bp, Artificial Sequence
  ENSG00000080493_57 (sequence is synthesized)
tgggacaaagccttcttcaatccttttcatactacttaatgattttggtgcaggaacctgagattttctgatttatatttcatgatatttcacatttgctcttcacagcatgagcatgaa

SEQ ID NO: 77702 - DNA, 120 bp, Artificial Sequence
  ENSG00000080493_58 (sequence is synthesized)
gcccagtggcaccaaatggctgggtacaatcaagtgatattttgtagcacctcactatctgaaaggccatgagttttcagatgatttcattgagcttcattgcagcctgaaattttaaaa

SEQ ID NO: 77703 - DNA, 120 bp, Artificial Sequence
  ENSG00000080493_59 (sequence is synthesized)
aagttgtgtaatacgccaaccagtcaagttgtgttttggccagagatttagatatgtccaatttcctggctcatttcattgtgctctatgggtacgtataaaaagcaagaattctgtttc

SEQ ID NO: 77704 - DNA, 120 bp, Artificial Sequence
  ENSG00000080493_60 (sequence is synthesized)
ctaggcaaacattgcaactcagggctaaagtcatccagtgaaacttttagagccagaagtaactttgtcccagtcctacaatgtgaaaagagtgaatagttgcctctttttagccatttt

SEQ ID NO: 77705 - DNA, 120 bp, Artificial Sequence
  ENSG00000080493_61 (sequence is synthesized)
catggctggtacatattcgtacgcattacttttcagaatcaatacgcactttcagatattcttatttttattctcttaagtctttattaactttggagagagaaatgatgcatcttttta

SEQ ID NO: 77706 - DNA, 120 bp, Artificial Sequence
  ENSG00000080493_62 (sequence is synthesized)
ttttaaatgaagtagatcaacatggtggaacaaaatgataaagaacagaaaacatttcaatatattactaataactttttccaatataaatcctaaaattcctataacatagtattttac

SEQ ID NO: 77707 - DNA, 120 bp, Artificial Sequence
  ENSG00000080493_63 (sequence is synthesized)
agttttatgaagctttctattgtgacttttatggaattaagagatgaagaagatgagatattttagcatttatatttttcaaaattatatgtatacttaaaaataaagtaactttatgca

SEQ ID NO: 77708 - DNA, 120 bp, Artificial Sequence
  ENSG00000080493_64 (sequence is synthesized)
cttgagcgtgcatcattcagaagatataagaagcttagaaggtagaaaagtggatttctttgatttttcagacgacattgctgaaaaacatattaccacagacaatttgaaggacattga

SEQ ID NO: 77709 - DNA, 120 bp, Artificial Sequence
  ENSG00000080493_65 (sequence is synthesized)
tgtgcactagcctacctccctgtcgctctctgcgtgtgggtgggtgtgcatgtgtgtgtgtgtgagggtatacattttatgcagtgggtgtttaaagagctaagcactgaagctggattt

SEQ ID NO: 77710 - DNA, 120 bp, Artificial Sequence
  ENSG00000080493_66 (sequence is synthesized)
aggaggggaagtgagtggttagacctcagctcatctgagggctaaaggttctttgtgacacatcacacagaattggagtgctgtccttctggagagtggtggagaaccaagatacagttc

SEQ ID NO: 77711 - DNA, 120 bp, Artificial Sequence
  ENSG00000080493_67 (sequence is synthesized)
agaaccaaaggaatagagaagggctttgatttctttttggctttagattggggatttgggaggcttagcaggaaagatgtccactgaaaatgtggaagggaagcccagtaaccttgggga

SEQ ID NO: 77712 - DNA, 120 bp, Artificial Sequence
  ENSG00000080493_68 (sequence is synthesized)
aagaattttaaaaccctaaaggggagagcccccaacatcctgcctacaggattgggattattttctcttacctgtctatgtgggtgccctctcaaggttagaactgaagctatgtgggac

SEQ ID NO: 77713 - DNA, 120 bp, Artificial Sequence
  ENSG00000080493_69 (sequence is synthesized)
ggaattagtcttgtttttttctctgaaaaactctgctactgaatttgatgtctcattgcctgaggtattttagctgtatgattcaaccaggaaggagaccaggagctctggaatgtgaac

SEQ ID NO: 77714 - DNA, 120 bp, Artificial Sequence
  ENSG00000080493_70 (sequence is synthesized)
ataaccaactcaatattttgaaattaactcaaactgtgggatttgcaaggaattcatgtgtacattattcttgattttataagtggggaaacctggatacatgtattaacagatataaat

SEQ ID NO: 77715 - DNA, 120 bp, Artificial Sequence
  ENSG00000080503_0 (sequence is synthesized)
gtactctgggtgactcagagagggaagagattcagccagcacactcctcgcgagcaagcattactctactgactggcagagacaggagaggtagatgtccacgcccacagaccctggtgc

SEQ ID NO: 77716 - DNA, 120 bp, Artificial Sequence
  ENSG00000080503_1 (sequence is synthesized)
gatgccccacccagggccttcgccggggcctgggccttcccctgggccaattcttgggcctagtccaggaccaggaccatccccaggttccgtccacagcatgatggggccaagtcctgg

SEQ ID NO: 77717 - DNA, 120 bp, Artificial Sequence
  ENSG00000080503_2 (sequence is synthesized)
acctccaagtgtctcccatcctatgccgacgatggggtccacagacttcccacaggaaggcatgcatcaaatgcataagcccatcgatggtatacatgacaaggggattgtagaagacat

SEQ ID NO: 77718 - DNA, 120 bp, Artificial Sequence
  ENSG00000080503_3 (sequence is synthesized)
ccattgtggatccatgaagggcactggtatgcgaccacctcacccaggcatgggccctccccagagtccaatggatcaacacagccaaggttatatgtcaccacacccatctccattagg

SEQ ID NO: 77719 - DNA, 120 bp, Artificial Sequence
  ENSG00000080503_4 (sequence is synthesized)
agccccagagcacgtctccagccctatgtctggaggaggcccaactccacctcagatgccaccaagccagccgggggccctcatcccaggtgatccgcaggccatgagccagcccaacag

SEQ ID NO: 77720 - DNA, 120 bp, Artificial Sequence
  ENSG00000080503_5 (sequence is synthesized)
aggtccctcacctttcagtcctgtccagctgcatcagcttcgagctcagattttagcttataaaatgctggcccgaggccagcccctccccgaaacgctgcagcttgcagtccaggggaa

SEQ ID NO: 77721 - DNA, 76 bp, Artificial Sequence
  ENSG00000080503_6 (sequence is synthesized)
agcccctccccgaaacgctgcagcttgcagtccaggggaaaaggacgttgcctggcttgcagcaacaacagcagca

SEQ ID NO: 77722 - DNA, 120 bp, Artificial Sequence
  ENSG00000080503_7 (sequence is synthesized)
gcaacaacagcagccggcccttgttaactacaacagaccatctggcccggggccggagctgagcggcccgagcaccccgcagaagctgccggtgcccgcgcccggcggccggccctcgcc

SEQ ID NO: 77723 - DNA, 120 bp, Artificial Sequence
  ENSG00000080503_8 (sequence is synthesized)
gcgcagccgcccgcggccgcagtgcccgggccctcagtgccgcagccggccccggggcagccctcgcccgtcctccagctgcagcagaagcagagccgcatcagccccatccagaaaccg

SEQ ID NO: 77724 - DNA, 120 bp, Artificial Sequence
  ENSG00000080503_9 (sequence is synthesized)
ccccatccagaaaccgcaaggcctggaccccgtggaaattctgcaagagcgggaatacagacttcaggcccgcatagctcataggatacaagaactggaaaatctgcctggctctttgcc

SEQ ID NO: 77725 - DNA, 120 bp, Artificial Sequence
  ENSG00000080503_10 (sequence is synthesized)
accagatttaagaaccaaagcaaccgtggaactaaaagcacttcggttactcaatttccagcgtcagctgagacaggaggtggtggcctgcatgcgcagggacacgaccctggagacggc

SEQ ID NO: 77726 - DNA, 120 bp, Artificial Sequence
  ENSG00000080503_11 (sequence is synthesized)
tctcaactccaaagcatacaaacggagcaagcgccagactctgagagaagctcgcatgaccgagaagctggagaagcagcagaagattgagcaggagaggaaacgccgtcagaaacacca

SEQ ID NO: 77727 - DNA, 120 bp, Artificial Sequence
  ENSG00000080503_12 (sequence is synthesized)
ggaatacctgaacagtattttgcaacatgcaaaagattttaaggaatatcatcggtctgtggccggaaagatccagaagctctccaaagcagtggcaacttggcatgccaacactgaaag

SEQ ID NO: 77728 - DNA, 120 bp, Artificial Sequence
  ENSG00000080503_13 (sequence is synthesized)
agagcagaagaaggagacagagcggattgaaaaggagagaatgcggcgactgatggctgaagatgaggagggttatagaaaactgattgatcaaaagaaagacaggcgtttagcttacct

SEQ ID NO: 77729 - DNA, 120 bp, Artificial Sequence
  ENSG00000080503_14 (sequence is synthesized)
tttgcagcagaccgatgagtatgtagccaatctgaccaatctggtttgggagcacaagcaagcccaggcagccaaagagaagaagaagaggaggaggaggaagaagaaggctgaggagaa

SEQ ID NO: 77730 - DNA, 120 bp, Artificial Sequence
  ENSG00000080503_15 (sequence is synthesized)
tgcagagggtggggagtctgccctgggaccggatggagagcccatagatgagagcagccagatgagtgacctccctgtcaaagtgactcacacagaaaccggcaaggttctgttcggacc

SEQ ID NO: 77731 - DNA, 120 bp, Artificial Sequence
  ENSG00000080503_16 (sequence is synthesized)
agaagcacccaaagcaagtcagctggacgcctggctggaaatgaatcctggttatgaagttgcccctagatctgacagtgaagagagtgattctgattatgaggaagaggatgaggaaga

SEQ ID NO: 77732 - DNA, 120 bp, Artificial Sequence
  ENSG00000080503_17 (sequence is synthesized)
agagtccagtaggcaggaaaccgaagagaaaatactcctggatccaaatagcgaagaagtttctgagaaggatgctaagcagatcattgagacagctaagcaagacgtggatgatgaata

SEQ ID NO: 77733 - DNA, 120 bp, Artificial Sequence
  ENSG00000080503_18 (sequence is synthesized)
cagcatgcagtacagtgccaggggctcccagtcctactacaccgtggctcatgccatctcggagagggtggagaaacagtctgccctcctaattaatgggaccctaaagcattaccagct

SEQ ID NO: 77734 - DNA, 120 bp, Artificial Sequence
  ENSG00000080503_19 (sequence is synthesized)
ccagggcctggaatggatggtttccctgtataataacaacttgaacggaatcttagccgatgaaatggggcttggaaagaccatacagaccattgcactcatcacttatctgatggagca

SEQ ID NO: 77735 - DNA, 120 bp, Artificial Sequence
  ENSG00000080503_20 (sequence is synthesized)
caaaagactcaatggcccctatctcatcattgttcccctttcgactctatctaactggacatatgaatttgacaaatgggctccttctgtggtgaagatttcttacaagggtactcctgc

SEQ ID NO: 77736 - DNA, 120 bp, Artificial Sequence
  ENSG00000080503_21 (sequence is synthesized)
catgcgtcgctcccttgtcccccagctacggagtggcaaattcaatgtcctcttgactacttatgagtatattataaaagacaagcacattcttgcaaagattcggtggaaatacatgat

SEQ ID NO: 77737 - DNA, 120 bp, Artificial Sequence
  ENSG00000080503_22 (sequence is synthesized)
agtggacgaaggccaccgaatgaagaatcaccactgcaagctgactcaggtcttgaacactcactatgtggcccccagaaggatcctcttgactgggaccccgctgcagaataagctccc

SEQ ID NO: 77738 - DNA, 120 bp, Artificial Sequence
  ENSG00000080503_23 (sequence is synthesized)
cttaaatgaagaagaaactatattgatcatcaggcgtctacataaggtgttaagaccatttttactaaggagactgaagaaagaagttgaatcccagcttcccgaaaaagtggaatatgt

SEQ ID NO: 77739 - DNA, 120 bp, Artificial Sequence
  ENSG00000080503_24 (sequence is synthesized)
gatcaagtgtgacatgtcagctctgcagaagattctgtatcgccatatgcaagccaaggggatccttctcacagatggttctgagaaagataagaaggggaaaggaggtgctaagacact

SEQ ID NO: 77740 - DNA, 120 bp, Artificial Sequence
  ENSG00000080503_25 (sequence is synthesized)
tatgaacactattatgcagttgagaaaaatctgcaaccacccatatatgtttcagcacattgaggaatcctttgctgaacacctaggctattcaaatggggtcatcaatggggctgaact

SEQ ID NO: 77741 - DNA, 120 bp, Artificial Sequence
  ENSG00000080503_26 (sequence is synthesized)
gtatcgggcctcagggaagtttgagctgcttgatcgtattctgccaaaattgagagcgactaatcaccgagtgctgcttttctgccagatgacatctctcatgaccatcatggaggatta

SEQ ID NO: 77742 - DNA, 120 bp, Artificial Sequence
  ENSG00000080503_27 (sequence is synthesized)
ttttgcttttcggaacttcctttacctacgccttgatggcaccaccaagtctgaagatcgtgctgctttgctgaagaaattcaatgaacctggatcccagtatttcattttcttgctgag

SEQ ID NO: 77743 - DNA, 120 bp, Artificial Sequence
  ENSG00000080503_28 (sequence is synthesized)
cacaagagctggtggcctgggcttaaatcttcaggcagctgatacagtggtcatctttgacagcgactggaatcctcatcaggatctgcaggcccaagaccgagctcaccgcatcgggca

SEQ ID NO: 77744 - DNA, 120 bp, Artificial Sequence
  ENSG00000080503_29 (sequence is synthesized)
gcagaacgaggtccgggtactgaggctctgtaccgtgaacagcgtggaggaaaagatcctcgcggccgcaaaatacaagctgaacgtggatcagaaagtgatccaggcgggcatgtttga

SEQ ID NO: 77745 - DNA, 120 bp, Artificial Sequence
  ENSG00000080503_30 (sequence is synthesized)
ccaaaagtcttcaagccacgagcggagggcattcctgcaggccatcttggagcatgaggaggaaaatgaggaagaagatgaagtaccggacgatgagactctgaaccaaatgattgctcg

SEQ ID NO: 77746 - DNA, 120 bp, Artificial Sequence
  ENSG00000080503_31 (sequence is synthesized)
acgagaagaagaatttgacctttttatgcggatggacatggaccggcggagggaagatgcccggaacccgaaacggaagccccgtttaatggaggaggatgagctgccctcctggatcat

SEQ ID NO: 77747 - DNA, 120 bp, Artificial Sequence
  ENSG00000080503_32 (sequence is synthesized)
taaggatgacgctgaagtagaaaggctcacctgtgaagaagaggaggagaaaatatttgggagggggtcccgccagcgccgtgacgtggactacagtgacgccctcacggagaagcagtg

SEQ ID NO: 77748 - DNA, 120 bp, Artificial Sequence
  ENSG00000080503_33 (sequence is synthesized)
gctaagggccatcgaagacggcaatttggaggaaatggaagaggaagtacggcttaagaagcgaaaaagacgaagaaatgtggataaagatcctgcaaaagaagatgtggaaaaagctaa

SEQ ID NO: 77749 - DNA, 120 bp, Artificial Sequence
  ENSG00000080503_34 (sequence is synthesized)
gaagagaagaggccgccctcccgctgagaaactgtcaccaaatccccccaaactgacaaagcagatgaacgctatcatcgatactgtgataaactacaaagataggtgtaacgtggagaa

SEQ ID NO: 77750 - DNA, 120 bp, Artificial Sequence
  ENSG00000080503_35 (sequence is synthesized)
ggtgcccagtaattctcagttggaaatagaaggaaacagttcagggcgacagctcagtgaagtcttcattcagttaccttcaaggaaagaattaccagaatactatgaattaattaggaa

SEQ ID NO: 77751 - DNA, 120 bp, Artificial Sequence
  ENSG00000080503_36 (sequence is synthesized)
gccagtggatttcaaaaaaataaaggaaaggattcgtaatcataagtaccggagcctaggcgacctggagaaggatgtcatgcttctctgtcacaacgctcagacgttcaacctggaggg

SEQ ID NO: 77752 - DNA, 120 bp, Artificial Sequence
  ENSG00000080503_37 (sequence is synthesized)
atcccagatctatgaagactccatcgtcttacagtcagtgtttaagagtgcccggcagaaaattgccaaagaggaagagagtgaggatgaaagcaatgaagaggaggaagaggaagatga

SEQ ID NO: 77753 - DNA, 120 bp, Artificial Sequence
  ENSG00000080503_38 (sequence is synthesized)
agaagagtcagagtccgaggcaaaatcagtcaaggtgaaaattaagctcaataaaaaagatgacaaaggccgggacaaagggaaaggcaagaaaaggccaaatcgaggaaaagccaaacc

SEQ ID NO: 77754 - DNA, 120 bp, Artificial Sequence
  ENSG00000080503_39 (sequence is synthesized)
tgtagtgagcgattttgacagcgatgaggagcaggatgaacgtgaacagtcagaaggaagtgggacggatgatgagtgatcagtatggacctttttccttggtagaactgaattccttcc

SEQ ID NO: 77755 - DNA, 120 bp, Artificial Sequence
  ENSG00000080503_40 (sequence is synthesized)
tcccctgtctcatttctacccagtgagttcatttgtcatataggcactgggttgtttctatatcatcatcgtctataaactagctttaggatagtgccagacaaacatatgatatcatgg

SEQ ID NO: 77756 - DNA, 120 bp, Artificial Sequence
  ENSG00000080503_41 (sequence is synthesized)
tgtaaaaaacacacacatacacaaatatttgtaacatattgtgaccaaatgggcctcaaagattcagattgaaacaaacaaaaagcttttgatggaaaatatgtgggtggatagtatatt

SEQ ID NO: 77757 - DNA, 120 bp, Artificial Sequence
  ENSG00000080503_42 (sequence is synthesized)
tctatgggtgggtctaatttggtaacggtttgattgtgcctggttttatcacctgttcagatgagaagatttttgtcttttgtagcactgataaccaggagaagccattaaaagccactg

SEQ ID NO: 77758 - DNA, 120 bp, Artificial Sequence
  ENSG00000080503_43 (sequence is synthesized)
gttattttatttttcatcaggcaattttcgaggtttttatttgttcggtattgtttttttacactgtggtacatataagcaactttaataggtgataaatgtacagtagttagatttcac

SEQ ID NO: 77759 - DNA, 120 bp, Artificial Sequence
  ENSG00000080503_44 (sequence is synthesized)
ctgcatatacatttttccattttatgctctatgatctgaacaaaagctttttgaattgtataagatttatgtctactgtaaacattgcttaatttttttgctcttgatttaaaaaaaagt

SEQ ID NO: 77760 - DNA, 120 bp, Artificial Sequence
  ENSG00000080503_45 (sequence is synthesized)
tttgttgaaagcgctattgaatattgcaatctatatagtgtattggatggcttcttttgtcaccctgatctcctatgttaccaatgtgtatcgtctccttctccctaaagtgtacttaat

SEQ ID NO: 77761 - DNA, 120 bp, Artificial Sequence
  ENSG00000080503_46 (sequence is synthesized)
ctttgctttctttgcacaatgtctttggttgcaagtcataagcctgaggcaaataaaattccagtaatttcgaagaatgtggtgttggtgctttcctaataaagaaataatttagcttga

SEQ ID NO: 77762 - DNA, 120 bp, Artificial Sequence
  ENSG00000080503_47 (sequence is synthesized)
tcagaagaaagccccgagatcacagagacccggcgagatcacagagacccggcctgaaggaacgtggaaagaccaatgtacctgttttgaccggttgcctggagcaagaagttccagttg

SEQ ID NO: 77763 - DNA, 120 bp, Artificial Sequence
  ENSG00000080503_48 (sequence is synthesized)
cagggaggagcggcgcgcggggccaactgcggcgcgtcttccggcgcccgcggaggaggcgagggtgggacgctgggcggagcccgagtttaggaagaggaggggacggctgtcatcaat

SEQ ID NO: 77764 - DNA, 120 bp, Artificial Sequence
  ENSG00000080503_49 (sequence is synthesized)
gtgcgcgcaggagccagtgcgtcgggagcagcggctcgggcagctgctcctgcccgcaccctcccctggagcccggggaggacaagcattactctactgactggcagagacaggagaggt

SEQ ID NO: 77765 - DNA, 120 bp, Artificial Sequence
  ENSG00000080503_50 (sequence is synthesized)
aatgaaggtaattgccttatgattagagctctttcagctacgagaaaggattgattatcatttgcatactggaggcaatattgagaggcaggaggaacaaataacaacattagttatttt

SEQ ID NO: 77766 - DNA, 120 bp, Artificial Sequence
  ENSG00000080503_51 (sequence is synthesized)
gtgtgagagagcaatctcaaaacgtaatttaaagatcttttttttagaaaatttcttttctatgttcaaattttatgttctttttttttttcttccttggcagtatttttcccctttatt

SEQ ID NO: 77767 - DNA, 120 bp, Artificial Sequence
  ENSG00000080503_52 (sequence is synthesized)
tttcttcttttgagttttgagatttaccaggaaaaaaaaaaaaagtttaaacttctgggtctgtcacatggatcttttagccctttatgaacaggtttcttttatacctggttgttttta

SEQ ID NO: 77768 - DNA, 120 bp, Artificial Sequence
  ENSG00000080503_53 (sequence is synthesized)
cctattcacttcattaaatctagaggcagttgagcatgggagccgtctgtatgttgaattagggctcgcactcttgcgcaacacgtcaccagtcggaaactgggggtttgcttctgtgat

SEQ ID NO: 77769 - DNA, 120 bp, Artificial Sequence
  ENSG00000080503_54 (sequence is synthesized)
ttatttcattattgtgctggtaaaagctgatgaagagactagcagctcgctgctttgctggcttgttaattttatccccactaactgtgatttctgatagccggcctgctgatagtggta

SEQ ID NO: 77770 - DNA, 120 bp, Artificial Sequence
  ENSG00000080503_55 (sequence is synthesized)
gttccttcccttccaatgaagaaaaattaccaaaaactggatcatcacagatgtgtcaaacagccttccttcagacttcagactaacttcaacatataacaggtttcaagattacttacc

SEQ ID NO: 77771 - DNA, 120 bp, Artificial Sequence
  ENSG00000080503_56 (sequence is synthesized)
aaacacagaataaggtttcacatgctgggcagcaaaaactgctgagaaacgtccagtacaggactgggggaaggtcttaacatgaaaccgtgacatgattttccctcctttgtagcccat

SEQ ID NO: 77772 - DNA, 120 bp, Artificial Sequence
  ENSG00000080503_57 (sequence is synthesized)
attcacttcattaaatctagaggcagttgagcatgggagccgtctgtatgttgaattagggctcgcactcttgcgcaacacgtcaccagtcggaaactggggctgatgaagagactagca

SEQ ID NO: 77773 - DNA, 120 bp, Artificial Sequence
  ENSG00000080503_58 (sequence is synthesized)
tttttcctcataactcatcagatctcgcctccttcatagtggttatctgaacactgtaggatcgtgatggaaattgtcttttgattattaaggcctaggctcagactgtcccttaggaat

SEQ ID NO: 77774 - DNA, 120 bp, Artificial Sequence
  ENSG00000080503_59 (sequence is synthesized)
ctgtctgtgtgcatgttgcttctatggatttgcacattggaggatgcgtagaaaacatatttttttaaaaatcccactggcatttttaacatgccaggttgttttgtgttctgcaccagg

SEQ ID NO: 77775 - DNA, 120 bp, Artificial Sequence
  ENSG00000080503_60 (sequence is synthesized)
ggcagttgagcatgggagccgtctgtatgttgaattagggctcgcactcttgcgcaacacgtcaccagtcggaaactgggggtttgcttctgtgatttatttcattattgtgctgtgctg

SEQ ID NO: 77776 - DNA, 120 bp, Artificial Sequence
  ENSG00000080503_61 (sequence is synthesized)
aagcgttgtacataagtgaaagaaattatgtctgagctgtaatcactctttatattgattgttatactcacatgatcataaatattagccatgtttggtgctgtggagaaatgaaggcca

SEQ ID NO: 77777 - DNA, 120 bp, Artificial Sequence
  ENSG00000080503_62 (sequence is synthesized)
agaggcagttgagcatgggagccgtctgtatgttgaattagggctcgcactcttgcgcaacacgtcaccagtcggaaactgggggtttgcttctgtgatttatttcattattgtgctgac

SEQ ID NO: 77778 - DNA, 120 bp, Artificial Sequence
  ENSG00000080503_63 (sequence is synthesized)
cagaatattattgcttttaccatcagaagtttaaatcttcagggggaaaatgaagcattactctactgactggcagagacaggagaggtagatgtccacgcccacagaccctggtgcgat

SEQ ID NO: 77779 - DNA, 120 bp, Artificial Sequence
  ENSG00000080503_64 (sequence is synthesized)
aaaccgcaaggcctggaccccgtggaaattctgcaagagcgggaatacaggtaacgcaccccgccagcaaggggccccctgcggtgtgctagcacctgccgcccaagccgaggggggtga

SEQ ID NO: 77780 - DNA, 120 bp, Artificial Sequence
  ENSG00000080503_65 (sequence is synthesized)
cgtgcggtcggaaaactttcatccactcctggggccttcccggtgctgaggggaggcaccggggttttgaagatcaaaagccgacggggacttcctgtggacccgagagagtgatcatct

SEQ ID NO: 77781 - DNA, 120 bp, Artificial Sequence
  ENSG00000080503_66 (sequence is synthesized)
cacactgcgactgtggaatacactgtccgtgtttgtgcttgtgcggttcggtgatgacggaggggctgggacgctgagtgtgttgcgctggcctgattttcatgttaactgtacgtttct

SEQ ID NO: 77782 - DNA, 120 bp, Artificial Sequence
  ENSG00000080503_67 (sequence is synthesized)
actaaagcatccttcggtagcttggtataatctttgttttaattcacgtgtgtctatgcagtgatccagccttatgggtataccctgtgcgagtgtctttatacaaggtctatacttaaa

SEQ ID NO: 77783 - DNA, 120 bp, Artificial Sequence
  ENSG00000080503_68 (sequence is synthesized)
ggaggacaaggcgaggtttggtggcgagggctggtgggggtggcgtgtgcgtgtggttgtgagtgtgtgtgtgtgcgcgcgcgagcggcggagaatcaggaagtcacagcagcgaagcgc

SEQ ID NO: 77784 - DNA, 120 bp, Artificial Sequence
  ENSG00000080503_69 (sequence is synthesized)
acacagcacacagacatgtttgattgccgtgacatgacgcgcgcgagggaggaagcggcagcggcgggggccgggccgcgggctgtggcgcgggcctagagccgcggctcggagaccggt

SEQ ID NO: 77785 - DNA, 120 bp, Artificial Sequence
  ENSG00000080503_70 (sequence is synthesized)
tcccgtccgccggccgcgccgccaccccaagctccgcgaaccccgcgcccctttttgttccgcgtcctccagcattactctactgactggcagagacaggagaggtagatgtccacgccc

SEQ ID NO: 77786 - DNA, 120 bp, Artificial Sequence
  ENSG00000080503_71 (sequence is synthesized)
tcttgactagccatgtccgcctgatgagatctcacaaaccagttcaagttgtggctcaaaccttccctgatcatttctcataaaccagttcaagttgtggctcaaagccttccctgatca

SEQ ID NO: 77787 - DNA, 120 bp, Artificial Sequence
  ENSG00000080503_72 (sequence is synthesized)
gctggcctcttgcatttccatgccccttcagccttttcgctttattacccaggactggaaatgtcaggatttagtgagatttcattattgagggatgtgaacggagctgtatgatttaga

SEQ ID NO: 77788 - DNA, 120 bp, Artificial Sequence
  ENSG00000080503_73 (sequence is synthesized)
acaaaggattgggggctttgtttattgcctttttaatagtcttcaaaaatgaaaaactaccaaatcaagcttccctttccccctttttaatcttcccacatgctttcttataaatatggt

SEQ ID NO: 77789 - DNA, 120 bp, Artificial Sequence
  ENSG00000080503_74 (sequence is synthesized)
tttccccgtagccagttaatattttacatgcatcacagccagcatggtgcctggtacataacagtagattagatggaagaatgagaaaaactgttatgacgtcagagttattggctcgag

SEQ ID NO: 77790 - DNA, 120 bp, Artificial Sequence
  ENSG00000080503_75 (sequence is synthesized)
ttgctacttaagggaccatgtaaaaactcaaaggactttttaagtacctaggggtgttatttttcatatttgaaaaattcagtgagcatctattgagccaggccttgtaataggtacctc

SEQ ID NO: 77791 - DNA, 120 bp, Artificial Sequence
  ENSG00000080503_76 (sequence is synthesized)
cctgtgtggtagcatattaaatactgatgtcggcatcgtgagatagatgtcactctcaaataacatgttatggaaatggttaggttatgggtgttttgctacagatcacgtcgcagaggt

SEQ ID NO: 77792 - DNA, 120 bp, Artificial Sequence
  ENSG00000080503_77 (sequence is synthesized)
agaagagtgggcagaagctcctaataccttgccttttgaaatacccttcatttcatccattcactttccagaggatggtttcctggcacccacattattttctttctggaaagataaatt

SEQ ID NO: 77793 - DNA, 120 bp, Artificial Sequence
  ENSG00000080503_78 (sequence is synthesized)
tcccttttcctagtttgattttccttcaacacattaccattttggtaaaatttcagaattatgatctcaccccagccttaacccttgatgcaagcattttcaaatacatttttctttagg

SEQ ID NO: 77794 - DNA, 120 bp, Artificial Sequence
  ENSG00000080503_79 (sequence is synthesized)
agatgtcaaatgcagggtatttttttttctcccatgaattttctaaaacctggggctgaaaaagagaaaatattagccataaacctttcaagccaaagtgaaagggcacaaacaatagct

SEQ ID NO: 77795 - DNA, 120 bp, Artificial Sequence
  ENSG00000080503_80 (sequence is synthesized)
tagagggtgggctttgctttggggtttttcagtaagaaaaacttctcagcttagagactgtcgatgcctctttaatgtgtttctgtcctcccacggaaagagatttggcgagttgtttcc

SEQ ID NO: 77796 - DNA, 120 bp, Artificial Sequence
  ENSG00000080503_81 (sequence is synthesized)
aaaatgtcattttttcctactggcctcttgatggtttgttgttatatcttctttttcttgcatgtgatgttacttcattttatcttcttatttttacttttaggaacagtcagaaggaag

SEQ ID NO: 77797 - DNA, 120 bp, Artificial Sequence
  ENSG00000080503_82 (sequence is synthesized)
caacacagccaaggtttgtgtccgctgcacacctgatactggttccccagcatagtctttcagtctttcctgttggatattttaattatgaattccaaagaatgtgtctaaggaaggttg

SEQ ID NO: 77798 - DNA, 120 bp, Artificial Sequence
  ENSG00000080503_83 (sequence is synthesized)
gcgtcgggagcagcggctcgggcagctgctcctgcccgcaccctcccctggagcccggggaggacaaggcgagcattactctactgactggcagagacaggagaggtagatgtccacgcc

SEQ ID NO: 77799 - DNA, 120 bp, Artificial Sequence
  ENSG00000080503_84 (sequence is synthesized)
gcaacaacagcagccggcccttgttaactacaacagaccatctggtaggttaatacgcaaccaaatgaataatgccatggtccaactcggataacaaagactgctcaccaaaacaccggg

SEQ ID NO: 77800 - DNA, 120 bp, Artificial Sequence
  ENSG00000080503_85 (sequence is synthesized)
ttgttaaaagcccggggctgacgtagccttttgttatacctcactggctctctatccttgctccacttagatggccaagattcttggtcttcccctgctgttgagacctagggcagtgtt

SEQ ID NO: 77801 - DNA, 120 bp, Artificial Sequence
  ENSG00000080503_86 (sequence is synthesized)
tcttaaccttaaaaggtggttgtgcaagctggagacccagggaaaaagcacctgtgattttgcgttctctttgaagcggttcaaggtttcttggaagcccatccacacacacaaggttaa

SEQ ID NO: 77802 - DNA, 120 bp, Artificial Sequence
  ENSG00000080503_87 (sequence is synthesized)
gaacctctggacttagtgcatttcatccccagaactcactgctcagatcagccccactagagccattttataatttgttgatttgtttatttctatccctttttgttatgaagaacatct

SEQ ID NO: 77803 - DNA, 120 bp, Artificial Sequence
  ENSG00000080503_88 (sequence is synthesized)
ggagaggcttacaagaagcatgcctgttgtaaaataattatgagtagcaaaatcagcaacaagggaaaatagaaaaaaaagtaagaaattgaggcaagaaagtagggctgcaaaagttct

SEQ ID NO: 77804 - DNA, 120 bp, Artificial Sequence
  ENSG00000080503_89 (sequence is synthesized)
catagttgctgtatttgcttcaaagatgacttgagtttcttgacaatcagagccaaaaggagacaaagtcctgtatctaagtctcgccctttggaaggaagttccttaccagtttctcag

SEQ ID NO: 77805 - DNA, 120 bp, Artificial Sequence
  ENSG00000080503_90 (sequence is synthesized)
aaaaagccatttctagcatgagagtatagagttgatttcccaggtgagattattttttaaattattatcatcatcattattgtaagaggcactgcatgacagaaacatcaatagcatttg

SEQ ID NO: 77806 - DNA, 120 bp, Artificial Sequence
  ENSG00000080503_91 (sequence is synthesized)
ttcataatagactaacagattcaacatggcctatttcttatacaccttgggatgaagtctgaagctatgacattatacaatgggtagaaatgatacaatcctttgcatggcctcttggtc

SEQ ID NO: 77807 - DNA, 120 bp, Artificial Sequence
  ENSG00000080503_92 (sequence is synthesized)
ttctgtcttgatcccattgatagacttcagaggtgcaggggactgtgaagtgatcttccatgaaggttgttttctctaggaagcgttttgttaaagaactggaaaagcagagattgtatg

SEQ ID NO: 77808 - DNA, 120 bp, Artificial Sequence
  ENSG00000080503_93 (sequence is synthesized)
ggtctactctaatgaaaactttggattctagggaatgaggtacttccttgacgttgataccatttcctctgagtggtttccattcatttaggcaagttctgacatgcaggttgttgcaaa

SEQ ID NO: 77809 - DNA, 120 bp, Artificial Sequence
  ENSG00000080503_94 (sequence is synthesized)
cagctagtttgggatattggtactgttcctgggttttgggccttataccatgggagagagttcagattagtattttttcattaatattctgcctattgagtttgtatacgtttattttct

SEQ ID NO: 77810 - DNA, 120 bp, Artificial Sequence
  ENSG00000080503_95 (sequence is synthesized)
ggtagaggcagctccaagagtaggcctacctaagagatatcctcatcttattaattgttatagccttaagaatggatgtcttagtaagtctgagctgctgtaatgaaaggtcattgactg

SEQ ID NO: 77811 - DNA, 120 bp, Artificial Sequence
  ENSG00000080503_96 (sequence is synthesized)
ggtggcttaaaaacagcaaatttatttcttacagctctgaatgctgggaattccaacctcaaaacaccagcagattcagtgtctggtgagggcctgcttcctgattcatagatggcttcc

SEQ ID NO: 77812 - DNA, 120 bp, Artificial Sequence
  ENSG00000080503_97 (sequence is synthesized)
ttctcactgtgtcctcacatggcagaagagacaaggcagctctctggagcctcttttacaagggcatgaatcccaattatgaggactctactctcatgaaatagtcacctcccaaagacc

SEQ ID NO: 77813 - DNA, 120 bp, Artificial Sequence
  ENSG00000080503_98 (sequence is synthesized)
ccaccttctaataccatctccctgggaattaggattttaacatatgaattttgaggggaccataaactttcagaccatggcagtgggttttaaaagggcaagaaagtatcatttcatctc

SEQ ID NO: 77814 - DNA, 120 bp, Artificial Sequence
  ENSG00000080503_99 (sequence is synthesized)
cagaatttctgtgtggctaccatggaggcatttggtaggtggaggatcatagagaactgagatttgggaacaggaaaggttatacaagaaactatgcagaaaatggcagtttgaatccta

SEQ ID NO: 77815 - DNA, 120 bp, Artificial Sequence
  ENSG00000080503_100 (sequence is synthesized)
aaagtatttagaggttttaaaactgcaaaactccagctcttgagaatgcagccagatagaagaaaaaagcacgtatgtatatgtgtgtgtggcttatcctccctgagtgcctgctggcct

SEQ ID NO: 77816 - DNA, 120 bp, Artificial Sequence
  ENSG00000080503_101 (sequence is synthesized)
actcatgtgccattctcagtgataagtcctttgcatgtgtcacacaactaatgatggagagtcgggattcagaccccaggaatttgacttaagatctcatgttcttaaccactttcccat

SEQ ID NO: 77817 - DNA, 120 bp, Artificial Sequence
  ENSG00000080503_102 (sequence is synthesized)
actggctccttcatggcaaaaaggctcatgacaaggaaaaaaacctatcacaaagtctgtgtaccaagatgcaagcattgtacttctgtgtgtaaagagacagtatctgcacaccttact

SEQ ID NO: 77818 - DNA, 120 bp, Artificial Sequence
  ENSG00000080503_103 (sequence is synthesized)
tagatccttttccctcttactctgagacacaatatcaacaaaattggtaatctttatatcccatgtctcagtatgtgaagagtattaactaggagaatttcaagtagaggccagctggta

SEQ ID NO: 77819 - DNA, 120 bp, Artificial Sequence
  ENSG00000080503_104 (sequence is synthesized)
actaccagctacatgaaaggctgatggagaggagggatcagaacttgaactcccaaaaggtagtagtctgggatgatgtgttctgggtatgatctgctatacctcacagttggtcctggg

SEQ ID NO: 77820 - DNA, 120 bp, Artificial Sequence
  ENSG00000080503_105 (sequence is synthesized)
acagacatcaccaagcattggtatttttaagaacgagctagactcagtaataaaagattcgaagatatcagttaagaatgtaggaagcagaatgatttgtttgagaaacctttttcatcc

SEQ ID NO: 77821 - DNA, 120 bp, Artificial Sequence
  ENSG00000080503_106 (sequence is synthesized)
aaggttaaaataatgtaactgaacacagtagtaaaatttaaaggatgaagttccatttatctggatacctgtacacaataaatgcttcatgtcctaatcaacccaatcctgagtgccttt

SEQ ID NO: 77822 - DNA, 120 bp, Artificial Sequence
  ENSG00000080503_107 (sequence is synthesized)
tctggatcattttcaggagagggctctattttttttttttttttaacctggctccggtacctacatctttcgtcatcaggtgcctgtcattaaagggaattcactttattactcactgct

SEQ ID NO: 77823 - DNA, 120 bp, Artificial Sequence
  ENSG00000080503_108 (sequence is synthesized)
catgtctttttaaattttcaatagtcggagcttcattagaaatgacaatatttgggcaggtagggttttatggaagagtggaaaggagacgtgaatgaaggaggaaagaagatatctcct

SEQ ID NO: 77824 - DNA, 120 bp, Artificial Sequence
  ENSG00000080503_109 (sequence is synthesized)
tcaaatagaatgagcccatttctgtcactgagagggcactgccatttgacagcattgctgaacttgtccccacatctcaggtttcattagagaaacagataactttacttgccaaaaata

SEQ ID NO: 77825 - DNA, 120 bp, Artificial Sequence
  ENSG00000080503_110 (sequence is synthesized)
tttttttagattggcttttagaaaagataaaataaggcatgattttcttgttaaagttcatattagtctatttattgtttatctcctttttataaaataaattacttttaaacacccctg

SEQ ID NO: 77826 - DNA, 120 bp, Artificial Sequence
  ENSG00000080503_111 (sequence is synthesized)
cctgctaatatttcaggatattattcacttacgtagaggtagttgtgttcccattttgcttctgttccatttcctggtgttattcatgtgtgaagagaatctttttggctgggttggcct

SEQ ID NO: 77827 - DNA, 120 bp, Artificial Sequence
  ENSG00000080503_112 (sequence is synthesized)
gcctcaaagctgctccaaacttataattcaccaaaagtgacatcatcccagccaccaccaaagaattatgattggagtcgaggcattgcccatggaacacataactctgcagtggtttcc

SEQ ID NO: 77828 - DNA, 120 bp, Artificial Sequence
  ENSG00000080503_113 (sequence is synthesized)
cctacaaaatgtcagccactcttacgatggaatgtgcccttgcctgctgtgggcaccgctcaaatctaacccatcatttttcttttcattttgattcacttttcctttcagagattcaaa

SEQ ID NO: 77829 - DNA, 120 bp, Artificial Sequence
  ENSG00000080503_114 (sequence is synthesized)
caaaaagaaaaatgggaactgaaaaaatttggggtttttgaggggtgagggagagaccttatggtagaaaataaagtgttttttttgatatctgaaattttatatgctcaatttaaatgt

SEQ ID NO: 77830 - DNA, 120 bp, Artificial Sequence
  ENSG00000080503_115 (sequence is synthesized)
tttattgcgtttgttttttccaacctgtggaaaccccttaaattcttactgaatgcatagatcttttatttgcatgaatgtcctgtatgccggaagactaagtgggagcactgaatgctt

SEQ ID NO: 77831 - DNA, 120 bp, Artificial Sequence
  ENSG00000080503_116 (sequence is synthesized)
tgaagttctgtgcctgtgagacttgggtattttaatacattgttaccctattgcatcaaatcacgcctagggatgcattcaataaagactgccccctccccgcttagctgcgctgggact

SEQ ID NO: 77832 - DNA, 120 bp, Artificial Sequence
  ENSG00000080503_117 (sequence is synthesized)
cccttctggagggccagagtttctactttgtttctactttgactcctaaaatgaggactgaagggaaagcagatggcattttgtacctctgacaatgaagcctaaattgtttacgttgga

SEQ ID NO: 77833 - DNA, 120 bp, Artificial Sequence
  ENSG00000080503_118 (sequence is synthesized)
gagggagtgggagataagctaaagaatgtgatttgtcttccatttgaagataccagggaaaagtcttgtcaagtagcaggccaccggtgtctagtgtagaggagacgatttctgtcgata

SEQ ID NO: 77834 - DNA, 120 bp, Artificial Sequence
  ENSG00000080503_119 (sequence is synthesized)
gagagcaaagccagccaggcaaacgaacccgtaagccgcctgagggacagacaggcataaaacctaatgaatgggtaggtagactttgggcaaggctaattgcagcaagctgtgttcagt

SEQ ID NO: 77835 - DNA, 120 bp, Artificial Sequence
  ENSG00000080503_120 (sequence is synthesized)
tccccggcctctgttaagtagtcatttttatacaatctgtcggagggaagaggaaatagacccacacggtaaatgaacttgtggtgtttagctaggaagtggagtttgctctaagtagct

SEQ ID NO: 77836 - DNA, 120 bp, Artificial Sequence
  ENSG00000080503_121 (sequence is synthesized)
ctggtagcagactccagggagcacatggcaggcggactcatctgagtatctgtgctgaggagttgtgttaaactgttgaaacacttagaaattgctatagaaaaagagtactcccaaagt

SEQ ID NO: 77837 - DNA, 120 bp, Artificial Sequence
  ENSG00000080503_122 (sequence is synthesized)
tgccagctaatatggtaccgaatttcctgaaagacctttcttttgccatgtggtttttctataaagctgagtcaattaggcttctttatctccctgtccttggcaataaaacgacaaaag

SEQ ID NO: 77838 - DNA, 120 bp, Artificial Sequence
  ENSG00000080503_123 (sequence is synthesized)
ccgagggttgaacaggtagacactgttatctcactgaatcttcaccgctgccctatgaggtggctattgttactctccccattctatagatgaggacactgagccacagattggttgagt

SEQ ID NO: 77839 - DNA, 120 bp, Artificial Sequence
  ENSG00000080503_124 (sequence is synthesized)
aacttgctcaggctcacacaactagcaggtgataacagctgaggtgaaagaacattttttctgggaagatacagggtgtttaaaggtacctgtttagtgcacagcaagttgcagtacttt

SEQ ID NO: 77840 - DNA, 120 bp, Artificial Sequence
  ENSG00000080503_125 (sequence is synthesized)
taaattggagactggaatatgtaagtagatgtttgaatctctctctgtctttcagtgttacaggtgaatcaacaaaattagaatatctttctatttagtgactgaagaaggcggtccatg

SEQ ID NO: 77841 - DNA, 120 bp, Artificial Sequence
  ENSG00000080503_126 (sequence is synthesized)
catatatcagatctagtttggagtcacagactagattctggaccagagatgaaagatatgctttgggtacctctttttgattaaatgtagtttttaaaatagtgacttgactatacctca

SEQ ID NO: 77842 - DNA, 120 bp, Artificial Sequence
  ENSG00000080503_127 (sequence is synthesized)
aggagtcttcataatcttctgcatgggtatttataggcaataatgctaaagaagacagtgccagtacaagtgaaatgataacatgattgcagtgttacggcttttgttgatgaattattt

SEQ ID NO: 77843 - DNA, 120 bp, Artificial Sequence
  ENSG00000080503_128 (sequence is synthesized)
gaactgggaggaaaaacactttgagaactaaatttaaagtaattcttccgatattatcagtaagacctaaagatggttgcttttagaggacctaaatgtattaaattcctgatttagcat

SEQ ID NO: 77844 - DNA, 120 bp, Artificial Sequence
  ENSG00000080503_129 (sequence is synthesized)
gcttatagcaaggcttcaaatatgtttaattctaccagcttcttgagcttcttaaggagagtcatagaatcatagggaattaaaatgaatgttagaaatctgtatctcctctgacttgac

SEQ ID NO: 77845 - DNA, 120 bp, Artificial Sequence
  ENSG00000080503_130 (sequence is synthesized)
tggatcacacctagagcaacccaaatgaaaaatgtaccttgttttaaagctctccagggaaaaatattctaaaacttcccctgataacttactccaatgcatagtaaccctgagacttaa

SEQ ID NO: 77846 - DNA, 120 bp, Artificial Sequence
  ENSG00000080503_131 (sequence is synthesized)
tatttacaaattggtttcttatatatggatgaaaggaactctaaatgtatcgtattataaaaggtatgcattacataaaggaccttttatacaggaaaaaaagtatttagatgaaaaaac

SEQ ID NO: 77847 - DNA, 120 bp, Artificial Sequence
  ENSG00000080503_132 (sequence is synthesized)
ttcttaattatggaggtacatctacaatacctaaaattaaaaataaaatgaagtgcattttcctcctaagattttctcatcaaccccgagaaccactgctggaaattacctgaagaagaa

SEQ ID NO: 77848 - DNA, 120 bp, Artificial Sequence
  ENSG00000080503_133 (sequence is synthesized)
ggaaattacctgaagaagaaatcttaccttgctctgtatctttaggaaatgttttacctaattttagaaggaggggaaaagaacgataacatcacagacacacacacacacacacacaca

SEQ ID NO: 77849 - DNA, 120 bp, Artificial Sequence
  ENSG00000080503_134 (sequence is synthesized)
aggctgaaatatgcttaactgttttaacttgactggggatttttaccaccatatgggttttttttcgtgacatccggagccaaacgggtgcagtgtgcctttaagaaaagaggtgcctca

SEQ ID NO: 77850 - DNA, 120 bp, Artificial Sequence
  ENSG00000080503_135 (sequence is synthesized)
ttcagggcgacagctcagtgaagtcttcattcagttaccttcaaggaaagaattaccagaatactatgaattaattaggaagccagtggatttcaaaaaaataaaggattcgtaatcata

SEQ ID NO: 77851 - DNA, 120 bp, Artificial Sequence
  ENSG00000080503_136 (sequence is synthesized)
ggagaggcggaggtggaaacgatgcgcaggagttggcttggggctttttgtttgcgtgtccctgtttacctattcataatcatggatcccctctgctttgtgatactgtgaaccacgcat

SEQ ID NO: 77852 - DNA, 120 bp, Artificial Sequence
  ENSG00000080503_137 (sequence is synthesized)
gcgctgagtttgagtcagttgagccagtttagtaaataattttttaaaataaaagaacagtttaaaatctccatgaataattttacttacatgcaggagtaatcttactctactctttat

SEQ ID NO: 77853 - DNA, 120 bp, Artificial Sequence
  ENSG00000080503_138 (sequence is synthesized)
gaagtgtttagtgaattgatttccattagaaaaagacccttagaaatcacagaacataaagcactgcatatggatgtgtttggggtctttggggaggagggaagatgttttgtagctctc

SEQ ID NO: 77854 - DNA, 120 bp, Artificial Sequence
  ENSG00000080503_139 (sequence is synthesized)
cccaaacagattctagtcttcctatgctgttaaacacacactgagagttttcttggacaacactgatagctcagaggacactggtcattggattttaagtatccttttcttccctttttg

SEQ ID NO: 77855 - DNA, 120 bp, Artificial Sequence
  ENSG00000080503_140 (sequence is synthesized)
gttggaggatgtgactaaaatcacaggccactccagttgctattgtggtaggaatttgggtgtatatttgccttaccggctataatctcacagatggacattagtggtggctgagacagg

SEQ ID NO: 77856 - DNA, 120 bp, Artificial Sequence
  ENSG00000080503_141 (sequence is synthesized)
aggaaggaggactgggccatataagcattctggacgttttacgcaatcgtcatgttggggaagtatgctgtatttaattctgcagttttggcataaatacaggagtgatatttttgcagt

SEQ ID NO: 77857 - DNA, 120 bp, Artificial Sequence
  ENSG00000080503_142 (sequence is synthesized)
cccctgtcaaaatgtttgcttatagctttctttgtattgtcatttaagcccatttctaattggtgattgttggaaattgaataaatgtgttcagtttttcataatgtatgtcgttgtatg

SEQ ID NO: 77858 - DNA, 120 bp, Artificial Sequence
  ENSG00000080503_143 (sequence is synthesized)
gcctgatcggaggtgtcacctccactttccgcgtttcctccggcgtggatggggaggctgattgcattactctactgactggcagagacaggagaggtagatgtccacgcccacagaccc

SEQ ID NO: 77859 - DNA, 120 bp, Artificial Sequence
  ENSG00000080503_144 (sequence is synthesized)
ttcatttaaaaatgaaatttttagctaacaaggatattttaaatatttctatcaaaataaagagatatatttgctctgaaagggaaatccacagtttcagggcgacagctcagtgaagtc

SEQ ID NO: 77860 - DNA, 120 bp, Artificial Sequence
  ENSG00000080503_145 (sequence is synthesized)
tttccggtacacgcggggaaatcgcctcctgccagtgtctgatcgctcgcctccgcctccgcctctgccgcctggattgcattattatttttatccgggttgccgtttgctgcggatggt

SEQ ID NO: 77861 - DNA, 120 bp, Artificial Sequence
  ENSG00000080503_146 (sequence is synthesized)
agccttcgggccttgtagtaggtagcatgaaacagcagatttgagtatccacaatcctttcagtattaaattttcagtaaaataaaattacttgtatatgaaaacacagcctttccccag

SEQ ID NO: 77862 - DNA, 120 bp, Artificial Sequence
  ENSG00000080503_147 (sequence is synthesized)
cgggaaaggagggcggggagcccaggctggcggcggggcgccaacggacgctgttgccacccgcttcccagggacttgttcaaagggctccggctgcggagacgtgagcggatcgcagcg

SEQ ID NO: 77863 - DNA, 120 bp, Artificial Sequence
  ENSG00000080511_0 (sequence is synthesized)
tgtctatagtaggtgcggagaagaaatgtttggcagatgaagaaaatgaggtgcagagaggatttaagagattctctcttactgcctgttcagggtcagtccagaattgagggtctccgg

SEQ ID NO: 77864 - DNA, 120 bp, Artificial Sequence
  ENSG00000080511_1 (sequence is synthesized)
gggagggcagaggctttgccctgcaggggatctgtgggagggggttaggagggagcagatgagcccaggatgaatggtcagagtcaggtgctgcccggcggaggtcacgagtccagggag

SEQ ID NO: 77865 - DNA, 120 bp, Artificial Sequence
  ENSG00000080511_2 (sequence is synthesized)
gggatcaacatggccgctgcaccccggactgtgttgatctccggctgctcatcaggaattggtctggaacttgcagtgcaactggcccatgaccccaagaagcgctaccaggtcgtggcc

SEQ ID NO: 77866 - DNA, 120 bp, Artificial Sequence
  ENSG00000080511_3 (sequence is synthesized)
accatgagggacctggggaagaaggagacactggaggcagctgctggggaggctctggggcagaccctcaccgtggcccagctggacgtgtgcagtgatgagtcggtggcccagtgtctc

SEQ ID NO: 77867 - DNA, 120 bp, Artificial Sequence
  ENSG00000080511_4 (sequence is synthesized)
agctgtatccagggagaagtggacgtgctggtgaataatgctggaatgggcctggtggggcccctggaggggctcagccttgctgccatgcagaatgtctttgacaccaactttttcgga

SEQ ID NO: 77868 - DNA, 120 bp, Artificial Sequence
  ENSG00000080511_5 (sequence is synthesized)
gctgtccgtctcgtcaaagctgtgcttccaggcatgaagaggaggcggcagggccacatcgtggtgatcagcagtgtcatgggcctgcagggtgtcatcttcaacgatgtctatgcagct

SEQ ID NO: 77869 - DNA, 120 bp, Artificial Sequence
  ENSG00000080511_6 (sequence is synthesized)
tccaagttcgccctggagggattcttcgaaagcctcgctatccagctgctgcagttcaacatcttcatctccctggtggagccaggccccgtggtcaccgagtttgaggggaagcttctg

SEQ ID NO: 77870 - DNA, 120 bp, Artificial Sequence
  ENSG00000080511_7 (sequence is synthesized)
accctgagaccctgcactacttccgggacctctatctcccagcctccaggaagctgttttgctccgtgggacagaacccacaggacgtggttcaggccattgtcaacgtcatcagctcga

SEQ ID NO: 77871 - DNA, 120 bp, Artificial Sequence
  ENSG00000080511_8 (sequence is synthesized)
ctcgaccacccctgcgccgacagaccaacatccgctactcgccgctgaccacgctcaaaaccgtggattcctctggcagcctgtatgtgcgaacgacccaccgcctcctcttccgctgtc

SEQ ID NO: 77872 - DNA, 120 bp, Artificial Sequence
  ENSG00000080511_9 (sequence is synthesized)
cacgcctcctcaaccttggccttcaatgtctgtcctgcggctgcctcccaacgcgggtgcggccaagatgagcagaacagagcttcacgatccccatccctgaacaaccagacctcttca

SEQ ID NO: 77873 - DNA, 120 bp, Artificial Sequence
  ENSG00000080511_10 (sequence is synthesized)
ttccacatctaattcaaaggatgaacagactcttcatttattcattctgcaaactccccctcccctcctctgtgcctagacatggctagaatcccagaagggcctttattttcaggcata

SEQ ID NO: 77874 - DNA, 120 bp, Artificial Sequence
  ENSG00000080511_11 (sequence is synthesized)
gactcctctgtggtcacagctggagcacagagagggaccctgggaacttggcctgggaagcccagagcaggaagccacagctgtctctgggaaagcaagggaggcttcctggaggaagcg

SEQ ID NO: 77875 - DNA, 120 bp, Artificial Sequence
  ENSG00000080511_12 (sequence is synthesized)
gcattgttatgagccttgaaggaagagacagactctgctacattcaacctcgtgacttcatgatcctgggcctgagaacacaggaatgattcatagcccaccccccacctccatgcatac

SEQ ID NO: 77876 - DNA, 120 bp, Artificial Sequence
  ENSG00000080511_13 (sequence is synthesized)
accagagctctgtggaccaaggggtcattcctggtcacacactccatcagcaaaatgtatttgagcacacaccagcaatgtatgtatattttttccattaaatatatatttataaccaca

SEQ ID NO: 77877 - DNA, 120 bp, Artificial Sequence
  ENSG00000080511_14 (sequence is synthesized)
gtcggtggcccagtgtctcagctgtatccagggagaagtggacgtgctgggtgtcatcttcaacgatgtctatgcagcttccaagttcgccctggagggattcttcgaaagcctcgctat

SEQ ID NO: 77878 - DNA, 120 bp, Artificial Sequence
  ENSG00000080511_15 (sequence is synthesized)
aggtggcatcgaaagggggagaggagagatgaagacaatgaagctgagtgcagtggctcacacctgtaagtccagcgttttgagaggctgaaatgggaggatcgcttgaggtcaggcatt

SEQ ID NO: 77879 - DNA, 80 bp, Artificial Sequence
  ENSG00000080511_16 (sequence is synthesized)
aggtcaggcaagcccaaaatttaaaaattagccaagggtggtggtgtgtgtacctgcagtcccagctactcaggaggctg

SEQ ID NO: 77880 - DNA, 120 bp, Artificial Sequence
  ENSG00000080546_0 (sequence is synthesized)
gattgccagggccgccctgtgccctctggctcggcggtggtgggcgagggctcagggatcggagaagtagcgtcttcccgggggtgccgaattggcggggctgggggacgctttttttca

SEQ ID NO: 77881 - DNA, 120 bp, Artificial Sequence
  ENSG00000080546_1 (sequence is synthesized)
ttttttcaccgccgcccgccgagactacggctgcccgagactgccgccctccgacagcgcccaagcctccggccgctgcggccagtgggccagggttcggcgagccttccctgccggcgc

SEQ ID NO: 77882 - DNA, 120 bp, Artificial Sequence
  ENSG00000080546_2 (sequence is synthesized)
tgctgaggcgctgggaggagctgcggagggcggggactggtgtcggagaaggggcggggtgggaacgccggagagaacccggtggctgcacagacaaaaaagccccgaatggctggaggg

SEQ ID NO: 77883 - DNA, 120 bp, Artificial Sequence
  ENSG00000080546_3 (sequence is synthesized)
cgttcagctgttaacagccttttggggcagagcacggatttgacagctccacaacgtgaggatatccactgaccccgcgagacggaggagaacgcttccccgaaattctctgcccaccaa

SEQ ID NO: 77884 - DNA, 120 bp, Artificial Sequence
  ENSG00000080546_4 (sequence is synthesized)
agccagcgctgcaaggttgcaactttcaaactttgtttttccagaaagaagactgccctttcgtgtacaaggagagggtgagagggtgacctagcttgtagatcggctgaaggcaccagt

SEQ ID NO: 77885 - DNA, 120 bp, Artificial Sequence
  ENSG00000080546_5 (sequence is synthesized)
ggttccaaatgtcacccagatgtgtgttttcatgacgatttgatttctctgattttatttttacatttttcattttaaaaatacaaagcaatttttttggggcatgctgaaaggtaactg

SEQ ID NO: 77886 - DNA, 120 bp, Artificial Sequence
  ENSG00000080546_6 (sequence is synthesized)
aagaccgcaaaggaaaaactattgtcatggctgaaggagagaatgaagtgagatgggatggactctgcagcagagattcaactactagggagacagcattggaaaacattaggcaaacca

SEQ ID NO: 77887 - DNA, 120 bp, Artificial Sequence
  ENSG00000080546_7 (sequence is synthesized)
ttttgaggaaaaccgagtatcttcgttcggtgaaagaaacacctcatcgtccatcagacgggctttcaaataccgagtcttcggatgggttgaataagctacttgctcatctgcttatgc

SEQ ID NO: 77888 - DNA, 120 bp, Artificial Sequence
  ENSG00000080546_8 (sequence is synthesized)
tttctaagaggtgtcccttcaaagatgtgagagagaaaagtgagtttattctgaagagcatccaggaacttggcattagaattcctcgaccactaggacagggaccaagcagattcatcc

SEQ ID NO: 77889 - DNA, 120 bp, Artificial Sequence
  ENSG00000080546_9 (sequence is synthesized)
cagaaaaggagatcctccaagtggggagtgaagacgcacagatgcatgctttatttgcagattcttttgctgctttgggccgtttggataacattacgttagtgatggttttccacccac

SEQ ID NO: 77890 - DNA, 120 bp, Artificial Sequence
  ENSG00000080546_10 (sequence is synthesized)
aatatttagaaagtttcttaaaaactcagcactatctactgcaaatggatgggccgttacccctacattatcgtcactacattggaataatggctgcggcaagacatcagtgctcctact

SEQ ID NO: 77891 - DNA, 120 bp, Artificial Sequence
  ENSG00000080546_11 (sequence is synthesized)
tagtgaacctgcatgtaaatgatttccttcatgttggtggggaccccaagtggctcaatggtttagagaatgctcctcaaaaactacagaatttaggagaacttaacaaagtgttagccc

SEQ ID NO: 77892 - DNA, 120 bp, Artificial Sequence
  ENSG00000080546_12 (sequence is synthesized)
atagaccttggcttattaccaaagaacacattgagggacttttaaaagctgaagagcacagctggtcccttgcggaattggtacatgcagtagttttactcacacactatcattctcttg

SEQ ID NO: 77893 - DNA, 120 bp, Artificial Sequence
  ENSG00000080546_13 (sequence is synthesized)
cctcattcacattcggctgtggaatcagtccagaaattcattgtgatggtggccacacattcagacctccttctgttagcaactactgcatctgtgacattacaaatggcaatcacagtg

SEQ ID NO: 77894 - DNA, 120 bp, Artificial Sequence
  ENSG00000080546_14 (sequence is synthesized)
aatgtttctgtaagtgattctttctttgaggttgaagccctcatggaaaagatgaggcagttacaggaatgtcgagatgaagaagaggcaagtcaggaagagatggcttcacgttttgaa

SEQ ID NO: 77895 - DNA, 120 bp, Artificial Sequence
  ENSG00000080546_15 (sequence is synthesized)
atagaaaaaagagagagtatgtttgtcttctcttcagatgatgaagaagttacaccagcaagagctgtatctcgtcattttgaggatactagttatggctataaagatttctctagacat

SEQ ID NO: 77896 - DNA, 120 bp, Artificial Sequence
  ENSG00000080546_16 (sequence is synthesized)
gggatgcatgttccaacatttcgtgtccaggactattgctgggaagatcatggttattctttggtaaatcgcctttatccagatgtgggacagttgattgatgaaaaatttcacattgct

SEQ ID NO: 77897 - DNA, 120 bp, Artificial Sequence
  ENSG00000080546_17 (sequence is synthesized)
tacaatcttacttataatacaatggcaatgcacaaagatgttgatacctcaatgcttagacgggcaatttggaactatattcactgcatgtttggaataagatatgatgattatgactat

SEQ ID NO: 77898 - DNA, 120 bp, Artificial Sequence
  ENSG00000080546_18 (sequence is synthesized)
ggtgaaattaaccagctattggatcgtagctttaaagtttatatcaaaactgttgtttgcactcctgaaaaggttaccaaaagaatgtatgatagcttctggaggcagttcaagcactct

SEQ ID NO: 77899 - DNA, 120 bp, Artificial Sequence
  ENSG00000080546_19 (sequence is synthesized)
gagaaggttcatgttaatctgcttcttatagaagctaggatgcaagcagaactcctttatgctctgagagccattacccgctatatgacctgatgcctttccttcattaaagatgattct

SEQ ID NO: 77900 - DNA, 120 bp, Artificial Sequence
  ENSG00000080546_20 (sequence is synthesized)
ggaatgatcagcagatatagtctacaagggggaaggtactaagccccaggaccaatggtagacaaaataattcagaaatccattgtgccatgattcctttagtttctgctatttttctgt

SEQ ID NO: 77901 - DNA, 120 bp, Artificial Sequence
  ENSG00000080546_21 (sequence is synthesized)
ggaaaaccactgctggcacaagcagtgactgtttggcagcttcaagtttagagctgtgaagacaggctgccattcacagtattttgctttttgacagtacaagatgctgtgtaactgttt

SEQ ID NO: 77902 - DNA, 120 bp, Artificial Sequence
  ENSG00000080546_22 (sequence is synthesized)
taatacagcaaatagtaactctccaaatcctgttgcttttatgttaaataagataacaagaattggagcatgcaaagaatgggacttggataatgacttaagctttatatgtaaagaatt

SEQ ID NO: 77903 - DNA, 120 bp, Artificial Sequence
  ENSG00000080546_23 (sequence is synthesized)
ttagaagatcttggtgctgctattcctgctggaggaatgaatagatggctgtttcagttaagctattagtaataaaagtgaacattgctactatctgagcctacatacataacttgtgtg

SEQ ID NO: 77904 - DNA, 120 bp, Artificial Sequence
  ENSG00000080546_24 (sequence is synthesized)
atttcaaattaaacttgcattatgtgttaattttcttgcatctaaaaaagcatagaattcctactcacacagctcagcaacaaccattttgatggtaacagttaatttctttcattagtt

SEQ ID NO: 77905 - DNA, 120 bp, Artificial Sequence
  ENSG00000080546_25 (sequence is synthesized)
ttttaaattcagggttctggatattaaattaaaatggcattcttaaagattttcttcaaaaagcaatcctaaatgaaagtgtgtaaattataagaagctggcgatcttttgatatgctgt

SEQ ID NO: 77906 - DNA, 120 bp, Artificial Sequence
  ENSG00000080546_26 (sequence is synthesized)
ttcacaggatcctgacactggagggcagctgtcttgtgcattacttgtgtttccagcaccaaagttgtgggacatgttgctgtagactgctgcgcagtcctgggtgcattcagtctctct

SEQ ID NO: 77907 - DNA, 120 bp, Artificial Sequence
  ENSG00000080546_27 (sequence is synthesized)
gcctctgcctgcctcctggtccccactttaaaggctgtgcagctccttaaataataaagctggaaaatatttttagtcgggttatcaaatttgatttacaaaaacgctaactttgtttga

SEQ ID NO: 77908 - DNA, 120 bp, Artificial Sequence
  ENSG00000080546_28 (sequence is synthesized)
aatgcaaacaggtttgaaaatatgtattaagtactttgtattctggaagcgtgaattgcttttgaagtctgtcagtattactggtatttttaaataaagaagaatttttctccaatttta

SEQ ID NO: 77909 - DNA, 80 bp, Artificial Sequence
  ENSG00000080546_29 (sequence is synthesized)
gccgtccgtgctgactgaggcgctgcagccaggagccgcggccggctgcccagcgctcgccgcctccgcgcgtccgcagc

SEQ ID NO: 77910 - DNA, 120 bp, Artificial Sequence
  ENSG00000080546_30 (sequence is synthesized)
aggcgtacacggcccctttggcggtctcggggctgctgggctgcaagcagtgcggcgggggccgcgaccaggacgaggaacttggcattagaattcctcgaccactaggacagggaccaa

SEQ ID NO: 77911 - DNA, 120 bp, Artificial Sequence
  ENSG00000080546_31 (sequence is synthesized)
aattttatgctaggctttgtatgatgactcatgttttcaataaattaaatactaaaatgaactgtatacttttaccacaccccagtacaaaaatatattctttttttttttccccctaag

SEQ ID NO: 77912 - DNA, 120 bp, Artificial Sequence
  ENSG00000080546_32 (sequence is synthesized)
tcgcacagaaagtacagagagttcctattttctaccccctgaatctcttcccacagatgcacattttcttctgttacagcatttctgtggtacatttgctgtaattgatatattactagt

SEQ ID NO: 77913 - DNA, 120 bp, Artificial Sequence
  ENSG00000080546_33 (sequence is synthesized)
aactctatagttcacattagggttcagtctttgcattgtatcgttctacacattttgacaaatgcctaatgtcacgcatccattacaatatcatatggaatagttagtaccctaaaaatg

SEQ ID NO: 77914 - DNA, 120 bp, Artificial Sequence
  ENSG00000080546_34 (sequence is synthesized)
ccctgggttccacctgttcatccctttccccccctttccccttcccctaaacccctgcaaccactcatctttttattgtttctatatagttttgccttttccagaatgtcatacagctgg

SEQ ID NO: 77915 - DNA, 120 bp, Artificial Sequence
  ENSG00000080546_35 (sequence is synthesized)
aatcatacaaaagtatgtagcttttcagactggcttctttcatctagcaacatccatttaaggcttcttcatgctttttcacgacttgatagttcatttctttttatcactgaataattc

SEQ ID NO: 77916 - DNA, 120 bp, Artificial Sequence
  ENSG00000080546_36 (sequence is synthesized)
gttgatattggtcactcagtatcagagaaagagttatgccatttttactcctttgggtaaaatcaattttaactagcatcctatttttaaaaacctttcaatggccttttttcccagatg

SEQ ID NO: 77917 - DNA, 120 bp, Artificial Sequence
  ENSG00000080546_37 (sequence is synthesized)
cctaacctaatggtgctgaaaccctttccatcacccctaccaacccaaagaaaaacattccaggacagctgtctcaggtaccccttcagaagggaacctgattatgttgatagagtaaaa

SEQ ID NO: 77918 - DNA, 120 bp, Artificial Sequence
  ENSG00000080546_38 (sequence is synthesized)
gagaaaagtgagtttattctgaagagcatccagtgtactcaaagtgaagaccgtaagaatgaagatcttcatgattatccacgtccacttaatgaatgcatagcaaatgatgtctccatt

SEQ ID NO: 77919 - DNA, 120 bp, Artificial Sequence
  ENSG00000080546_39 (sequence is synthesized)
cctacagcatgctattccaggcaccatgtgcagacatgactatctgcagctaagaagaaaagagtttcttcccacgtctctctctcggggaagaaaacctttcccagaaaccctctagca

SEQ ID NO: 77920 - DNA, 120 bp, Artificial Sequence
  ENSG00000080546_40 (sequence is synthesized)
tgaaacagcctgtggatatgccccctcgattgtcttgtcttgtgaaaacagattatttagccaccttcatcccctttgcctcctacttaaaagagagagaaagaaaaaaaacacatttga

SEQ ID NO: 77921 - DNA, 120 bp, Artificial Sequence
  ENSG00000080546_41 (sequence is synthesized)
ctcagggaagagatgatgttgcctggaataagtgtgtcctgcaagctctatgacgttatgcacagcgtttactcttgcgtattaagccatcccttttctgaattgtcctttagaaagagg

SEQ ID NO: 77922 - DNA, 120 bp, Artificial Sequence
  ENSG00000080561_0 (sequence is synthesized)
acctgggaacgctatgggtgaaagcccagcctccgtggttcttaatgcctcaggaggactattttcactaaagatggaaacactggagtctgaattgacctgtccaatctgcctagagtt

SEQ ID NO: 77923 - DNA, 120 bp, Artificial Sequence
  ENSG00000080561_1 (sequence is synthesized)
gtttgaagacccccttctgctcccttgtgctcacagcctctgcttcagctgtgcccatcgcattttggtatcaagctgcagctctggtgaatccattgaacccattactgctttccagtg

SEQ ID NO: 77924 - DNA, 120 bp, Artificial Sequence
  ENSG00000080561_2 (sequence is synthesized)
tcctacctgcaggtatgttatctcgctgaaccaccggggcctggatggcctcaagaggaatgtgactctgcagaacattattgatcgcttccagaaggcttcagtcagtgggcccaattc

SEQ ID NO: 77925 - DNA, 120 bp, Artificial Sequence
  ENSG00000080561_3 (sequence is synthesized)
ccctagtgagagccgccgggaaaggacttacaggcccaccactgccatgtctagcgagcgaattgcttgccaattctgtgagcaggacccgccaagggatgcagtaaaaacatgcatcac

SEQ ID NO: 77926 - DNA, 120 bp, Artificial Sequence
  ENSG00000080561_4 (sequence is synthesized)
ctgtgaggtctcctactgtgaccgttgcctgcgggccacgcaccccaacaagaaacctttcaccagccaccgcctggtggaaccagtgccagacacacatcttcgagggatcacctgcct

SEQ ID NO: 77927 - DNA, 120 bp, Artificial Sequence
  ENSG00000080561_5 (sequence is synthesized)
ggaccatgagaatgagaaagtgaacatgtactgtgtatctgatgaccaattgatctgtgccttatgcaaactggtgggtcgtcaccgagaccatcaggtcgcatccctgaatgatcgatt

SEQ ID NO: 77928 - DNA, 120 bp, Artificial Sequence
  ENSG00000080561_6 (sequence is synthesized)
tgagaaactcaagcaaactctggagatgaacctcaccaacctggttaagcgcaacagcgaactagaaaatcaaatggccaaactaatacagatctgccagcaggttgaggtgaatactgc

SEQ ID NO: 77929 - DNA, 120 bp, Artificial Sequence
  ENSG00000080561_7 (sequence is synthesized)
tatgcatgaggcaaaacttatggaagaatgtgacgagttggtagagatcatccagcagaggaagcaaatgatcgctgtcaaaatcaaagagacaaaggttatgaaactgagaaagttggc

SEQ ID NO: 77930 - DNA, 120 bp, Artificial Sequence
  ENSG00000080561_8 (sequence is synthesized)
acagcaggttgctaattgccgccagtgtcttgaacggtcaacagtcctcatcaaccaagctgagcatatcctgaaagaaaatgaccaggcacggtttctacagtctgcaaaaaatattgc

SEQ ID NO: 77931 - DNA, 120 bp, Artificial Sequence
  ENSG00000080561_9 (sequence is synthesized)
tccagagaaaagaaactgctagaggggttagattatttaacagccccaaacccaccatctatccgagaagaactctgtactgcctcccatgacaccattacagtccactggatctcggat

SEQ ID NO: 77932 - DNA, 120 bp, Artificial Sequence
  ENSG00000080561_10 (sequence is synthesized)
gatgagttcagcatcagctcctatgagcttcagtacaccatattcactggccaggctaacttcatcagcctgtataattcagtagacagctggatgattgttcccaacattaaacagaac

SEQ ID NO: 77933 - DNA, 120 bp, Artificial Sequence
  ENSG00000080561_11 (sequence is synthesized)
cattacacagtgcatggactccagagcgggactcgctacatcttcatcgttaaagccataaaccaagccggcagccggaacagtgaacctacccgactaaaaacaaacagccaacccttt

SEQ ID NO: 77934 - DNA, 120 bp, Artificial Sequence
  ENSG00000080561_12 (sequence is synthesized)
aaattggatcccaaaatgactcacaagaagttgaagatctccaatgatggattgcagatggagaaggatgaaagctctctaaagaagagccacaccccagagaggtttagtggcacaggg

SEQ ID NO: 77935 - DNA, 120 bp, Artificial Sequence
  ENSG00000080561_13 (sequence is synthesized)
tgctatggggcagcaggaaatatattcattgacagtggctgccactattgggaggtggtcatgggttcctcaacatggtatgcaattggcattgcctacaaatcagctccaaagaatgaa

SEQ ID NO: 77936 - DNA, 120 bp, Artificial Sequence
  ENSG00000080561_14 (sequence is synthesized)
tggattggcaagaatgcctcctcatgggtcttctctcgctgcaatagtaacttcgtggtgagacacaacaacaaggaaatgctggtggatgtgcccccacacctgaagcgtctgggtgtc

SEQ ID NO: 77937 - DNA, 120 bp, Artificial Sequence
  ENSG00000080561_15 (sequence is synthesized)
ctcctggattatgacaacaatatgctgtctttctatgacccagctaactctctccatcttcatacttttgatgtgaccttcattcttccagtttgtccaacatttacaatctggaacaaa

SEQ ID NO: 77938 - DNA, 120 bp, Artificial Sequence
  ENSG00000080561_16 (sequence is synthesized)
tccctaatgatcctgtctggcttgcctgccccagattttattgattaccctgagcggcaggaatgcaactgcaggcctcaagaatccccttatgtttctgggatgaaaacctgtcattaa

SEQ ID NO: 77939 - DNA, 120 bp, Artificial Sequence
  ENSG00000080561_17 (sequence is synthesized)
gtttcaggagagtatataattcactggctctctagttcagcagttcttcccctcctacacctaagttagcgttcaatatacgagacacaaaataaagtttgtttgaagcatccaaaataa

SEQ ID NO: 77940 - DNA, 120 bp, Artificial Sequence
  ENSG00000080561_18 (sequence is synthesized)
gagaagacatgtaaacgtgcctccagaggaagggctgggggagctgggagtggcgggggcggcggaaggtgagcctgggaaggtggccgagcaccccttcttcttgggcccttcccagtg

SEQ ID NO: 77941 - DNA, 120 bp, Artificial Sequence
  ENSG00000080561_19 (sequence is synthesized)
ctcccttggggtgtcagccccagccccgtttgcccccactccgcctcccttttggaagggattgccttttttttcctctgcggcggcggaaatgacagtgtggtgctgccgtggtgtcat

SEQ ID NO: 77942 - DNA, 120 bp, Artificial Sequence
  ENSG00000080561_20 (sequence is synthesized)
ggtgctgcccctggactgaggggcgaaaactcttaagtttagctcgggaggcccagctgcggtagcatcgcggccgccgtgctgtcccctgcggggcgcgcgggctggcggatcccggct

SEQ ID NO: 77943 - DNA, 80 bp, Artificial Sequence
  ENSG00000080561_21 (sequence is synthesized)
gctgcgcggcgtcggcgacggtagcggcagcggcggcgaaggcgggcggcggcctacagtggtagcggcggcggcggcga

SEQ ID NO: 77944 - DNA, 120 bp, Artificial Sequence
  ENSG00000080561_22 (sequence is synthesized)
ctgtggccagagataaggaaatgtaaggaagcagtaagctgctcaagattggccggggcgccacgaggcctgtataattcagtagacagctggatgattgttcccaacattaaacagaac

SEQ ID NO: 77945 - DNA, 120 bp, Artificial Sequence
  ENSG00000080561_23 (sequence is synthesized)
taggagattcaattctatagcacaaccataataccaataagtcaaggttaaaaggtatgtgatgaaaaccactcctagaaaaatttgccagctttttaataaaataatggaaaatatact

SEQ ID NO: 77946 - DNA, 120 bp, Artificial Sequence
  ENSG00000080572_0 (sequence is synthesized)
gcacgatttatcctggcctagcatgccttggttaggaaatgttttgggggatatcacacttcagactgaaaaaaaaatggccccagtacttactacgtgaataatgtcctttgtgcgaca

SEQ ID NO: 77947 - DNA, 120 bp, Artificial Sequence
  ENSG00000080572_1 (sequence is synthesized)
acttgaacgctgtggtctgagggttccagtgttgcttggttagataagctgaggagtgagaagtaatcagaccttcacttggtgggcccgagtgtactgtgcagagactacttgtaccta

SEQ ID NO: 77948 - DNA, 120 bp, Artificial Sequence
  ENSG00000080572_2 (sequence is synthesized)
caagacctgctactcgccaagggctgattgggagagtaaataatggaatctgaaaatatggattctgaaaatatgaagacagaaaatatggaatctcaaaatgtagactttgagagtgtt

SEQ ID NO: 77949 - DNA, 120 bp, Artificial Sequence
  ENSG00000080572_3 (sequence is synthesized)
tcttcagttacagctctggaagccctctctaagctacttaatcctgaagaagaggatgattctgactatggacagacaaatggtttatctactattggagccatgggtcctgggaatatt

SEQ ID NO: 77950 - DNA, 120 bp, Artificial Sequence
  ENSG00000080572_4 (sequence is synthesized)
cctgaaaccagcgaggaaaataatgaggacatctggaattcagaagagattccagaaggagcagaatatgatgatatgtgggatgttagagaaatcccagagtatgagattatattcaga

SEQ ID NO: 77951 - DNA, 120 bp, Artificial Sequence
  ENSG00000080572_5 (sequence is synthesized)
cagcaggtgggaactgaagatatatttttagggttgtcaaaaaaggactcctcaacaggttgttgcagtgaactagtggctaaaattaaattgccaaatacaaacccttctgatattcaa

SEQ ID NO: 77952 - DNA, 120 bp, Artificial Sequence
  ENSG00000080572_6 (sequence is synthesized)
attgatatccaggaaacaatccttgaccttcgtactcctcagaagaagctgttgataactcttcctgagctggtggaatgtaccagtgccaaagcattctatatcccagagactgaaact

SEQ ID NO: 77953 - DNA, 120 bp, Artificial Sequence
  ENSG00000080572_7 (sequence is synthesized)
cttgaaatcactatgactatgaaaagagagttagatattgctaatttcttctgaaactgcatgaaaaagataaaaagtagtaaaatggcattggtaacaattaaaaaactttgaaaaaaa

SEQ ID NO: 77954 - DNA, 120 bp, Artificial Sequence
  ENSG00000080572_8 (sequence is synthesized)
ttctgacatatttttgaaagggacaaaattcagttctagtgatattgtgaccatttacagtaatttctattactctgttaggaaatatgtttccttggccaggtgcaatggctcatgcct

SEQ ID NO: 77955 - DNA, 120 bp, Artificial Sequence
  ENSG00000080572_9 (sequence is synthesized)
cctgtaatcccagctactctgtctcaaaaaacaaacaaaaaaaggaaatatgttttcttatgtaaataaactattctatttttatagtgatagctgagtagaatctttacaggttaaaaa

SEQ ID NO: 77956 - DNA, 120 bp, Artificial Sequence
  ENSG00000080572_10 (sequence is synthesized)
attagaatatttcatggtcaattacataattgaaatatgatcatgaaatggttggtccacttacttcagtagtctgaaaaacttatgctaattatttacatttacactgtgatacaatca

SEQ ID NO: 77957 - DNA, 120 bp, Artificial Sequence
  ENSG00000080572_11 (sequence is synthesized)
gttgcatagcaattggtcattattattaccagagaattttatttggttgctttttcattgatttgagcaaatgatttacagtgttctctgtttaggctctcactgttgttctggaatata

SEQ ID NO: 77958 - DNA, 120 bp, Artificial Sequence
  ENSG00000080572_12 (sequence is synthesized)
caggtaataaatagtttgatgtaccatactatcaacatatttacttgagtaaggaacacttttgtgcgtacagtattatttggcttcttcagttgtgcttttaatgcttggatatagtta

SEQ ID NO: 77959 - DNA, 120 bp, Artificial Sequence
  ENSG00000080572_13 (sequence is synthesized)
ggttaaaaacattttttatatgcactaataattattagcattgcctttttgggtactgtatttatatgtagtcaattgaaatccttgactttaaaataaatttaaagtgtggcacattta

SEQ ID NO: 77960 - DNA, 120 bp, Artificial Sequence
  ENSG00000080573_0 (sequence is synthesized)
agtttcccgcggaccctgagaggagcggccgccgcgagtgactgcaccgagcccgagaagtcgccgcgccccgcagccgccccgactggttccccgccttgcccgtgggccccgccggga

SEQ ID NO: 77961 - DNA, 120 bp, Artificial Sequence
  ENSG00000080573_1 (sequence is synthesized)
tggggaaccgccgggacctgggccagccgcgggccggtctctgcctgctcctggccgcgctgcagcttctgccggggacgcaggccgatcctgtggatgtcctgaaggccctgggtgtgc

SEQ ID NO: 77962 - DNA, 120 bp, Artificial Sequence
  ENSG00000080573_2 (sequence is synthesized)
agggaggccaggctggggtccccgaggggcctggcttctgtccccagaggactccagagggtgaccgggcattcagaattggccaggccagcacgctcggcatccccacgtgggaactct

SEQ ID NO: 77963 - DNA, 120 bp, Artificial Sequence
  ENSG00000080573_3 (sequence is synthesized)
ttccagaaggccactttcctgagaacttctccttgctgatcaccttgcggggacagccagccaatcagtctgtcctgctgtccatttatgatgaaaggggtgcccggcagttgggcctgg

SEQ ID NO: 77964 - DNA, 120 bp, Artificial Sequence
  ENSG00000080573_4 (sequence is synthesized)
cactggggccagcgctgggtctcctaggtgaccccttccgccccctcccccagcaggtcaacctcacagatggcaggtggcaccgtgtggccgtcagcatagatggtgagatggtgaccc

SEQ ID NO: 77965 - DNA, 120 bp, Artificial Sequence
  ENSG00000080573_5 (sequence is synthesized)
tggtagctgactgtgaagctcagccccctgttttgggccatggcccccgcttcatcagcatagctggactcactgtgctggggacccaggaccttggggaaaagactttcgagggagaca

SEQ ID NO: 77966 - DNA, 120 bp, Artificial Sequence
  ENSG00000080573_6 (sequence is synthesized)
ttcaggagctgctgataagcccagatcctcaggctgccttccaggcttgtgagcggtacctccccgactgtgacaacctggcaccggcagccacagtggctccccagggtgaaccagaaa

SEQ ID NO: 77967 - DNA, 120 bp, Artificial Sequence
  ENSG00000080573_7 (sequence is synthesized)
cccctcgtcctcggcggaaggggaagggaaaagggaggaagaaagggcgaggtcgcaaggggaagggcaggaaaaagaacaaggaaatttggacctcaagtccacctcctgactccgcag

SEQ ID NO: 77968 - DNA, 120 bp, Artificial Sequence
  ENSG00000080573_8 (sequence is synthesized)
agaaccagacctccactgacatccccaagacagagactccagctccaaatctgcctccgacccccacgcctttggtcgtcacctccactgtgactactggactcaatgccacgatcctag

SEQ ID NO: 77969 - DNA, 120 bp, Artificial Sequence
  ENSG00000080573_9 (sequence is synthesized)
agaggagcttggaccctgacagtggaaccgagctggggaccctggagaccaaggcagccagggaggatgaagaaggagatgattccaccatgggccctgacttccgggcagcagaatatc

SEQ ID NO: 77970 - DNA, 120 bp, Artificial Sequence
  ENSG00000080573_10 (sequence is synthesized)
catctcggactcagttccagatctttcctggtgctggagagaaaggagcaaaaggagagcccgcagtgattgaaaaggggcagcagtttgagggacctccaggagccccaggaccccaag

SEQ ID NO: 77971 - DNA, 120 bp, Artificial Sequence
  ENSG00000080573_11 (sequence is synthesized)
gggtggttggcccctcaggccctcccggccccccaggattccctggcgaccctggtccaccgggccctgctggcctcccaggaatccccggcattgatgggatccgaggcccaccgggca

SEQ ID NO: 77972 - DNA, 120 bp, Artificial Sequence
  ENSG00000080573_12 (sequence is synthesized)
ctgtgatcatgatgccgttccagtttgcaggcggctcctttaaaggccccccagtctcattccagcaggcccaggctcaggcagttctgcagcagactcagctctctatgaaaggccccc

SEQ ID NO: 77973 - DNA, 120 bp, Artificial Sequence
  ENSG00000080573_13 (sequence is synthesized)
ctggtccagtggggctcactgggcgcccaggccctgtgggtctccccgggcatccaggtctgaaaggagaggagggagcagaagggccacagggtccccgaggcctgcagggacctcatg

SEQ ID NO: 77974 - DNA, 120 bp, Artificial Sequence
  ENSG00000080573_14 (sequence is synthesized)
gaccccctggccgagtgggcaagatgggccgccctggagcagatggagctcggggcctcccaggggacactggacctaagggtgatcgtggcttcgatggcctccctgggctgcctggtg

SEQ ID NO: 77975 - DNA, 120 bp, Artificial Sequence
  ENSG00000080573_15 (sequence is synthesized)
agaagggccaaaggggtgactttggccatgtggggcaacccggtcccccaggagaggatggtgagaggggagcagagggacctccagggcccactggccaggctggggagccgggtccac

SEQ ID NO: 77976 - DNA, 120 bp, Artificial Sequence
  ENSG00000080573_16 (sequence is synthesized)
gaggactgcttggccccagaggctctcctggccccacgggtcgcccgggtgtgactggaattgatggtgctcctggtgccaaaggcaatgtgggtcctccaggagaaccaggccctccgg

SEQ ID NO: 77977 - DNA, 120 bp, Artificial Sequence
  ENSG00000080573_17 (sequence is synthesized)
gacagcagggaaaccatgggtcccagggactccccggtccccagggactcattggcactcctggggagaagggtccccctggaaacccaggaattccaggcctcccaggatccgatggcc

SEQ ID NO: 77978 - DNA, 120 bp, Artificial Sequence
  ENSG00000080573_18 (sequence is synthesized)
ctctgggtcacccaggacatgagggccccacgggagagaaaggggctcagggtccaccagggtcggcaggccctccgggctatcctggacctcggggagtgaagggcacttcaggcaacc

SEQ ID NO: 77979 - DNA, 120 bp, Artificial Sequence
  ENSG00000080573_19 (sequence is synthesized)
ggggcctccagggggagaaaggcgagaagggagaggacggcttcccaggcttcaagggcgatgtggggctcaaaggtgatcaggggaaacccggagctccaggtccccggggagaggatg

SEQ ID NO: 77980 - DNA, 120 bp, Artificial Sequence
  ENSG00000080573_20 (sequence is synthesized)
gtcctgaggggccgaaggggcaggcggggcaggctggcgaggaggggcccccaggctcagctggggagaagggcaagcttggggtgccaggcctcccaggttatccaggacgccctggac

SEQ ID NO: 77981 - DNA, 120 bp, Artificial Sequence
  ENSG00000080573_21 (sequence is synthesized)
ctaagggatctattggatttcccggtcccctgggacccataggagagaaagggaagtcgggaaagacagggcagccaggcctggaaggagagcggggaccaccaggttcccgtggagaga

SEQ ID NO: 77982 - DNA, 120 bp, Artificial Sequence
  ENSG00000080573_22 (sequence is synthesized)
gggggcaaccgggtgccacagggcaaccaggccccaagggcgatgtgggccaggatggagcccctgggatccctggagaaaagggcctccctggtctgcaaggccctccaggattccctg

SEQ ID NO: 77983 - DNA, 120 bp, Artificial Sequence
  ENSG00000080573_23 (sequence is synthesized)
ggccaaagggcccccctggtcaccaaggtaaagatgggcgaccagggcaccctggacagagaggagaactgggcttccaaggtcagacaggcccgcctggaccagctggtgtcttaggcc

SEQ ID NO: 77984 - DNA, 120 bp, Artificial Sequence
  ENSG00000080573_24 (sequence is synthesized)
ctcagggaaagacaggagaagtgggacctctaggtgaaagggggcctccaggcccccctggacctcctggtgaacaaggtcttcctggcctggaaggcagagagggggccaagggggaac

SEQ ID NO: 77985 - DNA, 120 bp, Artificial Sequence
  ENSG00000080573_25 (sequence is synthesized)
ctactggcttaaagggtgataagggccccccagggcccgtgggggccaatggctcccctggtgagcgcggtcctttgggcccagcaggaggcattggacttcctggccaaagtggcagcg

SEQ ID NO: 77986 - DNA, 120 bp, Artificial Sequence
  ENSG00000080573_26 (sequence is synthesized)
aaggccccgttggccctgcaggcaagaaggggtcccggggagaacgtggcccccctggccccactggcaaagatgggatcccagggcccctggggcctctgggaccccctggagctgctg

SEQ ID NO: 77987 - DNA, 120 bp, Artificial Sequence
  ENSG00000080573_27 (sequence is synthesized)
ggccttctggcgaggaaggggacaagggggatgtgggtgcccccggacacaaggggagtaaaggcgataaaggagacgcgggcccacctggacaaccagggatacggggtcctgcaggac

SEQ ID NO: 77988 - DNA, 120 bp, Artificial Sequence
  ENSG00000080573_28 (sequence is synthesized)
acccaggtcccccgggagcagacggggctcaggggcgccggggacccccaggcctctttgggcagaaaggagatgacggagtcagaggctttgtgggggtgattggccctcctggactgc

SEQ ID NO: 77989 - DNA, 120 bp, Artificial Sequence
  ENSG00000080573_29 (sequence is synthesized)
aggggctgccaggccctccgggagagaaaggggaggtcggagacgtcgggtccatgggtccccatggagctccaggtcctcggggtccccaaggccccactggatcagagggcactccag

SEQ ID NO: 77990 - DNA, 120 bp, Artificial Sequence
  ENSG00000080573_30 (sequence is synthesized)
ggctgcctggaggagttggtcagccaggcgccgtgggtgagaagggtgagcgaggggacgctggagacccagggcctccaggagccccaggcatcccggggcccaagggagacattggtg

SEQ ID NO: 77991 - DNA, 120 bp, Artificial Sequence
  ENSG00000080573_31 (sequence is synthesized)
aaaagggggactcaggcccatctggagctgctggacccccaggcaagaaaggtccccctggagaggatggagccaaagggagcgtgggccccacggggctgcccggagatctagggcccc

SEQ ID NO: 77992 - DNA, 120 bp, Artificial Sequence
  ENSG00000080573_32 (sequence is synthesized)
caggagaccctggagtttcaggcatagatggttccccaggggagaagggagaccctggtgatgttgggggaccgggtccgcctggagcttctggggagcccggcgcccccgggccccccg

SEQ ID NO: 77993 - DNA, 120 bp, Artificial Sequence
  ENSG00000080573_33 (sequence is synthesized)
gcaagaggggtccttcaggccacatgggtcgagaaggcagagaaggggagaaaggtgccaagggggagccaggtcctgatgggcccccagggaggacgggtccaatgggggctagagggc

SEQ ID NO: 77994 - DNA, 120 bp, Artificial Sequence
  ENSG00000080573_34 (sequence is synthesized)
cccctggacgtgtggggcctgagggtcttcgagggatccctggccctgtgggtgaaccaggcctcctgggagcccctggacagatgggccctcctggccccctggggccctctggcctcc

SEQ ID NO: 77995 - DNA, 120 bp, Artificial Sequence
  ENSG00000080573_35 (sequence is synthesized)
cagggctgaagggagacactggccccaagggggaaaagggccacattggattgatcggtctcattggccccccgggagaagctggtgagaaaggagatcaggggttgccaggcgtgcagg

SEQ ID NO: 77996 - DNA, 120 bp, Artificial Sequence
  ENSG00000080573_36 (sequence is synthesized)
gaccccctggtcccaagggagaccctggtccccctggtcccattggctctctgggccaccctgggcccccaggtgtggcgggccctctaggacagaaaggctcaaaagggtctccggggt

SEQ ID NO: 77997 - DNA, 120 bp, Artificial Sequence
  ENSG00000080573_37 (sequence is synthesized)
ccatgggcccccgtggagacactggacctgcaggcccaccaggccccccgggtgcccctgccgagctgcatgggctgcgcaggcgccggcgcttcgtcccagtcccgcttccagtcgtgg

SEQ ID NO: 77998 - DNA, 120 bp, Artificial Sequence
  ENSG00000080573_38 (sequence is synthesized)
agggcggcctggaggaggtgctggcctcgctcacatcgctgagcttggagctggagcagctgcggcgtcctcccggcactgcggagcgcccgggcctcgtgtgccacgagctgcaccgca

SEQ ID NO: 77999 - DNA, 120 bp, Artificial Sequence
  ENSG00000080573_39 (sequence is synthesized)
accacccgcacctgcctgatggggaatactggattgaccccaaccagggctgcgcgcgggactcgttcagggttttttgcaacttcacggcgggaggagagacctgcctctatcccgaca

SEQ ID NO: 78000 - DNA, 120 bp, Artificial Sequence
  ENSG00000080573_40 (sequence is synthesized)
agaagtttgagatcgtgaaattggcctcctggtccaaggaaaagcctggaggctggtatagcacattccgtcgagggaagaagttctcctacgtggacgccgacgggtccccagtgaatg

SEQ ID NO: 78001 - DNA, 120 bp, Artificial Sequence
  ENSG00000080573_41 (sequence is synthesized)
tcgtgcagctgaacttcctgaaactgctgagtgccacagctcgccagaacttcacctactcctgccagaatgcagctgcctggctggacgaagccacgggtgactacagccactccgccc

SEQ ID NO: 78002 - DNA, 120 bp, Artificial Sequence
  ENSG00000080573_42 (sequence is synthesized)
gcttccttggcaccaatggagaggagctgtctttcaaccagacgacagcagccactgtcagcgtcccccaggatggctgccggctccggaaaggacagacgaagacccttttcgaattca

SEQ ID NO: 78003 - DNA, 120 bp, Artificial Sequence
  ENSG00000080573_43 (sequence is synthesized)
gctcttctcgagcgggatttctgcccctgtgggatgtggcggccactgactttggccagacgaaccaaaagtttgggtttgaactgggccccgtctgcttcagcagctgagagtgtccgg

SEQ ID NO: 78004 - DNA, 120 bp, Artificial Sequence
  ENSG00000080573_44 (sequence is synthesized)
ggtgggagggaccatgagggagccccagaatggggtgcatttggtgctgaggctttgaagccaccgtatttttcgttacctgtgactatggagccaatgggatgtgacttcgctcatcac

SEQ ID NO: 78005 - DNA, 120 bp, Artificial Sequence
  ENSG00000080573_45 (sequence is synthesized)
ggacagtcattccttctcctttccagggtgctgggggctggggttccctggcccaagggtccagcctcctctcaccccattccaggtggcatactgcagtctggctctttctcccctccc

SEQ ID NO: 78006 - DNA, 120 bp, Artificial Sequence
  ENSG00000080573_46 (sequence is synthesized)
tccccacccaagcctcacctccccaccccttgaacccccatgcaatgagcttctaactcagagctgatgaacaaaagcccccccacccccaatgcctgcctcctcactcctccgtcgctg

SEQ ID NO: 78007 - DNA, 120 bp, Artificial Sequence
  ENSG00000080573_47 (sequence is synthesized)
cccttcacaccttttggtgctacccctccccagagttaagcactggatgtctcctgatcccaggctgggacccctacccccaccccctttgatcctttctacttccacggtgaaaggact

SEQ ID NO: 78008 - DNA, 120 bp, Artificial Sequence
  ENSG00000080573_48 (sequence is synthesized)
gaggtcggactacagagggaagagggacttcccttgactgggttgtgtttcttttcctgcctcagcccagctctgcaaatcccctccccctgccccccacctccccaggctcaccttgcc

SEQ ID NO: 78009 - DNA, 120 bp, Artificial Sequence
  ENSG00000080573_49 (sequence is synthesized)
atgccaggtggtttggggaccaagatgttgggggggtgaatcaggatcctaatggtgctgccctatttatacctgggtctgtattaaaagggaaagtcccccctgttgtagatttcatct

SEQ ID NO: 78010 - DNA, 120 bp, Artificial Sequence
  ENSG00000080573_50 (sequence is synthesized)
gcttcctccttagggaaggctgggatatgatgagagattccagcccaagcctggccccccaccgccaggccatagggcataatttgcatctcaaatctgagaataaactgatgaactgtg

SEQ ID NO: 78011 - DNA, 120 bp, Artificial Sequence
  ENSG00000080573_51 (sequence is synthesized)
atcccaccttggtggcctactctgaccatcccttgacctcatccctggtaattcccatttgaaatctgcataatttcccatttgaccatcccctaaccacccacacagacctcgagttca

SEQ ID NO: 78012 - DNA, 120 bp, Artificial Sequence
  ENSG00000080573_52 (sequence is synthesized)
taggacagaaaggctcaaaagggtctccggtgagtacaccctgcttccgtgggcttacacatcccagctccccacccccttcactgcaccagaaccctccacgtctctgccttcatttat

SEQ ID NO: 78013 - DNA, 120 bp, Artificial Sequence
  ENSG00000080573_53 (sequence is synthesized)
ttatttattcatgcaatcgtgcgttcgacaaatatttattcaacacctacggttgtatttcatcagatccaaaatgccatcaattataagatgtaccattattttacaaactgctaggaa

SEQ ID NO: 78014 - DNA, 120 bp, Artificial Sequence
  ENSG00000080573_54 (sequence is synthesized)
agaaaacagttctgccaagtaaactatgacttgccaaagatgttaagaagctgatttcagagacattaaaacatgaaaagaaaatttgtgtctgatgcctaatgctgaaaactgcatgtc

SEQ ID NO: 78015 - DNA, 120 bp, Artificial Sequence
  ENSG00000080603_0 (sequence is synthesized)
gtcagtccgtcgggagggctagggagatggtcacgaaacctgaagtcaagagttaaggcttgttggcttctggtgtgattcccttcagtacggcggcaccgtggaagtgcagactttcac

SEQ ID NO: 78016 - DNA, 120 bp, Artificial Sequence
  ENSG00000080603_1 (sequence is synthesized)
agggggtgtggtctcagctcacacaggtgctccagaggctggtggacctgagcggaggctgggacgccctggtgggccccgggccctggaaggcgggtcccggtggccggtggcccagaa

SEQ ID NO: 78017 - DNA, 120 bp, Artificial Sequence
  ENSG00000080603_2 (sequence is synthesized)
tgaggccagctcccagcatgccctgcagccggacgccagcccctcggccagcagtactggtgataacaacccagtcattcttcaggcatccaagggggagcctgggagtgggaccatgca

SEQ ID NO: 78018 - DNA, 120 bp, Artificial Sequence
  ENSG00000080603_3 (sequence is synthesized)
gagcagcccctcccctgctcaccctcagctcccagtcctacagacacagatggtgtcggacggcatgacaggcagcaatcctgtgtcccctgcctcatccagttccccagcctctagtgg

SEQ ID NO: 78019 - DNA, 120 bp, Artificial Sequence
  ENSG00000080603_4 (sequence is synthesized)
ggcaggcggcatctccccgcagcacatagctcaagattcctcactggatggacctccaggccccccagatggtgccacagtgcccctggaggggttcagcttatcccaggctgctgacct

SEQ ID NO: 78020 - DNA, 120 bp, Artificial Sequence
  ENSG00000080603_5 (sequence is synthesized)
ggctaacaagggcccgaagtgggagaagagccatgccgaaattgcagaacaggccaagcatgaggccgagatcgagactcggattgctgagctgcggaaggagggtttctggtcactgaa

SEQ ID NO: 78021 - DNA, 120 bp, Artificial Sequence
  ENSG00000080603_6 (sequence is synthesized)
gaggctgcctaaggtgccagagccccctcgccccaaaggtcactgggactatttgtgcgaagagatgcagtggctctctgctgactttgctcaggagcgccgttggaaacggggtgtggc

SEQ ID NO: 78022 - DNA, 120 bp, Artificial Sequence
  ENSG00000080603_7 (sequence is synthesized)
ccggaaggtggtgcgcatggtgatccggcaccacgaggagcagcggcagaaagaggaacgggcccggagggaggagcaggccaagctgcgtcgaattgcttccaccatggccaaggatgt

SEQ ID NO: 78023 - DNA, 120 bp, Artificial Sequence
  ENSG00000080603_8 (sequence is synthesized)
caggcagttctggagcaatgtggagaaggtggtgcaattcaagcaacagtcccggcttgaggaaaagcgcaaaaaagccctggacctgcatttggacttcattgtggggcaaactgaaaa

SEQ ID NO: 78024 - DNA, 120 bp, Artificial Sequence
  ENSG00000080603_9 (sequence is synthesized)
gtactcggaccttctgtctcagagcctcaaccagccattaacctccagcaaagcaggctcttccccttgcctcggctcttcctcagctgcctccagtcctccaccccctgcttctcgcct

SEQ ID NO: 78025 - DNA, 120 bp, Artificial Sequence
  ENSG00000080603_10 (sequence is synthesized)
ggatgatgaagatggggactttcaaccccaagaggatgaggaagaggatgatgaggaaacgattgaagttgaagaacaacaggaaggcaatgatgcagaggcccagaggcgtgagattga

SEQ ID NO: 78026 - DNA, 120 bp, Artificial Sequence
  ENSG00000080603_11 (sequence is synthesized)
gctgcttcgccgtgagggagaattgccactggaagagctgctccgttcccttccccctcagctgttggaagggccttccagcccctctcaaaccccctcatctcatgatagtgacacccg

SEQ ID NO: 78027 - DNA, 120 bp, Artificial Sequence
  ENSG00000080603_12 (sequence is synthesized)
agatgggcctgaagaaggtgctgaagaagagccccctcaggtgttggagataaagcccccaccctctgctgtcacacagcgcaacaaacagccttggcatccagatgaagatgatgaaga

SEQ ID NO: 78028 - DNA, 120 bp, Artificial Sequence
  ENSG00000080603_13 (sequence is synthesized)
gtttactgccaacgaagaggaagcggaggatgaagaggatactatagcagctgaggaacagttggaaggggaggtggatcatgccatggagctgagcgagttggctcgagaaggtgagct

SEQ ID NO: 78029 - DNA, 120 bp, Artificial Sequence
  ENSG00000080603_14 (sequence is synthesized)
ttccatggaggagctattgcagcagtatgcaggagcctatgccccaggctctgggagcagtgaagatgaggatgaagatgaggttgatgctaatagctctgactgtgaaccagaggggcc

SEQ ID NO: 78030 - DNA, 120 bp, Artificial Sequence
  ENSG00000080603_15 (sequence is synthesized)
cgtggaagcggaagagcctcctcaggaggatagtagcagtcagtcagactctgtggaggaccggagtgaggatgaggaagatgaacattcagaggaggaagaaacaagtggaagttcagc

SEQ ID NO: 78031 - DNA, 120 bp, Artificial Sequence
  ENSG00000080603_16 (sequence is synthesized)
atcagaggaatctgagtctgaagagtctgaggatgcccaatcacagagccaagcagatgaagaggaggaagatgatgattttggggtggagtacttgcttgccagggatgaagagcagag

SEQ ID NO: 78032 - DNA, 120 bp, Artificial Sequence
  ENSG00000080603_17 (sequence is synthesized)
tgaggcagatgcaggcagtgggcctcctactccagggcccactactctaggtccaaagaaagaaattactgacattgctgcagcagctgaaagtctccagcccaagggttacacgctggc

SEQ ID NO: 78033 - DNA, 120 bp, Artificial Sequence
  ENSG00000080603_18 (sequence is synthesized)
cacgacccaggtaaagacgcccattcccctgcttctgcggggccagctccgggagtaccagcacattgggctagactggctggttaccatgtatgagaagaagcttaatggcattcttgc

SEQ ID NO: 78034 - DNA, 120 bp, Artificial Sequence
  ENSG00000080603_19 (sequence is synthesized)
tgatgagatggggcttgggaagaccatccagaccatctctctgcttgcccacttggcttgtgagaaaggtaactggggtccccatttaatcattgttcccaccagcgtgatgttgaactg

SEQ ID NO: 78035 - DNA, 120 bp, Artificial Sequence
  ENSG00000080603_20 (sequence is synthesized)
ggagatggagttgaaacggtggtgccccagctttaaaatcctcacttactatggagcccagaaagagaggaagctcaagcggcagggctggaccaagcccaatgcctttcatgtgtgtat

SEQ ID NO: 78036 - DNA, 120 bp, Artificial Sequence
  ENSG00000080603_21 (sequence is synthesized)
cacatcttacaagctggtgctgcaggaccaccaggccttccgtcgcaagaactggcgctatctcattctggatgaggcgcagaacatcaagaacttcaagtcacagcgctggcagtcact

SEQ ID NO: 78037 - DNA, 120 bp, Artificial Sequence
  ENSG00000080603_22 (sequence is synthesized)
cctcaacttcaacagccagagacgcctgctcctgacaggaactcccttgcagaacagcctcatggagctgtggtccttgatgcactttttgatgccccatgtcttccagtctcatcgcga

SEQ ID NO: 78038 - DNA, 120 bp, Artificial Sequence
  ENSG00000080603_23 (sequence is synthesized)
gttcaaggagtggttctctaatcccctaactggcatgattgagggcagccaagagtataatgaaggtctagtcaaacgcctccacaaggttttgaggccttttttactgcgccgagttaa

SEQ ID NO: 78039 - DNA, 120 bp, Artificial Sequence
  ENSG00000080603_24 (sequence is synthesized)
ggtggatgttgagaagcagatgcccaaaaagtacgagcatgttatccgctgcaggctctccaagcgtcaacgctgtctctatgatgacttcatggcacagaccacaactaaggagacact

SEQ ID NO: 78040 - DNA, 120 bp, Artificial Sequence
  ENSG00000080603_25 (sequence is synthesized)
agccacaggccatttcatgagcgtcatcaacattttgatgcagctgagaaaagtttgcaatcatccaaatctgttcgaccctcgaccggttacctcccctttcatcaccccaggcatctg

SEQ ID NO: 78041 - DNA, 120 bp, Artificial Sequence
  ENSG00000080603_26 (sequence is synthesized)
cttcagcaccgcctctctggtgctaagggccacggatgtccatcccctccagcggatagacatgggtcgatttgaccttattggcctggaaggtcgtgtctctcgatatgaggcagacac

SEQ ID NO: 78042 - DNA, 120 bp, Artificial Sequence
  ENSG00000080603_27 (sequence is synthesized)
atttctgccccggcaccgcctctctcgccgggtactgttagaagtggctactgctcctgaccccccaccccggcccaagccagtcaagatgaaggtcaacaggatgctgcagccagtacc

SEQ ID NO: 78043 - DNA, 120 bp, Artificial Sequence
  ENSG00000080603_28 (sequence is synthesized)
taagcaagaaggccggacagtggtggtggtgaacaacccacgggcgcccctgggccctgtcccagttcgacctcctccaggtcctgagctctcagcccagcccacccctggcccagtccc

SEQ ID NO: 78044 - DNA, 120 bp, Artificial Sequence
  ENSG00000080603_29 (sequence is synthesized)
ccaagtgctgccagcatcactgatggtttcagcctcacctgccgggcccccgcttattcctgcatctcggcctcctggccctgtcctcttgcctccactgcagcccaacagtggttctct

SEQ ID NO: 78045 - DNA, 120 bp, Artificial Sequence
  ENSG00000080603_30 (sequence is synthesized)
cccccaggtgttgccatcccccctgggggtcctgagtgggacctcacggcctcccacgccaaccttgtccctaaagccaacaccacctgccccagttcgcctgagcccagccccacctcc

SEQ ID NO: 78046 - DNA, 120 bp, Artificial Sequence
  ENSG00000080603_31 (sequence is synthesized)
aggctcctctagcctgttgaagcccctgacagtgccaccaggctacaccttccctcctgctgctgccaccaccacttctaccaccacggcaactgctaccaccacagcagtgccagctcc

SEQ ID NO: 78047 - DNA, 120 bp, Artificial Sequence
  ENSG00000080603_32 (sequence is synthesized)
gactcctgcaccacagcgcctcattctatctcccgatatgcaggctcgcctgccctcaggcgaagtggtcagcatcgggcagttagcctcactggcacaacgtccagtggctaatgcagg

SEQ ID NO: 78048 - DNA, 120 bp, Artificial Sequence
  ENSG00000080603_33 (sequence is synthesized)
gggaagcaaacctctcaccttccaaatccagggcaacaagctgactttgactggtgcccaggtgcgccagcttgctgtggggcagccccgcccgctgcaaaggaatgtggtgcacctcgt

SEQ ID NO: 78049 - DNA, 120 bp, Artificial Sequence
  ENSG00000080603_34 (sequence is synthesized)
gtcagcaggggggcagcaccatctcatcagccagcctgcccatgtggccctcatccaggccgtggccccgacccctggccctacccctgtctctgtgctgccttcttcgacccccagcac

SEQ ID NO: 78050 - DNA, 120 bp, Artificial Sequence
  ENSG00000080603_35 (sequence is synthesized)
cacccctgcccctactggcctcagccttccgcttgctgctaaccaggtgccaccaaccatggtgaataatacaggcgtggtgaagattgtagtgagacaagcccctcgggatggactgac

SEQ ID NO: 78051 - DNA, 120 bp, Artificial Sequence
  ENSG00000080603_36 (sequence is synthesized)
tcctgttcctccattggccccagcaccccggcctccgagctctgggcttccagctgtgttgaatccacgccccacgttaacccctggccggctacccacacctactctgggtactgctcg

SEQ ID NO: 78052 - DNA, 120 bp, Artificial Sequence
  ENSG00000080603_37 (sequence is synthesized)
agcccccatgcccacacccactctggtgaggcctcttctcaagctggtccacagtccttcacctgaagtcagtgcttcagcccccggagctgcccccttgaccatctcttctcctctcca

SEQ ID NO: 78053 - DNA, 120 bp, Artificial Sequence
  ENSG00000080603_38 (sequence is synthesized)
cgtgccatcctccctccctgggccagcctcttctccaatgccaattcccaactcctctccccttgctagtcctgtgtcctctacagtctcagttccattgtcatcttcactccccatctc

SEQ ID NO: 78054 - DNA, 120 bp, Artificial Sequence
  ENSG00000080603_39 (sequence is synthesized)
tgtccccaccacacttcctgccccagcctcggctccactcaccatccccatctcagcccccttgactgtttctgcttcgggcccagctctgttgaccagtgtgactccaccattggcacc

SEQ ID NO: 78055 - DNA, 120 bp, Artificial Sequence
  ENSG00000080603_40 (sequence is synthesized)
tgttgtcccagcggctcctggacctccctccttggcaccatctggtgcttccccgtcagcatcagccttgactctaggtttggccacagctccatccctgtcttcatctcagacacctgg

SEQ ID NO: 78056 - DNA, 120 bp, Artificial Sequence
  ENSG00000080603_41 (sequence is synthesized)
tcaccctctgttgttggctcccacctcttcacatgttccagggttgaactcaaccgtggccccagcatgctcacctgtcctggtgccagcttcggctctggccagtccttttccgtcagc

SEQ ID NO: 78057 - DNA, 120 bp, Artificial Sequence
  ENSG00000080603_42 (sequence is synthesized)
accaaatccagctccagctcaggcttcccttctggctccagcatcttctgcatctcaggctctagccacccctctggctcctatggcggctccacagacagcaattctggctccttctcc

SEQ ID NO: 78058 - DNA, 120 bp, Artificial Sequence
  ENSG00000080603_43 (sequence is synthesized)
agctcctcctctggctcctcttccggtcctggcaccatcgccaggtgctgctcctgtcctggcttcatcacagactccggttccagttatggctccatcgtctactccaggaacctcttt

SEQ ID NO: 78059 - DNA, 120 bp, Artificial Sequence
  ENSG00000080603_44 (sequence is synthesized)
agcctcagcttcaccggtaccagctccaacccctgtgttggctccatcatcaactcaaactatgctaccagccccggttccgtcacctctcccgagcccggcttctacgcagacactggc

SEQ ID NO: 78060 - DNA, 120 bp, Artificial Sequence
  ENSG00000080603_45 (sequence is synthesized)
cctagccccagctttagcacccactcttggaggctcatctccatctcagacactctctttgggaacggggaacccccagggaccctttccaactcagacattgtcattaactccagcatc

SEQ ID NO: 78061 - DNA, 120 bp, Artificial Sequence
  ENSG00000080603_46 (sequence is synthesized)
atccctggtaccaactccagcccagacactgtctttggcaccaggaccaccactgggtccaactcagacgctgtctctggctccagcaccccctctggctccagcttctccagtgggccc

SEQ ID NO: 78062 - DNA, 120 bp, Artificial Sequence
  ENSG00000080603_47 (sequence is synthesized)
agccccagctcacacgctgactttggctccagcatcgtcatctgcttcactcctggccccagcttcagtgcagacactgaccttgagccctgccccagttcctaccctgggcccggccgc

SEQ ID NO: 78063 - DNA, 120 bp, Artificial Sequence
  ENSG00000080603_48 (sequence is synthesized)
cgctcccttgcctgtcaccatggtatcccggctgcctgtttccaaggatgagcctgacacactgacattgcgctctggtccccccagccctccctccactgctacctcgtttggtggccc

SEQ ID NO: 78064 - DNA, 120 bp, Artificial Sequence
  ENSG00000080603_49 (sequence is synthesized)
ccggcctcgacgccagccccccccaccacctcgttcccctttttatctggactccctggaggaaaagcggaagcggcagcggtctgaacgcctggaacggattttccaacttagtgaggc

SEQ ID NO: 78065 - DNA, 120 bp, Artificial Sequence
  ENSG00000080603_50 (sequence is synthesized)
tcatggggccctggcacctgtgtatgggactgaagtcctggatttctgtaccctgccccaacctgttgccagccccatcggccctcgttctcctggccccagccaccccaccttttggac

SEQ ID NO: 78066 - DNA, 120 bp, Artificial Sequence
  ENSG00000080603_51 (sequence is synthesized)
ttataccgaggctgcccaccgggctgtactgtttccccagcagcgactagaccagctgtcagaaatcattgagaggttcatctttgtcatgcctcctgtggaggcacctcccccttccct

SEQ ID NO: 78067 - DNA, 120 bp, Artificial Sequence
  ENSG00000080603_52 (sequence is synthesized)
gcatgcctgccacccacctccttggctggccccacgtcaggcagccttccaggagcaattggcctctgagctctggccccgggctcgtcctttgcaccgtattgtgtgtaacatgcgcac

SEQ ID NO: 78068 - DNA, 120 bp, Artificial Sequence
  ENSG00000080603_53 (sequence is synthesized)
ccagttccctgacttaagactcatccagtatgattgcggaaagttgcagacgttggcagtgctgttgcggcagctcaaggcagagggccaccgagtgctcatcttcacccagatgacccg

SEQ ID NO: 78069 - DNA, 120 bp, Artificial Sequence
  ENSG00000080603_54 (sequence is synthesized)
aatgctggatgtattggagcagtttctcacctaccatggccatctctacctgcgcctggatggatctactagagttgaacagagacaggccttgatggaacggttcaatgcagacaaacg

SEQ ID NO: 78070 - DNA, 120 bp, Artificial Sequence
  ENSG00000080603_55 (sequence is synthesized)
catattctgcttcatcctttcaactcggagtgggggtgtgggcgtgaacctgacaggagcagacactgttgttttttatgacagcgactggaatcccaccatggatgctcaggcccagga

SEQ ID NO: 78071 - DNA, 120 bp, Artificial Sequence
  ENSG00000080603_56 (sequence is synthesized)
ccgctgtcaccgaattggccagacccgggatgtccacatatataggcttatcagtgaacggacagtggaggagaacatcctaaaaaaggcaaatcagaagagaatgttgggggacatggc

SEQ ID NO: 78072 - DNA, 120 bp, Artificial Sequence
  ENSG00000080603_57 (sequence is synthesized)
cattgagggaggcaacttcaccacagcctatttcaaacagcagaccatccgagagctgtttgatatgcccctggaggaaccttctagctcatccgtgccctctgcccctgaagaggagga

SEQ ID NO: 78073 - DNA, 120 bp, Artificial Sequence
  ENSG00000080603_58 (sequence is synthesized)
agagactgtggccagcaagcagactcatattctggagcaggcattgtgtcgggcagaagatgaagaggatatccgtgcagccacccaggccaaggctgaacaggtggctgagcttgcaga

SEQ ID NO: 78074 - DNA, 120 bp, Artificial Sequence
  ENSG00000080603_59 (sequence is synthesized)
atttaatgagaacgatgggtttcctgctggtgagggagaggaagctggccggcctggggctgaggatgaggagatgtcccgggctgagcaggaaattgctgccctcgtagaacagctgac

SEQ ID NO: 78075 - DNA, 120 bp, Artificial Sequence
  ENSG00000080603_60 (sequence is synthesized)
ccccattgagcgctatgccatgaaattcctggaggcctcactggaggaggtgagccgagaggagctcaaacaggcagaagagcaagtggaagctgcccgcaaagacctggaccaagccaa

SEQ ID NO: 78076 - DNA, 120 bp, Artificial Sequence
  ENSG00000080603_61 (sequence is synthesized)
ggaggaggtgttccgcctaccccaagaggaggaggaggggccgggggctggggatgagagttcctgtgggactggtggaggcacccaccggcgcagtaaaaaggccaaagcccctgagag

SEQ ID NO: 78077 - DNA, 120 bp, Artificial Sequence
  ENSG00000080603_62 (sequence is synthesized)
gccggggactcgtgtcagtgagcgtcttcgtggagcccgggctgagactcaaggggcaaaccacactcctgtcatatccgcccatcaaactcgcagcaccaccacaccaccccgctgcag

SEQ ID NO: 78078 - DNA, 120 bp, Artificial Sequence
  ENSG00000080603_63 (sequence is synthesized)
tcctgccagggagcgagttcccaggccagcacctaggcctcgacccactccagcttcagctccggctgcaattcctgcccttgttcctgtcccagtttctgccccagtacccatttcagc

SEQ ID NO: 78079 - DNA, 120 bp, Artificial Sequence
  ENSG00000080603_64 (sequence is synthesized)
cccaaatccaataaccattctccctgtccatatcttgccttctcctccccctccttcacagattcctccttgttcttctcctgcctgcacccctcctcctgcctgtacccctccaccagc

SEQ ID NO: 78080 - DNA, 120 bp, Artificial Sequence
  ENSG00000080603_65 (sequence is synthesized)
tcatacaccgcctccagcccaaacctgtcttgtaactccttcctctcctctcttgcttggtccaccttctgtgcccatctctgcctcagtcactaatctccccttgggcttgaggcctga

SEQ ID NO: 78081 - DNA, 120 bp, Artificial Sequence
  ENSG00000080603_66 (sequence is synthesized)
ggcagagctgtgtgcccaggcattggcatctccagagtccctggagctggcttctgtggccagttcagaaacctcctcactttctcttgtgccccctaaagatctgttgccagttgctgt

SEQ ID NO: 78082 - DNA, 120 bp, Artificial Sequence
  ENSG00000080603_67 (sequence is synthesized)
ggagatcctgcctgtgtcagagaagaacctttctctcaccccttctgcacccagcctgaccttggaggctggcagcatccccaatggtcaagagcaggaggcaccagattctgctgaggg

SEQ ID NO: 78083 - DNA, 120 bp, Artificial Sequence
  ENSG00000080603_68 (sequence is synthesized)
gaccacccttacagtgctgcctgaaggtgaggagttgcccctgtgtgtgagtgagagcaatggcctggagctcccaccctcagcagcatctgatgagccacttcaggagccactggaggc

SEQ ID NO: 78084 - DNA, 120 bp, Artificial Sequence
  ENSG00000080603_69 (sequence is synthesized)
tgacaggacctcggaagagctgacagaggccaagaccccaacctccagcccagagaagccacaggaactcgttacagctgaggttgcagctccatccacctcatcttcagccacttcctc

SEQ ID NO: 78085 - DNA, 120 bp, Artificial Sequence
  ENSG00000080603_70 (sequence is synthesized)
gcctgagggtccttcacctgcccgacctcctcggcgtcgcaccagtgctgatgtggaaattaggggtcaagggactggtcggccaggacaaccaccaggccccaaagtgcttcgaaagct

SEQ ID NO: 78086 - DNA, 120 bp, Artificial Sequence
  ENSG00000080603_71 (sequence is synthesized)
gccaggacggctggtaactgtggtagaggaaaaggaactggtgcggcggcggcggcagcagcggggagctgccagcaccctagtgcctggggtctctgagactagtgccagcccgggaag

SEQ ID NO: 78087 - DNA, 120 bp, Artificial Sequence
  ENSG00000080603_72 (sequence is synthesized)
cccgtctgtccgcagcatgtcagggccagaatcctcccctcccattggtgggccctgtgaagctgctccttcatcctcactgcccactccaccccagcagcccttcattgctcgccgtca

SEQ ID NO: 78088 - DNA, 120 bp, Artificial Sequence
  ENSG00000080603_73 (sequence is synthesized)
cattgagctgggggtgactggtggtggcagccccgagaatggagacggagcactgctcgccatcaccccacctgctgtgaaacgtcggagggggaggccccccaagaagaacaggtctcc

SEQ ID NO: 78089 - DNA, 120 bp, Artificial Sequence
  ENSG00000080603_74 (sequence is synthesized)
agcagatgctgggagaggtgtggatgaggcaccctcatccaccttgaagggaaaaaccaatggggctgacccagtccctgggcctgagaccctaattgttgcagatcctgtcctggaacc

SEQ ID NO: 78090 - DNA, 120 bp, Artificial Sequence
  ENSG00000080603_75 (sequence is synthesized)
acagcttattcctgggccccagcctcttggaccccagccagttcacagacccaatcccctcctgtcacctgtggagaaaagaaggcgaggacgaccccctaaagcacgagatttgcccat

SEQ ID NO: 78091 - DNA, 120 bp, Artificial Sequence
  ENSG00000080603_76 (sequence is synthesized)
ccctgggaccatttcctctgcaggggatggcaactccgaaagtcggacacagccacccccacacccatcacccctaaccccactcccaccactgctagtttgtcccactgctactgttgc

SEQ ID NO: 78092 - DNA, 120 bp, Artificial Sequence
  ENSG00000080603_77 (sequence is synthesized)
caacactgtcaccactgtcaccatttcaacgtccccacccaaacggaagaggggccgacctcccaagaatcctccatcacctcggcccagccagctccccgtcttggaccgtgacagcac

SEQ ID NO: 78093 - DNA, 120 bp, Artificial Sequence
  ENSG00000080603_78 (sequence is synthesized)
ttctgttctcgagagctgtggattggggaggcgacggcaaccccagggccaaggggagagtgagggtagttcctctgatgaggatggaagccgccccctcacccgcctggcccgccttcg

SEQ ID NO: 78094 - DNA, 120 bp, Artificial Sequence
  ENSG00000080603_79 (sequence is synthesized)
gcttgaagcagaaggaatgcgaggacggaagagtggagggtccatggtggtggctgtaattcaggatgacctggacttagcagatagcgggccaggcgggttggaattgacaccacctgt

SEQ ID NO: 78095 - DNA, 120 bp, Artificial Sequence
  ENSG00000080603_80 (sequence is synthesized)
ggtctcactaaccccaaaactgcgctcgacccggctgcgtccagggtctctagtccccccactagagactgagaagttgcctcgcaaacgagcaggggccccagttggtgggagtcctgg

SEQ ID NO: 78096 - DNA, 120 bp, Artificial Sequence
  ENSG00000080603_81 (sequence is synthesized)
gctggcaaagcggggccgcctacagcccccaagtcccctggggcctgagggttcagtagaggagtctgaggctgaagcctcaggtgaggaggaggaaggggatgggaccccacgccgacg

SEQ ID NO: 78097 - DNA, 120 bp, Artificial Sequence
  ENSG00000080603_82 (sequence is synthesized)
tcctggcccccgccggcttgttgggaccaccaaccaaggggaccagcgcatcctgcgcagcagcgcccctccctccctggctggccctgctgttagtcacagaggccgcaaggccaagac

SEQ ID NO: 78098 - DNA, 120 bp, Artificial Sequence
  ENSG00000080603_83 (sequence is synthesized)
gtgagtgggctgcccctccacctaggctttccaccgtggccactccctccatgaccaggcctgactctgttaaccactacttgaagtcttgagggggaaagcctccagggagacataggg

SEQ ID NO: 78099 - DNA, 120 bp, Artificial Sequence
  ENSG00000080603_84 (sequence is synthesized)
gccttctcccttcttcccaccaaagtagggggtaggcaactggttgtcatggaaatggggatcatcacagtccccttccccttcaccccacgtggctgggcagtgttaagggtggcaaga

SEQ ID NO: 78100 - DNA, 120 bp, Artificial Sequence
  ENSG00000080603_85 (sequence is synthesized)
tagtctctgtccccacccccttgtacttgattccccagctgtctttcacacagccccccacccttaggggaagggggaggggcttctctacaatgaggtttttttctttttttttttttt

SEQ ID NO: 78101 - DNA, 120 bp, Artificial Sequence
  ENSG00000080603_86 (sequence is synthesized)
ttaagaagaaaaaataataaacttagtttctgtatgagcatccgcgtaaggaggcttctgattttctggtctggtggagggttgggtgggaacttgggcatcgtttttctcctccctctt

SEQ ID NO: 78102 - DNA, 120 bp, Artificial Sequence
  ENSG00000080603_87 (sequence is synthesized)
gttcttgcaaagatcctagcacctgatctctagcccaggactatatgttccaggcagaaatctacccaagaagagggaagattggtgaatttgatgtggtagggtgcctttccccagtca

SEQ ID NO: 78103 - DNA, 120 bp, Artificial Sequence
  ENSG00000080603_88 (sequence is synthesized)
gtttgaagtcacagatatccttttcctctcatttcttttccctcggttcctagacgttcctcggagctctttgatgcctcagacctttcccttttatccctcttgctcaggtgcttcctt

SEQ ID NO: 78104 - DNA, 120 bp, Artificial Sequence
  ENSG00000080603_89 (sequence is synthesized)
tcacaactttttccagagggcaggcgtcctagctccagttgctccatcccttgggccctcccctgctcttcatctagccaaactggtttgagtcagccacaccccttcccagctccctgg

SEQ ID NO: 78105 - DNA, 120 bp, Artificial Sequence
  ENSG00000080603_90 (sequence is synthesized)
gctcttcacgtggtggctggccactcaaccccacccctgggcttggcttggagccctgagtcagctccatcaccacccaagccaaaccaaagctgaggcaggagccgaaactcagagtcc

SEQ ID NO: 78106 - DNA, 120 bp, Artificial Sequence
  ENSG00000080603_91 (sequence is synthesized)
ttcaaggcctatagccaggtaagagccctgttcatttttacattctctgttcactccctgggccctccttgtgtcctcctgttgactctgtgcttacctcatctgagttatttctttgta

SEQ ID NO: 78107 - DNA, 120 bp, Artificial Sequence
  ENSG00000080603_92 (sequence is synthesized)
tctacttccctgcagcttcttggcacacatcattctttgctctctacttgtctcgcccctttcacctttcctatccttcgttacttgggttcagggagccaaggtggtttcattttgtct

SEQ ID NO: 78108 - DNA, 120 bp, Artificial Sequence
  ENSG00000080603_93 (sequence is synthesized)
gggttgtaggggaatggttggagataagggtagaaaggtggtttgatgccagggcctagaggacctgagaagtagggagacaagaaatgattaagtagggcatcattttgcaggtttctg

SEQ ID NO: 78109 - DNA, 120 bp, Artificial Sequence
  ENSG00000080603_94 (sequence is synthesized)
tgtggtaatgaggtcatttagactcagtgtactagtctgattgtgttatgtggcctgggttaaattggagagaggaggtggcagggaggcagcatagcagaggaagccctgacttaggga

SEQ ID NO: 78110 - DNA, 120 bp, Artificial Sequence
  ENSG00000080603_95 (sequence is synthesized)
agtaaagtctttctgatgtttggttttagtggtaataaagggcttacttgggtacattttccttacctttctccattcccataactgttttcatgtaaaatggctgctttgcttgaaacg

SEQ ID NO: 78111 - DNA, 120 bp, Artificial Sequence
  ENSG00000080603_96 (sequence is synthesized)
ggttgcagtacctagggtcctgctctctgacatctataatactcagggggcagcctcttgggaatttgggggaattgtagagtcctttgaaatacagattaaaataacagattcatagca

SEQ ID NO: 78112 - DNA, 120 bp, Artificial Sequence
  ENSG00000080603_97 (sequence is synthesized)
gcggccgagacggcggcggccattttggtgaggcctcgggagcggcagcggcggttcgctgggagtagcgtctgccctttttcccacccaccgtccgcatctgtgtgctgcgcgaagagg

SEQ ID NO: 78113 - DNA, 120 bp, Artificial Sequence
  ENSG00000080603_98 (sequence is synthesized)
cagtggaggcaaggcggtggcagtagccgcagtctccaggggagtttaaaggccgcgaaggcggtggccaagagggggccctcccccctcctaggcgggagggggggtggtgcgcacgcc

SEQ ID NO: 78114 - DNA, 120 bp, Artificial Sequence
  ENSG00000080603_99 (sequence is synthesized)
gaatgttgggggacatggccattgagggaggcaacttcaccacagcctatttcaaacaggtactaagtaagatcttttagcctatgcaggagaaaactgctgcgccttcaggagttcctc

SEQ ID NO: 78115 - DNA, 65 bp, Artificial Sequence
  ENSG00000080603_100 (sequence is synthesized)
cctatgcaggagaaaactgctgcgccttcaggagttcctcctgtttattaaagaagactgctttg

SEQ ID NO: 78116 - DNA, 71 bp, Artificial Sequence
  ENSG00000080603_101 (sequence is synthesized)
gttgcagtgagttgagatggcgccattgcactttagcctgggtgacgagcaaaaccgtctcaaaaaagaaa

SEQ ID NO: 78117 - DNA, 120 bp, Artificial Sequence
  ENSG00000080603_102 (sequence is synthesized)
gtgacgagcaaaaccgtctcaaaaaagaaaaaacaaaaaggactgctttggccttcacagacgtgcgtcttcaaccagtggtacccctgacagttccaagaaccatcagccttacagctt

SEQ ID NO: 78118 - DNA, 120 bp, Artificial Sequence
  ENSG00000080603_103 (sequence is synthesized)
ctcgttcccctttttatctggtaagttttacttcctcaagagggaacaggaagttgagtttctttggagtgttggtagggtggatggaacagtgatgtcacatttaacctggtgaattac

SEQ ID NO: 78119 - DNA, 120 bp, Artificial Sequence
  ENSG00000080603_104 (sequence is synthesized)
aaagcttaatgttatggaccaagtacttgagtgacatttggacaagtcccttctcttccctgggcgtgtacctcatgatccgcctgcctcagcctcctgaagtgttaggattacaggggt

SEQ ID NO: 78120 - DNA, 120 bp, Artificial Sequence
  ENSG00000080603_105 (sequence is synthesized)
gagccaccacgcccggcctcttttcccgttttttaacccgcacggtaataaatgggcagtaaaaggaactcttctctgtcccttttatgatttccggtagctgtttctttcctgtactat

SEQ ID NO: 78121 - DNA, 120 bp, Artificial Sequence
  ENSG00000080603_106 (sequence is synthesized)
gtatataggcccatgtctgtgtagtacttgagttaaactcacagttcagcttaagtaaaccagaactaaggagaaggaaggtccagtgggtccctccacgccctctggcttttccccact

SEQ ID NO: 78122 - DNA, 120 bp, Artificial Sequence
  ENSG00000080603_107 (sequence is synthesized)
gtaatcagagctgctgcttagtctttgcttcatgcctactcccccaccttccaccagtgccattgactccacctttggtttttacctgaccagccgctaggttggtcctggctggttgga

SEQ ID NO: 78123 - DNA, 120 bp, Artificial Sequence
  ENSG00000080603_108 (sequence is synthesized)
agtagagagtagagggattgctctgcaagtagataatagcctcttgccacttggttttttttggtaacagtttgtgctataaatcatataccattcgatttacccatttaaactgtacaa

SEQ ID NO: 78124 - DNA, 88 bp, Artificial Sequence
  ENSG00000080603_109 (sequence is synthesized)
aaatcatataccattcgatttacccatttaaactgtacaatagtttttggttttttttttaaatacagatgggggtctcccactcttg

SEQ ID NO: 78125 - DNA, 120 bp, Artificial Sequence
  ENSG00000080603_110 (sequence is synthesized)
gtgtgagccaccatgcctggccctaaactgtacaataggtttttaatatatttatagggttgtacaatcatcaacacaatcaacttagaacctttccgtggccccaaaaagaaacgctgc

SEQ ID NO: 78126 - DNA, 120 bp, Artificial Sequence
  ENSG00000080603_111 (sequence is synthesized)
acctgttagccagcattccccaatccctccgtccctcctagtcttgaatgactaccatcctacttttttatttctctagttttgcctatggagtcataatgtataatgtgtggtccattg

SEQ ID NO: 78127 - DNA, 120 bp, Artificial Sequence
  ENSG00000080603_112 (sequence is synthesized)
tgactggcatcttctacttagattaatgttctttgaattttattgtgttatagcgtatatcagtacttcatttgtttttatgttgaataataatgtatgaataccacattttatccttga

SEQ ID NO: 78128 - DNA, 120 bp, Artificial Sequence
  ENSG00000080608_0 (sequence is synthesized)
ggagaggcggtcgggatccgctgcgcgagctgtctcggtcccacgtgtgcgagttgctacgatggaagttaaagggaaaaagcaattcacaggaaagagtacaaagacagcacaagaaaa

SEQ ID NO: 78129 - DNA, 120 bp, Artificial Sequence
  ENSG00000080608_1 (sequence is synthesized)
aaacagatttcataaaaatagtgattctggttcttcaaagacatttccaacaaggaaagttgctaaagaaggtggacctaaagtcacatctaggaactttgagaaaagtatcacaaaact

SEQ ID NO: 78130 - DNA, 120 bp, Artificial Sequence
  ENSG00000080608_2 (sequence is synthesized)
tgggaaaaagggtgtaaagcagttcaagaataagcagcaaggggacaaatcaccaaagaacaaattccagccggcaaataaattcaacaagaagagaaaattccagccagatggtagaag

SEQ ID NO: 78131 - DNA, 120 bp, Artificial Sequence
  ENSG00000080608_3 (sequence is synthesized)
cgatgaatcagcagccaagaagcccaaatgggatgacttcaaaaagaagaagaaagaactgaagcaaagcagacaactcagtgataaaaccaactatgacattgttgttcgggcaaagca

SEQ ID NO: 78132 - DNA, 120 bp, Artificial Sequence
  ENSG00000080608_4 (sequence is synthesized)
gatgtgggagattttaagaagaaaagactgtgacaaagaaaaaagagtaaagttaatgagtgatttgcagaagttgattcaagggaaaattaaaactattgcatttgcacacgattcaac

SEQ ID NO: 78133 - DNA, 120 bp, Artificial Sequence
  ENSG00000080608_5 (sequence is synthesized)
tcgtgtgatccagtgttacattcagtatggtaatgaagaacagagaaaacaggcttttgaagaattgcgagatgatttggttgagttaagtaaagccaaatattcgagaaatattgttaa

SEQ ID NO: 78134 - DNA, 120 bp, Artificial Sequence
  ENSG00000080608_6 (sequence is synthesized)
gaaatttctcatgtatggaagtaaaccacagattgcagagataatcagaagttttaaaggccacgtgaggaagatgctgcggcatgcggaagcatcagccatcgtggagtacgcatacaa

SEQ ID NO: 78135 - DNA, 120 bp, Artificial Sequence
  ENSG00000080608_7 (sequence is synthesized)
tgacaaagccattttggagcagaggaacatgctgacggaagagctctatgggaacacatttcagctttacaagtcagcagatcaccgaactctggacaaagtgttagaggtacagccaga

SEQ ID NO: 78136 - DNA, 120 bp, Artificial Sequence
  ENSG00000080608_8 (sequence is synthesized)
aaaattagaacttattatggatgaaatgaaacagattctaactccaatggcccaaaaggaagctgtgattaagcactcattggtgcataaagtattcttggacttttttacctatgcacc

SEQ ID NO: 78137 - DNA, 120 bp, Artificial Sequence
  ENSG00000080608_9 (sequence is synthesized)
agccatccgcgaagcggtggtctacctggcacacacacacgatggcgccagagtggccatgcactgcctgtggcatggcacgcccaaggacaggaaagtgattgtgaaaacaatgaagac

SEQ ID NO: 78138 - DNA, 120 bp, Artificial Sequence
  ENSG00000080608_10 (sequence is synthesized)
ttatgttgaaaaggtggctaatggccaatactcccatttggttttactggcggcatttgattgtattgatgatactaagcttgtgaagcagataatcatatcagaaattatcagttcatt

SEQ ID NO: 78139 - DNA, 120 bp, Artificial Sequence
  ENSG00000080608_11 (sequence is synthesized)
gcctagcatagtaaatgacaaatatggaaggaaggtcctattgtacttactaagccccagagatcctgcacatacagtacgagaaatcattgaagttctgcaaaaaggagatggaaatgc

SEQ ID NO: 78140 - DNA, 120 bp, Artificial Sequence
  ENSG00000080608_12 (sequence is synthesized)
acacagtaagaaagatacagaggtccgcagacgggagctcctagaatccatttctccagctttgttaagctacctgcaagaacacgcccaagaagtggtgctagataagtctgcgtgtgt

SEQ ID NO: 78141 - DNA, 120 bp, Artificial Sequence
  ENSG00000080608_13 (sequence is synthesized)
gttggtgtctgacattctgggatctgccactggagacgttcagcctaccatgaatgccatcgccagcttggcagcaacaggactgcatcctggtggcaaggacggagagcttcacattgc

SEQ ID NO: 78142 - DNA, 120 bp, Artificial Sequence
  ENSG00000080608_14 (sequence is synthesized)
agaacatcctgcaggacatctagttctgaagtggttaatagagcaagataaaaagatgaaagaaaatgggagagaaggttgttttgcaaaaacacttgtagagcatgttggtatgaagaa

SEQ ID NO: 78143 - DNA, 120 bp, Artificial Sequence
  ENSG00000080608_15 (sequence is synthesized)
cctgaagtcctgggctagtgtaaatcgaggtgccattattctttctagcctcctccagagttgtgacctggaagttgcaaacaaagtcaaagctgcactgaaaagcttgattcctacatt

SEQ ID NO: 78144 - DNA, 120 bp, Artificial Sequence
  ENSG00000080608_16 (sequence is synthesized)
ggaaaaaaccaaaagcaccagcaaaggaatagaaattctacttgaaaaactgagcacataggtggaaagagttaagagcaagatggaatgattttttctgttctctgttctgtttcccaa

SEQ ID NO: 78145 - DNA, 120 bp, Artificial Sequence
  ENSG00000080608_17 (sequence is synthesized)
tgcagaaaagaaggggtagggtccaccatactggtaattggggtactctgtatatgtgtttcttctttgtatacgaatctatttatataaattgtttttttaaatggtcttttttaaaaa

SEQ ID NO: 78146 - DNA, 120 bp, Artificial Sequence
  ENSG00000080608_18 (sequence is synthesized)
agggaacatccagtcatcaagttccaatgtgttgggcatgaagtcatcattagacaggatgacctttcatcacttggaatatgatcagagaagcagaatttgcctagctcattcagaaga

SEQ ID NO: 78147 - DNA, 120 bp, Artificial Sequence
  ENSG00000080608_19 (sequence is synthesized)
tggatgaaatgaaacagattctaactccaatggcccaaaagtaagaaagttgtttttgttttgttcttaagaaatgacattcaaaggaggaaggttttccataactgttgcccagaagag

SEQ ID NO: 78148 - DNA, 120 bp, Artificial Sequence
  ENSG00000080608_20 (sequence is synthesized)
gtagctatttcctgcttacaagtattaatctattctaaataagagtgcaaaagtgttggtttgaaaccattcttggtgcaaaaggagatttctttttctgatattgtaccctataaaatg

SEQ ID NO: 78149 - DNA, 120 bp, Artificial Sequence
  ENSG00000080618_0 (sequence is synthesized)
gttgtacagaaaattgctgttgggatgaagctttgcagccttgcagtccttgtacccattgttctcttctgtgagcagcatgtcttcgcgtttcagagtggccaagttctagctgctctt

SEQ ID NO: 78150 - DNA, 120 bp, Artificial Sequence
  ENSG00000080618_1 (sequence is synthesized)
cctagaacctctaggcaagttcaagttctacagaatcttactacaacatatgagattgttctctggcagccggtaacagctgaccttattgtgaagaaaaaacaagtccatttttttgta

SEQ ID NO: 78151 - DNA, 120 bp, Artificial Sequence
  ENSG00000080618_2 (sequence is synthesized)
aatgcatctgatgtcgacaatgtgaaagcccatttaaatgtgagcggaattccatgcagtgtcttgctggcagatgtggaagatcttattcaacagcagatttccaacgacacagtcagc

SEQ ID NO: 78152 - DNA, 120 bp, Artificial Sequence
  ENSG00000080618_3 (sequence is synthesized)
ccccgagcctccgcatcgtactatgaacagtatcactcactaaatgaaatctattcttggatagaatttataactgagaggcatcctgatatgcttacaaaaatccacattggatcctca

SEQ ID NO: 78153 - DNA, 120 bp, Artificial Sequence
  ENSG00000080618_4 (sequence is synthesized)
tttgagaagtacccactctatgttttaaaggtttctggaaaagaacaagcagccaaaaatgccatatggattgactgtggaatccatgccagagaatggatctctcctgctttctgcttg

SEQ ID NO: 78154 - DNA, 120 bp, Artificial Sequence
  ENSG00000080618_5 (sequence is synthesized)
tggttcataggccatataactcaattctatgggataatagggcaatataccaatctcctgaggcttgtggatttctatgttatgccagtggttaatgtggatggttatgactactcatgg

SEQ ID NO: 78155 - DNA, 120 bp, Artificial Sequence
  ENSG00000080618_6 (sequence is synthesized)
aaaaagaatcgaatgtggagaaagaaccgttctttctatgcgaacaatcattgcatcggaacagacctgaataggaactttgcttccaaacactggtgtgaggaaggtgcatccagttcc

SEQ ID NO: 78156 - DNA, 120 bp, Artificial Sequence
  ENSG00000080618_7 (sequence is synthesized)
agaagtgaaggcagtggctagtttcttgagaagaaatatcaaccagattaaagcatacatcagcatgcattcatactcccagcatatagtgtttccatattcctatacacgaagtaaaag

SEQ ID NO: 78157 - DNA, 120 bp, Artificial Sequence
  ENSG00000080618_8 (sequence is synthesized)
caaagaccatgaggaactgtctctagtagccagtgaagcagttcgtgctattgagaaaattagtaaaaataccaggtatacacatggccatggctcagaaaccttatacctagctcctgg

SEQ ID NO: 78158 - DNA, 120 bp, Artificial Sequence
  ENSG00000080618_9 (sequence is synthesized)
aggtggggacgattggatctatgatttgggcatcaaatattcgtttacaattgaacttcgagatacgggcacatacggattcttgctgccggagcgttacatcaaacccacctgtagaga

SEQ ID NO: 78159 - DNA, 120 bp, Artificial Sequence
  ENSG00000080618_10 (sequence is synthesized)
agcttttgccgctgtctctaaaatagcttggcatgtcattaggaatgtttaatgcccctgattttatcattctgcttccgtattttaatttactgattccagcaagaccaaatcattgta

SEQ ID NO: 78160 - DNA, 120 bp, Artificial Sequence
  ENSG00000080618_11 (sequence is synthesized)
tcaaattatttttaagttttatccgtagttttgataaaagattttcctattccttggttctgtcagagaacctaataagtgctactttgccattaaggcagactagggttcatgtctttt

SEQ ID NO: 78161 - DNA, 120 bp, Artificial Sequence
  ENSG00000080618_12 (sequence is synthesized)
taccctttaaaaaaaattgtaaaagtctagttacctactttttctttgattttcgacgtttgactagccatctcaagcaagtttcgacgtttgactagccatctcaagcaagtttaatca

SEQ ID NO: 78162 - DNA, 120 bp, Artificial Sequence
  ENSG00000080618_13 (sequence is synthesized)
atgatcatctcacgctgatcattggatcctactcaacaaaaggaagggtggtcagaagtacattaaagatttctgctccaaattttcaataaatttctgcttgtgcctttagaaatacaa

SEQ ID NO: 78163 - DNA, 120 bp, Artificial Sequence
  ENSG00000080644_0 (sequence is synthesized)
actccggatggttcctgtcctcccgcgggtccgagggcgctggaaacccagcggcggcgaagcggagaggagccccgcgcgtctccgcccgcacggctccaggtctggggtctgcgctgg

SEQ ID NO: 78164 - DNA, 120 bp, Artificial Sequence
  ENSG00000080644_1 (sequence is synthesized)
gctcccgaccgtccgggtccgcggccagcccggccaccagccatgggctctggcccgctctcgctgcccctggcgctgtcgccgccgcggctgctgctgctgctgctgctgtctctgctg

SEQ ID NO: 78165 - DNA, 120 bp, Artificial Sequence
  ENSG00000080644_2 (sequence is synthesized)
gccgccgcggctgctgctgctgctgctgctgtctctgctgccagtggccagggcctcagaggctgagcaccgtctatttgagcggctgtttgaagattacaatgagatcatccggcctgt

SEQ ID NO: 78166 - DNA, 120 bp, Artificial Sequence
  ENSG00000080644_3 (sequence is synthesized)
agccaacgtgtctgacccagtcatcatccatttcgaggtgtccatgtctcagctggtgaaggtggatgaagtaaaccagatcatggagaccaacctgtggctcaagcaaatctggaatga

SEQ ID NO: 78167 - DNA, 120 bp, Artificial Sequence
  ENSG00000080644_4 (sequence is synthesized)
ctacaagctgaaatggaacccctctgactatggtggggcagagttcatgcgtgtccctgcacagaagatctggaagccagacattgtgctgtataacaatgctgttggggatttccaggt

SEQ ID NO: 78168 - DNA, 120 bp, Artificial Sequence
  ENSG00000080644_5 (sequence is synthesized)
ggacgacaagaccaaagccttactcaagtacactggggaggtgacttggatacctccggccatctttaagagctcctgtaaaatcgacgtgacctacttcccgtttgattaccaaaactg

SEQ ID NO: 78169 - DNA, 120 bp, Artificial Sequence
  ENSG00000080644_6 (sequence is synthesized)
taccatgaagttcggttcctggtcctacgataaggcgaaaatcgatctggtcctgatcggctcttccatgaacctcaaggactattgggagagcggcgagtgggccatcatcaaagcccc

SEQ ID NO: 78170 - DNA, 120 bp, Artificial Sequence
  ENSG00000080644_7 (sequence is synthesized)
aggctacaaacacgacatcaagtacaactgctgcgaggagatctaccccgacatcacatactcgctgtacatccggcgcctgcccttgttctacaccatcaacctcatcatcccctgcct

SEQ ID NO: 78171 - DNA, 120 bp, Artificial Sequence
  ENSG00000080644_8 (sequence is synthesized)
gctcatctccttcctcactgtgctcgtcttctacctgccctccgactgcggtgagaaggtgaccctgtgcatttctgtcctcctctccctgacggtgtttctcctggtgatcactgagac

SEQ ID NO: 78172 - DNA, 120 bp, Artificial Sequence
  ENSG00000080644_9 (sequence is synthesized)
catcccttccacctcgctggtcatccccctgattggagagtacctcctgttcaccatgatttttgtaaccttgtccatcgtcatcaccgtcttcgtgctcaacgtgcactacagaacccc

SEQ ID NO: 78173 - DNA, 120 bp, Artificial Sequence
  ENSG00000080644_10 (sequence is synthesized)
gacgacacacacaatgccctcatgggtgaagactgtattcttgaacctgctccccagggtcatgttcatgaccaggccaacaagcaacgagggcaacgctcagaagccgaggcccctcta

SEQ ID NO: 78174 - DNA, 120 bp, Artificial Sequence
  ENSG00000080644_11 (sequence is synthesized)
cggtgccgagctctcaaatctgaattgcttcagccgcgcagagtccaaaggctgcaaggagggctacccctgccaggacgggatgtgtggttactgccaccaccgcaggataaaaatctc

SEQ ID NO: 78175 - DNA, 120 bp, Artificial Sequence
  ENSG00000080644_12 (sequence is synthesized)
cctcacgagaagctctagttctgaatctgttgatgctgtgctgtccctctctgctttgtcaccagaaatcaaagaagccatccaaagtgtcaagtatattgctgaaaatatgaaagcaca

SEQ ID NO: 78176 - DNA, 120 bp, Artificial Sequence
  ENSG00000080644_13 (sequence is synthesized)
aaatgaagccaaagagattcaagatgattggaagtatgttgccatggtgattgatcgtatttttctgtgggttttcaccctggtgtgcattctagggacagcaggattgtttctgcaacc

SEQ ID NO: 78177 - DNA, 120 bp, Artificial Sequence
  ENSG00000080644_14 (sequence is synthesized)
cctgatggccagggaagatgcataagcactaagctgtgtgcctgcctgggagacttccttgtgtcagggcaggaggaggctgcttcctagtaagaacgtactttctgttatcaagctacc

SEQ ID NO: 78178 - DNA, 120 bp, Artificial Sequence
  ENSG00000080644_15 (sequence is synthesized)
agctttgtttttggcatttcgaggtttacttattttccacttatcttggaatcatgcaaaaaaaaaaatgtcaagagtatttattaccgataaatgaacatttaactagcctttttggta

SEQ ID NO: 78179 - DNA, 120 bp, Artificial Sequence
  ENSG00000080644_16 (sequence is synthesized)
tggtaaagagatgtcaaaatgtgattctatgtgattagtatgctatgctatggaatatacatgtaaaaatgtttccttttagttgttgaaacaaaactggatagaaaaatgctgttcaga

SEQ ID NO: 78180 - DNA, 120 bp, Artificial Sequence
  ENSG00000080644_17 (sequence is synthesized)
aatatgaaaagtcattcagttatcactacagatctcccagtaatttttcttatttagcccataatctctttgaaggtttatactaattcagcaatcccccatcgttacccatttcttacc

SEQ ID NO: 78181 - DNA, 120 bp, Artificial Sequence
  ENSG00000080644_18 (sequence is synthesized)
atgcatttctcgttctttactgggtctaaagggctatgcctccatttcagagagcttcaactacttctcttgcatacttctaaattataccatgagaaatcatgcctagttattcattgt

SEQ ID NO: 78182 - DNA, 120 bp, Artificial Sequence
  ENSG00000080644_19 (sequence is synthesized)
taatataactgtcttagtacaccataaactgggtggattataaacaacagaaacttctcagttttggaggttgggaggtccaaggtcaaggcaccagcaaatttggtgtctggtgagggt

SEQ ID NO: 78183 - DNA, 120 bp, Artificial Sequence
  ENSG00000080644_20 (sequence is synthesized)
cctcttcctcaaagggtgccttctagctgtgtcctcacatgactgaagggactagctatctctgtggggtctattttataagggcactaaccccattcatgagagcagagcccccatggc

SEQ ID NO: 78184 - DNA, 120 bp, Artificial Sequence
  ENSG00000080644_21 (sequence is synthesized)
ctaatcacctttccaaggccccaccttctatctaagacaatcacgctgggaataggtttcaacatatgaattgggggaggacacatttggaccacagcatgaacctttagaacagggttt

SEQ ID NO: 78185 - DNA, 120 bp, Artificial Sequence
  ENSG00000080644_22 (sequence is synthesized)
ctcagccttagcactatggacattttgggctggataaatatgtgttggtacagaatgggggtatcctgtgcattgtaggatctttagcagtaccctagcctcaactcactagatgccaat

SEQ ID NO: 78186 - DNA, 120 bp, Artificial Sequence
  ENSG00000080644_23 (sequence is synthesized)
gacataccttgcttcttcaccagttatgataaccaagaatgtctccattgttaaatgttcccttaggagcaaaattgcccctggttgagaaacattgctttagacaaattgttaagagta

SEQ ID NO: 78187 - DNA, 120 bp, Artificial Sequence
  ENSG00000080644_24 (sequence is synthesized)
tcatgtactacacttctgaaacttaacgtgatcatcaccactgacagatgattcacagagactgtttgaatcttgtctcactagtttttcctgtgcaaaaataaaatggacagaattgca

SEQ ID NO: 78188 - DNA, 120 bp, Artificial Sequence
  ENSG00000080644_25 (sequence is synthesized)
gtccttcccagggtgtgttagcgtctctcctacggcgcccgcctagcccggtggtcccaaccccctgcgggagctgcacacgccccggaaacctgggacagaaactgagtccctctcctt

SEQ ID NO: 78189 - DNA, 120 bp, Artificial Sequence
  ENSG00000080644_26 (sequence is synthesized)
cctggtggtggtgacagcacctgctcagatctggtcggacgccgccggccggagcacccagcccggcggagaaggagctcgcccggcgctggggactgggacctggagccccttccccta

SEQ ID NO: 78190 - DNA, 120 bp, Artificial Sequence
  ENSG00000080644_27 (sequence is synthesized)
ccaacaattgaaacgaaaagaaaagtccacagaaacatccgatcaagaacctgggctatgaatttccaatcttcaacaacctgttaggaaaaaaataaaaatgcattaaataattgtaaa

SEQ ID NO: 78191 - DNA, 120 bp, Artificial Sequence
  ENSG00000080644_28 (sequence is synthesized)
gtttataatccttattttgactggtaaagacacaggttcagagaggttaagccacttgcctaagctcacacagcttacaagtgatttgtcaggatttgcaccagatctgtccaactccag

SEQ ID NO: 78192 - DNA, 120 bp, Artificial Sequence
  ENSG00000080644_29 (sequence is synthesized)
agcccaggcttgcaaccactgtgcttctcactgaatgcgtgtggccaggtagaatcctgcccctcttgggcctcagtttcccattttgtaacccactgggttagactggcctgaaagtct

SEQ ID NO: 78193 - DNA, 78 bp, Artificial Sequence
  ENSG00000080644_30 (sequence is synthesized)
aggtagctgggattacaggaacaaaaagcccaagagatccaacaattgaaacgaaaagaaaagtccacagaaacatcc

SEQ ID NO: 78194 - DNA, 120 bp, Artificial Sequence
  ENSG00000080644_31 (sequence is synthesized)
aagaggggagtcgcttcgggactggggctggagctggagcgccagcctctcctccggttgtagcctcctagcgctcctggctgcgtcgctgagggaccctccaccgggagagcgcctcct

SEQ ID NO: 78195 - DNA, 120 bp, Artificial Sequence
  ENSG00000080644_32 (sequence is synthesized)
gtcttcctcccgctctccagaggagcctgctgggggaagccggccctggcccgccgctgggaggctcttgggtgcctgggagggctggtgggtagcgagagtcggggaccgggcaaggct

SEQ ID NO: 78196 - DNA, 120 bp, Artificial Sequence
  ENSG00000080644_33 (sequence is synthesized)
aaccgacctcctgcctgggacccttctttcatcctggggaaggagagtggggagcaggaaaaatcctatttcaagacctgaggaagttggattcaacttcctagaggattctcctcccgc

SEQ ID NO: 78197 - DNA, 120 bp, Artificial Sequence
  ENSG00000080644_34 (sequence is synthesized)
ttccccaagctgcccccagatctgtacgtgggaatcagaagacagctgacccgtggccagggcctcagaggctgagcaccgtctatttgagcggctgtttgaagattacaatgagatcat

SEQ ID NO: 78198 - DNA, 120 bp, Artificial Sequence
  ENSG00000080644_35 (sequence is synthesized)
caagtaagtgaccagaccctaggcactgctgccccctggtggtgactgttttatttgctttaggtgaaccaagaaaggcctaaagaccaggcttcatttacttctgtggaacccagattg

SEQ ID NO: 78199 - DNA, 120 bp, Artificial Sequence
  ENSG00000080644_36 (sequence is synthesized)
gggtccactgactggcagatatatctcttctaaggcttgaggtcacatgcactgccctacagtccccctggaaggactgtagggcccaacccctcaagtcccagatggacaggttgcagc

SEQ ID NO: 78200 - DNA, 120 bp, Artificial Sequence
  ENSG00000080709_0 (sequence is synthesized)
cggcggcagcagcccatgcctccggtgcaacagctgcgcctcctccggtgccccggcggcgggggcgggagataacctgtccctgctgctccgcacctcctcgcccggcggcgccttccg

SEQ ID NO: 78201 - DNA, 120 bp, Artificial Sequence
  ENSG00000080709_1 (sequence is synthesized)
gacccgcacctcctcgccgctgtcgggctcgtcctgctgctgctgctgctgctcgtcgcgccggggcagccagctcaatgtgagcgagctgacgccgtccagccatgccagtgcgctccg

SEQ ID NO: 78202 - DNA, 120 bp, Artificial Sequence
  ENSG00000080709_2 (sequence is synthesized)
gcagcagtacgcgcagcagtccgcgcagcagtcggcgtccgcctcccagtaccaccagtgccacagcctgcagcccgccgccagccccacgggcagcctcggcagtctgggctccgggcc

SEQ ID NO: 78203 - DNA, 120 bp, Artificial Sequence
  ENSG00000080709_3 (sequence is synthesized)
cccgctctcgcaccaccaccaccacccgcacccggcgcaccaccagcaccaccagccccaggcgcgccgcgagagcaaccccttcaccgaaatagccatgagcagctgcaggtacaacgg

SEQ ID NO: 78204 - DNA, 120 bp, Artificial Sequence
  ENSG00000080709_4 (sequence is synthesized)
gggcgtcatgcggccgctcagcaacttgagcgcgtcccgccggaacctgcacgagatggactcagaggcgcagcccctgcagccccccgcgtctgtcggaggaggtggcggcgcgtcctc

SEQ ID NO: 78205 - DNA, 120 bp, Artificial Sequence
  ENSG00000080709_5 (sequence is synthesized)
cccgtctgcagccgctgccgccgccgccgctgtttcgtcctcagcccccgagatcgtggtgtctaagcccgagcacaacaactccaacaacctggcgctctatggaaccggcggcggagg

SEQ ID NO: 78206 - DNA, 120 bp, Artificial Sequence
  ENSG00000080709_6 (sequence is synthesized)
cagcactggaggaggcggcggcggtggcgggagcgggcacggcagcagcagtggcaccaagtccagcaaaaagaaaaaccagaacatcggctacaagctgggccaccggcgcgccctgtt

SEQ ID NO: 78207 - DNA, 120 bp, Artificial Sequence
  ENSG00000080709_7 (sequence is synthesized)
cgaaaagcgcaagcggctcagcgactacgcgctcatcttcggcatgttcggcatcgtggtcatggtcatcgagaccgagctgtcgtggggcgcctacgacaaggcgtcgctgtattcctt

SEQ ID NO: 78208 - DNA, 120 bp, Artificial Sequence
  ENSG00000080709_8 (sequence is synthesized)
agctctgaaatgccttatcagtctctccacgatcatcctgctcggtctgatcatcgtgtaccacgccagggaaatacagttgttcatggtggacaatggagcagatgactggagaatagc

SEQ ID NO: 78209 - DNA, 120 bp, Artificial Sequence
  ENSG00000080709_9 (sequence is synthesized)
catgacttatgagcgtattttcttcatctgcttggaaatactggtgtgtgctattcatcccatacctgggaattatacattcacatggacggcccggcttgccttctcctatgccccatc

SEQ ID NO: 78210 - DNA, 120 bp, Artificial Sequence
  ENSG00000080709_10 (sequence is synthesized)
agaagcattggagcacttaataagataaacttcaatacacgttttgttatgaagactttaatgactatatgcccaggaactgtactcttggtttttagtatctcattatggataattgcc

SEQ ID NO: 78211 - DNA, 120 bp, Artificial Sequence
  ENSG00000080709_11 (sequence is synthesized)
gcatggactgtccgagcttgtgaaaggtaccatgatcaacaggatgttactagcaacttccttggagcgatgtggttgatatcaataacttttctctccattggttatggtgacatggta

SEQ ID NO: 78212 - DNA, 120 bp, Artificial Sequence
  ENSG00000080709_12 (sequence is synthesized)
cctaacacatactgtggaaaaggagtctgcttacttactggaattatgggtgctggttgcacagccctggtggtagctgtagtggcaaggaagctagaacttaccaaagcagaaaaacac

SEQ ID NO: 78213 - DNA, 120 bp, Artificial Sequence
  ENSG00000080709_13 (sequence is synthesized)
gtgcacaatttcatgatggatactcagctgactaaaagagtaaaaaatgcagctgccaatgtactcagggaaacatggctaatttacaaaaatacaaagctagtgaaaaagatagatcat

SEQ ID NO: 78214 - DNA, 120 bp, Artificial Sequence
  ENSG00000080709_14 (sequence is synthesized)
gcaaaagtaagaaaacatcaacgaaaattcctgcaagctattcatcaattaagaagtgtaaaaatggagcagaggaaactgaatgaccaagcaaacactttggtggacttggcaaagacc

SEQ ID NO: 78215 - DNA, 120 bp, Artificial Sequence
  ENSG00000080709_15 (sequence is synthesized)
cagaacatcatgtatgatatgatttctgacttaaacgaaaggagtgaagacttcgagaagaggattgttaccctggaaacaaaactagagactttgattggtagcatccacgccctccct

SEQ ID NO: 78216 - DNA, 120 bp, Artificial Sequence
  ENSG00000080709_16 (sequence is synthesized)
gggctcataagccagaccatcaggcagcagcagagagatttcattgaggctcagatggagagctacgacaagcacgtcacttacaatgctgagcggtcccggtcctcgtccaggaggcgg

SEQ ID NO: 78217 - DNA, 120 bp, Artificial Sequence
  ENSG00000080709_17 (sequence is synthesized)
cggtcctcttccacagcaccaccaacttcatcagagagtagctagaagagaataagttaaccacaaaataagactttttgccatcatatggtcaatattttagcttttattgtaaagccc

SEQ ID NO: 78218 - DNA, 120 bp, Artificial Sequence
  ENSG00000080709_18 (sequence is synthesized)
ctatggttctaatcagcgttatccgggttctgatgtcagaatcctgggaacctgaacactaagttttaggccaaaatgagtgaaaactctttttttttctttcagatgcacagggaatgc

SEQ ID NO: 78219 - DNA, 120 bp, Artificial Sequence
  ENSG00000080709_19 (sequence is synthesized)
acctattattgctatatagattgttcctcctgtaatttcactaactttttattcatgcacttcaaacaaactttactactacattatatgatatataataaaaaaagttaatttctgcac

SEQ ID NO: 78220 - DNA, 120 bp, Artificial Sequence
  ENSG00000080709_20 (sequence is synthesized)
gtgcgacgccgggcagctcctgcggcagccggggagggcgtgatggagaccacgctggaaatgggaatcaaggcacgtttctaaccttgtactggaacgatacatagtctgcgatttctc

SEQ ID NO: 78221 - DNA, 120 bp, Artificial Sequence
  ENSG00000080709_21 (sequence is synthesized)
tccctccctgtctttcctctgcagctccccccggttaacacccgaaattcggccttagaatacacacacacgatggaatttgttccatatctttttttttaaccttcgataggcataaat

SEQ ID NO: 78222 - DNA, 120 bp, Artificial Sequence
  ENSG00000080709_22 (sequence is synthesized)
ccaaacctaaaattaaaatcatccccaaatttggttttgggaatcatgttggttttcacccttgagcggcgttccctccccagtgccgcatgctgcttaaggactgttactttcttgggg

SEQ ID NO: 78223 - DNA, 120 bp, Artificial Sequence
  ENSG00000080709_23 (sequence is synthesized)
agggaagtatcaaatggaaacggtgtgtgtgtgcgcgcgcgcgtttatttttggcgcatgcacacccctcggtagcctcaaggtcggcgataccctgagcattcgggcccccgcctgcag

SEQ ID NO: 78224 - DNA, 120 bp, Artificial Sequence
  ENSG00000080709_24 (sequence is synthesized)
gactcgctcctgccagccaaggactcaagaaggagggagtccccagtcccggcggggcgcctgggattcggttcaatatttagcacagtcagtaccgaagcaggggcagccaggtgggag

SEQ ID NO: 78225 - DNA, 120 bp, Artificial Sequence
  ENSG00000080709_25 (sequence is synthesized)
ctgggcgcccaaaagttggaccccaatcagcagcgagtgggcagcgggggcctggctcgcccgcgcccgcgccccggagctctccggctggctctctgctccccgaagctggggagccgg

SEQ ID NO: 78226 - DNA, 120 bp, Artificial Sequence
  ENSG00000080709_26 (sequence is synthesized)
gggcgctctcccgggccgcaagcaggcacggaatttgacgcccgagaggcagatggtcctggctaggactcctgattcttctcagatggaaacagtttctcccggtgaacctgccggaat

SEQ ID NO: 78227 - DNA, 120 bp, Artificial Sequence
  ENSG00000080709_27 (sequence is synthesized)
tctcagtggactcgatcttcagctttgtccactggcgcatttcaccaaggccgcatttaccgctttgaggcaaatttgagcttcaaatggagcgggactcctggttgcagaacgagggtg

SEQ ID NO: 78228 - DNA, 120 bp, Artificial Sequence
  ENSG00000080709_28 (sequence is synthesized)
tgggaatgcgcatctgcaagaccagaggatgcagagcttgcaggaaggaggaaactcactaggttcaggtgaggaggaggaagagaagcagaagagcagctggaggccggcggtggctga

SEQ ID NO: 78229 - DNA, 120 bp, Artificial Sequence
  ENSG00000080709_29 (sequence is synthesized)
gcagcccccacacctttgagcgagccgcctgcctctccaccggcaaggaagccctgggacctccggattcgggctgccggagggcctgagcgccagagcccaggacccggcggccggggg

SEQ ID NO: 78230 - DNA, 120 bp, Artificial Sequence
  ENSG00000080709_30 (sequence is synthesized)
cgccatcccctcatgttctggagaaggcgcaaatgtgatgtcatgcccattgttttggtgcgcccaaccaatcggactcgccgcctggattctaccggagccggcatgggcccttcctcg

SEQ ID NO: 78231 - DNA, 120 bp, Artificial Sequence
  ENSG00000080709_31 (sequence is synthesized)
caccagcagcaggagtccccgctcccgaccataacgcattgcgcagggtgcaccaccgcttggtctccctgcagctttaacagccctgacatggaaaccccattgcagttccagcgcggc

SEQ ID NO: 78232 - DNA, 120 bp, Artificial Sequence
  ENSG00000080709_32 (sequence is synthesized)
ttcttcccagagcagccgccgccgccgccgcgctcctcacacctgcattgccagcagcagcaacagagccaggacaagccgtgcccgcccttcgcgcccctcccgcaccctcaccaccac

SEQ ID NO: 78233 - DNA, 73 bp, Artificial Sequence
  ENSG00000080709_33 (sequence is synthesized)
ctgtaacactcaccgcgagggaggaatgaacaactccagatgcaccgccttaagagctgtaacactcacggcg

SEQ ID NO: 78234 - DNA, 70 bp, Artificial Sequence
  ENSG00000080709_34 (sequence is synthesized)
acactcaccgccagggtccgcagtaccatgatcaacaggatgttactagcaacttccttggagcgatgtg

SEQ ID NO: 78235 - DNA, 120 bp, Artificial Sequence
  ENSG00000080709_35 (sequence is synthesized)
aggaagatcatggagacaacaattgcaatacacggtggagaactcaacaccccttgattaaaaaaaaaaaatagttgaataaaaaagaagtttcctgaaggagtaagatagaatttacca

SEQ ID NO: 78236 - DNA, 120 bp, Artificial Sequence
  ENSG00000080709_36 (sequence is synthesized)
cagaaagaaagtggtagtatctccctatttcaatttaagtgttgttcccaggcaggtacaagtacttctaaaaaggcatagattaaagaaaaatggtatttggagtcatggttactaaat

SEQ ID NO: 78237 - DNA, 120 bp, Artificial Sequence
  ENSG00000080709_37 (sequence is synthesized)
ccagaggatgcagagcttgcaggaaggaggaaactcactaggttcaggttcatgaaattttcaggaattaaagttagtcctgaggaaagttcatgaatgtctaatgctggactgtgattc

SEQ ID NO: 78238 - DNA, 120 bp, Artificial Sequence
  ENSG00000080709_38 (sequence is synthesized)
ttgctgagagaactacaaaaggatggactccagcaagaggaaaaatgaatctaaggaatggagtgggatataagcaataacataaacatttgagtgcctactgtgtgccaaacaatgatt

SEQ ID NO: 78239 - DNA, 120 bp, Artificial Sequence
  ENSG00000080709_39 (sequence is synthesized)
gatgatgatgatgatgatgatgatgaaagaagaaggagatgatgataaagttccaagctttaattgaattcccattgatgaatgcttataatttggtgaattatgaaaaacaatgacata

SEQ ID NO: 78240 - DNA, 120 bp, Artificial Sequence
  ENSG00000080709_40 (sequence is synthesized)
tgaattatgaaaaacaatgacatagatttggtgttcaggtattaaggaacaataaaatttcagtcttgagatgtcatttcaattattagaatcaaattctctttcaactgaaaaagtagt

SEQ ID NO: 78241 - DNA, 120 bp, Artificial Sequence
  ENSG00000080709_41 (sequence is synthesized)
atagatttatgtaacagcatgtagagtagaaaagaaagtcttgaatattacatttatgaaaataataaaaggaaactaagtttcacaactgcatttcaaatttaaaaatattgtcaacca

SEQ ID NO: 78242 - DNA, 120 bp, Artificial Sequence
  ENSG00000080709_42 (sequence is synthesized)
aacagattttaaaagcagacagtttaaaatgtataacttttaaccatctatctaattttttgaaataaaatagttttattatgatgtagtctgcttctgggaaaaatgcagtaatatcag

SEQ ID NO: 78243 - DNA, 120 bp, Artificial Sequence
  ENSG00000080709_43 (sequence is synthesized)
taactgggaaaagttggaaaatttttattgaaacacagaactaaaattgtgcctgaaattgcagttacactaatatgctttatgtttctccatttctgatatataagttgagctttctca

SEQ ID NO: 78244 - DNA, 120 bp, Artificial Sequence
  ENSG00000080709_44 (sequence is synthesized)
ctcagccccttacttggaaagtatgtattcatgattttcagattatgacttcttcataattttattagaagttgagaaagttcagaatgttgtcaatcacatacatgattttttaatagt

SEQ ID NO: 78245 - DNA, 120 bp, Artificial Sequence
  ENSG00000080709_45 (sequence is synthesized)
ggcttttggattcttatgatgtaaggtttgtatcatgtttttcttttacacataaaatttgtcatttatattttctctttaaaagcgttttgctttcaaaaataaaagacaattatagca

SEQ ID NO: 78246 - DNA, 120 bp, Artificial Sequence
  ENSG00000080709_46 (sequence is synthesized)
gcgttttgctttcaaaaataaaagacaattatagcaataaattattactttcatggcatattatctaatgattctactattttaaaaacattagattgtttctgaatttaacagtaaaat

SEQ ID NO: 78247 - DNA, 120 bp, Artificial Sequence
  ENSG00000080709_47 (sequence is synthesized)
ataattgtgttgattaattagttaggttaaattaaaggatggaagcagtaaagctataaaatttatgattgtactaaaaattaaaacaaatttgattacttttcagaactttaggcaaag

SEQ ID NO: 78248 - DNA, 120 bp, Artificial Sequence
  ENSG00000080709_48 (sequence is synthesized)
atattttccattatgttactcagtgttcagtttcatagagagtcatatgataatgatttcttctggaattttaatttctggaaaatgtgtctatctcctgaattactagcttattctctt

SEQ ID NO: 78249 - DNA, 120 bp, Artificial Sequence
  ENSG00000080709_49 (sequence is synthesized)
ttattatctactaagatccctgctttttttttttaacattttcttttttgcttttattatctaggagctctcagtttttaacttagtattcagatacaataattatatctcccctggcct

SEQ ID NO: 78250 - DNA, 120 bp, Artificial Sequence
  ENSG00000080802_0 (sequence is synthesized)
accctaatgtaagatggtggcccgtctggctgtggaacccaccgaaagctgagagtctctctctcagccgtaaaggtcggactcgctgaagcaatcaggcccggttctgaagagtttttt

SEQ ID NO: 78251 - DNA, 120 bp, Artificial Sequence
  ENSG00000080802_1 (sequence is synthesized)
ccccgacgctcgttcggtggtttcttgtgaggacgcggcagcccgtggagtcggctgagggaaaagcgaggcaaggcaggcgggtcgtcaaagtcctacattttagctttcagtgctgaa

SEQ ID NO: 78252 - DNA, 120 bp, Artificial Sequence
  ENSG00000080802_2 (sequence is synthesized)
cttccttctcccttaaattattataaacttttgctgctgtttaataaacgtgaagatgtctcgcagtcctgatgcgaaggaagaccctgtggagtgccctctttgcatggagcccttgga

SEQ ID NO: 78253 - DNA, 120 bp, Artificial Sequence
  ENSG00000080802_3 (sequence is synthesized)
gatagatgatatcaactttttcccttgcacctgtggctaccagatttgccgattttgttggcatcgaattcgcactgatgaaaatgggctttgtcctgcatgtagaaagccatatccaga

SEQ ID NO: 78254 - DNA, 120 bp, Artificial Sequence
  ENSG00000080802_4 (sequence is synthesized)
agacccagcagtttataaaccactctcccaggaagagctgcaaaggataaagaatgagaaaaaacagaaacaaaatgagagaaaacagaaaatatcagaaaatcgcaaacatttggctag

SEQ ID NO: 78255 - DNA, 120 bp, Artificial Sequence
  ENSG00000080802_5 (sequence is synthesized)
tgtacgtgtcgtacaaaaaaacctcgtctttgttgtaggtttatctcagcgcctagcagacccagaggttttaaaacgaccagaatattttgggaagtttggtaaaatacataaagttgt

SEQ ID NO: 78256 - DNA, 120 bp, Artificial Sequence
  ENSG00000080802_6 (sequence is synthesized)
catcaataatagcacatcatatgcaggctcacagggtccaagtgccagtgcttatgtaacctatatccggtcagaagacgctctcagagccatacagtgtgtcaacaatgtggtagtaga

SEQ ID NO: 78257 - DNA, 120 bp, Artificial Sequence
  ENSG00000080802_7 (sequence is synthesized)
tggcagaacacttaaggcatctctaggtacaacaaaatactgcagttacttcttaaagaatatgcagtgtccaaaacctgactgcatgtatcttcatgaattgggggatgaggcggccag

SEQ ID NO: 78258 - DNA, 120 bp, Artificial Sequence
  ENSG00000080802_8 (sequence is synthesized)
cttcacaaaagaggaaatgcaggcgggtaaacaccaagaatatgaacagaagctacttcaagaattatataaattaaatcccaattttcttcagctatctacgggttcagttgataaaaa

SEQ ID NO: 78259 - DNA, 120 bp, Artificial Sequence
  ENSG00000080802_9 (sequence is synthesized)
agtatagggaacggtgataattcccagcagatatctaacagtgatacgccttcaccaccacctggtttgtcaaaatccaatccagtcatccccatcagttcatccaatcacagtgcacgg

SEQ ID NO: 78260 - DNA, 120 bp, Artificial Sequence
  ENSG00000080802_10 (sequence is synthesized)
tccccttttgaaggggcagtaacagagtcacagtcgttattctcagacaattttcgccatcccaaccctatcccaagtgggcttcctcctttccccagctccccacagacatccagtgac

SEQ ID NO: 78261 - DNA, 120 bp, Artificial Sequence
  ENSG00000080802_11 (sequence is synthesized)
tggcctacagcaccagaaccacagagcctcttcacatcagaaacaatcccagtatcatcctctacagactggcaagcagcttttggctttggttcttctaaacaaccagaggatgacttg

SEQ ID NO: 78262 - DNA, 120 bp, Artificial Sequence
  ENSG00000080802_12 (sequence is synthesized)
ggttttgatcccttcgatgtcactcgaaaagccttagcagacctgattgagaaggaactgtccgttcaagaccaaccttccctttcgcccacatctcttcagaactcctcttcacacact

SEQ ID NO: 78263 - DNA, 120 bp, Artificial Sequence
  ENSG00000080802_13 (sequence is synthesized)
acaaccgccaaaggtccaggctctggattcctgcatcctgctgcagctacaaatgccaattctctcaatagtaccttttcagtcttgccccagaggttccctcaatttcagcagcaccga

SEQ ID NO: 78264 - DNA, 120 bp, Artificial Sequence
  ENSG00000080802_14 (sequence is synthesized)
gcggtttataattcattcagttttccaggccaggcagcccgctatccttggatggcctttccacgcaatagcatcatgcacttgaaccacacagcaaaccccacctcaaatagtaatttc

SEQ ID NO: 78265 - DNA, 120 bp, Artificial Sequence
  ENSG00000080802_15 (sequence is synthesized)
ttggacttgaatctcccgccacagcacaacacaggtctgggagggatccctgtagcaggtattccagcgtcttcaggaaacagtttagactctcttcaagatgacaatcctccacactgg

SEQ ID NO: 78266 - DNA, 120 bp, Artificial Sequence
  ENSG00000080802_16 (sequence is synthesized)
ctaaaatcccttcaggccctcacagagatggacggccccagcgctgctccatcacagacccaccacagcgcccccttcagcacacagatcccgctgcacagagccagttggaatccctac

SEQ ID NO: 78267 - DNA, 120 bp, Artificial Sequence
  ENSG00000080802_17 (sequence is synthesized)
cctcctccttcaaacccttccagcttccactccccacccccaggctttcagacagccttcagaccccccagcaaaacccccacagatttactacagagttcaacactggaccgccattag

SEQ ID NO: 78268 - DNA, 120 bp, Artificial Sequence
  ENSG00000080802_18 (sequence is synthesized)
catgccactgtcaacctcttcccattcattacaacaaggacagcagcctacaagtctccacactactgtggcctgacaacagaactgagaggagaggattagactctggggtgcttgcat

SEQ ID NO: 78269 - DNA, 120 bp, Artificial Sequence
  ENSG00000080802_19 (sequence is synthesized)
gggcaactggatttttgcatgattcctttatgattttgcttttaatgtatacacccagaagagccaatataaacgttcctcatgcctacagctagcgtgttacctcatagttgttgaagt

SEQ ID NO: 78270 - DNA, 120 bp, Artificial Sequence
  ENSG00000080802_20 (sequence is synthesized)
atttcttcattaggcctttaacataatttattagtgtaataattttggcattgtttctcatgagtgatactatttctaactcataaaaataaacttgtagtactaagatcccaggtgaga

SEQ ID NO: 78271 - DNA, 120 bp, Artificial Sequence
  ENSG00000080802_21 (sequence is synthesized)
ttagctagaattgttgttattttggctctattattgaaaaattatacaaaggtaatggtagtatcttgttttctggtttgtgaaaaaataatatcctaatctcctgaaaaatttgcaaat

SEQ ID NO: 78272 - DNA, 120 bp, Artificial Sequence
  ENSG00000080802_22 (sequence is synthesized)
taacaagataatgtctattgcattctttgaatacttgagaagaaagaatacatataaaacaaaattggtggtgtcatttaatgctcagaaggatattgttggcgattgtttttagttgtc

SEQ ID NO: 78273 - DNA, 120 bp, Artificial Sequence
  ENSG00000080802_23 (sequence is synthesized)
tagatttatatcctataatatgcattacatgtgtagaaactgttttgttctctctcttttgcacttttgcactttctttttgaatggttgttaattatgcatagatggttaaaagataat

SEQ ID NO: 78274 - DNA, 120 bp, Artificial Sequence
  ENSG00000080802_24 (sequence is synthesized)
tattgtagcctaaatgcaatataatctcttttctaatgcactgcctagtataccaggaaatgcctcaaaaacagaacttcagtttatagttgacttatctgaaacttgaatacggagtaa

SEQ ID NO: 78275 - DNA, 120 bp, Artificial Sequence
  ENSG00000080802_25 (sequence is synthesized)
acattgtatgtgaaaagcaaccatagtagtgtaacattgttactgaacaaacagtaattctgtgggatattgttttggaaatttcattgtttaataattaaaatgtgataataagataat

SEQ ID NO: 78276 - DNA, 120 bp, Artificial Sequence
  ENSG00000080802_26 (sequence is synthesized)
attataagtacctgaccagaatgagactaaggcagaagagaagagattggatgtcctctaaaattaggccacctaaattgtaacagataattttaatcaagagaatagtggagtacttta

SEQ ID NO: 78277 - DNA, 120 bp, Artificial Sequence
  ENSG00000080802_27 (sequence is synthesized)
ttaggacataatgtgaagtgatatttctgaaaacacatttcttgaaatagttttaaaactgataataaaggaaaagaaactgtacttagtttggagcagtggacaaaagctgattcagaa

SEQ ID NO: 78278 - DNA, 120 bp, Artificial Sequence
  ENSG00000080802_28 (sequence is synthesized)
aacatgaccatattctgcctacatgaagcatctgggaagaaagggaaagtcacacctcctcttgagattttaaccattatgataaaaggtatgctttaatttgttaaaaaaaaaagtatg

SEQ ID NO: 78279 - DNA, 120 bp, Artificial Sequence
  ENSG00000080802_29 (sequence is synthesized)
aaaggggataatgtgaatacaaaaaagaagcctagagattgaaaataataataatagaacatgttattaggagatggtacttaatgtcatgttggagttggagttttcaaggttacctct

SEQ ID NO: 78280 - DNA, 120 bp, Artificial Sequence
  ENSG00000080802_30 (sequence is synthesized)
atataaaattggattattttctgttagatataatgtgacaaattaaatgactttatcccaaggtacagtgaggtaaacaaaaatctattcttagatatccttagatttggttaactgagg

SEQ ID NO: 78281 - DNA, 120 bp, Artificial Sequence
  ENSG00000080802_31 (sequence is synthesized)
ctgtagaagcagcgaattgtctagccatttaagttatttttgtaaaattcagcataaacatcaatctctaatttctatctagaagtgactttaagacattacaagaacattgccaatttg

SEQ ID NO: 78282 - DNA, 120 bp, Artificial Sequence
  ENSG00000080802_32 (sequence is synthesized)
gaaaatgccaataaaatactgtagacttattaatattgtagacttattatcagtcttttactatagcttaatttaattatggttttcatttttactgtaagaggccaagacttcacttat

SEQ ID NO: 78283 - DNA, 120 bp, Artificial Sequence
  ENSG00000080802_33 (sequence is synthesized)
ggagcaaccattagaaaatgcaggatttgtcccactctgttttctccctctcagcccaccacccacagctcccttctcatctcttatgttctgaagaatccagtacctgatcaatttttt

SEQ ID NO: 78284 - DNA, 120 bp, Artificial Sequence
  ENSG00000080802_34 (sequence is synthesized)
ttctccctaaccccagatgcaatgcgatcacagggtcattaccatctctttattaattgtaaaaatttttgttgatccagcatttgagtgacactgttgaatgtttctaaaaatgccttt

SEQ ID NO: 78285 - DNA, 120 bp, Artificial Sequence
  ENSG00000080802_35 (sequence is synthesized)
ttaaggagagaaaaaaaaatcaaagggcagtctcaatacttagaaaattattgtttgtctgttgcgcataataatgacataatctgcttagcagaaaatgacgattaatctataggaaag

SEQ ID NO: 78286 - DNA, 120 bp, Artificial Sequence
  ENSG00000080802_36 (sequence is synthesized)
ctcaagtaaatgcattatcaactgcagaagtttgaaaaccaggttcatttacgtgagattgctaaatgcatgggggaaagcagtggtcctagcatccatcttgtattcagcttatcatta

SEQ ID NO: 78287 - DNA, 120 bp, Artificial Sequence
  ENSG00000080802_37 (sequence is synthesized)
ttgcagggaaaatgcttttaatttaaattaatttttaattcttttggcaagttgatggcaaggacttgattgtgtcattaagcaaaagaatgtattggaagttgatggaaagacaaattc

SEQ ID NO: 78288 - DNA, 120 bp, Artificial Sequence
  ENSG00000080802_38 (sequence is synthesized)
atctgtagtagtaactggccgattgctaaagagttcataaggaggtgagaagtaatttttttaaaggagaaaaattttttggctttagatttaaagtaaattgaaatgttttaaagaaaa

SEQ ID NO: 78289 - DNA, 120 bp, Artificial Sequence
  ENSG00000080802_39 (sequence is synthesized)
aagtattcacagatttaatacctattaataatataagagctgaaatgtaagtcatttcttcagtccttctcctctgtcggaatcttttttgttttaccataaattcacctgacgagggca

SEQ ID NO: 78290 - DNA, 120 bp, Artificial Sequence
  ENSG00000080802_40 (sequence is synthesized)
ctctgagatagcactgctctggggccatctgatcaccatcgggagcaaatctctgacctccttgcctgcagcttttacttaaccctgtagtttctggacgtttgtgcagtattgaaaaga

SEQ ID NO: 78291 - DNA, 120 bp, Artificial Sequence
  ENSG00000080802_41 (sequence is synthesized)
caggagaaaagaaaacagaaacctggttataacctgacgctaaaactaaaaacaaggaaatgtacctctttcttcagaattaaaactaaaatcttaaataaaacagaaaacttgatggtg

SEQ ID NO: 78292 - DNA, 120 bp, Artificial Sequence
  ENSG00000080802_42 (sequence is synthesized)
agccttctccagcattcagtgttagcctttcattgcctggatcttcttacaaagccatagcaagtggttagtgccatttgctccttggtgttgagagatatacctgttaaatgaggcttc

SEQ ID NO: 78293 - DNA, 120 bp, Artificial Sequence
  ENSG00000080802_43 (sequence is synthesized)
tttcctttctcattcatagccagcgtggaaaaatcatcaggtagtttgcccagatttgccagagccctaaataaaatggcaaaacgatctccctgcctgcttctcctccccacccccact

SEQ ID NO: 78294 - DNA, 120 bp, Artificial Sequence
  ENSG00000080802_44 (sequence is synthesized)
tacatgcacaccgtaaatcaagaaatgctttttgggcaattagactttatcttctaaatttttgcatagaatggctaaacatgatcttttgcctcactttgtaattcctacaccttcctt

SEQ ID NO: 78295 - DNA, 120 bp, Artificial Sequence
  ENSG00000080802_45 (sequence is synthesized)
gtaagcttcaccttttgcttacctaatattttatttaaacatggttttttaaaaaacctgaagctttaaaatcatagtcataattaattttacactaaaggacagaagaaattatacaac

SEQ ID NO: 78296 - DNA, 120 bp, Artificial Sequence
  ENSG00000080802_46 (sequence is synthesized)
acataaaagaagccactacttcacatagcaagcaaattgaaatcaaaatgacagaagaatgagaaattctttaaaagcttcaggttttttttgttgttgttgttaaattcctgcatgatg

SEQ ID NO: 78297 - DNA, 120 bp, Artificial Sequence
  ENSG00000080802_47 (sequence is synthesized)
catcatgtgcaagggaaacttaatatacttttacacccttaacctttataaagtgactagcttttcccttaacataggaatttttaacctggagcccagatttttgagagtacacacaaa

SEQ ID NO: 78298 - DNA, 120 bp, Artificial Sequence
  ENSG00000080802_48 (sequence is synthesized)
attgtgggtttgtgtgcatgtacatatgtccatttttttctagggagaagatccatagttattagatttgtgaaggatttggtgatccccttctcccatcaaaaaaaaaaaaaaaaagaa

SEQ ID NO: 78299 - DNA, 120 bp, Artificial Sequence
  ENSG00000080802_49 (sequence is synthesized)
acgggctaagggcacttctacccaacattaacatcaactttggtggactgcccaattcttcttccccctccaacgccaaccacagtgcaccaacgtccaacactgccaccaccgacagcc

SEQ ID NO: 78300 - DNA, 120 bp, Artificial Sequence
  ENSG00000080802_50 (sequence is synthesized)
taaggaaaagggagcgggtcagaaggcagcgcggcggcaagcagcgactctccttcgagaatttctttaattggggagccgaggcggcttttggtctccagcttttccccctgcattttc

SEQ ID NO: 78301 - DNA, 120 bp, Artificial Sequence
  ENSG00000080802_51 (sequence is synthesized)
aagataggctcattcagtaggataatagatgtcgttgggtggtgggaagagataagctcctgagacgagcatgtggtatagcttaagagaggtgggtggccaggcgcggtggctcacgcc

SEQ ID NO: 78302 - DNA, 120 bp, Artificial Sequence
  ENSG00000080802_52 (sequence is synthesized)
cgcggcagcccgtggagtcggctgagggaaaagcgaggcaaggcaggcggatcctttcaatatacacttccagaaaaagggaagccccgtggtggcccttgaaaagtaaaaggaagttgg

SEQ ID NO: 78303 - DNA, 120 bp, Artificial Sequence
  ENSG00000080815_0 (sequence is synthesized)
ggaaacaaaacagcggctggtctggaaggaacctgagctacgagccgcggcggcagcggggcggcggggaagcgtatacctaatctgggagcctgcaagtgacaacagcctttgcggtcc

SEQ ID NO: 78304 - DNA, 120 bp, Artificial Sequence
  ENSG00000080815_1 (sequence is synthesized)
ttagacagcttggcctggaggagaacacatgaaagaaagaacctcaagaggctttgttttctgtgaaacagtatttctatacagttgctccaatgacagagttacctgcaccgttgtcct

SEQ ID NO: 78305 - DNA, 120 bp, Artificial Sequence
  ENSG00000080815_2 (sequence is synthesized)
acttccagaatgcacagatgtctgaggacaaccacctgagcaatactgtacgtagccagaatgacaatagagaacggcaggagcacaacgacagacggagccttggccaccctgagccat

SEQ ID NO: 78306 - DNA, 120 bp, Artificial Sequence
  ENSG00000080815_3 (sequence is synthesized)
tatctaatggacgaccccagggtaactcccggcaggtggtggagcaagatgaggaagaagatgaggagctgacattgaaatatggcgccaagcatgtgatcatgctctttgtccctgtga

SEQ ID NO: 78307 - DNA, 120 bp, Artificial Sequence
  ENSG00000080815_4 (sequence is synthesized)
ctctctgcatggtggtggtcgtggctaccattaagtcagtcagcttttatacccggaaggatgggcagctaatctataccccattcacagaagataccgagactgtgggccagagagccc

SEQ ID NO: 78308 - DNA, 120 bp, Artificial Sequence
  ENSG00000080815_5 (sequence is synthesized)
tgcactcaattctgaatgctgccatcatgatcagtgtcattgttgtcatgactatcctcctggtggttctgtataaatacaggtgctataaggtcatccatgcctggcttattatatcat

SEQ ID NO: 78309 - DNA, 120 bp, Artificial Sequence
  ENSG00000080815_6 (sequence is synthesized)
ctctattgttgctgttctttttttcattcatttacttgggggaagtgtttaaaacctataacgttgctgtggactacattactgttgcactcctgatctggaattttggtgtggtgggaa

SEQ ID NO: 78310 - DNA, 120 bp, Artificial Sequence
  ENSG00000080815_7 (sequence is synthesized)
tgatttccattcactggaaaggtccacttcgactccagcaggcatatctcattatgattagtgccctcatggccctggtgtttatcaagtacctccctgaatggactgcgtggctcatct

SEQ ID NO: 78311 - DNA, 120 bp, Artificial Sequence
  ENSG00000080815_8 (sequence is synthesized)
tggctgtgatttcagtatatgatttagtggctgttttgtgtccgaaaggtccacttcgtatgctggttgaaacagctcaggagagaaatgaaacgctttttccagctctcatttactcct

SEQ ID NO: 78312 - DNA, 120 bp, Artificial Sequence
  ENSG00000080815_9 (sequence is synthesized)
caacaatggtgtggttggtgaatatggcagaaggagacccggaagctcaaaggagagtatccaaaaattccaagtataatgcagaaagcacagaaagggagtcacaagacactgttgcag

SEQ ID NO: 78313 - DNA, 120 bp, Artificial Sequence
  ENSG00000080815_10 (sequence is synthesized)
agaatgatgatggcgggttcagtgaggaatgggaagcccagagggacagtcatctagggcctcatcgctctacacctgagtcacgagctgctgtccaggaactttccagcagtatcctcg

SEQ ID NO: 78314 - DNA, 120 bp, Artificial Sequence
  ENSG00000080815_11 (sequence is synthesized)
ctggtgaagacccagaggaaaggggagtaaaacttggattgggagatttcattttctacagtgttctggttggtaaagcctcagcaacagccagtggagactggaacacaaccatagcct

SEQ ID NO: 78315 - DNA, 120 bp, Artificial Sequence
  ENSG00000080815_12 (sequence is synthesized)
gtttcgtagccatattaattggtttgtgccttacattattactccttgccattttcaagaaagcattgccagctcttccaatctccatcacctttgggcttgttttctactttgccacag

SEQ ID NO: 78316 - DNA, 120 bp, Artificial Sequence
  ENSG00000080815_13 (sequence is synthesized)
attatcttgtacagccttttatggaccaattagcattccatcaattttatatctagcatatttgcggttagaatcccatggatgtttcttctttgactataacaaaatctggggaggaca

SEQ ID NO: 78317 - DNA, 120 bp, Artificial Sequence
  ENSG00000080815_14 (sequence is synthesized)
aaggtgattttcctgtgtccacatctaacaaagtcaagattcccggctggacttttgcagcttccttccaagtcttcctgaccaccttgcactattggactttggaaggaggtgcctata

SEQ ID NO: 78318 - DNA, 120 bp, Artificial Sequence
  ENSG00000080815_15 (sequence is synthesized)
gaaaacgattttgaacatacttcatcgcagtggactgtgtccctcggtgcagaaactaccagatttgagggacgaggtcaaggagatatgataggcccggaagttgctgtgccccatcag

SEQ ID NO: 78319 - DNA, 120 bp, Artificial Sequence
  ENSG00000080815_16 (sequence is synthesized)
cagcttgacgcgtggtcacaggacgatttcactgacactgcgaactctcaggactaccgttaccaagaggttaggtgaagtggtttaaaccaaacggaactcttcatcttaaactacacg

SEQ ID NO: 78320 - DNA, 120 bp, Artificial Sequence
  ENSG00000080815_17 (sequence is synthesized)
ttgaaaatcaacccaataattctgtattaactgaattctgaacttttcaggaggtactgtgaggaagagcaggcaccagcagcagaatggggaatggagaggtgggcaggggttccagct

SEQ ID NO: 78321 - DNA, 120 bp, Artificial Sequence
  ENSG00000080815_18 (sequence is synthesized)
tccctttgattttttgctgcagactcatcctttttaaatgagacttgttttcccctctctttgagtcaagtcaaatatgtagattgcctttggcaattcttcttctcaagcactgacact

SEQ ID NO: 78322 - DNA, 120 bp, Artificial Sequence
  ENSG00000080815_19 (sequence is synthesized)
cattaccgtctgtgattgccatttcttcccaaggccagtctgaacctgaggttgctttatcctaaaagttttaacctcaggttccaaattcagtaaattttggaaacagtacagctattt

SEQ ID NO: 78323 - DNA, 120 bp, Artificial Sequence
  ENSG00000080815_20 (sequence is synthesized)
ctcatcaattctctatcatgttgaagtcaaatttggattttccaccaaattctgaatttgtagacatacttgtacgctcacttgccccagatgcctcctctgtcctcattcttctctccc

SEQ ID NO: 78324 - DNA, 120 bp, Artificial Sequence
  ENSG00000080815_21 (sequence is synthesized)
acacaagcagtctttttctacagccagtaaggcagctctgtcgtggtagcagatggtcccattattctagggtcttactctttgtatgatgaaaagaatgtgttatgaatcggtgctgtc

SEQ ID NO: 78325 - DNA, 120 bp, Artificial Sequence
  ENSG00000080815_22 (sequence is synthesized)
agccctgctgtcagaccttcttccacagcaaatgagatgtatgcccaaagacggtagaattaaagaagagtaaaatggctgttgaagcactttctgtcctggtattttgtttttgctttt

SEQ ID NO: 78326 - DNA, 120 bp, Artificial Sequence
  ENSG00000080815_23 (sequence is synthesized)
gccacacagtagctcagaatttgaacaaatagccaaaagctggtggttgatgaattatgaactagttgtatcaacacaaagcaagagttggggaaagccatatttaacttggtgagctgt

SEQ ID NO: 78327 - DNA, 120 bp, Artificial Sequence
  ENSG00000080815_24 (sequence is synthesized)
gggagaacctggtggcagaaggagaaccaactgccaaggggaaagagaaggggcctccagcagcgaaggggatacagtgagctaatgatgtcaaggaggagtttcaggttattctcgtca

SEQ ID NO: 78328 - DNA, 120 bp, Artificial Sequence
  ENSG00000080815_25 (sequence is synthesized)
ttgtggtctctgcccgcgttacctttcctctcaatgtacctttgtgtgaactgggcagtggaggtgcctgctgcagttaccatggagttcaggctctgggcagctcagtcaggcaaaaca

SEQ ID NO: 78329 - DNA, 120 bp, Artificial Sequence
  ENSG00000080815_26 (sequence is synthesized)
cacaaacagccatcagcctgtgtgggctcagggcacctctggacaaaggcttgtggggcataaccttctttaccacagagagcccttagctatgctgatcagaccgtaagcgtttatgag

SEQ ID NO: 78330 - DNA, 120 bp, Artificial Sequence
  ENSG00000080815_27 (sequence is synthesized)
aaacttagtttcctcctgtggctgaggaggggccagctttttcttcttttgcctgctgttttctctcccaatctatgatatgatatgacctggtttggggctgtctttggtgtttagaat

SEQ ID NO: 78331 - DNA, 120 bp, Artificial Sequence
  ENSG00000080815_28 (sequence is synthesized)
atttgttttctgtcccaggatatttcttataagaacctaacttcaagagtagtgtgcgagtactgatctgaatttaaattaaaattggcttatattaggcagtcacagacaggaaaaata

SEQ ID NO: 78332 - DNA, 120 bp, Artificial Sequence
  ENSG00000080815_29 (sequence is synthesized)
agagctatgcaaagaaagggggatttaaagtagtaggttctatcatctcaattcatttttttccatgaaatcccttcttccaagattcattccctctctcagacatgtgctagcatgggt

SEQ ID NO: 78333 - DNA, 120 bp, Artificial Sequence
  ENSG00000080815_30 (sequence is synthesized)
attatcattgagaaagcacagctacagcaaagccacctgaatagcaatttgtgattggaagcattcttgagggatccctaatctagagtaatttatttgtgtaaggatcccaaatgtgtt

SEQ ID NO: 78334 - DNA, 120 bp, Artificial Sequence
  ENSG00000080815_31 (sequence is synthesized)
gcacctttcatgatacatttcttctctgaagagggtacgtggggtgtgtgtatttaaatccatcctatgtattactgattgtcctgtgtagaaagatggcaattattctgtctctttctc

SEQ ID NO: 78335 - DNA, 120 bp, Artificial Sequence
  ENSG00000080815_32 (sequence is synthesized)
caagtttgagccacatctcagccacattgttagacagtgtacagagaacctatctttcctttttttttttttaaaggacaggattttgctgtgttgcccaggctagacttgaactcctgg

SEQ ID NO: 78336 - DNA, 120 bp, Artificial Sequence
  ENSG00000080815_33 (sequence is synthesized)
gctcaagtaatccacctcagcctgagtagctgagactacagcccatcttatttctttaaatcattcatctcaggcagagaacttttccctcaaacattctttttagaattagttcagtca

SEQ ID NO: 78337 - DNA, 120 bp, Artificial Sequence
  ENSG00000080815_34 (sequence is synthesized)
ttcctaaaacatccaaatgctagtcttccaccatgaaaaatagattgtcactggaaagaacagtagcaatttccataaggatgtgccttcactcacacgggacaggcggtggttatagag

SEQ ID NO: 78338 - DNA, 120 bp, Artificial Sequence
  ENSG00000080815_35 (sequence is synthesized)
tcgggcaaaaccagcagtagagtatgaccagccaagccaatctgcttaataaaaagatggaagacagtaaggaaggaaagtagccactaagagtctgagtctgactgggctacagaataa

SEQ ID NO: 78339 - DNA, 120 bp, Artificial Sequence
  ENSG00000080815_36 (sequence is synthesized)
agggtatttatggacagaatgtcattacatgcctatgggaataccaatcatatttggaagatttgcagattttttttcagagaggaaagactcaccttcctgtttttggttctcagtagg

SEQ ID NO: 78340 - DNA, 120 bp, Artificial Sequence
  ENSG00000080815_37 (sequence is synthesized)
ttcgtgtgtgttcctagaatcacagctctgactccaaatgactcaatttctcaattagaaaaagtagaagctttctaagcaacttggaagaaaacagtcataagtaagcaatttgttgat

SEQ ID NO: 78341 - DNA, 120 bp, Artificial Sequence
  ENSG00000080815_38 (sequence is synthesized)
tttactacagaagcaacaactgaagaggcagtgtttttactttcagactccgggattcccattctgtagtctctctgcttttaaaaaccctccttttgcaatagatgcccaaacagatga

SEQ ID NO: 78342 - DNA, 120 bp, Artificial Sequence
  ENSG00000080815_39 (sequence is synthesized)
tgtttattacttgttatttacgtggcctcagacagtgtatgtattctcgatataacttgtagagtgtgaaatataagtttaactaccaaataaggtctcccagggttagatgactgcggg

SEQ ID NO: 78343 - DNA, 120 bp, Artificial Sequence
  ENSG00000080815_40 (sequence is synthesized)
aagcctttgatcccaacccccaaggctttgtatatttgatcatttgtgatctaaccctggaagaaaaagagctcagaaaccactatgaaaaaatttgttcagtgttttctgtgttcccgt

SEQ ID NO: 78344 - DNA, 120 bp, Artificial Sequence
  ENSG00000080815_41 (sequence is synthesized)
aggttctggagtctgaggatgcaaagatgaataagataaattctcagaatgtagttataatctcttgttttctggtatatgccatctttctttaacttctctaaaatattgggtatttgt

SEQ ID NO: 78345 - DNA, 120 bp, Artificial Sequence
  ENSG00000080815_42 (sequence is synthesized)
caaataaccacttttaacagttaccattactgagggcttatacattggtgttataaaagtgacttgattcagaaatcaatccattcagtaaagtactccttctctaaatttgctgttatg

SEQ ID NO: 78346 - DNA, 120 bp, Artificial Sequence
  ENSG00000080815_43 (sequence is synthesized)
tctataaggaacagtttgacctgcccttctcctcacctcctcacctgccttccaacattgaatttggaaggagacgtgaaaattggacatttggttttgcccttgggctggaaactatca

SEQ ID NO: 78347 - DNA, 120 bp, Artificial Sequence
  ENSG00000080815_44 (sequence is synthesized)
tataatcataagtttgagcctagaagtgatccttgtgatcttctcacctctttaaattcccacaacacaagagattaaaaacagaggtttcagctcttcatagtgcgttgtgaaatggct

SEQ ID NO: 78348 - DNA, 120 bp, Artificial Sequence
  ENSG00000080815_45 (sequence is synthesized)
ggccagagtgtaccaacaaagctgtcatcgggctcacagctcagagacatctgcatgtgatcatctgcatagtcctctcctctaacgggaaacacctcagatttgcatataaaaaagcac

SEQ ID NO: 78349 - DNA, 120 bp, Artificial Sequence
  ENSG00000080815_46 (sequence is synthesized)
cctggtgctgaaatgaacccctttcttgaacatcaaagctgtctcccacagccttgggcagcagggtgcctcttagtggatgtgctgggtccaccctgagccctgacatgtggtggcagc

SEQ ID NO: 78350 - DNA, 120 bp, Artificial Sequence
  ENSG00000080815_47 (sequence is synthesized)
attgccagttggtctgtgtgtctgtgtagcagggacgatttcccagaaagcaattttccttttgaaatacgtaattgttgagactaggcagtttcaaagtcagctgcatatagtagcaag

SEQ ID NO: 78351 - DNA, 120 bp, Artificial Sequence
  ENSG00000080815_48 (sequence is synthesized)
tacaggactgtcttgtttttggtgtccttggaggtgctggggtgagggtttcagtgggatcatttactctcacatgttgtctgccttctgcttctgtggacactgctttgtacttaattc

SEQ ID NO: 78352 - DNA, 120 bp, Artificial Sequence
  ENSG00000080815_49 (sequence is synthesized)
agacagactgtgaatacaccttttttataaatacctttcaaattcttggtaagatataattttgatagctgattgcagattttctgtatttgtcagattaataaagactgcatgaatcca

SEQ ID NO: 78353 - DNA, 120 bp, Artificial Sequence
  ENSG00000080815_50 (sequence is synthesized)
ggaaatgctgtttgctcgaagacgtctcagggcgcaggtgccttgggccgggattagtagccgtctgaactggagtggagtaggagaaagaggaagcgtcttgggctgggtctgcttgag

SEQ ID NO: 78354 - DNA, 120 bp, Artificial Sequence
  ENSG00000080815_51 (sequence is synthesized)
caactggtgaaactccgcgcctcacgccccgggtgtgtccttgtccaggggcgacgagcattctgggcgaagtccgcacgcctcttgttcgaggcggaagacggggtctgatgctttctc

SEQ ID NO: 78355 - DNA, 120 bp, Artificial Sequence
  ENSG00000080815_52 (sequence is synthesized)
cttggtcgggactgtctcgaggcatgcatgtccagtgactcttgtgtttgctgctgcttccctctcagattcttctcaccgttgtggtcagctctgctttaggcatattaatccatagtg

SEQ ID NO: 78356 - DNA, 120 bp, Artificial Sequence
  ENSG00000080815_53 (sequence is synthesized)
atcattatctctgcagctttcctttaaactaggaagacttgttcctataccccagtaacgatacactgtacactaagcaaatagcagtcaaacccaaatgaaatttttacagatgttctg

SEQ ID NO: 78357 - DNA, 120 bp, Artificial Sequence
  ENSG00000080815_54 (sequence is synthesized)
tgtcattttattttgtttatgttgtctcccccacccccaccagttcacctgccatttatttcatattcattcaacgtctttttgtgtaaaaagagacaaaaaacattaaacttttttcct

SEQ ID NO: 78358 - DNA, 120 bp, Artificial Sequence
  ENSG00000080815_55 (sequence is synthesized)
tttgtgatagcaggtgcagtttgagtactacagtaaacattcagtttcagaacttcttctcttacctgctaaaaccaaagagaaccttttttttatttttacttctgattgttgaacagt

SEQ ID NO: 78359 - DNA, 120 bp, Artificial Sequence
  ENSG00000080815_56 (sequence is synthesized)
ggtttcacatcggaaacaaaacagcggctggtctggaaggaacctgagctacgagccgcggcggcagcggggcggcggggaagcgtatgcatacaaatttattagcatgcagactgggag

SEQ ID NO: 78360 - DNA, 89 bp, Artificial Sequence
  ENSG00000080815_57 (sequence is synthesized)
acagagttacctgcaccgttgtcctacttccagaatgcacagatgtctgaggacaaccacctgagcaatactagacgagttctcgggct

SEQ ID NO: 78361 - DNA, 120 bp, Artificial Sequence
  ENSG00000080815_58 (sequence is synthesized)
catagtggaggctgggatgggtgagagaattgaggtgacttttccataattcaggcatacaaatttattagcatgcagactgggagaaccacaagcctgggtgacagagcaagactgtgt

SEQ ID NO: 78362 - DNA, 120 bp, Artificial Sequence
  ENSG00000080815_59 (sequence is synthesized)
atctttgctttccaccctgttcttcttatggttgggtattcttgtcacagtaacttaactgatctaggaaagaaaaaatgttttgtcttctagagataagttaatttttagttttcttcc

SEQ ID NO: 78363 - DNA, 120 bp, Artificial Sequence
  ENSG00000080815_60 (sequence is synthesized)
tcctcactgtggaacattcaaaaaatacaaaaaggaagccaggtgcatgtgtaatgccaggctcagaggctgaggcaggaggatcacttgggcccaggagttcacaagcagcttgggcaa

SEQ ID NO: 78364 - DNA, 120 bp, Artificial Sequence
  ENSG00000080815_61 (sequence is synthesized)
cgtagcaagaccctgcctctattaaagaaaacaaaaaacaaatattggaagtattttatatgcatggaatctatatgtcatgaaaaaattagtgtaaaatatatatattatgattagtta

SEQ ID NO: 78365 - DNA, 120 bp, Artificial Sequence
  ENSG00000080815_62 (sequence is synthesized)
tcaagatttagtgataatttatgttattttggatttcaatgcctttttaggccattgtctcaaaaaataaaagcagaaaacaaaaaaagttgtaactgaaaaataaacatttccatataa

SEQ ID NO: 78366 - DNA, 120 bp, Artificial Sequence
  ENSG00000080815_63 (sequence is synthesized)
tgaatttggtcagcatagaaaaaggaatgttgagaacattccttaagattactcagctccctttgctggaaatcagaagtcattaagtatctttgtggttgaaaatgtttggtgtctcag

SEQ ID NO: 78367 - DNA, 120 bp, Artificial Sequence
  ENSG00000080815_64 (sequence is synthesized)
gcggttctacttattgctaaagaggtctaccttgagcttatagtaaatttgtcagttagttgaaagtcgtgacaaattaatacattcctggtttacaaattggtcttataagtatttgat

SEQ ID NO: 78368 - DNA, 120 bp, Artificial Sequence
  ENSG00000080815_65 (sequence is synthesized)
aggcagctccggggtccgcggtttcacatcggaaacaaaacagcggctggtctggaaggaacctgagctacgagccgcggcggcagcggggcggcggggaagcgcatacaaatttattag

SEQ ID NO: 78369 - DNA, 120 bp, Artificial Sequence
  ENSG00000080815_66 (sequence is synthesized)
ttttttttttttttttttgcttcgaagaatgattgcctttaccttctcagttctcagttattttccagcacattatgattttatgaccttgatacagaagggctgggctcctggctaaat

SEQ ID NO: 78370 - DNA, 120 bp, Artificial Sequence
  ENSG00000080815_67 (sequence is synthesized)
tccacccttaaacctggaactgcaaccctaagtgaaaacagctaaccccattttttttcccacccaaatgttgcctctttggcctgccatgcccctatcctgtgctcataaaaatatttc

SEQ ID NO: 78371 - DNA, 88 bp, Artificial Sequence
  ENSG00000080815_68 (sequence is synthesized)
tgtctcagcagctgggagaacaatataagcagctgacgtcagggatataaatggctgtgtgttgggaatacaagcagctgattgtcgg

SEQ ID NO: 78372 - DNA, 120 bp, Artificial Sequence
  ENSG00000080815_69 (sequence is synthesized)
aaatggctgtgtgttgggaatacaagcagctgattgtcggaaatacaagccactgagtgttggtgatacaagtggctgagcagcgagcagagaatcaggtgagcgttggagactatggat

SEQ ID NO: 78373 - DNA, 120 bp, Artificial Sequence
  ENSG00000080815_70 (sequence is synthesized)
gggacgtggctaacttcagatggtgcagctttggagaataggcccagccggagatggcctggcttcagggaaagatcaccttcttcccataccatccctttttcaactccccattctgct

SEQ ID NO: 78374 - DNA, 120 bp, Artificial Sequence
  ENSG00000080815_71 (sequence is synthesized)
gagaaccacttccatcgtgcaatacaatcttctgcatatactacccttcaatctgttcatgtgatctgattattcctggacactggaagagaacctgggtgccaagaggagagggcaggg

SEQ ID NO: 78375 - DNA, 120 bp, Artificial Sequence
  ENSG00000080815_72 (sequence is synthesized)
gctgccaccctgaccctccactgagctggctggcacctggccatccccgaatggccgcgttgaaggagcattgattgtaacacacttggatgctgctgcggggccgcatagagcctgcgc

SEQ ID NO: 78376 - DNA, 120 bp, Artificial Sequence
  ENSG00000080815_73 (sequence is synthesized)
ctgccagagaggagcaactggctggttcccgcattcgtttgctctgattcccacactcactcactcgcttgcacactgcctcttgcaaggggtttgagtgtgtggtggccgagtaaacga

SEQ ID NO: 78377 - DNA, 120 bp, Artificial Sequence
  ENSG00000080815_74 (sequence is synthesized)
gccacgctccgagccatgagggggtcaagggaattatccagtctcatctcaatccgacttccctcttcactgttttacttttgtaaaacccttgatgaacttcccattgtcaattcaggg

SEQ ID NO: 78378 - DNA, 120 bp, Artificial Sequence
  ENSG00000080815_75 (sequence is synthesized)
tctttttagctctcatcctgccagactgttgataacacctctgatttgtgctccacttttggcttctgtgtcatattgattcctgagttttcttccttctcctctattctcttaatctcg

SEQ ID NO: 78379 - DNA, 120 bp, Artificial Sequence
  ENSG00000080815_76 (sequence is synthesized)
ttttctggttttctcccatcacctgctggttaagcttaggggttatttacacttctctccttggtcatctttttactgtatttttccctccacagctatttcatccatttctgaggcctg

SEQ ID NO: 78380 - DNA, 120 bp, Artificial Sequence
  ENSG00000080815_77 (sequence is synthesized)
agatttcatccatttctgaggctatagagaccagtgacttcctctgactcttctgagcttgaaattcctattgaatgacaatagagaacggcaggagcacaacgacagacggagccttgg

SEQ ID NO: 78381 - DNA, 120 bp, Artificial Sequence
  ENSG00000080819_0 (sequence is synthesized)
ctttccgcctgtgcagctcgccggctcaatactccgggggtctgggtggggggctcaaacgcagggctctgggacgcaggcactgctccaggtgatagtgcgggaacatggccttgcagc

SEQ ID NO: 78382 - DNA, 120 bp, Artificial Sequence
  ENSG00000080819_1 (sequence is synthesized)
tgatagtgcgggaacatggccttgcagctgggcaggctgagctcgggcccctgctggctcgtggcgcggggcggctgcggagggccccgcgcctggtcccagtgcggcggcggagggctc

SEQ ID NO: 78383 - DNA, 80 bp, Artificial Sequence
  ENSG00000080819_2 (sequence is synthesized)
gacgcgtctgccggccccctggcccggctggcacggagcagagccgcgggctggggcacggctcgacgtcgagaggcggc

SEQ ID NO: 78384 - DNA, 120 bp, Artificial Sequence
  ENSG00000080819_3 (sequence is synthesized)
tggtggggctggccaccgccgccttcgggcatgtgcagcgggcggagatgttgcctaagacctcggggacgcgggccacttcgctggggaggccggaggaggaggaggatgagctggccc

SEQ ID NO: 78385 - DNA, 120 bp, Artificial Sequence
  ENSG00000080819_4 (sequence is synthesized)
accgctgcagcagcttcatggccccgcctgtgaccgacctgggcgagctgcgaaggaggccgggcgacatgaagaccaagatggagctgctgattctggagacccaggcccaggtgtgcc

SEQ ID NO: 78386 - DNA, 120 bp, Artificial Sequence
  ENSG00000080819_5 (sequence is synthesized)
aggctctggcacaggtagacgggggcgccaacttttctgtggaccggtgggagaggaaggaaggaggtggcggcatcagctgtgtacttcaagatgggtgtgttttcgaaaaggctgggg

SEQ ID NO: 78387 - DNA, 120 bp, Artificial Sequence
  ENSG00000080819_6 (sequence is synthesized)
tgagcatttctgttgttcatggaaatctttcagaggaagctgcaaaacaaatgagaagcagaggaaaagttctgaagactaaagatggtaaattgccattttgtgctatgggcgtgagct

SEQ ID NO: 78388 - DNA, 120 bp, Artificial Sequence
  ENSG00000080819_7 (sequence is synthesized)
ctgttatccaccccaagaatcctcatgctcctactatccatttcaactacagatactttgaagtagaagaagctgatggcaacaagcagtggtggtttggtggtggatgtgacctcactc

SEQ ID NO: 78389 - DNA, 120 bp, Artificial Sequence
  ENSG00000080819_8 (sequence is synthesized)
caacatacttgaatcaagaagacgctgtccattttcacagaactctgaaggaggcttgtgaccagcatggtccagatctctaccccaaatttaaaaaatggtgtgatgattacttcttta

SEQ ID NO: 78390 - DNA, 120 bp, Artificial Sequence
  ENSG00000080819_9 (sequence is synthesized)
tagcccatcgtggagaacggcggggcattggtggtatcttttttgatgatcttgactctccgtccaaggaggaggtgtttcgctttgtacagagctgtgccagggctgtagttccttctt

SEQ ID NO: 78391 - DNA, 120 bp, Artificial Sequence
  ENSG00000080819_10 (sequence is synthesized)
acattccccttgtgaaaaagcactgtgatgactcattcaccccccaggagaagctgtggcagcagctcagaagaggacggtatgtagaatttaatctgctgtatgatcggggcacaaagt

SEQ ID NO: 78392 - DNA, 120 bp, Artificial Sequence
  ENSG00000080819_11 (sequence is synthesized)
agtacatgcattcaccctcagagaattccaaagaagctgaaattctggaagttctacgccatccaagggactgggtgcgttgatgcaggcagaatggctgtgcaggggtttggagggcac

SEQ ID NO: 78393 - DNA, 120 bp, Artificial Sequence
  ENSG00000080819_12 (sequence is synthesized)
acgatgtgtgctccccatgccactggtcggcactttgccactgtgtggcagttacccgtgccttagtcttctccactctgcaccctacctcgtgggcagatgataacatgttttggatgc

SEQ ID NO: 78394 - DNA, 120 bp, Artificial Sequence
  ENSG00000080819_13 (sequence is synthesized)
tgtcagtgatgaatggtgagatggcagattgtcagagtcaattgattaaacctcatttatacttctagtgtcattttatatgactagtttacaaaataggacattgagtttccaagtatt

SEQ ID NO: 78395 - DNA, 120 bp, Artificial Sequence
  ENSG00000080819_14 (sequence is synthesized)
gagataagggaatataaatagtattatatgtatcaggaaatctctcatcttgtttttgtttcatgtattttttaaagttttcatttgtgccacaaaaatctgtcgtggaatatattttat

SEQ ID NO: 78396 - DNA, 120 bp, Artificial Sequence
  ENSG00000080819_15 (sequence is synthesized)
tttcattaattcagtgaagttgagacttcatagtaattttagaatgcaacttgaaggtaaaaattttactttgtcaatactgaagtctctgctgtaatccttatatatctttctccagag

SEQ ID NO: 78397 - DNA, 120 bp, Artificial Sequence
  ENSG00000080819_16 (sequence is synthesized)
aacataatattgtcaaatagatacacatttttctaataggtatttagaagcacttgaaataatctctgcatgtgttacaattcagttatttctgtagtttgtaaactctaaagtgacatt

SEQ ID NO: 78398 - DNA, 120 bp, Artificial Sequence
  ENSG00000080819_17 (sequence is synthesized)
actattattttagagatgtctaagttgtaattttgatttttgtggaaccattgtttgttaatgttgggattctctgcacttttgaatgtgaaagcttatatccctgaattctgatactta

SEQ ID NO: 78399 - DNA, 120 bp, Artificial Sequence
  ENSG00000080819_18 (sequence is synthesized)
agagttttctatttcagacatctctgtgtggaagttgagactaagaataatcctagggatgtcatgaatttaggcaatgtttctcatttggaaaatgaaatgagaaataatttccttctt

SEQ ID NO: 78400 - DNA, 120 bp, Artificial Sequence
  ENSG00000080819_19 (sequence is synthesized)
taaagcaagtatatatagtatgagaaacttggaggcatttcatacacacgtttcttaggaaaatggacacattgaaaatgtcctcttttttatattagagattctgcagctctttgctct

SEQ ID NO: 78401 - DNA, 120 bp, Artificial Sequence
  ENSG00000080819_20 (sequence is synthesized)
taagagcaaatcacaacaggattcttaatgtatgatttctttgttcatatattatgaatgtattattttatttgcttcgtaataaagtttataaggaagagcatctcatacatatcatta

SEQ ID NO: 78402 - DNA, 120 bp, Artificial Sequence
  ENSG00000080819_21 (sequence is synthesized)
tcgtggaacacgttgaatgtttgtgattctgtgtggcctttttggggctggaaaatgtatgaattcttcaactgtcttacaagagatctgctaataaattttattattaaataagactaa

SEQ ID NO: 78403 - DNA, 120 bp, Artificial Sequence
  ENSG00000080819_22 (sequence is synthesized)
aggataagcattttctaccttggtgatatctgcaaaaaatctatctgtctaaagtcctcatttcattttcatagttggacagcaagtaaggacaccatcctgacattagttgaggatagt

SEQ ID NO: 78404 - DNA, 120 bp, Artificial Sequence
  ENSG00000080819_23 (sequence is synthesized)
gctgatggtaagggtctcaggagctacggaaagtactgtcgtgcaaaatgtgcattttaaaacagataagagggcataacatctaaaagcgagaaagaatagtcttaattaggtctttca

SEQ ID NO: 78405 - DNA, 120 bp, Artificial Sequence
  ENSG00000080819_24 (sequence is synthesized)
tactttgaagtagaagaagctgatgccattcagcttggttcaaccttttatgtttaaagttggtaactggtattgacaactcatggacctgtgagcacatgaaacagttattctcaagtg

SEQ ID NO: 78406 - DNA, 120 bp, Artificial Sequence
  ENSG00000080822_0 (sequence is synthesized)
agggtgctgtggtctgagctagagggtgaagctggcggagcaggaggatgggcgagcagtctgaatgccagaatggataaccgttttgctacagcatttgtaattgcttgtgtgcttagc

SEQ ID NO: 78407 - DNA, 120 bp, Artificial Sequence
  ENSG00000080822_1 (sequence is synthesized)
ctcatttccaccatctacatggcagcctccattggcacagacttctggtatgaatatcgaagtccagttcaagaaaattccagtgatttgaataaaagcatctgggatgaattcattagt

SEQ ID NO: 78408 - DNA, 120 bp, Artificial Sequence
  ENSG00000080822_2 (sequence is synthesized)
gatgaggcagatgaaaagacttataatgatgcactttttcgatacaatggcacagtgggattgtggagacggtgtatcaccatacccaaaaacatgcattggtatagcccaccagaaagg

SEQ ID NO: 78409 - DNA, 120 bp, Artificial Sequence
  ENSG00000080822_3 (sequence is synthesized)
acagagtcatttgatgtggtcacaaaatgtgtgagtttcacactaactgagcagttcatggagaaatttgttgatcccggaaaccacaatagcgggattgatctccttaggacctatctt

SEQ ID NO: 78410 - DNA, 120 bp, Artificial Sequence
  ENSG00000080822_4 (sequence is synthesized)
tggcgttgccagttccttttaccttttgtgagtttaggtttgatgtgctttggggctttgatcggactttgtgcttgcatttgccgaagcttatatcccaccattgccacgggcattctc

SEQ ID NO: 78411 - DNA, 120 bp, Artificial Sequence
  ENSG00000080822_5 (sequence is synthesized)
catctccttgcaggtctgtgtacactgggctcagtaagttgttatgttgctggaattgaactactccaccagaaactagagctccctgacaatgtatccggtgaatttggatggtccttc

SEQ ID NO: 78412 - DNA, 120 bp, Artificial Sequence
  ENSG00000080822_6 (sequence is synthesized)
tgcctggcttgtgtctctgctcccttacagttcatggcttctgctctcttcatctgggctgctcacaccaaccggaaagagtacaccttaatgaaggcatatcgtgtggcatgagcaaga

SEQ ID NO: 78413 - DNA, 120 bp, Artificial Sequence
  ENSG00000080822_7 (sequence is synthesized)
aactgcctgctttacaattgccatttttatttttttaaaataatactgatattttccccacctctcaattgtttttaatttttatttgtggatataccattttattatgaaaatctattt

SEQ ID NO: 78414 - DNA, 120 bp, Artificial Sequence
  ENSG00000080822_8 (sequence is synthesized)
atctaggtctagacagaaagaaatggatagagacttgacacaaatttatgaaagaaaattgggagtaggaatgtgaccgaaaacaagttgtgctaatgtctgttagacttttcagtaaaa

SEQ ID NO: 78415 - DNA, 120 bp, Artificial Sequence
  ENSG00000080822_9 (sequence is synthesized)
ctaaagtaactgtatctgttcaactaaaaactctatattagtttctttgggaaacctctcatcgtcaaaactttatgttcactttgctgttgtagatagccagtcaaccagcagtattag

SEQ ID NO: 78416 - DNA, 120 bp, Artificial Sequence
  ENSG00000080822_10 (sequence is synthesized)
tgctgttttcaaagatttaagctctataaaattgggaaattatctaagatcattttccctaagcattgacacatagcttcatctgaggtgagatatggcagctgtttgtatctgcactgt

SEQ ID NO: 78417 - DNA, 120 bp, Artificial Sequence
  ENSG00000080822_11 (sequence is synthesized)
gtctgtctacaaaaagtgaaaaatacagtgtttacttgaaattttaactttgtaactgcaagaattccagttcagccgggcgaggattagtattatttttaactctccgtaagattttca

SEQ ID NO: 78418 - DNA, 120 bp, Artificial Sequence
  ENSG00000080822_12 (sequence is synthesized)
gtaccaccaaattgttttggattttttttctttcctcttcacataccagggttattaaaagtgtgctttctttttacattatattacagttacaaggtaaaattcctcaactgctattta

SEQ ID NO: 78419 - DNA, 120 bp, Artificial Sequence
  ENSG00000080822_13 (sequence is synthesized)
tttattccagcccagtactataaagaacgtttcaccataatgaccctccagagctgggaaacctaccacaagatctaaagttctggctgtccattaacctccaactatggtctttatttc

SEQ ID NO: 78420 - DNA, 120 bp, Artificial Sequence
  ENSG00000080822_14 (sequence is synthesized)
ttgtggtaatatgatgtgcctttccttgcctaaatcccttcctggtgtgtatcaacattatttaatgtcttctaattcagtcatttttttataagtatgtctataaacattgaactttaa

SEQ ID NO: 78421 - DNA, 120 bp, Artificial Sequence
  ENSG00000080822_15 (sequence is synthesized)
aaaacttatttatttattccactactgtagcaattgacagattaaaaaaatgtaacttcataatttcttaccataacctcaatgtcttttttaaaaaataaaattaaaaatgaaaagaga

SEQ ID NO: 78422 - DNA, 120 bp, Artificial Sequence
  ENSG00000080822_16 (sequence is synthesized)
tatcgccgcctcagacagctttcagtctgtccctcctacaactcccacaaggcccctcggccccgggccgcggcccggcccggagtgggggcgggcggaggcgcgggagttatggagggg

SEQ ID NO: 78423 - DNA, 120 bp, Artificial Sequence
  ENSG00000080822_17 (sequence is synthesized)
gcgggctctgcagggaagtgcgtcagaggaggcgcggggagagtagggtgctgtggtctgagctagagggtgaagctggcggagcaggaggatgggcgtatgcaggtgatagactagaga

SEQ ID NO: 78424 - DNA, 120 bp, Artificial Sequence
  ENSG00000080822_18 (sequence is synthesized)
gagcaggaggatgggcgtgttgtctgttttagtatgcaggtgatagactagagaacaagacctctgtctccgtagcatcctggagcagtctgaatgccagaatggataaccgttttgcta

SEQ ID NO: 78425 - DNA, 120 bp, Artificial Sequence
  ENSG00000080822_19 (sequence is synthesized)
gggatttttaaaaaatcaaaatacaaatccaactttttgagttttcgttgtcattgctcttatctttcctgagtcacttcccattttccaaactcagcaaccccagtttgcgagtctgtt

SEQ ID NO: 78426 - DNA, 120 bp, Artificial Sequence
  ENSG00000080822_20 (sequence is synthesized)
ttcatgaacctttgtaaggtgtttggtgcggtcacggtgtatacttgccgtgtagtatttgactcagcgcgatctgccttgagtcattttaccgcggccatttactactgccgttgagcc

SEQ ID NO: 78427 - DNA, 120 bp, Artificial Sequence
  ENSG00000080822_21 (sequence is synthesized)
ctgtccacgccttgggagtgttgatatgttgagagttttctgtctggctgaggagggatcatttagtttttgcggacgtatgttgcactgaggatttagggagagagcaagatttctgtt

SEQ ID NO: 78428 - DNA, 120 bp, Artificial Sequence
  ENSG00000080822_22 (sequence is synthesized)
gaggaggttcagaagtataaggaatcgggagagtagataggagtgaagcatttggcagcgtaaagaagcttggcttagctttaatggattagggagagattgctatctagcattattaca

SEQ ID NO: 78429 - DNA, 120 bp, Artificial Sequence
  ENSG00000080822_23 (sequence is synthesized)
tgttattgttctctttgctattttatacacctagaacaacctttccctcggggttaacaaacatcttcaactctgttttctgtatggctcctgactcttacctttgttttaggaggcttc

SEQ ID NO: 78430 - DNA, 120 bp, Artificial Sequence
  ENSG00000080822_24 (sequence is synthesized)
cctcttcagaggaaactgggagaagccaatttccactgcttctttttcctgtgcctttttaacactcaaacccagaacacttaatcctctgcagctcgtgcaaaaattcagtctgtaatt

SEQ ID NO: 78431 - DNA, 120 bp, Artificial Sequence
  ENSG00000080822_25 (sequence is synthesized)
cgggttccgagcggcggatttgtcccagggccgagccctctagggcggggcctggtcgggtaccgggggaccctggcccggggccgagcacggctgccccgccccagccctggccttctc

SEQ ID NO: 78432 - DNA, 120 bp, Artificial Sequence
  ENSG00000080822_26 (sequence is synthesized)
gccttctccggccccgccgtgaggcccaggaggtggctgctgcaggcgtccggcttggacgaaccgccgttcccagtgctgggaccctttaagagcagtctgaatgccagaatggataac

SEQ ID NO: 78433 - DNA, 120 bp, Artificial Sequence
  ENSG00000080822_27 (sequence is synthesized)
agttccttttaccttttgtctgtgtacactgggctcagtaagttgttatgttgctggaattgaactactccaccagaaactagagctccctgacaatgtatccggtgaatttggatggtc

SEQ ID NO: 78434 - DNA, 120 bp, Artificial Sequence
  ENSG00000080822_28 (sequence is synthesized)
cttttgaataatgtgctttagaaaagaggcctcaatgttaaaatactttcacactttttgagaaaagatctaattagaatatgaaagaaattgccattgcggggaaaatggtctgaaatc

SEQ ID NO: 78435 - DNA, 120 bp, Artificial Sequence
  ENSG00000080822_29 (sequence is synthesized)
gaggtggctgctgcaggcgtccggcttggacgaaccgccgttcccagtgctgggaccctttaagtatgcaggtgatagactagagaacaagacctctgtctccgtagcatcctggtctga

SEQ ID NO: 78436 - DNA, 120 bp, Artificial Sequence
  ENSG00000080822_30 (sequence is synthesized)
catggaatgcagatttccagctatgaaggcgcctgtggtcatctgaatgcagagtttcttggacatcatgatgtggtactgcagtgggttgcagatggccacatagcggtcataggccac

SEQ ID NO: 78437 - DNA, 120 bp, Artificial Sequence
  ENSG00000080822_31 (sequence is synthesized)
tgctgccagaagaaagcagtctgcagtttccacagtgcaaagaaaataaaactgtactgcacattcatagagggaaatccttttgccctcagaaaagaagttctctaacattttgggggt

SEQ ID NO: 78438 - DNA, 120 bp, Artificial Sequence
  ENSG00000080822_32 (sequence is synthesized)
agcccaagtaggagaagaggaaagaggttgtagggatttgggaagaaccttgattattccctggaggaaaagacaaatctacttccctgaaatcaccctcgaatctacttccaccctcag

SEQ ID NO: 78439 - DNA, 120 bp, Artificial Sequence
  ENSG00000080822_33 (sequence is synthesized)
aacttaaaatgaactgcatcctttttttcatcttcttttcttctccagtgaatatgatctccaaacccttattttttctttgaactgtaaaatttccactcatggacgatgcaaccaaca

SEQ ID NO: 78440 - DNA, 120 bp, Artificial Sequence
  ENSG00000080822_34 (sequence is synthesized)
gatgcaatctctgagaagatgaaaattgggacctcttattataaaattgacctagctggactcaggaaaccagggaagaagtcaatgcaggcatttaaaatgtaaagttttttctggtta

SEQ ID NO: 78441 - DNA, 120 bp, Artificial Sequence
  ENSG00000080822_35 (sequence is synthesized)
aatctatttatttttcttgtaggttgagtatttcttcccagtttttctgctctggtgtataacaaacaggtcaaaatttcccatctttcctcctgatagtagttgaatcctaccttgcat

SEQ ID NO: 78442 - DNA, 120 bp, Artificial Sequence
  ENSG00000080822_36 (sequence is synthesized)
acttaatgcatagtgaaatggcatctagcagaaatacacacccccaaaacacaccaccatttcattaggtgcccaaaaaattctgtatttagcttatttatttattgttatttttgcttt

SEQ ID NO: 78443 - DNA, 120 bp, Artificial Sequence
  ENSG00000080822_37 (sequence is synthesized)
ggggaacaaagataattttatttgtctctttttggactatgtttttggaataagatgagttagtagattgtgccaacgtgaaataaaatctctaacagtatccagtgaactctattctgt

SEQ ID NO: 78444 - DNA, 120 bp, Artificial Sequence
  ENSG00000080822_38 (sequence is synthesized)
tctccttgcaggtaggttttgtcatcatacttaccttttagcttcttcctgtctctttagggaccaaagagttataaatctgaaatgttcacgtattaactgccctgtcacattgcctga

SEQ ID NO: 78445 - DNA, 120 bp, Artificial Sequence
  ENSG00000080822_39 (sequence is synthesized)
aaagctctttactgtgcttttatccagccatgttttgttttgttttctaaattttcccccaaggtctgtgtacactgggctcagtaagttgttatgttgctggaattgaactactccacc

SEQ ID NO: 78446 - DNA, 120 bp, Artificial Sequence
  ENSG00000080822_40 (sequence is synthesized)
ggaggtggctgctgcaggcgtccggcttggacgaaccgccgttcccagtgctgggaccctttaaggtgatagactagagaacaagacctctgtctccgtagcatcctggtctgaatgcca

SEQ ID NO: 78447 - DNA, 120 bp, Artificial Sequence
  ENSG00000080822_41 (sequence is synthesized)
cgacgtaatgattgcccaattacatgtaagcaggtttgttggttctctctctccttaaagaaataaatcgtgtatcttctctttctactgccttctctccccaacttctttgcattacca

SEQ ID NO: 78448 - DNA, 120 bp, Artificial Sequence
  ENSG00000080822_42 (sequence is synthesized)
tggtactcatcaatattggttggatgaggaacttttcttatcttgggaaagccttaatggcttttttttttcttatttactcactcattaaaatacttttcattactctaacacatgtta

SEQ ID NO: 78449 - DNA, 120 bp, Artificial Sequence
  ENSG00000080822_43 (sequence is synthesized)
taaagaaatagttggaaaagtacatcgaaagacttttaaaaatatttggtaactagtaaaaggactaccatcgaaaatcaactcaaaaaattgtccttttatgggttagctgtattataa

SEQ ID NO: 78450 - DNA, 120 bp, Artificial Sequence
  ENSG00000080823_0 (sequence is synthesized)
agggcctgacggttgctagggtgacagggacacaacatggcggcgggatctctaacgctctccttcgagggaccaccacggagatcctagtgcgggaccccgcctcagggaagtggaaag

SEQ ID NO: 78451 - DNA, 120 bp, Artificial Sequence
  ENSG00000080823_1 (sequence is synthesized)
cagggggacaaccttcctgcttctttcttttccgtccagtgtcggcaaggggttgtcaccggcttccgcatccaagatgaagaactataaagcaattggcaaaataggagagggaacgtt

SEQ ID NO: 78452 - DNA, 120 bp, Artificial Sequence
  ENSG00000080823_2 (sequence is synthesized)
ttctgaagttatgaagatgcaaagcctgagagatggaaactactatgcatgtaaacaaatgaagcagcgctttgaaagtattgagcaagtcaacaacctacgagagatccaagcactgag

SEQ ID NO: 78453 - DNA, 120 bp, Artificial Sequence
  ENSG00000080823_3 (sequence is synthesized)
gcgcctgaatccgcacccaaacattcttatgttgcatgaagtggtttttgacagaaaatctggttctcttgcactaatatgtgaacttatggacatgaatatttatgagctaatacgagg

SEQ ID NO: 78454 - DNA, 120 bp, Artificial Sequence
  ENSG00000080823_4 (sequence is synthesized)
gagaagatacccattatcagaaaaaaaaattatgcactatatgtaccagttatgtaagtccctggatcatattcacagaaatggaatatttcacagagatgtaaaaccagaaaatatact

SEQ ID NO: 78455 - DNA, 120 bp, Artificial Sequence
  ENSG00000080823_5 (sequence is synthesized)
aataaagcaggatgtcctgaaattaggggactttggctcctgccggagtgtctattccaagcagccgtacacggaatacatctccacccgctggtaccgggccccggagtgtctcctcac

SEQ ID NO: 78456 - DNA, 120 bp, Artificial Sequence
  ENSG00000080823_6 (sequence is synthesized)
tgatgggttctacacgtacaagatggacctgtggagcgccggctgtgtgttctacgagatcgccagtctgcagcccctctttcctggagtaaatgaactggaccaaatctcaaaaatcca

SEQ ID NO: 78457 - DNA, 120 bp, Artificial Sequence
  ENSG00000080823_7 (sequence is synthesized)
accaatttgtccccacaatgcctctccctcctgcacgcaatggtggcctatgatcccgatgagagaatcgccgcccaccaggccctgcagcacccctacttccaagaacagaggaaaaca

SEQ ID NO: 78458 - DNA, 120 bp, Artificial Sequence
  ENSG00000080823_8 (sequence is synthesized)
gagaagcgggctctgggcagccacagaaaagctggctttccggagcaccctgtggcaccggaaccactcagtaacagctgccagatttccaaggagggcagaaagcagaaacagtcccta

SEQ ID NO: 78459 - DNA, 120 bp, Artificial Sequence
  ENSG00000080823_9 (sequence is synthesized)
aagcaagaggaggaccgtcccaagagacgaggaccggcctatgtcatggaactgcccaaactaaagctttcgggagtggtcagactgtcgtcttactccagccccacgctgcagtccgtg

SEQ ID NO: 78460 - DNA, 120 bp, Artificial Sequence
  ENSG00000080823_10 (sequence is synthesized)
cttggatctggaacaaatggaagagtgccggtgctgagacccttgaagtgcatccctgcgagcaagaagacagatccgcagaaggaccttaagcctgccccgcagcagtgtcgcctgccc

SEQ ID NO: 78461 - DNA, 120 bp, Artificial Sequence
  ENSG00000080823_11 (sequence is synthesized)
accatagtgcggaaaggcggaagataactgagcagcaccgtcgtctcgacttcggaggcaacaccaagcccgaccgggccaggcctgggtgatctgctgctgagacgccacggagggctg

SEQ ID NO: 78462 - DNA, 120 bp, Artificial Sequence
  ENSG00000080823_12 (sequence is synthesized)
gggatgcgcctgcgtccgtttcgcgctggccggggctctgggtgctgccctgcgccctgccgcacccgcggcccgcgcagctgcctaggatgttctgggctaatatacttgtaaaaccac

SEQ ID NO: 78463 - DNA, 120 bp, Artificial Sequence
  ENSG00000080823_13 (sequence is synthesized)
cgcattctagggttttctttcattttcgttaagaatttggggcaggaaatactttgtaactttgtatatgaatcaaaacaaacgagcaggcatttctgtgatgtgttgggcgtggttgga

SEQ ID NO: 78464 - DNA, 120 bp, Artificial Sequence
  ENSG00000080823_14 (sequence is synthesized)
aggtgggttctgcgtgtcccttcccagcgctgctggtcagtcgtggagcgccatcatgtcttaccagtgacgctgctgacacccctgacttttattaaagaataagctgtcgttacagta

SEQ ID NO: 78465 - DNA, 120 bp, Artificial Sequence
  ENSG00000080823_15 (sequence is synthesized)
aagttcaaacagtaagtattgtgttctgagagtggatgtggacccactcccctgctaggacctgcagcagggcaagcccctccctgtgcctccctcaaacccctctcaggagctcctttg

SEQ ID NO: 78466 - DNA, 120 bp, Artificial Sequence
  ENSG00000080823_16 (sequence is synthesized)
gctgactacaggggttcaagttcacttgagggccagtgagtggctgctcagacagagcccatcactttaagtggtctcaaaggtgagctcttccttgagcatcacagaaagatttgtcac

SEQ ID NO: 78467 - DNA, 120 bp, Artificial Sequence
  ENSG00000080823_17 (sequence is synthesized)
aggctttctgagggctggggagtcaggctgtgttccctgagtaatttaaacaggacttagaagcctttgggtggaaacgttccccaagcacagagcataggtggtgagggctttctgcag

SEQ ID NO: 78468 - DNA, 120 bp, Artificial Sequence
  ENSG00000080823_18 (sequence is synthesized)
ccctccacagccctgctggcgggaccgacgcctggaagaggtgttcccggactcttagggtcattctggtgaagctgaggctgggagttgggacttcccagggagggcctgtgggctgag

SEQ ID NO: 78469 - DNA, 120 bp, Artificial Sequence
  ENSG00000080823_19 (sequence is synthesized)
gggcaagtagcacccagcggcccccacatcccagggagggagaaggtggcaaccattttggactcttctttttttgttaaattttatttcattcttctcatgtgggaaggtgatattaat

SEQ ID NO: 78470 - DNA, 120 bp, Artificial Sequence
  ENSG00000080823_20 (sequence is synthesized)
taggtttccatagagccctgtccccatgtgcacacagcctcccctgtcgtcagcacctgcctcgagtggtgtgtttattatggtcgatgaaccgtggatatctcattactacacagagcc

SEQ ID NO: 78471 - DNA, 120 bp, Artificial Sequence
  ENSG00000080823_21 (sequence is synthesized)
catcatttacatcaggggtccctcttggtggtgcacgttctgtgggctgggacaggtgtagactctgcagtcataaaccattccccaccacacagggcccttagttgtgacagtggacca

SEQ ID NO: 78472 - DNA, 120 bp, Artificial Sequence
  ENSG00000080823_22 (sequence is synthesized)
taataaatgccatcaacataactgactgcacctggaagaaaataattgaaagcaccattttcacaccgcagacaaaaatgaaccctattcagacggccgttcaaaccttctagagggaaa

SEQ ID NO: 78473 - DNA, 120 bp, Artificial Sequence
  ENSG00000080823_23 (sequence is synthesized)
tgacagctctgaaattaataaaatgtgttaacattcagattcaagaatttgaataaatgaagtgtaattctatttttcctttatactgaatgcagaaatggaatatttcacagagatgta

SEQ ID NO: 78474 - DNA, 120 bp, Artificial Sequence
  ENSG00000080823_24 (sequence is synthesized)
aaaccagaaaatatactaataaaggtaagagcttttacatgaaagctgggtatcagaataaaagctgaatagaaaatctttcccgaaaggttttctcctcctaccagaggaactttcagt

SEQ ID NO: 78475 - DNA, 120 bp, Artificial Sequence
  ENSG00000080823_25 (sequence is synthesized)
agacccatgggcacatggtggggcaaggtactgccccctggagggtccctggttcttgggaatcgcgctctctatcctgaagagtggtcagggcctcttggggcccacaccgtgctgcct

SEQ ID NO: 78476 - DNA, 120 bp, Artificial Sequence
  ENSG00000080823_26 (sequence is synthesized)
tctggtgtatcctccccaaaatgaggatgttagcagctccacggcaggagaaagaggggctggctgtccactttgcggttgatgccaaggctacaggtagtaatccttctagaagagcct

SEQ ID NO: 78477 - DNA, 120 bp, Artificial Sequence
  ENSG00000080823_27 (sequence is synthesized)
ggtgtgcggcccttgtaaatggtgtgaacaggatgcattctgagatggtagagcactgtggatgtcacctggcgctggaagtacctgctgaatgtgaatctaagacctgtctgccctgag

SEQ ID NO: 78478 - DNA, 120 bp, Artificial Sequence
  ENSG00000080823_28 (sequence is synthesized)
gtcacctaattccggacctctggacactcctgtttgcctaactgtggaggtgacagtttgatctgaaactgcgagtccctgggtaggcagcgcttctgattcatggagccagctctgttc

SEQ ID NO: 78479 - DNA, 120 bp, Artificial Sequence
  ENSG00000080823_29 (sequence is synthesized)
ctggcccagagactgtcaggctgagacagaaaagaaaaaaaaaggctcctgattacagctcaggcagaaaagaagagctagtgacaactcacacagtagacaaattggagacaaagaagc

SEQ ID NO: 78480 - DNA, 120 bp, Artificial Sequence
  ENSG00000080823_30 (sequence is synthesized)
cagtaggccgtgtgctctgcgggctctcagtggagctgctccattctcttctccttccccgtaggaaaacagagaagcgggctctgggcagccacagaaaagctggctttccggagcacc

SEQ ID NO: 78481 - DNA, 120 bp, Artificial Sequence
  ENSG00000080823_31 (sequence is synthesized)
ctgtggcaccggaaccactcagtaacagctgccagatttccaaggagggcagaaagcaggtactaagcgaaatcggagccggagactgcctagctcagccgggactggatgccctcgggt

SEQ ID NO: 78482 - DNA, 120 bp, Artificial Sequence
  ENSG00000080823_32 (sequence is synthesized)
ggcctgtgtctctctcaggaggacgccacctgtggaggctgtggcagaccacattgtcagtcgaggcctgaacagcatgcgagttgatggctccatgtgttgggacatcagggaccccag

SEQ ID NO: 78483 - DNA, 120 bp, Artificial Sequence
  ENSG00000080823_33 (sequence is synthesized)
ttctatttgctcaagccctttctgccccagtagctaagaattgatgacgaatatcccatgtgagcaggcccagagaggggatgtttgcatgaacttttgtgtctgtcctgatgaccatat

SEQ ID NO: 78484 - DNA, 120 bp, Artificial Sequence
  ENSG00000080823_34 (sequence is synthesized)
gcaggtgccaggttctatgccaaagcaccgtgcagacatcgcccctcagaacggccctggagggaggcgccaagaagatgcaatgctggcccaagtcacccacccagccagtgacaggtc

SEQ ID NO: 78485 - DNA, 120 bp, Artificial Sequence
  ENSG00000080823_35 (sequence is synthesized)
tcaagtcactgtctctgcctggctccagatgagcacttcgtcccatcagcagaggttgtgcacattttcggttgagaaatgccagctttgcccctcagtgccttcaccttcccacctacc

SEQ ID NO: 78486 - DNA, 120 bp, Artificial Sequence
  ENSG00000080823_36 (sequence is synthesized)
gtgtggcatcctagcctggtgcagccctgtgtcacctgctggcagggtcacaccagtctcccagttctgggctggcaccccaacagtgtgacagtgtgcccttccatcattcgtctgttc

SEQ ID NO: 78487 - DNA, 120 bp, Artificial Sequence
  ENSG00000080823_37 (sequence is synthesized)
ggtcgtccgtacgtcactcgctcctcccagcctttaccgagtgctccctgaccgcttgggagctgggaacccagagctgcagtcaggctgctctccagaaagccaggctcctgtgtccca

SEQ ID NO: 78488 - DNA, 120 bp, Artificial Sequence
  ENSG00000080823_38 (sequence is synthesized)
tccctgtggcttcccatggccttccctccgagggaggcaactccgtcaactgcccaggccccccgtggacccttccttcatcccacaggggcttcgccttcttgcctcctacatcctcct

SEQ ID NO: 78489 - DNA, 120 bp, Artificial Sequence
  ENSG00000080823_39 (sequence is synthesized)
caccttgcctaagtcaccacagatggcctcctcactactgtccctgctctgcctccgctccctcctggacagagggtctgcttcaaacccttgatgtcactcctggccggcattcaccca

SEQ ID NO: 78490 - DNA, 120 bp, Artificial Sequence
  ENSG00000080823_40 (sequence is synthesized)
agtccccaccctcagtcacatccgaggtcggcatatttttctctaagggtctgataggaaatattttaggccccgtggccgtggggtgttcgttacactccctgctttgctgcagtgtga

SEQ ID NO: 78491 - DNA, 120 bp, Artificial Sequence
  ENSG00000080823_41 (sequence is synthesized)
aaggagctggaggcaacacatgaaccacataggggctgcgttccagtagaactggggacactaaaatttgaatttcacataattttcacatgccatgaaacatttttttttcagtcatta

SEQ ID NO: 78492 - DNA, 120 bp, Artificial Sequence
  ENSG00000080823_42 (sequence is synthesized)
ccatgaaacatttttttttcagtcattaaaaataaaaaccaggtgggtgcggtggctcacacctgtaaacccagtgcttagggaggccagggtaggatcacttgaggccaggagtttgag

SEQ ID NO: 78493 - DNA, 89 bp, Artificial Sequence
  ENSG00000080823_43 (sequence is synthesized)
gcaagaccactgccccaccaccccatctgttttaaaaattagctgggtgtggtgcgtgcctttggtcccagctacttgggaggctgagg

SEQ ID NO: 78494 - DNA, 90 bp, Artificial Sequence
  ENSG00000080823_44 (sequence is synthesized)
gcaacaaacaccgcccaaatgtaaaaccatccttagctcacaagccacccaaaaccaggcgacaggcagatcagggtgtgagaccttgga

SEQ ID NO: 78495 - DNA, 120 bp, Artificial Sequence
  ENSG00000080823_45 (sequence is synthesized)
aaaaccaggcgacaggcagatcagggtgtgagaccttggagctagagcaggaggcaggaggcgtgggcaccacagcccgcgagccctttgccgcccgcactgctcagcttgcagtcggca

SEQ ID NO: 78496 - DNA, 120 bp, Artificial Sequence
  ENSG00000080823_46 (sequence is synthesized)
ttcttcaggttccccctgaaggtttggcctcccccgtgggactctagtgggcagccactcccttggggtgtctgggacctggtggatgtgtcccagtcacatcttatggtcaagaaattg

SEQ ID NO: 78497 - DNA, 120 bp, Artificial Sequence
  ENSG00000080823_47 (sequence is synthesized)
atggccccgtgatccagagtccctgctggcgccttcgagtggggcaggctgagaactcaagctgtaactaatgtctcctccgaagaaaactaaaccgagggctgagctgatgtgaagttt

SEQ ID NO: 78498 - DNA, 120 bp, Artificial Sequence
  ENSG00000080823_48 (sequence is synthesized)
ctgtaagggtaacgattaggcagacggctaaagtgagggagacttttggctggtattccaattggaaggagttacactatataatcccactgcaaacaataggtctgcagcccctctttc

SEQ ID NO: 78499 - DNA, 120 bp, Artificial Sequence
  ENSG00000080823_49 (sequence is synthesized)
ctggagtaaatgaactggaccaaatctcaaaaatccacgatgtcatcggcacacccgctcagaagatcctcaccaagttcaaacagtcgagagctatgaattttgattttccttttaaaa

SEQ ID NO: 78500 - DNA, 120 bp, Artificial Sequence
  ENSG00000080823_50 (sequence is synthesized)
agtgcatccctgcgagcaagaaggtagcgcggaaccagcttctctgacggcgctgctcttcgacccagcccaggccgccactgaattttgtgtctgtaatttttctttgacagacagatc

SEQ ID NO: 78501 - DNA, 120 bp, Artificial Sequence
  ENSG00000080823_51 (sequence is synthesized)
cagccgtcctcctccccattcaaacacgttcatccctcaaccctctgctgagcacctgcatgctgcccggccgcagtgtcacccttcttgtgtgagcctaccctcatccacccacctcac

SEQ ID NO: 78502 - DNA, 120 bp, Artificial Sequence
  ENSG00000080823_52 (sequence is synthesized)
cctcctgaccttaaagaagacaccgggcagaagcacaggggagcccagtcacaccccacactggcgggggcaggccttgcagggagaagcagtaagcagccatctccatcagccatttcc

SEQ ID NO: 78503 - DNA, 120 bp, Artificial Sequence
  ENSG00000080823_53 (sequence is synthesized)
gcagtttgtatgtaatagtctcaacactgcatgcacgtcgtgcacttcccacgcactttacaaagtactctgtccagaatctcacatggacctcggaacaaccgagacctcttccagcca

SEQ ID NO: 78504 - DNA, 120 bp, Artificial Sequence
  ENSG00000080823_54 (sequence is synthesized)
gattggaggcacccagagtagggtctgggatgatacaggctcttgctcaggactctgggaaccctttaagggcctgcttgaactcagaagttggtggctcagccagcagtctctgtccct

SEQ ID NO: 78505 - DNA, 120 bp, Artificial Sequence
  ENSG00000080823_55 (sequence is synthesized)
attctgtgtcagcgttgatatcacacacttgtgatgtgactcgtttttctctttttcccctgactggtttttggtttttactctcccattgtgatttatcccaattacatggaaggaatt

SEQ ID NO: 78506 - DNA, 83 bp, Artificial Sequence
  ENSG00000080823_56 (sequence is synthesized)
ctctcccattgtgatttatcccaattacatggaaggaatttagctaaattaaaattaaatttgcagtcatggagcacgaatta

SEQ ID NO: 78507 - DNA, 63 bp, Artificial Sequence
  ENSG00000080823_57 (sequence is synthesized)
ggccaggctggtctcaaactcctaacctgaagtgatcgaccatattgttttgcttacccaact

SEQ ID NO: 78508 - DNA, 120 bp, Artificial Sequence
  ENSG00000080823_58 (sequence is synthesized)
ttttattgttttgcttacccaactccccaacctttttcttctttctgctgataattaattatgtattttcaagacatatctgttttcaacttctagaattttgttcaaagttgggttttg

SEQ ID NO: 78509 - DNA, 120 bp, Artificial Sequence
  ENSG00000080823_59 (sequence is synthesized)
ctagtatttttagttaattttatctgaaatactgatttaaaatcaaaacctttactgtttcagcaattacactgtagtatttgatgtgggagtacctaatgtttactagaaatgtttaca

SEQ ID NO: 78510 - DNA, 120 bp, Artificial Sequence
  ENSG00000080823_60 (sequence is synthesized)
aatgaattaaatattggattatattttctgattaaggccagaaaatttattttaaaaacttgctttcttcttcagtgacagaaaatctggttctcttgcactaatatgtgaacttatgga

SEQ ID NO: 78511 - DNA, 120 bp, Artificial Sequence
  ENSG00000080823_61 (sequence is synthesized)
acatggtttcccggtgatgaagcacatcctgggtctgccatctgccagattcctcacacaccaaaagtgcctggtccaccagaatcttggcttccttgtcatagtgcttgacgactaagc

SEQ ID NO: 78512 - DNA, 120 bp, Artificial Sequence
  ENSG00000080823_62 (sequence is synthesized)
ctgtgactggtgctggagttttgagtccacagataaaatgtgtctccttcgtctctactagagaggaaaaagaactggaattggaagaacagggagactgaagggtagcaagagaggctg

SEQ ID NO: 78513 - DNA, 120 bp, Artificial Sequence
  ENSG00000080823_63 (sequence is synthesized)
ctgcaagccacactctttccttttcttccggaaggagggtagaagacaaaataatatagagatcatgccaatctgcagcccctctttcctggagtaaatgaactggaccaaatctcaaaa

SEQ ID NO: 78514 - DNA, 120 bp, Artificial Sequence
  ENSG00000080823_64 (sequence is synthesized)
aatcatatgattacaggaggtctggcaggggcctgtgggttgatacgcccaggtacgctcttctcagggaactgcagcggcccctactggcctagtaggatcttgccgatggaggtcatc

SEQ ID NO: 78515 - DNA, 120 bp, Artificial Sequence
  ENSG00000080823_65 (sequence is synthesized)
gtgcggcttgaaggagttggtaaataagggggtggttagtgatagggtcactttggcagtaaggaatctcctctcttgccagatggtggcgtgggaatgaagaatgtgatatacatcttt

SEQ ID NO: 78516 - DNA, 120 bp, Artificial Sequence
  ENSG00000080823_66 (sequence is synthesized)
gacacacatgcatctagagtaaactggggcgtatctgacagcgttagtacagtgatggccaaatgcaaactgcattccagaaccagcgaagggtgacagactgggctgaggcagagctag

SEQ ID NO: 78517 - DNA, 120 bp, Artificial Sequence
  ENSG00000080823_67 (sequence is synthesized)
gactaaccatctcgagtgatgccatctcggggccaacaaaagttttggacacggctggatcatctgaccaaactgctcaaatctttacacaattattgtcctggtattaaactttcacct

SEQ ID NO: 78518 - DNA, 120 bp, Artificial Sequence
  ENSG00000080823_68 (sequence is synthesized)
ctggtattaaactttcacctgccacttccaacaaacaggagacagaataaggagatgaccaggaagatggctggattaagaattctagacttggccgggtgcggtggctcacacctgtaa

SEQ ID NO: 78519 - DNA, 120 bp, Artificial Sequence
  ENSG00000080823_69 (sequence is synthesized)
catacctcccctcaaaagcctgaaagtaaagacatgcccccaatttaatgtgatgaattagagaaataggtttcagacacttcatggtttaaagtctcacaaaataaagctttcgaagga

SEQ ID NO: 78520 - DNA, 120 bp, Artificial Sequence
  ENSG00000080823_70 (sequence is synthesized)
atgctgttccggtggaggattaggatgttgtcgaggaggggagaaatcggtgggatcaaagaaggagaagtcgtccgctggggctattgggatgaggggagcaggagtctgcagcccctc

SEQ ID NO: 78521 - DNA, 120 bp, Artificial Sequence
  ENSG00000080823_71 (sequence is synthesized)
aatgttaggaaagtgtggctgcaggtgatctaggacgtcagtgcaagaatgagtaggaagggaagaagatacagggagagggtagaagacaaaataatatagagatcatgccaatgcccc

SEQ ID NO: 78522 - DNA, 120 bp, Artificial Sequence
  ENSG00000080823_72 (sequence is synthesized)
agcgctttgaaaggtaggctacagagatgcacttgggaccaaacacagatccaagtttcagtcaataacggcaacttaatattaggggggagctttattaatttaataatatgtaagata

SEQ ID NO: 78523 - DNA, 120 bp, Artificial Sequence
  ENSG00000080823_73 (sequence is synthesized)
caatcagatttctttgggcagtgagggttatatgctaatgttatgtttatcatactggagtttactcatatccaggcttactgtaatatcagtgatgaatgaccacaaaaaagtttaagt

SEQ ID NO: 78524 - DNA, 120 bp, Artificial Sequence
  ENSG00000080823_74 (sequence is synthesized)
ttcaaaagtgtgtctcaccttaaacagtctgtatgttcctaaaagttataaatgtgttggatttcttttttttttaattaaaaaaaacagcaaaaaaatgatatatcaaccaatggaaca

SEQ ID NO: 78525 - DNA, 120 bp, Artificial Sequence
  ENSG00000080823_75 (sequence is synthesized)
agaaaggaaaaattgacctaaagtcaggcaagcaagtttttattaacctgccaccggccgcttaacagtcagaggaagcagccccaagcttacagattgaggggtttatattggggaagg

SEQ ID NO: 78526 - DNA, 120 bp, Artificial Sequence
  ENSG00000080823_76 (sequence is synthesized)
gagtttgagggagttcttcggtatggtcacatcccggggttgtttgctggttaattttgccacatatcaccttgtgatgtttacggtagcagctagatgaacagcaggaacttacagaag

SEQ ID NO: 78527 - DNA, 120 bp, Artificial Sequence
  ENSG00000080823_77 (sequence is synthesized)
aactgggattggtaggggttggtctcctggagcaacattgatttttggagtgaggaaaaccagggtgcagtctgcagcccctctttcctggagtaaatgaactggaccaaatctcaaaaa

SEQ ID NO: 78528 - DNA, 120 bp, Artificial Sequence
  ENSG00000080823_78 (sequence is synthesized)
tgtccccacacctgcggtgcagccagcctgccacaaggcagctagagtccagctagacccacccctggcacggccgacctcttcctggcttcttctgggcctaatccccgtgcattctcc

SEQ ID NO: 78529 - DNA, 120 bp, Artificial Sequence
  ENSG00000080823_79 (sequence is synthesized)
agctagtctttccagggcacctgagtgagggcatgaccagccttgacgctgcctcgctaccatctgcccagggcctgctgaatgcttgagtccatggtgacagtggtgggaacagttacg

SEQ ID NO: 78530 - DNA, 120 bp, Artificial Sequence
  ENSG00000080823_80 (sequence is synthesized)
agaccagcctaggcaacataaggagaccccatctctacaaaatatcaaaaaattacccaggtatggtggcacacacgtgtgattccagctactcgggaggctgagatgggaggatcactt

SEQ ID NO: 78531 - DNA, 120 bp, Artificial Sequence
  ENSG00000080823_81 (sequence is synthesized)
ctactatgcatgtaaacaaatgaagcagcgctttgaaagactagggaattgaaattcggagagatcaagttccccacctggcccgttgctacccaacctacacgtcgtggagctgactct

SEQ ID NO: 78532 - DNA, 65 bp, Artificial Sequence
  ENSG00000080823_82 (sequence is synthesized)
gcccgttgctacccaacctacacgtcgtggagctgactctgagcccagtgacggggtttcactgg

SEQ ID NO: 78533 - DNA, 120 bp, Artificial Sequence
  ENSG00000080823_83 (sequence is synthesized)
tttatgcctctttaatgctgagcaacattcattacaatcttgacagaaaatctggttctcttgcactaatatgtgaacttatggacatgaatatttatgagctaatacgaggtacgtaga

SEQ ID NO: 78534 - DNA, 120 bp, Artificial Sequence
  ENSG00000080824_0 (sequence is synthesized)
gtgccgcggcaacggcgcatgcgtaggcgcgcggccgcggcggcggctggggagggttcttccggaaggttcgggaggcttctggaaaaagcgccgcgcgctgggcgggcccgtcgctat

SEQ ID NO: 78535 - DNA, 120 bp, Artificial Sequence
  ENSG00000080824_1 (sequence is synthesized)
ataaggcaggcgcgggggtggcgcgtcagttgcttcagcgtcccggtgtggctgtgccgttggtcctgtgcggtcacttagccaagatgcctgaggaaacccagacccaagaccaaccga

SEQ ID NO: 78536 - DNA, 120 bp, Artificial Sequence
  ENSG00000080824_2 (sequence is synthesized)
tggaggaggaggaggttgagacgttcgcctttcaggcagaaattgcccagttgatgtcattgatcatcaatactttctactcgaacaaagagatctttctgagagagctcatttcaaatt

SEQ ID NO: 78537 - DNA, 120 bp, Artificial Sequence
  ENSG00000080824_3 (sequence is synthesized)
catcagatgcattggacaaaatccggtatgaaagcttgacagatcccagtaaattagactctgggaaagagctgcatattaaccttataccgaacaaacaagatcgaactctcactattg

SEQ ID NO: 78538 - DNA, 120 bp, Artificial Sequence
  ENSG00000080824_4 (sequence is synthesized)
tggatactggaattggaatgaccaaggctgacttgatcaataaccttggtactatcgccaagtctgggaccaaagcgttcatggaagctttgcaggctggtgcagatatctctatgattg

SEQ ID NO: 78539 - DNA, 120 bp, Artificial Sequence
  ENSG00000080824_5 (sequence is synthesized)
gccagttcggtgttggtttttattctgcttatttggttgctgagaaagtaactgtgatcaccaaacataacgatgatgagcagtacgcttgggagtcctcagcagggggatcattcacag

SEQ ID NO: 78540 - DNA, 120 bp, Artificial Sequence
  ENSG00000080824_6 (sequence is synthesized)
tgaggacagacacaggtgaacctatgggtcgtggaacaaaagttatcctacacctgaaagaagaccaaactgagtacttggaggaacgaagaataaaggagattgtgaagaaacattctc

SEQ ID NO: 78541 - DNA, 120 bp, Artificial Sequence
  ENSG00000080824_7 (sequence is synthesized)
agtttattggatatcccattactctttttgtggagaaggaacgtgataaagaagtaagcgatgatgaggctgaagaaaaggaagacaaagaagaagaaaaagaaaaagaagagaaagagt

SEQ ID NO: 78542 - DNA, 120 bp, Artificial Sequence
  ENSG00000080824_8 (sequence is synthesized)
cggaagacaaacctgaaattgaagatgttggttctgatgaggaagaagaaaagaaggatggtgacaagaagaagaagaagaagattaaggaaaagtacatcgatcaagaagagctcaaca

SEQ ID NO: 78543 - DNA, 120 bp, Artificial Sequence
  ENSG00000080824_9 (sequence is synthesized)
aaacaaagcccatctggaccagaaatcccgacgatattactaatgaggagtacggagaattctataagagcttgaccaatgactgggaagatcacttggcagtgaagcatttttcagttg

SEQ ID NO: 78544 - DNA, 120 bp, Artificial Sequence
  ENSG00000080824_10 (sequence is synthesized)
aaggacagttggaattcagagcccttctatttgtcccacgacgtgctccttttgatctgtttgaaaacagaaagaaaaagaacaacatcaaattgtatgtacgcagagttttcatcatgg

SEQ ID NO: 78545 - DNA, 120 bp, Artificial Sequence
  ENSG00000080824_11 (sequence is synthesized)
ataactgtgaggagctaatccctgaatatctgaacttcattagaggggtggtagactcggaggatctccctctaaacatatcccgtgagatgttgcaacaaagcaaaattttgaaagtta

SEQ ID NO: 78546 - DNA, 120 bp, Artificial Sequence
  ENSG00000080824_12 (sequence is synthesized)
tcaggaagaatttggtcaaaaaatgcttagaactctttactgaactggcggaagataaagagaactacaagaaattctatgagcagttctctaaaaacataaagcttggaatacacgaag

SEQ ID NO: 78547 - DNA, 120 bp, Artificial Sequence
  ENSG00000080824_13 (sequence is synthesized)
actctcaaaatcggaagaagctttcagagctgttaaggtactacacatctgcctctggtgatgagatggtttctctcaaggactactgcaccagaatgaaggagaaccagaaacatatct

SEQ ID NO: 78548 - DNA, 120 bp, Artificial Sequence
  ENSG00000080824_14 (sequence is synthesized)
caaggaccaggtagctaactcagcctttgtggaacgtcttcggaaacatggcttagaagtgatctatatgattgagcccattgatgagtactgtgtccaacagctgaaggaatttgaggg

SEQ ID NO: 78549 - DNA, 120 bp, Artificial Sequence
  ENSG00000080824_15 (sequence is synthesized)
gaagactttagtgtcagtcaccaaagaaggcctggaacttccagaggatgaagaagagaaaaagaagcaggaagagaaaaaaacaaagtttgagaacctctgcaaaatcatgaaagacat

SEQ ID NO: 78550 - DNA, 120 bp, Artificial Sequence
  ENSG00000080824_16 (sequence is synthesized)
attggagaaaaaagttgaaaaggtggttgtgtcaaaccgattggtgacatctccatgctgtattgtcacaagcacatatggctggacagcaaacatggagagaatcatgaaagctcaagc

SEQ ID NO: 78551 - DNA, 120 bp, Artificial Sequence
  ENSG00000080824_17 (sequence is synthesized)
cctaagagacaactcaacaatgggttacatggcagcaaagaaacacctggagataaaccctgaccattccattattgagaccttaaggcaaaaggcagaggctgataagaacgacaagtc

SEQ ID NO: 78552 - DNA, 120 bp, Artificial Sequence
  ENSG00000080824_18 (sequence is synthesized)
tgtgaaggatctggtcatcttgctttatgaaactgcgctcctgtcttctggcttcagtctggaagatccccagacacatgctaacaggatctacaggatgatcaaacttggtctgggtat

SEQ ID NO: 78553 - DNA, 120 bp, Artificial Sequence
  ENSG00000080824_19 (sequence is synthesized)
tgatgaagatgaccctactgctgatgataccagtgctgctgtaactgaagaaatgccaccccttgaaggagatgacgacacatcacgcatggaagaagtagactaatctctggctgaggg

SEQ ID NO: 78554 - DNA, 120 bp, Artificial Sequence
  ENSG00000080824_20 (sequence is synthesized)
atgacttacctgttcagtactctacaattcctctgataatatattttcaaggatgtttttctttatttttgttaatattaaaaagtctgtatggcatgacaactactttaaggggaagat

SEQ ID NO: 78555 - DNA, 120 bp, Artificial Sequence
  ENSG00000080824_21 (sequence is synthesized)
aagatttctgtctactaagtgatgctgtgataccttaggcactaaagcagagctagtaatgctttttgagtttcatgttggtttattttcacagattggggtaacgtgcactgtaagacg

SEQ ID NO: 78556 - DNA, 120 bp, Artificial Sequence
  ENSG00000080824_22 (sequence is synthesized)
tatgtaacatgatgttaactttgtggtctaaagtgtttagctgtcaagccggatgcctaagtagaccaaatcttgttattgaagtgttctgagctgtatcttgatgtttagaaaagtatt

SEQ ID NO: 78557 - DNA, 120 bp, Artificial Sequence
  ENSG00000080824_23 (sequence is synthesized)
cgttacatcttgtaggatctactttttgaacttttcattccctgtagttgacaattctgcatgtactagtcctctagaaataggttaaactgaagcaacttgatggaaggatctctccac

SEQ ID NO: 78558 - DNA, 120 bp, Artificial Sequence
  ENSG00000080824_24 (sequence is synthesized)
agggcttgttttccaaagaaaagtattgtttggaggagcaaagttaaaagcctacctaagcatatcgtaaagctgttcaaaaataactcagacccagtcttgtggatggaaatgtagtgc

SEQ ID NO: 78559 - DNA, 120 bp, Artificial Sequence
  ENSG00000080824_25 (sequence is synthesized)
tcgagtcacattctgcttaaagttgtaacaaatacagatgagttaaaagatattgtgtgacagtgtcttatttagggggaaaggggagtatctggatgacagttagtgccaaaatgtaaa

SEQ ID NO: 78560 - DNA, 120 bp, Artificial Sequence
  ENSG00000080824_26 (sequence is synthesized)
acatgaggcgctagcaggagatggttaaacactagctgctccaagggttgacatggtcttcccagcatgtactcagcaggtgtggggtggagcacacgtaggcacagaaaacaggaatgc

SEQ ID NO: 78561 - DNA, 120 bp, Artificial Sequence
  ENSG00000080824_27 (sequence is synthesized)
agacaacatgcatcccctgcgtccatgagttacatgtgttctcttagtgtccacgttgttttgatgttattcatggaataccttctgtgttaaatacagtcacttaattccttggcctta

SEQ ID NO: 78562 - DNA, 120 bp, Artificial Sequence
  ENSG00000080824_28 (sequence is synthesized)
gggtgtggcctccgggcggcatggctgcttcccaggtgatgccggcttcagctagtggggtctagttgaccgttccgcagccgccagggccagcggaaagccggtcagggggaaccgcgg

SEQ ID NO: 78563 - DNA, 120 bp, Artificial Sequence
  ENSG00000080824_29 (sequence is synthesized)
cggggctggtgtcatgagcctgaggtgaacttgagggtgcctcctcagcggtctcccgccctgccctgaggggcgccgggaccccaaagagcggaggaagagcgccaccccgacggccac

SEQ ID NO: 78564 - DNA, 120 bp, Artificial Sequence
  ENSG00000080824_30 (sequence is synthesized)
cgcttcggagccagcacgcggggtaccctacggggagcgcggatgcccccgtgttcgggcggggacggctccacccctcctgggccctcccttcgggacagggactgtcccgcccagagt

SEQ ID NO: 78565 - DNA, 120 bp, Artificial Sequence
  ENSG00000080824_31 (sequence is synthesized)
gctgaatacccgcgcgaccgtctggatccccgcccaggaagcccctctgaagcctcctcgccgccgtttctgagaagcagggcacctgttaactggtaccaagaaaaggcccaagtgttt

SEQ ID NO: 78566 - DNA, 120 bp, Artificial Sequence
  ENSG00000080824_32 (sequence is synthesized)
ctctggcatctgatggtgtctggatccaccactctactctgtctctggaaacagcccttccacgtctctgcattccctgtcaccgcgtcactggccttcagacagagccaaggtgcaggg

SEQ ID NO: 78567 - DNA, 120 bp, Artificial Sequence
  ENSG00000080824_33 (sequence is synthesized)
ggttgagacgttcgcctttcaggcagaaattgcccagttgatgtcattgatcatcaatactttctactcgaacaaagagatctttctgagagagctcatttcaaattcatcagatgtgaa

SEQ ID NO: 78568 - DNA, 120 bp, Artificial Sequence
  ENSG00000080824_34 (sequence is synthesized)
tacagcatttcctgatcattgatacttctaaggtgctttcaagcttagtcatacatagcccattttcgcatgttttcaacttaaaacagaaaactatgttgtgtgtggctgggcgcggtg

SEQ ID NO: 78569 - DNA, 67 bp, Artificial Sequence
  ENSG00000080824_35 (sequence is synthesized)
agtctctactaaaaatagaaaaaaataaaccaggcgtggtggcacggcctgtaatcctagccacttg

SEQ ID NO: 78570 - DNA, 61 bp, Artificial Sequence
  ENSG00000080824_36 (sequence is synthesized)
cacggtgaaactcagtctctactaaaaatagaaaaaaataaaccaggcgtggtggcacggc

SEQ ID NO: 78571 - DNA, 77 bp, Artificial Sequence
  ENSG00000080824_37 (sequence is synthesized)
atctctactaaattacaaaaattagccccatgtagtggcaggctgaggcatgaaaacagcttgaacccccctccagc

SEQ ID NO: 78572 - DNA, 120 bp, Artificial Sequence
  ENSG00000080824_38 (sequence is synthesized)
gcaacagagtgagactgtctcaaaaatacgtcccatcatcttcaggttatctttgattttgggagtttacatagtaccagttttgtccttggaatgactcagtgcatttggtttatattt

SEQ ID NO: 78573 - DNA, 120 bp, Artificial Sequence
  ENSG00000080824_39 (sequence is synthesized)
agagctcaacaaaacaaagcccatctggaccagaaatcccgacgatattactaatgaggagtacggagaattctataagagcttgaccaatgactgggaagatcacttggcagtgaaggt

SEQ ID NO: 78574 - DNA, 120 bp, Artificial Sequence
  ENSG00000080824_40 (sequence is synthesized)
gagtgactgatgggtgcttcaagcttgtccttagattatcatctttctccaccaccccaaatatcttctataatgcattgttcattggtacttagtgtatctgttttattacagcatttt

SEQ ID NO: 78575 - DNA, 120 bp, Artificial Sequence
  ENSG00000080824_41 (sequence is synthesized)
ctgcaacccttggacccctggggatgcggtgaagcttacagaatttgtgtttgcccaacgatcaggaacaagctagagcacttaattagtgtaatggcatgacttggtgggcggttcttt

SEQ ID NO: 78576 - DNA, 120 bp, Artificial Sequence
  ENSG00000080839_0 (sequence is synthesized)
gtgggtagcgcgcctgggagggagaaagaagtcgggggccgtggcgcgcagcccgcggggcctgaagggatgttcgaggacaagccccacgctgagggggcggcggtggtcgccgcagcc

SEQ ID NO: 78577 - DNA, 120 bp, Artificial Sequence
  ENSG00000080839_1 (sequence is synthesized)
ggggaggcgctacaggccctgtgccaggagctgaacctggacgaggggagcgcggccgaagccctggacgactttactgccatccgaggcaactacagcctagagggagaagttacacac

SEQ ID NO: 78578 - DNA, 120 bp, Artificial Sequence
  ENSG00000080839_2 (sequence is synthesized)
tggttggcatgttcattatatgttgcatgccgcaaaagcattattcccacggttggaaagggtatcatggaaggcaactgtgtttcacttaccagaatactacgttcagctaaattaagt

SEQ ID NO: 78579 - DNA, 120 bp, Artificial Sequence
  ENSG00000080839_3 (sequence is synthesized)
ttaatacaattttttagtaaaatgaagaaatggatggacatgtcaaatctaccacaagaatttcgtgaacgtatagaaaggctagagagaaattttgaggtgtctactgtaatattcaaa

SEQ ID NO: 78580 - DNA, 120 bp, Artificial Sequence
  ENSG00000080839_4 (sequence is synthesized)
aaatatgagccaatttttttagatatatttcaaaatccatatgaagaaccaccaaagttaccacgaagccggaagcagaggaggattccttgcagtgttaaggatctgtttaatttctgt

SEQ ID NO: 78581 - DNA, 120 bp, Artificial Sequence
  ENSG00000080839_5 (sequence is synthesized)
tggacactttttgtttatactaagggtaattttcggatgattggggatgacttagtaaactcttatcatttacttctatgctgcttggatctgatttttgccaatgcgattatgtgccca

SEQ ID NO: 78582 - DNA, 120 bp, Artificial Sequence
  ENSG00000080839_6 (sequence is synthesized)
aatagacaagacttgctaaatccatcatttaaaggtttaccatctgattttcatactgctgactttacggcttctgaagagccaccctgcatcattgctgtactgtgtgaactgcatgat

SEQ ID NO: 78583 - DNA, 120 bp, Artificial Sequence
  ENSG00000080839_7 (sequence is synthesized)
ggacttctcgtagaagcaaaaggaataaaggagcactactttaagccatatatttcaaaactctttgacaggaagatattaaaaggagaatgcctcctggacctttcaagttttactgat

SEQ ID NO: 78584 - DNA, 120 bp, Artificial Sequence
  ENSG00000080839_8 (sequence is synthesized)
aatagcaaagcagtgaataaggagtatgaagagtatgttctaactgttggtgattttgatgagaggatctttttgggagcagacgcagaagaggaaattggaacacctcgaaagttcact

SEQ ID NO: 78585 - DNA, 120 bp, Artificial Sequence
  ENSG00000080839_9 (sequence is synthesized)
cgtgacaccccattagggaaactgacagcacaggctaatgtggagtataaccttcaacagcactttgaaaaaaaaaggtcatttgcaccttctaccccactgaccggacggagatattta

SEQ ID NO: 78586 - DNA, 120 bp, Artificial Sequence
  ENSG00000080839_10 (sequence is synthesized)
cgagaaaaagaagcagtcattactcctgttgcatcagccacccaaagtgtgagccggttacagagtattgtggctggtctgaaaaatgcaccaagtgaccaacttataaatatttttgaa

SEQ ID NO: 78587 - DNA, 120 bp, Artificial Sequence
  ENSG00000080839_11 (sequence is synthesized)
tcttgtgtgcgtaatcctgtggaaaacattatgaaaatactaaaaggaataggagagactttctgtcaacactatactcaatcaacagatgaacagccaggatctcacatagactttgct

SEQ ID NO: 78588 - DNA, 120 bp, Artificial Sequence
  ENSG00000080839_12 (sequence is synthesized)
gtaaacagactaaagctggcagaaattttgtattataaaatactagagactgtaatggttcaggaaacacgaagacttcatggaatggacatgtcagttcttttagagcaagatatattt

SEQ ID NO: 78589 - DNA, 120 bp, Artificial Sequence
  ENSG00000080839_13 (sequence is synthesized)
catcgttccttgatggcttgttgtttggaaattgtgctctttgcctatagctcacctcgtacttttccttggattattgaagttctcaacttgcaaccattttacttttataaggttatt

SEQ ID NO: 78590 - DNA, 120 bp, Artificial Sequence
  ENSG00000080839_14 (sequence is synthesized)
gaggtggtgatccgctcagaagaggggctctcaagggacatggtgaaacacctaaacagcattgaagaacagattttggagagtttagcatggagtcacgattctgcactgtgggaggct

SEQ ID NO: 78591 - DNA, 120 bp, Artificial Sequence
  ENSG00000080839_15 (sequence is synthesized)
ctccaggtttctgcaaacaaagttcctacctgtgaagaagttatattcccaaataactttgaaacaggaaatggaggaaatgtgcagggacatcttcccctgatgccaatgtctcctcta

SEQ ID NO: 78592 - DNA, 120 bp, Artificial Sequence
  ENSG00000080839_16 (sequence is synthesized)
atgcacccaagagtcaaggaagttcgaactgacagtgggagtcttcgaagagatatgcaaccattgtctccaatttctgtccatgaacgctacagttctcctaccgcagggagtgctaag

SEQ ID NO: 78593 - DNA, 120 bp, Artificial Sequence
  ENSG00000080839_17 (sequence is synthesized)
agaagactctttggagaggaccccccaaaggaaatgcttatggacaagatcataacagaaggaacaaaattgaaaatcgctccttcttcaagcattactgctgaaaatgtatcaatttta

SEQ ID NO: 78594 - DNA, 120 bp, Artificial Sequence
  ENSG00000080839_18 (sequence is synthesized)
cctggtcaaactcttctaacaatggccacagccccagtaacaggaacaacaggacataaagttacaattccattacatggtgtcgcaaatgatgctggagagatcacactgatacctctt

SEQ ID NO: 78595 - DNA, 120 bp, Artificial Sequence
  ENSG00000080839_19 (sequence is synthesized)
tccatgaatacaaatcaggagtccaaagtcaagagtcctgtatcacttactgctcattcattaattggtgcttctccaaaacagaccaatctgactaaagcacaagaggtacattcaact

SEQ ID NO: 78596 - DNA, 120 bp, Artificial Sequence
  ENSG00000080839_20 (sequence is synthesized)
ggaataaacaggccaaagagaactgggtccttagcactattttacagaaaggtctatcatttggcaagtgtacgcttacgtgatctatgtctaaaactggatgtttcaaatgagttacga

SEQ ID NO: 78597 - DNA, 120 bp, Artificial Sequence
  ENSG00000080839_21 (sequence is synthesized)
aggaagatatggacgtgttttgaattcactttagttcactgtcctgatctaatgaaagacaggcatttggatcagctcctcctttgtgccttttatatcatggcaaaggtaacaaaagaa

SEQ ID NO: 78598 - DNA, 120 bp, Artificial Sequence
  ENSG00000080839_22 (sequence is synthesized)
gaaagaacttttcaagaaattatgaaaagttataggaatcagccccaagctaatagtcacgtatatagaagtgttctgctgaaaagtattccaagagaagttgtggcatataataaaaat

SEQ ID NO: 78599 - DNA, 120 bp, Artificial Sequence
  ENSG00000080839_23 (sequence is synthesized)
caaaaacacctgactgttccagtggaccagtgaaagaggaaagaggtgatcttataaaattttacaatacaatatatgtaggaagagtgaagtcatttgcactgaaatacgacttggcga

SEQ ID NO: 78600 - DNA, 120 bp, Artificial Sequence
  ENSG00000080839_24 (sequence is synthesized)
atcaggaccatatgatggatgctccaccactctctccttttccacatattaaacaacagccaggctcaccacgccgcatttcccagcagcactccatttatatttccccgcacaagaatg

SEQ ID NO: 78601 - DNA, 120 bp, Artificial Sequence
  ENSG00000080839_25 (sequence is synthesized)
ggtcaggccttacaccaagaagcgctctgctgtacaagttcaatggcagcccttctaagagtttgaaagatatcaacaacatgataaggcaaggtgagcagagaaccaagaagcgagtaa

SEQ ID NO: 78602 - DNA, 120 bp, Artificial Sequence
  ENSG00000080839_26 (sequence is synthesized)
tagccatcgatagtgatgcagaatcccctgccaaacgcgtctgtcaagaaaatgatgacgttttactgaaacgactacaggatgttgtcagtgaaagagcaaatcattaatgttgttctt

SEQ ID NO: 78603 - DNA, 120 bp, Artificial Sequence
  ENSG00000080839_27 (sequence is synthesized)
gtttctatgataaaagcactttcagattgttctgcagaaagttggagctctgtccttcaaaccttttagccctatagatgataaatatcactgggttataagaaaaaattgcacaaaaat

SEQ ID NO: 78604 - DNA, 120 bp, Artificial Sequence
  ENSG00000080839_28 (sequence is synthesized)
tatgtgctttttaaaatatttatccaaaatgtagttgacagagatgtattttgagttggattggaaaggaatattttaagtgccttttaaaaatactaatagtccggccaggcgctgtgg

SEQ ID NO: 78605 - DNA, 120 bp, Artificial Sequence
  ENSG00000080839_29 (sequence is synthesized)
caagagtaaaactccatctcaaaaaatatatatatatatataaatagggaattttttttaatgtttgctccttgagttttcaagatgaaataaggagaaaccccataactttttagctct

SEQ ID NO: 78606 - DNA, 120 bp, Artificial Sequence
  ENSG00000080839_30 (sequence is synthesized)
ctctcttttaaaaataaatgtctccttctgtgttctgtaatatgaggataaataatctacttttgatagcatgctttgagatatttgtattcttaatttaatattgaaggaaggggttgg

SEQ ID NO: 78607 - DNA, 120 bp, Artificial Sequence
  ENSG00000080839_31 (sequence is synthesized)
ttcccatagtacctggccagagggttatataccatcctgtctctggcccactgtggtaattccacatccaggtaccaccgccattcagagttgtctcaccccttctcgtgccttttctct

SEQ ID NO: 78608 - DNA, 120 bp, Artificial Sequence
  ENSG00000080839_32 (sequence is synthesized)
ccttgagctttataaacagatttgtacctgagccccagtgctacactcatccttgctttccagccctaagccatctcagcctgatgtcacaacccaataaatggggcactttcttctttt

SEQ ID NO: 78609 - DNA, 120 bp, Artificial Sequence
  ENSG00000080839_33 (sequence is synthesized)
gtaaactattatcattttggtttctgtgacattaacttaattatatatgatcgtattaactcatgtagttctcaaaataggcagctgcttctgaagccagtaaaataaaattcagttagt

SEQ ID NO: 78610 - DNA, 120 bp, Artificial Sequence
  ENSG00000080839_34 (sequence is synthesized)
tattaaaaactaaattcctattagtaaggtaacaccatgattatgtgtgatatactgtttttgagatcatagttatcagtcattctcaatatctaattgagtccctaagaatattttaaa

SEQ ID NO: 78611 - DNA, 120 bp, Artificial Sequence
  ENSG00000080839_35 (sequence is synthesized)
ccttttaaaaatcacataaatatcatctcatgcctcataattctaatatatttaatacatcagtaaaatagctgcttattacttcccacactttgttctcagtattgttagtgcatcatg

SEQ ID NO: 78612 - DNA, 120 bp, Artificial Sequence
  ENSG00000080839_36 (sequence is synthesized)
agtttcctgctagtgtttgaccactgggtactcctgaagatgttttttagtactagggatgcttttcagtattagggatgcttttttcagtactagggatgtactagggagtactgagta

SEQ ID NO: 78613 - DNA, 120 bp, Artificial Sequence
  ENSG00000080839_37 (sequence is synthesized)
ctcctgaagatgtttttcagtactagggatgcttttttcagtgttagggatgcttttcagtactagggatgcttttttcagtgctagggatgcttttcagtactagggatgctttccaaa

SEQ ID NO: 78614 - DNA, 120 bp, Artificial Sequence
  ENSG00000080839_38 (sequence is synthesized)
atatcacctctttaacgtttactttttctagtgtgtgtctggaatccaaaggacatgaataagccactcataattaattttgagaagttttatcaaatgtttatgtttctaactgcaaac

SEQ ID NO: 78615 - DNA, 120 bp, Artificial Sequence
  ENSG00000080839_39 (sequence is synthesized)
cttaattttggaaaggcacaatgtttaactcacctatgtttaaccatggctaatttaaaatagtctaagatttggccgtcactaattagtattctcaagaatttcatttttcaattttaa

SEQ ID NO: 78616 - DNA, 120 bp, Artificial Sequence
  ENSG00000080839_40 (sequence is synthesized)
gaagaaaagggattttggtcacattttgcttgtaaatgaaaattacatcctcattctttgtgtagtatctacacattgttataagccaaaaaacaaagtctgtctggaatctttgtacat

SEQ ID NO: 78617 - DNA, 120 bp, Artificial Sequence
  ENSG00000080839_41 (sequence is synthesized)
atttgtatgttgctataattgttatttttatcttcattattgtgcaaaatataaatgagcatttgtacattgactgtataagaaaccatgggccaggtcctgtggctcatgcctataatc

SEQ ID NO: 78618 - DNA, 120 bp, Artificial Sequence
  ENSG00000080839_42 (sequence is synthesized)
ttgggaggctgaggcaggaggattgcttcagtccaggagttcaagactaacctgggcaacatagccctcatctctacaaaaaataaaaaaattagttgggtgtgatggcatgtgcctgta

SEQ ID NO: 78619 - DNA, 80 bp, Artificial Sequence
  ENSG00000080839_43 (sequence is synthesized)
atcacttgagactgggagatttcctaggtgagagggcaagaccctttctcagaaaaggaaaaaaagaaattctggacatg

SEQ ID NO: 78620 - DNA, 120 bp, Artificial Sequence
  ENSG00000080839_44 (sequence is synthesized)
accctttctcagaaaaggaaaaaaagaaattctggacatgtttttatcagttttcaggacttggtatcaatgtacatagaatggctaataaaaattggaattgagattattgaaaaaaaa

SEQ ID NO: 78621 - DNA, 120 bp, Artificial Sequence
  ENSG00000080839_45 (sequence is synthesized)
gctgctgctgccctatgtctcctggccagttgacattttggcaaccatgaagtgacctgaagcgagcctccatttactgatattataattggagccttggtaccattcacccaatctcgc

SEQ ID NO: 78622 - DNA, 120 bp, Artificial Sequence
  ENSG00000080839_46 (sequence is synthesized)
tgagccagcaggggtctctgtttaatacaattttttagtaaaatgaagaaatggatggacatgtcaaatctaccacaagaatttcgtgaacgtatagaaaggctagagagaaattttgag

SEQ ID NO: 78623 - DNA, 120 bp, Artificial Sequence
  ENSG00000080839_47 (sequence is synthesized)
aataggctaaaagttggatttcagattaacagtcagtaactgttaatcctgcctctttttttttttttcttttttggccaagttactactatactaataaaatatgaaatgttaactatg

SEQ ID NO: 78624 - DNA, 80 bp, Artificial Sequence
  ENSG00000080845_0 (sequence is synthesized)
gccggggcctaggcgcgcggacctgcgagcggacccgagaggcggcggcggcgcagcggaacggcagagcgggccggagg

SEQ ID NO: 78625 - DNA, 120 bp, Artificial Sequence
  ENSG00000080845_1 (sequence is synthesized)
gcggcggcgcagcggaacggcagagcgggccggaggcggccgaggcgcccggcgcaggcacccgtgcctcccctctgccaggaaccttggggccttgtgtgtgaccaggacctggtggcc

SEQ ID NO: 78626 - DNA, 120 bp, Artificial Sequence
  ENSG00000080845_2 (sequence is synthesized)
cccgggcggtggcagagcccctgtcccaagctgcttcctgccggcacctctgatcaagtgcctagagggatgtgtgtgccagccctcggtccagtgcccgctcctgagctgactcctgct

SEQ ID NO: 78627 - DNA, 120 bp, Artificial Sequence
  ENSG00000080845_3 (sequence is synthesized)
gggccccgacagcttgccgtgtttcctgtgcctgtagctccctggttggatagctgccgcccgggagaggtgacccgggcgccctgctagggtgaaggcccctgccctcggcccgggatc

SEQ ID NO: 78628 - DNA, 120 bp, Artificial Sequence
  ENSG00000080845_4 (sequence is synthesized)
atgaaaggcctcggtgacagccgcccccgccacctctccgacagcctagacccaccccacgagcccctgtttgcagggaccgaccgcaacccctacctgctgtcgcccacggaggccttc

SEQ ID NO: 78629 - DNA, 120 bp, Artificial Sequence
  ENSG00000080845_5 (sequence is synthesized)
gcccgcgaggcccgcttccccgggcagaacaccctgccaggagatggcctctttcccctcaacaaccagctgcccccgcccagcagcacctttccccgcatccactacaactcccacttc

SEQ ID NO: 78630 - DNA, 120 bp, Artificial Sequence
  ENSG00000080845_6 (sequence is synthesized)
gaggtgccagaggagagccccttccccagccatgcccaagccaccaagatcaaccggctgcccgccaacctcctggaccagtttgagaagcagctgcccatccaccgtgatggcttcagc

SEQ ID NO: 78631 - DNA, 120 bp, Artificial Sequence
  ENSG00000080845_7 (sequence is synthesized)
accctccaatttccccgtggcgaggccaaggcccgtggtgagagccctggccgcatccgccacctggtccactcagtccagcggcttttcttcaccaaggcaccctcactggagggcaca

SEQ ID NO: 78632 - DNA, 120 bp, Artificial Sequence
  ENSG00000080845_8 (sequence is synthesized)
gcgggcaaggtcggtggcaatggcagcaagaagggtggcatggaggacggcaagggccggagggccaaaagcaaggagcgggccaaggctggggagcccaaacggcgcagccgctccaac

SEQ ID NO: 78633 - DNA, 120 bp, Artificial Sequence
  ENSG00000080845_9 (sequence is synthesized)
atctcaggctggtggagctccgatgacaacttggacggcgaggccggcgccttccgcagcagtggcccagcctctgggctgatgacactaggccgccaggcagaacgcagccagccacgc

SEQ ID NO: 78634 - DNA, 120 bp, Artificial Sequence
  ENSG00000080845_10 (sequence is synthesized)
tacttcatgcacgcctacaacaccatcagtgggcacatgctcaaaaccaccaagaacaacactactgagctgactgccccaccacccccgcccgcacccccagccacctgccccagcctt

SEQ ID NO: 78635 - DNA, 120 bp, Artificial Sequence
  ENSG00000080845_11 (sequence is synthesized)
ggggtgggcactgacaccaactacgtcaaacggggctcctggtccactctgaccctcagccacgcccacgaggtctgccagaagacctcagccaccttggataagagcctgctcaagtcc

SEQ ID NO: 78636 - DNA, 120 bp, Artificial Sequence
  ENSG00000080845_12 (sequence is synthesized)
aaatcctgccaccagggtctagcctaccattacctgcaggtgcccggcggcggcggcgagtggagcaccacgctgctgtccccacgcgagacggatgccgcggccgagggccctatcccg

SEQ ID NO: 78637 - DNA, 120 bp, Artificial Sequence
  ENSG00000080845_13 (sequence is synthesized)
tgccggcgcatgcgcagcggcagctacatcaaggccatgggcgacgaggacagcgacgagtccggcggcagccccaagccctcacccaagaccgcggcgcggcgccagagctatctgagg

SEQ ID NO: 78638 - DNA, 120 bp, Artificial Sequence
  ENSG00000080845_14 (sequence is synthesized)
gccacgcagcagtcgctgggagagcagagcaacccccgcaggagtctggaccgcctggattcagtggacatgctgctgccctccaagtgtccgagctgggaagaggactacacccccgtc

SEQ ID NO: 78639 - DNA, 120 bp, Artificial Sequence
  ENSG00000080845_15 (sequence is synthesized)
agcgacagcctcaacgactccagctgcatcagccagatttttggacaggcctccctgatcccccagttgtttggccatgagcagcaggtacgggaggcagagctgagtgaccagtatgag

SEQ ID NO: 78640 - DNA, 120 bp, Artificial Sequence
  ENSG00000080845_16 (sequence is synthesized)
gcggcctgcgagtcagcctgcagtgaagcggagtccacagcggcagagacgcttgacttgccactgcccagctacttccgctcccgcagccacagctacctgcgtgccatccaggcaggc

SEQ ID NO: 78641 - DNA, 120 bp, Artificial Sequence
  ENSG00000080845_17 (sequence is synthesized)
tgctcgcaggaggaggacagtgtctccctgcagtccctctccccaccgcccagtaccggcagcctcagcaatagtcgcacgcttccgagttcatcatgcctagtggcgtataagaagacc

SEQ ID NO: 78642 - DNA, 120 bp, Artificial Sequence
  ENSG00000080845_18 (sequence is synthesized)
ccgccaccggtccctccacgcaccacttcaaagccgttcatctcagtcacagtccagagcagtactgagtctgcccaggacacctacctggacagccaggaccacaagagcgaggtgact

SEQ ID NO: 78643 - DNA, 120 bp, Artificial Sequence
  ENSG00000080845_19 (sequence is synthesized)
agccagtcgggcctgagcaactcgtcggacagcctggacagcagtacccgaccgcccagcgtgacacggggtggagtcgccccagcccctgaggccccagagccacccccaaaacatgca

SEQ ID NO: 78644 - DNA, 120 bp, Artificial Sequence
  ENSG00000080845_20 (sequence is synthesized)
gctctgaaaagtgaacaagggacgctgaccagctctgagtcccaccccgaggccgcccccaaaaggaaactgtcatcgataggaatacaagagaggactagaaggaacggttcccacctc

SEQ ID NO: 78645 - DNA, 120 bp, Artificial Sequence
  ENSG00000080845_21 (sequence is synthesized)
ccaaagcgatcgatgtgatggcaccctcctcagaaagcagcgtcccctctcacagtatgtcctcccgacgggacacagactcggatacccaggatgccaatgactcaagctgtaagtcat

SEQ ID NO: 78646 - DNA, 120 bp, Artificial Sequence
  ENSG00000080845_22 (sequence is synthesized)
ctgagaggagcctcccggactgtacccctcaccccaactccatcagcatcgatgccggtccccggcaggcccccaagattgcccagatcaagcgcaacctctcctatggagacaacagcg

SEQ ID NO: 78647 - DNA, 120 bp, Artificial Sequence
  ENSG00000080845_23 (sequence is synthesized)
accctgccctagaggcgtcctcgctgcccccacccgacccctggctcgagacctcctccagctccccagcagagccggcacagccaggggcctgccgccgagacggctactggttcctaa

SEQ ID NO: 78648 - DNA, 120 bp, Artificial Sequence
  ENSG00000080845_24 (sequence is synthesized)
agctactgcaggcagaaacagagcggctggaaggctggtgctgccagatggacaaggagaccaaagagaacaacctctctgaagaagtcttaggaaaagtcctcagtgctgtgggcagtg

SEQ ID NO: 78649 - DNA, 120 bp, Artificial Sequence
  ENSG00000080845_25 (sequence is synthesized)
cccagctactgatgtcccagaaattccagcagttccggggcctctgtgagcaaaacttgaaccctgatgccaacccacgccccacagcccaggacctggcagggttctgggacctgctac

SEQ ID NO: 78650 - DNA, 120 bp, Artificial Sequence
  ENSG00000080845_26 (sequence is synthesized)
agctgtccatcgaggatatcagcatgaagttcgatgaactctaccacctcaaggccaacagctggcagctggtggagacccccgagaagaggaaggaagagaagaaaccaccccctccgg

SEQ ID NO: 78651 - DNA, 120 bp, Artificial Sequence
  ENSG00000080845_27 (sequence is synthesized)
tcccaaagaagccagccaaatccaagccggcagtgagccgcgacaaggcctcagacgccagcgacaagcagcgccaggaggcccgcaagagactcctggcggccaagcgggcagcttctg

SEQ ID NO: 78652 - DNA, 120 bp, Artificial Sequence
  ENSG00000080845_28 (sequence is synthesized)
tgcggcagaactcagccaccgagagcgcagacagcatcgagatttatgtcccggaggcccagaccaggctctgagaccatgcaggaggaaagaaacgattttaaatcattaaaaacacaa

SEQ ID NO: 78653 - DNA, 120 bp, Artificial Sequence
  ENSG00000080845_29 (sequence is synthesized)
aaactaagtgcgaacggaacagagttttctcaacctttgctatggttattctgtctagagaccctgagccaactttcaaattgacgcatacaagggctcacaatttggcttttttgggtc

SEQ ID NO: 78654 - DNA, 120 bp, Artificial Sequence
  ENSG00000080845_30 (sequence is synthesized)
cctcccagctttaggttatgaagattttactcacaaaaaaaatcaacaaaaatcacgaaactagaaaactttttttttcctcttgctggccgtggtggactagatagatggacgtcggca

SEQ ID NO: 78655 - DNA, 120 bp, Artificial Sequence
  ENSG00000080845_31 (sequence is synthesized)
actcccggcccagcctccatactgcggtctttttactcgttctatctgatgagaactcacactagcttgtttacaagatgacgacagtccaagggcagccttgggcacctgccatgtccc

SEQ ID NO: 78656 - DNA, 120 bp, Artificial Sequence
  ENSG00000080845_32 (sequence is synthesized)
tcctttccccagctatccccgctctgaccttgattttcattcttatgtttttctcttttcccttcagagctcacacagtggtcaccattgtggcaagcggctttctgggtctcagccctc

SEQ ID NO: 78657 - DNA, 120 bp, Artificial Sequence
  ENSG00000080845_33 (sequence is synthesized)
tctgcggttgagggcccagaggacagagagatggacatgcgtcccctccctccccccgccaagtgctcacacacaacctcacgcgcacacacacacacgcagatggaggcgcctcactgg

SEQ ID NO: 78658 - DNA, 120 bp, Artificial Sequence
  ENSG00000080845_34 (sequence is synthesized)
gaggtgccccgccagccctgggcagtgtcaggcaggactcactcaccgctgagcagatgagggaagttttagtcttggcgggtggaaatgagacgaagccacagttatcacactccagac

SEQ ID NO: 78659 - DNA, 120 bp, Artificial Sequence
  ENSG00000080845_35 (sequence is synthesized)
tcctgcccttttattttctccagccccttcttccttcagcaaaatctaggactcccgagtggcttccagggggccgtcagtcctcagccgcgcctgtgtccggtgcccgaggggcgggcg

SEQ ID NO: 78660 - DNA, 120 bp, Artificial Sequence
  ENSG00000080845_36 (sequence is synthesized)
gcggtgtctgtatgtatgtgtacatatgcacatagaccttagagtgtatagttaacaaacgcccatctgctcacccatgcccacccagcgccgccgccgctggctctcggggcacctggc

SEQ ID NO: 78661 - DNA, 120 bp, Artificial Sequence
  ENSG00000080845_37 (sequence is synthesized)
aggaggcgggtgtgtgaatagcatatatttttacatgtactatatctaggtgtgtgtacaagtgtgtgtaaaaatatataccttgtgtgtaagcagccctttttttttttggtctccacc

SEQ ID NO: 78662 - DNA, 120 bp, Artificial Sequence
  ENSG00000080845_38 (sequence is synthesized)
cccctccccccgccccgcactcctaagggcccatctgcccagcctctgagttttctgttctattttttttttaaccccaattatccttctctctctcctgcccccgcatcccactcccag

SEQ ID NO: 78663 - DNA, 120 bp, Artificial Sequence
  ENSG00000080845_39 (sequence is synthesized)
ggtgtcacgagccctgagctgcaatggcccgggcctgcagggcggggtaggggagggcaggggctgagccccgaagccagctcagtacctgaggggctgctctatgctgtgtatgcgcct

SEQ ID NO: 78664 - DNA, 120 bp, Artificial Sequence
  ENSG00000080845_40 (sequence is synthesized)
ctctggcatccgagacatcctcttggctggcgcttgctgcagggggggacccccccccgtccccaggtgaaccaagggtctgctccggggcccatttccagcttggccgccgtctgtgac

SEQ ID NO: 78665 - DNA, 120 bp, Artificial Sequence
  ENSG00000080845_41 (sequence is synthesized)
cttgggcaagtcacttgacctctgtgtgcctcaacttcctcctctgtaaaacggggacagtccctgcccctccctacctcacaggcatgttgtgagaataaatgaggtaacgtgtaccaa

SEQ ID NO: 78666 - DNA, 120 bp, Artificial Sequence
  ENSG00000080845_42 (sequence is synthesized)
gtccgcccgcccgcccgcccgcccgcgcttccgtcctgtccagccgccagtcctccagcccgtgtccccgctccgcccgctttgtctctccccggctcgctgtctctttgtctctgccct

SEQ ID NO: 78667 - DNA, 120 bp, Artificial Sequence
  ENSG00000080845_43 (sequence is synthesized)
cgcgctcctccgcagcccctccctcgctccccatctcgggtccccttctcagagcgctcttcagccctcagagccgccctttctgggcgaccccactcttcgggactccccctcagagcg

SEQ ID NO: 78668 - DNA, 120 bp, Artificial Sequence
  ENSG00000080845_44 (sequence is synthesized)
cccccagatcttttggggttccccttgagaacaccttccactctccccaagggctccccgtgagtttcttgcacatcctttgggggttctgcaccccaagtcgctggggtctcgcctcct

SEQ ID NO: 78669 - DNA, 120 bp, Artificial Sequence
  ENSG00000080845_45 (sequence is synthesized)
ctgaacccccattgcccctgggctttccctcttctgggtgttccccatatccactgggagctcctaggtcccaagttggggtctttctccttgggaccccccaatatgtcctcagctccc

SEQ ID NO: 78670 - DNA, 120 bp, Artificial Sequence
  ENSG00000080845_46 (sequence is synthesized)
tgacttcaggagctcctctctgctttcccctggtttgtcccctgtcgctgtctctccttgttctctctcaggtctccgagcacccccacttctcgggatcggggtcccctgctttgctct

SEQ ID NO: 78671 - DNA, 120 bp, Artificial Sequence
  ENSG00000080845_47 (sequence is synthesized)
ccctgcccctctgtgcccccacatctgtctcggtggtctcgccactctgtgcctcttgcgctgaaggcccccctttgagcctgcttctttgcctggggcccttggcccccccttgctttt

SEQ ID NO: 78672 - DNA, 120 bp, Artificial Sequence
  ENSG00000080845_48 (sequence is synthesized)
tcagccctagccccctgtctccccttctctctgctccttgtctccctctccctttttctgtctttgccgggtctctgggtctctgacccccatccggccctcatggctttgtgtctggag

SEQ ID NO: 78673 - DNA, 120 bp, Artificial Sequence
  ENSG00000080845_49 (sequence is synthesized)
aactgtcatcgataggaatacaagttgactgcattcagccagtgccaaaagaggagcccagtcccgctaccaaattccagtccatcggggttcaggtagaggacgactggcgaagcagcg

SEQ ID NO: 78674 - DNA, 120 bp, Artificial Sequence
  ENSG00000080845_50 (sequence is synthesized)
gtacaaaaccggagcctcgggccgggctgcgtgagggaggagggctgtgtgaggcattgtgtaatcagccaggctctttcccgaccattgttctccaccaacaggcctggaagtcggaag

SEQ ID NO: 78675 - DNA, 120 bp, Artificial Sequence
  ENSG00000080845_51 (sequence is synthesized)
ggctgcgtgagggaggagggcccagttgtgtctgtaccagaaatgaggagtgatgccaagcctaggcctggcccagccttagcttctgcaatgcaacctatgtaatcacacccattttac

SEQ ID NO: 78676 - DNA, 120 bp, Artificial Sequence
  ENSG00000080845_52 (sequence is synthesized)
gggacgctgaccagctctgagtcccaccccgaggccgcccccaaaaggaaactgtcatcgataggaatacaagtcagctcgggtgcggaggccatagccccgcttggcggcaggagcagc

SEQ ID NO: 78677 - DNA, 120 bp, Artificial Sequence
  ENSG00000080845_53 (sequence is synthesized)
atggagcatagacgctgttgggccaggggcccaggacccagggcccttgagccatgggggttgctcgaggggaactttgcccagagccctctcgggccttggggacagccagtgccaaaa

SEQ ID NO: 78678 - DNA, 120 bp, Artificial Sequence
  ENSG00000080845_54 (sequence is synthesized)
tcactttcctcttaccgaatcaggcctggacttgctttctggctgggttactttccctctgatgactggctgcctaggccagggctcagggcgtctgagggtgcttagtagaactctggg

SEQ ID NO: 78679 - DNA, 120 bp, Artificial Sequence
  ENSG00000080845_55 (sequence is synthesized)
cccagcagctctgagagagaggctggagggtcagtcctttgtccagaccctgactgtgggcagtcctgttgtcttccattgggaagaaggtgtgcctcttcccaccagaacctcgtgaat

SEQ ID NO: 78680 - DNA, 120 bp, Artificial Sequence
  ENSG00000080845_56 (sequence is synthesized)
gctgcatgcacactcttcatggacagtgtcatccctaccccacagatgggaacaaggactctggtgtcacacagcctaagctaggcttagtgcccagttcttgctcccccatactaactg

SEQ ID NO: 78681 - DNA, 120 bp, Artificial Sequence
  ENSG00000080845_57 (sequence is synthesized)
ctaccctcctaagggagatatactcccttaaacattttgagcaaattgaggttggcttccgttttctgatctagggcaaaaaaccccatttgtttgggactttaggtcaaacaaatccat

SEQ ID NO: 78682 - DNA, 120 bp, Artificial Sequence
  ENSG00000080845_58 (sequence is synthesized)
tcctttcctgaaatcctcagtgagttagtcctgtctctgctggtggccatagatttcaagagttgctctaaacaaacgtccaggtcttggtggaaactgtccctgggccagtcagagaac

SEQ ID NO: 78683 - DNA, 120 bp, Artificial Sequence
  ENSG00000080845_59 (sequence is synthesized)
tgtcttgtttgctgagctggggaaacttgggccctgccttgtagtttttaagagtttctctaaatccagattgagtggactctccctgccctggctggacctgcagaccaaactagggca

SEQ ID NO: 78684 - DNA, 120 bp, Artificial Sequence
  ENSG00000080845_60 (sequence is synthesized)
cgttcagagccatgagggaggggcagctacagtgggtgagggcgagaggggagacagggcccccccaagcccaggggttgagtcagggaggacgaggcattgtgtgttgtggcacaggct

SEQ ID NO: 78685 - DNA, 120 bp, Artificial Sequence
  ENSG00000080845_61 (sequence is synthesized)
gcaagggactcctccagccacccctgagcaattggatgtggcccagctgataacaaagcactggaatgcaggagcgtgggacacaaagtggagcttgaatggaacagagaaggctcactg

SEQ ID NO: 78686 - DNA, 120 bp, Artificial Sequence
  ENSG00000080845_62 (sequence is synthesized)
agcaatttcttgcagttgcctgtatttgtttcctccaagaggcagctctaggcttccacttccccatgtataaacagagagagagttggccaggagactctgctgctgttttctgggctt

SEQ ID NO: 78687 - DNA, 120 bp, Artificial Sequence
  ENSG00000080845_63 (sequence is synthesized)
cttaagtgtccagtccctgcgctgcacaggtgggattctcagaaacacagagagtagcctgatcttcaacccttggtcctgaccacccatatctttgggcagccccaccctcttgctggc

SEQ ID NO: 78688 - DNA, 120 bp, Artificial Sequence
  ENSG00000080845_64 (sequence is synthesized)
caaaccagacgctcttatcttcccggaaagcctaagagttaggactacccttgattcctttcacccagaaaatgacaccgggataaggactctcttaggcctgtcctgggcgtcccattc

SEQ ID NO: 78689 - DNA, 120 bp, Artificial Sequence
  ENSG00000080845_65 (sequence is synthesized)
cctggattcaccccagccccattcttggtctcattgcagctccttggagatccagtggtgctgcattccttgagccggcttttgccgaggggaaatgtggctgcatccctgtcccagaaa

SEQ ID NO: 78690 - DNA, 120 bp, Artificial Sequence
  ENSG00000080845_66 (sequence is synthesized)
gcttccctggcccctacttctctccacaaggccaagagactgaagagtccccagtttctgaggatgccctgaacccttggtgcctcatgccctagattgagtgtgggtttctccctcatt

SEQ ID NO: 78691 - DNA, 120 bp, Artificial Sequence
  ENSG00000080845_67 (sequence is synthesized)
cttgagtgatgataggaaagctggcctggctgccccatggcccgggacctttgtcccagagaagaaaggcaggcgcagggcatcactgttgtcctgttccacttcacaggagtggaggga

SEQ ID NO: 78692 - DNA, 120 bp, Artificial Sequence
  ENSG00000080845_68 (sequence is synthesized)
gtgacagctttccacttggccctgaccccagtccttcctactgctccccagggccacccagtgctaaaggtaacctcagccaagtgtgaataacgtccagggacttcggtggctcctgtg

SEQ ID NO: 78693 - DNA, 120 bp, Artificial Sequence
  ENSG00000080845_69 (sequence is synthesized)
ggtggcagtttctgaatctagaactgccgtccagggtttgcccttagtgcaggcgcctctggcctgccctccaggtttctgccacagggttcagggagtgatctttgcctcaagacagcc

SEQ ID NO: 78694 - DNA, 120 bp, Artificial Sequence
  ENSG00000080845_70 (sequence is synthesized)
tttgtgtgtgtgtgtgtgttttctttctctttcgtcgtccttttttttttttctctctgatgcgtgtgaaggagaggactagaaggaacggttcccacctctcggaggacaacggaccca

SEQ ID NO: 78695 - DNA, 120 bp, Artificial Sequence
  ENSG00000080845_71 (sequence is synthesized)
cgggagtccctgacgacgcgcgcgcggctgacgcggggggcggggaggggcggggcaggtgcgggactttaacccggagccccgcccctcgggcgtacaaaaccggagcctcgggccggg

SEQ ID NO: 78696 - DNA, 120 bp, Artificial Sequence
  ENSG00000080854_0 (sequence is synthesized)
cgagtagtgcaggtgccgctgcgccggggccggggaggcgcgcgccgagccgagcggagcctaggagggatggagagctggccacccgggctgcaggagcaccggcgcggggcgtaggcg

SEQ ID NO: 78697 - DNA, 120 bp, Artificial Sequence
  ENSG00000080854_1 (sequence is synthesized)
ggggcgtaggcggcgcgaggcgggcgcgaggcgggcgctcgggcgcgaggcgcgtgcgggcgcgggagcactttgcgataggatgaggctccgggctggcgcggtagtactatgatttgg

SEQ ID NO: 78698 - DNA, 120 bp, Artificial Sequence
  ENSG00000080854_2 (sequence is synthesized)
tatgtggccactttcatagcaagtgtgatcggcacccgagggcttgcggctgaaggcgcccacggcctgcgagaggagcccgagtttgtgacggcaagagctggggagagcgtggtcctg

SEQ ID NO: 78699 - DNA, 120 bp, Artificial Sequence
  ENSG00000080854_3 (sequence is synthesized)
cgatgcgacgtgatccacccagtgacgggacagcccccaccctatgtcgtagagtggttcaagttcggggtccccatccctatcttcatcaagtttggctactacccgccgcacgtggac

SEQ ID NO: 78700 - DNA, 120 bp, Artificial Sequence
  ENSG00000080854_4 (sequence is synthesized)
cctgagtatgcaggccgggccagtcttcatgataaggcatctctgcggctggaacaagttcgctctgaggaccagggctggtatgagtgcaaagtgctcatgctggaccagcagtatgac

SEQ ID NO: 78701 - DNA, 120 bp, Artificial Sequence
  ENSG00000080854_5 (sequence is synthesized)
accttccacaatggcagctgggtccacctcaccatcaacgcccctcccacctttacagaaacacccccccagtacatcgaggccaaggagggtggtagtatcaccatgacctgcacagct

SEQ ID NO: 78702 - DNA, 120 bp, Artificial Sequence
  ENSG00000080854_6 (sequence is synthesized)
tttgggaaccccaagcccattgtcacctggctcaaggaggggacgctcctcggtgctagtgggaaataccaggtgagtgacggcagcctgacagtgacatcggtcagtcgggaggacaga

SEQ ID NO: 78703 - DNA, 120 bp, Artificial Sequence
  ENSG00000080854_7 (sequence is synthesized)
ggtgcctacacctgccgagcgtacagcattcagggggaggctgtccacacgactcacctgcttgtccaagggccccctttcatcgtctcccctcctgagaacatcaccgtcaacatctcc

SEQ ID NO: 78704 - DNA, 120 bp, Artificial Sequence
  ENSG00000080854_8 (sequence is synthesized)
caggatgctctgctcacctgccgggcagaggcgtatccgggcaacctcacctacacctggtactggcaggacgagaacgtctactttcagaacgacctgaagctgagggtgcgcatccta

SEQ ID NO: 78705 - DNA, 120 bp, Artificial Sequence
  ENSG00000080854_9 (sequence is synthesized)
atcgatgggaccctgatcatcttccgggtgaagccggaggactcggggaagtacacctgtgtgcccagcaacagcctggggcgctccccctccgcctcggcgtacctgaccgtgcagtac

SEQ ID NO: 78706 - DNA, 120 bp, Artificial Sequence
  ENSG00000080854_10 (sequence is synthesized)
ccagcgcgtgtcctcaacatgccccctgtgatttacgtgcccgtggggatccatggctacatccgctgccctgtggacgcagaaccaccggccaccgtggtcaagtggaacaaggacggc

SEQ ID NO: 78707 - DNA, 120 bp, Artificial Sequence
  ENSG00000080854_11 (sequence is synthesized)
cgtcccctgcaggttgagaagaacctcggttggaccctgatggaggatggctccattcgaattgaggaggccacagaggaggctcttggcacttatacctgtgtgccttacaacactctg

SEQ ID NO: 78708 - DNA, 120 bp, Artificial Sequence
  ENSG00000080854_12 (sequence is synthesized)
gggaccatgggccagtctgcccctgcgaggcttgtcctgaaggaccccccctatttcacggtgctaccaggctgggagtacaggcaggaggccggccgggagctacttatcccctgtgct

SEQ ID NO: 78709 - DNA, 120 bp, Artificial Sequence
  ENSG00000080854_13 (sequence is synthesized)
gccgcaggggacccctttcctgtcatcacttggagaaaggtagggaagcccagcagaagcaagcacagtgccctgcccagtgggagcctgcagttccgtgccctgagtaaggaggaccac

SEQ ID NO: 78710 - DNA, 120 bp, Artificial Sequence
  ENSG00000080854_14 (sequence is synthesized)
ggggagtgggaatgtgtcgccaccaacgtggtcacgagcatcactgccagcacccacctcaccgtcatcggcaccagcccccatgccccgggcagtgtccgggtccaggtctccatgaca

SEQ ID NO: 78711 - DNA, 120 bp, Artificial Sequence
  ENSG00000080854_15 (sequence is synthesized)
actgccaacgtgtcctgggaaccaggctatgatggaggctacgagcagacattctcagtttggatgaagcgggcacagtttgggccccatgactggctgtccttgccagtgccgccagga

SEQ ID NO: 78712 - DNA, 120 bp, Artificial Sequence
  ENSG00000080854_16 (sequence is synthesized)
cccagctggctgctggtggacaccctggagcctgagacagcgtaccagttcagcgtcctggcccagaacaagctgggaaccagcgccttcagtgaggtggtcactgtgaacactttagca

SEQ ID NO: 78713 - DNA, 120 bp, Artificial Sequence
  ENSG00000080854_17 (sequence is synthesized)
ttccctattacaactccagaacccctggtgctggtcaccccaccgaggtgcctcatagccaatcggactcagcagggtgtgctcctgtcctggcttccgcctgccaaccacagctttccc

SEQ ID NO: 78714 - DNA, 120 bp, Artificial Sequence
  ENSG00000080854_18 (sequence is synthesized)
atcgaccgctacatcatggagttccgtgtcgcagagcgctgggagttgctcgacgatggcatccccggcaccgaaggagagttctttgccaaggatctgtcacaggacacgtggtatgag

SEQ ID NO: 78715 - DNA, 120 bp, Artificial Sequence
  ENSG00000080854_19 (sequence is synthesized)
ttccgggttctggccgtcatgcaggatctgatcagcgagcccagcaacatcgccggcgtctccagcacagacatcttcccgcagccggacctgaccgaggatgggctggcgcggcctgtg

SEQ ID NO: 78716 - DNA, 120 bp, Artificial Sequence
  ENSG00000080854_20 (sequence is synthesized)
ctggcgggaatcgtagctaccatctgcttcttggcagctgccatcctgttcagcaccctggctgcctgctttgtcaacaagcagcgcaagcgtaagctcaagcgcaaaaaagaccctcca

SEQ ID NO: 78717 - DNA, 120 bp, Artificial Sequence
  ENSG00000080854_21 (sequence is synthesized)
ctctccatcacccactgcaggaagagcctggagtctcccttgtcctctggcaaggtgagccccgagagcatccgcacgctccgagcgccgtcagaatcctccgacgaccagggccagccc

SEQ ID NO: 78718 - DNA, 120 bp, Artificial Sequence
  ENSG00000080854_22 (sequence is synthesized)
gcggccaagaggatgctgagccccacccgtgagaaggagctgtcgctgtacaagaagaccaagcgggccatcagcagcaagaagtacagcgtggccaaggcagaggccgaggcagaggcc

SEQ ID NO: 78719 - DNA, 120 bp, Artificial Sequence
  ENSG00000080854_23 (sequence is synthesized)
accacgcccatcgagctcatcagcagaggccctgacggccgcttcgtgatggaccctgccgagatggagccctcgctgaagagcaggcgcatcgagggcttccccttcgccgaggagacg

SEQ ID NO: 78720 - DNA, 120 bp, Artificial Sequence
  ENSG00000080854_24 (sequence is synthesized)
gacatgtaccccgagttccgccagtcggacgaggagaacgaggacccactggtgcccacatctgtggccgccctgaagtcccagctcacccctctgtcatccagccaggagtcctacctg

SEQ ID NO: 78721 - DNA, 120 bp, Artificial Sequence
  ENSG00000080854_25 (sequence is synthesized)
ccaccaccagcatacagccctcggttccagccccgcgggctggagggccccggtggcctggaaggtcggcttcaggccacaggccaggcccggccccctgccccccggcccttccaccat

SEQ ID NO: 78722 - DNA, 120 bp, Artificial Sequence
  ENSG00000080854_26 (sequence is synthesized)
ggccagtattatgggtacctcagcagcagcagccctggggaggtggagccgcccccgttctacgtgccagaagtgggcagccccctgagctccgtcatgtcgtccccgcccctgcccacc

SEQ ID NO: 78723 - DNA, 120 bp, Artificial Sequence
  ENSG00000080854_27 (sequence is synthesized)
gaggggccctttggccaccccaccatccccgaggagaatggagagaatgcatccaacagcacgctgcccttgactcagacacctacaggagggcgctcccctgagccctggggccggcca

SEQ ID NO: 78724 - DNA, 120 bp, Artificial Sequence
  ENSG00000080854_28 (sequence is synthesized)
gaattccccttcggggggctggagaccccagcgatgatgttcccccaccagctgccaccctgtgatgtgcccgagagtctgcagcccaaggccggcctcccccgaggactgccccccacc

SEQ ID NO: 78725 - DNA, 120 bp, Artificial Sequence
  ENSG00000080854_29 (sequence is synthesized)
tccctgcaggtgcccgcggcctacccgggcatcctgtctctggaggcaccgaagggttgggcaggcaagtcgcccggcaggggccctgtcccagcgccccccgccgccaagtggcaggac

SEQ ID NO: 78726 - DNA, 120 bp, Artificial Sequence
  ENSG00000080854_30 (sequence is synthesized)
agacctatgcaacctctggtaagccaagggcagctgcgacatacaagccaaggcatgggcatacctgtgctgccttaccccgagccggctgagccgggggcgcacggcggccccagcaca

SEQ ID NO: 78727 - DNA, 120 bp, Artificial Sequence
  ENSG00000080854_31 (sequence is synthesized)
tttggcctggacacccggtggtatgagccccagccccggccccggcctagccctcggcaggccaggcgcgccgagcccagtttacatcaagtggtgctacagccctcccggctctcacct

SEQ ID NO: 78728 - DNA, 120 bp, Artificial Sequence
  ENSG00000080854_32 (sequence is synthesized)
ctgacccaaagccccctcagctcccgcaccggctcccctgagctcgccgcccgtgcccggcctcgcccgggcctcctgcagcaggcagagatgtcagagatcaccctgcagccgccggct

SEQ ID NO: 78729 - DNA, 120 bp, Artificial Sequence
  ENSG00000080854_33 (sequence is synthesized)
gcagtcagcttttctcgaaagtctacgccgtccacaggctccccctcccagagcagccgcagtgggagtcccagctaccggcccgccatgggcttcaccactctggccaccggctaccct

SEQ ID NO: 78730 - DNA, 120 bp, Artificial Sequence
  ENSG00000080854_34 (sequence is synthesized)
tcccctccacccggccccgcccctgctgggcctggggacagcttggacgtgtttggacagacgccttcccctcgaaggacgggggaggaattgctccgaccggagaccccaccacccacg

SEQ ID NO: 78731 - DNA, 120 bp, Artificial Sequence
  ENSG00000080854_35 (sequence is synthesized)
ttacctacttcaggaacacttccacctgcacccgggaacgctgctgcgcctgagaggctggaggctctgaaataccaacggataaagaagcccaaaaagtcatccaagggctcttcgaag

SEQ ID NO: 78732 - DNA, 120 bp, Artificial Sequence
  ENSG00000080854_36 (sequence is synthesized)
tcaaagaaacgatccgacgattctgcctcccagactcagcagcttcccaactctcaggttctgtggcccgatgaagctgtctgcctccgaaagaagaagagacattctcgtcctgacccc

SEQ ID NO: 78733 - DNA, 120 bp, Artificial Sequence
  ENSG00000080854_37 (sequence is synthesized)
tttgcccggctctcagacttgtgccaccgccagcttccggaagaccagacagcgattctcaacagtgtggaccacgatgacccaggacatgccactttgctgtgactccaccccactcta

SEQ ID NO: 78734 - DNA, 120 bp, Artificial Sequence
  ENSG00000080854_38 (sequence is synthesized)
ggtgtccccggggcgaggttgctgggctcaggcagggagggccactgtgtgggggtgtgtcctcctccgtctgccaagggcggcccagacctttgtcctgcatgccccctcttttgccag

SEQ ID NO: 78735 - DNA, 120 bp, Artificial Sequence
  ENSG00000080854_39 (sequence is synthesized)
agcgggtgtctccctccagatcctggccgcctgtcttcaggacggagggtgggcacaccttccacctgtgggtcgaggtcaggaagtggattggagactgggcaacacctgtctcctccc

SEQ ID NO: 78736 - DNA, 120 bp, Artificial Sequence
  ENSG00000080854_40 (sequence is synthesized)
ctccgccccctgcttcactaggttgatttttctcatctcttccaatgtctttggaagtgaagaggaaagcaatggcttttactgctctctgcttctgtttcagtttttcaagtcctggaa

SEQ ID NO: 78737 - DNA, 120 bp, Artificial Sequence
  ENSG00000080854_41 (sequence is synthesized)
gaaggctggacttaatgtccatcttccacaccccacatatatatagatatagatacagatgcatatgtctgtagtgtgtgggtttctctatgtgtgtatatatatatatatatatgtaca

SEQ ID NO: 78738 - DNA, 120 bp, Artificial Sequence
  ENSG00000080854_42 (sequence is synthesized)
ttgaggcaaagtgctgttgctctctgtggtcagtggaggcaggaggaggagggcagtggccagctggggtttgcgagcagggctggctgcacgttggccaggtgcctgacatctgtcttg

SEQ ID NO: 78739 - DNA, 120 bp, Artificial Sequence
  ENSG00000080854_43 (sequence is synthesized)
ggggattctttctcccaaaacaagatccgtgtctctcagctgaattctccgtgtgtctcctaccttctcccacccagagcagaaatggggccttgctgtgattaccggctgccttctatg

SEQ ID NO: 78740 - DNA, 120 bp, Artificial Sequence
  ENSG00000080854_44 (sequence is synthesized)
ggggttcagtaatgagttactgcagaactaaattcaagcctttgtttcttggttcctgggtgaagaaggggtggccaggctcctagacctgcatctttcttccttccagcgtggctcacg

SEQ ID NO: 78741 - DNA, 120 bp, Artificial Sequence
  ENSG00000080854_45 (sequence is synthesized)
ctgcaggagtagaggctaactcagccgcggggctaaagcaagcctctggtgcacatgtccagcgcatccgtcggcgcccttccgcccagccaggccgtgagctctgtggccaaagtctcc

SEQ ID NO: 78742 - DNA, 120 bp, Artificial Sequence
  ENSG00000080854_46 (sequence is synthesized)
ccactgcggagccacctgtgctagcgccaagctgccggctctatttataccgtccccggctcagcactctgtgcagtgctgttccacagcggctgattggatcctcctttgcttttgtgg

SEQ ID NO: 78743 - DNA, 120 bp, Artificial Sequence
  ENSG00000080854_47 (sequence is synthesized)
gagctaattctccagattgattaattaccacttgtgcggagccgcctgtggctttcccgcactcaccacgtgctgcctgccgactcttctctgccccggggccttcgtcctccggtggac

SEQ ID NO: 78744 - DNA, 120 bp, Artificial Sequence
  ENSG00000080854_48 (sequence is synthesized)
ctgagctgcagggggatgagctcaggtgaagctagggcgcctctggctgctggggcctgggacgctctggatcctgccctctttgcccagttctattctgtggctgaggcgtaggaatga

SEQ ID NO: 78745 - DNA, 120 bp, Artificial Sequence
  ENSG00000080854_49 (sequence is synthesized)
aggcgggaggggtggtgagtagggtctgggcactgactcttcctctgccaaagtctggtcctggttcaaactcgtagcatccagaagcttcctgagatcatcttcccactaagatgtctc

SEQ ID NO: 78746 - DNA, 120 bp, Artificial Sequence
  ENSG00000080854_50 (sequence is synthesized)
tctgccggtaagatatggtgctgcccaagggcagggcagaaggccccgagggcggggtggaggggagatctgcccctcccccactcttgtgtaggagccccccttctggcttggcttaga

SEQ ID NO: 78747 - DNA, 120 bp, Artificial Sequence
  ENSG00000080854_51 (sequence is synthesized)
atgaaggttccttgaagtatttccttcttggtgctgctgtcttggtgggtttgggggcacccacctctcccgagttccctgcttggacgtgagccacggcagcattggatggcttctgct

SEQ ID NO: 78748 - DNA, 120 bp, Artificial Sequence
  ENSG00000080854_52 (sequence is synthesized)
ggtctcatgcagctgccatgggcttggcccagtgacctcgcaggatgaggccttggatggctgctgtctcttcttggcgtttccatcttaggggatggacttcttctgtgccacaccggc

SEQ ID NO: 78749 - DNA, 120 bp, Artificial Sequence
  ENSG00000080854_53 (sequence is synthesized)
cctggtccttcctttcacccagggagctgaggaccagctccacccttgaggtttaccgtgcaagtaacaccaccgcagttcctttctgaacacatctgaaggggtcatggtgagagaggc

SEQ ID NO: 78750 - DNA, 120 bp, Artificial Sequence
  ENSG00000080854_54 (sequence is synthesized)
acgcaggggcttctgagactgggccgtgcacccttggggtggaacctgggccttccagttgatgtgcttctctggggcgttggaatccacttgaccactgggcaccagctctgcgagatg

SEQ ID NO: 78751 - DNA, 120 bp, Artificial Sequence
  ENSG00000080854_55 (sequence is synthesized)
gaagagcacacaactctttgtgttcttttttccaggtagcacaccctctgcccccgcgtcgtgatgtgctgctcacttgggcgtctctcctgggggatgacgggagccggcttacctgag

SEQ ID NO: 78752 - DNA, 120 bp, Artificial Sequence
  ENSG00000080854_56 (sequence is synthesized)
gtgttggggtgggaggtgggggcttaccgcaagctgacgtgcagcctttatgcactggcagtgtgagatttctaccccagaggagctcacggggctcagccaggccctgggatgcactgg

SEQ ID NO: 78753 - DNA, 120 bp, Artificial Sequence
  ENSG00000080854_57 (sequence is synthesized)
gatgtgggcatcaggctgtcagccttcaggatgaatttggcctacttttctgagcaccctcctgggaattccagccctcaggttagaaaagaagaggagatgatgaggtagaaggctttg

SEQ ID NO: 78754 - DNA, 120 bp, Artificial Sequence
  ENSG00000080854_58 (sequence is synthesized)
cttctttcggatgtcatgagaggctgagatgctcaggccatggctgtgccttccagggcacccccgtgctaacccaggtgctgactcctcctccgcttcctctggcagtgcccatgacct

SEQ ID NO: 78755 - DNA, 120 bp, Artificial Sequence
  ENSG00000080854_59 (sequence is synthesized)
cagcacgtagacccaacgcggggagccgtgcttttcgctggtcaccgagtggctgctgtgctgtggcttccctggctagggcaaggacgtcaggtctgcccatctctcagtggcctgcca

SEQ ID NO: 78756 - DNA, 120 bp, Artificial Sequence
  ENSG00000080854_60 (sequence is synthesized)
ctcattcagctcccctgagggcttcctcctgtgacagtgtcctcggaggccagcagccctcctgcagcccgtggacggcgatgggattggtggaacgcagttccctccgtggatagaggg

SEQ ID NO: 78757 - DNA, 120 bp, Artificial Sequence
  ENSG00000080854_61 (sequence is synthesized)
tgaagatgtcacaggcacaagtttaggtgctgggtgtgggcatgtgtgacagcgtggttgtgagcatgtgggtgatgggggtgtaaccacctctagggaccagtgtccttcatagtctgc

SEQ ID NO: 78758 - DNA, 120 bp, Artificial Sequence
  ENSG00000080854_62 (sequence is synthesized)
ctttgaacaatggcagtgactactgatcagcttcttaggacttcggcactcactctgtaggagatcacgccttccaaacttccccttttacggtctggcggccttgcagtagacacgact

SEQ ID NO: 78759 - DNA, 120 bp, Artificial Sequence
  ENSG00000080854_63 (sequence is synthesized)
cagatgtaaacctgcttctgtgtctcagatgtctgtctgcctcttcagcatcatggctgagaactgtggctgttgtagtgtcaggtgacccacagaccaggaagaggggaaaacggttct

SEQ ID NO: 78760 - DNA, 120 bp, Artificial Sequence
  ENSG00000080854_64 (sequence is synthesized)
tagcggggcctggacaactgcatttgcgtggggagagaagatgtacgacgaggcagagaggcgaagcctgtcttgatttgctggtgggctgccgtgggctccctggtgctgagcggggtc

SEQ ID NO: 78761 - DNA, 120 bp, Artificial Sequence
  ENSG00000080854_65 (sequence is synthesized)
ctgtgctggattgttggggtggctctgggcccagcatctgggagtggccctgcctgctgccagtctgcctctaagcagcttccctggagagactgggggtaggacaggccttttgagatc

SEQ ID NO: 78762 - DNA, 120 bp, Artificial Sequence
  ENSG00000080854_66 (sequence is synthesized)
ctactttcttagcaggaaggacgcctttttcccagcaggctggcggggtctgtgccctcctttgaggtgcttagtcccacaaccatgcgcttgggggaagactgaagccgggtggattga

SEQ ID NO: 78763 - DNA, 120 bp, Artificial Sequence
  ENSG00000080854_67 (sequence is synthesized)
gccgagtatttcttgttatttttccatgctctctgtctttatttttgatttgtgatctaaaatatttggggttgaactgatttaatttattcctctgccctttttgtgctgaggaaactg

SEQ ID NO: 78764 - DNA, 120 bp, Artificial Sequence
  ENSG00000080854_68 (sequence is synthesized)
gggtaaggttcaaatgtgaaattttctgattttatttggggtgggggacaaggttgacgaaacagtagcttctagggagaaacagatttcacggagcctccagcatctttggcactgccc

SEQ ID NO: 78765 - DNA, 120 bp, Artificial Sequence
  ENSG00000080854_69 (sequence is synthesized)
acgatctgaatctccagggctgaagactgcgtggctggaatctgtttcttcctattttgttagcaaaagccttttccaggcttgggggtggggtgggggaagaattgtacataaagtaca

SEQ ID NO: 78766 - DNA, 120 bp, Artificial Sequence
  ENSG00000080854_70 (sequence is synthesized)
ttttattaatctgtagagaaacctaggaaaagaaaagctaatggttaatcttgggcttgctttgcttgcatgtaaaggagctttgggggcactgcagggatggctggggagctgcaggaa

SEQ ID NO: 78767 - DNA, 120 bp, Artificial Sequence
  ENSG00000080854_71 (sequence is synthesized)
ctgagcgggtcatggaaggctctgttgagtccagcctctgtggtactctaggagctgtgcacattcccaccggggcttctaacccagccctgcctgggtatcttcttcatataaagtgga

SEQ ID NO: 78768 - DNA, 120 bp, Artificial Sequence
  ENSG00000080854_72 (sequence is synthesized)
tctagtaggcagtgtgtagagccccatgtggctgtgtgtgttgctttagggagagggccaaagaggtgccttattggccagctctagattgactagggtaatggatggggcactggtgtt

SEQ ID NO: 78769 - DNA, 120 bp, Artificial Sequence
  ENSG00000080854_73 (sequence is synthesized)
tcaggagggggagttggagaactggagggtggaggggaggcctgtgtgctttgccaggtgttggtgaggctggaaggggcacagagggtgaggtcaggcatgggttaggatggtgagacc

SEQ ID NO: 78770 - DNA, 120 bp, Artificial Sequence
  ENSG00000080854_74 (sequence is synthesized)
accccaggggacaccaagcctcagcatctctttgagtcatgtgataacttagttacttgtaagggtgcagggtacacactgggggatcatcccaagatgacgaagaatgattgcctggtg

SEQ ID NO: 78771 - DNA, 120 bp, Artificial Sequence
  ENSG00000080854_75 (sequence is synthesized)
ggcatctggctggggagtggtagccatgcagggcatgtgggagggggatctgggcatcagggacggattgtggggtggggtcctgcatgtgaacgcagactggatcttgggagaggtctt

SEQ ID NO: 78772 - DNA, 120 bp, Artificial Sequence
  ENSG00000080854_76 (sequence is synthesized)
gcttcttagctagatcttccttgcttcttctagaattagcctctaacactaagtgcccaaaccaaacatggacatcttctttatattgtatttcaacttcatttgttttgggggctcctc

SEQ ID NO: 78773 - DNA, 120 bp, Artificial Sequence
  ENSG00000080854_77 (sequence is synthesized)
aggcccaaagctgagaaacttgtcttgagatgcccatcctatcaccagctcttcatcagtggagaaggaagtgccattctcattttcctaagctgcagcggtgggttgcctctccgtcca

SEQ ID NO: 78774 - DNA, 120 bp, Artificial Sequence
  ENSG00000080854_78 (sequence is synthesized)
caatctgaaaatgttcatgggccttggtgatggtgatggtgatagagagggggagctggagcctgacgtgccttcatccccctttcctcttgaggtagagaggcttccttccggccatga

SEQ ID NO: 78775 - DNA, 120 bp, Artificial Sequence
  ENSG00000080854_79 (sequence is synthesized)
agttgcacagtggcttcgtgaggccttctctttactttctcttcttttgataggctaaagtcactagtctgtggtggaggtgggagggcaaaagagtttcacctgaaactcttggcttga

SEQ ID NO: 78776 - DNA, 120 bp, Artificial Sequence
  ENSG00000080854_80 (sequence is synthesized)
ccagccattcttctctctttaatgtctccagctctgcttctttttagattaagaggcagaatgaaaaatctcttctttagaagaagtcagtaaaccaaggatcaaagcccagattggact

SEQ ID NO: 78777 - DNA, 120 bp, Artificial Sequence
  ENSG00000080854_81 (sequence is synthesized)
ttcgcactcttaccagcttgctgtttggctaggggtaccaatcaccacccttccctctgactgcgagtgaatccacactggttcagagccttatttctgggttcctgtctgtactctcaa

SEQ ID NO: 78778 - DNA, 120 bp, Artificial Sequence
  ENSG00000080854_82 (sequence is synthesized)
aaccttctttcaggagcaagtataataaccccaccagatgttctgtgtgttgggttgccgagaaggtggaagtttttttcaacctcattttaagctgttagaaaaacactcagtagattg

SEQ ID NO: 78779 - DNA, 120 bp, Artificial Sequence
  ENSG00000080854_83 (sequence is synthesized)
aatttggtccaaagacaccaccatcccctgagggatcccatgtaggataaggataaatgaagcatccatacaggggtcattaatggctgctcacatcttagagaaggaagagtctgggta

SEQ ID NO: 78780 - DNA, 120 bp, Artificial Sequence
  ENSG00000080854_84 (sequence is synthesized)
tcttggttgccatatactctggtggaacagtggccagtcattaaaatcacatgggtgttgtcttctgcggtgtagaagacagtagtagtagttagggtttcggacgagagctggtgaaaa

SEQ ID NO: 78781 - DNA, 120 bp, Artificial Sequence
  ENSG00000080854_85 (sequence is synthesized)
gctaccggctttggagccctggctgggagagctagattggacagttttaaccccgtggctcaaatgctcagctcctgtcactggtccttggttgtcaccattcccatcacactagatggg

SEQ ID NO: 78782 - DNA, 120 bp, Artificial Sequence
  ENSG00000080854_86 (sequence is synthesized)
gacgtgaatggctgcctgggcctgcctttctttcgggtcttgaagaagtgtgctccaccaatcctacctctctgtggcactggatttcctggatttattttgcgaactagggcaggttct

SEQ ID NO: 78783 - DNA, 120 bp, Artificial Sequence
  ENSG00000080854_87 (sequence is synthesized)
ccctcgccaccccgtatacacaccagttagcttcccttcccttttcctttccccacttctgtatggctccagggatcgtgaacatgtgcgtggtttacgatggggaggtggtgggagggg

SEQ ID NO: 78784 - DNA, 120 bp, Artificial Sequence
  ENSG00000080854_88 (sequence is synthesized)
cagggaatctcggagggcagggggttgggctggggaggtgacttgcattttcggccttagaaatgctgcgggcatgcacgtgtggggttttcatataagccatgggaggggcgagtgccc

SEQ ID NO: 78785 - DNA, 120 bp, Artificial Sequence
  ENSG00000080854_89 (sequence is synthesized)
agccctcctcacgctggtggtagaacccagggctttggcctccttttggcatagtggtctatgaagctgtatttctggtggagggatgagcctcctcacggtcatcttgcagttcttgaa

SEQ ID NO: 78786 - DNA, 120 bp, Artificial Sequence
  ENSG00000080854_90 (sequence is synthesized)
agggtagttgtcagccactctatcaatgaggttttatatggcctcccatgaacaacgagaggtgtgccatggccgacggtgtcctggcagggctggagaagggattgtctcatgtgtcct

SEQ ID NO: 78787 - DNA, 120 bp, Artificial Sequence
  ENSG00000080854_91 (sequence is synthesized)
tctgcaggcaccaggttgtccccctggtctctaacccccagccagctgtctagtccagtgtttcttttctggattcaggaagtaagtggggtgtgtgtgtgtgtgtgtggggtgtgtgtg

SEQ ID NO: 78788 - DNA, 120 bp, Artificial Sequence
  ENSG00000080854_92 (sequence is synthesized)
tgtatgtggtgtgtgtggtatatgtgtgtggtgtgcatgtctgtgtgtggtgtgcatgtctggtgtgtgtgtgtgttgtgtgtggtgtgtgtatctgtgtgtggtgtgtctgggtggtgt

SEQ ID NO: 78789 - DNA, 120 bp, Artificial Sequence
  ENSG00000080854_93 (sequence is synthesized)
gtgtggtgtggtgtgtgtattgtgtgtggtatgtgttgtgcgtattgtgtggtgtgttgtgtgtggtgtgtctattgtgtggttgtgtatgtgtgtggggtgtgtgtggtatggtgtgtg

SEQ ID NO: 78790 - DNA, 120 bp, Artificial Sequence
  ENSG00000080854_94 (sequence is synthesized)
tgtatctgtggtgtgcgtgtatgtgtgatgtgtctggtgtgtgtgtgtgtgatgcagtgtgtgtggtgtgttgagtgtggtttggtgtgtgtatgttgcgtgtggtgtatgcttgtggtg

SEQ ID NO: 78791 - DNA, 120 bp, Artificial Sequence
  ENSG00000080854_95 (sequence is synthesized)
tgtctggtgtgtttggtgtgtgtgtgtttggtgtgtgtggtgtgtctggtgtgtttggtgtggtacatggactgtgtgtggtgtgtgtgtgtgctatgtgttttgtgtattgtatgtggt

SEQ ID NO: 78792 - DNA, 120 bp, Artificial Sequence
  ENSG00000080854_96 (sequence is synthesized)
gtgttattgtgtgtggtatgtgtgtattgtgtgtgggtgtggtgtgtggtatggtgtgtgtatgtctggtgtgtgtgtgtgtgtgatgtgtctggtgtgcatgtgtgtgatgcggtgtgc

SEQ ID NO: 78793 - DNA, 120 bp, Artificial Sequence
  ENSG00000080854_97 (sequence is synthesized)
atgtgtgtgatgtgtgtgtgtgttgtgtggtttggtgtgtgttgtgtgtggtgtgttgtgtgtgtgttgtgtgtgtgtgtggtgcgtgtgtggtgcgtgtgtggtgcgtgtgtggtgtgt

SEQ ID NO: 78794 - DNA, 120 bp, Artificial Sequence
  ENSG00000080854_98 (sequence is synthesized)
gtgtgtttgtgtgtgtggtgtggtgtgtctgttgtgtgtggtgtgtgtgagagagatttgtacagacatgctgatttgcctgcgtagtgtcaggcccaggagaccctcctttgtttggct

SEQ ID NO: 78795 - DNA, 120 bp, Artificial Sequence
  ENSG00000080854_99 (sequence is synthesized)
cttttgctagacaacttctgtttgggtaggagggtcaaattagtaatgcaccatctttaatgtattttttatggagactgtacataaaattatataaatctacagaattggttctatttt

SEQ ID NO: 78796 - DNA, 120 bp, Artificial Sequence
  ENSG00000080854_100 (sequence is synthesized)
aaggagagaggggaatgtatgtgggaggcaaggatcagatgcaatcgtggagactgggagcttcgggcgagtggcactcgggtgtggggagcgggagggcaagagatgagtgccgggcaa

SEQ ID NO: 78797 - DNA, 120 bp, Artificial Sequence
  ENSG00000080854_101 (sequence is synthesized)
gatgggcaggggcccgtgccctctgcacacatatataaatataaagaacacctagataaagtctatatatctctatatctatatgaagtcatagtttgctttatttttgtacctgtgctt

SEQ ID NO: 78798 - DNA, 120 bp, Artificial Sequence
  ENSG00000080854_102 (sequence is synthesized)
agagatgttttgagcagtgctaccttcccaggcagtctgggatactagctcatgccttgacgccacctccttccctgctcttcctttggtattctctctgttcagagttgcttgggtctt

SEQ ID NO: 78799 - DNA, 120 bp, Artificial Sequence
  ENSG00000080854_103 (sequence is synthesized)
tctgatggaaatgtgtatatatgaaaagtttgtaaaataacaaaacaaataacccacctgcaggaaggacaagtgagctgaaggttgtgtggagctgcaggatctgatagccctaaagaa

SEQ ID NO: 78800 - DNA, 120 bp, Artificial Sequence
  ENSG00000080854_104 (sequence is synthesized)
ccaggaccaatgtgtctcttgccacttgggagggatgttgacttgaacttctttgcagaggggcttaacagggcaaggctgaggagatgaaaactgtgactccatccccacgtggctgtg

SEQ ID NO: 78801 - DNA, 120 bp, Artificial Sequence
  ENSG00000080854_105 (sequence is synthesized)
gaaaggtaaccagttcctcagagaaaacctggcttcacagcattagaaagggggtggttgagactacctagggacctacggtgacacctgtcttggtttgtagcactgtagctcagacag

SEQ ID NO: 78802 - DNA, 120 bp, Artificial Sequence
  ENSG00000080854_106 (sequence is synthesized)
ctcagaccgctcatagagggcatggcaatgggagagtttgtgaggctggctgcctgggcttggtcttggagaacacatggcctgtttagtgttgctgcagattcttagagccagtgtgaa

SEQ ID NO: 78803 - DNA, 120 bp, Artificial Sequence
  ENSG00000080854_107 (sequence is synthesized)
tgtggtatgtagtataaatatgtcatctatgtttttttcagttatttttaattggaaataaagtgccattgcaaataggatgctccaatcctgggacactgagtggaggatgaggaggga

SEQ ID NO: 78804 - DNA, 120 bp, Artificial Sequence
  ENSG00000080854_108 (sequence is synthesized)
gagatgaactgtgggccggcctgggagagggggtcttagtggaaccttccttctggcctccagccggggacttacaaaactgaacaatgtattggcagaactggacccacaatgggagat

SEQ ID NO: 78805 - DNA, 120 bp, Artificial Sequence
  ENSG00000080854_109 (sequence is synthesized)
tctggggagcaggagttcacttgtatctgagcaggaagcagtgtgccctgaagaatacctctctgagcaaattccagacctcacacatatgcaagggctctgccttgcagcctcagcaag

SEQ ID NO: 78806 - DNA, 120 bp, Artificial Sequence
  ENSG00000080854_110 (sequence is synthesized)
cgtctcctggtgctagctccttcctgacttgcccggagctcggagtgatgtatttgaagctggtgctgggccagatggtgcaggcagtgaggagagactcaggactgcaacctttcggct

SEQ ID NO: 78807 - DNA, 120 bp, Artificial Sequence
  ENSG00000080854_111 (sequence is synthesized)
ccttattcctgctcatcactcagaaaagggcagtactaacccctttcctaaccaagacatggcactccctaagagctcttgtctatagagtttggtccttagaggaaagcagataccttc

SEQ ID NO: 78808 - DNA, 120 bp, Artificial Sequence
  ENSG00000080854_112 (sequence is synthesized)
agcgtgagaagggcttggttgacagttttggggtattatgggaagagtaggttggggtaaagcttgagtctaactcttgatccttacatggacctatgaggccctgccattcagtcaggc

SEQ ID NO: 78809 - DNA, 120 bp, Artificial Sequence
  ENSG00000080854_113 (sequence is synthesized)
actgtccttgggtcctcaaattaactgctgagaacactccccactttccgaggacgctgatgggaaatgggctctgtccatgcagctggaaggatccagtgctggtgccactgtcagtgg

SEQ ID NO: 78810 - DNA, 120 bp, Artificial Sequence
  ENSG00000080854_114 (sequence is synthesized)
caccatccttgccttgaatgatctttcttgcaggctcctgcagctgagtgtttcttgtaagatttttcagggggattgggcaagaagaagaggtgcaaattctgttcccttcctaccttg

SEQ ID NO: 78811 - DNA, 120 bp, Artificial Sequence
  ENSG00000080854_115 (sequence is synthesized)
aagccttcccagaccaccacggtctctgcacaagggaggctcccattactgttctgttggcttctagacccaccatcccctctctttctgtggactctgcccgacttctggccacatgca

SEQ ID NO: 78812 - DNA, 120 bp, Artificial Sequence
  ENSG00000080854_116 (sequence is synthesized)
accagcagagtaaactgctccaacacctcgggcatgtcctagggcttgccctcccaccagggccagcccaagattaggtcctcagcagcatcaaggtctgggagagccactggcccacat

SEQ ID NO: 78813 - DNA, 120 bp, Artificial Sequence
  ENSG00000080854_117 (sequence is synthesized)
gtcaccattctattcctcagcctccaacaggactcttcattttggggagggaaagggaagatggggccatagcccctaccttgaaattgtacagtgtggaggggatgttagtgcctacct

SEQ ID NO: 78814 - DNA, 120 bp, Artificial Sequence
  ENSG00000080854_118 (sequence is synthesized)
gtgacctttctgctccactgctcagcaagatgaggtaaggttgggtgtcagaggggacctccagcttctctgaagagccagcccttaaggcacttggagcaaaggtcattgagatcagct

SEQ ID NO: 78815 - DNA, 120 bp, Artificial Sequence
  ENSG00000080854_119 (sequence is synthesized)
ttatgtggagtaaggaggaggcctgggaaccgcttgtggcatcagttggggcgacaggtggatgagtgtgctctgatggagcttttacggcccacagccactgccaggagcctgagctct

SEQ ID NO: 78816 - DNA, 120 bp, Artificial Sequence
  ENSG00000080854_120 (sequence is synthesized)
tccccatgcttgggacacgttccttggtccccacagcagaatggacattgaattttggtgcttttccctttggtagaaggtggaggtatctgaggagttgtttctgtcttgctacctctg

SEQ ID NO: 78817 - DNA, 120 bp, Artificial Sequence
  ENSG00000080854_121 (sequence is synthesized)
tctactatatagagcaagagtcgggaatagggagatgtgtgagaatcactctcccatggatcagtgtgggccctgtccctcttccccactgtcaccaaccagcagcttggggaaaaggct

SEQ ID NO: 78818 - DNA, 120 bp, Artificial Sequence
  ENSG00000080854_122 (sequence is synthesized)
ctgtcgtggatttttgctgcctgcttcccgcttccactcttcttggcggtagatgttcatggtgatccactttgggcggtctgaaagtaggaggtgggggaagaggcaagcctgcacaca

SEQ ID NO: 78819 - DNA, 120 bp, Artificial Sequence
  ENSG00000080854_123 (sequence is synthesized)
cacttcctgtccacagggggttgcctgtggcattggagggtggagtctcagagtccagggactgggaggaaggtacttgatgggatggtcttgattctggaactttagactgaggtgtta

SEQ ID NO: 78820 - DNA, 120 bp, Artificial Sequence
  ENSG00000080854_124 (sequence is synthesized)
gaaaggggaattgttggctaggggagaagagcagtttaacgctccacttgctaagtcgtctgtatcagtgtcagaaggtcttgacctcccattcagatttaatttcctaactgccaggtg

SEQ ID NO: 78821 - DNA, 120 bp, Artificial Sequence
  ENSG00000080854_125 (sequence is synthesized)
tggggctggggatagagggcccagaagggggcgcagtcactgacgtgaagggaccacatcccgcttcatgtcagtgactcctgccccttggtcttcagtgtttttctcttccccaggagg

SEQ ID NO: 78822 - DNA, 120 bp, Artificial Sequence
  ENSG00000080854_126 (sequence is synthesized)
gactttgatcatgcaggatagaattctcccatcgcacacctgggggcaagttttagatgagcttctttcctccatttcacctggtggtctgaggacacacagagggtgggggtgagcagg

SEQ ID NO: 78823 - DNA, 120 bp, Artificial Sequence
  ENSG00000080854_127 (sequence is synthesized)
cagtgtgggtggggaggggctacctcccccagaccccttacaaactctgtacctctcggtgcgcggcagcctcttgctgtagttcttcttttctggatatgactgtcagtttcgtcatga

SEQ ID NO: 78824 - DNA, 120 bp, Artificial Sequence
  ENSG00000080854_128 (sequence is synthesized)
gatttcttgctctcatttcgaactctttctttcttccactttctttgggggcgacccccgatccatgccaggtcttcctgtgaagaccgttccaacctcgtttccatttcttgaatgttg

SEQ ID NO: 78825 - DNA, 120 bp, Artificial Sequence
  ENSG00000080854_129 (sequence is synthesized)
agtattacaacatcactgcgctagggtgcttcatggtgctgttctcgaagaggccagttgggctgaatctccttcctcccactggctcctgatatcttgctgtattttgtcttctttctg

SEQ ID NO: 78826 - DNA, 120 bp, Artificial Sequence
  ENSG00000080854_130 (sequence is synthesized)
atttttccctaggggtttggggtgggtgacttaggggcggcttttgtgttctccctctctctctctttcttttctgtatgtatgtatggactggttaaagtgagtttgggcagctgactt

SEQ ID NO: 78827 - DNA, 120 bp, Artificial Sequence
  ENSG00000080854_131 (sequence is synthesized)
tatggtatgggttggctgacttttgttcaacattaaagacaaaccaacaaattgtacagctgcacacagaacacctttgagtgtgaacttgaatggcaactagaggcttactttttgaac

SEQ ID NO: 78828 - DNA, 120 bp, Artificial Sequence
  ENSG00000080854_132 (sequence is synthesized)
ttcaggtatgtaactcaaaagtaaataaaaccactattttttcagtaagcttttttttcttctaaaagatgacttagaaatcaaactataagaacatgaaatcggtgctgtaccaaagcc

SEQ ID NO: 78829 - DNA, 120 bp, Artificial Sequence
  ENSG00000080854_133 (sequence is synthesized)
ttatatgaacatattctacactctgtataacctgtctgtgaggagctccctgctctatcaccctcttctcaaaagcctgggaatgccagcgcgtgccaagcctggggctgggtcttgggg

SEQ ID NO: 78830 - DNA, 120 bp, Artificial Sequence
  ENSG00000080854_134 (sequence is synthesized)
acctgtgggccaagggcaccctgggaagtaaaagatgacggtgaggatgggacacccttctgctgcctgagcagactgcaaggaaaccagatgtgtgtgtgtgcgcgcacctgcatatat

SEQ ID NO: 78831 - DNA, 120 bp, Artificial Sequence
  ENSG00000080854_135 (sequence is synthesized)
atgtgtgcatacctgtgcgtgtgtgtgcgtgtgcgtgtgtgcacgcaagagagtgagagcgggagagagctcacaggtgcacagtgtcatggtgaatgtactaagtacgagcttgaaggg

SEQ ID NO: 78832 - DNA, 120 bp, Artificial Sequence
  ENSG00000080854_136 (sequence is synthesized)
aggcccaggttggctctgggagtggggcggtgtgggaatgaaggggggatgctctctcccctgttttctgcctccttcccttctccgtcagggaagggaggtgtattggaaacagctaca

SEQ ID NO: 78833 - DNA, 120 bp, Artificial Sequence
  ENSG00000080854_137 (sequence is synthesized)
ctctcaatcaggtgctttttttccctcaaaatctccaaactcaaagcatttataaggggcccttccaatgggcaggcacccccagccaccaaatcacagacttccaagagtaggaggaac

SEQ ID NO: 78834 - DNA, 120 bp, Artificial Sequence
  ENSG00000080854_138 (sequence is synthesized)
tgtctcctcccgaacccttccttgctttcctggggaagagggttcttcctgcagggaccctgggcatcctgctgctgggcctgggcctatagactgccctgccccttcttcccaaacact

SEQ ID NO: 78835 - DNA, 120 bp, Artificial Sequence
  ENSG00000080854_139 (sequence is synthesized)
gagaagaccccgctggagatgaccccaaagccacgcctgctctacggccctaagcaatagacgcctgccctggctgctgatgatggtgatccctttgtcctttgacttggcagtcaaaaa

SEQ ID NO: 78836 - DNA, 120 bp, Artificial Sequence
  ENSG00000080854_140 (sequence is synthesized)
tggagtgacaccccagactcagtcaggaagagaacctgcagcctgcctcagctcaggctaccacgccaggctccactcgctggtatttccaggcttgctaagtactaaccaactcatccc

SEQ ID NO: 78837 - DNA, 120 bp, Artificial Sequence
  ENSG00000080854_141 (sequence is synthesized)
cagtaacactgcatgttcatatcctgaattacaaatcaaaatgagcaaacacgtgcataagcaaatgagaaaaaagaaggcacacatcaaatgatgagatgtgcagccagtgcaggtacc

SEQ ID NO: 78838 - DNA, 120 bp, Artificial Sequence
  ENSG00000080854_142 (sequence is synthesized)
ccgggagtgttgcaagttaaactgatgaaaagacgtttagtatttaattgctcctcatgtaacattactctgcttcagaaatgttttgtattttgatataaataaacatttgctaaaaaa

SEQ ID NO: 78839 - DNA, 120 bp, Artificial Sequence
  ENSG00000080854_143 (sequence is synthesized)
ggactgaactctgtccttctgtgggtcagctacttggctttcttccagcccctcttccaaagcctcacacatccgggagctgaattgtggctctctggttgtcctttccagaacacttcc

SEQ ID NO: 78840 - DNA, 120 bp, Artificial Sequence
  ENSG00000080854_144 (sequence is synthesized)
agtctgctggaggcagctgacctatttttcttgggaatcttcctgcttttctgttctctcttgcgtgaataagcaggagatggggcctccaagagggctctggagaaagagtccgagtgc

SEQ ID NO: 78841 - DNA, 120 bp, Artificial Sequence
  ENSG00000080854_145 (sequence is synthesized)
gccagagctgggaggagtctcagccggcctgactgtcctttctgagaaggtcccgctcagcctggctttctgtcctctgtggccccttgcctccctcctggtcgtgtgtgcccccgagat

SEQ ID NO: 78842 - DNA, 120 bp, Artificial Sequence
  ENSG00000080854_146 (sequence is synthesized)
tttcccatccccaccttccttcctttgtccttgcattccgcagagccgcagcgagggtgatgtgtggggcaggtactgttgttgcagggcagcgatgtggctgatggcgtgtccttcatc

SEQ ID NO: 78843 - DNA, 120 bp, Artificial Sequence
  ENSG00000080910_0 (sequence is synthesized)
accacaaaggactttactaaactagcttccagttagtacactgaaattcaaagtcatgctcataactgttaatgaaagcagattcaaagcaacaccaccaccactgaagtatttttagtt

SEQ ID NO: 78844 - DNA, 120 bp, Artificial Sequence
  ENSG00000080910_1 (sequence is synthesized)
atataagattggaactaccaagcatgtggctcctggtcagtgtaattctaatctcacggatatcctctgttgggggagaagcaatgttctgtgattttccaaaaataaaccatggaattc

SEQ ID NO: 78845 - DNA, 120 bp, Artificial Sequence
  ENSG00000080910_2 (sequence is synthesized)
tatatgatgaagaaaaatataagccattttcccaagttcctacaggggaagttttctattactcctgtgaatataattttgtgtctccttcaaaatccttttggactcgcataacgtgcg

SEQ ID NO: 78846 - DNA, 120 bp, Artificial Sequence
  ENSG00000080910_3 (sequence is synthesized)
cagaagaaggatggtcaccaacaccaaagtgtctcagactgtgtttctttccttttgtggaaaatggtcattctgaatcttcaggacaaacacatctggaaggtgatactgtacaaatta

SEQ ID NO: 78847 - DNA, 120 bp, Artificial Sequence
  ENSG00000080910_4 (sequence is synthesized)
tttgcaacacaggatacagacttcaaaacaatgagaacaacatttcatgtgtagaacggggctggtccactcctcccaaatgcaggtccactatttctgcagaaaaatgtgggccccctc

SEQ ID NO: 78848 - DNA, 120 bp, Artificial Sequence
  ENSG00000080910_5 (sequence is synthesized)
cacctattgacaatggagacattacttcattcctgttgtcagtatatgctccaggttcatcagttgagtaccagtgccagaacttgtatcaacttgagggtaacaatcaaataacatgta

SEQ ID NO: 78849 - DNA, 120 bp, Artificial Sequence
  ENSG00000080910_6 (sequence is synthesized)
aattatggaaaaatataacataaaattaaagtggacaaaccaacaaaagctttattcaagaacaggtgacatagttgaatttgtttgtaaatctggatatcatccaacaaaatctcattc

SEQ ID NO: 78850 - DNA, 120 bp, Artificial Sequence
  ENSG00000080910_7 (sequence is synthesized)
atttcgagcaatgtgtcagaatgggaaactggtatatcccagttgtgaagaaaaatagaatcaatggcattactattagtaaaatgcacacctttttctgaatttactattatatttgtt

SEQ ID NO: 78851 - DNA, 120 bp, Artificial Sequence
  ENSG00000080910_8 (sequence is synthesized)
ttcaatttcatttttcaagtactgttttactcatttttattcataaataaagttttgtgttgatttgtgaaaatgcaattacaatctgagatgtgtcacaatggtgaggactatcttcac

SEQ ID NO: 78852 - DNA, 120 bp, Artificial Sequence
  ENSG00000080910_9 (sequence is synthesized)
caaatctaagtaacaacctaggaattgtctttttttttctttttaaaaaaattgacaataactgtatatattcatggagtacatagtaatgtttccatatatataatgtataatggtcag

SEQ ID NO: 78853 - DNA, 120 bp, Artificial Sequence
  ENSG00000080910_10 (sequence is synthesized)
ttagggtaattagtatatccattatctcaaacatttttcatttctttgggttaggagcattaaatattctccttccagctatttggtacttcatagtatattactggtaactgaaggaat

SEQ ID NO: 78854 - DNA, 120 bp, Artificial Sequence
  ENSG00000080910_11 (sequence is synthesized)
tatatctagacgttaccccaggtatcttgaaatgtcaattcctaacagtcacagcctgggagctcatgtttgccttctttcagagcttgtaactatgtatatccacataaataatcaaaa

SEQ ID NO: 78855 - DNA, 120 bp, Artificial Sequence
  ENSG00000080910_12 (sequence is synthesized)
accactgaagtatttttagttatataagattggaactaccaagcatgtggctcctggtcagtgtaattctaatctcacggatatcctctgttgggggagaaggactgtgtttctttcctt

SEQ ID NO: 78856 - DNA, 120 bp, Artificial Sequence
  ENSG00000080910_13 (sequence is synthesized)
gttttcacttttagtgctgagttgtaatcacaggagtgcgattgtatgagtgtatttgatttttcttaagtctgtgtttatggtatttattaagtggcttatacacctattacacatggc

SEQ ID NO: 78857 - DNA, 120 bp, Artificial Sequence
  ENSG00000080910_14 (sequence is synthesized)
attacatgaggatttctaaataggggggtagcagaggaaaataagtgaaaaatatgagagaaatatgtagaattttgacaattcctaaccctcctcccaccaaaaaaaagttcaagcttc

SEQ ID NO: 78858 - DNA, 120 bp, Artificial Sequence
  ENSG00000080910_15 (sequence is synthesized)
aatccagtctctgggagaaacttcagtgaaattctatctaaaggttgcctagatgttaaatgatctgtaagtgtgtgttacactgtcatttaggtgtctactgagagacctgccaaacag

SEQ ID NO: 78859 - DNA, 120 bp, Artificial Sequence
  ENSG00000080910_16 (sequence is synthesized)
caaaaacaacacactgaagcaacacatttgtatacatagaaagctgcatgcttccagtagcaaaatatttatcaagcactatgttgtgcttcatgtagcaaagaagctggaagaaaatga

SEQ ID NO: 78860 - DNA, 120 bp, Artificial Sequence
  ENSG00000080910_17 (sequence is synthesized)
acaccaaagtgtctcagtgagtaaatgccctgttcattaaatggatgtcattcaatgaacagagaaggatatgccagacaagatcataaacacttgataatcacaggagcagtgaccaga

SEQ ID NO: 78861 - DNA, 120 bp, Artificial Sequence
  ENSG00000080910_18 (sequence is synthesized)
ggagctggaaagatgggagatgtagtccttctattttgagatggctcctatgagaatcaatgaagaataaatatgtcaactgtcttgcattacccggaaattctctacatgttgaaatat

SEQ ID NO: 78862 - DNA, 120 bp, Artificial Sequence
  ENSG00000080986_0 (sequence is synthesized)
aaattcgaacggctttggcgggccgaggaaggacctggtgttttgatgaccgctgtcctgtctagcagatacttgcacggtttacagaaattcggtccctgggtcgtgtcaggaaactgg

SEQ ID NO: 78863 - DNA, 120 bp, Artificial Sequence
  ENSG00000080986_1 (sequence is synthesized)
aaaaaaggtcataagcatgaagcgcagttcagtttccagcggtggtgctggccgcctctccatgcaggagttaagatcccaggatgtaaataaacaaggcctctatacccctcaaaccaa

SEQ ID NO: 78864 - DNA, 120 bp, Artificial Sequence
  ENSG00000080986_2 (sequence is synthesized)
agagaaaccaacctttggaaagttgagtataaacaaaccgacatctgaaagaaaagtctcgctatttggcaaaagaactagtggacatggatcccggaatagtcaacttggtatattttc

SEQ ID NO: 78865 - DNA, 120 bp, Artificial Sequence
  ENSG00000080986_3 (sequence is synthesized)
cagttctgagaaaatcaaggacccgagaccacttaatgacaaagcattcattcagcagtgtattcgacaactctgtgagtttcttacagaaaatggttatgcacataatgtgtccatgaa

SEQ ID NO: 78866 - DNA, 120 bp, Artificial Sequence
  ENSG00000080986_4 (sequence is synthesized)
atctctacaagctccctctgttaaagacttcctgaagatcttcacatttctttatggcttcctgtgcccctcatacgaacttcctgacacaaagtttgaagaagaggttccaagaatctt

SEQ ID NO: 78867 - DNA, 120 bp, Artificial Sequence
  ENSG00000080986_5 (sequence is synthesized)
taaagaccttgggtatccttttgcactatccaaaagctccatgtacacagtgggggctcctcatacatggcctcacattgtggcagccttagtttggctaatagactgcatcaagataca

SEQ ID NO: 78868 - DNA, 120 bp, Artificial Sequence
  ENSG00000080986_6 (sequence is synthesized)
tactgccatgaaagaaagctcacctttatttgatgatgggcagccttggggagaagaaactgaagatggaattatgcataataagttgtttttggactacaccataaaatgctatgagag

SEQ ID NO: 78869 - DNA, 120 bp, Artificial Sequence
  ENSG00000080986_7 (sequence is synthesized)
ttttatgagtggtgccgacagctttgatgagatgaatgcagagctgcagtcaaaactgaaggatttatttaatgtggatgcttttaagctggaatcattagaagcaaaaaacagagcatt

SEQ ID NO: 78870 - DNA, 120 bp, Artificial Sequence
  ENSG00000080986_8 (sequence is synthesized)
aaggagatgttcaaaagtatcaggcatacatgagcaatttggagtctcattcagccattcttgaccagaaattaaatggtctcaatgaggaaattgctagagtagaactagaatgtgaaa

SEQ ID NO: 78871 - DNA, 120 bp, Artificial Sequence
  ENSG00000080986_9 (sequence is synthesized)
caataaaacaggagaacactcgactacagaatatcattgacaaccagaagtactcagttgcagacattgagcgaataaatcatgaaagaaatgaattgcagcagactattaataaattaa

SEQ ID NO: 78872 - DNA, 120 bp, Artificial Sequence
  ENSG00000080986_10 (sequence is synthesized)
ccaaggacctggaagctgaacaacagaagttgtggaatgaggagttaaaatatgccagaggcaaagaagcgattgaaacacaattagcagagtatcacaaattggctagaaaattaaaac

SEQ ID NO: 78873 - DNA, 120 bp, Artificial Sequence
  ENSG00000080986_11 (sequence is synthesized)
ttattcctaaaggtgctgagaattccaaaggttatgactttgaaattaagtttaatcccgaggctggtgccaactgccttgtcaaatacagggctcaagtttatgtacctcttaaggaac

SEQ ID NO: 78874 - DNA, 120 bp, Artificial Sequence
  ENSG00000080986_12 (sequence is synthesized)
tcctgaatgaaactgaagaagaaattaataaagccctaaataaaaaaatgggtttggaggatactttagaacaattgaatgcaatgataacagaaagcaagagaagtgtgagaactctga

SEQ ID NO: 78875 - DNA, 120 bp, Artificial Sequence
  ENSG00000080986_13 (sequence is synthesized)
aagaagaagttcaaaagctggatgatctttaccaacaaaaaattaaggaagcagaggaagaggatgaaaaatgtgccagtgagcttgagtccttggagaaacacaagcacctgctagaaa

SEQ ID NO: 78876 - DNA, 120 bp, Artificial Sequence
  ENSG00000080986_14 (sequence is synthesized)
gtactgttaaccaggggctcagtgaagctatgaatgaattagatgctgttcagcgggaataccaactagttgtgcaaaccacgactgaagaaagacgaaaagtgggaaataacttgcaac

SEQ ID NO: 78877 - DNA, 120 bp, Artificial Sequence
  ENSG00000080986_15 (sequence is synthesized)
gtctgttagagatggttgctacacatgttgggtctgtagagaaacatcttgaggagcagattgctaaagttgatagagaatatgaagaatgcatgtcagaagatctctcggaaaatatta

SEQ ID NO: 78878 - DNA, 120 bp, Artificial Sequence
  ENSG00000080986_16 (sequence is synthesized)
aagagattagagataagtatgagaagaaagctactctaattaagtcttctgaagaatgaagataaaatgttgatcatgtatatatatccatagtgaataaaattgtctcagtaaagtgta

SEQ ID NO: 78879 - DNA, 120 bp, Artificial Sequence
  ENSG00000080986_17 (sequence is synthesized)
tcctcaaaaaaaatattttctctcccagtcttttgacagtattctcaaagtctgcttcagagttttcatttttcaaagcacatttgattttaagtttttcaaactattatcacaaggtaa

SEQ ID NO: 78880 - DNA, 120 bp, Artificial Sequence
  ENSG00000080986_18 (sequence is synthesized)
aacatattttttatcaatgccatgtgttttgttactatgatgaacagactctctttttttaattctatttccatggtgattattactaaaagagttttttgtgtttactacccttattga

SEQ ID NO: 78881 - DNA, 120 bp, Artificial Sequence
  ENSG00000080986_19 (sequence is synthesized)
attgctttattacaactactgttctcagttgatttctattactaaccactgtttttaaattaaatatttttcattgtatcgtttagtatgatatattcagtagaagataatgttttgcat

SEQ ID NO: 78882 - DNA, 120 bp, Artificial Sequence
  ENSG00000080986_20 (sequence is synthesized)
gttgaagtttattcacttttatcaaagaatgatctttgaaggttatcctatgcttttgcaggatgtattgagattattcttgttatcttgacctattgatctaatatgttgatttcctaa

SEQ ID NO: 78883 - DNA, 120 bp, Artificial Sequence
  ENSG00000080986_21 (sequence is synthesized)
tgacctctatttgttcattgtttattattcatttgttatgctcctaaattgtttgttcatgctttgtaaataaactttgatttcctatttcactatgcctccttgcacagaacttggcac

SEQ ID NO: 78884 - DNA, 66 bp, Artificial Sequence
  ENSG00000080986_22 (sequence is synthesized)
tcagctcactgcaacctctgcctcctagtggacatggatcccggaatagtcaacttggtatatttt

SEQ ID NO: 78885 - DNA, 120 bp, Artificial Sequence
  ENSG00000080986_23 (sequence is synthesized)
acgactgaagaaagacgaaaagtgggaaataacttgcaacgtctgttagagatggttgctacacatgttgggtctgtagagaggcggatgctggggtgaagcagccgcatgctaaggaac

SEQ ID NO: 78886 - DNA, 120 bp, Artificial Sequence
  ENSG00000080986_24 (sequence is synthesized)
ctgctgacgtcttgatttcaaacttccggcctccagagctgaaagagtacatttctgttgttttaagccacctagtttgtggcaatttgttacagtatcagtatttgaaatcgcaaaaaa

SEQ ID NO: 78887 - DNA, 120 bp, Artificial Sequence
  ENSG00000080986_25 (sequence is synthesized)
atcaacaaaaacaacaagaaaaaataatgtggcatgttagtttcccattgctaatgtaacaaattaccaccaacctaatggcttaaaacaacacaaatttgtcatcttagagttattaag

SEQ ID NO: 78888 - DNA, 120 bp, Artificial Sequence
  ENSG00000081014_0 (sequence is synthesized)
agtgcctacggaggccgggccggcagcggcggccgggcatgaagccgggcggctacgggatcgcgggcggcggcggcatcgcgggcggcggcggcgatgagcgacatagtggagaagacg

SEQ ID NO: 78889 - DNA, 120 bp, Artificial Sequence
  ENSG00000081014_1 (sequence is synthesized)
ctgacggcgctgccgggactctttctgcagaaccagcccggtggtgggcccgcggccgccaaggcgtccttctcctcgaggctgggcagccttgtccgcggcatcacagccctcacctcc

SEQ ID NO: 78890 - DNA, 120 bp, Artificial Sequence
  ENSG00000081014_2 (sequence is synthesized)
aagcacgaagaagaaaaattaatccagcaggaactgagtagtctgaaagcgactgtttctgctcctactacaacactgaaaatgatgaaggaatgtatggtgagacttatatattgtgaa

SEQ ID NO: 78891 - DNA, 120 bp, Artificial Sequence
  ENSG00000081014_3 (sequence is synthesized)
atgcttggatatgatgcttcctttggctatattcatgcaatcaagttagcccaacaaggaaacctcttagaaaaaagagtaggttatttggctgtttccttatttctacatgaaagtcat

SEQ ID NO: 78892 - DNA, 120 bp, Artificial Sequence
  ENSG00000081014_4 (sequence is synthesized)
gaattattgcttctccttgtgaatacagttgtaaaggatctgcagagcactaacctagtagaagtgtgtatggcactgactgttgttagccagattttcccctgcgaaatgattccagct

SEQ ID NO: 78893 - DNA, 120 bp, Artificial Sequence
  ENSG00000081014_5 (sequence is synthesized)
gttcttccattaatagaagataaacttcaacattctaaggagattgtacgaagaaaagctgttctggcattatacaaattccatctcattgctcctaatcaagtacaacatattcatatt

SEQ ID NO: 78894 - DNA, 120 bp, Artificial Sequence
  ENSG00000081014_6 (sequence is synthesized)
aagtttcggaaagcactttgtgacagagatgttggggtcatggctgcctccttgcatatatatcttagaatgattaaggagaattcatctggatataaagacttgactgggagttttgta

SEQ ID NO: 78895 - DNA, 120 bp, Artificial Sequence
  ENSG00000081014_7 (sequence is synthesized)
accattttgaagcaagtagttggaggaaagctcccagtagaattcaattaccacagtgtgccagcaccatggttacaaattcagctcttgagaatactgggacttctaggaaaagatgat

SEQ ID NO: 78896 - DNA, 120 bp, Artificial Sequence
  ENSG00000081014_8 (sequence is synthesized)
caaaggacaagtgaattaatgtatgatgttcttgatgaatccttacgaagagctgagttaaatcacaatgtcacatatgctattttgtttgaatgtgtgcatacagtctattctatttat

SEQ ID NO: 78897 - DNA, 120 bp, Artificial Sequence
  ENSG00000081014_9 (sequence is synthesized)
cctaaatcggaattacttgagaaggctgccaagtgcattggaaaatttgttctgtcacctaaaataaatctaaaatatttaggactgaaggctcttacctatgttatccaacaggatcct

SEQ ID NO: 78898 - DNA, 120 bp, Artificial Sequence
  ENSG00000081014_10 (sequence is synthesized)
actctggctcttcaacaccagatgacaataattgaatgtttagatcatcctgatcccattattaaaagagagactctggaacttctttacagaattactaatgcacagaatataacagtt

SEQ ID NO: 78899 - DNA, 120 bp, Artificial Sequence
  ENSG00000081014_11 (sequence is synthesized)
attgtccagaaaatgcttgaatatttacatcagagcaaagaagagtatgtcatcgtcaatttggtcggcaaaatagcagagctggctgagaaatatgctcctgataatgcatggtttatt

SEQ ID NO: 78900 - DNA, 120 bp, Artificial Sequence
  ENSG00000081014_12 (sequence is synthesized)
cagacaatgaatgctgtgttttcagtaggaggagatgtaatgcatcctgatattcccaataactttctgagactactagcggaaggttttgatgatgaaacagaagatcagcaattaaga

SEQ ID NO: 78901 - DNA, 120 bp, Artificial Sequence
  ENSG00000081014_13 (sequence is synthesized)
ctctatgcagttcagtcttatctcactttactggatatggaaaatgtgttctatccacagagatttcttcaagttatgagttgggtattaggggaatattcctacctcttagataaggaa

SEQ ID NO: 78902 - DNA, 120 bp, Artificial Sequence
  ENSG00000081014_14 (sequence is synthesized)
acgccagaggaagttatagctaagctctacaagttacttatgaatgactctgtgtcttcagaaacaaaagcctggttaattgctgctgtgaccaaattgacatctcaggcgcactcttct

SEQ ID NO: 78903 - DNA, 120 bp, Artificial Sequence
  ENSG00000081014_15 (sequence is synthesized)
aatacagttgagagattaatccatgaatttaccatatctttggatacttgtatgagacaacatgcatttgaattaaaacatttgcatgagaatgtggaacttatgaagagcttgcttcca

SEQ ID NO: 78904 - DNA, 120 bp, Artificial Sequence
  ENSG00000081014_16 (sequence is synthesized)
gttgacaggagttgtgaagacttggtggtagatgcttctttatcttttctggatggttttgtggctgaaggactcagtcagggtgcagcgccttacaaacctccccatcaacgccaggag

SEQ ID NO: 78905 - DNA, 120 bp, Artificial Sequence
  ENSG00000081014_17 (sequence is synthesized)
gaaaagctttctcaggaaaaagttctcaattttgaaccatatggactctccttttcttcatctggcttcactggacgacagtctcctgctggcatttctcttggttcagatgtatctggg

SEQ ID NO: 78906 - DNA, 120 bp, Artificial Sequence
  ENSG00000081014_18 (sequence is synthesized)
aatagtgctgagacaggactgaaagagacaaatagcttgaagctggaaggtataaagaaattgtgggggaaagaaggctatcttcccaagaaggaaagcaaaactggtgatgaaagtgga

SEQ ID NO: 78907 - DNA, 120 bp, Artificial Sequence
  ENSG00000081014_19 (sequence is synthesized)
gctctgcctgttcctcaagagagtataatggagaatgtagatcaagctataactaaaaaggatcaatctcaagttcttacccaatctaaagaggagaaagaaaagcagctgctggcatca

SEQ ID NO: 78908 - DNA, 120 bp, Artificial Sequence
  ENSG00000081014_20 (sequence is synthesized)
tcattatttgttggtctaggatcagaaagtacaatcaacctgctgggaaaagcagatactgtctctcacaagttcagaaggaaatcaaaagtcaaagaagctaaaagtggcgaaacaacc

SEQ ID NO: 78909 - DNA, 120 bp, Artificial Sequence
  ENSG00000081014_21 (sequence is synthesized)
agtactcataatatgacctgttcttcctttagttctttgtcaaatgtggcatatgaagatgattattattcgaatactttgcacgatacaggagacaaggaattaaagaaattttctctc

SEQ ID NO: 78910 - DNA, 120 bp, Artificial Sequence
  ENSG00000081014_22 (sequence is synthesized)
acttcagaacttttggattctgagtcactcacagaactgcccttggttgagaaattctcatattgtagtctgtctacaccttcattgtttgctaataacaacatggaaatttttcaccct

SEQ ID NO: 78911 - DNA, 120 bp, Artificial Sequence
  ENSG00000081014_23 (sequence is synthesized)
cctcaatctactgcagcctcagttgccaaggaaagctctttagcttcatcttttttggaagaaactactgaatacatacactcaaatgctatggaagtctgtaataatgaaactatatca

SEQ ID NO: 78912 - DNA, 120 bp, Artificial Sequence
  ENSG00000081014_24 (sequence is synthesized)
gtgtcttcttataaaatttggaaagatgattgtttattgatggtctggtcagtcactaataagagtggtttggaattgaaaagtgctgacttagaaatttttcctgcagaaaatttcaag

SEQ ID NO: 78913 - DNA, 120 bp, Artificial Sequence
  ENSG00000081014_25 (sequence is synthesized)
gtgactgagcaacctggatgctgtttgcctgtaatggaagcagaaagcaccaaaagctttcaatatagtgtgcagatagaaaaaccttttacagaaggaaatcttactggttttattagt

SEQ ID NO: 78914 - DNA, 120 bp, Artificial Sequence
  ENSG00000081014_26 (sequence is synthesized)
tatcatatgatggatactcattctgctcagctggaattttctgtaaacttatcactattagatttcattagaccattaaaaatctcaagtgacgactttgggaaactctggttatccttc

SEQ ID NO: 78915 - DNA, 120 bp, Artificial Sequence
  ENSG00000081014_27 (sequence is synthesized)
gcaaatgatgtgaaacaaaatgtaaaaatgtcagaatctcaagctgcacttccttctgcactaaagactctgcaacagaaactaagactccatattattgagattataggcaatgaaggg

SEQ ID NO: 78916 - DNA, 120 bp, Artificial Sequence
  ENSG00000081014_28 (sequence is synthesized)
atccatcccctgcttactgcattgccgagttcatgcagatgtattagccctgtggttcagatcctcctgttctactcttcctgactatttactgtatcagtgtcaaaaggtgatggaggg

SEQ ID NO: 78917 - DNA, 120 bp, Artificial Sequence
  ENSG00000081014_29 (sequence is synthesized)
atcctagcagaagccctgctaaattttactccatcaagatcaatggtttacatagataaacttatttaccaaagtaaaaagaactcatggtacttctaatgaaaatggggattattacaa

SEQ ID NO: 78918 - DNA, 120 bp, Artificial Sequence
  ENSG00000081014_30 (sequence is synthesized)
gtgtggtttatatgttttctttgtgattcctggtcaagaaagatccccaaaactgtatccctaacctttaactcaggattgtacagtatgtttaggtccctcaaaaagtgacctaagcta

SEQ ID NO: 78919 - DNA, 120 bp, Artificial Sequence
  ENSG00000081014_31 (sequence is synthesized)
atgttataaactgctaatgatttatatatcacttagtgtgtagagggactgaaaatatttattttgttataaataattttatagcacgtttactctagtgctagctaatttgtaataaag

SEQ ID NO: 78920 - DNA, 120 bp, Artificial Sequence
  ENSG00000081014_32 (sequence is synthesized)
ccaagtctcagttttctgcattaaatggaagggagacatgaaattgataatctcaaacttaattcatatttggctttggaatgtagtgtatggtttttggtagggaagtcaatattttcg

SEQ ID NO: 78921 - DNA, 120 bp, Artificial Sequence
  ENSG00000081014_33 (sequence is synthesized)
attatgttttgcttagatcagtgttgaactaagttggcatagcacacactaacagttgtaggagatccatgagcatgctggatattgaggggatccaatctgtgatctattttttattat

SEQ ID NO: 78922 - DNA, 120 bp, Artificial Sequence
  ENSG00000081014_34 (sequence is synthesized)
agataactgttacacataatttcagatcgtttggctgtaaaatttgtctgttttccacttggagttattttaaaattcaaagtaaatcactctattcttattttgaaaactcagagccat

SEQ ID NO: 78923 - DNA, 120 bp, Artificial Sequence
  ENSG00000081014_35 (sequence is synthesized)
tttatatagaaacaaaacccataagagcacacagtaacaaagcaaacagatacaaaaatgactttttagttatgacaaatattttagttggttactacttaggtccttttggcaaatgaa

SEQ ID NO: 78924 - DNA, 120 bp, Artificial Sequence
  ENSG00000081014_36 (sequence is synthesized)
aatttgtgattagagtataaatggcaaaactatcttttcctggcctttgaatccactagtacttaatggatatagctgaagcagagactaagtataacatacaggttcttcagtaaaata

SEQ ID NO: 78925 - DNA, 120 bp, Artificial Sequence
  ENSG00000081014_37 (sequence is synthesized)
tatcattttcatgttatagttatgcctgtgtggcctctgtcagaactattatcagtaaaagaggttaagcctatatatgaatgatggaccaaaaccttgaggttgtacattaactgaaat

SEQ ID NO: 78926 - DNA, 120 bp, Artificial Sequence
  ENSG00000081014_38 (sequence is synthesized)
agtattttataaaatcttatggtgctgtggaaaatatttattatttcaccttttctgacacttcaccatggagactattcaggtaatacaattttaagtcattgcagttaatactctggt

SEQ ID NO: 78927 - DNA, 120 bp, Artificial Sequence
  ENSG00000081014_39 (sequence is synthesized)
taattggtactgttaatcacccaggtcaggaattctgattttaggttatctcattaatcatggctgataaagaagctaaggggattctccagatctaatagatttcattagtcatttgtg

SEQ ID NO: 78928 - DNA, 120 bp, Artificial Sequence
  ENSG00000081014_40 (sequence is synthesized)
tcgagtattcctccctaaaaacaaaagcagtattttctttctcaattaatttttaagttattcattaaaaaatatataacatcttaattttattcttttaaaaacatacagtgaagcctt

SEQ ID NO: 78929 - DNA, 120 bp, Artificial Sequence
  ENSG00000081014_41 (sequence is synthesized)
gctacaagagtcataagtgactggaatttcttgcataataggttcctccttttgaatagatcagattcatccccaggctctcagcagtgtcatgatgaaatgagtgtgctgacttcaggg

SEQ ID NO: 78930 - DNA, 120 bp, Artificial Sequence
  ENSG00000081014_42 (sequence is synthesized)
gtgtggtggacactggtagctagccttatcagctccctccttattcctacctctgtcagcagcatgcctcgccccttacctaattctgctgtgactctgacagagaggaagtgccttctc

SEQ ID NO: 78931 - DNA, 120 bp, Artificial Sequence
  ENSG00000081014_43 (sequence is synthesized)
actttgcaaaggaatgcagcatgtcacaaaggaggtgctccaattttttgtgtccttacttccctatgtttgcctagttactgaggctaggtcgagtgtgaagcaataggtgtaagatgc

SEQ ID NO: 78932 - DNA, 120 bp, Artificial Sequence
  ENSG00000081014_44 (sequence is synthesized)
tgagagcacatggacagctaccagggagatctgttgcttggttacagggtgtattcatgagtggtagctgcagttgtcgtgagagacatgcttggcatacagagctgtctaatgggtggg

SEQ ID NO: 78933 - DNA, 120 bp, Artificial Sequence
  ENSG00000081014_45 (sequence is synthesized)
agacatgtaatggtagatttagggctgggagcatgattttgggtctgcccaaaggaacatggtgtcacttttgttctttctgacccactaaataaaaagtagtgtaacagggtttcactg

SEQ ID NO: 78934 - DNA, 120 bp, Artificial Sequence
  ENSG00000081014_46 (sequence is synthesized)
gaatgtttattagaaagtttacactttttatatttttatgattttaaaaacaaacaataatagaaaaacagattttaaggaacttcagagcagtatatattctgtctaaactcactgaat

SEQ ID NO: 78935 - DNA, 120 bp, Artificial Sequence
  ENSG00000081014_47 (sequence is synthesized)
tctgtctaaactcactgaatattttaagttgtaaatcaggtgtccaccaacctttatttttgcattgcaggagatgtgactgtaaagtagggagtttttttttttgagacagagtttcac

SEQ ID NO: 78936 - DNA, 120 bp, Artificial Sequence
  ENSG00000081014_48 (sequence is synthesized)
gcgcccggccaaattatttttgtgggtagattcattctctttacctaatagtcataatttagtcagtgaagggacaacatctggggtaagagctatggaggaggtgctcagctttgtgag

SEQ ID NO: 78937 - DNA, 120 bp, Artificial Sequence
  ENSG00000081014_49 (sequence is synthesized)
ttttgtgccaggcatctttgctgaaaatggagatggcagcaagtgtgaatctgggggaatataagggaagacagaaaagccttaagagtagacggaggaagaagggtaccagaatagtcc

SEQ ID NO: 78938 - DNA, 120 bp, Artificial Sequence
  ENSG00000081014_50 (sequence is synthesized)
ctgtggaggcaggcagatcagagctcagggtttgaaagtgggcctgagtaagggtcctgctagagaaactgcagatggaagctgagcagttaccaactgctaatgtgccaagtataccaa

SEQ ID NO: 78939 - DNA, 120 bp, Artificial Sequence
  ENSG00000081014_51 (sequence is synthesized)
gcacagcatgtgtcctgtagaggagcattattttaaacaatgttctactatcatctaccaaaataattgtggtaaaagtgtagtattttattttttccttttatgtcagcaatattttaa

SEQ ID NO: 78940 - DNA, 120 bp, Artificial Sequence
  ENSG00000081014_52 (sequence is synthesized)
aatattgatctgtttatcttatatttttatggataaatgtagtatttgcctcatgattgtgagccactgagagtgcactgaacctattcacatgtctttaagatgttttgctgtgttaaa

SEQ ID NO: 78941 - DNA, 120 bp, Artificial Sequence
  ENSG00000081014_53 (sequence is synthesized)
attttaggagagaaaaatacaagtgaataattatttaataggcatttattactttattttggagttgaattctgtcatttgaaaaagttcagtaatgtaataaatacaaagtgatctgca

SEQ ID NO: 78942 - DNA, 120 bp, Artificial Sequence
  ENSG00000081014_54 (sequence is synthesized)
ttagaaaaaagagtaggtatgtatgtgttttaagactttgatgctttcatgttgtccttgaagttgcatctattatacaaaatgaatgatggcatgtatatagtatgtttttagaatact

SEQ ID NO: 78943 - DNA, 120 bp, Artificial Sequence
  ENSG00000081014_55 (sequence is synthesized)
gtattataatttctaaaactttaaaagatcacacttcagaaagtcaaagccatttataggaaatcagttttcctgatgcatagcattttggagttaaagagaagactaaagatttcttgc

SEQ ID NO: 78944 - DNA, 120 bp, Artificial Sequence
  ENSG00000081014_56 (sequence is synthesized)
tcagaactcattgaaccatacacttaaatattttttgtatataaattatatgtctataaagctgacttttttgtatataaattatatgtctataaagagctcttttttttgttgttgttg

SEQ ID NO: 78945 - DNA, 72 bp, Artificial Sequence
  ENSG00000081014_57 (sequence is synthesized)
gtatataaattatatgtctataaagagctcttttttttgttgttgttgagacagagtctctctgtgttgccc

SEQ ID NO: 78946 - DNA, 120 bp, Artificial Sequence
  ENSG00000081019_0 (sequence is synthesized)
gctttacaatagaagctcggttggagaggcctgcggagaaaagctgggaacggccgcttccggcatgttcatctctggacgaagaacggccgacaagtggagggcggaggagagactcca

SEQ ID NO: 78947 - DNA, 120 bp, Artificial Sequence
  ENSG00000081019_1 (sequence is synthesized)
atgcccagcgggcagtgcgcgggcggcgcttgcgcgatgcgcggacgggggggcggtcgggccatttaaatgtgtgtttgtgggtgaaatggctgcgcaggtcggagcggtgcgcgtagt

SEQ ID NO: 78948 - DNA, 120 bp, Artificial Sequence
  ENSG00000081019_2 (sequence is synthesized)
acgggcggtggcggcgcaggaggagccggacaaagaggggaaggagaaacctcatgctggggtctccccgcggggagttaaacggcagcgccgatctagcagtggggggtctcaggagaa

SEQ ID NO: 78949 - DNA, 120 bp, Artificial Sequence
  ENSG00000081019_3 (sequence is synthesized)
gcgggggcggccgagccaggagccccctctcgctccccctcaccggcggcgtcgcagccgccaacatcctgggccgctgccgccaacgaatgcagccccaactgtcccaggccctgttga

SEQ ID NO: 78950 - DNA, 120 bp, Artificial Sequence
  ENSG00000081019_4 (sequence is synthesized)
gcctcttctcctgccgcctccgccgccaccttcgctggcacccgccgggcccgctgtcgctgcccctctcccggccccaagcacctcggccctcttcaccttctcgcctctgacggtgag

SEQ ID NO: 78951 - DNA, 120 bp, Artificial Sequence
  ENSG00000081019_5 (sequence is synthesized)
cgcggccgggcccaagcataagggccacaaggagcggcacaagcaccatcaccaccgcggccccgatggtgatcccagctcctgcggaaccgatctcaagcacaaggacaagcaggaaaa

SEQ ID NO: 78952 - DNA, 120 bp, Artificial Sequence
  ENSG00000081019_6 (sequence is synthesized)
cggcgagaggactggaggggtgcctctgatcaaagcccccaagagagaaacaccagatgaaaatggtaaaacccagagagccgatgattttgtcttgaagaaaataaagaagaaaaagaa

SEQ ID NO: 78953 - DNA, 120 bp, Artificial Sequence
  ENSG00000081019_7 (sequence is synthesized)
aaagaaacaccgagaagacatgcgaggaagacgccttaaaatgtacaataaggaagtacaaaccgtctgtgctggcctgacccgcatcagtaaagaaattctcacccaaggacaaataaa

SEQ ID NO: 78954 - DNA, 120 bp, Artificial Sequence
  ENSG00000081019_8 (sequence is synthesized)
tagcacttcaggacttaataaggagtccttcaggtatctgaaagatgaacagctgtgccgattaaatttgggtatgcaagaatatcgggtaccccagggagtacaaacaccttttatgac

SEQ ID NO: 78955 - DNA, 120 bp, Artificial Sequence
  ENSG00000081019_9 (sequence is synthesized)
tcaccaggaacattctattcgtagaaatttcttaaaaacaggtactaaatttagcaactttattcatgaggaacaccagtccaatggtggtgctcttgtccttcatgcttacatggatga

SEQ ID NO: 78956 - DNA, 120 bp, Artificial Sequence
  ENSG00000081019_10 (sequence is synthesized)
actctcatttttgtctccaatggagatggagagattttctgaggagtttcttgctttgacattcagtgaaaatgagaaaaatgctgcttactatgctttagcaatagtgcatggagcggc

SEQ ID NO: 78957 - DNA, 120 bp, Artificial Sequence
  ENSG00000081019_11 (sequence is synthesized)
tgcttatctcccagacttcttggactactttgcttttaatttccccaacactccagtgaaaatggaaattctgggcaagaaagatattgaaacaaccaccatttcaaattttcacactca

SEQ ID NO: 78958 - DNA, 120 bp, Artificial Sequence
  ENSG00000081019_12 (sequence is synthesized)
ggtcaacaggacatactgctgtggcacctaccgagcaggtcctatgcggcagataagtctcgttggagcagtagatgaagaagttggtgattatttcccagagttccttgatatgttaga

SEQ ID NO: 78959 - DNA, 120 bp, Artificial Sequence
  ENSG00000081019_13 (sequence is synthesized)
agaatcaccatttctgaaaatgactttgccctggggtacactttctagcctccgactccagtgtaggtcccagagtgatgatgggcctataatgtgggtaaggccaggagaacagatgat

SEQ ID NO: 78960 - DNA, 120 bp, Artificial Sequence
  ENSG00000081019_14 (sequence is synthesized)
ccctacagcagatatgccaaagtcacccttcaaaagacgacgatcaatgaatgaaataaaaaatctccagtacctacctcggaccagtgaaccccgcgaagttctctttgaagataggac

SEQ ID NO: 78961 - DNA, 120 bp, Artificial Sequence
  ENSG00000081019_15 (sequence is synthesized)
tagagctcatgctgatcatgtcggtcaggggtttgactggcagagtacggctgctgttggagttttgaaagctgtacaatttggtgaatggagtgaccaacctcgcataaccaaagatgt

SEQ ID NO: 78962 - DNA, 120 bp, Artificial Sequence
  ENSG00000081019_16 (sequence is synthesized)
gatttgttttcatgctgaggattttactgatgttgtacaaagacttcagttagatcttcatgaacctccagtttcccagtgcgtacagtgggtagatgaagctaaactaaaccaaatgag

SEQ ID NO: 78963 - DNA, 120 bp, Artificial Sequence
  ENSG00000081019_17 (sequence is synthesized)
gcgggaaggcattcgttatgctagaattcagctttgcgacaatgatatctacttcatccctagaaatgtcattcatcagttcaaaacagtttcggcggtgtgcagcttagcctggcatat

SEQ ID NO: 78964 - DNA, 120 bp, Artificial Sequence
  ENSG00000081019_18 (sequence is synthesized)
aaggcttaaacagtaccaccctgttgtggaagccactcaaaacacagaaagcaattctaacatggactgtggtttaactggaaagcgagaattagaagttgactcccaatgtgtgaggat

SEQ ID NO: 78965 - DNA, 120 bp, Artificial Sequence
  ENSG00000081019_19 (sequence is synthesized)
aaaaactgaatctgaagaagcatgcacagagattcagctgttaacaactgcttcatcatctttcccacctgcatcagaacttaatctacagcaagatcagaagactcagcctattccagt

SEQ ID NO: 78966 - DNA, 120 bp, Artificial Sequence
  ENSG00000081019_20 (sequence is synthesized)
tttaaaagtggaaagtagactggactctgaccagcaacacaatctgcaagaacattcaaccacttctgtgtgatatgtacatattcaaacacattttttaacttttttaaattttgatgt

SEQ ID NO: 78967 - DNA, 120 bp, Artificial Sequence
  ENSG00000081019_21 (sequence is synthesized)
gaagttatagttttataactggcttaagttaagttttattggagaaatcttgcctataattctataaagagaaatgacattccacaaatgtcaagcatatcttttttacacagattatgc

SEQ ID NO: 78968 - DNA, 120 bp, Artificial Sequence
  ENSG00000081019_22 (sequence is synthesized)
aaagttaagagttgtatcttatcccgttagtacagtatgtaatagtgggtctgctgctactttctgttttaaggtgtgaggtaacaattcaatctcttcttcaaatcaaaatgagaattc

SEQ ID NO: 78969 - DNA, 120 bp, Artificial Sequence
  ENSG00000081019_23 (sequence is synthesized)
tctggaataacagattcttgtttggtaaattattcacttcccttaattttatcttgccttgtctcttgccatatttgctgtttttatggataaataagatttatggtttagtacttgtgt

SEQ ID NO: 78970 - DNA, 120 bp, Artificial Sequence
  ENSG00000081019_24 (sequence is synthesized)
ctttatggcacaggttcaatttctacagtgaaaatggcataggttgcaggaaagaatttctgcatctggtacatgggcaagtaagttatttagttctaaccacaaataacaagtagtttc

SEQ ID NO: 78971 - DNA, 120 bp, Artificial Sequence
  ENSG00000081019_25 (sequence is synthesized)
caaggaaatttcagtggctctctggtttcttaacaaaagagaaagcacagcactttctgatccaaactgtcttttttttgtatctgttatttaaagcccagtggatatttcaattaaaaa

SEQ ID NO: 78972 - DNA, 120 bp, Artificial Sequence
  ENSG00000081019_26 (sequence is synthesized)
aaaaatctaaagatgaatagtccttggtcattcattatccatggctcattaatctcttctagaatatatgctaactgttgaagatattttgggtaaaagagataatgttgacatgatact

SEQ ID NO: 78973 - DNA, 120 bp, Artificial Sequence
  ENSG00000081019_27 (sequence is synthesized)
tcctcacattttgtggggataattttgcttcctaaactgatcacaactattaaacttagagaataataatagtctttctgatgaggctgccatattttgagcatcaatcttatgataaac

SEQ ID NO: 78974 - DNA, 120 bp, Artificial Sequence
  ENSG00000081019_28 (sequence is synthesized)
tattcttgtcacttggcatcaacctcttcatgataaatatctactactgagacacttcaattcacagttttaactggtgaatacctgggtttatttactattactctgtgttgctatttt

SEQ ID NO: 78975 - DNA, 120 bp, Artificial Sequence
  ENSG00000081019_29 (sequence is synthesized)
ctaagaaagaatacagcactagacttcatcctagagtttcaggtaggctaatgcttagtgcctgagtatttaaattttcttttcaaacaggcacagttcacattgctagtatggtcctaa

SEQ ID NO: 78976 - DNA, 120 bp, Artificial Sequence
  ENSG00000081019_30 (sequence is synthesized)
ctttctgttattttagaatgttaacatgattcacattatactttctcttagttaataatacagtaggccttttgtttattaatggaagagtactccccacacctaagaccagattcttat

SEQ ID NO: 78977 - DNA, 120 bp, Artificial Sequence
  ENSG00000081019_31 (sequence is synthesized)
atctccctggttacagtgcaatttggagattttttttttttcctggatggtaagatttgaaatatttacattaacataggcaaaaaaaaaaaaaaatacaagatgctgctttattatgtc

SEQ ID NO: 78978 - DNA, 120 bp, Artificial Sequence
  ENSG00000081019_32 (sequence is synthesized)
tgtcaccatgaaaacttagctgcatcttttgaaatatcaaatatgaattttctctaaaatattctgaaataggttaaatcttatataaatattactttgtgcaatattgttgtgtagtta

SEQ ID NO: 78979 - DNA, 120 bp, Artificial Sequence
  ENSG00000081019_33 (sequence is synthesized)
aatgcatattagcaaagtatagaggtcactgtgtaaaccgatagaaaagtaaccatcagcaaatactgcagtgattagttagaatctgtattattccttatatatatgtatatgtatgta

SEQ ID NO: 78980 - DNA, 120 bp, Artificial Sequence
  ENSG00000081019_34 (sequence is synthesized)
ttctctgttacaaaggatgaagacaaatagggatacatttcaatgtaaaccatttatgaattggaagtgatgttggctttagttatctttgtaaataaggtaattagaatggtatgaaag

SEQ ID NO: 78981 - DNA, 120 bp, Artificial Sequence
  ENSG00000081019_35 (sequence is synthesized)
gtaatgtgattattgcaggggtgtttttaaatcttgggtataaattctagggtaaattccagtttatccagactagtttttaacgggacctgcctttgagggtgttttttgttattttgt

SEQ ID NO: 78982 - DNA, 120 bp, Artificial Sequence
  ENSG00000081019_36 (sequence is synthesized)
tggggaggggtttaatcacaaagtgtgtgggtttgggttatttcttgtttttatttttctgtccagaagagctttaccaggctgtgcaaagtaaaattcttctcaggcaacatttgcttt

SEQ ID NO: 78983 - DNA, 120 bp, Artificial Sequence
  ENSG00000081019_37 (sequence is synthesized)
taaaaataatcatgaagagaaggctgttaaagcaaaaattttttttttttaattttttcttgtcttccaagatccgatttccccatctcccacttgccatccagcagatgccatctgtca

SEQ ID NO: 78984 - DNA, 120 bp, Artificial Sequence
  ENSG00000081019_38 (sequence is synthesized)
tccaagctggtcattgctaataaacaaggagactgtctcctgacagccagcactgtgtattatcactcaggaaccagcggatctgcaaagacctacaatcaaaagcaaatccccattttc

SEQ ID NO: 78985 - DNA, 120 bp, Artificial Sequence
  ENSG00000081019_39 (sequence is synthesized)
cttttataaaacattctaccctcacctccaatataaacacattaaaagagtacaataaaaatgtttaaaatcatgtactaataaattcattgtatgttagaattgcaatagaatgaagag

SEQ ID NO: 78986 - DNA, 120 bp, Artificial Sequence
  ENSG00000081019_40 (sequence is synthesized)
aaacatttagctagtaacgtgatctgaaaactgaatgtcctatgtgagtattagattttaatagcatgctttaaagactgatgagtataaaagcagaagttttgcgttttttactgcttt

SEQ ID NO: 78987 - DNA, 120 bp, Artificial Sequence
  ENSG00000081019_41 (sequence is synthesized)
caaagctgtatcctagtttagtgatacaaatgattgcaatttttctaaatcattaaattatttggtttggtggagtgaggcatggagcaatctggcgtcttctgatttgttaaagtagtg

SEQ ID NO: 78988 - DNA, 120 bp, Artificial Sequence
  ENSG00000081019_42 (sequence is synthesized)
atggcagtgaagttgtaactgaaatttaagctgatcttcctttttggtatattatccgttgtgccagctcttgagattacttgcacaatgtggctataagttttaatattttgtggagca

SEQ ID NO: 78989 - DNA, 120 bp, Artificial Sequence
  ENSG00000081019_43 (sequence is synthesized)
gagggatggtttttaaatgtgcttatggaaaggacccaataaatgaatattcctaacttagtaaagtagaataatttcatggtattcattaaaaagcataaaagtcttcctcttgcccca

SEQ ID NO: 78990 - DNA, 120 bp, Artificial Sequence
  ENSG00000081019_44 (sequence is synthesized)
gaagtaattctctataccaagatatgctaggagtaggatgatgattcaaagtggtaacccaaattcataaagcaataataataaaaacctatatagtatgttctctcctccaaagtttta

SEQ ID NO: 78991 - DNA, 120 bp, Artificial Sequence
  ENSG00000081019_45 (sequence is synthesized)
actctaaaaattggttcctaggtttaattgtacctttaatttgcttattcagtacttagaatttgtttaactggtacttttattattttttagtgaaagacttttgaaaagtgccctttc

SEQ ID NO: 78992 - DNA, 120 bp, Artificial Sequence
  ENSG00000081019_46 (sequence is synthesized)
cccttaagagacagttggaataccagttgactaatattacaagctcttgtagggggaaaaaggagcttattaaagttgtttactaaactttaggaaaagatgtcttgcatcagtcttact

SEQ ID NO: 78993 - DNA, 120 bp, Artificial Sequence
  ENSG00000081019_47 (sequence is synthesized)
aggcataaaagtcacacttaatgactggaaaaaacttgcttattgcctttccctatataaatattaattgtctagaatgaaagctaatataggaacaagactcccaaatccatgaaaacg

SEQ ID NO: 78994 - DNA, 120 bp, Artificial Sequence
  ENSG00000081019_48 (sequence is synthesized)
cttagtgaatatattcttaatcattaataaattagcccattatattttcatctgtatttgccataaaaaatttatttgcatttatgcctttaggataattttgtatctttctaatctgtt

SEQ ID NO: 78995 - DNA, 120 bp, Artificial Sequence
  ENSG00000081019_49 (sequence is synthesized)
ttatcattgctacaggtttttaaaaaagaacctttcactagctagcacatgccagaggttcacatctgttttgtttttcaaacaggtcgtagctgtatttattggccatgcaagtagagg

SEQ ID NO: 78996 - DNA, 120 bp, Artificial Sequence
  ENSG00000081019_50 (sequence is synthesized)
aaatgcacagtacaaatgtttttctttagcacgtaagggacctatccttgtcttgaaagtttgttgctttaaaagcaagtatctctccataaatattatggccttccattttcttcatac

SEQ ID NO: 78997 - DNA, 120 bp, Artificial Sequence
  ENSG00000081019_51 (sequence is synthesized)
attttttaggatccacttgtgcatgtagttgagaccactgtctcttaaaatatagcacttttcaattctctctaaagaaatacttatgtactactatcacatgttgtaaattttcatgta

SEQ ID NO: 78998 - DNA, 120 bp, Artificial Sequence
  ENSG00000081019_52 (sequence is synthesized)
atagtgttttctgtgagtaaactccattttgattggcagctaagactttttttcctgtggcttttatttatctaagaggtctttgcatatagatgaaatgtatatttgcctggcggacta

SEQ ID NO: 78999 - DNA, 120 bp, Artificial Sequence
  ENSG00000081019_53 (sequence is synthesized)
tttgcgttgtgtggccttagtttgtttattgacattaacgagtgttttaaaaaggtttttaatgaatagtcttaaatctaaatttgtgtgaataatccttttaacacagtgcttttttgt

SEQ ID NO: 79000 - DNA, 120 bp, Artificial Sequence
  ENSG00000081019_54 (sequence is synthesized)
agctgtctaagtgtgttaaattgttaagctatttctttgtaaaataggacaatggaatgcatagtttttttttttcctgtaaagtatttttttaataaaaaaagtctgatttgtccttta

SEQ ID NO: 79001 - DNA, 120 bp, Artificial Sequence
  ENSG00000081026_0 (sequence is synthesized)
cggccgcccgcgcggggtctcccccatggtgcagcggggttcgggatgtcgaagacgctgaagaagaagaagcactggctcagcaaggtgcaggagtgcgccgtgtcctgggccgggccc

SEQ ID NO: 79002 - DNA, 120 bp, Artificial Sequence
  ENSG00000081026_1 (sequence is synthesized)
ccgggcgacttcggcgcggagatccgcggtggcgcggagcgtggcgagttcccctacctggggcggctccgcgaggagcccggcgggggcacctgctgcgtcgtctcgggcaaggcgccc

SEQ ID NO: 79003 - DNA, 120 bp, Artificial Sequence
  ENSG00000081026_2 (sequence is synthesized)
agcccaggcgatgtgctgctggaggtaaacgggacgcctgtcagcgggctcaccaaccgggacaccctggctgtcatccgccacttccgcgagcccatccgtctcaagactgtgaaacca

SEQ ID NO: 79004 - DNA, 120 bp, Artificial Sequence
  ENSG00000081026_3 (sequence is synthesized)
ggcaaagtcattaataaagatttgcggcattacctaagtcttcagtttcaaaaaggatcaattgaccacaaactgcagcaagtgatcagagataatctctacttgagaaccattccatgc

SEQ ID NO: 79005 - DNA, 120 bp, Artificial Sequence
  ENSG00000081026_4 (sequence is synthesized)
actacaagggcccccagggatggagaagtaccaggagtggattataatttcatttccgttgaacagttcaaagcactggaagagagtggagcattgttagaaagtgggacatatgatgga

SEQ ID NO: 79006 - DNA, 120 bp, Artificial Sequence
  ENSG00000081026_5 (sequence is synthesized)
aacttctatggaactcccaagcctccagcagaacccagcccttttcagccagatccagttgatcaagtcctctttgataatgagtttgatgcagaatctcaaagaaaacgaacgacatct

SEQ ID NO: 79007 - DNA, 120 bp, Artificial Sequence
  ENSG00000081026_6 (sequence is synthesized)
gtcagcaagatggaaagaatggatagctctcttcctgaagaggaagaagatgaggacaaggaagctattaatggcagtggaaacgcagaaaacagagagaggcattctgagtcatctgac

SEQ ID NO: 79008 - DNA, 120 bp, Artificial Sequence
  ENSG00000081026_7 (sequence is synthesized)
tggatgaagactgttccaagttacaaccaaacaaatagctccatggactttagaaattatatgatgagagatgagactctggaaccactgcccaaaaactgggaaatggcctacactgac

SEQ ID NO: 79009 - DNA, 120 bp, Artificial Sequence
  ENSG00000081026_8 (sequence is synthesized)
acagggatgatctacttcattgaccacaataccaagacaaccacctggttggatcctcgtctttgtaagaaagccaaagcccctgaagactgtgaagatggagagcttccttatggctgg

SEQ ID NO: 79010 - DNA, 120 bp, Artificial Sequence
  ENSG00000081026_9 (sequence is synthesized)
gagaaaatagaggaccctcagtatgggacatactatgttgatcaccttaaccagaaaacccagtttgaaaatccagtggaggaagccaaaaggaaaaagcagttaggacaggttgaaatt

SEQ ID NO: 79011 - DNA, 120 bp, Artificial Sequence
  ENSG00000081026_10 (sequence is synthesized)
gggtcttcaaaaccagatatggaaaaatcacacttcacaagagatccatcccagcttaaaggtgtccttgttcgagcatcactgaaaaaaagcacaatgggatttggttttactattatt

SEQ ID NO: 79012 - DNA, 120 bp, Artificial Sequence
  ENSG00000081026_11 (sequence is synthesized)
ggtggagatagacctgatgagttcctacaagtgaaaaatgtgctgaaagatggtcccgcagctcaggatgggaaaattgcaccaggcgatgttattgtagacatcaatggcaactgtgtc

SEQ ID NO: 79013 - DNA, 120 bp, Artificial Sequence
  ENSG00000081026_12 (sequence is synthesized)
ctcggtcacactcatgcagatgttgtccagatgtttcaattggtacctgtcaatcagtatgtaaacctcactttatgtcgtggttatccacttcctgatgacagtgaagatcctgttgtg

SEQ ID NO: 79014 - DNA, 120 bp, Artificial Sequence
  ENSG00000081026_13 (sequence is synthesized)
gacattgttgctgctacccctgtcatcaatggacagtcattaaccaagggagagacttgcatgaatcctcaggattttaagccaggagcaatggttctggagcagaatggaaaatcggga

SEQ ID NO: 79015 - DNA, 120 bp, Artificial Sequence
  ENSG00000081026_14 (sequence is synthesized)
ccctaaagggtttgggtttgcaattgctgacagccctactggacagaaggtgaaaatgatactggatagtcagtggtgtcaaggccttcagaaaggagatataattaaggaaatatacca

SEQ ID NO: 79016 - DNA, 120 bp, Artificial Sequence
  ENSG00000081026_15 (sequence is synthesized)
tcaaaatgtgcagaatttaacacatctccaagtggtagaggtgctaaagcagtttccagtaggtgctgatgtaccattgcttatcttaagaggaggtcctccttcaccaaccaaaactgc

SEQ ID NO: 79017 - DNA, 120 bp, Artificial Sequence
  ENSG00000081026_16 (sequence is synthesized)
caaaatgaaaacagataaaaaggaaaatgcaggaagtttggaggccataaatgagcctattcctcagcctatgccttttccaccgagcattatcaggtcaggatccccaaaattggatcc

SEQ ID NO: 79018 - DNA, 120 bp, Artificial Sequence
  ENSG00000081026_17 (sequence is synthesized)
ttctgaggtctacctgaaatctaagactttatatgaagataaaccaccaaacaccaaagatttggatgtttttcttcgaaaacaagagtcagggtttggcttcagggtgctaggaggaga

SEQ ID NO: 79019 - DNA, 120 bp, Artificial Sequence
  ENSG00000081026_18 (sequence is synthesized)
tggacctgaccagtctatatatattggggctattattcccctgggagcagctgagaaagatggtcggctccgcgcagctgatgaactaatgtgcattgatggaattcctgttaaagggaa

SEQ ID NO: 79020 - DNA, 120 bp, Artificial Sequence
  ENSG00000081026_19 (sequence is synthesized)
atcacacaaacaagtcttggacctcatgacaactgctgctcgaaatggccatgtgttactaactgtcagacggaagatcttctatggagaaaaacaacccgaggacgacagctctcaggc

SEQ ID NO: 79021 - DNA, 120 bp, Artificial Sequence
  ENSG00000081026_20 (sequence is synthesized)
cttcatttcaacacagaatggatctccccgcctgaaccgggcagaggtcccagccaggcctgcaccccaggagccctatgatgttgtcttgcaacgaaaagaaaatgaaggatttggctt

SEQ ID NO: 79022 - DNA, 120 bp, Artificial Sequence
  ENSG00000081026_21 (sequence is synthesized)
tgtcatcctcacctccaaaaacaaaccacctccaggagttattcctcataaaattggccgagtcatagaaggaagtccggctgaccgctgtggaaaactgaaagttggagatcatatctc

SEQ ID NO: 79023 - DNA, 120 bp, Artificial Sequence
  ENSG00000081026_22 (sequence is synthesized)
tgcagtgaatgggcagtccattgttgaactgtctcatgataacattgttcagctgatcaaagatgctggtgtcaccgtcacactaacggtcattgctgaagaagagcatcatggtccacc

SEQ ID NO: 79024 - DNA, 120 bp, Artificial Sequence
  ENSG00000081026_23 (sequence is synthesized)
atcaggaacaaactcagccaggcaaagcccagccctgcagcacaggcccatgggacagtcacaggccaaccacatacctggggacagaagtgccctagaaggtgaaattggaaaagatgt

SEQ ID NO: 79025 - DNA, 120 bp, Artificial Sequence
  ENSG00000081026_24 (sequence is synthesized)
ctccacttcttacagacattcttggtcagaccacaagcaccttgcacagcctgacaccgcagtaatttcagttgtaggcagtcggcacaatcagaaccttggttgttatccagtagagct

SEQ ID NO: 79026 - DNA, 120 bp, Artificial Sequence
  ENSG00000081026_25 (sequence is synthesized)
ggagagaggcccccggggctttggattcagcctccgaggggggaaggagtacaacatggggctgttcatccttcgtcttgctgaagatggtcctgccatcaaagatggcagaattcatgt

SEQ ID NO: 79027 - DNA, 120 bp, Artificial Sequence
  ENSG00000081026_26 (sequence is synthesized)
tggtgaccagattgttgaaatcaatggggaacctacacaaggaatcacacatactcgagcaattgagctcattcaggctggtggaaataaagttcttcttcttttgaggccaggaactgg

SEQ ID NO: 79028 - DNA, 120 bp, Artificial Sequence
  ENSG00000081026_27 (sequence is synthesized)
cttgatacctgaccatggtttggctccttccggtctgtgctcctacgtgaaacccgagcaacattaaggctttcagggcttttcttggtctttccttaaaaagacttggtaaatttgcat

SEQ ID NO: 79029 - DNA, 120 bp, Artificial Sequence
  ENSG00000081026_28 (sequence is synthesized)
gtcttgtaaatcactttcttcttttgttttcttttaaattaaaaatgatgctattaaatacatctatttctatcttctgcacttttcagtcttcttttgacattaaatttgacagcttaa

SEQ ID NO: 79030 - DNA, 120 bp, Artificial Sequence
  ENSG00000081026_29 (sequence is synthesized)
cttcaaatgtgatttatgatgaacagtcaccattacccccatcttcacattttgcttccatatttgaagagtctcacgtgccagtaattgaagaatctttgagagttcagatatgtgaaa

SEQ ID NO: 79031 - DNA, 120 bp, Artificial Sequence
  ENSG00000081026_30 (sequence is synthesized)
aggcagaagaattaaaggacattgtgcctgaaaagaaaagcactttaaatgaaaatcagcctgagataaagcatcagtctcttctccagaaaaatgtgagtaagagggatccacccagca

SEQ ID NO: 79032 - DNA, 120 bp, Artificial Sequence
  ENSG00000081026_31 (sequence is synthesized)
gtcatgggcacagtaacaagaaaaatctattaaaagtagaaaatggtgttacacgaagaggtagatcggttagtcccaaaaagccagccagtcaacattcagaggaacatttggataaga

SEQ ID NO: 79033 - DNA, 120 bp, Artificial Sequence
  ENSG00000081026_32 (sequence is synthesized)
ttcctagtcctctaaaaaataaccccaaaagaagacccagagatcaatccctcagccccagcaaaggggaaaataaaagttgtcaggtcagcaccagggcaggctctggacaagatcagt

SEQ ID NO: 79034 - DNA, 120 bp, Artificial Sequence
  ENSG00000081026_33 (sequence is synthesized)
gcagaaaaagcagaggtcggtcggccagcccaaaaaagcagcaaaaaattgaaggaagcaaagctccatcaaatgctgaggccaaattattagagggtaagagtcgaagaatagcaggct

SEQ ID NO: 79035 - DNA, 120 bp, Artificial Sequence
  ENSG00000081026_34 (sequence is synthesized)
atacgggcagtaatgctgagcagatcccagatgggaaggaaaaatcagacgtcatcaggaaagatgcaaagcagaatcagttggaaaaaagcagaacaaggtctccagagaaaaaaatca

SEQ ID NO: 79036 - DNA, 120 bp, Artificial Sequence
  ENSG00000081026_35 (sequence is synthesized)
aaagaatggttgagaaatctcttccatccaaaatgactaataagactacaagtaaagaagtatctgaaaatgaaaaaggaaagaaagtaaccacaggagaaacaagttctagtaacgata

SEQ ID NO: 79037 - DNA, 120 bp, Artificial Sequence
  ENSG00000081026_36 (sequence is synthesized)
aaataggagaaaatgtccagctatcagaaaagaggctgaagcaagaacctgaagagaaggtagtttcaaacaaaacagaagatcacaaagggaaagaactagaggcagctgacaaaaaca

SEQ ID NO: 79038 - DNA, 120 bp, Artificial Sequence
  ENSG00000081026_37 (sequence is synthesized)
aagagactggaaggttcaaaccggaaagcagttctccagttaagaaaacactgataactccagggccctggaaggttccaagtggaaataaagtcacaggcactattggtatggctgaga

SEQ ID NO: 79039 - DNA, 120 bp, Artificial Sequence
  ENSG00000081026_38 (sequence is synthesized)
aacggcagtaacctttagtataaaacaaagaaaaacaagttgtaatcttttcttacagcagcatttttccagaaaaagcctttttttttttttcagatattctgaaacagataagtacat

SEQ ID NO: 79040 - DNA, 120 bp, Artificial Sequence
  ENSG00000081026_39 (sequence is synthesized)
gttaatgtgagcctcaagttacctaggctgcatgaagggcctttaggattgctaagaaccaactgtccccctggccggctgccctccctcgctctcaggaaggagctgcatccacatgct

SEQ ID NO: 79041 - DNA, 120 bp, Artificial Sequence
  ENSG00000081026_40 (sequence is synthesized)
catctgacccgccctgctcaggctgcccagctcgtcttcatgagtgtctgaacaaatgacatatgttgatattaacaatgtggtcacaactcactttgtatttgtgccaagttatctact

SEQ ID NO: 79042 - DNA, 120 bp, Artificial Sequence
  ENSG00000081026_41 (sequence is synthesized)
gtatcatgtctgtttttatcctttttgttcagctgtttccacagtaatgaaaaagttaggtttggcttggaagttgatgatctcaatagcatgttgcatgtttacagagagaaatatgtg

SEQ ID NO: 79043 - DNA, 120 bp, Artificial Sequence
  ENSG00000081026_42 (sequence is synthesized)
agtccttgcagaagaagagactgttaactcatcgttaaagatggccgttgtctcttctaacagctactgatgatgtcccactttaaaaataaaacccccaaacatcactactttaaggaa

SEQ ID NO: 79044 - DNA, 120 bp, Artificial Sequence
  ENSG00000081026_43 (sequence is synthesized)
aaaaaaaatgtagtccaatattgatgctttcttatggctttttattttaatttggctggataagttgtttcaaataactgttaaagatattacttacaattgaatgtttgaaataagaaa

SEQ ID NO: 79045 - DNA, 120 bp, Artificial Sequence
  ENSG00000081026_44 (sequence is synthesized)
gtactttaagcaatagagttcatctcctgctgtgttatccaacctcgatgtatacttacagcatctcaggtcaccctttttatttcagttatttaattatgaaaccataaagaagcatgt

SEQ ID NO: 79046 - DNA, 120 bp, Artificial Sequence
  ENSG00000081026_45 (sequence is synthesized)
ggaaatagtgtttattgctctttgaagaaaaaccaccaactatttctggatattttggctgtacctactactaaagtcattagtctttaatacataatacatatttgaaaagtaaacata

SEQ ID NO: 79047 - DNA, 120 bp, Artificial Sequence
  ENSG00000081026_46 (sequence is synthesized)
ttatatagattatgtgagggacttaatcatgaaaccagtttcacagtccaagtaccaactcttctggtagcaggtgcacaagcttgggtgtttaaaaacaacctgtgtagggtatgccca

SEQ ID NO: 79048 - DNA, 120 bp, Artificial Sequence
  ENSG00000081026_47 (sequence is synthesized)
gcaaatgaggacaaatgtgtagacagtacttactggatcttatttaacttttagctacattaactaactttcttatttaaaaacaagaaagggagactaaacatctgcttaacttgtaca

SEQ ID NO: 79049 - DNA, 120 bp, Artificial Sequence
  ENSG00000081026_48 (sequence is synthesized)
cattttcagaattctttttaaaagtctagttaaagatgtttcttagaagttggagactgttaacaacttccataaaatagatccaggtttttcagttccctgaagcagcattcagtagca

SEQ ID NO: 79050 - DNA, 120 bp, Artificial Sequence
  ENSG00000081026_49 (sequence is synthesized)
tctatataaataaaggcaccttctgagaataaaactattttatggagtgtgtgaacacacttgttctgtcacctgggttcatcttgttgtgaagcacattaggtccaggtccttccctct

SEQ ID NO: 79051 - DNA, 120 bp, Artificial Sequence
  ENSG00000081026_50 (sequence is synthesized)
gggagtctgactgtgaaactctttaacccaacaactcaattagcccctgtagataagacatgcttcccagagtgagatttttgaaatccccttttcatccagaactatatttacccacct

SEQ ID NO: 79052 - DNA, 120 bp, Artificial Sequence
  ENSG00000081026_51 (sequence is synthesized)
attgtaactattcaaatagagcaaaattaggaggcttgataaatactaagaatttagtaccacagaaattatttattattttccctgtagtccacaattagtgataacgaatcctatttt

SEQ ID NO: 79053 - DNA, 120 bp, Artificial Sequence
  ENSG00000081026_52 (sequence is synthesized)
tgttaactgtgacataactttgatgtcatatgttgtcctatgtggttcttcctaagtaaactctgtactgattatatactgacttagcaatgtggccttggaatgctgagcaaaatgtgg

SEQ ID NO: 79054 - DNA, 120 bp, Artificial Sequence
  ENSG00000081026_53 (sequence is synthesized)
atgtactggttgtaaatgtttatatattgtacagtacctttatatatacacttgaggttctgattagagaaagatctgtaaattgctcattattttttatatagatatttaaaaaaaaca

SEQ ID NO: 79055 - DNA, 120 bp, Artificial Sequence
  ENSG00000081026_54 (sequence is synthesized)
agtaccactttttgaaaaactttttttcctctctgtttttgagaaaattttcttttgatggggagatttgtaatttattaattaaaatgggattaaataataagcaaaaaaaatccatca

SEQ ID NO: 79056 - DNA, 120 bp, Artificial Sequence
  ENSG00000081026_55 (sequence is synthesized)
tattttaaagttgattgtgaacagtatactaaaaatcagccagactggccagtttatatatttcatagtaattcacattcatcatgtgaactcagtgagtatttgttgattgcattttat

SEQ ID NO: 79057 - DNA, 120 bp, Artificial Sequence
  ENSG00000081026_56 (sequence is synthesized)
ttgtggttggaattcaaaatctgtactttaaaaaacttacatgtaccttgactatcctggaaaaaagagaatataaaatttggggagaaaacaacaaaaacagaataattggttttcttt

SEQ ID NO: 79058 - DNA, 120 bp, Artificial Sequence
  ENSG00000081026_57 (sequence is synthesized)
agtttcctggcagcttgggcaggcgttggtctccgcgctacagctccgcagcggccacgatcgatcccgcgacgggtctacgcgcgcttctgcgcgccccccacggatttttcccgttcc

SEQ ID NO: 79059 - DNA, 120 bp, Artificial Sequence
  ENSG00000081026_58 (sequence is synthesized)
cggctcttcccccttcacctccccgcccccccgcctcagcctttcccgccgctcgggcgctgagcccagggaccagccggcggcagtgaccccgcccgaagccccttctggaacctcctg

SEQ ID NO: 79060 - DNA, 120 bp, Artificial Sequence
  ENSG00000081026_59 (sequence is synthesized)
gggacaattcccttttcctttcttcagcctaacccgcggtggccctcgcggagtccggtcagccccggggagcgcagccgggaggggcgtccaaggggcgtctcgcgtctgggaacggcc

SEQ ID NO: 79061 - DNA, 120 bp, Artificial Sequence
  ENSG00000081026_60 (sequence is synthesized)
ccctgaagactgtgaagatggagagcttccttatggctgggagaaaatagaggaccctcagtatgggacatactatgttgatttcactcttgtcgcccaagctggagtgcaatggcatga

SEQ ID NO: 79062 - DNA, 120 bp, Artificial Sequence
  ENSG00000081026_61 (sequence is synthesized)
gacgcctgtcagcgggctcaccaaccgggacaccctggctgtcatccgccacttccgcgagcccatccgtctcaagactgtgaaaccagttcaaagctggagactggatactgacatgtt

SEQ ID NO: 79063 - DNA, 120 bp, Artificial Sequence
  ENSG00000081026_62 (sequence is synthesized)
catgaccttgtgtacaagctgaaagctgctgaaagctacaggccaatggggctctgctttacttctgccttccatatcttgtgtcctgcatcttaatggtggaatcagatttgcatccag

SEQ ID NO: 79064 - DNA, 120 bp, Artificial Sequence
  ENSG00000081026_63 (sequence is synthesized)
aatactagctataaaggagtctggaaaagacagtttttagttttccaacttctgcgtttcaggaaggcatactacaaggaggaagtcgctgagtgatagctgatcctttcccaggcactc

SEQ ID NO: 79065 - DNA, 120 bp, Artificial Sequence
  ENSG00000081026_64 (sequence is synthesized)
tcattgtcatttctgtgagcttctcttttcataatggcctgtagttggaataatcatagggccaagggattttaacatctgtagtaactttttgtcctaggttagcttgtatctctccca

SEQ ID NO: 79066 - DNA, 120 bp, Artificial Sequence
  ENSG00000081026_65 (sequence is synthesized)
cctcccataactgctgctgagacatctatgtttgatatcatttgacgtcaacctcccctgcaagccacaggcagggagagcacctcacccaaagcaaccagtttattggctggtcagcaa

SEQ ID NO: 79067 - DNA, 120 bp, Artificial Sequence
  ENSG00000081026_66 (sequence is synthesized)
cctgtgatttctgtagcttaaaaagatgagtggggcttattgtcttttgaactaagacaaaaaggaaagaatttccaattaagggtgggagcttcagctgagaggttttgaagtgagttg

SEQ ID NO: 79068 - DNA, 120 bp, Artificial Sequence
  ENSG00000081026_67 (sequence is synthesized)
gctgtattcttttgcaagaccaattgttaaattttcaagaattttgtgagttgtcaaacagccatttttaagaattaagttgcataataatttaataaaaacaaagataaatactcaaaa

SEQ ID NO: 79069 - DNA, 120 bp, Artificial Sequence
  ENSG00000081041_0 (sequence is synthesized)
acagagcccgggccacaggcagctccttgccagctctcctcctcgcacagccgctcgaaccgcctgctgagccccatggcccgcgccacgctctccgccgcccccagcaatccccggctc

SEQ ID NO: 79070 - DNA, 120 bp, Artificial Sequence
  ENSG00000081041_1 (sequence is synthesized)
ctgcgggtggcgctgctgctcctgctcctggtggccgccagccggcgcgcagcaggagcgcccctggccactgaactgcgctgccagtgcttgcagaccctgcagggaattcacctcaag

SEQ ID NO: 79071 - DNA, 120 bp, Artificial Sequence
  ENSG00000081041_2 (sequence is synthesized)
aacatccaaagtgtgaaggtgaagtcccccggaccccactgcgcccaaaccgaagtcatagccacactcaagaatgggcagaaagcttgtctcaaccccgcatcgcccatggttaagaaa

SEQ ID NO: 79072 - DNA, 120 bp, Artificial Sequence
  ENSG00000081041_3 (sequence is synthesized)
atcatcgaaaagatgctgaaaaatggcaaatccaactgaccagaaggaaggaggaagcttattggtggctgttcctgaaggaggccctgcccttacaggaacagaagaggaaagagagac

SEQ ID NO: 79073 - DNA, 120 bp, Artificial Sequence
  ENSG00000081041_4 (sequence is synthesized)
gtttgagcatcacttaggagaagtcttctatttatttatttatttatttatttgtttgttttagaagattctatgttaatattttatgtgtaaaataaggttatgattgaatctacttgc

SEQ ID NO: 79074 - DNA, 120 bp, Artificial Sequence
  ENSG00000081041_5 (sequence is synthesized)
acactctcccattatatttattgtttattttaggtcaaacccaagttagttcaatcctgattcatatttaatttgaagatagaaggtttgcagatattctctagtcatttgttaatattt

SEQ ID NO: 79075 - DNA, 120 bp, Artificial Sequence
  ENSG00000081041_6 (sequence is synthesized)
cttcgtgatgacatatcacatgtcagccactgtgatagaggctgaggaatccaagaaaatggccagtgagatcaatgtgacggcagggaaatgtatgtgtgtctattttgtaactgtaaa

SEQ ID NO: 79076 - DNA, 120 bp, Artificial Sequence
  ENSG00000081041_7 (sequence is synthesized)
gatgaatgtcagttgttatttattgaaatgatttcacagtgtgtggtcaacatttctcatgttgaagctttaagaactaaaatgttctaaatatcccttggacattttatgtctttcttg

SEQ ID NO: 79077 - DNA, 120 bp, Artificial Sequence
  ENSG00000081041_8 (sequence is synthesized)
taaggcatactgccttgtttaatgttaattatgcagtgtttccctctgtgttagagcagagaggtttcgatatttattgatgttttcacaaagaacaggaaaataaaatatttaaaaata

SEQ ID NO: 79078 - DNA, 120 bp, Artificial Sequence
  ENSG00000081041_9 (sequence is synthesized)
actgctggggtccccgactctcccgctgccccaaaccctgtcctcagcccgacctcctgtctcacgagattcccttctctctgcagagccacactcaagaatgggcagaaagcttgtctc

SEQ ID NO: 79079 - DNA, 120 bp, Artificial Sequence
  ENSG00000081041_10 (sequence is synthesized)
aaccccgcatcgcccatggttaagaaaatcatcgaaaagatgctgaaaaagtaagttataatttccatgtacacaggcgactggagctgttggtcagaaatactggcgtctgccccctaa

SEQ ID NO: 79080 - DNA, 120 bp, Artificial Sequence
  ENSG00000081041_11 (sequence is synthesized)
gccagccggcgcgcagcaggtgggtcccggcgccctggggtccccgggccggacgcggctggggtgggcgccccgcgccgacagccccgctcaatcagcgagtctcttcttccctaggag

SEQ ID NO: 79081 - DNA, 120 bp, Artificial Sequence
  ENSG00000081051_0 (sequence is synthesized)
attgtgcttccaccactgccaataacaaaataactagcaaccatgaagtgggtggaatcaatttttttaattttcctactaaattttactgaatccagaacactgcatagaaatgaatat

SEQ ID NO: 79082 - DNA, 120 bp, Artificial Sequence
  ENSG00000081051_1 (sequence is synthesized)
ggaatagcttccatattggattcttaccaatgtactgcagagataagtttagctgacctggctaccatattttttgcccagtttgttcaagaagccacttacaaggaagtaagcaaaatg

SEQ ID NO: 79083 - DNA, 120 bp, Artificial Sequence
  ENSG00000081051_2 (sequence is synthesized)
gtgaaagatgcattgactgcaattgagaaacccactggagatgaacagtcttcagggtgtttagaaaaccagctacctgcctttctggaagaactttgccatgagaaagaaattttggag

SEQ ID NO: 79084 - DNA, 120 bp, Artificial Sequence
  ENSG00000081051_3 (sequence is synthesized)
aagtacggacattcagactgctgcagccaaagtgaagagggaagacataactgttttcttgcacacaaaaagcccactccagcatcgatcccacttttccaagttccagaacctgtcaca

SEQ ID NO: 79085 - DNA, 120 bp, Artificial Sequence
  ENSG00000081051_4 (sequence is synthesized)
agctgtgaagcatatgaagaagacagggagacattcatgaacaaattcatttatgagatagcaagaaggcatcccttcctgtatgcacctacaattcttctttgggctgctcgctatgac

SEQ ID NO: 79086 - DNA, 120 bp, Artificial Sequence
  ENSG00000081051_5 (sequence is synthesized)
aaaataattccatcttgctgcaaagctgaaaatgcagttgaatgcttccaaacaaaggcagcaacagttacaaaagaattaagagaaagcagcttgttaaatcaacatgcatgtgcagta

SEQ ID NO: 79087 - DNA, 120 bp, Artificial Sequence
  ENSG00000081051_6 (sequence is synthesized)
atgaaaaattttgggacccgaactttccaagccataactgttactaaactgagtcagaagtttaccaaagttaattttactgaaatccagaaactagtcctggatgtggcccatgtacat

SEQ ID NO: 79088 - DNA, 120 bp, Artificial Sequence
  ENSG00000081051_7 (sequence is synthesized)
gagcactgttgcagaggagatgtgctggattgtctgcaggatggggaaaaaatcatgtcctacatatgttctcaacaagacactctgtcaaacaaaataacagaatgctgcaaactgacc

SEQ ID NO: 79089 - DNA, 120 bp, Artificial Sequence
  ENSG00000081051_8 (sequence is synthesized)
acgctggaacgtggtcaatgtataattcatgcagaaaatgatgaaaaacctgaaggtctatctccaaatctaaacaggtttttaggagatagagattttaaccaattttcttcaggggaa

SEQ ID NO: 79090 - DNA, 120 bp, Artificial Sequence
  ENSG00000081051_9 (sequence is synthesized)
aaaaatatcttcttggcaagttttgttcatgaatattcaagaagacatcctcagcttgctgtctcagtaattctaagagttgctaaaggataccaggagttattggagaagtgtttccag

SEQ ID NO: 79091 - DNA, 120 bp, Artificial Sequence
  ENSG00000081051_10 (sequence is synthesized)
taaaggagaagaagaattacagaaatacatccaggagagccaagcattggcaaagcgaagctgcggcctcttccagaaactaggagaatattacttacaaaatgcgtttctcgttgctta

SEQ ID NO: 79092 - DNA, 120 bp, Artificial Sequence
  ENSG00000081051_11 (sequence is synthesized)
cacaaagaaagccccccagctgacctcgtcggagctgatggccatcaccagaaaaatggcagccacagcagccacttgttgccaactcagtgaggacaaactattggcctgtggcgaggg

SEQ ID NO: 79093 - DNA, 120 bp, Artificial Sequence
  ENSG00000081051_12 (sequence is synthesized)
agcggctgacattattatcggacacttatgtatcagacatgaaatgactccagtaaaccctggtgttggccagtgctgcacttcttcatatgccaacaggaggccatgcttcagcagctt

SEQ ID NO: 79094 - DNA, 120 bp, Artificial Sequence
  ENSG00000081051_13 (sequence is synthesized)
ggtggtggatgaaacatatgtccctcctgcattctctgatgacaagttcattttccataaggatctgtgccaagctcagggtgtagcgctgcaaacaatgaagcaagagtttctcattaa

SEQ ID NO: 79095 - DNA, 120 bp, Artificial Sequence
  ENSG00000081051_14 (sequence is synthesized)
ccttgtgaagcaaaagccacaaataacagaggaacaacttgaggctgtcattgcagatttctcaggcctgttggagaaatgctgccaaggccaggaacaggaagtctgctttgctgaaga

SEQ ID NO: 79096 - DNA, 120 bp, Artificial Sequence
  ENSG00000081051_15 (sequence is synthesized)
gggacaaaaactgatttcaaaaactcgtgctgctttgggagtttaaattacttcaggggaagagaagacaaaacgagtctttcattcggtgtgaacttttctctttaattttaactgatt

SEQ ID NO: 79097 - DNA, 120 bp, Artificial Sequence
  ENSG00000081051_16 (sequence is synthesized)
taacactttttgtgaattaatgaaatgataaagacttttatgtgagatttccttatcacagaaataaaatatctccaaatgtttccttttccaagtttgcttatttatgaaaagttatcg

SEQ ID NO: 79098 - DNA, 120 bp, Artificial Sequence
  ENSG00000081051_17 (sequence is synthesized)
ataatttctttagttttgtataccattgtctgaagcagattctgttaaaatagcattaagtgttggttattataggagattaaagctatccaaggatggatttacagcactagatcactt

SEQ ID NO: 79099 - DNA, 120 bp, Artificial Sequence
  ENSG00000081051_18 (sequence is synthesized)
ggtgaactgaaaaatgttcccaagttaaacactatttgatgctaccagggcattttgtttattaaatgaccatcactgaagtattctaacagataatctggagatgagaaaagaaattat

SEQ ID NO: 79100 - DNA, 120 bp, Artificial Sequence
  ENSG00000081051_19 (sequence is synthesized)
tattcttctatgggatctaagaaaatttaacatctactttttttctcaatcttgttcagttctctattcacagacattttaaaacataagaatattacagttttgattgaatataattaa

SEQ ID NO: 79101 - DNA, 120 bp, Artificial Sequence
  ENSG00000081051_20 (sequence is synthesized)
gactatgggctggaggactttgaggatgtctgtctcataacacttgggttgtatctgttctatggggcttgttttaagcttggcaacttgcaacagggttcactgactttctccccaggc

SEQ ID NO: 79102 - DNA, 120 bp, Artificial Sequence
  ENSG00000081051_21 (sequence is synthesized)
ctgcactttgtaaatactatcctggaatccaaacggatagacaaggatggtgctacctctttctggagacttccatattggattcttaccaatgtactgcagagataagtttagctgacc

SEQ ID NO: 79103 - DNA, 120 bp, Artificial Sequence
  ENSG00000081051_22 (sequence is synthesized)
ctccagaaatatcaatccataatgagatagatcatgaggagtgccattaattctcttaaaaatacatggaattcaaaaaaaagtttattttaaaaacacttgaacaaaattacgcacaca

SEQ ID NO: 79104 - DNA, 120 bp, Artificial Sequence
  ENSG00000081051_23 (sequence is synthesized)
atgttaaattagtggctcaactatgcaaaatcctttttggttatttaaaagacttcaacaaatgctatcagaagactttcctacgtatccaatatttctctgatataaaataatagaacc

SEQ ID NO: 79105 - DNA, 120 bp, Artificial Sequence
  ENSG00000081051_24 (sequence is synthesized)
atgaggggagattgccttccactacacataagtatggtcaagtatgaaatagtgttttatccacaacctgcacaactccaggctggtggaacacttggcatgctttcagcctcaatcttt

SEQ ID NO: 79106 - DNA, 120 bp, Artificial Sequence
  ENSG00000081052_0 (sequence is synthesized)
agattaagcgggaggcgcgccgggcgtctgcactcgggaggccccgcttgttccccgcgcccgcggcggtccgcgttccccgcctccagcccgcctccaacttgcggccgccgggcttgg

SEQ ID NO: 79107 - DNA, 120 bp, Artificial Sequence
  ENSG00000081052_1 (sequence is synthesized)
ctgcgagagcgccgcgaagaggcagcggggcgcgggtggattggggctggaggtgcgcgtcccgtggggtggcaaggcggcagctcctggcgctgcgggcgtccccacaggaacagactt

SEQ ID NO: 79108 - DNA, 120 bp, Artificial Sequence
  ENSG00000081052_2 (sequence is synthesized)
tgacccagaacacagaacctcacttgtcaacaagaaccttctggaagagaagactggcagaatattttttaagtactaagacttgcctgcgatgtggtctctgcacatagtactaatgag

SEQ ID NO: 79109 - DNA, 120 bp, Artificial Sequence
  ENSG00000081052_3 (sequence is synthesized)
gtgctccttcagattgaccaagtccttggccacaggtccctggtcacttatactcattctcttttctgtacaatatgtatatgggagtggaaagaaatacattggtccttgtggaggaag

SEQ ID NO: 79110 - DNA, 120 bp, Artificial Sequence
  ENSG00000081052_4 (sequence is synthesized)
agattgctctgtttgccactgtgttcctgaaaaggggtctcggggtccaccaggaccaccagggccacagggtccaattggacccctgggagccccaggacccattgggctttcaggaga

SEQ ID NO: 79111 - DNA, 120 bp, Artificial Sequence
  ENSG00000081052_5 (sequence is synthesized)
gaaaggaatgagaggggaccgcggccctcctggagcagcaggggacaaaggagataagggtccaactggtgttcctggatttccaggtttagatggcatacctgggcacccagggcctcc

SEQ ID NO: 79112 - DNA, 120 bp, Artificial Sequence
  ENSG00000081052_6 (sequence is synthesized)
tggacccagaggcaaacctggtatgagtggccacaatggctcaagaggtgacccagggtttccaggaggaagaggagctcttggcccaggaggccccctaggccatcctggggaaaaggg

SEQ ID NO: 79113 - DNA, 120 bp, Artificial Sequence
  ENSG00000081052_7 (sequence is synthesized)
agaaaaaggaaattcagtgttcattttaggtgccgttaaaggtattcagggagacagaggggacccaggactgcctggcttaccaggatcttggggtgcaggaggaccggcaggtcccac

SEQ ID NO: 79114 - DNA, 120 bp, Artificial Sequence
  ENSG00000081052_8 (sequence is synthesized)
aggatatcctggagagccagggttagtgggacctccgggccaaccagggcgtccaggtttgaagggaaatcccggtgtgggagtaaaggggcaaatgggagacccgggtgaggttggtca

SEQ ID NO: 79115 - DNA, 120 bp, Artificial Sequence
  ENSG00000081052_9 (sequence is synthesized)
gcaaggttctcctggacccaccctgttggtagagccacctgacttttgtctctataaaggagaaaagggtataaaaggaattcctggaatggttggactgccaggaccaccaggacgcaa

SEQ ID NO: 79116 - DNA, 120 bp, Artificial Sequence
  ENSG00000081052_10 (sequence is synthesized)
gggagaatctggtattggggcaaaaggagaaaaaggtattcctggatttccagggcctcggggggatcctggttcctatggatctccaggttttccaggattaaagggagaactaggact

SEQ ID NO: 79117 - DNA, 120 bp, Artificial Sequence
  ENSG00000081052_11 (sequence is synthesized)
ggttggagatcctgggctatttggattaattggcccaaagggggatcctggaaatcgagggcacccaggaccaccaggtgttttggtgactccacctcttccactcaaaggcccaccagg

SEQ ID NO: 79118 - DNA, 120 bp, Artificial Sequence
  ENSG00000081052_12 (sequence is synthesized)
ggacccagggttccctggccgctatggagaaacaggggatgttggaccacctggtcccccaggtctcttgggcagaccaggggaagcctgtgcaggcatgataggaccccctgggccaca

SEQ ID NO: 79119 - DNA, 120 bp, Artificial Sequence
  ENSG00000081052_13 (sequence is synthesized)
aggatttcctggtcttcctgggcttccaggagaagctggtattcctgggagacctgattctgctccaggaaaaccagggaagccaggatcacctggcttgcctggagcaccaggcctgca

SEQ ID NO: 79120 - DNA, 120 bp, Artificial Sequence
  ENSG00000081052_14 (sequence is synthesized)
gggcctcccaggatcaagtgtgatatactgtagtgttgggaaccccggaccacaaggaataaaaggcaaagttggtcccccaggaggaagaggcccaaaaggagaaaaaggaaatgaagg

SEQ ID NO: 79121 - DNA, 120 bp, Artificial Sequence
  ENSG00000081052_15 (sequence is synthesized)
actctgtgcctgtgagcctggacccatgggcccccctggccctccaggacttcctgggaggcaggggagtaagggagacttggggctccctggctggcttggaacaaaaggtgacccagg

SEQ ID NO: 79122 - DNA, 120 bp, Artificial Sequence
  ENSG00000081052_16 (sequence is synthesized)
acctcctggtgctgaaggacctccagggctaccaggaaagcatggtgcctctggaccacctggcaacaaaggggcgaagggtgacatggttgtatcaagagttaaagggcacaaaggaga

SEQ ID NO: 79123 - DNA, 120 bp, Artificial Sequence
  ENSG00000081052_17 (sequence is synthesized)
aagaggtcctgatgggcccccaggatttccagggcagccaggatcacatggtcgggatggacatgctggagaaaaaggggatccaggacctccaggggatcatgaagatgcgaccccagg

SEQ ID NO: 79124 - DNA, 120 bp, Artificial Sequence
  ENSG00000081052_18 (sequence is synthesized)
tggtaaaggatttcctggacctctgggccccccaggcaaagcaggacctgtggggcccccaggactgggatttcctggtccaccaggagagcgaggccacccaggagttccaggccaccc

SEQ ID NO: 79125 - DNA, 120 bp, Artificial Sequence
  ENSG00000081052_19 (sequence is synthesized)
aggtgtgaggggccctgatggcttgaagggtcagaaaggtgacacaatttcttgcaacgtaacctaccctgggaggcatggccctccaggttttgatggacctccaggtccgaagggatt

SEQ ID NO: 79126 - DNA, 120 bp, Artificial Sequence
  ENSG00000081052_20 (sequence is synthesized)
tccaggtccccaaggtgcccctgggctgagtggttcagatgggcataaaggcagacctggcacaccaggaacagcggaaataccaggtccacctggttttcgtggtgacatgggagatcc

SEQ ID NO: 79127 - DNA, 120 bp, Artificial Sequence
  ENSG00000081052_21 (sequence is synthesized)
gggttttggaggtgaaaaggggtcctcccctgttgggcccccaggccctcccggctcaccaggagtgaatggtcagaaaggaatcccgggagaccctgcatttggtcacctgggaccccc

SEQ ID NO: 79128 - DNA, 120 bp, Artificial Sequence
  ENSG00000081052_22 (sequence is synthesized)
gggaaagaggggtctttcaggagtgccagggataaaaggacccagaggtgatccgggatgtccaggggctgaagggccagctggcattcctggattcctaggtctcaaaggtcccaaagg

SEQ ID NO: 79129 - DNA, 120 bp, Artificial Sequence
  ENSG00000081052_23 (sequence is synthesized)
cagagagggacatgctgggtttccaggtgtcccaggtccacctggccattcctgtgaaagaggtgctccagggataccagggcaaccgggactccctgggtatccaggtagcccaggtgc

SEQ ID NO: 79130 - DNA, 120 bp, Artificial Sequence
  ENSG00000081052_24 (sequence is synthesized)
tccaggtgggaaaggacagccgggagatgtggggcctcccgggccagctggaatgaaaggcctccccggactcccaggacggcctggggcacatggtcccccaggcctcccaggaatccc

SEQ ID NO: 79131 - DNA, 120 bp, Artificial Sequence
  ENSG00000081052_25 (sequence is synthesized)
aggtccctttggagatgatgggctacctggtcctccaggtccaaagggaccccgggggctgcctggtttcccaggttttcccggagaaagaggaaagcctggtgcagagggatgtcctgg

SEQ ID NO: 79132 - DNA, 120 bp, Artificial Sequence
  ENSG00000081052_26 (sequence is synthesized)
cgcaaagggagaacctggagagaagggcatgtctggccttcctggagaccggggactgagaggggccaaaggagccataggacctcccggagatgaaggagaaatggctatcatttcaca

SEQ ID NO: 79133 - DNA, 120 bp, Artificial Sequence
  ENSG00000081052_27 (sequence is synthesized)
aaagggaacacctggggaacctggacctcctggagatgatggattcccaggagaaagaggtgataaaggaactcccgggatgcaagggagaagaggagagccgggaagatacggaccacc

SEQ ID NO: 79134 - DNA, 120 bp, Artificial Sequence
  ENSG00000081052_28 (sequence is synthesized)
tggatttcacagaggggaacctggtgagaaaggtcagccagggcctcctggacccccaggccctccaggctcaactggtctaagagggttcattggttttccaggacttccaggtgacca

SEQ ID NO: 79135 - DNA, 120 bp, Artificial Sequence
  ENSG00000081052_29 (sequence is synthesized)
gggtgagccaggttctccaggtccccctggattttcaggaattgatggagcaagaggacctaaaggaaacaaaggtgaccctgccagtcactttggtccacctggtccaaagggtgagcc

SEQ ID NO: 79136 - DNA, 120 bp, Artificial Sequence
  ENSG00000081052_30 (sequence is synthesized)
aggtagccctggatgtccagggcattttggagcatccggagagcagggcttgcctggtattcaagggcccagaggatcacctggaaggccagggccacctggctcctctggaccaccagg

SEQ ID NO: 79137 - DNA, 120 bp, Artificial Sequence
  ENSG00000081052_31 (sequence is synthesized)
gtgcccaggtgatcacgggatgcctgggctgaggggacagccaggagaaatgggagaccctgggccaagaggcctccagggggatccagggataccaggtcctccgggaataaaaggtcc

SEQ ID NO: 79138 - DNA, 120 bp, Artificial Sequence
  ENSG00000081052_32 (sequence is synthesized)
ctccggatcacctggcctgaacggcttgcatggattgaaaggtcagaaaggaactaaaggtgcttcaggtttgcatgatgtggggccacctggtccagtgggaatacctgggctaaaagg

SEQ ID NO: 79139 - DNA, 120 bp, Artificial Sequence
  ENSG00000081052_33 (sequence is synthesized)
ggagagaggagaccctgggagcccaggaatctctcctccaggtcctcgtggaaagaaaggtcccccaggacccccagggagttcaggaccacctggtcctgcaggtgccacaggaagagc

SEQ ID NO: 79140 - DNA, 120 bp, Artificial Sequence
  ENSG00000081052_34 (sequence is synthesized)
tcctaaggacattcctgacccgggtccacctggagatcagggacctcctggtcctgatggcccaagaggagcacctgggcctccaggcctccctgggagtgttgaccttctgagagggga

SEQ ID NO: 79141 - DNA, 120 bp, Artificial Sequence
  ENSG00000081052_35 (sequence is synthesized)
gccaggtgactgtggtctaccagggccaccaggtccccctggcccaccaggccctccaggatacaaaggctttccaggatgtgatggaaaagatggccagaaaggaccagtgggattccc

SEQ ID NO: 79142 - DNA, 120 bp, Artificial Sequence
  ENSG00000081052_36 (sequence is synthesized)
gggaccgcagggaccacatggatttcctgggccacctggagagaagggtttacctggacctccagggagaaaagggcccactggtcttccgggtcccagaggtgaaccggggccacctgc

SEQ ID NO: 79143 - DNA, 120 bp, Artificial Sequence
  ENSG00000081052_37 (sequence is synthesized)
agatgtggatgactgtccccgaatcccaggccttcctggggcgccaggcatgagaggaccagaaggagccatggggctccctggaatgagaggcccctcaggaccagggtgcaaaggaga

SEQ ID NO: 79144 - DNA, 120 bp, Artificial Sequence
  ENSG00000081052_38 (sequence is synthesized)
gcctgggctggatggcaggaggggtgtggatggcgtccctgggtctcctgggcctcccggacgtaaaggtgacacaggagaagacggctaccctggaggaccagggcctcctggtcccat

SEQ ID NO: 79145 - DNA, 120 bp, Artificial Sequence
  ENSG00000081052_39 (sequence is synthesized)
tggggatcctgggcccaaagggtttggccctggatacctcggtggcttcctcctggttctccacagtcagacggaccaggagcccacctgccccctgggcatgcccaggctctggactgg

SEQ ID NO: 79146 - DNA, 120 bp, Artificial Sequence
  ENSG00000081052_40 (sequence is synthesized)
gtatagtctgttatacctggaagggcaagagaaagctcacaatcaagaccttggtctggcagggtcttgccttcccgtatttagcacgctgccctttgcctactgcaacatccaccaggt

SEQ ID NO: 79147 - DNA, 120 bp, Artificial Sequence
  ENSG00000081052_41 (sequence is synthesized)
cccatgatgccactctctgaagaggcgatccgcccctatgtcagccgctgtgcggtatgcgaggccccggcccaggcggtggcggtgcacagccaggaccagtccatccccccatgtccg

SEQ ID NO: 79148 - DNA, 120 bp, Artificial Sequence
  ENSG00000081052_42 (sequence is synthesized)
cagacctggaggagcctctggatcgggtattcattcctgatgcacacaggagctggggaccaaggaggagggcaggcccttatgtcacctggcagctgcctggaagatttcagagcagca

SEQ ID NO: 79149 - DNA, 120 bp, Artificial Sequence
  ENSG00000081052_43 (sequence is synthesized)
ccattccttgaatgccagggccggcagggaacttgccactttttcgcaaataagtatagcttctggctcacaacggtgaaagcagacttgcagttttcctctgctccagcaccagacacc

SEQ ID NO: 79150 - DNA, 120 bp, Artificial Sequence
  ENSG00000081052_44 (sequence is synthesized)
ttaaaagaaagccaggcccaacgccagaaaatcagccggtgccaggtctgcgtgaagtatagctagagaatgcgaaattcaccaacacgtggccaagagaaacttcctagggggctaaga

SEQ ID NO: 79151 - DNA, 120 bp, Artificial Sequence
  ENSG00000081052_45 (sequence is synthesized)
cttcctagactgtgctaagagatgtcatggtgctcattttggactccctttcagtggttccttctgttttgtcgtggttattcccagagtcctctggttccttacacattaagcaaatgc

SEQ ID NO: 79152 - DNA, 120 bp, Artificial Sequence
  ENSG00000081052_46 (sequence is synthesized)
tgcacagatggatttgtttggacctcccaatctagggagcctagatactcttattttactgaggatgatcgaagaactggctttacttaaaaatatgctaattctcagaaaggcaagtag

SEQ ID NO: 79153 - DNA, 120 bp, Artificial Sequence
  ENSG00000081052_47 (sequence is synthesized)
atgataaaggccagattacaaattacattactgaaaacttcattcttgggttaacagtatctcaaacaattgaagtcaattactctataatacagtgggcttctggatggattttatagg

SEQ ID NO: 79154 - DNA, 120 bp, Artificial Sequence
  ENSG00000081052_48 (sequence is synthesized)
aaaaaataaacaggtcaatgaatgaaactagaaagcagagattttcaacatttcaaaatgatttcctctgtaatctatttttccatatactttaaataatggtaaaaccatgacgcaaag

SEQ ID NO: 79155 - DNA, 120 bp, Artificial Sequence
  ENSG00000081052_49 (sequence is synthesized)
agagatttttttttaaagaagaaaaaaaaaaattcacactgccagcgttaacagttcctttcaaaggagaatgaatcatgatggcaggaaggcccacagtcgccgtattccagagatgcg

SEQ ID NO: 79156 - DNA, 120 bp, Artificial Sequence
  ENSG00000081052_50 (sequence is synthesized)
acattagcataaacacatcacagatgaatataaaacattatgttctcttctgcatttttcagagaatagaaatgcctactttggcaacccttttgaaaagtagcaattatggaaaaaaaa

SEQ ID NO: 79157 - DNA, 120 bp, Artificial Sequence
  ENSG00000081052_51 (sequence is synthesized)
tattcaataagagattaggagcctaaaagctattagtgaatattaaggtagttattcacaaaaattgactccccattgcagtgaacttccagacagactgcttttccccagtcggggtcc

SEQ ID NO: 79158 - DNA, 120 bp, Artificial Sequence
  ENSG00000081052_52 (sequence is synthesized)
ggcgtgtcacaggtgcgtgcgtgctaatgggactgacgctacatggggctcactcaggcaggcacgcgcttcatacaaagcatctcactcccctccccaggagagcctgcacagcttctt

SEQ ID NO: 79159 - DNA, 120 bp, Artificial Sequence
  ENSG00000081052_53 (sequence is synthesized)
gcactcacaacggacactttgctccacacacataatggcagctcacacagggacgtgacagagctatcattatgcacttgggagaaaattaagggccgatttaattaaacttaggtaaga

SEQ ID NO: 79160 - DNA, 120 bp, Artificial Sequence
  ENSG00000081052_54 (sequence is synthesized)
agattcatttaagtcagggttaccccatcaggaggacatggcactatctttaaacgaaacaaagacaatttataatttgaattttatgctcccgtggttggctgttacaggagcatccca

SEQ ID NO: 79161 - DNA, 120 bp, Artificial Sequence
  ENSG00000081052_55 (sequence is synthesized)
ttttgccaattttaaagacattcttatatttcatatcagtcttgtaccaaggcaacagtttgacatttggcattagtattttctaaaaaagtttagaatgtgtgtcaatttataatgatt

SEQ ID NO: 79162 - DNA, 120 bp, Artificial Sequence
  ENSG00000081052_56 (sequence is synthesized)
atttttttctgtaaagcaaaagatccctttttctgttttgctaggaatttggtgatctaatcctaaatttaaaagatttgttggaaaaaatttttaggaaactcaccttcctcatctaaa

SEQ ID NO: 79163 - DNA, 120 bp, Artificial Sequence
  ENSG00000081052_57 (sequence is synthesized)
agaaaaaggcattttagagaaaactaaagaaatttctcatgagcgtgacactcattttagtgctttgtttccgtgcacttaaaaataattgagaagaaaaactcaattaaaattttgttt

SEQ ID NO: 79164 - DNA, 120 bp, Artificial Sequence
  ENSG00000081052_58 (sequence is synthesized)
ataagaaatgttttccttgccaaaccttgatttgtaatgagctcttatatgcagaacacatttcaaatgagttttgctatgggctgcccccagggtggcaatttattttaagagtatttt

SEQ ID NO: 79165 - DNA, 120 bp, Artificial Sequence
  ENSG00000081052_59 (sequence is synthesized)
ctggtaaaaagaaaaatgtgtattttaagatgaaatattttcttgatgtagcagaatatttcctagttcatttgacccatttgatattttttaaaccatgctctggcatgttgaatattt

SEQ ID NO: 79166 - DNA, 120 bp, Artificial Sequence
  ENSG00000081052_60 (sequence is synthesized)
ttgtgcacctaaaacttaagccaatttcaatcttatttgtgattacctttctccttcccaaaaagctttatctattaccaaaagtcaaccctcctaaaagttcaacctgttcatcttgaa

SEQ ID NO: 79167 - DNA, 120 bp, Artificial Sequence
  ENSG00000081052_61 (sequence is synthesized)
cttggcctgagaacattttctgggaagaggtaagggtgacaaatggaacatcagaaacgtatcttgcttgctaattattttaaacactttaatgttggtattagaatattatcttcataa

SEQ ID NO: 79168 - DNA, 120 bp, Artificial Sequence
  ENSG00000081052_62 (sequence is synthesized)
gttaataaataagtaaaaaaaaaaaacccacacaaagacaggctaaattatgtagacagtttactccacagtgagcttgggaaggtatcagactgttcaaaatgttagtattacaagagc

SEQ ID NO: 79169 - DNA, 120 bp, Artificial Sequence
  ENSG00000081052_63 (sequence is synthesized)
tgtctctaaatgcagcattaacactgccctctaattttacaaaagtattttaaaggatcaaaagggcggaaaaataacttcttggaatagaagatcctgttaccttaaaccattattttc

SEQ ID NO: 79170 - DNA, 120 bp, Artificial Sequence
  ENSG00000081052_64 (sequence is synthesized)
ttcacctggttatatatcaatgtgccttcaattaccctttctctgtggaggtgatgaacaaagcttttaagttgttctcctaacccattattggagatgatccttatcaaacccttctct

SEQ ID NO: 79171 - DNA, 120 bp, Artificial Sequence
  ENSG00000081052_65 (sequence is synthesized)
ccctgcctccccaccaaccttgtagactggaacgtgcctagattgccctaatgggaactgttctgttctgtgcccgtgctggaaatctgggatgcttccttctgggttctgattctcagt

SEQ ID NO: 79172 - DNA, 120 bp, Artificial Sequence
  ENSG00000081052_66 (sequence is synthesized)
gagtggagcccattcatccaggcaggtttccatgctatgagtggccctttcgttctgctctcacactccccacattgaaagctgagtcatcgctgctttggatggctacctcctctttag

SEQ ID NO: 79173 - DNA, 120 bp, Artificial Sequence
  ENSG00000081052_67 (sequence is synthesized)
ccccgtgcccgtctcacacagcctttgttttccacctccacccttgcagtaggcatctcccagttggtgccttagtttcaaatcccagttgccatctaagatccacccaaacttgatttt

SEQ ID NO: 79174 - DNA, 120 bp, Artificial Sequence
  ENSG00000081052_68 (sequence is synthesized)
gtcaccctctggattagaatccttctgtgactccgctgcccatgaagtccaaatgacttcctatggggtgaaaggtccagtggggactgttcgagggttccctctaggagtatttcctgt

SEQ ID NO: 79175 - DNA, 120 bp, Artificial Sequence
  ENSG00000081052_69 (sequence is synthesized)
catgatgaactgtgtgcagctctgcagacactcccagcacctcttcgactttgctcctgcttcaccagtgatgtcctccctggggtcagtttaccctgcgtgggaggtgaattccctggg

SEQ ID NO: 79176 - DNA, 120 bp, Artificial Sequence
  ENSG00000081052_70 (sequence is synthesized)
ggaaacttaggctcccttctgctgctcttgtgcagtgcacggggctgtcctcattttctccgttccccattgcttctttaatgtctcagtgcacttccttcattccattgccaaaatgca

SEQ ID NO: 79177 - DNA, 120 bp, Artificial Sequence
  ENSG00000081052_71 (sequence is synthesized)
agccccttgagggcagggaccatgcttgactcgtttttgtatgcctaatgcctagcacagagttgaacacattactgccaattcatttttttcaatgacaattccataaacatcattagg

SEQ ID NO: 79178 - DNA, 120 bp, Artificial Sequence
  ENSG00000081052_72 (sequence is synthesized)
cattaggtgttcagctctgcatataaggtcttcatcagcaagacggttacaagtataaaccatttcctatttcagaatattttaatattcaacatatttgtatacccacattctcttgtt

SEQ ID NO: 79179 - DNA, 120 bp, Artificial Sequence
  ENSG00000081052_73 (sequence is synthesized)
acaattattgccagaaagccaattgataagctttcaaaatgggcttatcacacccctccaaaaatagatttttgttttttctataaacagaaatttcagaaatgagatttgagagatccg

SEQ ID NO: 79180 - DNA, 120 bp, Artificial Sequence
  ENSG00000081052_74 (sequence is synthesized)
actgagaagacccttcagtaaaatgtgacatgacttaccttatgctgtaatctgtattccctcaggatttaagagcttcctagcataaaatctttgctaaacgtttgtgtacatgttatt

SEQ ID NO: 79181 - DNA, 120 bp, Artificial Sequence
  ENSG00000081052_75 (sequence is synthesized)
ggtgctccgaaaaatagtcaatggaatggtgcactacaattgggctttatcatcttattttgaacctcgtgtagattacagtaaagcaaaccattcagtgtgttccaggaaattatatta

SEQ ID NO: 79182 - DNA, 120 bp, Artificial Sequence
  ENSG00000081052_76 (sequence is synthesized)
gatctgtgtttctatcagctcactggaataatctgataattgttacttttacttggtatggctgcaagaatagtggaaagaagaggacttgagagttggtcgaacccaggtttgaaatct

SEQ ID NO: 79183 - DNA, 120 bp, Artificial Sequence
  ENSG00000081052_77 (sequence is synthesized)
ggcttagtcatttttcagctgttatcctgggtgagttttgccaactttcttagcttcatttccctcattaatacggtgggacataacagctactcttgcattgaaaattaagttagatta

SEQ ID NO: 79184 - DNA, 120 bp, Artificial Sequence
  ENSG00000081052_78 (sequence is synthesized)
cctgtctagcatacccatcatcatacacttactatggtcacattttgtatttaaaataaactaatacgaaaaatatttctttttttttacacagaattatgattctcacagggtatataa

SEQ ID NO: 79185 - DNA, 120 bp, Artificial Sequence
  ENSG00000081052_79 (sequence is synthesized)
attactgattagaattatttatatgtggccaattcttaatgtcattgggaatgctgtttcatttcaatcctcaaagttactgtagcacagaaaatatcacaatttcctgcagggacatta

SEQ ID NO: 79186 - DNA, 120 bp, Artificial Sequence
  ENSG00000081052_80 (sequence is synthesized)
tcagtaagttctgcagggaacaaacaattgacattaaaaatcagtactctgcaattgtcactgttatcatctgctagaaactctgcataatgcattttaaaccaccaaggctggctgcca

SEQ ID NO: 79187 - DNA, 120 bp, Artificial Sequence
  ENSG00000081052_81 (sequence is synthesized)
catccatgtgaaatgcttgaattttatggtgcttaaatatttaatgattcatgggaaaaatgtgaaatgtgtctaataaattgcatccctttctctaacctctggttgtaaagttaaaga

SEQ ID NO: 79188 - DNA, 120 bp, Artificial Sequence
  ENSG00000081052_82 (sequence is synthesized)
ctttcagcatgtaacttttgcaagatgcctggtctgccattggcacttaaatatttgttgtattacgatttataatatggttcattatatataaaattctgtgatgacttccaaaaacaa

SEQ ID NO: 79189 - DNA, 120 bp, Artificial Sequence
  ENSG00000081059_0 (sequence is synthesized)
gcgcctttgatgttccgacccgccagctcgcggagccgctctgccccgcgccctagcccgcgcctgcagcccgcccaggcggagtcagcccgcgctccgcccgccgcgatccgagctcgg

SEQ ID NO: 79190 - DNA, 80 bp, Artificial Sequence
  ENSG00000081059_1 (sequence is synthesized)
cgcgatccgagctcggaggttcggactccgggctcgccgccccccgggccggctccgcgccccgcactcccggcgcccag

SEQ ID NO: 79191 - DNA, 120 bp, Artificial Sequence
  ENSG00000081059_2 (sequence is synthesized)
ctccggcgggggcggcgcgggcggcggcgacgacctcggcgcgccggacgagctgctggccttccaggatgaaggcgaggagcaggacgacaagagccgcgacagcgccgccggtcccga

SEQ ID NO: 79192 - DNA, 120 bp, Artificial Sequence
  ENSG00000081059_3 (sequence is synthesized)
gacaagagccgcgacagcgccgccggtcccgagcgcgacctggccgagctcaagtcgtcgctcgtgaacgagtccgagggcgcggccggcggcgcagggatcccgggggtcccgggggcc

SEQ ID NO: 79193 - DNA, 120 bp, Artificial Sequence
  ENSG00000081059_4 (sequence is synthesized)
cgggcgggaacacgctgcgcagagactcttcccggacaaacttccagagcccctggaggacggcctgaaggccccggagtgcaccagcggcatgtacaaagagaccgtctactccgcctt

SEQ ID NO: 79194 - DNA, 120 bp, Artificial Sequence
  ENSG00000081059_5 (sequence is synthesized)
caatctgctcatgcattacccacccccctcgggagcagggcagcacccccagccgcagcccccgctgcacaaggccaatcagcccccccacggtgtcccccaactctctctctacgaaca

SEQ ID NO: 79195 - DNA, 120 bp, Artificial Sequence
  ENSG00000081059_6 (sequence is synthesized)
tttcaacagcccacatcccacccctgcacctgcggacatcagccagaagcaagttcacaggcctctgcagacccctgacctctctggcttctactccctgacctcaggcagcatggggca

SEQ ID NO: 79196 - DNA, 120 bp, Artificial Sequence
  ENSG00000081059_7 (sequence is synthesized)
gctcccccacactgtgagctggttcacccacccatccttgatgctaggttctggtgtacctggtcacccagcagccatcccccacccggccattgtgcccccctcagggaagcaggagct

SEQ ID NO: 79197 - DNA, 120 bp, Artificial Sequence
  ENSG00000081059_8 (sequence is synthesized)
gcagcccttcgaccgcaacctgaagacacaagcagagtccaaggcagagaaggaggccaagaagccaaccatcaagaagcccctcaatgccttcatgctgtacatgaaggagatgagagc

SEQ ID NO: 79198 - DNA, 120 bp, Artificial Sequence
  ENSG00000081059_9 (sequence is synthesized)
caaggtcattgcagagtgcacacttaaggagagcgctgccatcaaccagatcctgggccgcaggtggcacgcgctgtcgcgagaagagcaggccaagtactatgagctggcccgcaagga

SEQ ID NO: 79199 - DNA, 120 bp, Artificial Sequence
  ENSG00000081059_10 (sequence is synthesized)
gaggcagctgcacatgcagctatacccaggctggtcagcgcgggacaactacgggaagaagaagaggcggtcgagggaaaagcaccaagaatccaccacaggaggaaaaagaaatgcatt

SEQ ID NO: 79200 - DNA, 120 bp, Artificial Sequence
  ENSG00000081059_11 (sequence is synthesized)
cggtacttacccggagaaggccgctgccccagccccgttccttccgatgacagtgctctaggctgccccgggtccccagctccccaggactcaccctcataccatctgctgccccgcttc

SEQ ID NO: 79201 - DNA, 120 bp, Artificial Sequence
  ENSG00000081059_12 (sequence is synthesized)
cccacagaactgcttactagccctgcggagccggcacctacatccccaggtctctccactgctctcagcctcccaaccccagggcccccacaggccccccgcagcaccctgcagagcaca

SEQ ID NO: 79202 - DNA, 120 bp, Artificial Sequence
  ENSG00000081059_13 (sequence is synthesized)
gacacctggccgcctccaggagcctaccccctgaaagtgacagagacccagatctcatggaaactggccaggggtcctgttaacgtcatctcagggtccagaccctgaagatttcagagg

SEQ ID NO: 79203 - DNA, 120 bp, Artificial Sequence
  ENSG00000081059_14 (sequence is synthesized)
ctgcaggacttctgcctgaacctggggtcatcgattcaaactgctccaagtggtgggaatcagatctgtcttgatgtgtcatctaattaagggaatcccttgtacctatggctgcctgca

SEQ ID NO: 79204 - DNA, 120 bp, Artificial Sequence
  ENSG00000081059_15 (sequence is synthesized)
tctattctttgtaccatctgtcttgccagccagaagcctctgcctccctagcttttctgctataggtcagagatgggctgaactgagcctagctaccttctctacccatctcccccatcc

SEQ ID NO: 79205 - DNA, 120 bp, Artificial Sequence
  ENSG00000081059_16 (sequence is synthesized)
cccactgccacaccctccccattcagacacttcatggaccaagaatgagctggtttgtcaaacaacatgtgagcatggtcacaagcacaaagctcaagatgacagctcttctaaggaaat

SEQ ID NO: 79206 - DNA, 120 bp, Artificial Sequence
  ENSG00000081059_17 (sequence is synthesized)
ggagaagctctgtttataaaaacaaaaacaaaaccagctgctactcataagttggaccagaggaagccccttactatgatctcaggagcttgcaagaagcaggaaggggaatggaatagg

SEQ ID NO: 79207 - DNA, 120 bp, Artificial Sequence
  ENSG00000081059_18 (sequence is synthesized)
ttaagtttaggcctatcaacctaagcaacagaaataatctgacactaccttatcaggcaaattggggaggggagggtgtatctagctctagttcaaattatttggaagtgttccctgaga

SEQ ID NO: 79208 - DNA, 120 bp, Artificial Sequence
  ENSG00000081059_19 (sequence is synthesized)
aacccaccagcctaagaagctctggccccaggcttgtcactagcagctgcagtcaacagttcaaagaagtcatggcccaaatccagtgtgcacccctccccattcacagagcctttttca

SEQ ID NO: 79209 - DNA, 120 bp, Artificial Sequence
  ENSG00000081059_20 (sequence is synthesized)
caattccatttccagttcatctatggcagtccagccagctcctgggcagcttgagagggcaaacccaaaacctcatgacagccagagcctgtctttcagcattcagtccgcctggccggc

SEQ ID NO: 79210 - DNA, 120 bp, Artificial Sequence
  ENSG00000081059_21 (sequence is synthesized)
tccagtttccccatggggctgcgggacagaggaccattacaactagatcaaggagcccagaaaacctccagtagtggacaacaggttttcaccatagcctacgttaacccatttttgagc

SEQ ID NO: 79211 - DNA, 120 bp, Artificial Sequence
  ENSG00000081059_22 (sequence is synthesized)
ccatttttgagccaagcttcaaccctcagccttgaaaaacaagtctttaatttaatttttgttttttgcctaaatccaaagaaaaagggctgccgggccaggcgcggtggctcacgcctg

SEQ ID NO: 79212 - DNA, 88 bp, Artificial Sequence
  ENSG00000081059_23 (sequence is synthesized)
gaggctgaggcgccagtgagccgagatggcgctattgcactccagtctgggtaacagggagactgcatctcaaaaaaaaaaaaaaaaa

SEQ ID NO: 79213 - DNA, 120 bp, Artificial Sequence
  ENSG00000081059_24 (sequence is synthesized)
aaaaaaaaaaaaaaaaaaaaaaagggctgtccatgtattcacacacccctcaaaaaaagcctttagttcctactttagccactggtttctcagaatccaaagatcacatattctagtgta

SEQ ID NO: 79214 - DNA, 120 bp, Artificial Sequence
  ENSG00000081059_25 (sequence is synthesized)
tgtaacactgcaagaagtcttgagaaaaagattattgtagtgttcaaaatatttttgtattgttaatgcatcatcatagaaaaacttttaaacatgagaataaagatactttttactggg

SEQ ID NO: 79215 - DNA, 120 bp, Artificial Sequence
  ENSG00000081059_26 (sequence is synthesized)
gccaggacagtacaggcatatgtggctcagcccgtgtgcagatgtgtgtgcactcacctctgttcttcatccctacttagaaggactctcctgggcatcccctgagctttgcccaagctg

SEQ ID NO: 79216 - DNA, 120 bp, Artificial Sequence
  ENSG00000081059_27 (sequence is synthesized)
agacagcaccttttacctaagtccccaacctctgacccttaggggctgctggctcagggataatacctgtgcaagcagtaaggggcagaatggtctccacagaatagcaagaaagtgaag

SEQ ID NO: 79217 - DNA, 120 bp, Artificial Sequence
  ENSG00000081059_28 (sequence is synthesized)
tgggccgcagggtgagaccatgggcaggtgggctggcagggatgctccccgaccatcttcagcctggtgcagcctgctgactccctgatgcaccccacctgcccctcttccctgttgcag

SEQ ID NO: 79218 - DNA, 120 bp, Artificial Sequence
  ENSG00000081059_29 (sequence is synthesized)
acgcggtacccagctaggagccttcagggcctggggcctatgaaaacaaggcctgcatctcacaagtcaaattcccatgcaagaaacagctatattatactaagtcccagggaaacccag

SEQ ID NO: 79219 - DNA, 120 bp, Artificial Sequence
  ENSG00000081059_30 (sequence is synthesized)
cagaactggcttctgctgggtagaattggagtagatggtgcgttcctctgccttgcacccactacctttgctagctccactcaccagagaaaccagcaaagaactgactgtatggtttga

SEQ ID NO: 79220 - DNA, 120 bp, Artificial Sequence
  ENSG00000081059_31 (sequence is synthesized)
tgcttagcccaaacaatgtcctggctagttctgctgagactgggagaggctgagctaggccccatgactaggcccagtagacacacagcctactggctggagcctggcaatttatcaccc

SEQ ID NO: 79221 - DNA, 120 bp, Artificial Sequence
  ENSG00000081059_32 (sequence is synthesized)
ccacttcaacatttttcatggcagtgcaaagtgctctatgtagagaagcccacaccctgctgcaggcctccttcctaagggtgaattcctgcctctctggtaactgagactccacatccc

SEQ ID NO: 79222 - DNA, 120 bp, Artificial Sequence
  ENSG00000081059_33 (sequence is synthesized)
tgaccacctcagccgtgctgtccccacacagggaagctggaggctaggactgggacagagcagggcagagttcctagccctttttccaaggcaaagaataggcccttccttccatctgca

SEQ ID NO: 79223 - DNA, 120 bp, Artificial Sequence
  ENSG00000081059_34 (sequence is synthesized)
agtgtgtagaacagcataaggtatagccttcagccttatcccttgaaggaatgtaggtcaagaatgaagaaaaactggataaaatgggtagggagttggggaggaggtgggtggccctag

SEQ ID NO: 79224 - DNA, 120 bp, Artificial Sequence
  ENSG00000081059_35 (sequence is synthesized)
ggcataaaaggctggatctccatggtcttccttgggcccctctgcagcctccatgctgcaagggccccacaagccacagagatgagccagattgacaggactccctccctcccattcttc

SEQ ID NO: 79225 - DNA, 120 bp, Artificial Sequence
  ENSG00000081059_36 (sequence is synthesized)
ccactgcctctactgcgtacctgggtgcccacctttcctgatatcttggctctgggctcttgggctcccactggggctggctgtgccatggagaggcccactctgcctatgggggctgta

SEQ ID NO: 79226 - DNA, 120 bp, Artificial Sequence
  ENSG00000081059_37 (sequence is synthesized)
gggtgtctataactggctaacactgatgttacctcttctttctgggccctgctctgccccgctgcctgctcgccctctgccctgctctacccctctggcatggctgtgagcagaccctgg

SEQ ID NO: 79227 - DNA, 120 bp, Artificial Sequence
  ENSG00000081059_38 (sequence is synthesized)
ctcgcctaagaaatgccgtgctcgctttggcctcaaccagcagacggattggtgtggtccgtgcaggtgggtttgtccccaccatcgttctccctttgctttaagctgcttccctgactc

SEQ ID NO: 79228 - DNA, 120 bp, Artificial Sequence
  ENSG00000081059_39 (sequence is synthesized)
tgcacatgttccactgggcctgcagcccactcctttggcccctcagcccactagcatactcagcagattgggagcccaggcctcctgagaatagtagtaaatactgaacacagcgcgtgg

SEQ ID NO: 79229 - DNA, 120 bp, Artificial Sequence
  ENSG00000081059_40 (sequence is synthesized)
agaagaccacttgggtctaagtgcaggaggattggagagaaagacacagaatgttccagaaaggaaggacagactcaagaaggcagctctgatgccagtgggcctagcaggtcctcagca

SEQ ID NO: 79230 - DNA, 120 bp, Artificial Sequence
  ENSG00000081059_41 (sequence is synthesized)
aacagacagctcagccaccactaagggggcctggagcccattctaccaggcctcaaagtcattatggcccatgggctccctcacttcctcttcaagatgggatccctgcctgtaccatcc

SEQ ID NO: 79231 - DNA, 120 bp, Artificial Sequence
  ENSG00000081059_42 (sequence is synthesized)
gccttatgacttgctatcttgtacctactgataccaaagggctggagaggctgggggagaggacccagggggtaccctgggctgtctgagggaaagggctcatgtgtttcaccatacaac

SEQ ID NO: 79232 - DNA, 120 bp, Artificial Sequence
  ENSG00000081059_43 (sequence is synthesized)
agagaaatacttgtgggtgtgacaaggtttacccaacaagtggttaaagtttcctcagtcagtttcaggccaggcctggcagggctaagatagagggtactccaggcagtaaggccactg

SEQ ID NO: 79233 - DNA, 120 bp, Artificial Sequence
  ENSG00000081059_44 (sequence is synthesized)
gctctaaggaacacttgtccagcctctcagtgtacccaccacactccctgtccaagggcaaggaggagtttggggtgtgtctgtgtatccacatacatatgcacggtgggaaacaaccct

SEQ ID NO: 79234 - DNA, 120 bp, Artificial Sequence
  ENSG00000081059_45 (sequence is synthesized)
gtcttcaggggaagttctattccattcattccatcagagacaaactggcccagagaactcaaggatggtaatggacaagagtcactgtccatgtcttcttcctctagcccagcttgagga

SEQ ID NO: 79235 - DNA, 120 bp, Artificial Sequence
  ENSG00000081059_46 (sequence is synthesized)
ctgggatggctgggcaaggaagccataggcattgcggccccttgccttggtgcagatgtgagtcccacaaacacatctggagaagctcaaaggccgggactgggagatgactcccttgga

SEQ ID NO: 79236 - DNA, 120 bp, Artificial Sequence
  ENSG00000081059_47 (sequence is synthesized)
agacaggagagatgactcccttggaagacagatgacagcccataggcctagtgacaaaaggcccctttgccaccttgtggctgttctgggaactgcacctgtcctaggtctgggccagac

SEQ ID NO: 79237 - DNA, 120 bp, Artificial Sequence
  ENSG00000081059_48 (sequence is synthesized)
caagcagaatggcagtctgaggacactgacttaccacccaagtcccaggaagagaggacaaggaatcagccaggcctgtgcaaaggcagcattttttggttgtggtgtatgactatgaat

SEQ ID NO: 79238 - DNA, 120 bp, Artificial Sequence
  ENSG00000081059_49 (sequence is synthesized)
tcgggagcagggcagcacccccagccgcagcccccgctggtaagtggaccccgcagccagtgccgccctgtgcttgcagcctccttgaccagcacaaggccaatcagcccccccacggtg

SEQ ID NO: 79239 - DNA, 120 bp, Artificial Sequence
  ENSG00000081059_50 (sequence is synthesized)
gacagaattggccaaggtttcttggttggagggcggggggtgggaggtcaagtaggggccacctcggggaggcctgccctccaggtccttcccctaaaacttggcactgccgatactccc

SEQ ID NO: 79240 - DNA, 120 bp, Artificial Sequence
  ENSG00000081059_51 (sequence is synthesized)
agcccgttccttcccaagtcaggaacttgcaggggaccccttggcaattctttttctctcaagagcagacagccttcagtcccagccgctgccagggctggtgtgtctgacccagctgtg

SEQ ID NO: 79241 - DNA, 120 bp, Artificial Sequence
  ENSG00000081059_52 (sequence is synthesized)
ccaggctgggctcccctagaccaggggcctgcctcctgcccagaaagctaggctggagtcccccgagcagagatgccccaatgcctccatgcctgagtgacttcagctctgcctactggc

SEQ ID NO: 79242 - DNA, 120 bp, Artificial Sequence
  ENSG00000081059_53 (sequence is synthesized)
cccctaatgtcttaggcaagtcaccccagccctctgccctgggttcccttgtctgtcaaaggggcactattatcacactgggatcctcctgaataaactagtttatgtctggtcctctag

SEQ ID NO: 79243 - DNA, 120 bp, Artificial Sequence
  ENSG00000081059_54 (sequence is synthesized)
caaagctggtgggatcttaaggcccctgtaggaggttctaggatgcagtaactgctgatatggcctgccaggtcaggctagcccactcactcagcttctctcctctgcagttcacaggcc

SEQ ID NO: 79244 - DNA, 120 bp, Artificial Sequence
  ENSG00000081059_55 (sequence is synthesized)
atccccgcctcccctcctgcccaggtgactgactaatccgccgccttcaggagacagaattggccaaggcctgaaggccccggagtgcaccagcggcatgtacaaagagaccgtctactc

SEQ ID NO: 79245 - DNA, 120 bp, Artificial Sequence
  ENSG00000081059_56 (sequence is synthesized)
ccagttgcgcgcggccctcggggtctccagcgcgcagagcgtccctgccccggcgtcggccccgacccccgcggtcccaccgcccctcactcccctccggttctccctccaggctctcgg

SEQ ID NO: 79246 - DNA, 120 bp, Artificial Sequence
  ENSG00000081059_57 (sequence is synthesized)
agacagaggcccagggtctacgaaggatgtgcggtgagactggagaagaaggtcccagcctgtgaccttggtgctggggcagcgctggttccagagcctgggagaagctgatgggcgcat

SEQ ID NO: 79247 - DNA, 120 bp, Artificial Sequence
  ENSG00000081059_58 (sequence is synthesized)
actgcttgggcaaagtcttgggggctagtgggcggggtactggacactgtgacttgagtggtacccccttcgctgaggcctgtggttttggccaccacttttctttgacagctgggcttc

SEQ ID NO: 79248 - DNA, 120 bp, Artificial Sequence
  ENSG00000081059_59 (sequence is synthesized)
ctgtataccctcatcccagtgtcttcctccctcaggactcgccacactcacccaccctccttctcatttttcagcacaaggccaatcagcccccccacggtgtcccccaactctctctct

SEQ ID NO: 79249 - DNA, 120 bp, Artificial Sequence
  ENSG00000081059_60 (sequence is synthesized)
caccctgctgccagctctgtttagatgccaggggctggccagcaactctgtcctaacctggctctgagctaggggtcctcatgtaccccggcctgcattccccagggagcctgacatact

SEQ ID NO: 79250 - DNA, 120 bp, Artificial Sequence
  ENSG00000081059_61 (sequence is synthesized)
acttccggtgccctgacctttataggagtaaacagacccccgccatccccgcctcccctcctgcccaggcctgaaggccccggagtgcaccagcggcatgtacaaagagaccgtctactc

SEQ ID NO: 79251 - DNA, 120 bp, Artificial Sequence
  ENSG00000081059_62 (sequence is synthesized)
aaagcaaggtgacaacaacacagaaccatctggttgccaggaggaaaaagaaatgcattcggtacttacccggagaaggccgctgccccagccccgttccttccgatgacagtgctctag

SEQ ID NO: 79252 - DNA, 120 bp, Artificial Sequence
  ENSG00000081059_63 (sequence is synthesized)
ggagaggcaggagagctggtccctggtcccagccctgtctccctcagtgtccaagagatccccttagatgggagaactctgggctgctaagggacctccagggccatatgagtaactgag

SEQ ID NO: 79253 - DNA, 120 bp, Artificial Sequence
  ENSG00000081059_64 (sequence is synthesized)
gaagaaaggtgggcccgagcagggaggggacagcatgagtggctaccagagaggctgctgcttctcagctcactggcctcagtgcctactgcttttggtcctttccttggctgagctgct

SEQ ID NO: 79254 - DNA, 120 bp, Artificial Sequence
  ENSG00000081059_65 (sequence is synthesized)
tgaggggcagtgtccctccctgcccctgtggtgcctgcttaagcccaagcctctgaccagcctgcttggagattcttaaggctggaccaggaaaaggaagcctggccccctaagccagta

SEQ ID NO: 79255 - DNA, 120 bp, Artificial Sequence
  ENSG00000081059_66 (sequence is synthesized)
ggcctgactatgggccaaagggcctgtcctcagctggagttgggccttggcaggctacttggccctttactcatcaacgatagtttgagctgcgcaggtctctagcctatttcagagagc

SEQ ID NO: 79256 - DNA, 120 bp, Artificial Sequence
  ENSG00000081059_67 (sequence is synthesized)
tgggctgtggcagtcacccaacagcaggaaaacttggctccccaaggagatcgggcaggccagaggcccaacctgtggcccacttgccctttacccatggtcagcaccctcctccgttcc

SEQ ID NO: 79257 - DNA, 120 bp, Artificial Sequence
  ENSG00000081059_68 (sequence is synthesized)
gaaacagaagcaggctggaggggcccaggggcctgctaagctgggtcccaggagaaggataccatttccatccctcaagcacccatacaagtttatagagggaaaccgcacaagctgccc

SEQ ID NO: 79258 - DNA, 120 bp, Artificial Sequence
  ENSG00000081059_69 (sequence is synthesized)
tctggtggcagatgcttgaaattccagcagaggcccatctgtctcacaggatgggtcaaggcctgcctagcaaggtagggaagtctttcctcgtgtctggccagcagccagactgctaac

SEQ ID NO: 79259 - DNA, 120 bp, Artificial Sequence
  ENSG00000081059_70 (sequence is synthesized)
agctatctctcccaaccacaggcccagccctcctctctaccccctgtccccttcctgcggatatagacagcacttccctgcccccactgcagcccctggcgccccctaccccaggttcac

SEQ ID NO: 79260 - DNA, 120 bp, Artificial Sequence
  ENSG00000081059_71 (sequence is synthesized)
cgcgggacaactacgtgagtgcctagtgacacacagcaggggtgggcaggggaccctttgagataccatgccccaggccacaatctcagtaaggaacgcagaactactgtcctgaaggca

SEQ ID NO: 79261 - DNA, 120 bp, Artificial Sequence
  ENSG00000081059_72 (sequence is synthesized)
ccgatgaggaagggcacggagggtccaaggcctcccatggctgcctcagaagaggacaagcccacatcctattctccactccagaatatgctcacacatgagctgttacccaacatttga

SEQ ID NO: 79262 - DNA, 120 bp, Artificial Sequence
  ENSG00000081059_73 (sequence is synthesized)
ttgggccacatgggcagaaggggagaaaggggtctggaagtcacctccttccattcaaactggagaccagattggggtgagggaagagcttctaaatgcactccatagcagcctagcaag

SEQ ID NO: 79263 - DNA, 120 bp, Artificial Sequence
  ENSG00000081059_74 (sequence is synthesized)
accagcaatcaagaaacaccagcaccccaaggggaagaagaagaggcggtcgagggaaaagcaccaagaatccaccacagaccctggctcgcctaagaaatgccgtgctcgctttggcct

SEQ ID NO: 79264 - DNA, 120 bp, Artificial Sequence
  ENSG00000081059_75 (sequence is synthesized)
atgctgctcaatactggcacacagaccagaggtagccagcagtacacaagactgcaaggcaacaagtacattatcaatgaattagccatctatcactcaaactatgtcccgcattggaag

SEQ ID NO: 79265 - DNA, 120 bp, Artificial Sequence
  ENSG00000081059_76 (sequence is synthesized)
acagcccagtatagcaagtgtagacatggcaccggcagcttaatgggccagctgagtgatggggaagccccaaggagacctcaccaggcctgatgggtcagggagagcttcgcggaaaga

SEQ ID NO: 79266 - DNA, 120 bp, Artificial Sequence
  ENSG00000081059_77 (sequence is synthesized)
gtaatagatcttttgcgagaagaaaacaagggaacagccataactggggctgccggggaacggagagggacaggaagcagaggagaagagaaggggctagcaacagcagcaggatgctca

SEQ ID NO: 79267 - DNA, 120 bp, Artificial Sequence
  ENSG00000081059_78 (sequence is synthesized)
tgcagggctgtgcaggcccttgggagcagcctgggttctattctttggacgctgggggaatttcagccgaagcaggccaggaacattcaggtgtctctaatggttactctggctattgtg

SEQ ID NO: 79268 - DNA, 120 bp, Artificial Sequence
  ENSG00000081059_79 (sequence is synthesized)
tggagagaggcctggaagggtcaagcaggagagggatgaggcctcacagggcagccacaggctcctgaggctgggttggtaggggaaggacgtgagaaggggacagattcaaaagctact

SEQ ID NO: 79269 - DNA, 120 bp, Artificial Sequence
  ENSG00000081059_80 (sequence is synthesized)
tgggacctatgtagtaaccatctgaatggcaatctatgtagatttttgcagtgtgtctgtgtagtgtgctgggagcaggtatttgtatttatctctgtgtacttatgtctaggccagtag

SEQ ID NO: 79270 - DNA, 120 bp, Artificial Sequence
  ENSG00000081059_81 (sequence is synthesized)
gatagagtatctatctgttcacctgtgtcctcaagttatgtattatgcaggggcctctgtgtgtgtccaaaggtctggcccataattcttggctcagtgttaactttcttcctgcctcca

SEQ ID NO: 79271 - DNA, 120 bp, Artificial Sequence
  ENSG00000081087_0 (sequence is synthesized)
aaaccggaagcggcggctgtccgcggtgccggctgggggcggagaggcggcggtgggctccctggggtgtgtgagcccggtgatggagccgggcccgacagccgcgcagcggaggtgttc

SEQ ID NO: 79272 - DNA, 120 bp, Artificial Sequence
  ENSG00000081087_1 (sequence is synthesized)
aggtgttcgttgccgccgtggctgccgctggggctgctgctgtggtcggggctggccctgggcgcgctccccttcggcagcagtccgcacagggtcttccacgacctcctgtcggagcag

SEQ ID NO: 79273 - DNA, 120 bp, Artificial Sequence
  ENSG00000081087_2 (sequence is synthesized)
cagttgctggaggtggaggacttgtccctgtccctcctgcagggtggagggctggggcctctgtcgctgcccccggacctgccggatctggatcctgagtgccgggagctcctgctggac

SEQ ID NO: 79274 - DNA, 120 bp, Artificial Sequence
  ENSG00000081087_3 (sequence is synthesized)
ttcgccaacagcagcgcagagctgacagggtgtctggtgcgcagcgcccggcccgtgcgcctctgtcagacctgctaccccctcttccaacaggtcgtcagcaagatggacaacatcagc

SEQ ID NO: 79275 - DNA, 120 bp, Artificial Sequence
  ENSG00000081087_4 (sequence is synthesized)
cgagccgcggggaatacttcagagagtcagagttgtgccagaagtctcttaatggcagatagaatgcaaatagttgtgattctctcagaattttttaataccacatggcaggaggcaaat

SEQ ID NO: 79276 - DNA, 120 bp, Artificial Sequence
  ENSG00000081087_5 (sequence is synthesized)
tgtgcaaattgtttaacaaacaacagtgaagaattatcaaacagcacagtatatttccttaatctatttaatcacaccctgacctgctttgaacataaccttcaggggaatgcacatagt

SEQ ID NO: 79277 - DNA, 120 bp, Artificial Sequence
  ENSG00000081087_6 (sequence is synthesized)
cttttacagacaaaaaattattcagaagtatgcaaaaactgccgtgaagcatacaaaactctgagtagtctgtacagtgaaatgcaaaaaatgaatgaacttgagaataaggctgaacct

SEQ ID NO: 79278 - DNA, 120 bp, Artificial Sequence
  ENSG00000081087_7 (sequence is synthesized)
ggaacacatttatgcattgatgtggaagatgcaatgaacatcactcgaaaactatggagtcgaactttcaactgttcagtcccttgcagtgacacagtgcctgtaattgctgtttctgtg

SEQ ID NO: 79279 - DNA, 120 bp, Artificial Sequence
  ENSG00000081087_8 (sequence is synthesized)
ttcattctctttctacctgttgtcttctaccttagtagctttcttcactcagagcaaaagaaacgcaaactcattctgcccaaacgtctcaagtccagtaccagttttgcaaatattcag

SEQ ID NO: 79280 - DNA, 120 bp, Artificial Sequence
  ENSG00000081087_9 (sequence is synthesized)
gaaaattcaaactgagacctacaaaatggagaattgacatatcacgtgaatgaatggtggaagacacaacttggtttcagaaagaagataaactgtgatttgacaagtcaagctcttaag

SEQ ID NO: 79281 - DNA, 120 bp, Artificial Sequence
  ENSG00000081087_10 (sequence is synthesized)
aaatacaaggacttcagatccatttttaaataagaattttcgatttttctttccttttccacttctttctaacagatttggatatttttaatttccaggcatagcaatgttatctatttt

SEQ ID NO: 79282 - DNA, 120 bp, Artificial Sequence
  ENSG00000081087_11 (sequence is synthesized)
aatgtgtatttgtcacaataacagaacatgcaagaacaatcattattttattttataggcatttgattactattctagacttctggtatcttcttactaacataaatatctcaagtagaa

SEQ ID NO: 79283 - DNA, 120 bp, Artificial Sequence
  ENSG00000081087_12 (sequence is synthesized)
aagtttttgaaaactaacatttaaaaattaatcagttacagtaaagactttgaaaaagaaatgtacttgttaggaagtagcttaattaccccccattgcagtattattgttatatatata

SEQ ID NO: 79284 - DNA, 120 bp, Artificial Sequence
  ENSG00000081087_13 (sequence is synthesized)
gttaatatgttgtacatcacaataatatataattcagtctctagtttccctagagtcatttttgaaaccactgattgcaaacctccctgacaatttttaaaagtagtaagccacattaca

SEQ ID NO: 79285 - DNA, 120 bp, Artificial Sequence
  ENSG00000081087_14 (sequence is synthesized)
tttatctttgtaaaaagatttatggtaactggtttcttacttgacttttataaatagtattttacatcttatttttgcctttatttcataagtaatttaaaaatcactggattgctttat

SEQ ID NO: 79286 - DNA, 120 bp, Artificial Sequence
  ENSG00000081087_15 (sequence is synthesized)
tatattcagggcaatatggattatttttataccaaggatttgcatcgtgaattacattaagttatttggcaatttataatttattactactttaaatcaaatgtagcattatcacactgt

SEQ ID NO: 79287 - DNA, 120 bp, Artificial Sequence
  ENSG00000081087_16 (sequence is synthesized)
atttaaattgtcattttttaaaggaatattttcttcttaagatatatagaggattttggagaagagagacaggaggggtaaaaccagcttaaggttcagcgagcagaaagggacctgaga

SEQ ID NO: 79288 - DNA, 120 bp, Artificial Sequence
  ENSG00000081087_17 (sequence is synthesized)
ggatgctcactgtaagactgttggacagtggtgtgtattgaggggatgaatcggaacgatagtctcatgcagaaaatagtgagattaagatcatccttattgtttctaaattatttcaat

SEQ ID NO: 79289 - DNA, 120 bp, Artificial Sequence
  ENSG00000081087_18 (sequence is synthesized)
acatagttcgtgctcagaaattctattttggtatgtttgtattagcctttagaaaaaacactccgtttcagaattgttcacagttttatttcttaggtttttagagttcaggatttcatt

SEQ ID NO: 79290 - DNA, 120 bp, Artificial Sequence
  ENSG00000081087_19 (sequence is synthesized)
tattaatttcttcttgcttttttggtggaaataggctttgttgtaaacattaagaatataaaatctcctctatatagaaacaagaattttgttaaaaagagaatttgaatcccttcctat

SEQ ID NO: 79291 - DNA, 120 bp, Artificial Sequence
  ENSG00000081087_20 (sequence is synthesized)
actataaaatgctctatagggagacaaagtgtttcttttttcttttatgtttactgtttatgtggagtgaaatataaggctcttggatgtataacatactcaaaagctgttacactttct

SEQ ID NO: 79292 - DNA, 120 bp, Artificial Sequence
  ENSG00000081087_21 (sequence is synthesized)
ctgatctgctgtgatccactgaaaatgtgctggggtttgttctgctgtcactgtttatgctgctggaacttagcactgtcttgatttgaagcatatgattgagagccatttgaagcaatc

SEQ ID NO: 79293 - DNA, 120 bp, Artificial Sequence
  ENSG00000081087_22 (sequence is synthesized)
ttcattaatgcagataaaacaagtttacatgtgcagagttagaaaatgacatgttcaattctgtaagtggtgactttttgagcacctttcagtattatgtatttgtaaaaaccattgttt

SEQ ID NO: 79294 - DNA, 120 bp, Artificial Sequence
  ENSG00000081087_23 (sequence is synthesized)
ttggatataaagctaataagcactttaaaaaggaaaaggcagcctttactattttttctggttgagtcattgctctttagacctagcatcagcaatagatttcaaagataagtattaagc

SEQ ID NO: 79295 - DNA, 120 bp, Artificial Sequence
  ENSG00000081087_24 (sequence is synthesized)
gctaccctaaagtgtgtaagtttttcattttgtcatattgaaaaatgatttgcatagtactgaatgttgacacacagcttatatgtatttacaagaatatctttaagtgtttttttgaca

SEQ ID NO: 79296 - DNA, 120 bp, Artificial Sequence
  ENSG00000081087_25 (sequence is synthesized)
cattaaaataaaggaaataaggaaattgtaagctttatttggatttttaaatacatttttaaaatttcagatgtaatttaacatcacatttgtttttcaggtattgagtttagatgccta

SEQ ID NO: 79297 - DNA, 120 bp, Artificial Sequence
  ENSG00000081087_26 (sequence is synthesized)
cctacttttatgagtaccatcagctggacacagtgtctcatacctgtatttgcagcactttgggaggctgaagcagatcgctggagcttatgagttcgagaccagcctggacaacatagt

SEQ ID NO: 79298 - DNA, 71 bp, Artificial Sequence
  ENSG00000081087_27 (sequence is synthesized)
tgtctgtcttaaattttgctgcaaataaaaatgtactttggattatttattgttgaacttgagagatagaa

SEQ ID NO: 79299 - DNA, 120 bp, Artificial Sequence
  ENSG00000081087_28 (sequence is synthesized)
agtactgtctgtcttaaattttgctgcaaataaaaatgtactttggattatttattgttgaacttgagagatagaaataacatcagatatattttttcttttttttttataattaatttt

SEQ ID NO: 79300 - DNA, 75 bp, Artificial Sequence
  ENSG00000081087_29 (sequence is synthesized)
accacacctggctgaacatcagatattttaaagtgtagcccagagtctagttggtaaatgttacttatattggga

SEQ ID NO: 79301 - DNA, 120 bp, Artificial Sequence
  ENSG00000081087_30 (sequence is synthesized)
tagcccagagtctagttggtaaatgttacttatattgggactagtattttctaatgtttctgggatatgctccctataaaatgaaatgttttcctggaacaatgctaattaggattgcat

SEQ ID NO: 79302 - DNA, 120 bp, Artificial Sequence
  ENSG00000081087_31 (sequence is synthesized)
tcctggccaaagacatgacatcaaataagtaatagacatcaccagcaatgaattttgaaaagcaaaaaatactattaacctatataaccatttaaaatttaaaaaattatgttccaagta

SEQ ID NO: 79303 - DNA, 120 bp, Artificial Sequence
  ENSG00000081087_32 (sequence is synthesized)
cctctattttctgagctagaagaaaccttagaggccatctgatgatagattcccagagctggatggatccctagggactacctaatctgactttctgtccactgcatggattcttctaaa

SEQ ID NO: 79304 - DNA, 120 bp, Artificial Sequence
  ENSG00000081087_33 (sequence is synthesized)
aagtatgtcacttatttccctaccttattaagactaaataagtggaacatcatagagctctttatttataacagtcattctttgatagtcaactcttaaatggagacttgagatgcttaa

SEQ ID NO: 79305 - DNA, 120 bp, Artificial Sequence
  ENSG00000081087_34 (sequence is synthesized)
atattgtactactgtgcttatcttgtaaagatttcataaaatgatagtattggttattttaaaaaggctttggcttatgctgaattatacatgtagcaccaaaatgttacaactctacta

SEQ ID NO: 79306 - DNA, 120 bp, Artificial Sequence
  ENSG00000081087_35 (sequence is synthesized)
aatttccttgttctaaactattatattagctataataaatattagtcatacatgtaacatgtttaatgacaaataactttctttatctccttggaattaaagagggcttttaaaagataa

SEQ ID NO: 79307 - DNA, 120 bp, Artificial Sequence
  ENSG00000081087_36 (sequence is synthesized)
agaatactttggtcagtattatggacttagaatatgaaatttctgtatggatataaatttctacaatgactgtattttgaaccaggtttttttcctggcagaagaagttgtcctcaacta

SEQ ID NO: 79308 - DNA, 120 bp, Artificial Sequence
  ENSG00000081087_37 (sequence is synthesized)
agaaagtgtgaatatgggagtgtggctctgtgcgtgcgtgatgagtgccagatagattcgcggaagaaattgggtggctgtgtgctggcgtgtgattgtgcgcgccggacatggccatgt

SEQ ID NO: 79309 - DNA, 120 bp, Artificial Sequence
  ENSG00000081087_38 (sequence is synthesized)
gagttggttcattcttggtccggtgccccttctgttgggtaaaacttggatctggcccgagatgaagtctcgccctgtctcccagactggagtgcagtggtgcaatcacagttcactgca

SEQ ID NO: 79310 - DNA, 120 bp, Artificial Sequence
  ENSG00000081087_39 (sequence is synthesized)
atgagccactgcacccggcccatcctcaaattttggtatgaggtggtgtcctggaatcaatcccccatggataccaaaggatgactgtactgtattcctagcatgaattcagtatcaatc

SEQ ID NO: 79311 - DNA, 120 bp, Artificial Sequence
  ENSG00000081087_40 (sequence is synthesized)
aacatctgcctaatgcggctgttggaagaattaaaagagatattgcctgtgacttcatcttagtgatgtgaacagtctggagctagctagcggccaggactccagttccactctgcttat

SEQ ID NO: 79312 - DNA, 120 bp, Artificial Sequence
  ENSG00000081087_41 (sequence is synthesized)
tagcgaatacttcagagagtcagagttgtgccagaagtctcttaatggcagatagaatgcaaatagttgtgattctctcagaattttttaataccacatggcaggaggcaaattgtgcaa

SEQ ID NO: 79313 - DNA, 120 bp, Artificial Sequence
  ENSG00000081087_42 (sequence is synthesized)
cctggaacacatttatgcattgatgtggaagatgcagtttttttcctggcagaagaagttgtcctcaactatcagtaggtttttagagatgaacatcactcgaaaactatggagtcgaac

SEQ ID NO: 79314 - DNA, 120 bp, Artificial Sequence
  ENSG00000081138_0 (sequence is synthesized)
ctagggcagtccgaggagattgaaagggcaaaactatcaagcaagaaaactgtaagttctgattagttttatgactttgccttcatgcctcaggagctcaactgatcacggctttcacga

SEQ ID NO: 79315 - DNA, 120 bp, Artificial Sequence
  ENSG00000081138_1 (sequence is synthesized)
caggctaaggtacttactacaccattctttggcgaaggctattcagcagtggtgacctcttccaatccaacactctacagattattatctctggactcccagctgacaccctgccggagg

SEQ ID NO: 79316 - DNA, 120 bp, Artificial Sequence
  ENSG00000081138_2 (sequence is synthesized)
caagagctactaagccaactggaactgtgccttttctcttgtcaaggtttttttcttacacaggaaaaagaaagaaaaaaaaaagatgaagttgggcaaagtggagttctgccattttct

SEQ ID NO: 79317 - DNA, 120 bp, Artificial Sequence
  ENSG00000081138_3 (sequence is synthesized)
gcagctaatagctcttttcctgtgtttttctgggatgagtcaagcagaactctcaaggtccagatcaaagccctatttccaatcagggaggtcccggaccaagcgcagctgggtgtggaa

SEQ ID NO: 79318 - DNA, 120 bp, Artificial Sequence
  ENSG00000081138_4 (sequence is synthesized)
tcagttctttgtgctggaggaatacatgggttcagaccccctctatgtaggaaagcttcactctgatgttgataaaggagatggttccatcaaatacatcttgtcaggcgaaggggcaag

SEQ ID NO: 79319 - DNA, 120 bp, Artificial Sequence
  ENSG00000081138_5 (sequence is synthesized)
ttccattttcattattgatgagaacactggggatattcatgccaccaagagactggatcgtgaggagcaggcctactacacgctccgagctcaagcgctggataggctcaccaacaaacc

SEQ ID NO: 79320 - DNA, 120 bp, Artificial Sequence
  ENSG00000081138_6 (sequence is synthesized)
cgtggagcccgagtcggagtttgtcatcaaaattcaggatatcaacgacaatgaacccaaatttttggatggcccatacacggcaggagttcccgaaatgtctcccgtggggacctcagt

SEQ ID NO: 79321 - DNA, 120 bp, Artificial Sequence
  ENSG00000081138_7 (sequence is synthesized)
ggtacaagtgacagcgacggatgctgatgatcctacatatggcaacagtgccagagtggtctacagtattctgcaaggacagccgtacttctcagtggagccaaagacaggagtcatcaa

SEQ ID NO: 79322 - DNA, 120 bp, Artificial Sequence
  ENSG00000081138_8 (sequence is synthesized)
gactgcccttccaaacatggatagagaggctaaagaccagtatttgcttgtcattcaggcaaaggatatggttggtcaaaatggaggactgtcaggaactacatcagtcactgtgaccct

SEQ ID NO: 79323 - DNA, 120 bp, Artificial Sequence
  ENSG00000081138_9 (sequence is synthesized)
aactgatgtcaacgataatccacctcgctttcctcgaaggtcttatcaatataacgtcccagagtcattacctgtagcctcagttgtggccagaattaaagctgctgatgcagatattgg

SEQ ID NO: 79324 - DNA, 120 bp, Artificial Sequence
  ENSG00000081138_10 (sequence is synthesized)
agctaatgctgaaatggagtacaagattgtggatggtgatggtttgggcatttttaagatttctgttgacaaagaaacccaggaaggaatcattactatacagaaggagctggattttga

SEQ ID NO: 79325 - DNA, 120 bp, Artificial Sequence
  ENSG00000081138_11 (sequence is synthesized)
acaactgtgaagataattgtggaagatgtagatgagccccctgtgttctcttcacccttgtaccctatggaggtgtcggaagctacccaggttgggaatatcattggcactgtagcagct

SEQ ID NO: 79326 - DNA, 120 bp, Artificial Sequence
  ENSG00000081138_12 (sequence is synthesized)
catgacccagattcttccaatagccctgtgaggtactcaattgacagaaacacagacttggagagatacttcaatattgatgccaacagtggggtcatcacaactgccaagtctttggat

SEQ ID NO: 79327 - DNA, 120 bp, Artificial Sequence
  ENSG00000081138_13 (sequence is synthesized)
cgagagacaaatgctattcacaatatcacagtccttgcaatggagagccagaatccatctcaagtaggaagaggctatgtggccatcactatacttgacatcaatgataacgcccctgaa

SEQ ID NO: 79328 - DNA, 120 bp, Artificial Sequence
  ENSG00000081138_14 (sequence is synthesized)
tttgccatggactatgagaccaccgtctgtgaaaatgcccagccggggcaggttatccagaaaatcagtgctgtggataaagatgagccatccaatggacaccagttttacttcagctta

SEQ ID NO: 79329 - DNA, 120 bp, Artificial Sequence
  ENSG00000081138_15 (sequence is synthesized)
acaacggatgcaacaaataaccacaacttttcattgaaagataacaaagacaacacagcctcaatactgaccaggagaaacggcttccggagacaggaacaatcagtttactatctgcca

SEQ ID NO: 79330 - DNA, 120 bp, Artificial Sequence
  ENSG00000081138_16 (sequence is synthesized)
attttcattgtggacagtggatctccctcacttagcagcaccaacaccctcaccatccgcgtgtgtgactgtgatgctgacggcgtagcccagacctgcaatgcagaggcctatgtccta

SEQ ID NO: 79331 - DNA, 120 bp, Artificial Sequence
  ENSG00000081138_17 (sequence is synthesized)
cctgctggcctcagtacaggagccctgatagccatactcgcctgtgtcttgacattattggtgttgatcctccttatcgtcactatgagaagacggaaaaaagagccccttatttttgac

SEQ ID NO: 79332 - DNA, 120 bp, Artificial Sequence
  ENSG00000081138_18 (sequence is synthesized)
gaagaaagagacatcagagaaaatattgtgagatacgatgacgagggcgggggagaggaggacacggaagcgtttgacatggctgcactgagaaacctcaacgtcatccgagacaccaag

SEQ ID NO: 79333 - DNA, 120 bp, Artificial Sequence
  ENSG00000081138_19 (sequence is synthesized)
acccggagggatgtgactccagaaattcaattcctgagtcgaccagcttttaaaagcatcccagataatgtcatctttagggaatttatttgggaaagattaaaagaagccgatgttgat

SEQ ID NO: 79334 - DNA, 120 bp, Artificial Sequence
  ENSG00000081138_20 (sequence is synthesized)
cctggtgctcctccttatgactccctgcagacatatgcttttgaaggaaatggctcagttgctgaatcactcagctctttagattccatcagctcaaactctgatcagaactatgactac

SEQ ID NO: 79335 - DNA, 120 bp, Artificial Sequence
  ENSG00000081138_21 (sequence is synthesized)
ctaagtgactggggacctcgctttaaacgactcgcggacatgtatgggactggccaagagagtttgtactcatagccttggaaccttaattcgaaatgtactgaagaaaaagtaacagca

SEQ ID NO: 79336 - DNA, 120 bp, Artificial Sequence
  ENSG00000081138_22 (sequence is synthesized)
agtctgccccgcgcgcggagctgcgcgcactgggtccccaagagcccgcgggcgtccggcagccgagcgcacgttctttcggatgcacacgcccgggtccctggcgtctgacgccgtggg

SEQ ID NO: 79337 - DNA, 120 bp, Artificial Sequence
  ENSG00000081138_23 (sequence is synthesized)
aaataataaaccactacatacagaaaacaagaactccccttgctggagacagatggttgtaaatatttctccatttttaattgtttagatttctgccttggtgaggcatatcttcattag

SEQ ID NO: 79338 - DNA, 120 bp, Artificial Sequence
  ENSG00000081138_24 (sequence is synthesized)
acttatctaaaggactgcactgaccacagactctgagcatttgaaggttttttgataaaaataaatgctcagtggtttgtgaatagatagcaactctcatatacctgcaaaggcaccaaa

SEQ ID NO: 79339 - DNA, 120 bp, Artificial Sequence
  ENSG00000081138_25 (sequence is synthesized)
cctctatgagaaagtagtgccctgtgttgtcagtgagtcaaagatgccctgtacataccttcatggtactgtcattgagaggaatagaacatgatgagctattgaaaaaccctggaactt

SEQ ID NO: 79340 - DNA, 120 bp, Artificial Sequence
  ENSG00000081138_26 (sequence is synthesized)
gttgcatatcaaaacttgggacaaatttaatttacagagatgcttatagcttactatattatagaatccaacagaattatgttgctcttgattaacagaaatattttatttaggaatata

SEQ ID NO: 79341 - DNA, 120 bp, Artificial Sequence
  ENSG00000081138_27 (sequence is synthesized)
taaattcccagaaattccttcctaactgaaaaccctaccacaaaagccagtaaaatttagtttaaggcaatataaaccattgtttatccaataaattatgaagtgttccaaataagaaaa

SEQ ID NO: 79342 - DNA, 120 bp, Artificial Sequence
  ENSG00000081138_28 (sequence is synthesized)
aggtaaataatttgatagttttgagatgcttgtgtaggtatgataaaaaaaaaagttgctgtctgttcattgatttttattatctcttctgatttgtacaggagaatatcttttcttttt

SEQ ID NO: 79343 - DNA, 120 bp, Artificial Sequence
  ENSG00000081138_29 (sequence is synthesized)
tatttgacacatggtgttgtatttattttggagctccaatctccactaaattcaggtccatcatactgcctcatagtattaaactcatcagaacatgctgatttttctccagcccgagct

SEQ ID NO: 79344 - DNA, 120 bp, Artificial Sequence
  ENSG00000081138_30 (sequence is synthesized)
acatgaaggaaatgaagcatggaaatggagaactaatagtaaagcaattgagccctgttgcaggtcacatctcaaagaggagcacagctacaaggacatataaattgttcttctgagcca

SEQ ID NO: 79345 - DNA, 120 bp, Artificial Sequence
  ENSG00000081138_31 (sequence is synthesized)
ttagaatgtcaaaacattggaataaaatatttgtattttagaaagacttcagagagaattgagattttctttgatgcaagaattatttttcaagatcatgagttctacatgctccaaaga

SEQ ID NO: 79346 - DNA, 120 bp, Artificial Sequence
  ENSG00000081138_32 (sequence is synthesized)
cgatttcaagaacacaacctttcttgctgcaaacctattgagtaaaatattgagtttttaaaagtcttaatataatgttataaaaattaaaatccatctttaaattctgatgcaaatatg

SEQ ID NO: 79347 - DNA, 120 bp, Artificial Sequence
  ENSG00000081138_33 (sequence is synthesized)
tccctcaagaattaaccaagcaatgtatgatttctgtgtggtttagatgtgccaaaggaaggaaggcaattgcaagtcatcatgtgtttaagtttgagttgagcttgttagagtatgact

SEQ ID NO: 79348 - DNA, 120 bp, Artificial Sequence
  ENSG00000081138_34 (sequence is synthesized)
ttcatgaccaaaatgatgtttctacctattatttttcctagattaatactagtttaatgtgcatatacattcaagtaagaatggatttattttttccttcctttctccttttaaaaataa

SEQ ID NO: 79349 - DNA, 120 bp, Artificial Sequence
  ENSG00000081138_35 (sequence is synthesized)
ttcattgttgggttcctaatacatttacagatagtaaacactgtgtagagaatcatgttctaaaagtgctttttgaaaggtagacagtggaattagaatattaatatgttgattacacaa

SEQ ID NO: 79350 - DNA, 120 bp, Artificial Sequence
  ENSG00000081138_36 (sequence is synthesized)
agaagaactatgtaggattctgtaaacttgcagcccaactttagaaatgaagtatgtaaaagtggccttcaacttcataagtataaataatccaataaatttcattacctgcaaacagtt

SEQ ID NO: 79351 - DNA, 120 bp, Artificial Sequence
  ENSG00000081138_37 (sequence is synthesized)
agttctttaatttgaatagagttttgtagacattgttttatgactatatagatatgcttcttgctgtattaatatgcatatatattttaaaaaattataacagtgaaagatactgttcat

SEQ ID NO: 79352 - DNA, 120 bp, Artificial Sequence
  ENSG00000081138_38 (sequence is synthesized)
tttaatcacacatgcaagtttttcaaactaaaaaataacaaacaaacaaaaaaacacgcgtatttacccagttcaataaaatcagagtgtggtgcaggaattacagagttgttaagtcag

SEQ ID NO: 79353 - DNA, 120 bp, Artificial Sequence
  ENSG00000081138_39 (sequence is synthesized)
caaggtgctgagaaaacagtttgtaataatccccttgttgtctgcaagaagatgaaatagtttagtacatttggatgatgtcaaaactgctgattgttgcacataccactaaacggaggt

SEQ ID NO: 79354 - DNA, 120 bp, Artificial Sequence
  ENSG00000081138_40 (sequence is synthesized)
gtggatgtattttagaaaaggaacacacatcattcaccctgctttttctgcttttaaaatgtgtgttttttctcattaattttttcaaatggttaccaatgatagattggaaaaagaaag

SEQ ID NO: 79355 - DNA, 120 bp, Artificial Sequence
  ENSG00000081138_41 (sequence is synthesized)
aaaggttcatgtttaaataataatttaaaattattgcatatacccaattgctatttatgtgtggatgattatatgaatacagtattacatttcattcagtggtattttttaattaaaaaa

SEQ ID NO: 79356 - DNA, 120 bp, Artificial Sequence
  ENSG00000081138_42 (sequence is synthesized)
atttaaaaaattaatttttgagatggctggaagaatgttcctaatataggtagtatttatatgaagtattctaagcttaattgtaatagtagtaaattttttgccgttgcttattttagt

SEQ ID NO: 79357 - DNA, 120 bp, Artificial Sequence
  ENSG00000081138_43 (sequence is synthesized)
tttcttttttcttctgaaatctaatgctatatatgatgactgtcaatacttgagatataggctttgttttaaaaacagtgattgaagagctgattgataaaattaatattaagtctagtt

SEQ ID NO: 79358 - DNA, 120 bp, Artificial Sequence
  ENSG00000081138_44 (sequence is synthesized)
ggaaaattctccaaatatgatttaaataaatatatattatcaagttgcttaaattcagtattatactgaaaccaactagaatgagctcacaggaactaattcttcatatctcttcccaac

SEQ ID NO: 79359 - DNA, 120 bp, Artificial Sequence
  ENSG00000081138_45 (sequence is synthesized)
tccaggtacagtgatatcattttggtaggttgatgtcagccttggtgggattatttagaccacaacagtaatcagcaaacactacccttttctctggagaacaagttgttaaacatttac

SEQ ID NO: 79360 - DNA, 120 bp, Artificial Sequence
  ENSG00000081138_46 (sequence is synthesized)
gttgttaaacatttaccagcactctactgcttaaattattttataaaatgaaatgtcataattgtaaatatagtatgaatttatatgatttaaaataatgacatgaaaggaatttatgct

SEQ ID NO: 79361 - DNA, 120 bp, Artificial Sequence
  ENSG00000081138_47 (sequence is synthesized)
taacaatgtatgtggtagtgatttcctgaagtgaaatccttggagctacttgtagacagggagaggagtcacttctttatggaaaacaatggctaaatttcaagtagagataatagttca

SEQ ID NO: 79362 - DNA, 120 bp, Artificial Sequence
  ENSG00000081138_48 (sequence is synthesized)
ggaagtcaatatatttaattattttccacttgtccatacaggagcatcaatagaaactcagggtttgccaaattatgcccattttgaacagtttaatttattgaaaaatcagatgcattt

SEQ ID NO: 79363 - DNA, 120 bp, Artificial Sequence
  ENSG00000081138_49 (sequence is synthesized)
tacttcttactgtctatgtcaaggaaatacacccaagcccttaatctgaattgtcaccattgcattattaaaaatcaacataaaaatataaaaatcaaatcttaaggaaatggatttctg

SEQ ID NO: 79364 - DNA, 120 bp, Artificial Sequence
  ENSG00000081138_50 (sequence is synthesized)
tatcaatctcaattcacaaattagtctctgaaagaaatattccaagatcagccagctaaggaacaaaatcaggaaagagacatcaataaaaaattaggtagtaatttgcaggcaataagt

SEQ ID NO: 79365 - DNA, 120 bp, Artificial Sequence
  ENSG00000081138_51 (sequence is synthesized)
agatttttgatttttctacaagcaatcaccagatctgggatctggtaaatgtctttatttgccaggaagctctgctgatgactacaattgaggttagttgtctacaagatacatgcagga

SEQ ID NO: 79366 - DNA, 120 bp, Artificial Sequence
  ENSG00000081138_52 (sequence is synthesized)
ggtagtagtggttaagtaatggtagctgccttttcactctgccctctgaggaagttttaaattattttatcttcatgcacaattacatttactacattggatggtagacataggcaatta

SEQ ID NO: 79367 - DNA, 120 bp, Artificial Sequence
  ENSG00000081138_53 (sequence is synthesized)
ttttcatgtcaacggcatagttacacaatgtaggaatgatatttgtgaagtgatccacatgcccaagaaatgcaaatgcaaatagtgttgttagcatttatattgaaatataaaatctaa

SEQ ID NO: 79368 - DNA, 120 bp, Artificial Sequence
  ENSG00000081138_54 (sequence is synthesized)
agcagcttaaaataagctaagctaaacaaactgcaagaagctaaatgatttaaacatgttaaagttttaaagcactagctgtaaatattaatcttcagattttcaatttaacatgtattc

SEQ ID NO: 79369 - DNA, 120 bp, Artificial Sequence
  ENSG00000081138_55 (sequence is synthesized)
acttacaaactgttctaataataacactaattattttccaagtcaccatttaaagttttatttacagttgacctaatccaattgaagttgatgaaagcttcaacttattttttaactctt

SEQ ID NO: 79370 - DNA, 120 bp, Artificial Sequence
  ENSG00000081138_56 (sequence is synthesized)
tctggtccacgatgcctggaggcaagtgaaatatatatgacaaataatagataaaccaatttattttctgttagtgtatgtttattttttaattattaataatgtatattgtgtgtatat

SEQ ID NO: 79371 - DNA, 120 bp, Artificial Sequence
  ENSG00000081138_57 (sequence is synthesized)
atgacggtgtatgaaagttggcaatgaaagctaatacaatcatgttagtcggctggatataataaagaacaagaaaggaataatagcatttgcattttaaatgtaattgaaactatttca

SEQ ID NO: 79372 - DNA, 120 bp, Artificial Sequence
  ENSG00000081138_58 (sequence is synthesized)
gaagagtgggataagcccttaagaaaaatgggagatgtttaaggctgtgatttggccgacattgtaacgtataattctgtgggaaatttttcaagcaaatcaagacaggcagtgtgcgtt

SEQ ID NO: 79373 - DNA, 120 bp, Artificial Sequence
  ENSG00000081138_59 (sequence is synthesized)
aaatcaagacaggcagtgtgcgttgcattctgacactttttcattgttatgctaacttctactggcttagaatgtaactgaaaaggatgtgtgcctgtgttttttttttttttttttttt

SEQ ID NO: 79374 - DNA, 120 bp, Artificial Sequence
  ENSG00000081138_60 (sequence is synthesized)
gcccggccctgtgtgtgcgttttcatgtgtgtgattgggaaccttgagagatgtatctgaagtaatgtaaaaataagagtctcataattcctggttaatgctggcgtattgttgtcacct

SEQ ID NO: 79375 - DNA, 120 bp, Artificial Sequence
  ENSG00000081138_61 (sequence is synthesized)
gccaagtgactgttaggcaataagactagaaaatatggtaccgaatgaaaggagaaatatcttatttgctgtaacaatctaatttatattaaggtaaggattttggtggctaaggaaaga

SEQ ID NO: 79376 - DNA, 120 bp, Artificial Sequence
  ENSG00000081138_62 (sequence is synthesized)
acatttagctgttatttgtgtaattgtcacatattattgtgcagatttaatctcattgttaacagaatatagagtgtgaattatttgttattaaatgttactgggctttggtgtcagtgt

SEQ ID NO: 79377 - DNA, 120 bp, Artificial Sequence
  ENSG00000081138_63 (sequence is synthesized)
ggtataccagaaattacctctggtctgtggttataaaatctaggtcagaagctcagtttcgccacatttttgctgtgccctagatgccattttcattctctgaacttttatagcttcatg

SEQ ID NO: 79378 - DNA, 120 bp, Artificial Sequence
  ENSG00000081138_64 (sequence is synthesized)
attaaaattgagttaattactattgtgtttcagaggcttgtgaatgattaagtgaaagactgtgtaaacagtaaaacactataaaaagataaagctttattatgggaaataatgggaatt

SEQ ID NO: 79379 - DNA, 120 bp, Artificial Sequence
  ENSG00000081138_65 (sequence is synthesized)
atataaaaaggttgataattgttatatggtaaacagagaatttctgtttggagatacatacattaaggaaaaatatatgcaacttggtatcctaaattggaaaataatattcaaatagat

SEQ ID NO: 79380 - DNA, 120 bp, Artificial Sequence
  ENSG00000081138_66 (sequence is synthesized)
aattgtcataattaattgaagccactcaaatacagttatttataagatctcagaagattgcagtttaactcaacataattcaaccattcatatgaattaatgatatccatatgtgaatgg

SEQ ID NO: 79381 - DNA, 120 bp, Artificial Sequence
  ENSG00000081138_67 (sequence is synthesized)
gattataaataaagaacaaatctttcttacttataatgataactgagtggaagataaaggactgcctttagatgatcccagcctcattgatgaacacaaaacaccagaatagagaaaaag

SEQ ID NO: 79382 - DNA, 120 bp, Artificial Sequence
  ENSG00000081138_68 (sequence is synthesized)
acaataatgagtataagttaagtggtcttccaggcatccagagtagataaagaaaatgaagttctagagaatacaatactttttaaagtcacagtgacatatgtgtaattaataatttat

SEQ ID NO: 79383 - DNA, 120 bp, Artificial Sequence
  ENSG00000081138_69 (sequence is synthesized)
acacttgaaaaaattagatgcaatgatattgacttaacatgaaaaccatcctgaatgcaatgcactcttgatgactcaaactcacttatatcttacaacagctcatcttaatctcttacg

SEQ ID NO: 79384 - DNA, 120 bp, Artificial Sequence
  ENSG00000081138_70 (sequence is synthesized)
aatgaagaaactctaggaaactaaaaaataatatataatggatattactttttgtcagtgatgccaagatgaatgttaataagctctcttctcaactttagctcttagttatctggttat

SEQ ID NO: 79385 - DNA, 120 bp, Artificial Sequence
  ENSG00000081138_71 (sequence is synthesized)
tttatgctcatgtgaacagacactagaaacaaatatattaataactatgtaactaatgagaatgttgaaagtacagcatactttcattcaaaaacaaacttgcattttcattttattaat

SEQ ID NO: 79386 - DNA, 120 bp, Artificial Sequence
  ENSG00000081138_72 (sequence is synthesized)
gaatataatgatgttaatggtttatataagcaggaaaaacttatatgattcactaccctacagcttcatgttctaattttgtgagtataaaccctatgtttttgtatatcaagatctgga

SEQ ID NO: 79387 - DNA, 80 bp, Artificial Sequence
  ENSG00000081138_73 (sequence is synthesized)
gtataaaccctatgtttttgtatatcaagatctggaatatgttgtatactgtatatgaccaatactttaagaacaatcaa

SEQ ID NO: 79388 - DNA, 74 bp, Artificial Sequence
  ENSG00000081138_74 (sequence is synthesized)
accccacaacagtccctagagtgtggtgttccccttcctgtgtaactatatagcaatttcattttacatgcagt

SEQ ID NO: 79389 - DNA, 120 bp, Artificial Sequence
  ENSG00000081138_75 (sequence is synthesized)
ttcctgtgtaactatatagcaatttcattttacatgcagtaattttaaatgcccaaaaataaaaggaaaaggaaaaataagtcactacacaacttatatatattatgtatttgtctttga

SEQ ID NO: 79390 - DNA, 120 bp, Artificial Sequence
  ENSG00000081138_76 (sequence is synthesized)
attttgtgtgcgtatgtgtgtgtgtatatatagacagcatgcgcacacatacatacacgtgtgcaggaacacacacaatttgaggcgaaatgttgaagtaaagtaaatgacttttaaata

SEQ ID NO: 79391 - DNA, 120 bp, Artificial Sequence
  ENSG00000081138_77 (sequence is synthesized)
ttttctttttagcttttaagatgtctattagatccaacctctacaattaaattatatgagcatactgagggagaattgcacatttgtaaagtttctctttagtagagatttcagaatttt

SEQ ID NO: 79392 - DNA, 120 bp, Artificial Sequence
  ENSG00000081138_78 (sequence is synthesized)
ttttctcaaatttagaggaacgaacaattcacattagtaaaacacacagcattactttcaatgaaactataatttttatgtttatgagattccattataattacattaaaaagaaaacca

SEQ ID NO: 79393 - DNA, 120 bp, Artificial Sequence
  ENSG00000081138_79 (sequence is synthesized)
cttttataatatttttgcttatgtaagagtcacttctatagtaaaagagccttaaaaatgttaattcaattgactgcagaattgatcctgaaaatccagttcatttaaccttggaaatga

SEQ ID NO: 79394 - DNA, 120 bp, Artificial Sequence
  ENSG00000081138_80 (sequence is synthesized)
gacatgaagcataaaacctggggtcaggatgtatgtccaaactgaatagattattttcgttcagctcaagtgctatctttcaggcaaatagactcctacaatattcagtattggagatgt

SEQ ID NO: 79395 - DNA, 120 bp, Artificial Sequence
  ENSG00000081138_81 (sequence is synthesized)
ttaaaacaaatataagaaagagtactgtttcagaactaaccagcgaagagatgtatacaaagtgtactctgaattggaataagtgtaggaagacaagccgtgagaatgtgagacctcagt

SEQ ID NO: 79396 - DNA, 120 bp, Artificial Sequence
  ENSG00000081138_82 (sequence is synthesized)
atattgctgtgttttattgtgtgttttgctgtatttttaaaaaataagaaaaaattatcacagagtaagatacatagaagaaaataatttccgcaattcttggtacctcaaaagacctga

SEQ ID NO: 79397 - DNA, 120 bp, Artificial Sequence
  ENSG00000081138_83 (sequence is synthesized)
cacactacaatgaagacttctgttgtcatcattctcagctgtgatggtggcgccatcctggtttccagcttatacctcctgacaactcggtacagaaaatgagtatcattgtaattaaag

SEQ ID NO: 79398 - DNA, 120 bp, Artificial Sequence
  ENSG00000081138_84 (sequence is synthesized)
tttgatattttcttctaagtgactgatttttaatataaaagtatcacaataaagtttttccacagatatgtaattttaagttagataacattctaacatatacatggtttcaattttctt

SEQ ID NO: 79399 - DNA, 120 bp, Artificial Sequence
  ENSG00000081138_85 (sequence is synthesized)
attttcttataagtctgtgaatcactcaagttaggcattgttaggttttttaaggaaaaactttgatgcccagaataactgtaacttatgcaaacacacacacacacacacacactcaca

SEQ ID NO: 79400 - DNA, 120 bp, Artificial Sequence
  ENSG00000081138_86 (sequence is synthesized)
aagtaaatggtagaaatgaaagaagaagaagaagaaaaaaacattgggacattttgccctttatctttttattaagactgtcaataaatgatggtttggtttaagaggataagaagatag

SEQ ID NO: 79401 - DNA, 120 bp, Artificial Sequence
  ENSG00000081138_87 (sequence is synthesized)
ctgaaactctaataattggactttccaatcttaattatgctttagttcccttaccaggattaggaaacttctttgtgattcttttttaaaaataatttaatcaggaagtgacattaaatt

SEQ ID NO: 79402 - DNA, 120 bp, Artificial Sequence
  ENSG00000081138_88 (sequence is synthesized)
ctgtttcaatgtaatgagaaaatagaaatatttatattgtcattacgatggcacttcaccagtatgtcctaatctattctctattacgtctctgaggtgggacattgttgtgagaatgga

SEQ ID NO: 79403 - DNA, 120 bp, Artificial Sequence
  ENSG00000081138_89 (sequence is synthesized)
cgagagcacaaaaacacggcagaccagattttctgagggttacccgctatgcagattcataaacttgttattgaatagttggcacacaagggtaggagaaaaatcccaacaacccttcca

SEQ ID NO: 79404 - DNA, 120 bp, Artificial Sequence
  ENSG00000081138_90 (sequence is synthesized)
ccttttccaaaaagaaaaaaaagaaagaaaaagctaaatcttatgaagctaaactgtcaacaaacagttccactgaagttgccatagggacagctccaacccagtgctgggctcgtggaa

SEQ ID NO: 79405 - DNA, 120 bp, Artificial Sequence
  ENSG00000081138_91 (sequence is synthesized)
ggcagcaaggtacctgcatcaagccaagatccatgaaagtgctaatgtcatttgaggccagtttcacccctacctcccataaatcattttaaaccaaatatgaattagtagtcaaaaatg

SEQ ID NO: 79406 - DNA, 120 bp, Artificial Sequence
  ENSG00000081138_92 (sequence is synthesized)
accaaacacagacgataacccaccatgaaggagatggttcatagaaatctccaagaacttcagataattcaggtaattatcagaaacatgacaagaaaaagctttgtgtaaaatacagaa

SEQ ID NO: 79407 - DNA, 120 bp, Artificial Sequence
  ENSG00000081138_93 (sequence is synthesized)
tacaacacaaggaataatgaaaagatgatctatgatggtgtatacttgcaaaataactaaagagtgtatttaagatttaaatatatctttgaagctagaagtactatggagattgtatat

SEQ ID NO: 79408 - DNA, 120 bp, Artificial Sequence
  ENSG00000081138_94 (sequence is synthesized)
actatattagacactgtgcaagaaggaacttgtgaagctaaaaaatagaatgcaataaattagctagtctgccacatagagaaaaaaagataatctgcaagaacataagggacaaggata

SEQ ID NO: 79409 - DNA, 120 bp, Artificial Sequence
  ENSG00000081138_95 (sequence is synthesized)
aaatacggagtttaacgtgcttataaccagtgtgatccttgttaatcagaattctagaatgttccattgccttatgtgacacctccactgcccccactttttctttttttttgacaaggt

SEQ ID NO: 79410 - DNA, 120 bp, Artificial Sequence
  ENSG00000081138_96 (sequence is synthesized)
ctcattatgtttcccaggctggcttttaactcctggcctcaagttatcctcctgcctctgcctccttaaatactggaattacaggtgtgagtcaccatgccaggtgtctcccatttttta

SEQ ID NO: 79411 - DNA, 120 bp, Artificial Sequence
  ENSG00000081138_97 (sequence is synthesized)
atggtagcttaacttcacctgaagcctcctatgccactatctttataggaagctttaccgactttgtacgacttggtttaatttattcagcttaatggtccatttaaccaatattgttat

SEQ ID NO: 79412 - DNA, 120 bp, Artificial Sequence
  ENSG00000081138_98 (sequence is synthesized)
aaatttatgaagcttcaattctagcaaaaataaactatgtgcactcatcaaaatgtgtggcacacctatgaaaagtgatcaggatgcccaagcaattttaattaaaatcagataattaaa

SEQ ID NO: 79413 - DNA, 120 bp, Artificial Sequence
  ENSG00000081138_99 (sequence is synthesized)
gtgctggaggaatacatgggttcagaccccctctatgtaggaaagatatggatctataacagatgaataaactgggacccaagcaccatcaagacagcacaacatggagcagaatggaga

SEQ ID NO: 79414 - DNA, 120 bp, Artificial Sequence
  ENSG00000081138_100 (sequence is synthesized)
ttcagtagccatacctggggcttctttgcattgaccttccaattgggccactctgcctctaagaaaatggaccgtgaccccctagaatggctgtttctcacaagtgaattactgtgaact

SEQ ID NO: 79415 - DNA, 120 bp, Artificial Sequence
  ENSG00000081138_101 (sequence is synthesized)
ttttctgagaataaaaacaatatgagtagtattttttcttttcatttgttacttaataaaagaaatgatatttagggcaatattaccattacctatgcacttcctgaattatgtctcttt

SEQ ID NO: 79416 - DNA, 120 bp, Artificial Sequence
  ENSG00000081138_102 (sequence is synthesized)
caattaatatcttcttaaaccacacgtcttcattagagatgctttataagtgaattgtgttccattaccttgaaccacagtaataattataaattaggaatacttcaaccagaaagaaat

SEQ ID NO: 79417 - DNA, 120 bp, Artificial Sequence
  ENSG00000081138_103 (sequence is synthesized)
gactcatacatttgttttcatctgtaacatttattcaacagcttgataattgcaatatatacagtggtatgtggaaaatatttattaaaagacataatagaaaacttgtttataatatgt

SEQ ID NO: 79418 - DNA, 120 bp, Artificial Sequence
  ENSG00000081138_104 (sequence is synthesized)
atattcaggcatttttacttctgccaatcattgtttaaatctaccttctatacttaaaattttaaccttgtaaaattttaataaaattaccctgtatgggttctaataatctggaataca

SEQ ID NO: 79419 - DNA, 120 bp, Artificial Sequence
  ENSG00000081138_105 (sequence is synthesized)
ctgggaggcgccgaagtctcagtggctccctgggccggcctccgacagcgctgacagcaggcgcccgccgcccaccatcgtcgccctcttcccctccctcttcggccccggctccggcgc

SEQ ID NO: 79420 - DNA, 120 bp, Artificial Sequence
  ENSG00000081138_106 (sequence is synthesized)
gctctctcctcctctcctgcgcgccctctcgccctctctctggccgcgcgctcccgctggctccggaccctgcgtctcagctgcccgggcgagccggaggggcccctcgcagtgagcaga

SEQ ID NO: 79421 - DNA, 120 bp, Artificial Sequence
  ENSG00000081138_107 (sequence is synthesized)
tgtttccagggcttgctctgaaagagctgtcacaataaccacatgtcacgacttgcctattatcttctccatttggtgaacatatgcagatattctactggatggtgtttgttttgtttt

SEQ ID NO: 79422 - DNA, 74 bp, Artificial Sequence
  ENSG00000081138_108 (sequence is synthesized)
catatgcagatattctactggatggtgtttgttttgttttgtttttaatgatctgggctcactgcagcctctgc

SEQ ID NO: 79423 - DNA, 120 bp, Artificial Sequence
  ENSG00000081138_109 (sequence is synthesized)
tgctgggattacaggagtgagccacagctcctggcctggatggtgttttgctcactaagtaatacaattgttggccacactttccagtggtatatttgaagtataactcagacaaaaagt

SEQ ID NO: 79424 - DNA, 120 bp, Artificial Sequence
  ENSG00000081138_110 (sequence is synthesized)
aactcagacaaaaagttgtatcaatttcattttcaaagcaacagtgaagataaatggcttatgctttaaattaatgctttttaggattaaaaataatctatcttatcccagttctttgct

SEQ ID NO: 79425 - DNA, 120 bp, Artificial Sequence
  ENSG00000081138_111 (sequence is synthesized)
ttagagcactctacagaggagatacactagactggagaatacattttctatattgttttgacaatatgcttattttagaaattatggctttatattctactttttaaagaaattatttga

SEQ ID NO: 79426 - DNA, 120 bp, Artificial Sequence
  ENSG00000081138_112 (sequence is synthesized)
ttgctttcttaaattatttgcaaatttgaaatgattacaatttcagcaatgcaaatcttatatttttaaagtattaaatactaacacatttaattgtacatttccatgattagtttatta

SEQ ID NO: 79427 - DNA, 120 bp, Artificial Sequence
  ENSG00000081138_113 (sequence is synthesized)
ctcggttaaattaaatttataactcatatttgcagtaactcagattttgcagcatccttttaaaaattgggagatgtccaatgtggacactgggtaatgggtttattccaaagaaacatt

SEQ ID NO: 79428 - DNA, 120 bp, Artificial Sequence
  ENSG00000081138_114 (sequence is synthesized)
tttcttcacattgtaacttgtaacacgaacacaacaagaacagagtaaacattcaatataccgttccatatggtgaatgttcaataaattttaagtgttactgatggaaaattataagct

SEQ ID NO: 79429 - DNA, 120 bp, Artificial Sequence
  ENSG00000081138_115 (sequence is synthesized)
aagacctagttactaatacattataaatgctgtcgtgaaaatggaggttattgtcttaagtaacttaagctaaacaagtaaatctaaaagaaaataaactatattttgcatagaacttta

SEQ ID NO: 79430 - DNA, 120 bp, Artificial Sequence
  ENSG00000081148_0 (sequence is synthesized)
agaaaagaagtgagagctactttgaaaggacaaccatttttctttccgctaatttataatggttttgaagtggttgttcattctcaaacatagacttttaaatgttaggtctttcctata

SEQ ID NO: 79431 - DNA, 120 bp, Artificial Sequence
  ENSG00000081148_1 (sequence is synthesized)
actctttgttattggaagtttcaaggatttggacactcaattaaggattctgtcctctcctcattcctttggttttggcccaaatgattatgtttcctctttttgggaagatttctctgg

SEQ ID NO: 79432 - DNA, 120 bp, Artificial Sequence
  ENSG00000081148_2 (sequence is synthesized)
gtattttgatatttgtcctgatagaaggagactttccatcattaacagcacaaacctacttatctatagaggagatccaagaacccaagagtgcagtttcttttctcctgcctgaagaat

SEQ ID NO: 79433 - DNA, 120 bp, Artificial Sequence
  ENSG00000081148_3 (sequence is synthesized)
caacagacctttctctagctaccaaaaagaaacagcctctggaccgcagagaaactgaaagacagtggttaatcagaaggcggagatctattctgtttcctaatggagtgaaaatctgcc

SEQ ID NO: 79434 - DNA, 120 bp, Artificial Sequence
  ENSG00000081148_4 (sequence is synthesized)
cagatgaaagtgttgcagaggctgtggcaaatcatgtgaagtattttaaagtccgagtgtgtcaggaagctgtctgggaagccttcaggactttttgggatcgacttcctgggcgtgagg

SEQ ID NO: 79435 - DNA, 120 bp, Artificial Sequence
  ENSG00000081148_5 (sequence is synthesized)
aatatcattactggatgaatttgtgtgaggatggagtcacaagtatatttgaaatgggcacaaattttagtgaatctgtggaacatagaagcttaatcatgaagaaactgacttatgcaa

SEQ ID NO: 79436 - DNA, 120 bp, Artificial Sequence
  ENSG00000081148_6 (sequence is synthesized)
aggaaactgtaagcagctctgaactgtcttctccagttcctgttggtgatacttcaacattgggagacactactctcagtgttccacatccagaggtggacgcctatgaaggtgcctcag

SEQ ID NO: 79437 - DNA, 120 bp, Artificial Sequence
  ENSG00000081148_7 (sequence is synthesized)
agagcagcttggaaaggccagaggagagtattagcaatgaaattgagaatgtgatagaagaagccacaaaaccagcaggtgaacagattgcagaattcagtatccaccttttggggaagc

SEQ ID NO: 79438 - DNA, 120 bp, Artificial Sequence
  ENSG00000081148_8 (sequence is synthesized)
agtacagggaagaactacaggattcctccagctttcaccaccagcaccttgaagaagaatttatttcagaggttgaaaatgcatttactgggttaccaggctacaaggaaattcgtgtac

SEQ ID NO: 79439 - DNA, 120 bp, Artificial Sequence
  ENSG00000081148_9 (sequence is synthesized)
ttgaatttaggtcccccaaggaaaatgacagtggcgtagatgtttactatgcagttaccttcaatggtgaggccatcagcaataccacctgggacctcattagccttcactccaacaagg

SEQ ID NO: 79440 - DNA, 120 bp, Artificial Sequence
  ENSG00000081148_10 (sequence is synthesized)
tggaaaaccatggccttgtggaactggatgataaacccactgttgtttatacaatcagtaacttcagagattatattgctgagacattgcagcagaattttttgctggggaactcttcct

SEQ ID NO: 79441 - DNA, 120 bp, Artificial Sequence
  ENSG00000081148_11 (sequence is synthesized)
tgaatccagatcctgattccctgcagcttatcaatgtgagaggagttttgcgtcaccaaactgaagatctagtttggaacacccaaagttcaagtcttcaggcaacgccgtcatctattc

SEQ ID NO: 79442 - DNA, 120 bp, Artificial Sequence
  ENSG00000081148_12 (sequence is synthesized)
tggataatacctttcaagctgcatggccctcagcagatgaatccatcaccagcagtattccaccacttgatttcagctctggtcctccctcagccactggcagggaactctggtcagaaa

SEQ ID NO: 79443 - DNA, 120 bp, Artificial Sequence
  ENSG00000081148_13 (sequence is synthesized)
gtcctttgggtgatttagtgtctacacacaaattagcctttccctcgaagatgggcctcagctcttccccagaggttttagaggttagcagcttgactcttcattctgtcaccccggcag

SEQ ID NO: 79444 - DNA, 120 bp, Artificial Sequence
  ENSG00000081148_14 (sequence is synthesized)
tgcttcagactggcttgcctgtggcttctgaggaaaggacttctggatctcacttggtagaagatggattagccaatgttgaagagtcagaagattttctttctattgattcattgcctt

SEQ ID NO: 79445 - DNA, 120 bp, Artificial Sequence
  ENSG00000081148_15 (sequence is synthesized)
caagttcattcactcaacctgtgccaaaagaaacaataccatccatggaagactctgatgtgtccttaacatcttcaccatatctgacctcttctataccttttggcttggactccttga

SEQ ID NO: 79446 - DNA, 120 bp, Artificial Sequence
  ENSG00000081148_16 (sequence is synthesized)
cctccaaagtcaaagaccaattaaaagtgagccctttcctgccagatgcatccatggaaaaagagttaatatttgacggtggtttaggttcagggtctgggcaaaaggtagatctgatta

SEQ ID NO: 79447 - DNA, 120 bp, Artificial Sequence
  ENSG00000081148_17 (sequence is synthesized)
cttggccatggagtgagacttcatcagagaagagcgctgaaccactgtccaagccgtggcttgaagatgatgattcacttttgccagctgagattgaagacaagaaactagttttagttg

SEQ ID NO: 79448 - DNA, 120 bp, Artificial Sequence
  ENSG00000081148_18 (sequence is synthesized)
acaaaatggattccacagaccaaattagtaagcactcaaaatatgaacatgatgacagatccacacactttccagaggaagagcctcttagtgggcctgctgtgcccatcttcgcagata

SEQ ID NO: 79449 - DNA, 120 bp, Artificial Sequence
  ENSG00000081148_19 (sequence is synthesized)
ctgcagctgaatctgcgtctctaaccctccccaagcacatatcagaagtacctggtgttgatgattactcagttaccaaagcacctcttatactgacatctgtagcaatctctgcctcta

SEQ ID NO: 79450 - DNA, 120 bp, Artificial Sequence
  ENSG00000081148_20 (sequence is synthesized)
ctgataaatcagatcaggcagatgccatcctaagggaggatatggaacaaattactgagtcatccaactatgaatggtttgacagtgaggtttcaatggtaaagccagatatgcaaactt

SEQ ID NO: 79451 - DNA, 120 bp, Artificial Sequence
  ENSG00000081148_21 (sequence is synthesized)
tgtggactatattgccagaatcagagagagtttggacaagaacttcttccctagagaaattgtccagagacatattggcaagtacaccacagagtgctgacaggctctggttatctgtga

SEQ ID NO: 79452 - DNA, 120 bp, Artificial Sequence
  ENSG00000081148_22 (sequence is synthesized)
cacagtctaccaaattgcctccaaccacaatctccaccctgctagaggatgaagtaattatgggtgtacaggatatttcgttagaactggaccggataggcacagattactatcagcctg

SEQ ID NO: 79453 - DNA, 120 bp, Artificial Sequence
  ENSG00000081148_23 (sequence is synthesized)
agcaagtccaagagcaaaatggcaaggttggtagttatgtggaaatgtcaacaagtgttcactccacagagatggttagtgtggcttggcccacagaaggaggagatgacttgagttata

SEQ ID NO: 79454 - DNA, 120 bp, Artificial Sequence
  ENSG00000081148_24 (sequence is synthesized)
cccagacttcaggagctttggtggttttcttcagcctccgagtgactaacatgatgttttcagaagatctgtttaataaaaactccttggagtataaagccctggagcaaagattcttag

SEQ ID NO: 79455 - DNA, 120 bp, Artificial Sequence
  ENSG00000081148_25 (sequence is synthesized)
aattgctggttccctatctccagtcaaatctcacggggttccagaacttagaaatcctcaacttcagaaatggcagcattgtggtgaacagtcgaatgaagtttgccaattctgtccctc

SEQ ID NO: 79456 - DNA, 120 bp, Artificial Sequence
  ENSG00000081148_26 (sequence is synthesized)
ctaacgtcaacaatgcggtgtacatgattctggaagacttttgtaccactgcctacaataccatgaacttggctattgataaatactctcttgatgtggaatcaggtgatgaagccaacc

SEQ ID NO: 79457 - DNA, 120 bp, Artificial Sequence
  ENSG00000081148_27 (sequence is synthesized)
cttgcaagtttcaggcctgtaatgaattttcagagtgtctggtcaacccctggagtggagaagcaaagtgcagatgcttccctggatacctgagtgtggaagaacggccctgtcagagtc

SEQ ID NO: 79458 - DNA, 120 bp, Artificial Sequence
  ENSG00000081148_28 (sequence is synthesized)
tctgtgacctacagcctgacttctgcttgaatgatggaaagtgtgacattatgcctgggcacggggccatttgtaggtgccgggtgggtgagaactggtggtaccgaggcaagcactgtg

SEQ ID NO: 79459 - DNA, 120 bp, Artificial Sequence
  ENSG00000081148_29 (sequence is synthesized)
aggaatttgtgtctgagcccgtgatcataggcatcactattgcctccgtggttggacttcttgtcatcttttctgctatcatctacttcttcatcaggactctccaagcacaccatgaca

SEQ ID NO: 79460 - DNA, 120 bp, Artificial Sequence
  ENSG00000081148_30 (sequence is synthesized)
ggagtgaaagagagagtcccttcagtggctccagcaggcagcctgacagcctctcatctattgagaatgctgtgaagtacaaccccgtgtatgaaagtcacagggctggatgtgagaagt

SEQ ID NO: 79461 - DNA, 120 bp, Artificial Sequence
  ENSG00000081148_31 (sequence is synthesized)
atgagggaccctatcctcagcatcccttctacagctctgctagcggagacgtgattggtgggctgagcagagaagaaatcagacagatgtatgagagcagtgagctttccagagaggaaa

SEQ ID NO: 79462 - DNA, 120 bp, Artificial Sequence
  ENSG00000081148_32 (sequence is synthesized)
ttcaagagagaatgagagttttggaactgtatgccaatgatcctgagtttgcagcttttgtgagagagcaacaagtggaagaggtttaaccaaaactcctgttctgaaactgattagaag

SEQ ID NO: 79463 - DNA, 120 bp, Artificial Sequence
  ENSG00000081148_33 (sequence is synthesized)
cctggagaagatggagattacttgttacttatgtcatataattaacctggattttaaacactgttggaagaagagttttctatgaaaaaattaaatatagggcacactgtttttttttca

SEQ ID NO: 79464 - DNA, 120 bp, Artificial Sequence
  ENSG00000081148_34 (sequence is synthesized)
taaattgaaaactacgtaaactctggaaagtattctataagaaaaagctggacctaggatttagggctgcagttgctgtctgcttctgaatcactgggggtgtctcctaagaactgtgcc

SEQ ID NO: 79465 - DNA, 120 bp, Artificial Sequence
  ENSG00000081148_35 (sequence is synthesized)
tcgggtttttcaataggaaaataaggtgagactcttccatggagaagtctggcttagtaagggaatattttggagcatatttgttattgttgggtagaaggggaaacctttgaaatagtc

SEQ ID NO: 79466 - DNA, 120 bp, Artificial Sequence
  ENSG00000081148_36 (sequence is synthesized)
ttaatggatagtttataatcaggcattcatctaaataaaattctttcttttttttgatcaaactgctaaagaaaaagcaaacttttttgctgcaggatagaattcgggttgtatttttat

SEQ ID NO: 79467 - DNA, 120 bp, Artificial Sequence
  ENSG00000081148_37 (sequence is synthesized)
gcttctatcagtgtcttgcatttcctgagcatattaatcaagaccatgttattgttatgttaactatgttaatatcctttttttcttagttttcaggatgaatgcatatatatatatata

SEQ ID NO: 79468 - DNA, 120 bp, Artificial Sequence
  ENSG00000081148_38 (sequence is synthesized)
tatatatatatatatatatatataaagtttagaagattcccattaatctaaagacaaatttaatcacatgggcagggagggagtgagtgtcgggtcaagaccccagtgctgagaatatat

SEQ ID NO: 79469 - DNA, 120 bp, Artificial Sequence
  ENSG00000081148_39 (sequence is synthesized)
agtgctgagaatatattttgtttcttgattgctggactgaggttccctgattgcttctgaaatctaaagatgtcttgggcaaatcctgtctctcctctagttcctggtgtattaatttgg

SEQ ID NO: 79470 - DNA, 120 bp, Artificial Sequence
  ENSG00000081148_40 (sequence is synthesized)
aaaacagcacttaactacctcacataatatagatgagctcattttcattgcttctcctttgtgtaatacctcctgtctaaattaactcctgcttatacaaaacagggcaaagcttttatt

SEQ ID NO: 79471 - DNA, 120 bp, Artificial Sequence
  ENSG00000081148_41 (sequence is synthesized)
acaattaaaatattttaaaaactgaacagataggaagtccataccttatataaattttgacagaaaatggaaattttcctctttccccctagtgttttttttgaatgggttgctttggag

SEQ ID NO: 79472 - DNA, 120 bp, Artificial Sequence
  ENSG00000081148_42 (sequence is synthesized)
ggggagaggaggaggccaaatcatcatcatcatgatattaaattgcatatgcaataggttattattaatgcagatactttatgctagatgtcttcatgcttgccaaaaccaattctgaac

SEQ ID NO: 79473 - DNA, 120 bp, Artificial Sequence
  ENSG00000081148_43 (sequence is synthesized)
attttgatttatttctgaccagatataaataaccagtataaactgaccataagataaaatacttggttcacttttttttttctcaacttgatgactgccaattctgctcattatgaggac

SEQ ID NO: 79474 - DNA, 120 bp, Artificial Sequence
  ENSG00000081148_44 (sequence is synthesized)
accggaaactaaatatctgggctcagtgcatgccacagtaaagctagtgaaagccttgaagatggccaggtattttgcaaagtatgtatggataacaggttgtgtgtgtgtatgtgtgaa

SEQ ID NO: 79475 - DNA, 120 bp, Artificial Sequence
  ENSG00000081148_45 (sequence is synthesized)
tgtgtgtgtgcgtgtatgtgtgtgtgcgtgtgcgcgctaatgcgcatgtgcgcccgcgccaaggtggctcccttatcctagcatttcctttcattccctactcacataatggatcctcta

SEQ ID NO: 79476 - DNA, 120 bp, Artificial Sequence
  ENSG00000081148_46 (sequence is synthesized)
acagttcagtataggtacactttccactattttattgacatgttctagtcttaatattggataattagacactttccactgggcccatttgaaaagtaattgataattacctttaagaca

SEQ ID NO: 79477 - DNA, 120 bp, Artificial Sequence
  ENSG00000081148_47 (sequence is synthesized)
ttttaagtgttaatgatatttgtcactactaagtgcttagttttatttataaaactttcaaagttttctgtttaagactgtaaactgttttcctatactacgtgttagatgaaagtgtat

SEQ ID NO: 79478 - DNA, 120 bp, Artificial Sequence
  ENSG00000081148_48 (sequence is synthesized)
tttatcacaaattaaccttagaatgcaactctttgaatgtgtgcttgctggaagaattccagatggacacaaatccctctagggcaggtcaccatgcagaacacttaggagaagcacgaa

SEQ ID NO: 79479 - DNA, 120 bp, Artificial Sequence
  ENSG00000081148_49 (sequence is synthesized)
ctgagccagaggagggttgttgttttccacaaactaagcagtgaagtgggaatttgggaattctgacacacgtcaccatctctgatttccttttgcgtgaccttttcatgcaagagcaaa

SEQ ID NO: 79480 - DNA, 120 bp, Artificial Sequence
  ENSG00000081148_50 (sequence is synthesized)
acacttagctcttcatgaatgtctgctccacaccaatgaaatggaagagtaaaggagcccctcaactatcagggaaagaacaggaggcctcagttgaggaatacaacttttgtcctgcct

SEQ ID NO: 79481 - DNA, 120 bp, Artificial Sequence
  ENSG00000081148_51 (sequence is synthesized)
ttgctatagctgaaccactgttgaaaggttgaagaacacagtttgcccagcaaagatccatccactcatgtacaaagcaaagcactaaaggagctattagtttgatggaaaaaactaccc

SEQ ID NO: 79482 - DNA, 120 bp, Artificial Sequence
  ENSG00000081148_52 (sequence is synthesized)
ctaaagagcttctttctaaaagaccttcctcgaaggtgatttaatggcatgtcatcatttaaaagtcttaggctgaactgtcatttacactgcacaattgaggaatgaaattttctgagt

SEQ ID NO: 79483 - DNA, 120 bp, Artificial Sequence
  ENSG00000081148_53 (sequence is synthesized)
attagaacgttcttcttaacctagcaatataatattcaacaagactatcaccttatgtgaaaatactaaaatgcagttagcaataaaatgcatggtaaataaccattttaaaaatgttat

SEQ ID NO: 79484 - DNA, 120 bp, Artificial Sequence
  ENSG00000081148_54 (sequence is synthesized)
tataaaaggttgtaagatactgtggtgttttacagatgtagcctttataattgaattatatacactatccttttttatgggttatggataaaggggaatttatttgataaatagggctcc

SEQ ID NO: 79485 - DNA, 120 bp, Artificial Sequence
  ENSG00000081148_55 (sequence is synthesized)
tatttgataaatagggctccattttcaccattgcaatggtttaagggtgtttgttcacgtttatgtggcctgaagtcccatttttatcactattattatttgagatggagtctcgctctg

SEQ ID NO: 79486 - DNA, 82 bp, Artificial Sequence
  ENSG00000081148_56 (sequence is synthesized)
gagtgcaatggggcgatctcagctcctgtcagcttcctgagtagctggggttacagacacccaccaccatgcccagctaatt

SEQ ID NO: 79487 - DNA, 120 bp, Artificial Sequence
  ENSG00000081148_57 (sequence is synthesized)
cacctggccccatttaatttatataataaaacaagtgcaggctttacctgattttattctcaccttctgttttcttcttctgcattatctgtcaccatgggttggctcctccccactttc

SEQ ID NO: 79488 - DNA, 120 bp, Artificial Sequence
  ENSG00000081148_58 (sequence is synthesized)
tcttttttattcttttctctcttttttgccacactaaattgtaatgtgtttgaacaactctgacttaatattacctctaacaaaaagctggaaactgcacaaatattctttgtaggctct

SEQ ID NO: 79489 - DNA, 120 bp, Artificial Sequence
  ENSG00000081148_59 (sequence is synthesized)
aaaagtaggttggctgaagtatgatacctgaactaattattcatttgtatgcttgttttataagtttgacttccatttcatgatttttttggtagctttatgttatttctgttttcagca

SEQ ID NO: 79490 - DNA, 120 bp, Artificial Sequence
  ENSG00000081148_60 (sequence is synthesized)
atgggtactttgacatctttctgtctctgaattgaattttcattttgcaacggaagagaagacaacatatttattccataatgaaagagctaatgaagtagaataactattaaattgaga

SEQ ID NO: 79491 - DNA, 120 bp, Artificial Sequence
  ENSG00000081148_61 (sequence is synthesized)
tgttttagcaaaaaaacaaaaacacaaaccccaaacgggttgttttgttttatttttttctaaaacatttctaacaattcccagtaggaatgggtggggccagccttcctcatttacaat

SEQ ID NO: 79492 - DNA, 120 bp, Artificial Sequence
  ENSG00000081148_62 (sequence is synthesized)
ccagctgcagtgagtcaagatcctagcttattctcccaattgtgtaataaatgcagaaaaatgatgtgacggtcactattctcaaatccattgcattgtattccacaaaggatatcctgg

SEQ ID NO: 79493 - DNA, 120 bp, Artificial Sequence
  ENSG00000081148_63 (sequence is synthesized)
cggaaggtggaaatatgggagggtaccatgatgtaaagaattgcctggaaatttccttgagtcatgcattttgtaaaaccttacattactgctatgagttaataagagacaggttaaacc

SEQ ID NO: 79494 - DNA, 120 bp, Artificial Sequence
  ENSG00000081148_64 (sequence is synthesized)
actcccctcaggatagtaagactggttaaaaacactgctctcagcccacacagttatagctacagcctaggttaaatgattcctcatcctggtgtttttattctcatgtttaattacttc

SEQ ID NO: 79495 - DNA, 120 bp, Artificial Sequence
  ENSG00000081148_65 (sequence is synthesized)
cttctttaaagattaagattatatatagaaaaaataattgtggtatcagagaatacaggtataatttttcatatatcaggactatgtgatgatacttaagcaatagtgtacatacagtaa

SEQ ID NO: 79496 - DNA, 120 bp, Artificial Sequence
  ENSG00000081148_66 (sequence is synthesized)
tgtttaatatcgagtatggataatgaaggacttttctttttcaccttgtttataatgacattttatccagggtttgaatcaaataaattcatgttaactgtactattttattgaaatgtt

SEQ ID NO: 79497 - DNA, 120 bp, Artificial Sequence
  ENSG00000081148_67 (sequence is synthesized)
tgttctagtcttattattggataattagaaataaacattttaaagtctttatgaataaataaggatgttttcctatgtatacaactgtactattttcattagtaataaacatcactttca

SEQ ID NO: 79498 - DNA, 120 bp, Artificial Sequence
  ENSG00000081154_0 (sequence is synthesized)
cttggcgtggctgcaggggaggccgcggcggggaaaatggcggacgggaaggcgggagacgagaagcctgaaaagtcgcagcgagctggagccgccggaggacctgaagaagaagcagaa

SEQ ID NO: 79499 - DNA, 120 bp, Artificial Sequence
  ENSG00000081154_1 (sequence is synthesized)
aaacctgtgaaaactaagactgtttcttccagtaatggaggggaaagttccagtcgcagcgctgagaagcgatcagctgaagaagaagctgccgacctcccaacaaagcctacaaagatc

SEQ ID NO: 79500 - DNA, 120 bp, Artificial Sequence
  ENSG00000081154_2 (sequence is synthesized)
tccaagtttggatttgccataggtagtcagacgacaaagaaagcatcagccatatccatcaaacttggatcaagtaagcctaaagaaactgttccaactcttgctccaaaaactctttca

SEQ ID NO: 79501 - DNA, 120 bp, Artificial Sequence
  ENSG00000081154_3 (sequence is synthesized)
gtagcagcagcttttaatgaagatgaagatagtgaaccagaggaaatgcctccagaagcaaagatgaggatgaagaatattggaagggatacaccaacatcagctggaccaaactccttc

SEQ ID NO: 79502 - DNA, 120 bp, Artificial Sequence
  ENSG00000081154_4 (sequence is synthesized)
aataaaggaaagcatgggttttctgataaccagaagctgtgggagcgaaatataaaatctcatcttggaaatgtccatgaccaagacaattaaatgatgttttgaaattggggtgtgggg

SEQ ID NO: 79503 - DNA, 120 bp, Artificial Sequence
  ENSG00000081154_5 (sequence is synthesized)
tgggtgtaaagttaaaaggaacagtttccttttttaaagaatggtataagactatctttggagccgctttttttttctttttcatttttttaaaagattgagtggtacactaataaatga

SEQ ID NO: 79504 - DNA, 120 bp, Artificial Sequence
  ENSG00000081154_6 (sequence is synthesized)
gagtttgaaattagaggtaatttatgttttatatacagatttcaagacatttgctaattttgtagtttcatgtgattagtttccaaaggttacagataataaagaaatcagaaatggtac

SEQ ID NO: 79505 - DNA, 120 bp, Artificial Sequence
  ENSG00000081154_7 (sequence is synthesized)
ctttttaagaattgcatatttttttagacacaactattagtacattaagagggaagcaaagttactgtctatttaaaactgcaagcagttaactctcttaactcccttattacctaaact

SEQ ID NO: 79506 - DNA, 120 bp, Artificial Sequence
  ENSG00000081154_8 (sequence is synthesized)
tgtctggctcccaggaacagccttatagagagagggagtattgtattgggaagaaaatgttactgaactattgactgaaagtaaatttagataaaatacagcttttttccttatgggcat

SEQ ID NO: 79507 - DNA, 120 bp, Artificial Sequence
  ENSG00000081154_9 (sequence is synthesized)
ttgtttcaagtcatcataaactaggtattgcattgctatccgtggatacagacgcttagctcttaaaagattttttttttatgtaaactgttgaatatttgaaatagtccacttcacctt

SEQ ID NO: 79508 - DNA, 120 bp, Artificial Sequence
  ENSG00000081154_10 (sequence is synthesized)
aatgggtcttgtctatcttcattagtcttcaaagaaaaaccatttgctaccaaagtaaatcagtattttgaatgtgcttctcttgttttttgtttattagctagttcctgtaagcatttc

SEQ ID NO: 79509 - DNA, 120 bp, Artificial Sequence
  ENSG00000081154_11 (sequence is synthesized)
caccagaacttgaggcaaatcgtaaggaagctgtttcttttaaaacacaaaccaccaccaaaaatttaaatgtacatattgcttaagtatttggctgtttttattttttaaaaggtataa

SEQ ID NO: 79510 - DNA, 120 bp, Artificial Sequence
  ENSG00000081154_12 (sequence is synthesized)
acaccaaaaaaaaaattaacattgtatgaagatggaaaataagaagatgcactttctgtaactttgtctaaggatttaaattactaacttatgaactccaatttgaattgaacttaacta

SEQ ID NO: 79511 - DNA, 120 bp, Artificial Sequence
  ENSG00000081154_13 (sequence is synthesized)
tcggctttcttactggtaaaattatatggtttattttaaatgcgtacatattgaccaatggcctctgaaaaagcacattttagatactgaaattgaaggaaagaaaatgcatcttcaaac

SEQ ID NO: 79512 - DNA, 120 bp, Artificial Sequence
  ENSG00000081154_14 (sequence is synthesized)
attttttggaatctcaccacatatactttgttagatttgtgtattgtagggtgtttgttttgtatttttgtattgtatatgaactttttttaaatgtgacagttaaacacatctttaaaa

SEQ ID NO: 79513 - DNA, 120 bp, Artificial Sequence
  ENSG00000081154_15 (sequence is synthesized)
gcatagtcacagacaaaagcatacagtataaaaatttccttgaaaactcctacaatattatatttggaggcagcttcagactgttttattggtggtagctgcttgctgaggtcttttagt

SEQ ID NO: 79514 - DNA, 120 bp, Artificial Sequence
  ENSG00000081154_16 (sequence is synthesized)
tggtaataactccagagaagcagcctgtgtatattcctaacactttgttcactagcatttaagtttagaataagcccaagtaagacaatggaaatgtatatagaactcttagttcttaca

SEQ ID NO: 79515 - DNA, 120 bp, Artificial Sequence
  ENSG00000081154_17 (sequence is synthesized)
tgatttaattatatcgatacatgaatttaacttactttaatgtaggcaaactatcaattttttgtccattttcctgtttgttaaaataacatacctctcctacgtattattttcttgacc

SEQ ID NO: 79516 - DNA, 120 bp, Artificial Sequence
  ENSG00000081154_18 (sequence is synthesized)
caaatgaaatattaacctaaggtcaagctgggagagagaaatgactgagatgaatgtctttactaaagtaccaataaatttgtcaaactcaatagtgtttttattttctattccatttaa

SEQ ID NO: 79517 - DNA, 120 bp, Artificial Sequence
  ENSG00000081154_19 (sequence is synthesized)
atttttgaggagcagtaccttaaagtggttaagaacctttgctttggtgtcaaactcttttgctattcatttgctttgtttccttgagcaagttaactttgttacctcacctgcaaaata

SEQ ID NO: 79518 - DNA, 120 bp, Artificial Sequence
  ENSG00000081154_20 (sequence is synthesized)
tgaatgatgataatcatacctccctcatgcgattatgttaggatttttaagagataggacatacacaaacaacacaatgggcagcatttagtagctaaatggttttagttctagaatgtt

SEQ ID NO: 79519 - DNA, 120 bp, Artificial Sequence
  ENSG00000081154_21 (sequence is synthesized)
tgttttttcagcagttttttttctttatgcaaaatcagcaccgtagaagacaggcatttattttttaaatgtagttaaggtaaataactcactaattttctccttttaccaaaatttaca

SEQ ID NO: 79520 - DNA, 120 bp, Artificial Sequence
  ENSG00000081154_22 (sequence is synthesized)
gcggacgggaaggcgggagacgagaagcctgaaaagtcgcagcgagctggagccgccggagttaattcatgggagcctcttctactgccacacaatctcagttcctgctgtatactctaa

SEQ ID NO: 79521 - DNA, 120 bp, Artificial Sequence
  ENSG00000081154_23 (sequence is synthesized)
aggggaggccgcggcggggaaaatggcggacgggaaggcgggagacgagaagcctgaaaagtcgcagcgagctggagccgccggagaagcctaaagaaactgttccaactcttgctccaa

SEQ ID NO: 79522 - DNA, 120 bp, Artificial Sequence
  ENSG00000081177_0 (sequence is synthesized)
acaggttccaggtctttaacgtgagcccgctgcaggtgtgcggcccagtccgagacagcagatgaggagactgtccttcctgtttcgcagatgaggaaactgaggcttagagaagtttgg

SEQ ID NO: 79523 - DNA, 120 bp, Artificial Sequence
  ENSG00000081177_1 (sequence is synthesized)
caaattggctaagttcctacagctaattgtgggattagtgatatgcttttctaaagagtagaaaagtcgaagatgtctagacagaacttagtggctttgacagtgactacccttctgggt

SEQ ID NO: 79524 - DNA, 120 bp, Artificial Sequence
  ENSG00000081177_2 (sequence is synthesized)
gtggctgtaggggggtttgtcctctggaaaggcatccagcgccgccgaaggagtaaaacgagtcctgtgacccaacagccacagcagaaagtgctgggcagtagagagctgccccctcca

SEQ ID NO: 79525 - DNA, 120 bp, Artificial Sequence
  ENSG00000081177_3 (sequence is synthesized)
gaagatgatcagctgcactccagtgcccccagatcctcgtggaaggaacggatccttaaagcaaaggtggtgacggtgtctcaggaggcagagtgggatcaaatcgagcccttgcttaga

SEQ ID NO: 79526 - DNA, 120 bp, Artificial Sequence
  ENSG00000081177_4 (sequence is synthesized)
agtgaattagaagattttccagtacttggaattgactgtgagtgggaacgtcatggtacctacctccagtggcttttctaaggattcaaatagatcacccccataaaggattcagcacag

SEQ ID NO: 79527 - DNA, 120 bp, Artificial Sequence
  ENSG00000081177_5 (sequence is synthesized)
tgtgaacatatagtagtaaatttggaaggcaaagccagccctctgtcacttctacaaatggcctccccaagtggcctgtgtgtcttggttcgcctgcccaagctaatctgtggaggaaaa

SEQ ID NO: 79528 - DNA, 120 bp, Artificial Sequence
  ENSG00000081177_6 (sequence is synthesized)
acactaccaagaacgttattggatattttggcagatggcaccattttgaaagttggagtgggatgctcagaagatgccagcaagcttctgcaggattatggcctcgttgttagggggtgc

SEQ ID NO: 79529 - DNA, 120 bp, Artificial Sequence
  ENSG00000081177_7 (sequence is synthesized)
ctggacctccgatacctagccatgcggcagagaaacaatttgctctgtaatgggcttagcctgaagtccctcgctgagactgttttgaactttccccttgacaagtcccttctacttcgt

SEQ ID NO: 79530 - DNA, 120 bp, Artificial Sequence
  ENSG00000081177_8 (sequence is synthesized)
tgcagcaactgggatgctgagactctcacagaggaccaggtaatttatgctgccagggatgcccagatttcagtggctctctttcttcatcttcttggataccctttctctaggaattca

SEQ ID NO: 79531 - DNA, 120 bp, Artificial Sequence
  ENSG00000081177_9 (sequence is synthesized)
cctggagaaaaaaacgatgaccacagtagctggagaaaagtcttggaaaaatgccagggtgtggtcgacatcccatttcgaagcaaaggaatgagcagattgggagaagaggttaatggg

SEQ ID NO: 79532 - DNA, 120 bp, Artificial Sequence
  ENSG00000081177_10 (sequence is synthesized)
gaagcaacagaatctcagcagaagccaagaaataagaagtctaagatggatgggatggtgccaggcaaccaccaagggagagaccccagaaaacataaaagaaagcctctgggggtgggc

SEQ ID NO: 79533 - DNA, 120 bp, Artificial Sequence
  ENSG00000081177_11 (sequence is synthesized)
tattctgccagaaaatcacctctttatgataactgctttctccatgctcctgatggacagcccctctgcacttgtgatagaagaaaagctcagtggtacctggacaaaggcattggtgag

SEQ ID NO: 79534 - DNA, 120 bp, Artificial Sequence
  ENSG00000081177_12 (sequence is synthesized)
ctggtgagtgaagagccctttgtggtgaagctacggtttgaacctgcaggaaggcccgaatctcctggagactattacttgatggttaaagagaacctgtgtgtagtgtgtggcaagaga

SEQ ID NO: 79535 - DNA, 120 bp, Artificial Sequence
  ENSG00000081177_13 (sequence is synthesized)
gactcctacattcggaagaacgtgattccacatgagtaccggaagcacttccccatcgagatgaaggaccacaactcccacgatgtgctgctgctctgcacctcctgccatgccatttcc

SEQ ID NO: 79536 - DNA, 120 bp, Artificial Sequence
  ENSG00000081177_14 (sequence is synthesized)
ccaggcccccatcggctctgaggagggcttgcgcctgctggaagatcctgagcgccggcaggtgcgttctggggccagggccctgctcaacgcggagagcctgcctactcagcgaaagga

SEQ ID NO: 79537 - DNA, 120 bp, Artificial Sequence
  ENSG00000081177_15 (sequence is synthesized)
ggagctgctgcaagcactcagagagttttataacacagacgtggtcacagaggagatgcttcaagaggctgccagcctggagaccagaatctccaatgaaaactatgttcctcacgggct

SEQ ID NO: 79538 - DNA, 120 bp, Artificial Sequence
  ENSG00000081177_16 (sequence is synthesized)
gaaggtggtgcagtgtcacagccagggtggcctgcgctccctcatgcagctggagagccgctggcgtcagcacttcctggactccatgcagcccaagcacctgccccagcagtggtcagt

SEQ ID NO: 79539 - DNA, 120 bp, Artificial Sequence
  ENSG00000081177_17 (sequence is synthesized)
ggaccacaaccatcagaagctgctccggaaattcggggaagatcttcccatccagctgtcttgatagctgctttcctcccagttaggacaagtgggaagctggagccaaggttgaagagt

SEQ ID NO: 79540 - DNA, 120 bp, Artificial Sequence
  ENSG00000081177_18 (sequence is synthesized)
cacctcttcccattttagtacatcattaattgtcaaagcctgtgtgacacaactcagaatactaacctagactaatcccaggatgcttctgctggagcaaagatattgtttgaaggagag

SEQ ID NO: 79541 - DNA, 120 bp, Artificial Sequence
  ENSG00000081177_19 (sequence is synthesized)
tttatggttttggattttaaacgggcagggtcttttttcctctcatttttgtggacaagagaggccttcgcctttatttttactctccctcttctgctgtccctgtgcagaggaaaaatg

SEQ ID NO: 79542 - DNA, 120 bp, Artificial Sequence
  ENSG00000081177_20 (sequence is synthesized)
aagaattctcccagaagtgacttgtcaagacttaaaaaaaatgtttttaatgcatttcttccttgtctagtgcctcggtttatctctaacaggggctgtccagtatatcggtcctgttag

SEQ ID NO: 79543 - DNA, 120 bp, Artificial Sequence
  ENSG00000081177_21 (sequence is synthesized)
gaggggagaaaaagttcttccaaaggctggagaagtgaacaaggagtcaaatttattttcccaattcaacttcataattatcatttctttggcttcatgctctcccgtaactcatgtggt

SEQ ID NO: 79544 - DNA, 120 bp, Artificial Sequence
  ENSG00000081177_22 (sequence is synthesized)
tgggatccatcccatctgggtcacttcagtctacttcacgtacttgaaaaggctttcctttacacttccaggaccaaacagcaacttcctgccacacacttccaccctatcactgggaga

SEQ ID NO: 79545 - DNA, 120 bp, Artificial Sequence
  ENSG00000081177_23 (sequence is synthesized)
aatccttttctggacatgagcctttgacctgggtggggcagaaagaaccacaaactccatctcccaatagaactttgaaattcactcagcttttcctttcatgctgtttgttgcctgctt

SEQ ID NO: 79546 - DNA, 120 bp, Artificial Sequence
  ENSG00000081177_24 (sequence is synthesized)
gttgcactcctcctgccccagaactgcaagatttttagcttcacccctttctgagagtaatgttatcttttatcagaatcagtatcagttcccctgtattctgtgcttcatcgaatttgc

SEQ ID NO: 79547 - DNA, 120 bp, Artificial Sequence
  ENSG00000081177_25 (sequence is synthesized)
aagactgacctcttttaagcatttaattcactcccagagtcatctggtcaggttgcaatatgaggacttctctgtctcctctgaagcctgggacactgagcttacttaatacattagatg

SEQ ID NO: 79548 - DNA, 120 bp, Artificial Sequence
  ENSG00000081177_26 (sequence is synthesized)
ttcaaaagaggagcgttgtttcatctttcaaaatgttaggccattactttgagtataaaatcgacttattaatgattagtaatttttctaaagtattgggaaaactttcttattttataa

SEQ ID NO: 79549 - DNA, 120 bp, Artificial Sequence
  ENSG00000081177_27 (sequence is synthesized)
gatcttaacaagcttaaaaaagaattttatgaccagaatccaacaagagctctattttggaattgtgcccaagttggtgatgtttactctaaaattaataataaaactacttgtaagcac

SEQ ID NO: 79550 - DNA, 120 bp, Artificial Sequence
  ENSG00000081177_28 (sequence is synthesized)
gcggttcagcacccaggtgcgcaaggagggcctcacccctgcccgcggcctcccacgccctccttgggcctctcctttcgacccccttaccctctccctgggagactctaccagaccttc

SEQ ID NO: 79551 - DNA, 120 bp, Artificial Sequence
  ENSG00000081177_29 (sequence is synthesized)
gaggctgcgtgtcccagtcagctaaaaaggaggccccgcccgcggcacctggtagctcctcgggcgctgcgggttcgacgcggcaacagctgctgttttctctcctggattcgtattgtg

SEQ ID NO: 79552 - DNA, 120 bp, Artificial Sequence
  ENSG00000081177_30 (sequence is synthesized)
ggtatgtgtgcatggatataccagacacagtcaccatcggccatcagtagcagcccatgaacccacgtgcacatcctgcatcttgctcttctgacccttcattcccacttgtcttcaggc

SEQ ID NO: 79553 - DNA, 120 bp, Artificial Sequence
  ENSG00000081177_31 (sequence is synthesized)
aggcatttctgggatctaaactagaaatccttgaaaacaaatagtaccagccactttgaggaatgtgcattcactgtagtgggttattatggggtctctgcctcctggctgtgttatgcg

SEQ ID NO: 79554 - DNA, 120 bp, Artificial Sequence
  ENSG00000081177_32 (sequence is synthesized)
gagcccaggagtggaggagagccgtggaaatagacagggagaggctggtacttgggttgtggtaatagtcaggcttgccacaagagggcactcatagatttgtttttatattcattcttg

SEQ ID NO: 79555 - DNA, 120 bp, Artificial Sequence
  ENSG00000081177_33 (sequence is synthesized)
agaaaaaagcaactggttactgaacgtaactcatgacttatgtttcaaattttgcatagctgattttaagtcattttgatagctttgcaagaaaaatttttcctttgaaacaagggagta

SEQ ID NO: 79556 - DNA, 120 bp, Artificial Sequence
  ENSG00000081177_34 (sequence is synthesized)
gggctgtttcattttctttccttctaatcctcatgccaagaggtgagaaacacttaaggtcatttaaggtgctagggaaagggttttcccatggagctttctgtgaggcgcagtaaaata

SEQ ID NO: 79557 - DNA, 120 bp, Artificial Sequence
  ENSG00000081177_35 (sequence is synthesized)
gagccagcagcaaagtagaggaaaaagccagactgcgtcacacaagatttctcatccttttcaggagagagtcactgtgtagatttgaatcttttttctttgagtctgctttgaacttta

SEQ ID NO: 79558 - DNA, 120 bp, Artificial Sequence
  ENSG00000081177_36 (sequence is synthesized)
gcaggcttttcctaagactgacaattgtcgtcttaaatcagagatttgagggtagacttattttatggcaaatgtctatttttctgatataaaagtaacaatgctcattacagaagaatc

SEQ ID NO: 79559 - DNA, 120 bp, Artificial Sequence
  ENSG00000081177_37 (sequence is synthesized)
taaacaaagaataaaaattagccatcttctctccatctaaaacagagctaaactttgctgatatgtttatgaatttcctttcagtattaaaaagtgcatataaggtgtatatttacacaa

SEQ ID NO: 79560 - DNA, 120 bp, Artificial Sequence
  ENSG00000081177_38 (sequence is synthesized)
aattgaaggtcatacatagatacaggttggtatcctaactttaccctctcactgattaacatggtatcacgagtaacttcctatgtttttaaatctttgaaaatagatttctagtggttc

SEQ ID NO: 79561 - DNA, 120 bp, Artificial Sequence
  ENSG00000081177_39 (sequence is synthesized)
taccttatccatccccacactgttgaaaattttggttgtttcagatacttttattatcaatgatgatgtgataaagtttcttgtatatatctctttggctctatctttggtaatttctta

SEQ ID NO: 79562 - DNA, 120 bp, Artificial Sequence
  ENSG00000081177_40 (sequence is synthesized)
agaatggaatcttagaattggactgtgaagagggggattcacattgctggggctaagtacaaattgacatcaccttttaggaatgaaatgcttctctttgaccctttagctccagtgtcc

SEQ ID NO: 79563 - DNA, 120 bp, Artificial Sequence
  ENSG00000081177_41 (sequence is synthesized)
cagcatagtcactgggcttcataggagtagcagtgagaggacagtgtcacagcaagggcctctctgcatgctccctgatcattgtgtttgcaggttcagcatttcttcttgagtccttcc

SEQ ID NO: 79564 - DNA, 120 bp, Artificial Sequence
  ENSG00000081177_42 (sequence is synthesized)
cttcttccaaccttattgcctcatttcccccttgtagtcaatgttttttggaaacactgtttattttaaaataaaaatgtaaaaaaaaggtaaaaaaataaaattttaaattttaaaata

SEQ ID NO: 79565 - DNA, 78 bp, Artificial Sequence
  ENSG00000081177_43 (sequence is synthesized)
ctcccacctcgcatccccatgttgcccaggctggtatcaaactcctggacttaagcgatccgcccaccttggcctccc

SEQ ID NO: 79566 - DNA, 120 bp, Artificial Sequence
  ENSG00000081177_44 (sequence is synthesized)
gagcaacagaaagtgttgagtcaaacctgtttcctccactccctcactgccgcaccttccagagaagtaaaaaaagtctccctaccaactgactgatgattacaattttttttaaattga

SEQ ID NO: 79567 - DNA, 120 bp, Artificial Sequence
  ENSG00000081177_45 (sequence is synthesized)
gaagcagttttccttcaactgttaggtgatcaaaggtttaaaatacaaaatactttgaagaagatccattaactaaaaaattcattcattaatcagcagttagagattgtgggattagtg

SEQ ID NO: 79568 - DNA, 120 bp, Artificial Sequence
  ENSG00000081177_46 (sequence is synthesized)
ggatgattaaattgaaggaagtgttactgcatgtgagttagaagtaaatccacatggccctcattactttggcttgaactttaaaatttttaatgtactttgtttaatccagtgatttgg

SEQ ID NO: 79569 - DNA, 120 bp, Artificial Sequence
  ENSG00000081177_47 (sequence is synthesized)
cagttttcttgttgcttggttcttttttgcattcacagcagagctgtgtgtaaaccacttgacacactccctaatgtcctagtccataagtgtaaaaactagaggcataaactcattcat

SEQ ID NO: 79570 - DNA, 120 bp, Artificial Sequence
  ENSG00000081177_48 (sequence is synthesized)
ttgaccttagtgttgagaatagttttgagtcactcagaagagagcatgggaaggcaacagacattttgacccacagttagcttccggtttgagatttctctttcctttccctgcagaaaa

SEQ ID NO: 79571 - DNA, 120 bp, Artificial Sequence
  ENSG00000081181_0 (sequence is synthesized)
actcccggcttccaaccgcgcggagcctctgccttggagattctcagtgctgcggatcatgtccctaaggggcagcctctcgcgtctcctccagacgcgagtgcattccatcctgaagaa

SEQ ID NO: 79572 - DNA, 120 bp, Artificial Sequence
  ENSG00000081181_1 (sequence is synthesized)
atccgtccactccgtggctgtgataggagccccgttctcacaagggcagaaaagaaaaggagtggagcatggtcccgctgccataagagaagctggcttgatgaaaaggctctccagttt

SEQ ID NO: 79573 - DNA, 120 bp, Artificial Sequence
  ENSG00000081181_2 (sequence is synthesized)
gggctgccacctaaaagactttggagatttgagttttactccagtccccaaagatgatctctacaacaacctgatagtgaatccacgctcagtgggtcttgccaaccaggaactggctga

SEQ ID NO: 79574 - DNA, 120 bp, Artificial Sequence
  ENSG00000081181_3 (sequence is synthesized)
ggtggttagcagagctgtgtcagatggctacagctgtgtcacactgggaggagaccacagcctggcaatcggtaccattagtggccatgcccgacactgcccagacctttgtgttgtctg

SEQ ID NO: 79575 - DNA, 120 bp, Artificial Sequence
  ENSG00000081181_4 (sequence is synthesized)
ggttgatgcccatgctgacatcaacacaccccttaccacttcatcaggaaatctccatggacagccagtttcatttctcctcagagaactacaggataaggtaccacaactcccaggatt

SEQ ID NO: 79576 - DNA, 120 bp, Artificial Sequence
  ENSG00000081181_5 (sequence is synthesized)
ttcctggatcaaaccttgtatctcttctgcaagtattgtgtatattggtctgagagacgtggaccctcctgaacattttattttaaagaactatgatatccagtatttttccatgagaga

SEQ ID NO: 79577 - DNA, 120 bp, Artificial Sequence
  ENSG00000081181_6 (sequence is synthesized)
tattgatcgacttggtatccagaaggtcatggaacgaacatttgatctgctgattggcaagagacaaagaccaatccatttgagttttgatattgatgcatttgaccctacactggctcc

SEQ ID NO: 79578 - DNA, 120 bp, Artificial Sequence
  ENSG00000081181_7 (sequence is synthesized)
tcctcagttggccacctcagaggaagaggcgaagactacagctaacctggcagtagatgtgattgcttcaagctttggtcagacaagagaaggagggcatattgtctatgaccaacttcc

SEQ ID NO: 79579 - DNA, 120 bp, Artificial Sequence
  ENSG00000081181_8 (sequence is synthesized)
tactcccagttcaccagatgaatcagaaaatcaagcacgtgtgagaatttaggagacactgtgcactgacatgtttcacaacaggcattccagaattatgaggcattgaggggatagatg

SEQ ID NO: 79580 - DNA, 120 bp, Artificial Sequence
  ENSG00000081181_9 (sequence is synthesized)
aatactaaatggttgtctgggtcaatactgccttaatgagaacatttacacattctcacaattgtaaagtttcccctctattttggtgaccaatactactgtaaatgtatttggtttttt

SEQ ID NO: 79581 - DNA, 120 bp, Artificial Sequence
  ENSG00000081181_10 (sequence is synthesized)
gcagttcacagggtattaatatgctacagtactatgtaaatttaaagaagtcataaacagcatttattaccttggtatatcatactggtcttgttgctgttgttccttcacatttaagtg

SEQ ID NO: 79582 - DNA, 120 bp, Artificial Sequence
  ENSG00000081181_11 (sequence is synthesized)
gtttttcatctttcctccctcctcccacagcctggctatacagtgcatccttgaactgtcagcccacagcagcaatatgcttattctatccacatccctaacatcatgcattcacaaggt

SEQ ID NO: 79583 - DNA, 120 bp, Artificial Sequence
  ENSG00000081181_12 (sequence is synthesized)
caaagttctggtccacaaacccttccctatagaagttcaatggctgcgaaagaatttgtagtaaaccaggcctcccaggatggcgagctccagtaagatgataatggaaagcagcagctt

SEQ ID NO: 79584 - DNA, 120 bp, Artificial Sequence
  ENSG00000081181_13 (sequence is synthesized)
gttggttgtcactctacaaagagaagcaaagtggggagtagtcagaagtttggataaccttccttctaaacattttggggttagacctgggaccacggctggatactctgaggctgtatg

SEQ ID NO: 79585 - DNA, 120 bp, Artificial Sequence
  ENSG00000081181_14 (sequence is synthesized)
tttgatcacacagccacttagcaggaagtactcataaggttctttagctgtcacttagggataacactgtctacctcacagaaatgttaaactgagacaataaaaaccaaagcataaaaa

SEQ ID NO: 79586 - DNA, 120 bp, Artificial Sequence
  ENSG00000081181_15 (sequence is synthesized)
gttcctcagctgcccttctgaaacatttccaccttgtgtcacttctccttcccagatcaagtgtgtcctgtgttgctctaaacttaccctgtgggtggcagaagaaagcagattgcatac

SEQ ID NO: 79587 - DNA, 120 bp, Artificial Sequence
  ENSG00000081181_16 (sequence is synthesized)
gtcacactgggaggagaccacaggtaccacaactcccaggattttcctggatcaaaccttgtatctcttctgcaagtattgtgtatattggtctgagagacgtggaccctcctgaacagt

SEQ ID NO: 79588 - DNA, 120 bp, Artificial Sequence
  ENSG00000081181_17 (sequence is synthesized)
tgaaaggctgatgcttaacttggtctattgcaggtcactacaacaaacccaccctctcccccaaatacatatttgttaaaaatgctctttaaactaaggactcctccctttatatctcat

SEQ ID NO: 79589 - DNA, 120 bp, Artificial Sequence
  ENSG00000081189_0 (sequence is synthesized)
agcaattctgtgttcttttgccagcactgacaaaggtctggttgtcagtgatacctttacagctaaatttactccagagtgacagaaacaggtgcacctcggcctgccagacacttgtgc

SEQ ID NO: 79590 - DNA, 120 bp, Artificial Sequence
  ENSG00000081189_1 (sequence is synthesized)
agagagatcacgcatctcacggcttgacgatcaagggggcaaagcctcggtcttcatagaaaaggagaggaggcaaacgcagcccaaactggggggtttctcttcaaagccagctggtct

SEQ ID NO: 79591 - DNA, 120 bp, Artificial Sequence
  ENSG00000081189_2 (sequence is synthesized)
ggctttattctgcaggaatttttttacctgtcagggtttggacaacaaagccctcagcaggtgctgacgggtacaacttcctggagaagcagaaaggcactggtgccaaagaagagttgc

SEQ ID NO: 79592 - DNA, 120 bp, Artificial Sequence
  ENSG00000081189_3 (sequence is synthesized)
aaactgtgaagtaacttctatgaagagatgaagtaaagaacggaaggcaaatgattgtggcagtaaagaagtgtatgtgcaggaacgaatgcaggaatttgggaactgagctgtgcaagt

SEQ ID NO: 79593 - DNA, 120 bp, Artificial Sequence
  ENSG00000081189_4 (sequence is synthesized)
gctgaagaaggagatttgtttggaggaaacaggaaagagaaagaaaaggaaggaaaaaatacataatttcagggacgagagagagaagaaaaacggggactatggggagaaaaaagattc

SEQ ID NO: 79594 - DNA, 120 bp, Artificial Sequence
  ENSG00000081189_5 (sequence is synthesized)
agattacgaggattatggatgaacgtaacagacaggtgacatttacaaagaggaaatttgggttgatgaagaaggcttatgagctgagcgtgctgtgtgactgtgagattgcgctgatca

SEQ ID NO: 79595 - DNA, 120 bp, Artificial Sequence
  ENSG00000081189_6 (sequence is synthesized)
tcttcaacagcaccaacaagctgttccagtatgccagcaccgacatggacaaagtgcttctcaagtacacggagtacaacgagccgcatgagagccggacaaactcagacatcgtggagg

SEQ ID NO: 79596 - DNA, 120 bp, Artificial Sequence
  ENSG00000081189_7 (sequence is synthesized)
cattgaacaagaaagaaaacaaaggctgtgaaagccccgatcccgactcctcttatgcactcaccccacgcactgaagaaaaatacaaaaaaattaatgaagaatttgataatatgatca

SEQ ID NO: 79597 - DNA, 120 bp, Artificial Sequence
  ENSG00000081189_8 (sequence is synthesized)
agagtcataaaattcctgctgttccacctcccaacttcgagatgccagtctccatcccagtgtccagccacaacagtttggtgtacagcaaccctgtcagctcactgggaaaccccaacc

SEQ ID NO: 79598 - DNA, 120 bp, Artificial Sequence
  ENSG00000081189_9 (sequence is synthesized)
tattgccactggctcacccttctctgcagaggaatagtatgtctcctggtgtaacacatcgacctccaagtgcaggtaacacaggtggtctgatgggtggagacctcacgtctggtgcag

SEQ ID NO: 79599 - DNA, 120 bp, Artificial Sequence
  ENSG00000081189_10 (sequence is synthesized)
gcaccagtgcagggaacgggtatggcaatccccgaaactcaccaggtctgctggtctcacctggtaacttgaacaagaatatgcaagcaaaatctcctcccccaatgaatttaggaatga

SEQ ID NO: 79600 - DNA, 120 bp, Artificial Sequence
  ENSG00000081189_11 (sequence is synthesized)
ataaccgtaaaccagatctccgagttcttattccaccaggcagcaagaatacgatgccatcagtgaatcaaaggataaataactcccagtcggctcagtcattggctaccccagtggttt

SEQ ID NO: 79601 - DNA, 120 bp, Artificial Sequence
  ENSG00000081189_12 (sequence is synthesized)
ccgtagcaactcctactttaccaggacaaggaatgggaggatatccatcagccatttcaacaacatatggtaccgagtactctctgagtagtgcagacctgtcatctctgtctgggttta

SEQ ID NO: 79602 - DNA, 120 bp, Artificial Sequence
  ENSG00000081189_13 (sequence is synthesized)
acaccgccagcgctcttcaccttggttcagtaactggctggcaacagcaacacctacataacatgccaccatctgccctcagtcagttgggagcttgcactagcactcatttatctcaga

SEQ ID NO: 79603 - DNA, 120 bp, Artificial Sequence
  ENSG00000081189_14 (sequence is synthesized)
gttcaaatctctccctgccttctactcaaagcctcaacatcaagtcagaacctgtttctcctcctagagaccgtaccaccaccccttcgagatacccacaacacacgcgccacgaggcgg

SEQ ID NO: 79604 - DNA, 120 bp, Artificial Sequence
  ENSG00000081189_15 (sequence is synthesized)
ggagatctcctgttgacagcttgagcagctgtagcagttcgtacgacgggagcgaccgagaggatcaccggaacgaattccactcccccattggactcaccagaccttcgccggacgaaa

SEQ ID NO: 79605 - DNA, 120 bp, Artificial Sequence
  ENSG00000081189_16 (sequence is synthesized)
gggaaagtccctcagtcaagcgcatgcgactttctgaaggatgggcaacatgatcagattattacttactagtttttttttttttcttgcagtgtgtgtgtgtgctataccttaatgggg

SEQ ID NO: 79606 - DNA, 120 bp, Artificial Sequence
  ENSG00000081189_17 (sequence is synthesized)
aaggggggtcgatatgcattatatgtgccgtgtgtggaaaaaaaaaaagtcaggtactctgttttgtaaaagtacttttaaattgcctcagtgatacagtataaagataaacagaaatgc

SEQ ID NO: 79607 - DNA, 120 bp, Artificial Sequence
  ENSG00000081189_18 (sequence is synthesized)
tgagataagcttagcacttgagttgtacaacagaacacttgtacaaaatagattttaaggctaacttcttttcactgttgtgctcctttgcaaaatgtatgttacaatagatagtgtcat

SEQ ID NO: 79608 - DNA, 120 bp, Artificial Sequence
  ENSG00000081189_19 (sequence is synthesized)
gttgcaggttcaacgttatttacatgtaaatagacaaaaggaaacatttgccaaaagcggcagatctttactgaaagagagagcagctgttatgcaacatatagaaaaatgtatagatgc

SEQ ID NO: 79609 - DNA, 120 bp, Artificial Sequence
  ENSG00000081189_20 (sequence is synthesized)
ttggacagacccggtaatgggtggccattggtaaatgttaggaacacaccaggtcacctgacatcccaagaatgctcacaaacctgcaggcatatcattggcgtatggcactcattaaaa

SEQ ID NO: 79610 - DNA, 120 bp, Artificial Sequence
  ENSG00000081189_21 (sequence is synthesized)
aggatcagagaccattaaaagaggaccatacctattaaaaaaaaatgtggagttggagggctaacatatttaattaaataaataaataaatctgggtctgcatctcttattaaataaaaa

SEQ ID NO: 79611 - DNA, 120 bp, Artificial Sequence
  ENSG00000081189_22 (sequence is synthesized)
tataaaaatatgtacattacattttgcttattttcatataaaaggtaagacagagtttgcaaagcatttgtggctttttgtagtttacttaagccaaaatgtgtttttttccccttgata

SEQ ID NO: 79612 - DNA, 120 bp, Artificial Sequence
  ENSG00000081189_23 (sequence is synthesized)
gcttcgctaatattttaaacagtcctgtaaaaaaccaaaaaggactttttgtatagaaagcactaccctaagccatgaagaactccatgctttgctaaccaagataactgttttctcttt

SEQ ID NO: 79613 - DNA, 120 bp, Artificial Sequence
  ENSG00000081189_24 (sequence is synthesized)
taactgttttctctttgtagaagttttgtttttgaaatgtgtatttctaattatataaaatattaagaatcttttaaaaaaatctgtgaaattaacatgcttgtgtatagctttctaata

SEQ ID NO: 79614 - DNA, 120 bp, Artificial Sequence
  ENSG00000081189_25 (sequence is synthesized)
aatagcagaagttttgttatcttaatagcgggaggggggtatatttgtgcagttgcacatttgagtaactattttctttctgttttcttttactctgcttacattttataagtttaaggt

SEQ ID NO: 79615 - DNA, 120 bp, Artificial Sequence
  ENSG00000081189_26 (sequence is synthesized)
atccattgtatatactagtttctttcatgctatttttattttgttttttgcatttttatcaaatgcagggcccctttctgatctcaccatttcaccatgcatcttggaattcagtaagtg

SEQ ID NO: 79616 - DNA, 120 bp, Artificial Sequence
  ENSG00000081189_27 (sequence is synthesized)
catatcctaacttgcccatattctaaatcatctggttggttttcagcctagaatttgatacgctttttagaaatatgcccagaatagaaaagctatgttggggcacatgtcctgcaaata

SEQ ID NO: 79617 - DNA, 120 bp, Artificial Sequence
  ENSG00000081189_28 (sequence is synthesized)
tggccctagaaacaagtgatatggaatttacttggtgaataagttataaattcccacagaagaaaaatgtgaaagactgggtgctagacaagaaggaagcaggtaaagggatagttgctt

SEQ ID NO: 79618 - DNA, 120 bp, Artificial Sequence
  ENSG00000081189_29 (sequence is synthesized)
tgtcatccgtttttaattattttaactgacccttgacaatcttgtcagcaatataggactgttgaacaatcccggtgtgtcaggacccccaaatgtcacttctgcataaagcatgtatgt

SEQ ID NO: 79619 - DNA, 120 bp, Artificial Sequence
  ENSG00000081189_30 (sequence is synthesized)
catctattttttcttcaataaagagatttaatagccatttcaagaaatcccataaagaacctctctatgtccctttttttaatttaaaaaaaatgactcttgtctaatattcgtctataa

SEQ ID NO: 79620 - DNA, 120 bp, Artificial Sequence
  ENSG00000081189_31 (sequence is synthesized)
gggattaattttcagaccctttaataagtgagtgccataagaaagtcaatatatattgtttaaaagatatttcagtctaggaaagattttccttctcttggaatgtgaagatctgtcgat

SEQ ID NO: 79621 - DNA, 120 bp, Artificial Sequence
  ENSG00000081189_32 (sequence is synthesized)
tcatctccaatcatatgcattgacatacacagcaaagaagatataggcagtaatatcaacactgctatatcatgtgtaggacatttcttatccattttttctcttttacttgcatagttg

SEQ ID NO: 79622 - DNA, 120 bp, Artificial Sequence
  ENSG00000081189_33 (sequence is synthesized)
ctatgtgtttctcattgtaaaaggctgccgctgggtggcagaagccaagagaccttattaactaggctatatttttcttaacttgatctgaaatccacaattagaccacaatgcaccttt

SEQ ID NO: 79623 - DNA, 120 bp, Artificial Sequence
  ENSG00000081189_34 (sequence is synthesized)
ggttgtatccataaaggatgctagcctgccttgtactaatgttttatatattaaaaaaaaaaaatctatcaaccatttcatatatatcccactactcaaggtatccatggaacatgaaag

SEQ ID NO: 79624 - DNA, 120 bp, Artificial Sequence
  ENSG00000081189_35 (sequence is synthesized)
aataacatttatgcagaggaaaaacaaaaacatccctgaaaatatacacactcatacacacacacgcacaggggaataaaataagaaaatcattttcctcaccatagacttgatcccatc

SEQ ID NO: 79625 - DNA, 120 bp, Artificial Sequence
  ENSG00000081189_36 (sequence is synthesized)
cttacaacccatccttctaacttgatgtgtataaaatatgcaaacatttcacaaatgttctttgtcatttcaaaatactttagtatatcaatatcagtagataccagtgggtgggaaagg

SEQ ID NO: 79626 - DNA, 120 bp, Artificial Sequence
  ENSG00000081189_37 (sequence is synthesized)
gtcattacatgaaaatatgaagaaatagccatattagttttttaacctgcaatttgcctcagcaacaaagaaaaagtgaatttttaatgctgaagataaagtaagctaaagtaccagcag

SEQ ID NO: 79627 - DNA, 120 bp, Artificial Sequence
  ENSG00000081189_38 (sequence is synthesized)
aagccttggctatttatagcagttctgacaatagttttataagaacatgaagagaacagaatcacttgaaaatggatgccagtcatctcttgttcccactactgaattcttataaagtgg

SEQ ID NO: 79628 - DNA, 120 bp, Artificial Sequence
  ENSG00000081189_39 (sequence is synthesized)
tggcaagatagggaagggataatctgagaatttttaaaagatgatttaatgagaagaagcacaattttgattttgatgagtcactttctgtaaacaatcttggtctatctttacccttat

SEQ ID NO: 79629 - DNA, 120 bp, Artificial Sequence
  ENSG00000081189_40 (sequence is synthesized)
accttatctgtaatttaccatttattgtatttgcaaagctagtatggtttttaatcacagtaaatcctttgtattccagactttagggcagagccctgagggagtattattttacataac

SEQ ID NO: 79630 - DNA, 120 bp, Artificial Sequence
  ENSG00000081189_41 (sequence is synthesized)
ccgtcctagagtaacattttaggcaacattcttcattgcaagtaaaagatccataagtggcattttacacggctgcgagtattgttatatctaatcctattttaaaagatttttggtaat

SEQ ID NO: 79631 - DNA, 120 bp, Artificial Sequence
  ENSG00000081189_42 (sequence is synthesized)
atgaagcttgaatactggtaacagtgatgcaatatacgcaagctgcacaacctgtatattgtatgcattgctgcgtggaggctgtttatttcaacctttttaaaaattgtgttttttagt

SEQ ID NO: 79632 - DNA, 120 bp, Artificial Sequence
  ENSG00000081189_43 (sequence is synthesized)
aaaatggcttattttttcccaaaggtggaatttagcattttgtaatgatgaatataaaaatacctgtcatccccagatcatttaaaagttaactaaagtgagaatgaaaaaacaaaattc

SEQ ID NO: 79633 - DNA, 120 bp, Artificial Sequence
  ENSG00000081189_44 (sequence is synthesized)
caagacactttttaaaagaatgtctgccctcacacacttttatggatttgtttttcttacatacccatcttttaacttagagatagcattttttgccctctttattttgttgtttgtttc

SEQ ID NO: 79634 - DNA, 120 bp, Artificial Sequence
  ENSG00000081189_45 (sequence is synthesized)
tccagagagtaaacgctttgtagttctttctttaaaaaacattttttttaaagaagaagaagccacttgaaccctcaataaaggctgttgcctaagcatggcatacttcatctgttctca

SEQ ID NO: 79635 - DNA, 120 bp, Artificial Sequence
  ENSG00000081189_46 (sequence is synthesized)
tttgtgccatctgccgtgatgtcgtcacttttatggcgttaatttcctgccactacagatcttttgaagattgctggaatactggtgtctgttagaatgcttcagactacagatgtaatt

SEQ ID NO: 79636 - DNA, 120 bp, Artificial Sequence
  ENSG00000081189_47 (sequence is synthesized)
aaaggcttttcttaatatgttttaaccaaagatgtggagcaatccaagccacatatcttctacatcaaatttttccattttggttattttcataatctggtattgcattttgccttccct

SEQ ID NO: 79637 - DNA, 120 bp, Artificial Sequence
  ENSG00000081189_48 (sequence is synthesized)
gttcatacctcaaattgattcatacctcagtttaattcagagaggtcagttaagtgacggattctgttgtggtttgaatgcagtaccagtgttctcttcgagcaaagtagacctgggtca

SEQ ID NO: 79638 - DNA, 120 bp, Artificial Sequence
  ENSG00000081189_49 (sequence is synthesized)
ctgtaggcataggacttggattgcttcagatggtttgctgtatcatttttcttctttttcttttcctggggacttgtttccattaaatgagagtaattaaaatcgcttgtaaatgagggc

SEQ ID NO: 79639 - DNA, 120 bp, Artificial Sequence
  ENSG00000081189_50 (sequence is synthesized)
atacaagcatttgcaacaaatattcaaatagaggctcacagcggcataagctggactttgtcgccactagatgacaagatgttataactaagttaaaccacatctgtgtatctcaaggga

SEQ ID NO: 79640 - DNA, 120 bp, Artificial Sequence
  ENSG00000081189_51 (sequence is synthesized)
cttaattcagctgtctgtagtgaataaaagtgggaaattttcaaaagtttctcctgctggaaataaggtataatttgtattttgcagacaattcagtaaagttactggctttcttagtga

SEQ ID NO: 79641 - DNA, 120 bp, Artificial Sequence
  ENSG00000081189_52 (sequence is synthesized)
ggaaattgtcctatatgcatttgctgtggattcatggattggctttctgtgatagagaaagcttgtttgtatctttggggtcttaaacgtgcatgggaaataccattctaacacactgct

SEQ ID NO: 79642 - DNA, 120 bp, Artificial Sequence
  ENSG00000081189_53 (sequence is synthesized)
gctgttctccttttcccattcgtcttctgtcacttccttcctggacgcagttttctggacgagtctggttacttttaatccgaccggccgctgagagccactttctcctcctcctcctcc

SEQ ID NO: 79643 - DNA, 120 bp, Artificial Sequence
  ENSG00000081189_54 (sequence is synthesized)
tcctccttctcttcctcctccttcttcctcctcctcctcctcttccgagcggcctcggcgcgcgcgaatgcgcggccccgcgccccccccctcgcgcgcgctcccctcgcgcgcgcgcac

SEQ ID NO: 79644 - DNA, 120 bp, Artificial Sequence
  ENSG00000081189_55 (sequence is synthesized)
acacgcacacatcgtctccagctctctgctcgctctgctcgcagtcacagacacttgagcacacgcgtacacccagacatcttcgggctgctattggattgactttgaaggttctgtgtg

SEQ ID NO: 79645 - DNA, 120 bp, Artificial Sequence
  ENSG00000081189_56 (sequence is synthesized)
ggtcgccgtggctgcatgtttgaatcaggtggagaagcacttcaacgctggacgaagtaaagattattgttgttattttttttttctctctctctctctcttaagaaaggaaaatatccc

SEQ ID NO: 79646 - DNA, 120 bp, Artificial Sequence
  ENSG00000081189_57 (sequence is synthesized)
taaatttattcaattttattgtgttttttaaaaagcagcttatgccacaagcacaaatgagctttctcagttttcaactcaaaatattatatgaaaagatggatatgtgtgtctgtgtgg

SEQ ID NO: 79647 - DNA, 120 bp, Artificial Sequence
  ENSG00000081189_58 (sequence is synthesized)
gaggggtgtgaattggatgacggttcttagggtattacagaattcagccagtggtggaagtctaaggttcttattgaatggttcaacttctttatcaaagaagttccatgaagatctttg

SEQ ID NO: 79648 - DNA, 120 bp, Artificial Sequence
  ENSG00000081189_59 (sequence is synthesized)
ataacctgtttaaatgtacagaatttttcaaaagccactgtgaaaagcagtaccataagttattttttaactaaaatctgtagaaagtgtttccaaaagagttccttttttcttcttcga

SEQ ID NO: 79649 - DNA, 120 bp, Artificial Sequence
  ENSG00000081189_60 (sequence is synthesized)
agtaatttctaaaagttgaaaacataggcttataaatctgaataaattagtgaattcatacattttagagactatcaaatatatccattattaacattcaataataatctctaaagggga

SEQ ID NO: 79650 - DNA, 120 bp, Artificial Sequence
  ENSG00000081189_61 (sequence is synthesized)
atgtccttaaaaagattgatagaaagattaatttaaaaactgaaaaggaaaacaagacaccaccagttagccagctggagaacttggacttttgcattagtagtgatatctgctccaaaa

SEQ ID NO: 79651 - DNA, 120 bp, Artificial Sequence
  ENSG00000081189_62 (sequence is synthesized)
agaatgcagttcgaggaaatgttgcatgtggcttcaaaatagcagtgctttctgctttgttctcttgtattcattttcagcaaacatgtattaagcaattattatatgtaactcatgtgg

SEQ ID NO: 79652 - DNA, 120 bp, Artificial Sequence
  ENSG00000081189_63 (sequence is synthesized)
tgattccaggatgaatgaagttgtagccctttctcttaggaaacttataaactaataggagataaaaggcattctcagggaagtctacaaagtgctatgagggagccactttggccatcc

SEQ ID NO: 79653 - DNA, 120 bp, Artificial Sequence
  ENSG00000081189_64 (sequence is synthesized)
tggggcagagcagaccagaggctcagagcatggacacttcctcatccacccagcagaagcctttcacttgattttgaaggtgggcaggattgagaaaggcccagaaggggatgagttcaa

SEQ ID NO: 79654 - DNA, 120 bp, Artificial Sequence
  ENSG00000081189_65 (sequence is synthesized)
agctgtttgtgggcatgtgacccctgcagtcacatatggccctagcttgtgtttcgtttagtgttctgctatcattatcctgataatatcctgataataaaattatccttaataatttta

SEQ ID NO: 79655 - DNA, 120 bp, Artificial Sequence
  ENSG00000081189_66 (sequence is synthesized)
ttgcagctgttgcgcctctgctgaacgcccagccagagcggattcacttttcacacaaatcaaccggagggattgttgctgcctgcaatcaataactcagcggagtgagttgctcaaact

SEQ ID NO: 79656 - DNA, 120 bp, Artificial Sequence
  ENSG00000081189_67 (sequence is synthesized)
ggcaaatgattgtggcagtaaagaagtgtatgtgaaaggaaaatatcccaaggactaatctgatcgggtcttccttcatacttcttaggaaaggcagcattttacttcattcattaattg

SEQ ID NO: 79657 - DNA, 120 bp, Artificial Sequence
  ENSG00000081189_68 (sequence is synthesized)
atcaaatatctcattctatttgtagaaaagtacatttagctatgtattctgctactaactcaattctaaaagttttcatcaaaacagtctttaaacataacatttgcttaaaatttggtt

SEQ ID NO: 79658 - DNA, 120 bp, Artificial Sequence
  ENSG00000081189_69 (sequence is synthesized)
aaaacctactatttttattaatataattcacacagcattcgaatgtttgactttttttcagacttcttaggaaaggcagcattttacttcattcattaattgcaccatttacgtcctgat

SEQ ID NO: 79659 - DNA, 120 bp, Artificial Sequence
  ENSG00000081189_70 (sequence is synthesized)
tgctgtgcatgtggaatatattgaaagataatattaaagtgtaagttttattaaatgttaatttgttttttatttcaataacaaatgagcaatttataataaaaacagttttccaccttt

SEQ ID NO: 79660 - DNA, 120 bp, Artificial Sequence
  ENSG00000081189_71 (sequence is synthesized)
tgaaggattgtaaatgatagggttggcagagttcatagagacacatgttaaatgattaatttcatgagatttgtaccaagttatctctttatgtggaaaactaatactgaaatctaatat

SEQ ID NO: 79661 - DNA, 120 bp, Artificial Sequence
  ENSG00000081189_72 (sequence is synthesized)
aaaaagattcagattacgaggattatggatgaacgtaacagacagctttcctactttgaaaggataggagaggtgacatttacaaagaggaaatttgggttgatgaagaaggcttatgag

SEQ ID NO: 79662 - DNA, 120 bp, Artificial Sequence
  ENSG00000081189_73 (sequence is synthesized)
tgctgtttttatatttgtctaacttgatgaattacttaacattctcccagaaaattaacataacagtgccattgacagagccttgcttgtatttagctattatttctggtaactggtttg

SEQ ID NO: 79663 - DNA, 120 bp, Artificial Sequence
  ENSG00000081189_74 (sequence is synthesized)
catttcccttttccgtgtaaaaaaaatatatatatatatctggtgaacttcactaggctgatgttctaggataagaaaaacattttcttttaaggctttcaatttatagttggaaaaaaa

SEQ ID NO: 79664 - DNA, 120 bp, Artificial Sequence
  ENSG00000081189_75 (sequence is synthesized)
attttagtttagctccctgagacatgaaattctcttgttcagtctgtatccccttaacatgccaacatttagtctctttcttaaaattattattttcactcaagcagatttttactttta

SEQ ID NO: 79665 - DNA, 120 bp, Artificial Sequence
  ENSG00000081189_76 (sequence is synthesized)
atctttaaaatgatgtagaaactactttgaaaaatagcatttctggagtaggatggcttttagtttcaacaaatggaattctgaacgttgagaaagaagggccttaatggctgtgacagc

SEQ ID NO: 79666 - DNA, 120 bp, Artificial Sequence
  ENSG00000081189_77 (sequence is synthesized)
ccagaccccgatgcggacgattccgtaggtcacagccctgagtctgaggacaagtacaggaaaattaacgaagatattgatctaatgatcagcaggcaaagattgtgtgctgttccacct

SEQ ID NO: 79667 - DNA, 120 bp, Artificial Sequence
  ENSG00000081189_78 (sequence is synthesized)
gaaactgatgatttctccagctcgcgaggaaagagtcaacggtttgggattgtgggggagagagagacggagagaaaaaggcagcgcgaagcaaagaaaggaaaatatcccaaggactaa

SEQ ID NO: 79668 - DNA, 120 bp, Artificial Sequence
  ENSG00000081189_79 (sequence is synthesized)
aatttttcataacgggtgaaattgtcacctaatttcattaaaaagattaggaaactttttacaaaaaaaaatacatttcaagtgttagtctttaaaaaagcatagtttgcatcatttaaa

SEQ ID NO: 79669 - DNA, 120 bp, Artificial Sequence
  ENSG00000081189_80 (sequence is synthesized)
tgacttgttaaattacttatgagatcattttaattgttaaaaaataaaactacttgatctgctcctgtctgtgatataccatatatttttaacaaaaaagttatttttattcattttatt

SEQ ID NO: 79670 - DNA, 120 bp, Artificial Sequence
  ENSG00000081189_81 (sequence is synthesized)
ctccatataagcacagcgtctgagcattcttcaccgatgcttggtggggatattagctgtgttctcttacaccctttagctgtcaagtacatcagaagtggaggctgtggggacaggaca

SEQ ID NO: 79671 - DNA, 120 bp, Artificial Sequence
  ENSG00000081189_82 (sequence is synthesized)
gtttgtaaatgagatagcccagtgggagaatgatctttagcatctgtccagaagaaattcttctcgacttgggtctcaaaccactttgccttcatctgcctgcttatgccaaactcaaaa

SEQ ID NO: 79672 - DNA, 120 bp, Artificial Sequence
  ENSG00000081189_83 (sequence is synthesized)
cttgaagtcattccagatattgctttaacctaccagaacttgtactccttacattttgagacgttgagaaagaagggccttaatggctgtgacagcccagaccccgatgcggacgattcc

SEQ ID NO: 79673 - DNA, 120 bp, Artificial Sequence
  ENSG00000081189_84 (sequence is synthesized)
aagtaaagaacggaaggcaaatgattgtggcagtaaagaagtgtatgtgcgctccaacctctcagggtgaaaaccgcgacttctgggcgtgcaggaaaagcacgctggaatcgagtgctg

SEQ ID NO: 79674 - DNA, 120 bp, Artificial Sequence
  ENSG00000081189_85 (sequence is synthesized)
gaagctgcttcctcggtaaatatttccaaactgattagaaagttcatggccccgcgatgaagtcgagatctcaaatactgcaggaacgaatgcaggaatttgggaactgagctgtgcaag

SEQ ID NO: 79675 - DNA, 120 bp, Artificial Sequence
  ENSG00000081189_86 (sequence is synthesized)
tttgaaaggcagtatttgccaacagattcgttcttactgaattacaaatctcagagatttcctgtttaccagaagtcctcttggagtgcatgggatatagaagcagccattttgagcatt

SEQ ID NO: 79676 - DNA, 120 bp, Artificial Sequence
  ENSG00000081189_87 (sequence is synthesized)
cgctttgcaccatcaactgcctagcatctgaaattgaagtcagtcttacataggaacgaatgcaggaatttgggaactgagctgtgcaagtgctgaagaaggagatttgtttggaggaaa

SEQ ID NO: 79677 - DNA, 120 bp, Artificial Sequence
  ENSG00000081189_88 (sequence is synthesized)
agtgtatgtggtgagtgctcacatttgtttttatcatttaccacagagttaccataaaggtaaaactgccaaactccttggccttaggtatttacagaatagacgtgtataacaataata

SEQ ID NO: 79678 - DNA, 120 bp, Artificial Sequence
  ENSG00000081189_89 (sequence is synthesized)
tccgagttcttattccaccaggcagcaagaatacgatgccatcagtgtctgaggatgtcgacctgcttttgaatcaaaggataaataactcccagtcggctcagtcattggctaccccag

SEQ ID NO: 79679 - DNA, 120 bp, Artificial Sequence
  ENSG00000081237_0 (sequence is synthesized)
gacatcatcacctagcagttcatgcagctagcaagtggtttgttcttagggtaacagaggaggaaattgttcctcgtctgataagacaacagtggagaaaggacgcatgctgtttcttag

SEQ ID NO: 79680 - DNA, 120 bp, Artificial Sequence
  ENSG00000081237_1 (sequence is synthesized)
ggacacggctgacttccagatatgaccatgtatttgtggcttaaactcttggcatttggctttgcctttctggacacagaagtatttgtgacagggcaaagcccaacaccttcccccact

SEQ ID NO: 79681 - DNA, 120 bp, Artificial Sequence
  ENSG00000081237_2 (sequence is synthesized)
ggattgactacagcaaagatgcccagtgttccactttcaagtgaccccttacctactcacaccactgcattctcacccgcaagcacctttgaaagagaaaatgacttctcagagaccaca

SEQ ID NO: 79682 - DNA, 120 bp, Artificial Sequence
  ENSG00000081237_3 (sequence is synthesized)
acttctcttagtccagacaatacttccacccaagtatccccggactctttggataatgctagtgcttttaataccacaggtgtttcatcagtacagacgcctcaccttcccacgcacgca

SEQ ID NO: 79683 - DNA, 120 bp, Artificial Sequence
  ENSG00000081237_4 (sequence is synthesized)
gactcgcagacgccctctgctggaactgacacgcagacattcagcggctccgccgccaatgcaaaactcaaccctaccccaggcagcaatgctatctcagatgtcccaggagagaggagt

SEQ ID NO: 79684 - DNA, 120 bp, Artificial Sequence
  ENSG00000081237_5 (sequence is synthesized)
acagccagcacctttcctacagacccagtttccccattgacaaccaccctcagccttgcacaccacagctctgctgccttacctgcacgcacctccaacaccaccatcacagcgaacacc

SEQ ID NO: 79685 - DNA, 120 bp, Artificial Sequence
  ENSG00000081237_6 (sequence is synthesized)
tcagatgcctaccttaatgcctctgaaacaaccactctgagcccttctggaagcgctgtcatttcaaccacaacaatagctactactccatctaagccaacatgtgatgaaaaatatgca

SEQ ID NO: 79686 - DNA, 120 bp, Artificial Sequence
  ENSG00000081237_7 (sequence is synthesized)
aacatcactgtggattacttatataacaaggaaactaaattatttacagcaaagctaaatgttaatgagaatgtggaatgtggaaacaatacttgcacaaacaatgaggtgcataacctt

SEQ ID NO: 79687 - DNA, 120 bp, Artificial Sequence
  ENSG00000081237_8 (sequence is synthesized)
acagaatgtaaaaatgcgtctgtttccatatctcataattcatgtactgctcctgataagacattaatattagatgtgccaccaggggttgaaaagtttcagttacatgattgtacacaa

SEQ ID NO: 79688 - DNA, 120 bp, Artificial Sequence
  ENSG00000081237_9 (sequence is synthesized)
gttgaaaaagcagatactactatttgtttaaaatggaaaaatattgaaacctttacttgtgatacacagaatattacctacagatttcagtgtggtaatatgatatttgataataaagaa

SEQ ID NO: 79689 - DNA, 120 bp, Artificial Sequence
  ENSG00000081237_10 (sequence is synthesized)
attaaattagaaaaccttgaacccgaacatgagtataagtgtgactcagaaatactctataataaccacaagtttactaacgcaagtaaaattattaaaacagattttgggagtccagga

SEQ ID NO: 79690 - DNA, 120 bp, Artificial Sequence
  ENSG00000081237_11 (sequence is synthesized)
gagcctcagattattttttgtagaagtgaagctgcacatcaaggagtaattacctggaatccccctcaaagatcatttcataattttaccctctgttatataaaagagacagaaaaagat

SEQ ID NO: 79691 - DNA, 120 bp, Artificial Sequence
  ENSG00000081237_12 (sequence is synthesized)
tgcctcaatctggataaaaacctgatcaaatatgatttgcaaaatttaaaaccttatacgaaatatgttttatcattacatgcctacatcattgcaaaagtgcaacgtaatggaagtgct

SEQ ID NO: 79692 - DNA, 120 bp, Artificial Sequence
  ENSG00000081237_13 (sequence is synthesized)
gcaatgtgtcatttcacaactaaaagtgctcctccaagccaggtctggaacatgactgtctccatgacatcagataatagtatgcatgtcaagtgtaggcctcccagggaccgtaatggc

SEQ ID NO: 79693 - DNA, 120 bp, Artificial Sequence
  ENSG00000081237_14 (sequence is synthesized)
ccccatgaacgttaccatttggaagttgaagctggaaatactctggttagaaatgagtcgcataagaattgcgatttccgtgtaaaagatcttcaatattcaacagactacacttttaag

SEQ ID NO: 79694 - DNA, 120 bp, Artificial Sequence
  ENSG00000081237_15 (sequence is synthesized)
gcctattttcacaatggagactatcctggagaaccctttattttacatcattcaacatcttataattctaaggcactgatagcatttctggcatttctgattattgtgacatcaatagcc

SEQ ID NO: 79695 - DNA, 120 bp, Artificial Sequence
  ENSG00000081237_16 (sequence is synthesized)
ctgcttgttgttctctacaaaatctatgatctacataagaaaagatcctgcaatttagatgaacagcaggagcttgttgaaagggatgatgaaaaacaactgatgaatgtggagccaatc

SEQ ID NO: 79696 - DNA, 120 bp, Artificial Sequence
  ENSG00000081237_17 (sequence is synthesized)
catgcagatattttgttggaaacttataagaggaagattgctgatgaaggaagactttttctggctgaatttcagagcatcccgcgggtgttcagcaagtttcctataaaggaagctcga

SEQ ID NO: 79697 - DNA, 120 bp, Artificial Sequence
  ENSG00000081237_18 (sequence is synthesized)
aagccctttaaccagaataaaaaccgttatgttgacattcttccttatgattataaccgtgttgaactctctgagataaacggagatgcagggtcaaactacataaatgccagctatatt

SEQ ID NO: 79698 - DNA, 120 bp, Artificial Sequence
  ENSG00000081237_19 (sequence is synthesized)
gatggtttcaaagaacccaggaaatacattgctgcacaaggtcccagggatgaaactgttgatgatttctggaggatgatttgggaacagaaagccacagttattgtcatggtcactcga

SEQ ID NO: 79699 - DNA, 120 bp, Artificial Sequence
  ENSG00000081237_20 (sequence is synthesized)
tgtgaagaaggaaacaggaacaagtgtgcagaatactggccgtcaatggaagagggcactcgggcttttggagatgttgttgtaaagatcaaccagcacaaaagatgtccagattacatc

SEQ ID NO: 79700 - DNA, 120 bp, Artificial Sequence
  ENSG00000081237_21 (sequence is synthesized)
attcagaaattgaacattgtaaataaaaaagaaaaagcaactggaagagaggtgactcacattcagttcaccagctggccagaccacggggtgcctgaggatcctcacttgctcctcaaa

SEQ ID NO: 79701 - DNA, 120 bp, Artificial Sequence
  ENSG00000081237_22 (sequence is synthesized)
cacaggaacctatatcggaattgatgccatgctagaaggcctggaagccgagaacaaagtggatgtttatggttatgttgtcaagctaaggcgacagagatgcctgatggttcaagtaga

SEQ ID NO: 79702 - DNA, 120 bp, Artificial Sequence
  ENSG00000081237_23 (sequence is synthesized)
ggcccagtacatcttgatccatcaggctttggtggaatacaatcagtttggagaaacagaagtgaatttgtctgaattacatccatatctacataacatgaagaaaagggatccacccag

SEQ ID NO: 79703 - DNA, 120 bp, Artificial Sequence
  ENSG00000081237_24 (sequence is synthesized)
tgagccgtctccactagaggctgaattccagagacttccttcatataggagctggaggacacagcacattggaaatcaagaagaaaataaaagtaaaaacaggaattctaatgtcatccc

SEQ ID NO: 79704 - DNA, 120 bp, Artificial Sequence
  ENSG00000081237_25 (sequence is synthesized)
atatgactataacagagtgccacttaaacatgagctggaaatgagtaaagagagtgagcatgattcagatgaatcctctgatgatgacagtgattcagaggaaccaagcaaatacatcaa

SEQ ID NO: 79705 - DNA, 120 bp, Artificial Sequence
  ENSG00000081237_26 (sequence is synthesized)
tgcatcttttataatgagctactggaaacctgaagtgatgattgctgctcagggaccactgaaggagaccattggtgacttttggcagatgatcttccaaagaaaagtcaaagttattgt

SEQ ID NO: 79706 - DNA, 120 bp, Artificial Sequence
  ENSG00000081237_27 (sequence is synthesized)
tatgctgacagaactgaaacatggagaccaggaaatctgtgctcagtactggggagaaggaaagcaaacatatggagatattgaagttgacctgaaagacacagacaaatcttcaactta

SEQ ID NO: 79707 - DNA, 120 bp, Artificial Sequence
  ENSG00000081237_28 (sequence is synthesized)
tacccttcgtgtctttgaactgagacattccaagaggaaagactctcgaactgtgtaccagtaccaatatacaaactggagtgtggagcagcttcctgcagaacccaaggaattaatctc

SEQ ID NO: 79708 - DNA, 120 bp, Artificial Sequence
  ENSG00000081237_29 (sequence is synthesized)
tatgattcaggtcgtcaaacaaaaacttccccagaagaattcctctgaagggaacaagcatcacaagagtacacctctactcattcactgcagggatggatctcagcaaacgggaatatt

SEQ ID NO: 79709 - DNA, 120 bp, Artificial Sequence
  ENSG00000081237_30 (sequence is synthesized)
ttgtgctttgttaaatctcttagaaagtgcggaaacagaagaggtagtggatatttttcaagtggtaaaagctctacgcaaagctaggccaggcatggtttccacattcgagcaatatca

SEQ ID NO: 79710 - DNA, 120 bp, Artificial Sequence
  ENSG00000081237_31 (sequence is synthesized)
attcctatatgacgtcattgccagcacctaccctgctcagaatggacaagtaaagaaaaacaaccatcaagaagataaaattgaatttgataatgaagtggacaaagtaaagcaggatgc

SEQ ID NO: 79711 - DNA, 120 bp, Artificial Sequence
  ENSG00000081237_32 (sequence is synthesized)
taattgtgttaatccacttggtgccccagaaaagctccctgaagcaaaggaacaggctgaaggttctgaacccacgagtggcactgaggggccagaacattctgtcaatggtcctgcaag

SEQ ID NO: 79712 - DNA, 120 bp, Artificial Sequence
  ENSG00000081237_33 (sequence is synthesized)
tccagctttaaatcaaggttcataggaaaagacataaatgaggaaactccaaacctcctgttagctgttatttctatttttgtagaagtaggaagtgaaaataggtatacagtggattaa

SEQ ID NO: 79713 - DNA, 120 bp, Artificial Sequence
  ENSG00000081237_34 (sequence is synthesized)
ttaaatgcagcgaaccaatatttgtagaagggttatattttactactgtggaaaaatatttaagatagttttgccagaacagtttgtacagacgtatgcttattttaaaattttatctct

SEQ ID NO: 79714 - DNA, 120 bp, Artificial Sequence
  ENSG00000081237_35 (sequence is synthesized)
tattcagtaaaaaacaacttctttgtaatcgttatgtgtgtatatgtatgtgtgtatgggtgtgtgtttgtgtgagagacagagaaagagagagaattctttcaagtgaatctaaaagct

SEQ ID NO: 79715 - DNA, 120 bp, Artificial Sequence
  ENSG00000081237_36 (sequence is synthesized)
tttgcttttcctttgtttttatgaagaaaaaatacattttatattagaagtgttaacttagcttgaaggatctgtttttaaaaatcataaactgtgtgcagactcaataaaatcatgtac

SEQ ID NO: 79716 - DNA, 120 bp, Artificial Sequence
  ENSG00000081237_37 (sequence is synthesized)
atttctgaaatgacctcaagatgtcctccttgttctactcatatatatctatcttatatagtttactattttacttctagagatagtacataaaggtggtatgtgtgtgtatgctactac

SEQ ID NO: 79717 - DNA, 120 bp, Artificial Sequence
  ENSG00000081237_38 (sequence is synthesized)
aaaaaagttgttaactaaattaacattgggaaatcttatattccatatattagcatttagtccaatgtctttttaagcttatttaattaaaaaatttccagtgagcttatcatgctgtct

SEQ ID NO: 79718 - DNA, 120 bp, Artificial Sequence
  ENSG00000081237_39 (sequence is synthesized)
ttacatggggttttcaattttgcatgctcgattattccctgtacaatatttaaaatttattgcttgatacttttgacaacaaattaggttttgtacaattgaacttaaataaatgtcatt

SEQ ID NO: 79719 - DNA, 120 bp, Artificial Sequence
  ENSG00000081237_40 (sequence is synthesized)
atatgaaaaatatgatattgcatatgcatagttcccatgttaaatcccattcataactttcattaaagcatttactttgaatttctccaatgcttagaatgtttttaccaggaatggatg

SEQ ID NO: 79720 - DNA, 120 bp, Artificial Sequence
  ENSG00000081237_41 (sequence is synthesized)
tcgctaatcataataaaattcaaccattatttttttcttgtttataatacattgtgttatatgttcaaatatgaaatgtgtatgcacctattgaaatatgtttaatgcatttattaacat

SEQ ID NO: 79721 - DNA, 120 bp, Artificial Sequence
  ENSG00000081237_42 (sequence is synthesized)
ttgcaggacacttttacaggccccaattatccaatagtctaataattgtttaagatctagaaaaaaaaaatcaagaatagtggtatttttcatgaagtaataaaaactcgttttggtgaa

SEQ ID NO: 79722 - DNA, 120 bp, Artificial Sequence
  ENSG00000081237_43 (sequence is synthesized)
agccacaccatccccatgtgcctggtgatgtgctctcacaagggccttccacccactctacctcgggctcctttctttaagttgcattaagtgtttgaatcctgagggtgatggaacagc

SEQ ID NO: 79723 - DNA, 120 bp, Artificial Sequence
  ENSG00000081237_44 (sequence is synthesized)
aggaagatatttctctgcttagcagtgcaacagctgatgagatcaggatgtaattgttactgtcataattcatcagaaagcatgtgtgagaaacaaccacatctactagaactttttctc

SEQ ID NO: 79724 - DNA, 120 bp, Artificial Sequence
  ENSG00000081237_45 (sequence is synthesized)
acaggggtttaggtcttagtaaggaaaagaacaagcccatcaaaggggctgtccattgcaagtggtgagcatcagacggctgatggcagagttcccgttaagcagtgagagggcgtggag

SEQ ID NO: 79725 - DNA, 120 bp, Artificial Sequence
  ENSG00000081237_46 (sequence is synthesized)
ataaaggaaagagaaactgaggaatggctgcagcaatggtggtatctgtgaatcagcaagtaagctgatcagagcttgcaagcccacaattctcctcaaattcttccaacccaaaatcaa

SEQ ID NO: 79726 - DNA, 120 bp, Artificial Sequence
  ENSG00000081237_47 (sequence is synthesized)
aactgagacattccaaggtatggaaacaatttggggagtatatttctttgatataatggatctggtagcaaaatgaatataaattactctatgcaggcaaggccatcatataaataatgt

SEQ ID NO: 79727 - DNA, 120 bp, Artificial Sequence
  ENSG00000081237_48 (sequence is synthesized)
ttcagaataacattttaaaattatttaaatagaagtaactgtgaagaaaatatgactatcaaattagaaaataagctgaacttcactccagttaatgctctcttcaattctgattttaga

SEQ ID NO: 79728 - DNA, 120 bp, Artificial Sequence
  ENSG00000081237_49 (sequence is synthesized)
actctaaaacaaattaaatgagcccagatgcatttctttaaattttattttgaattcatcatttgtcaaaatatggttatcaataatgcatgcttataatatgaagaatgctttatccat

SEQ ID NO: 79729 - DNA, 120 bp, Artificial Sequence
  ENSG00000081237_50 (sequence is synthesized)
ccacttattcaatgtgcagctattgctagttgatgaatttggaatttcagtcactcttaggaatatgaaaccacagaacaaatgtccttttaacagagatgaaataatagtgagaattgt

SEQ ID NO: 79730 - DNA, 120 bp, Artificial Sequence
  ENSG00000081237_51 (sequence is synthesized)
gagactacagcaaaaatctgctcaggaggaaagagttattcagaatagtctattttttatatatttcaggcaattaccattctacagggaaaactttttgttagaagtaagaaataatat

SEQ ID NO: 79731 - DNA, 120 bp, Artificial Sequence
  ENSG00000081237_52 (sequence is synthesized)
gcataaatctttacttaaagactttgtaccaacaaacaaaagggtgaagagtgattcctattatcagtgaagggcagtgagaaattgtaaccacaatgaaactgttatttaaagaatgag

SEQ ID NO: 79732 - DNA, 120 bp, Artificial Sequence
  ENSG00000081237_53 (sequence is synthesized)
gaagcagggtttgctgtaactatagtagaaatgacattctgattccactcctagcttcacaaggatatctgtgaaagatttggggcaaaactgttaagctgtctgaaagtgcttttgcat

SEQ ID NO: 79733 - DNA, 120 bp, Artificial Sequence
  ENSG00000081237_54 (sequence is synthesized)
aagaaatgggttttactgctaaaactgtcatattgctgagttttgaatgccctaatggtaaatgatactgggttgccaaaaataaccagattagtagttttttcattcatttggccgtct

SEQ ID NO: 79734 - DNA, 120 bp, Artificial Sequence
  ENSG00000081237_55 (sequence is synthesized)
agggaagctgacagttcagccttcagttggtggccaaaggcccgagagcccctcacaaaccactggagtaagtccaagagtccaaaagctgaggaacttggagtctgatgttcaagagca

SEQ ID NO: 79735 - DNA, 120 bp, Artificial Sequence
  ENSG00000081237_56 (sequence is synthesized)
ggaagcagccagcacgagagaaagatgaagaccagaagactcagcaagctcacttctcctaccttcttgtgcctgctttttctagccgtgctggcagttgcttggatgatgcccactcat

SEQ ID NO: 79736 - DNA, 90 bp, Artificial Sequence
  ENSG00000081237_57 (sequence is synthesized)
tctagccgtgctggcagttgcttggatgatgcccactcatattgggtgggggtgggggggttggggagggtctgcctcccttggcaatac

SEQ ID NO: 79737 - DNA, 120 bp, Artificial Sequence
  ENSG00000081237_58 (sequence is synthesized)
tcaatattaaccatcaaatactattataaggagaatgttgcatgattttccttctagtctgtttgtaattcacatctaatgaaagagtgagagtggacgataaagggaacttgttgaaac

SEQ ID NO: 79738 - DNA, 120 bp, Artificial Sequence
  ENSG00000081237_59 (sequence is synthesized)
atttctctcaaagcaaaagggatcattggaagcaggcagacaccagaattggtttaacctaaaaataacaaattaataattatcaagtctataatgatgacagtgacttaatgtgaatag

SEQ ID NO: 79739 - DNA, 120 bp, Artificial Sequence
  ENSG00000081237_60 (sequence is synthesized)
aaagaattctaaactctctccttccttcctccctcccttctttcctactttctttccactccctttctcccacccccttttcttttcctttcttttctcccaccctctctccctcccttt

SEQ ID NO: 79740 - DNA, 120 bp, Artificial Sequence
  ENSG00000081237_61 (sequence is synthesized)
cttttattcaatgcatagtagttgaaaaaatctaaagttagacctgattttacactgaagactagaggtagttactatcctattactgtacttagttggctatgctggcatgtcattatg

SEQ ID NO: 79741 - DNA, 120 bp, Artificial Sequence
  ENSG00000081237_62 (sequence is synthesized)
ggtaaaagtttgatggatttatttgtgagttatttggttatgaaaatctagagattgaagtttttcattagaaaataacacacataacaagtctatgatcattttgcatttctgtaatca

SEQ ID NO: 79742 - DNA, 120 bp, Artificial Sequence
  ENSG00000081237_63 (sequence is synthesized)
cagaatagttctgcaatatttcatgtatattggaattgaagttcaattgaattttatctgtatttagtaaaaattaactttagctttgatactaatgaataaagctgggttttttattta

SEQ ID NO: 79743 - DNA, 120 bp, Artificial Sequence
  ENSG00000081237_64 (sequence is synthesized)
tatttaactacaattttctattattaacactgaaattatttttaaggataaattttataatcatgagtgattcttgacattcacttgttcttaaactttctgcttatacgttatagagtt

SEQ ID NO: 79744 - DNA, 120 bp, Artificial Sequence
  ENSG00000081237_65 (sequence is synthesized)
taataactacctaaacatgttattaaatttgtatatatattttgtgtataaatagtaacttttcccaaacttgacagtaaatcacacaacaggtttctactctcttttaatattttaaga

SEQ ID NO: 79745 - DNA, 120 bp, Artificial Sequence
  ENSG00000081237_66 (sequence is synthesized)
acagctgtctatgtatgttatagatatgtagataacagatttgcatatgtctatatttctttaagagtatgttgcttttttcaatggtatgcaaaacctttgagactattgagatatttt

SEQ ID NO: 79746 - DNA, 120 bp, Artificial Sequence
  ENSG00000081237_67 (sequence is synthesized)
taaataataattttcaaattctactgaacacttcaatagtccttataaatgtcttaatcatgagataaatttaaaacacagagatgctgcaaataaattcatacatagtacatacaaaat

SEQ ID NO: 79747 - DNA, 120 bp, Artificial Sequence
  ENSG00000081237_68 (sequence is synthesized)
aagagaaaaaattaaattgcagatggttaaatatcacatcacttaactgatgttactgaaaatgtattttcctgcataatcatatggttgacagtatgcattaagaaggtaagtaaaaca

SEQ ID NO: 79748 - DNA, 120 bp, Artificial Sequence
  ENSG00000081237_69 (sequence is synthesized)
atgaagacaattttgatttaatatggtaatgcacaattccaactaacgtacattcaacagatcatgaaattgggttattaaaatgaatatttttgtcattaaataaaaattccgtccaaa

SEQ ID NO: 79749 - DNA, 120 bp, Artificial Sequence
  ENSG00000081248_0 (sequence is synthesized)
agtccccaaggcgggggcattggggacacagggaagggaaagcactggggtgggggagcaggagaaagccagattcccagggaagccatggagccatcctcaccccaggatgaaggcctg

SEQ ID NO: 79750 - DNA, 120 bp, Artificial Sequence
  ENSG00000081248_1 (sequence is synthesized)
aggaagaaacagcccaagaagccagttcctgagattctgccaaggccaccccgggccttgttctgcctgaccctggagaaccccctgaggaaggcctgcatcagcattgtagaatggaag

SEQ ID NO: 79751 - DNA, 120 bp, Artificial Sequence
  ENSG00000081248_2 (sequence is synthesized)
cccttcgagacgatcatcttgctcaccatctttgccaattgtgtggccctggccgtgtacctgcccatgccggaagatgacaacaactctctgaacctcggcctggagaagctggagtat

SEQ ID NO: 79752 - DNA, 120 bp, Artificial Sequence
  ENSG00000081248_3 (sequence is synthesized)
ttcttcctcattgtcttctcgattgaagccgccatgaagatcattgcctacggcttcttattccaccaggacgcttacctgcgcagtggctggaatgtgctggacttcaccattgtcttc

SEQ ID NO: 79753 - DNA, 120 bp, Artificial Sequence
  ENSG00000081248_4 (sequence is synthesized)
ctgggggtcttcaccgtgattctggaacaggttaacgtcatccaaagccacacagccccaatgagcagcaaaggagccggcttggatgtcaaggccctcagagccttccgagtgctcaga

SEQ ID NO: 79754 - DNA, 120 bp, Artificial Sequence
  ENSG00000081248_5 (sequence is synthesized)
cccctccggctggtgtcgggggtgcctagcctgcaggtggtcctgaactccatcttcaaggccatgctccccctctttcacatcgccctgctggtcctctttatggtcatcatctatgcc

SEQ ID NO: 79755 - DNA, 120 bp, Artificial Sequence
  ENSG00000081248_6 (sequence is synthesized)
atcatcgggctggagctcttcaagggcaagatgcacaagacctgctacttcattggtacagatatcgtggccacggtggagaatgaagagccatcgccctgcgccaggacgggctcaggg

SEQ ID NO: 79756 - DNA, 120 bp, Artificial Sequence
  ENSG00000081248_7 (sequence is synthesized)
cgccggtgcaccatcaatggcagtgagtgccggggcggctggccagggcccaaccatggcatcacccacttcgacaacttcggcttctccatgctcaccgtgtaccagtgcattaccatg

SEQ ID NO: 79757 - DNA, 120 bp, Artificial Sequence
  ENSG00000081248_8 (sequence is synthesized)
gagggatggactgacgtcctttactgggtcaatgatgccatcgggaatgagtggccctggatctattttgtcaccctcattttgctgggatccttcttcatcctcaacctggtgctgggt

SEQ ID NO: 79758 - DNA, 120 bp, Artificial Sequence
  ENSG00000081248_9 (sequence is synthesized)
gtcctgagtggggaattcaccaaggagcgggagaaggccaagtccaggggaaccttccagaagctccgggagaagcagcaactagatgaggaccttcggggctacatgagctggatcacg

SEQ ID NO: 79759 - DNA, 120 bp, Artificial Sequence
  ENSG00000081248_10 (sequence is synthesized)
cagggcgaggtcatggatgttgaggacttcagagaaggaaaactgtctttggatgaaggtggctctgacacagagagcctgtatgaaattgcaggcttgaacaaaatcatccagttcatc

SEQ ID NO: 79760 - DNA, 120 bp, Artificial Sequence
  ENSG00000081248_11 (sequence is synthesized)
cgacattggaggcagtggaaccgcatctttcgctggaagtgccatgacatcgtgaagtccaaggtcttctattggctggtgattctcatcgttgccctcaacaccctgtctatcgcctca

SEQ ID NO: 79761 - DNA, 120 bp, Artificial Sequence
  ENSG00000081248_12 (sequence is synthesized)
gagcaccacaaccagcctctctggctgacccgtttgcaagacattgccaaccgggtgctgctgtccctcttcaccactgagatgctgatgaagatgtacgggctgggcctgcgccagtac

SEQ ID NO: 79762 - DNA, 120 bp, Artificial Sequence
  ENSG00000081248_13 (sequence is synthesized)
ttcatgtctatcttcaaccgcttcgactgcttcgtggtgtgtagcggtatcctggagatcctgctggtggagtcgggtgccatgacacccctgggcatctccgtgctccgctgcatccgc

SEQ ID NO: 79763 - DNA, 120 bp, Artificial Sequence
  ENSG00000081248_14 (sequence is synthesized)
ctcctgaggatcttcaagatcaccaaatattggacgtcgctgagcaacctggtggcatccctgctcaactccatccgctccatcgcctccctgctgctgctgctcttcctcttcatcgtc

SEQ ID NO: 79764 - DNA, 120 bp, Artificial Sequence
  ENSG00000081248_15 (sequence is synthesized)
atcttcgccctcctgggcatgcagctctttggggggaggtatgactttgaagacacagaagtacggcgcagcaactttgacaactttccccaagccctcatcagcgtcttccaggtactg

SEQ ID NO: 79765 - DNA, 120 bp, Artificial Sequence
  ENSG00000081248_16 (sequence is synthesized)
acaggggaagactggacctcaatgatgtacaatgggatcatggcctacggcgggccgtcctaccctggcatgcttgtgtgcatttacttcatcatccttttcgtctgtggcaactacatc

SEQ ID NO: 79766 - DNA, 120 bp, Artificial Sequence
  ENSG00000081248_17 (sequence is synthesized)
ctgctcaatgtcttcctggccattgccgtggacaacctggccgaggcggagagcctgacttctgcccagaaggccaaggctgaggagaaaaaacgcaggaagatgtccaagggtctccca

SEQ ID NO: 79767 - DNA, 120 bp, Artificial Sequence
  ENSG00000081248_18 (sequence is synthesized)
gacaagtcagaagaggagaagtcaacgatggccaagaagctggagcagaaacccaagggtgagggcatccccaccactgccaagctgaaaatcgatgagtttgaatctaatgtcaatgag

SEQ ID NO: 79768 - DNA, 120 bp, Artificial Sequence
  ENSG00000081248_19 (sequence is synthesized)
gtgaaggatccctacccctcagccgacttcccaggggatgacgaggaagatgagcctgagatcccgctgagcccccgaccacgtcccctggctgagctgcagctgaaagagaaggccgtg

SEQ ID NO: 79769 - DNA, 120 bp, Artificial Sequence
  ENSG00000081248_20 (sequence is synthesized)
cccattccagaagccagctccttcttcatcttcagccccaccaataagatccgtgtcctgtgtcaccgcatcgtcaatgccacctggtttaccaacttcatcctgctcttcatcctgctc

SEQ ID NO: 79770 - DNA, 120 bp, Artificial Sequence
  ENSG00000081248_21 (sequence is synthesized)
agcagcgctgcactggctgcggaagaccccatccgggctgattccatgagaaatcagatccttaaacactttgacatcgggttcacctctgtcttcactgtggagattgtcctcaagatg

SEQ ID NO: 79771 - DNA, 120 bp, Artificial Sequence
  ENSG00000081248_22 (sequence is synthesized)
acgacctacggagccttcctgcacaagggttccttctgccgcaattacttcaacatgctggacctgctggtggtggccgtgtccctcatctccatgggacttgagtccagtgccatctcc

SEQ ID NO: 79772 - DNA, 120 bp, Artificial Sequence
  ENSG00000081248_23 (sequence is synthesized)
gtggtgaagatcctgagggtgctgagggtgctccgaccactcagagccatcaacagagccaaggggttgaagcacgtggtgcagtgcatgttcgtggccatcagcaccatcgggaacatc

SEQ ID NO: 79773 - DNA, 120 bp, Artificial Sequence
  ENSG00000081248_24 (sequence is synthesized)
gtgctggtcactaccctcctacagttcatgtttgcctgcatcggcgtccagctcttcaaggggaagttcttcaggtgcaccgacttgtccaagatgacagaggaggagtgcaggggctac

SEQ ID NO: 79774 - DNA, 120 bp, Artificial Sequence
  ENSG00000081248_25 (sequence is synthesized)
tgcagatagagctgcgtcaccgcgagtgggtacacagcgacttccacttcgacaatgtgctctcagccatgatgtccctcttcacggtctccaccttcgagggatggcctcagctgctgt

SEQ ID NO: 79775 - DNA, 120 bp, Artificial Sequence
  ENSG00000081248_26 (sequence is synthesized)
acaaggccatagactccaatgcggaggacgtgggtcccatctacaacaaccgtgtggagatggccatcttcttcatcatctacatcatcctcattgccttcttcatgatgaacatctttg

SEQ ID NO: 79776 - DNA, 120 bp, Artificial Sequence
  ENSG00000081248_27 (sequence is synthesized)
tgggcttcgtcattgtcaccttccaggagcagggagagactgagtacaagaactgtgagctggacaagaaccagcgccaatgtgtacagtatgccctgaaggcccgcccactgaggtgct

SEQ ID NO: 79777 - DNA, 120 bp, Artificial Sequence
  ENSG00000081248_28 (sequence is synthesized)
acattcccaaaaacccataccagtaccaggtgtggtacattgtcacctcctcctactttgaatacctgatgtttgccctcatcatgctcaacaccatctgcctcggcatgcagcactaca

SEQ ID NO: 79778 - DNA, 120 bp, Artificial Sequence
  ENSG00000081248_29 (sequence is synthesized)
accagtcggagcagatgaaccacatctcagacatcctcaatgtggccttcactatcatcttcaccctggagatgatcctcaagctcatggccttcaaggccaggggctactttggagacc

SEQ ID NO: 79779 - DNA, 120 bp, Artificial Sequence
  ENSG00000081248_30 (sequence is synthesized)
cctggaatgtgtttgacttcctgattgtcattggcagcatcattgatgtcatcctcagtgagatcgacactttcctggcctccagcgggggactgtattgcctgggtggaggctgcggga

SEQ ID NO: 79780 - DNA, 120 bp, Artificial Sequence
  ENSG00000081248_31 (sequence is synthesized)
acgttgacccagatgagagtgcccgcatctccagcgccttcttccgcctgttccgtgtcatgaggctgatcaagctgctgagccgggcagaaggagtgcgaaccctcctgtggacgttca

SEQ ID NO: 79781 - DNA, 120 bp, Artificial Sequence
  ENSG00000081248_32 (sequence is synthesized)
tcaagtccttccaggccctaccctacgtggctctgctcatcgtcatgctcttcttcatctacgctgtcatcggcatgcagatgtttgggaagatcgccttggtggatgggacccaaataa

SEQ ID NO: 79782 - DNA, 120 bp, Artificial Sequence
  ENSG00000081248_33 (sequence is synthesized)
accggaacaacaacttccagaccttcccacaagctgtgctactgctcttcaggtgtgcaacaggtgaggcctggcaggagatcctactggcctgcagctatgggaagctgtgtgacccag

SEQ ID NO: 79783 - DNA, 120 bp, Artificial Sequence
  ENSG00000081248_34 (sequence is synthesized)
agtcggactatgccccaggggaggagtacacatgtggcaccaactttgcatactactacttcatcagcttctacatgctctgtgccttcctggtcatcaacctctttgtggctgtcatca

SEQ ID NO: 79784 - DNA, 120 bp, Artificial Sequence
  ENSG00000081248_35 (sequence is synthesized)
tggacaattttgactacctcacccgggactggtccatcctgggccctcatcacctggatgagttcaaggccatctgggcagagtatgacccagaggctaaggggagaatcaaacacctgg

SEQ ID NO: 79785 - DNA, 120 bp, Artificial Sequence
  ENSG00000081248_36 (sequence is synthesized)
acgtggtgaccctgctgagaaggattcagccccctctgggctttgggaagttctgcccacatcgggtagcttgtaagcggctggtgggcatgaacatgcccctgaacagcgacggcacag

SEQ ID NO: 79786 - DNA, 120 bp, Artificial Sequence
  ENSG00000081248_37 (sequence is synthesized)
tcaccttcaatgccacactctttgccctggtccgcacggcactcaagatcaagacggaaggtaactttgagcaggccaacgaggagctgagggccatcatcaagaagatctggaagagaa

SEQ ID NO: 79787 - DNA, 120 bp, Artificial Sequence
  ENSG00000081248_38 (sequence is synthesized)
ccagcatgaagctcttggaccaggtcatccctccaataggagatgatgaggtgacagtggggaagttctacgccacattcctcatccaggagcacttccggaagttcatgaaacgccaag

SEQ ID NO: 79788 - DNA, 120 bp, Artificial Sequence
  ENSG00000081248_39 (sequence is synthesized)
aggagtattatggctatcggcccaagaaggacattgtacagatccaggcagggctgcggaccattgaggaagaggcagcccccgagatctgtcgcacggtctcaggagacctggctgctg

SEQ ID NO: 79789 - DNA, 120 bp, Artificial Sequence
  ENSG00000081248_40 (sequence is synthesized)
aggaggagctggagagagccatggtggaggctgcgatggaggagggaatattccggaggactggaggcctgtttggccaggtggacaacttcctggaaaggaccaactccctgccccccg

SEQ ID NO: 79790 - DNA, 120 bp, Artificial Sequence
  ENSG00000081248_41 (sequence is synthesized)
tcatggccaatcagagacccctccagtttgctgagatagagatggaagagatggagtcacctgtcttcttggaggacttcccacaagatccacgcaccaaccccctggctcgtgccaata

SEQ ID NO: 79791 - DNA, 120 bp, Artificial Sequence
  ENSG00000081248_42 (sequence is synthesized)
ccaacaatgccaacgccaatgtcgcctatggcaacagcaaccatagcaacagccatgtgttttccagtgtccactatgaaagggagttcccagaagagacagagacgcctgctaccagag

SEQ ID NO: 79792 - DNA, 120 bp, Artificial Sequence
  ENSG00000081248_43 (sequence is synthesized)
gacgagcccttggccaaccctgcagggtcctgggaccccacagcaaaccctgtgtggagatgctgaagggactgctgacccagagggcaatgcccagaggccaggcacctcctgccccct

SEQ ID NO: 79793 - DNA, 120 bp, Artificial Sequence
  ENSG00000081248_44 (sequence is synthesized)
gccagtgccccagggtggagtcctccatgcctgaggacagaaagagctccacaccagggtctcttcatgaggagacaccccacagcaggagcaccagggagaatacttccaggtgctcag

SEQ ID NO: 79794 - DNA, 120 bp, Artificial Sequence
  ENSG00000081248_45 (sequence is synthesized)
caccagctacagccctgctgatccaaaaggctctggttcgagggggcctgggcaccttggcagctgatgcaaacttcatcatggcaacaggccaggccctggcagatgcctgccaaatgg

SEQ ID NO: 79795 - DNA, 120 bp, Artificial Sequence
  ENSG00000081248_46 (sequence is synthesized)
aaccagaggaagtggagatcatggcaacagagctactgaaaggacgagaggccccagagggcatggccagctccctgggatgcctgaacctcgggtcctccctgggcagcctcgaccaac

SEQ ID NO: 79796 - DNA, 120 bp, Artificial Sequence
  ENSG00000081248_47 (sequence is synthesized)
accagggctcccaggagacccttattcctccaaggctgtgatgcccacacagcatcagcatgggcttagagctggcatgaccaatgggggtggggaagttgctggggtggagaagggcta

SEQ ID NO: 79797 - DNA, 120 bp, Artificial Sequence
  ENSG00000081248_48 (sequence is synthesized)
gcccaccgcagcagcctccctccctctcagcagctagatgcatggcctgaggcagggtggtcaggaaccacctcaaaaagtgcggaggaagtagctggacaggccctgcccctcaccagc

SEQ ID NO: 79798 - DNA, 120 bp, Artificial Sequence
  ENSG00000081248_49 (sequence is synthesized)
aagaggcatgattggatggagcttctaatgtcattcaaaaaggcctggtcagtgcctgtctggcctagggccactcccacctgcaggacattaaaatctccaggcctgtgacactggcaa

SEQ ID NO: 79799 - DNA, 120 bp, Artificial Sequence
  ENSG00000081277_0 (sequence is synthesized)
gggtggtgcagggcaggggtggtatatcctgtctgacggagggcgggcctcgccagtgccagagagggacgaaccagggtggaagcgccaggagcagctgcagggagccctcacgcggac

SEQ ID NO: 79800 - DNA, 120 bp, Artificial Sequence
  ENSG00000081277_1 (sequence is synthesized)
cacgcactctatggccgtagggagccgctgagagcgagaagagcacgctcctgcccgcccgctgcaccgcacctcgcctcgcctctctgctctcctaggccccggccgcgcgccacccgc

SEQ ID NO: 79801 - DNA, 120 bp, Artificial Sequence
  ENSG00000081277_2 (sequence is synthesized)
ctcccgccaccatgaaccactcgccgctcaagaccgccttggcgtacgaatgcttccaggaccaggacaactccacgttggctttgccgtcggaccaaaagatgaaaacaggcacgtctg

SEQ ID NO: 79802 - DNA, 120 bp, Artificial Sequence
  ENSG00000081277_3 (sequence is synthesized)
gcaggcagcgcgtgcaggagcaggtgatgatgaccgtcaagcggcagaagtccaagtcttcccagtcgtccaccctgagccactccaatcgaggttccatgtatgatggcttggctgaca

SEQ ID NO: 79803 - DNA, 120 bp, Artificial Sequence
  ENSG00000081277_4 (sequence is synthesized)
attacaactatgggaccaccagcaggagcagctactactccaagttccaggcagggaatggctcatggggatatccgatctacaatggaaccctcaagcgggagcctgacaacaggcgct

SEQ ID NO: 79804 - DNA, 120 bp, Artificial Sequence
  ENSG00000081277_5 (sequence is synthesized)
tcagctcctacagccagatggagaactggagccggcactacccccggggcagctgtaacaccaccggcgcaggcagcgacatctgcttcatgcagaaaatcaaggcgagccgcagtgagc

SEQ ID NO: 79805 - DNA, 120 bp, Artificial Sequence
  ENSG00000081277_6 (sequence is synthesized)
ccgacctctactgtgacccacggggcaccctgcgcaagggcacgctgggcagcaagggccagaagaccacccagaaccgctacagcttttacagcacctgcagtggtcagaaggccataa

SEQ ID NO: 79806 - DNA, 120 bp, Artificial Sequence
  ENSG00000081277_7 (sequence is synthesized)
agaagtgccctgtgcgcccgccctcttgtgcctccaagcaggaccctgtgtatatcccgcccatctcctgcaacaaggacctgtcctttggccactctagggccagctccaagatctgca

SEQ ID NO: 79807 - DNA, 120 bp, Artificial Sequence
  ENSG00000081277_8 (sequence is synthesized)
gtgaggacatcgagtgcagtgggctgaccatccccaaggctgtgcagtacctgagctcccaggatgagaagtaccaggccattggggcctattacatccagcatacctgcttccaggatg

SEQ ID NO: 79808 - DNA, 120 bp, Artificial Sequence
  ENSG00000081277_9 (sequence is synthesized)
aatctgccaagcaacaggtctatcagctgggaggcatctgcaagctggtggacctcctccgcagccccaaccagaacgtccagcaggccgcggcaggggccctgcgcaacctggtgttca

SEQ ID NO: 79809 - DNA, 120 bp, Artificial Sequence
  ENSG00000081277_10 (sequence is synthesized)
ggagcaccaccaacaagctggagacccggaggcagaatgggatccgcgaggcagtcagcctcctgaggagaaccgggaacgccgagatccagaagcagctgactgggctgctctggaacc

SEQ ID NO: 79810 - DNA, 120 bp, Artificial Sequence
  ENSG00000081277_11 (sequence is synthesized)
tgtcttccactgacgagctgaaggaggaactcattgccgacgccctgcctgttctggccgaccgcgtcatcattcccttctctggctggtgcgatggcaatagcaacatgtcccgggaag

SEQ ID NO: 79811 - DNA, 120 bp, Artificial Sequence
  ENSG00000081277_12 (sequence is synthesized)
tggtggaccctgaggtcttcttcaatgccacaggctgcttgaggaacctgagctcggccgatgcaggccgccagaccatgcgtaactactcagggctcattgattccctcatggcctatg

SEQ ID NO: 79812 - DNA, 120 bp, Artificial Sequence
  ENSG00000081277_13 (sequence is synthesized)
tccagaactgtgtagcggccagccgctgtgacgacaagtctgtggaaaactgcatgtgtgttctgcacaacctctcctaccgcctggacgccgaggtgcccacccgctaccgccagctgg

SEQ ID NO: 79813 - DNA, 120 bp, Artificial Sequence
  ENSG00000081277_14 (sequence is synthesized)
agtataacgcccgcaacgcctacaccgagaagtcctccactggctgcttcagcaacaagagcgacaagatgatgaacaacaactatgactgccccctgcctgaggaagagaccaacccca

SEQ ID NO: 79814 - DNA, 120 bp, Artificial Sequence
  ENSG00000081277_15 (sequence is synthesized)
agggcagcggctggttgtaccattcagatgccatccgcacctacctgaacctcatgggcaagagcaagaaagatgctaccctggaggcctgtgctggtgccctgcagaacctgacagcca

SEQ ID NO: 79815 - DNA, 120 bp, Artificial Sequence
  ENSG00000081277_16 (sequence is synthesized)
gcaaggggctgatgtccagtggcatgagccagttgattgggctgaaggaaaagggcctgccacaaattgcccgcctcctgcaatctggcaactctgatgtggtgcggtccggagcctccc

SEQ ID NO: 79816 - DNA, 120 bp, Artificial Sequence
  ENSG00000081277_17 (sequence is synthesized)
tcctgagcaacatgtcccgccaccctctgctgcacagagtgatggggaaccaggtgttcccggaggtgaccaggctcctcaccagccacactggcaataccagcaactccgaagacatct

SEQ ID NO: 79817 - DNA, 120 bp, Artificial Sequence
  ENSG00000081277_18 (sequence is synthesized)
tgtcctcggcctgctacactgtgaggaacctgatggcctcgcagccacaactggccaagcagtacttctccagcagcatgctcaacaacatcatcaacctgtgccgaagcagtgcctcac

SEQ ID NO: 79818 - DNA, 120 bp, Artificial Sequence
  ENSG00000081277_19 (sequence is synthesized)
ccaaggccgcagaagctgcccggcttctcctgtctgacatgtggtccagcaaggaactgcagggtgtcctcagacagcaaggtttcgataggaacatgctgggaaccttagctggggcca

SEQ ID NO: 79819 - DNA, 120 bp, Artificial Sequence
  ENSG00000081277_20 (sequence is synthesized)
acagcctcaggaacttcacctcccgattctaagaagagactgtccaagcaagttaggcttgcaggaagatatgacccagctgagaagccctcaggcctcgctggatggggttttctgtcc

SEQ ID NO: 79820 - DNA, 120 bp, Artificial Sequence
  ENSG00000081277_21 (sequence is synthesized)
atcctatgcagtatttgggaaagttcacaagaaactgagaagaaacctaaaaactgtggatagtggaaagatttttagattttttttttccttggggaaactggcaggcaatgggggtta

SEQ ID NO: 79821 - DNA, 120 bp, Artificial Sequence
  ENSG00000081277_22 (sequence is synthesized)
tgtgcatgcatgtgcgcgtgcatgtgtgtgtgtgtgagtgtcttaaagcataaccacaaactgcaaaaagctaggtaagctattttgttgcagctcataaggtggtgaaaaggactctcc

SEQ ID NO: 79822 - DNA, 120 bp, Artificial Sequence
  ENSG00000081277_23 (sequence is synthesized)
tgtgtttcttactcataggcaaggacaacatgtgctttttggtgagctgctcataattcctgaaatgtgtggtgccagggcaagggggccatcactgcagtcaggccctcagaggagtcc

SEQ ID NO: 79823 - DNA, 120 bp, Artificial Sequence
  ENSG00000081277_24 (sequence is synthesized)
tgcaggcttcctaccagtggtctccaggggtgcaggagtaactggggctgggccagcctccccacttacaaggctgctttccaggaagggaggtctggtgtatctcatgggagaatctgg

SEQ ID NO: 79824 - DNA, 120 bp, Artificial Sequence
  ENSG00000081277_25 (sequence is synthesized)
ggtgtctgtaatgtcacccctccagcagcgccacaaggactgaggttgggtaggtgtggggttccagaggacagcaggacactctcgcatactttgccaaatgaggcctgctcagaggag

SEQ ID NO: 79825 - DNA, 120 bp, Artificial Sequence
  ENSG00000081277_26 (sequence is synthesized)
taggagctgaaagatggtgccttccaccctcttgggctgtgtgcccatcagagcaggctcagcctgcaaaggccctgcattcagaggtcttgtaatctacttgttgcaggagaaagaagg

SEQ ID NO: 79826 - DNA, 120 bp, Artificial Sequence
  ENSG00000081277_27 (sequence is synthesized)
taaaaaatgatttttttaagaaaagctattttattgcagctctttcccaagagctgttctgggaatggctggtcttcatattcccagtggagaggggaacaagtggggctgggcatatac

SEQ ID NO: 79827 - DNA, 120 bp, Artificial Sequence
  ENSG00000081277_28 (sequence is synthesized)
ctattccggcttctagtgggatggagttggggtatagaaattaaccaggaagatgtttccaccaagcctgctgtgagtcaattgagggagtgtttggggtcccaggagacttggacgggg

SEQ ID NO: 79828 - DNA, 120 bp, Artificial Sequence
  ENSG00000081277_29 (sequence is synthesized)
ggagtttgggtagactaggaaaggaaagtgccatatcagggtaccggtaccggcaagctcacatctcagccaggggccatgccccacttcccctgaccccagctgtcttgtctccactct

SEQ ID NO: 79829 - DNA, 120 bp, Artificial Sequence
  ENSG00000081277_30 (sequence is synthesized)
gtgaaacccacaggggatgtgataaacagggctattaggggtatcagccacgtcgagcccccagactctgtgcacttcagaccagcagcagcaggagggctcccgagggccttatgagaa

SEQ ID NO: 79830 - DNA, 120 bp, Artificial Sequence
  ENSG00000081277_31 (sequence is synthesized)
aacctgtgtggacatcccttggtgtacactaagacagagcagagcccagcgctcccaagccttcctccttccagcttctacctccatgctagcattgctggtgttagagaggaattaact

SEQ ID NO: 79831 - DNA, 120 bp, Artificial Sequence
  ENSG00000081277_32 (sequence is synthesized)
tcctggtctgtgcccttctctagaagaatataagatgctcctcctcctcaccccttctcagcctcctcccaagtcttcctcttctgcaccacccccgagtccaaacccacctcttgcccc

SEQ ID NO: 79832 - DNA, 120 bp, Artificial Sequence
  ENSG00000081277_33 (sequence is synthesized)
agcattcaggctggaaaacactgatgtggactcagtatgataactgagatgggggacgccagacatgtgaggacgctgtcctccgagaggtgtccccggctgttagccagctgtgctgtg

SEQ ID NO: 79833 - DNA, 120 bp, Artificial Sequence
  ENSG00000081277_34 (sequence is synthesized)
gtgctgtgggtctgtcataccctcccttgcttctgttcacactgggaggcccactcctggctcacctctccctctcagggacccacgtgggagcctggatccctggactgtcctgggcat

SEQ ID NO: 79834 - DNA, 120 bp, Artificial Sequence
  ENSG00000081277_35 (sequence is synthesized)
aggtttcaggggcctcctttgttgtcatcagaacccagaggaattcttctcctaaaaaatacgtatggcataccaatctgtgcggggcagtgtcctaagcacttagactacatcagggaa

SEQ ID NO: 79835 - DNA, 120 bp, Artificial Sequence
  ENSG00000081277_36 (sequence is synthesized)
gaacacagaccacatccctgtcctcatgcggcttatgttttctggaggaaagtggagacacaagtccttggctttagggctcccccggctgggggctgtgcagtccggtcagggcgggag

SEQ ID NO: 79836 - DNA, 120 bp, Artificial Sequence
  ENSG00000081277_37 (sequence is synthesized)
gggaaatgcaccgctgcatgtgaaccttaccagcccaggcggatgccccttccccttagcactaccctggcctcctgcatcccctcgcctcatgttcctcccaccttcaaagaatgaaga

SEQ ID NO: 79837 - DNA, 120 bp, Artificial Sequence
  ENSG00000081277_38 (sequence is synthesized)
gccccatgggcccagcccctgccctgggaaccaggcagccttccagacctcaggggctgaggcagactattagggcagggctgactttggtgacactgcccattccctctcaggccagct

SEQ ID NO: 79838 - DNA, 120 bp, Artificial Sequence
  ENSG00000081277_39 (sequence is synthesized)
caggtcacccgggcctctgacccaggcctgtcactttgagaggggcaaaactgagaggggcttttcctagagaaagagaacaaggagcttgccaggcttcatgtagccgacacacgtctc

SEQ ID NO: 79839 - DNA, 120 bp, Artificial Sequence
  ENSG00000081277_40 (sequence is synthesized)
aggattttaagtccacattggcctcacactaccagggccaatgcccaaaataaggagttccaatttggggccaaatgaggaaggacacagactctgccctgggatctcctgtgctagcgg

SEQ ID NO: 79840 - DNA, 120 bp, Artificial Sequence
  ENSG00000081277_41 (sequence is synthesized)
ccaatgacaaatccagtcattggccaccagccacctctgcagtggggaccacactagcagccctgactccacactcctcctggggacccaagaggcagtgttgctgtctgcatgtccacc

SEQ ID NO: 79841 - DNA, 120 bp, Artificial Sequence
  ENSG00000081277_42 (sequence is synthesized)
ttggaatctggctgaactggctggcaggaccaagactgcggctggggtgggcagggaagggaagccgggggctgctgtgagggatcttggagcttccctgtagcccaccttccccttgct

SEQ ID NO: 79842 - DNA, 120 bp, Artificial Sequence
  ENSG00000081277_43 (sequence is synthesized)
tcatgtttgtagaggaaccttgtgccggccaggcccagtttccttgtgtgatacactaatgtatttgctttttttggaaatagagaaaatcaataaattgctagtgtttctttgaacttt

SEQ ID NO: 79843 - DNA, 120 bp, Artificial Sequence
  ENSG00000081277_44 (sequence is synthesized)
gtttgagaaacaatgggcatgtcctctctgcccaagagctcttgtcagaattgtttaaaaaaagaaaagatagaggtggtcagagggaagaacaattgacagcttctctaatctgatttt

SEQ ID NO: 79844 - DNA, 120 bp, Artificial Sequence
  ENSG00000081277_45 (sequence is synthesized)
gattgttgctctgtttaaaaaataatactagcctaaatcctcacgccttgactcaggtttctgcaaatgcaagtaggaaattcacatgtgtcagtggaagttcaaacacattgcaccgac

SEQ ID NO: 79845 - DNA, 120 bp, Artificial Sequence
  ENSG00000081277_46 (sequence is synthesized)
ttactgaggccagttttcgccctgacacatgtacttagtgataagagagaggctgtgtgagccgaggttgctctgggagggcagtggacagtgtctgaccccacagcaagccccacacag

SEQ ID NO: 79846 - DNA, 120 bp, Artificial Sequence
  ENSG00000081277_47 (sequence is synthesized)
gagaaagagactgggcatgcgggagcttctggctcttgttccgcaaagggccactagtagcagggtgtgagccttgggatgcagctgcggagggaccgttgccacatggagccattgcca

SEQ ID NO: 79847 - DNA, 120 bp, Artificial Sequence
  ENSG00000081277_48 (sequence is synthesized)
gttataaagttactgggcagagtgaaggaggagaagaactgagtgcaaatgagacctcatttcagcctcagccagggccaggcggaattggctaaatggtttctctttccttccgttttc

SEQ ID NO: 79848 - DNA, 120 bp, Artificial Sequence
  ENSG00000081277_49 (sequence is synthesized)
atcttttcctctcttcattcctttcctccctttcctcttctccttccttccttctaccacaacttccaatctccaccccgtcgtctcctctctgccctcccctctcctgcctgttctctc

SEQ ID NO: 79849 - DNA, 120 bp, Artificial Sequence
  ENSG00000081307_0 (sequence is synthesized)
atgcctgtagggtgcgtccactgactgcaggaaaagcaatcagggtgggagaaacttaggaaaccacccagggccaaaggaaggaaaactcaatgtacaaatttttttccgctggaggca

SEQ ID NO: 79850 - DNA, 120 bp, Artificial Sequence
  ENSG00000081307_1 (sequence is synthesized)
aaggctgacatccatacctgtactgggcaatggtcagcgtagcctcacgttcggccccaaagccagacaagtgctggtttaggtaggcctccagggacttgctgtcgaacttgtgctggg

SEQ ID NO: 79851 - DNA, 120 bp, Artificial Sequence
  ENSG00000081307_2 (sequence is synthesized)
gcagcacttcggccaaatcggactcgccagtagcacctggcttcatgatcacccccgcaggccacagcaacgcggcatccacaggtctcgagtgccgaagtccttcaggattggggcaac

SEQ ID NO: 79852 - DNA, 120 bp, Artificial Sequence
  ENSG00000081307_3 (sequence is synthesized)
gtcccctctagagcatgggccgaggccggggtggggtctggctccagccaaccgcacacagcctacgcgccgttgctgagcaacgcttgcccgctgaatcccgaggttttagctctagtc

SEQ ID NO: 79853 - DNA, 120 bp, Artificial Sequence
  ENSG00000081307_4 (sequence is synthesized)
aagtgccaaaagagcccaatgtgtgttcgggtttcaattctccagtcagcgtcagagttggaggcctcaattttaaagaaggcaaagccatggtcatcgttgcgggtaaggaacaacgca

SEQ ID NO: 79854 - DNA, 120 bp, Artificial Sequence
  ENSG00000081307_5 (sequence is synthesized)
gaagcctcttccacccccaaatttaatgcaacagcaggcggaagacctgcagggtcccgttcagaaaaagggccgtcagactgtcgagcctaagaataaaaagaccctgtttctcttaga

SEQ ID NO: 79855 - DNA, 120 bp, Artificial Sequence
  ENSG00000081307_6 (sequence is synthesized)
tacccggttagcaaggcaacatcgctggcctcctgccctggacacttatcaccccggtgctgctgcggccgggtttagccggcccagcgaggaaggaagccgaaagagccaggtttttga

SEQ ID NO: 79856 - DNA, 120 bp, Artificial Sequence
  ENSG00000081307_7 (sequence is synthesized)
tgagggggagcgatgtctgcgacgcaccggaagcggctccgaggaaggcctgtgggagtctcggagacgtgtctgtctgtgaggcgctgggtgcacgtccccagggctctgggctaggaa

SEQ ID NO: 79857 - DNA, 120 bp, Artificial Sequence
  ENSG00000081307_8 (sequence is synthesized)
ggaaggcagcggcgaggtgcctccccacgtacccctcgcgggcccagccgagcaacgtggggcgaaggcggcggcgaaggcccgggctgggagcgttggcggccggagtcccagccatgg

SEQ ID NO: 79858 - DNA, 120 bp, Artificial Sequence
  ENSG00000081307_9 (sequence is synthesized)
gtctgtggagcgcctgcagcagcgggtccaggagctggagcgggaacttgcccaggagaggagtctgcaggtcccgaggagcggcgacggagggggcggccgggtccgcatcgagaagat

SEQ ID NO: 79859 - DNA, 120 bp, Artificial Sequence
  ENSG00000081307_10 (sequence is synthesized)
gagctcagaggtggtggattcgaatccctacagccgcttgatggcattgaaacgaatgggaattgtaagcgactatgagaaaatccgtacctttgccgtagcaatagtaggtgttggtgg

SEQ ID NO: 79860 - DNA, 120 bp, Artificial Sequence
  ENSG00000081307_11 (sequence is synthesized)
agtaggtagtgtgactgctgaaatgctgacaagatgtggcattggtaagttgctactctttgattatgacaaggtggaactagccaatatgaatagacttttcttccaacctcatcaagc

SEQ ID NO: 79861 - DNA, 120 bp, Artificial Sequence
  ENSG00000081307_12 (sequence is synthesized)
aggattaagtaaagttcaagcagcagaacatactctgaggaacattaatcctgatgttctttttgaagtacacaactataatataaccacagtggaaaactttcaacatttcatggatag

SEQ ID NO: 79862 - DNA, 120 bp, Artificial Sequence
  ENSG00000081307_13 (sequence is synthesized)
aataagtaatggtgggttagaagaaggaaaacctgttgatctagttcttagctgtgtggacaattttgaagctcgaatgacaataaatacagcttgtaatgaacttggacaaacatggat

SEQ ID NO: 79863 - DNA, 120 bp, Artificial Sequence
  ENSG00000081307_14 (sequence is synthesized)
ggaatctggggtcagtgaaaatgcagtttcagggcatatacagcttataattcctggagaatctgcttgttttgcgtgtgctccaccacttgtagttgctgcaaatattgatgaaaagac

SEQ ID NO: 79864 - DNA, 120 bp, Artificial Sequence
  ENSG00000081307_15 (sequence is synthesized)
tgttagtttttaccttggatacaatgcaatgcaggatttttttcctactatgtccatgaagccaaatcctcagtgtgatgacagaaattgcaggaagcagcaggaggaatataagaaaaa

SEQ ID NO: 79865 - DNA, 120 bp, Artificial Sequence
  ENSG00000081307_16 (sequence is synthesized)
ggtagcagcactgcctaaacaagaggttatacaagaagaggaagagataatccatgaagataatgaatggggtattgagctggtatctgaggtttcagaagaggaactgaaaaatttttc

SEQ ID NO: 79866 - DNA, 120 bp, Artificial Sequence
  ENSG00000081307_17 (sequence is synthesized)
aggtccagttccagacttacctgaaggaattacagtggcatacacaattccaaaaaagcaagaagattctgtcactgagttaacagtggaagattctggtgaaagcttggaagacctcat

SEQ ID NO: 79867 - DNA, 120 bp, Artificial Sequence
  ENSG00000081307_18 (sequence is synthesized)
ggccaaaatgaagaatatgtagataatggactgggatatattgtatttctcatgttaaagcctcttcccttgaaattaaaaaaaaattttaactgataaaacttagggcaacattaatta

SEQ ID NO: 79868 - DNA, 120 bp, Artificial Sequence
  ENSG00000081307_19 (sequence is synthesized)
atgtatattcttacctgaattgttatactttttgaaaatcctgtgacttgcctgtttctccccgctccaacgaaatcattaactctcctaaaatgtgtttcattctagtaagaaaacctc

SEQ ID NO: 79869 - DNA, 120 bp, Artificial Sequence
  ENSG00000081307_20 (sequence is synthesized)
aaaggatattgtaggatataaatcttacttgaaaacatagctgttgaaatgttttggccttttggagtgggggaaggacaaatctgatcctgtaatctttttctttccagtaatcccttg

SEQ ID NO: 79870 - DNA, 120 bp, Artificial Sequence
  ENSG00000081307_21 (sequence is synthesized)
tgtctgttgcatgaggacatggacaataaagtagtatatgatcctcagatacagggagaaggacaaggcatacagcttattgattagagctggcaagcatctgctcattatgtttggaat

SEQ ID NO: 79871 - DNA, 120 bp, Artificial Sequence
  ENSG00000081307_22 (sequence is synthesized)
tgctttctataagaaaattgcccactactactaacttgatcaacaatgaattcaaaatagttaacctatgaaataacatcctctcaaatgtttgctgatgaagtacaagttgaaatgtag

SEQ ID NO: 79872 - DNA, 120 bp, Artificial Sequence
  ENSG00000081307_23 (sequence is synthesized)
ttattggaaaagtctgtaacctgtggatcatatatattcaaagtgagacaaaggcaaataaaaagcagctattttcatgaatagacaaagttgatttcaggaagtataaattatattctg

SEQ ID NO: 79873 - DNA, 120 bp, Artificial Sequence
  ENSG00000081307_24 (sequence is synthesized)
caccgaacaaggaacagaaattattgcatctgtggaacatatatctggagttactatactttactgaagagcaaggcataaatttagactaaaatccatccagattacactcattcttta

SEQ ID NO: 79874 - DNA, 120 bp, Artificial Sequence
  ENSG00000081307_25 (sequence is synthesized)
ggctactcctggatacttcatttaaatttgattttcgaggtagtgagatgtcggcaaggtttgtcctgtatattaggaataaaggaaaagttctaaactgcctctgcaatgacttgtagt

SEQ ID NO: 79875 - DNA, 120 bp, Artificial Sequence
  ENSG00000081307_26 (sequence is synthesized)
cagtggaagagtatcactttcccctgatcatgaccactaaactgtaaattgatataaattagttttctctcgagttacacccaagtaatgaagacttaagagaaccttggttgaaataaa

SEQ ID NO: 79876 - DNA, 120 bp, Artificial Sequence
  ENSG00000081307_27 (sequence is synthesized)
tttccaatagtttggagactcataaataccatgcaggtgtaaccactgccaataggctgtttctatgcttatttcctattttgatttttactttgaagataggaatatctaaattatatc

SEQ ID NO: 79877 - DNA, 120 bp, Artificial Sequence
  ENSG00000081307_28 (sequence is synthesized)
tctagggagaaaatgttgtaaaaaattaaaagtacatccctgattgtaaaataaagttcaaaaaactgatttcagaaagtctcaactaccaaatgttttcaatatattagttttgagatg

SEQ ID NO: 79878 - DNA, 120 bp, Artificial Sequence
  ENSG00000081307_29 (sequence is synthesized)
ctaggattatactgtgattcttatgtttatagtaaagtctggaaagcagaaggatagtttttttagcctggaaacttatttatgttgccttggtgagtcttctatcattttttaaaaatt

SEQ ID NO: 79879 - DNA, 120 bp, Artificial Sequence
  ENSG00000081307_30 (sequence is synthesized)
gaggtgataagatagcatctgctgtggccaggcatccctgacacctgacaagaaagtaaagccaaaagtcagctgaagataatggccatggagatgtctgtggagagccgtaaaagccaa

SEQ ID NO: 79880 - DNA, 120 bp, Artificial Sequence
  ENSG00000081307_31 (sequence is synthesized)
tcatggctgagatgcctgcagaatctctgcccatgagaactctgaggcctcctttcctttggctgtggtaagccctctgggaaaagagcagctacccaccaccagccgcttgatggcatt

SEQ ID NO: 79881 - DNA, 120 bp, Artificial Sequence
  ENSG00000081307_32 (sequence is synthesized)
atgagagatgttttgaatttaaaaaatgaaatgcagtttttcaaaaataaatttcctttggaaattcttgcatatcaatttagtaaggttttataaaattttacaatttgataaagtatc

SEQ ID NO: 79882 - DNA, 120 bp, Artificial Sequence
  ENSG00000081307_33 (sequence is synthesized)
gcaggcgcgggggacgaggtcaggctccgtgaggtcagaagtgaggcgcttcccacgtcccgctcatggggacgcccgccacccttttcttggtctgcgaatcctgttcccaaatgggca

SEQ ID NO: 79883 - DNA, 120 bp, Artificial Sequence
  ENSG00000081307_34 (sequence is synthesized)
aggccacatcttagtactgatcggaagatattctttctcttttttaaaaacctccagtgagtcagccatatggtgctgctcctgtgcctgctgaggacgtgtgtccagtttcctatcacc

SEQ ID NO: 79884 - DNA, 120 bp, Artificial Sequence
  ENSG00000081307_35 (sequence is synthesized)
aggtatatgacaatctgttagaatgcatgagggatcatattgaataggacaatacataaacagatttggaatacaagataaatggttaatttattcaccatacttcaaaaatgaatgttc

SEQ ID NO: 79885 - DNA, 120 bp, Artificial Sequence
  ENSG00000081307_36 (sequence is synthesized)
gcggcgaggtgcctccccacgtacccctcgcgggcccagccgagcaacgagaggagtctgcaggtcccgaggagcggcgacggagggggcggccgggtccgcatcgagaagatgagctca

SEQ ID NO: 79886 - DNA, 120 bp, Artificial Sequence
  ENSG00000081307_37 (sequence is synthesized)
gtagtgaaaaaataactgttgtgaacatactttatacttccttcacccttgtagttcttgtaaaataagtaatactacaatgatactgtagtatcattgatgttatattcataagttact

SEQ ID NO: 79887 - DNA, 120 bp, Artificial Sequence
  ENSG00000081307_38 (sequence is synthesized)
atctttaatattacatatttattatgtaataattatagtcaaacatttaatgaaagaataagtgttggactgaacaagtaagtataatgtattagagtgtattttgtgtcctgatgtttt

SEQ ID NO: 79888 - DNA, 120 bp, Artificial Sequence
  ENSG00000081307_39 (sequence is synthesized)
tcttgcatctctaacaagcttcaggtgatgctaatgcagctagaccacgccattttgagtagcaaagaggtagaacagtagttatatattgctgtagttagaatcacctgggaagtttta

SEQ ID NO: 79889 - DNA, 120 bp, Artificial Sequence
  ENSG00000081307_40 (sequence is synthesized)
aaaaattctggtgtccagactgcaccccataataagtgtctctggggatgaggcacaaacatctgtatttttaaaaattctccaagtgattccagtgtgccctcaagtttgtaaactgag

SEQ ID NO: 79890 - DNA, 120 bp, Artificial Sequence
  ENSG00000081307_41 (sequence is synthesized)
aatctacacaggtaagtttcaggaagtctttctttaatttgtaaaacagataaatacgaagtgaattaatgaggttaaataggaaagtagaagatgttaggaaacccagagtccatttct

SEQ ID NO: 79891 - DNA, 120 bp, Artificial Sequence
  ENSG00000081307_42 (sequence is synthesized)
tatccctgaaagcctttggatctctttaaagtatctggggtgccttggatcaccagatctatattcgctgctttattttagagatgaagatacaggcctaaaaagtgaaagtgatttacc

SEQ ID NO: 79892 - DNA, 120 bp, Artificial Sequence
  ENSG00000081307_43 (sequence is synthesized)
cacaatcagagctaattagtggcagagttacagctcagaccttctgttcccaagtttaatgtttcccgcaacttatgtataaacaagctatgaggcagaaactcatttaatacttggcct

SEQ ID NO: 79893 - DNA, 120 bp, Artificial Sequence
  ENSG00000081307_44 (sequence is synthesized)
gacctaataaatattgatgagcttaaagaaactatgttttggagactcttacgtaggattagaaaattttggagagtgtgagatcttttctagtattaagggctatctaggtgttatggg

SEQ ID NO: 79894 - DNA, 120 bp, Artificial Sequence
  ENSG00000081307_45 (sequence is synthesized)
ttaggttaattttttttctttttagttttttattgaaaagaaaatcccatttttgtttttattgtttagtgtgctgagaattgtattaaagagtcacagaatttcatatgaagaagggac

SEQ ID NO: 79895 - DNA, 120 bp, Artificial Sequence
  ENSG00000081307_46 (sequence is synthesized)
attaaagagtcacagaatttcatatgaagaagggacaggaagtccttggctctagcctgttcttactgataagaaatgtgatctaatggccattttagtgtgtgtgtgtgtgtgtgtgtg

SEQ ID NO: 79896 - DNA, 120 bp, Artificial Sequence
  ENSG00000081307_47 (sequence is synthesized)
gcttaagtgtatagcaggaaacaacaattaactggtttgtaattctatttggaataatgttttagccatgtcactggtatatattttgtcatatacacaaaaggagtcaggttatactat

SEQ ID NO: 79897 - DNA, 120 bp, Artificial Sequence
  ENSG00000081307_48 (sequence is synthesized)
attttaagttacagcacttgttttcatcttatttaaagatttcatttatccaatggattcctggcttttagcaaaaaaatggaaatgaagtaggattttgccacagatttaaaaaatgga

SEQ ID NO: 79898 - DNA, 120 bp, Artificial Sequence
  ENSG00000081307_49 (sequence is synthesized)
atgaaagggaattaatcttaatttctgagtaaattatttagagaggcagcacagcattgtggttgaggtgcagatgctggattgagaatgcttgaatttgaatcccattttcacttcata

SEQ ID NO: 79899 - DNA, 120 bp, Artificial Sequence
  ENSG00000081307_50 (sequence is synthesized)
ttagatgagtggcctttggacaagtgttgtagttgcctcattttaaaaataaggataatagtacctacatgcctcacatgagcattcaatgaattaatatatggcacctagtgttgtaga

SEQ ID NO: 79900 - DNA, 120 bp, Artificial Sequence
  ENSG00000081307_51 (sequence is synthesized)
gttagctaatattattatcaaactgctaaactaattaaatgtaaagctctctaatttattttttgatatgtttagttttttggtatgtttttcatcagaataccactattttcattttag

SEQ ID NO: 79901 - DNA, 120 bp, Artificial Sequence
  ENSG00000081307_52 (sequence is synthesized)
tagatacttgagttcttaggggcattgaaaatgtattacaattcaaagaaaaagcaaacttggatggaatactatttggaacatctcatactttttctctttttttttgaaatgtgtttt

SEQ ID NO: 79902 - DNA, 120 bp, Artificial Sequence
  ENSG00000081307_53 (sequence is synthesized)
agtgtgactgctgaaatgctgacaagatgtggcattggtaaggtaaaaacatttctctttgcctgtcatatagggaactactcactcctggagtaaatcaggtacaagttaggatttttt

SEQ ID NO: 79903 - DNA, 120 bp, Artificial Sequence
  ENSG00000081320_0 (sequence is synthesized)
aaaccgcgactgcaagcttcggtagtcctctccgctgctgtcgccaggagtcacttcacgagaagccaggtcacaaccgtcggcccttgtctggaaaagtaaaagtggatcctgccacgt

SEQ ID NO: 79904 - DNA, 120 bp, Artificial Sequence
  ENSG00000081320_1 (sequence is synthesized)
tcggagctccctggcgcctcgcccggctggagctagagaactcgtcctgtggcggcccccggcgtggggcgggacagcggccccctggagggggcagtcccgggagaacctgcggcggcc

SEQ ID NO: 79905 - DNA, 120 bp, Artificial Sequence
  ENSG00000081320_2 (sequence is synthesized)
ggagcggtaaaaataagtgactaaagaagcagacctgggaatcacctaacatgtcgaggaggagatttgattgccgaagtatttcaggcctactaactacaactcctcaaattccaataa

SEQ ID NO: 79906 - DNA, 120 bp, Artificial Sequence
  ENSG00000081320_3 (sequence is synthesized)
aaatggaaaactttaataatttctatatacttacatctaaagagctagggagaggaaaatttgctgtggttagacaatgtatatcaaaatctactggccaagaatatgctgcaaaatttc

SEQ ID NO: 79907 - DNA, 120 bp, Artificial Sequence
  ENSG00000081320_4 (sequence is synthesized)
taaaaaagagaagaagaggacaggattgtcgagcagaaattttacacgagattgctgtgcttgaattggcaaagtcttgtccccgtgttattaatcttcatgaggtctatgaaaatacaa

SEQ ID NO: 79908 - DNA, 120 bp, Artificial Sequence
  ENSG00000081320_5 (sequence is synthesized)
gtgaaatcattttgatattggaatatgctgcaggtggagaaattttcagcctgtgtttacctgagttggctgaaatggtttctgaaaatgatgttatcagactcattaaacaaatacttg

SEQ ID NO: 79909 - DNA, 120 bp, Artificial Sequence
  ENSG00000081320_6 (sequence is synthesized)
aaggagtttattatctacatcagaataacattgtacaccttgatttaaagccacagaatatattactgagcagcatataccctctcggggacattaaaatagtagattttggaatgtctc

SEQ ID NO: 79910 - DNA, 120 bp, Artificial Sequence
  ENSG00000081320_7 (sequence is synthesized)
gaaaaatagggcatgcgtgtgaacttcgggaaatcatgggaacaccagaatatttagctccagaaatcctgaactatgatcccattaccacagcaacagatatgtggaatattggtataa

SEQ ID NO: 79911 - DNA, 120 bp, Artificial Sequence
  ENSG00000081320_8 (sequence is synthesized)
tagcatatatgttgttaactcacacatcaccatttgtgggagaagataatcaagaaacatacctcaatatttctcaagttaatgtagattattcggaagaaactttttcatcagtttcac

SEQ ID NO: 79912 - DNA, 120 bp, Artificial Sequence
  ENSG00000081320_9 (sequence is synthesized)
agctggccacagactttattcagagccttttagtaaaaaatccagagaaaagaccaacagcagagatatgcctttctcattcttggctacagcagtgggactttgaaaacttgtttcacc

SEQ ID NO: 79913 - DNA, 120 bp, Artificial Sequence
  ENSG00000081320_10 (sequence is synthesized)
ctgaagaaacttccagttcctctcaaactcaggatcattctgtaaggtcctctgaagacaagacttctaaatcctcctgtaatggaacctgtggtgatagagaagacaaagagaatatcc

SEQ ID NO: 79914 - DNA, 120 bp, Artificial Sequence
  ENSG00000081320_11 (sequence is synthesized)
cagaggatagcagcatggtttccaaaagatttcgtttcgatgactcattacccaatccccatgaacttgtttcagatttgctctgttagcacttttttctttgactcatttggactgaat

SEQ ID NO: 79915 - DNA, 120 bp, Artificial Sequence
  ENSG00000081320_12 (sequence is synthesized)
ttgaaattttatatccactccagtgagattatgatttgtagcttcatatatgacatgtttatattgtaaatgcacttttccatggaataatttagggaagtgttttaatgttaaattact

SEQ ID NO: 79916 - DNA, 120 bp, Artificial Sequence
  ENSG00000081320_13 (sequence is synthesized)
agttgctagcatgttatgatttcatatcctgagatagctctgcagataagaaaatatttaaatatatgacaaaaagtaaaattgtacatgtgagtttacatgttaatgaaataattcaac

SEQ ID NO: 79917 - DNA, 120 bp, Artificial Sequence
  ENSG00000081320_14 (sequence is synthesized)
ttcaaatgaacttaccagaatgttttgcatatcaacaaaaaaagtggcttgagttttattatagttggtgtaaactgaacacagtgaagacattggaatttaataggttctctctctaag

SEQ ID NO: 79918 - DNA, 120 bp, Artificial Sequence
  ENSG00000081320_15 (sequence is synthesized)
gtgactcttataccatgcctctatcaacataatttgtttaggaaagcagtatgaagtttaagccaaaataatttctactttatagatgctcaagagacattttacaattgaaaatgtctt

SEQ ID NO: 79919 - DNA, 120 bp, Artificial Sequence
  ENSG00000081320_16 (sequence is synthesized)
tcaattacaaatattttgaaacttcgtaagattttcattctctgtggtctgttatatgagagagatcctttaactagagcaaagagggagttagaaacctgatcagggatattctttaca

SEQ ID NO: 79920 - DNA, 120 bp, Artificial Sequence
  ENSG00000081320_17 (sequence is synthesized)
agttggagcagaggaaagagtagcatgccttcgtattttaacgcaaatgtctttttcctcctcccaacctacttgagatctgataaggtctggaagatggagatatttggtatgcaagtg

SEQ ID NO: 79921 - DNA, 120 bp, Artificial Sequence
  ENSG00000081320_18 (sequence is synthesized)
tagagttttttaatcctccagaatttctagagtagaagatacttaggtatagttaaatattctgtatttttagtcaaacatatttattaattgaatatagaagaaaatgttgacacactc

SEQ ID NO: 79922 - DNA, 120 bp, Artificial Sequence
  ENSG00000081320_19 (sequence is synthesized)
agacagcttactgaattttagatgtcttctgcatcttagaatacaagccagtcattcagagttctaaaagtatgcataaaaaattacagcaccggtaggtctattaacacagtgcccgag

SEQ ID NO: 79923 - DNA, 120 bp, Artificial Sequence
  ENSG00000081320_20 (sequence is synthesized)
tcagcggtagcaagactgatgtgatcataaaacatgacatcaggctcgtctgaagttcttgtgtgaaattcctagtgagtgaggaggctcagcttaaagccatctgcagagtggcccctc

SEQ ID NO: 79924 - DNA, 120 bp, Artificial Sequence
  ENSG00000081320_21 (sequence is synthesized)
atcttttatgaattttcacctgatgaccgttatattggtctgttatcatgttacgataactgtgatctcatgaccatgttgctgtatcagaagaaatagtttgacaaatggtaacaacaa

SEQ ID NO: 79925 - DNA, 120 bp, Artificial Sequence
  ENSG00000081320_22 (sequence is synthesized)
cctgatgttccccctttagacctttaacttctcaaaattttggtaagtttccaaattctttaataataacttaaaactttttgaataactatcaggtcactttatttgaccacatggtga

SEQ ID NO: 79926 - DNA, 120 bp, Artificial Sequence
  ENSG00000081320_23 (sequence is synthesized)
attcctttaatgtcttcagcatttgttaaggaaaagttttctctacttgtgtgtgtatgtgtgcacatgtgtgtatgtacaggtgtatgtatatatctatagatagatacaatacattct

SEQ ID NO: 79927 - DNA, 120 bp, Artificial Sequence
  ENSG00000081320_24 (sequence is synthesized)
gtatatatctatagatagatacaatacattctttagacacttttcaagattctttgctgtggtatattgtgctcaactcaggtgccaaaggagctttttttttttttttttttttttgag

SEQ ID NO: 79928 - DNA, 120 bp, Artificial Sequence
  ENSG00000081320_25 (sequence is synthesized)
cccccgcccaggagctcttttcttatgacatataaattatgacatttatattctttatatgactttatgttctcttcttatgacatttaaattctttaagtagtttgttggtccaataaa

SEQ ID NO: 79929 - DNA, 120 bp, Artificial Sequence
  ENSG00000081320_26 (sequence is synthesized)
ctagacgttgtataatctaaattgagcccttgtatatctaaaactgatgagttgtttctaaattgttgattgtccatttacttgcctttggtattaagataatgcaagtaaagtttagta

SEQ ID NO: 79930 - DNA, 120 bp, Artificial Sequence
  ENSG00000081320_27 (sequence is synthesized)
agtcattggataatgaaatgattatgtttctgaagaccatattatatttttaatttttagaggaatcatgccatcccccaaaaaatcaagaaatatttgaattttaaattataagttcat

SEQ ID NO: 79931 - DNA, 120 bp, Artificial Sequence
  ENSG00000081320_28 (sequence is synthesized)
ttgttaaaagacatttttacaaatgtctgaaaatcttaaaatactttacatctacctttaagtagtagaatacagagctgtaaatttccatgccttttttcctgatattaagttttatag

SEQ ID NO: 79932 - DNA, 120 bp, Artificial Sequence
  ENSG00000081320_29 (sequence is synthesized)
taaaaaagcaactagtgattgcacaaagaatataaaaatccactctttttacaaaggtgtgaatttaaataacgttattgattggaatatgaaaatagaccaatcatttaagagcttttt

SEQ ID NO: 79933 - DNA, 120 bp, Artificial Sequence
  ENSG00000081320_30 (sequence is synthesized)
agcaaatgattcaattcttactctttttctcccaagattgaaaagcataatgtatttctctaaagtaggaatctagagagcccctgtgagtggacaaatgtcagtaacacttgaacacat

SEQ ID NO: 79934 - DNA, 120 bp, Artificial Sequence
  ENSG00000081320_31 (sequence is synthesized)
gagaagataagtgttatgttgtgataatttaaagttaaatttgctttttgggtaggatccctaaatagatgggatttttaaatagatgatatatagatgacaattgcaattgtcatttta

SEQ ID NO: 79935 - DNA, 120 bp, Artificial Sequence
  ENSG00000081320_32 (sequence is synthesized)
attattttccctacagtaaagaacctagctctgagcagtgaaattgtaatggcactttaaaggaagtaagccgttaactgttctctagtggagcgatctccaactgttttggcactaggg

SEQ ID NO: 79936 - DNA, 120 bp, Artificial Sequence
  ENSG00000081320_33 (sequence is synthesized)
cactagggacgggttttgtggaagaaaatttttccacaggactgggggtttagggggatggtttcaggatgattcaagtacattacatttatcattagattctcataaggagcatgcaac

SEQ ID NO: 79937 - DNA, 120 bp, Artificial Sequence
  ENSG00000081320_34 (sequence is synthesized)
cttgcacgtgtggttcacagcaggattcgagctcctttgagaatctaatgccatggctgatctaacaggaaactgagctcaggcagtaatgcttggcaccgccccccaccttctatgcag

SEQ ID NO: 79938 - DNA, 120 bp, Artificial Sequence
  ENSG00000081320_35 (sequence is synthesized)
cccggtcgtggcctggggactggggacccctgctctagtcagtaataaggtacttgtgccagaatataaatcaacacattgcttcctttatcaaagaagtcttgttatttaaaaaaagtc

SEQ ID NO: 79939 - DNA, 120 bp, Artificial Sequence
  ENSG00000081320_36 (sequence is synthesized)
aactgagccagtatgattagtgatgtaattgattttcattctggcacaagcctctttcattctggacagctcacaaatagttaatggaccatgctttgaatagccttcctctaagcaaca

SEQ ID NO: 79940 - DNA, 120 bp, Artificial Sequence
  ENSG00000081320_37 (sequence is synthesized)
tttataaatactgatattttagaactgtttacatttcttctgtttatttttgaattttcagtttgatatcttgtccttattcattgttgtataaacaactgtactttaatttcaagtagt

SEQ ID NO: 79941 - DNA, 120 bp, Artificial Sequence
  ENSG00000081320_38 (sequence is synthesized)
caagtagtattaaaagtatttcacttcagtttggggggattattatcaatttataattttataaaagtattttaaagaataattgtaaattttccataaattacaacttcctgccatatt

SEQ ID NO: 79942 - DNA, 120 bp, Artificial Sequence
  ENSG00000081320_39 (sequence is synthesized)
taataatcttgcttaaggcatatagacagacattattatgagtattccagtaaaaaaaatctacatcaacttgaccattctggctaaaaattaaaaagcacttttttatatctgtggttg

SEQ ID NO: 79943 - DNA, 120 bp, Artificial Sequence
  ENSG00000081320_40 (sequence is synthesized)
tcatttgtttcaaagcatttctaaatttattgttcttaaaagtatgtctgcatgttctagcctttgacctaggtcatctatgaaccctctttgtgtctaataaacatatctgtaaaggca

SEQ ID NO: 79944 - DNA, 120 bp, Artificial Sequence
  ENSG00000081320_41 (sequence is synthesized)
ctctttctctctcacagcttctcacgaggtagaactttagagcctggtgtgtttgtggctggagcatagcagctcttctacaactttactgtagtttctactgaatattttggtttgcaa

SEQ ID NO: 79945 - DNA, 120 bp, Artificial Sequence
  ENSG00000081320_42 (sequence is synthesized)
atataaaggattctctgaagcacaaccttaaataacgtgtggtagacacctgggagaggaaaactgcagacagaaaaatgtggccggatgctctgtgggcgggcggcagcgatgttcggc

SEQ ID NO: 79946 - DNA, 120 bp, Artificial Sequence
  ENSG00000081320_43 (sequence is synthesized)
aggtcgcgccaggcagggcccccttcgcggcgggcccgcgcgggtcccttccacagcaaggccacgcggtccccctagcctctcccgagtcccagctgcggcgtgggcgcgttcccatcg

SEQ ID NO: 79947 - DNA, 120 bp, Artificial Sequence
  ENSG00000081320_44 (sequence is synthesized)
ggactcgtggacgcgtcctgctcccagctgcctttcgtctagagaaaggcaaccagatgtttgaggagggcttggtggacaaaggtgacattcatgctccactatatgcaaaactggcca

SEQ ID NO: 79948 - DNA, 120 bp, Artificial Sequence
  ENSG00000081320_45 (sequence is synthesized)
tggatgcctaaagcagcttgtgatcactggaagatcaattcttttatcatccatactttagaggcagcaaaatcgaagctttcttcaccagtaaaagggaatgcgaagtaaatcacaaca

SEQ ID NO: 79949 - DNA, 120 bp, Artificial Sequence
  ENSG00000081320_46 (sequence is synthesized)
aaattccatttcaccttcatcacactagaatagccaaacttaaaagtctgaattgggtaaaaataagtgactaaagaagcagacctgggaatcacctaacatgtcgaggaggagatttga

SEQ ID NO: 79950 - DNA, 120 bp, Artificial Sequence
  ENSG00000081320_47 (sequence is synthesized)
atgtaaaagggacctaatttatattcagatattttcataagactaaatgtatagcctcgggcacatacacaaaaactaacagcacagaataagcaaatgacaaatacaacatttgaggaa

SEQ ID NO: 79951 - DNA, 120 bp, Artificial Sequence
  ENSG00000081320_48 (sequence is synthesized)
tgtggagaaatgaatatacattattttcttaatggctaattgattgaatttttctggaacacaatctgatgggcagatagaattgaagtaatttgtatattttcttcatctatttgaaaa

SEQ ID NO: 79952 - DNA, 120 bp, Artificial Sequence
  ENSG00000081320_49 (sequence is synthesized)
aggaaaactgcagacagaaaaatgtggccggatgctctgtgggcgggcggcagcgatgttcggccaggtggctccaaggagaggaagcagtgatgcattgagggagtaaacatggaatcg

SEQ ID NO: 79953 - DNA, 120 bp, Artificial Sequence
  ENSG00000081320_50 (sequence is synthesized)
gtgagaatcactttccttgatcattatgtggtcagtatgcggtgactgacttgatgtgactggggaaggtcccttccctggacagaatatggtgagtgtcgtgccattaccggagaggat

SEQ ID NO: 79954 - DNA, 120 bp, Artificial Sequence
  ENSG00000081377_0 (sequence is synthesized)
ccttttgctcgaagtcctttaatcgctaaggagctttcccagactcttccctctgcaggcccgctggcctctgacgcatgtcccctctgcggagcgtttgggcactggaggagccctggt

SEQ ID NO: 79955 - DNA, 120 bp, Artificial Sequence
  ENSG00000081377_1 (sequence is synthesized)
tggttggcacaggccgccccgcgttcccagctggggaaggaaggcgggcggccaggcggggggaaagaaagcgggaggtggggcggggtgctgtccgtccccacggcctcgtcgcgcgcg

SEQ ID NO: 79956 - DNA, 120 bp, Artificial Sequence
  ENSG00000081377_2 (sequence is synthesized)
tttttccaggacttggggacttccggggttgcgctgtcgtgtcaggccgttgggccgccgaggggtgtcgctgcgcccgctgccccgcgcggccctttaaactttgttttttaaacttcg

SEQ ID NO: 79957 - DNA, 120 bp, Artificial Sequence
  ENSG00000081377_3 (sequence is synthesized)
ggggtgtggtcgcggcgcctcccctctcggcggctggcagtccttgcctctgccccgccttccagatgctttggagtcatgagccgggagggcgcgggggcagctttggtagccgaggtg

SEQ ID NO: 79958 - DNA, 120 bp, Artificial Sequence
  ENSG00000081377_4 (sequence is synthesized)
atcaaagatcgcctttgttttgccattctctacagcagaccaaagagtgcatcaaatgtacattatttcagcatagataatgaacttgaatatgagaacttctacgcagattttggacca

SEQ ID NO: 79959 - DNA, 120 bp, Artificial Sequence
  ENSG00000081377_5 (sequence is synthesized)
ctcaatctggcaatggtttacagatattgttgcaagatcaataagaaattaaagtccattacaatgttaaggaagaaaattgttcattttactggctctgatcagagaaaacaagcaaat

SEQ ID NO: 79960 - DNA, 120 bp, Artificial Sequence
  ENSG00000081377_6 (sequence is synthesized)
gctgccttccttgttggatgctacatggttatatatttggggagaaccccagaagaagcatatagaatattaatctttggagagacatcctatattcctttcagagatgctgcctatgga

SEQ ID NO: 79961 - DNA, 120 bp, Artificial Sequence
  ENSG00000081377_7 (sequence is synthesized)
agttgcaatttctacattacacttcttgactgttttcatgcagtaaagaaggcaatgcagtatggcttccttaatttcaactcatttaaccttgatgaatatgaacactatgaaaaagca

SEQ ID NO: 79962 - DNA, 120 bp, Artificial Sequence
  ENSG00000081377_8 (sequence is synthesized)
gaaaatggagatttaaattggataataccagaccgatttattgccttctgtggacctcattcaagagccagacttgaaagtggttaccaccaacattctcctgagacttatattcaatat

SEQ ID NO: 79963 - DNA, 120 bp, Artificial Sequence
  ENSG00000081377_9 (sequence is synthesized)
tttaagaatcacaatgttactaccattattcgtctgaataaaaggatgtatgatgccaaacgctttacggatgctggcttcgatcaccatgatcttttctttgcggatggcagcacccct

SEQ ID NO: 79964 - DNA, 120 bp, Artificial Sequence
  ENSG00000081377_10 (sequence is synthesized)
actgatgccattgtcaaagaattcctagatatctgtgaaaatgctgagggtgccattgcagtacattgcaaagctggccttggtcgcacgggcactctgatagcctgctacatcatgaag

SEQ ID NO: 79965 - DNA, 120 bp, Artificial Sequence
  ENSG00000081377_11 (sequence is synthesized)
cattacaggatgacagcagccgagaccattgcgtgggtcaggatctgcagacctggctcggtgattgggcctcagcagcagtttttggtgatgaagcaaaccaacctctggctggaaggg

SEQ ID NO: 79966 - DNA, 120 bp, Artificial Sequence
  ENSG00000081377_12 (sequence is synthesized)
tttccataaatggggtcgagaatcaagatcagcaagaacccgaaccgtacagtgatgatgacgaaatcaatggagtgacacaaggtgatagacttcgggccttgaaaagcagaagacaat

SEQ ID NO: 79967 - DNA, 120 bp, Artificial Sequence
  ENSG00000081377_13 (sequence is synthesized)
ccaaaacaaacgctattcctctcacagtaattcttcaatccagtgttcagagctgtaaaacatctgaacctaacatttctggcagtgcaggcattactaaaagaaccaccagatctgctt

SEQ ID NO: 79968 - DNA, 120 bp, Artificial Sequence
  ENSG00000081377_14 (sequence is synthesized)
caaggaaaagcagtgttaaaagtctctccatttcaaggactaaaacagtcttgcgttaagtaaaaacctgtgaccagagctgaaggaagactctaggactgaaaactgcaacagaaatta

SEQ ID NO: 79969 - DNA, 120 bp, Artificial Sequence
  ENSG00000081377_15 (sequence is synthesized)
gcacaatttgaaaacaaaacaaaattgcaaaagccttagttgctttttccacctaagaagttgatcaatggagaaaatgtccactggagtttgaataatgaactttgagtttgggtgcaa

SEQ ID NO: 79970 - DNA, 120 bp, Artificial Sequence
  ENSG00000081377_16 (sequence is synthesized)
gcaaatgactcagagaagggtccagctctcaagctgaatgacaaacatgctgttgtaaatttagtctcaggtgtaaatacccaagccctctggtacccagggagctggctggtctgtggt

SEQ ID NO: 79971 - DNA, 120 bp, Artificial Sequence
  ENSG00000081377_17 (sequence is synthesized)
gcatgtgtgtccctgtgatggcaatcattgtagttgctggccttcagaagaattgaggatctgatggaggttttttatgtatttattttctgttcaccttgtgaccctgtgtcaaaattt

SEQ ID NO: 79972 - DNA, 120 bp, Artificial Sequence
  ENSG00000081377_18 (sequence is synthesized)
ataaagatacaaaaggcattactgaaatggtactttctgtaatttgatactatttggcttaatcatcttcacttgactatttgtaatactgttgtaatgttaactctgttaagtacccaa

SEQ ID NO: 79973 - DNA, 120 bp, Artificial Sequence
  ENSG00000081377_19 (sequence is synthesized)
gctgcttgtcttccaccaaagagtgctttattaacaagaatctgtgaaaatcacatttaaacactgttgcatgttgtaagaccaggtggtaccttagtaacctaaaacttgcaagagaat

SEQ ID NO: 79974 - DNA, 120 bp, Artificial Sequence
  ENSG00000081377_20 (sequence is synthesized)
attaatggtagctttagaagactcaggaggagaaactgacttcagagttggaagatgttgcaagtcgttcctttttctgtccttcagggactgaagaactgggaggctgcccattgtttg

SEQ ID NO: 79975 - DNA, 120 bp, Artificial Sequence
  ENSG00000081377_21 (sequence is synthesized)
gttgccagtcatacaaattaaaatcatatttccttccatgaatggaagaaacacactattggtttttccccttggaaacagcaatcccaaataatgtcggcttacaaaaaaaaaaagtta

SEQ ID NO: 79976 - DNA, 120 bp, Artificial Sequence
  ENSG00000081377_22 (sequence is synthesized)
ccacttttttagagtccttccctgtaacattggattttttttttcccttatgagatccacctaaggccattgacgtggcctgcgatctcagtgacaatgatctgcttctggatctcactg

SEQ ID NO: 79977 - DNA, 120 bp, Artificial Sequence
  ENSG00000081377_23 (sequence is synthesized)
ttgcctttggttagggaacacaactagtaactctgcagagtgccttctcccgcagccctactggaacacagcagagtctgtgccatgaagcagttacagaaacagaattgatgtgctgct

SEQ ID NO: 79978 - DNA, 120 bp, Artificial Sequence
  ENSG00000081377_24 (sequence is synthesized)
ctgacgggccgcggccgcctccatgaagcggaaaagcgagcggcggtcgagctgggccgccgcgcccccctgctcgcggcgctgctcgtcgacctcgccgggtgtgaagaagatccgcag

SEQ ID NO: 79979 - DNA, 120 bp, Artificial Sequence
  ENSG00000081377_25 (sequence is synthesized)
agctgtgctgacctctgcactgtgtagtgttgtcatctggtggattgtttgtgactacattcttcccatcctgctattctgtctcgatggtttcagaacacagtagccatcaggaccccc

SEQ ID NO: 79980 - DNA, 120 bp, Artificial Sequence
  ENSG00000081377_26 (sequence is synthesized)
gtgaatgaagcgccacggaacagccctcctggggtccccacgagccgcgtcctgctgtgccccggcgcctacgcagcagcggccgcggccgcggtgggcacgcacggttaccccgggcag

SEQ ID NO: 79981 - DNA, 80 bp, Artificial Sequence
  ENSG00000081377_27 (sequence is synthesized)
cgcacggttaccccgggcagctccggccgccagctgcagccccgtcgcctcggccgcgccagccggctgcgggcacctgg

SEQ ID NO: 79982 - DNA, 120 bp, Artificial Sequence
  ENSG00000081377_28 (sequence is synthesized)
ttttgcctgtgccgggagcatggagggctgagatgtcgacaggcagtgggaaacaaatgccctcctaagccacaaggcgtgcgccagattagtaggcaactccattttaagaagctgcct

SEQ ID NO: 79983 - DNA, 120 bp, Artificial Sequence
  ENSG00000081377_29 (sequence is synthesized)
ttttcacaaaactggaagaaataaaagcggttggaataaacaagttaaaagtctttaatgcaaaaagtaattgaaaggcagtgcctccattttggtgtactttcttggaagaaagtataa

SEQ ID NO: 79984 - DNA, 120 bp, Artificial Sequence
  ENSG00000081377_30 (sequence is synthesized)
aattgaccggcatcatgagagacggaagatgccgtgttctcagccaaacaagcaactctttccccgccaggcactgtcgggtggggtcaggccagcttttaaacactggggactggatca

SEQ ID NO: 79985 - DNA, 120 bp, Artificial Sequence
  ENSG00000081377_31 (sequence is synthesized)
cagaaaaacagtggttttctgtccctggaaatgaataggcacaaagacccacttggctgtgggcagactactcttcaataagatttgggtgggaggaggaacattccttttgctattttg

SEQ ID NO: 79986 - DNA, 120 bp, Artificial Sequence
  ENSG00000081377_32 (sequence is synthesized)
agctgagacaatataaatattcaaactgtgccatgcataaagcattgaattctcagggcacctcttcttccccttaccccttttaaggccatcccctccattaataataatccaggtagt

SEQ ID NO: 79987 - DNA, 120 bp, Artificial Sequence
  ENSG00000081377_33 (sequence is synthesized)
tgtgaaaatcgtgcttctatctgatcccttcttagtttggcttttcatcccatcagaacaagtaaacgtaggcgccacagctcttgtgagtactgtctccctcacggtgaatgagcctcc

SEQ ID NO: 79988 - DNA, 120 bp, Artificial Sequence
  ENSG00000081377_34 (sequence is synthesized)
tggtgtttcgtccaagaaaagaaagggtgtcactggaaccacagccctttttcattttataaactgcctcttcatgttgcctgctcaagtttccacctagaattgctatcactgtggctc

SEQ ID NO: 79989 - DNA, 120 bp, Artificial Sequence
  ENSG00000081377_35 (sequence is synthesized)
tttctaaaaatctttctatttaactggttcactgaaattagtcatagaaaacttgtgatttggtgaagaggcattccttgtaataaccaaatgacttgggatggtgtgcatagcaagggc

SEQ ID NO: 79990 - DNA, 120 bp, Artificial Sequence
  ENSG00000081377_36 (sequence is synthesized)
agtgttacacttatgaggactgtctctagcatccaggaagtctctgggtctgagggatggaaagttcttcctgctatgaatgagagtggactcttcccctcacccccaactgaaaccaca

SEQ ID NO: 79991 - DNA, 120 bp, Artificial Sequence
  ENSG00000081377_37 (sequence is synthesized)
aacaaccagaatcttctggaattctgacttagagtcgttgttatagaagaccttgttgctatggaacatgaaactgtgtgtcagatggagagatccccttaacctaagagccttaaatag

SEQ ID NO: 79992 - DNA, 120 bp, Artificial Sequence
  ENSG00000081377_38 (sequence is synthesized)
ccctgaaagtacactgggacggtttgcgatggaattaaaattggaagtgaatatttttaggtgctcttgaagctttctggggactcaaaattatcaaaagtcagggacagtccggaggaa

SEQ ID NO: 79993 - DNA, 120 bp, Artificial Sequence
  ENSG00000081377_39 (sequence is synthesized)
gagcgtctgcaaaactgggttcctagaagtatagacggacttagctttttgtagaatttggtgaggagcagcgcctcgtgagagcagaatggcctggcgtggccagtgcttcccggcagc

SEQ ID NO: 79994 - DNA, 120 bp, Artificial Sequence
  ENSG00000081377_40 (sequence is synthesized)
acgcagctctgcggcctccagaattcccctgttctgagcttgatgcccctagcctgtcccctacctacttcctcccctcctctctagccctctcacaggggtgattgctacctctctgtt

SEQ ID NO: 79995 - DNA, 120 bp, Artificial Sequence
  ENSG00000081377_41 (sequence is synthesized)
ttcttgggcctaggcaagttttagaggagttcccaagcattgttatgaggccagtgtgctcgctgggctgggcgggatggcctgggcttgtgtgtggcctgagggctctcctggggcctt

SEQ ID NO: 79996 - DNA, 120 bp, Artificial Sequence
  ENSG00000081377_42 (sequence is synthesized)
ctcttttcccagtcacctttggagccacagaagcagtgcactcattggatgtctgttcttaacacagcttctctttctacattaaaaaaaatcattattgcattttggaaagcagtgctc

SEQ ID NO: 79997 - DNA, 120 bp, Artificial Sequence
  ENSG00000081377_43 (sequence is synthesized)
atcaaaagcaacttttaaaacctattttattgttcctttaaatgttctctcccgctgaaactgccctggagaggctatctgctgctcttccatttacccacatcaggttattctccatgt

SEQ ID NO: 79998 - DNA, 120 bp, Artificial Sequence
  ENSG00000081377_44 (sequence is synthesized)
cactcagtggagatgactccagatgtgtttaaagactggacaattcacctatactgtgtaggaaattacctccttaattacctggtagaattgtcagcagacatgttcatccgatgatag

SEQ ID NO: 79999 - DNA, 120 bp, Artificial Sequence
  ENSG00000081377_45 (sequence is synthesized)
tactgcagttttctattaataatttgcagacttttatctaacctgcactcatgtacagattattaaaagttttaaaatgtaactgatcagtattgatcaatcattgtcttgatttttttt

SEQ ID NO: 80000 - DNA, 120 bp, Artificial Sequence
  ENSG00000081377_46 (sequence is synthesized)
tacagcgtatatttctaatcatattttttaaagccaagagaactggttgaatgaatgtttattttcctgaaggtatttttaagataaagcttcctaatggcgtgtaaactttgcatatgt

SEQ ID NO: 80001 - DNA, 120 bp, Artificial Sequence
  ENSG00000081377_47 (sequence is synthesized)
atgtagtttgatacatattgtcacatttgaaaatcttgtgggttgtaactggttttatacaaaatatcgaatagtggaaattgtataattacaatcatgtaattaaaagtattaacccaa

SEQ ID NO: 80002 - DNA, 80 bp, Artificial Sequence
  ENSG00000081377_48 (sequence is synthesized)
aaacccccgctgctccgtagccttgggaccctgggcgccgcgttgcccgtccggcgcgtaagcccgagcccctctcctgg

SEQ ID NO: 80003 - DNA, 120 bp, Artificial Sequence
  ENSG00000081377_49 (sequence is synthesized)
tccgcctcccggggtccgctccccgccggggcctcgagaaggaaggtgtcacgttggtggcattcgagccagccggcaagacgaatgtccgggttgtcacttttgagaaatcccagccag

SEQ ID NO: 80004 - DNA, 120 bp, Artificial Sequence
  ENSG00000081377_50 (sequence is synthesized)
gttggctgtcccaggctgtcacctttctagaccggcttctgatctggctcgggatccacaaggactagacctgcggggaaggtctctcctggacacgcccgttgcccactgcaagttctc

SEQ ID NO: 80005 - DNA, 120 bp, Artificial Sequence
  ENSG00000081377_51 (sequence is synthesized)
tccaggtgcaattgaagcctctcagcagcggaggccgccatgtggagagagcaggcaggcccactgctgctgagaacagggcaggcacgggcagctcctgttctgcctttcccagcttcg

SEQ ID NO: 80006 - DNA, 120 bp, Artificial Sequence
  ENSG00000081377_52 (sequence is synthesized)
gagacgcaggctcagctgctccgaagcacctgccagcaccgcacagtacagtttcagaggacagcagtctccttcccgtgaagctcccatgtgctggaatggcatggacttgctgatcaa

SEQ ID NO: 80007 - DNA, 120 bp, Artificial Sequence
  ENSG00000081377_53 (sequence is synthesized)
cagaaggaaatggtctgaagtctgaccagcacaaggaaggaggctggctggctcagaggggcccaccttgcgtggaatgaaaacgccaaaggctcatgagcaacattaggctagaggggt

SEQ ID NO: 80008 - DNA, 120 bp, Artificial Sequence
  ENSG00000081377_54 (sequence is synthesized)
cttgttcaaagcatccaactctgacttcggaggcattcccagccggcagcagtgtgtccagcctgcctcttcccaggctggtctgacatgcagcttaggctttcatcccaagttaggtac

SEQ ID NO: 80009 - DNA, 69 bp, Artificial Sequence
  ENSG00000081377_55 (sequence is synthesized)
tgacccctccctcttgggcagcacctccctttttaaaaaaatttttttttcttccaaagacagagtctt

SEQ ID NO: 80010 - DNA, 120 bp, Artificial Sequence
  ENSG00000081377_56 (sequence is synthesized)
ggattacaggtgtcagccaccgcacccagccaagcacccctatctctagaggatctggccccccagcccagttactgcagggcagctttccccacctggtgacaggctgtgcgcagcagc

SEQ ID NO: 80011 - DNA, 120 bp, Artificial Sequence
  ENSG00000081377_57 (sequence is synthesized)
cacctggtgacaggctgtgcgcagcagccccaggacctcaccctgagctgagtcttcaggagccgccctggtggcacaactcagacacccctgaggcctagcagtcaactcctgattcag

SEQ ID NO: 80012 - DNA, 120 bp, Artificial Sequence
  ENSG00000081377_58 (sequence is synthesized)
acatgatccagtccagcctgggcttggctataaccagctcaaacttgcttgacctccacttttcaggagacttggggacgacagccctcatcggcgtctttcatggggttaatctgcttg

SEQ ID NO: 80013 - DNA, 120 bp, Artificial Sequence
  ENSG00000081377_59 (sequence is synthesized)
agtctaagtcgccagccagaaacgtggtgcccagggtgccctgcctcaggacatgtccacacccacgtcacaagcacctgaggagtccggccggggcactgtggtccaaaaggtcctgcc

SEQ ID NO: 80014 - DNA, 120 bp, Artificial Sequence
  ENSG00000081377_60 (sequence is synthesized)
gcctccgcatctgactgtcccaacggcatgctggtgacacccccctgcccttcgcttctgtcctccctggcttctctggggcacttggggctatgtacaacctggcacgatccagaaagg

SEQ ID NO: 80015 - DNA, 120 bp, Artificial Sequence
  ENSG00000081377_61 (sequence is synthesized)
gtgcaaacaaaatgcctacatccaggcacacgaccaagtcagcgagagctagccctggtaagcaaacatagcccattacaggttcagaacgtgcaccgggttccccaaaactgtcttcaa

SEQ ID NO: 80016 - DNA, 120 bp, Artificial Sequence
  ENSG00000081377_62 (sequence is synthesized)
ccacatgactcaacagctctatgggataggaactgtcagtgtttttgcaactgcaacattaaaccaagtgctgtgggcttttcaagtattattcacaacactaaaggaaagtttcttcaa

SEQ ID NO: 80017 - DNA, 120 bp, Artificial Sequence
  ENSG00000081377_63 (sequence is synthesized)
agggctctctggctaatcttcaaagccgcagttaggcaaaatgacagtgtgacagcttcaaagccactgactcatgacacagccctgatgttgtaccggctaggttcagatttcagaaat

SEQ ID NO: 80018 - DNA, 120 bp, Artificial Sequence
  ENSG00000081377_64 (sequence is synthesized)
cagggcacttgcatccattgccttttccaggaaagggaagaaaacactcagttgataaaccttagtactcagataataaataagagaccaaaagtaggctatcacccaaagcaaacatcc

SEQ ID NO: 80019 - DNA, 120 bp, Artificial Sequence
  ENSG00000081377_65 (sequence is synthesized)
ttaactgaccctaacgtgtatggattcaactttgattattcaacaaaatcatgaccgactgctgtggcctggagtaaccaaaggactgttttctctacacaaagtcaggagcgaatacca

SEQ ID NO: 80020 - DNA, 120 bp, Artificial Sequence
  ENSG00000081377_66 (sequence is synthesized)
acctttatttgcacttgggttccagttcaaagccaccttagacagtgtggcaaagtgggaaaaagcacagatcctgggaccaaggttcagattccatctcaagcgagcatatgaactgtg

SEQ ID NO: 80021 - DNA, 120 bp, Artificial Sequence
  ENSG00000081377_67 (sequence is synthesized)
tgacaacaggcagacagtacctctgtgtctatgagaaagcggggagagcaacaccccagcttctagcagctctacagctgcctggacctgcaggccctcctaggcccacttcctccccag

SEQ ID NO: 80022 - DNA, 120 bp, Artificial Sequence
  ENSG00000081377_68 (sequence is synthesized)
cacagtgtgtgttcccgggcgtgtgtggctctgggtccagctctgttcagggtgggactccaggtgaattactgaacctctgaggtgtacccccaaccccaaactttcaccaaaagcaat

SEQ ID NO: 80023 - DNA, 120 bp, Artificial Sequence
  ENSG00000081377_69 (sequence is synthesized)
aaagaggaactctagaactggagccaggactaagtgagaaaaactgcttataagtgcttaataaatactagttatttacaacttttgctcaagccgagggcagaggcctttgtacgcagc

SEQ ID NO: 80024 - DNA, 120 bp, Artificial Sequence
  ENSG00000081377_70 (sequence is synthesized)
tgccgaactctgactctagttctgcggaagaaaaggatgcggtatttgcttttgccatgatccctttccatttgattggcaggttaaataacatggtttttgaagtcacatacttaatat

SEQ ID NO: 80025 - DNA, 120 bp, Artificial Sequence
  ENSG00000081377_71 (sequence is synthesized)
tcttcctaaaaaccacccaaacactagatgtgtgtgtgcacacacacagaaaccacgaggtagtttaaatcaccattaaaaatcaacgctttctctgattctgtgtcacagagtggtggc

SEQ ID NO: 80026 - DNA, 120 bp, Artificial Sequence
  ENSG00000081377_72 (sequence is synthesized)
cagtggctacacaatagcgatttttaaatgattggttaagtgaaaaccagaactcaaaatattccaggagagaagataacatttacaagtaaacagtaagtgcaattgtattttaatttc

SEQ ID NO: 80027 - DNA, 120 bp, Artificial Sequence
  ENSG00000081377_73 (sequence is synthesized)
ttggtctccgaaaactcagctgtgactgctttccattaacagttccagctctatgtgtttcctctaacgctaaaggcacagcccccgggaatctactgcttcctaagagtctccatggag

SEQ ID NO: 80028 - DNA, 120 bp, Artificial Sequence
  ENSG00000081377_74 (sequence is synthesized)
tctattttacaacctcctttccctccatgcttccgcggaggagtctatactatctctatatacacattttaaacattattcttcatttgaaattccttcaataaaaacacagtcaccatt

SEQ ID NO: 80029 - DNA, 120 bp, Artificial Sequence
  ENSG00000081377_75 (sequence is synthesized)
tcataaaaatgcacacaacagtggttctttacatttgcagttggaattttgaaatcaagataatgtcttgatttctcttcagaaagaacgtgttttgcttttaaaaaattgaccaattca

SEQ ID NO: 80030 - DNA, 120 bp, Artificial Sequence
  ENSG00000081377_76 (sequence is synthesized)
cgaagaggctttatttctgcagaagaatgtacaagaggcccacttgtggaacagcatgttgaagacccccagaaggcgggtgtgtccgtgtcacggggtccaccgccacccttctgtgtc

SEQ ID NO: 80031 - DNA, 120 bp, Artificial Sequence
  ENSG00000081377_77 (sequence is synthesized)
tgagctgcgttcttccttctctgaagctttttccttaactcatattttaagaatttcttctcttgtctcctcttggacttggaagttatgaaagaatgcaaaagttccttgcaagatctc

SEQ ID NO: 80032 - DNA, 120 bp, Artificial Sequence
  ENSG00000081377_78 (sequence is synthesized)
ttccaaagaaaaattccattgcaaccaactctggtactttgtggtttcactgagtattttcacatagctgagaaagatttaaaaatcaagctgatttcactcttcagaattaggcaaaac

SEQ ID NO: 80033 - DNA, 120 bp, Artificial Sequence
  ENSG00000081386_0 (sequence is synthesized)
gttcgcagctcaggaaggagggagccccaggaacaggagtcccaccgaagaactgctctctgacagaacagagacctcctcaccagggcttccaaacagatgcagaagaacccagaaagg

SEQ ID NO: 80034 - DNA, 120 bp, Artificial Sequence
  ENSG00000081386_1 (sequence is synthesized)
agcaggtcttgatttgcccaaccagcggcacttcttcatccccttgcccagagagcaccagacttggtgatgtcgccacatccagaagccatcacagattgtgtgacactgaacactgtg

SEQ ID NO: 80035 - DNA, 120 bp, Artificial Sequence
  ENSG00000081386_2 (sequence is synthesized)
ggccaacttgcagaaggtggttatcctttacggttctccacactctttcaggagcagcagaaaatgaacatatctcaggcatcagtgtcattcaaggacgtgactatagaattcacccag

SEQ ID NO: 80036 - DNA, 120 bp, Artificial Sequence
  ENSG00000081386_3 (sequence is synthesized)
gaggagtggcagcaaatggcccctgttcagaagaatctgtacagagatgtgatgctggagaactacagcaacctcgtctcagtggggtactgctgtttcaaaccagaggtgatcttcaag

SEQ ID NO: 80037 - DNA, 120 bp, Artificial Sequence
  ENSG00000081386_4 (sequence is synthesized)
ttggagcaaggagaggagccttggttctcagaggaggaattctcaaaccagagtcacccaaaagattacagaggtgatgacctgatcaagcagaacaagaaaatcaaagacaaacacttg

SEQ ID NO: 80038 - DNA, 120 bp, Artificial Sequence
  ENSG00000081386_5 (sequence is synthesized)
gagcaagcaatatgtatcaataataaaacattgactacagaggaagagaaagttttggggaaaccatttactctgcatgtagctgctgttgcttcaacaaaaatgtcctgcaaatgcaac

SEQ ID NO: 80039 - DNA, 120 bp, Artificial Sequence
  ENSG00000081386_6 (sequence is synthesized)
tcatgggaagtgaatttgcaaagtatttctgaatttatcattaataatagaaactattcaacaaagaaaataggttgcggtaatgtatgtgagaattcacctttcaaaattaactttgag

SEQ ID NO: 80040 - DNA, 120 bp, Artificial Sequence
  ENSG00000081386_7 (sequence is synthesized)
aaaactcagactggagagaaattttatgaacataataaaaacatgaaagctctcaattataatgaaaatcttcccaagcatccaaagtttcaaactttggagcaagcttttgaatgtaat

SEQ ID NO: 80041 - DNA, 120 bp, Artificial Sequence
  ENSG00000081386_8 (sequence is synthesized)
aaaattggaaaagcctttaatgataaggctaactgtgttaaacataacagttctcacacaggagaaacatcctctaaagatgatgaatttaggaaaaattgtgataagaaaactctcttt

SEQ ID NO: 80042 - DNA, 120 bp, Artificial Sequence
  ENSG00000081386_9 (sequence is synthesized)
gaccacaggagaactggcacagggaagaaacacctgcatcttaatcaatgtgggaaatcctttgagaagtcaactgtggaggaatataataaacttaatatgggtataaaacattatgaa

SEQ ID NO: 80043 - DNA, 120 bp, Artificial Sequence
  ENSG00000081386_10 (sequence is synthesized)
ttaaatccaagtggaaataatttcaacagaaaggcacacctcactgatcctcaaacagctgtcatagaagagaacccattggtaagtaatgacagaacacagacttgggttaaatcctct

SEQ ID NO: 80044 - DNA, 120 bp, Artificial Sequence
  ENSG00000081386_11 (sequence is synthesized)
gaatatcatgaaaataagaaatcctaccagacgtcggttcacagagttcgccgaagaagtcactcaatgatgaaaccctataaatgtaatgaatgtgggaaatccttctgtcagaaagga

SEQ ID NO: 80045 - DNA, 120 bp, Artificial Sequence
  ENSG00000081386_12 (sequence is synthesized)
catctcattcaacatcagagaactcacacaggagagaaaccatttgaatgtagtgaatgtggaaaaactttctcccagaagtcacacctcagtactcatcagagaattcatacagcagaa

SEQ ID NO: 80046 - DNA, 120 bp, Artificial Sequence
  ENSG00000081386_13 (sequence is synthesized)
aaaccctataaatgtaatgaatgtggaaaaacatttgtccagaagtcaaccctcaggggacatcaaagaattcacacaggagaaaaaccctatgaatgtagtgaatgtgggaaaactttt

SEQ ID NO: 80047 - DNA, 120 bp, Artificial Sequence
  ENSG00000081386_14 (sequence is synthesized)
gttcagaagtccaccctcagagatcatcacagaattcacacaggggagaaatcctttcaatgcaatcaatgtggaaaaacatttggccagaagtcaaacctcagaatacatcagagaact

SEQ ID NO: 80048 - DNA, 120 bp, Artificial Sequence
  ENSG00000081386_15 (sequence is synthesized)
cacactggggagaaaacttaccagtgtaatgaatgtgaaaaatccttctggcgaaaagatcatctcattcaacatcagaaaactcacacgggagagaaaccattcaaatgtaacgaatgt

SEQ ID NO: 80049 - DNA, 120 bp, Artificial Sequence
  ENSG00000081386_16 (sequence is synthesized)
gggaaaacttttgcccggacatcaaccctcagagtgcatcaaagaattcacactggggagaaaccatttaaatgtaatgaatgtgggaagaaatttgtccggaaagcaatccttagtgat

SEQ ID NO: 80050 - DNA, 120 bp, Artificial Sequence
  ENSG00000081386_17 (sequence is synthesized)
agagaattcacacaggggagaaaccctttcagtgtaataaatgtgggaaaacttttggccagaaatcaaacctcagaatacatcaaaggactcacagtggggagaaatcttatgaatgca

SEQ ID NO: 80051 - DNA, 120 bp, Artificial Sequence
  ENSG00000081386_18 (sequence is synthesized)
tgcaatgaatatgggaaattatgtaagaagtctaccctaagcttataccagaaaattcagggagaggggaatccctattgatgtaataactagaaaatccttttgacaaaaggaataccc

SEQ ID NO: 80052 - DNA, 120 bp, Artificial Sequence
  ENSG00000081386_19 (sequence is synthesized)
catttgatatcagagatacacaaaaaaccaattgagggtagtgaatgtaagaagacagtcccagaagtaaaccctcactgtgaatcagagaattcacataggaaagaaaccagatgaaga

SEQ ID NO: 80053 - DNA, 120 bp, Artificial Sequence
  ENSG00000081386_20 (sequence is synthesized)
tgaatgcaggaagaattgtgtccaaaatgcaaccttcagagtgtatcaaagaattcagacaggcttctgttttcagagtactatggataggcctgaatgaagtcataccctattagatag

SEQ ID NO: 80054 - DNA, 120 bp, Artificial Sequence
  ENSG00000081386_21 (sequence is synthesized)
ggctactaagatgtggatgtccatgatgtatatcacatcccagtctgaaacataagagacttccctaataaattaccagggccctgtcacaacaaaatggatatcatttctaggacaagc

SEQ ID NO: 80055 - DNA, 120 bp, Artificial Sequence
  ENSG00000081386_22 (sequence is synthesized)
ttggtgccgtgctttaatgtggcatggtacaagataaagaagtctgtgcctgaatgaatacacgcagcaaaattctcctcttctgtgtctttcccagttgaacattatgtgagcaaaatt

SEQ ID NO: 80056 - DNA, 120 bp, Artificial Sequence
  ENSG00000081386_23 (sequence is synthesized)
taagcttatacagtagtccccccttatctgtattttcactttacgcaatttccattaaccatggtcaactgtactttaaagttattaaatggatccagaaataaacaattcctacatttt

SEQ ID NO: 80057 - DNA, 120 bp, Artificial Sequence
  ENSG00000081386_24 (sequence is synthesized)
aaactgcacccgattctgagtagtgggatgaagtctcatgccctcctgctctcccatgagggttattgaatcattccttagtctagcatatccacagtgtatacactatctgccagttag

SEQ ID NO: 80058 - DNA, 120 bp, Artificial Sequence
  ENSG00000081386_25 (sequence is synthesized)
tcacttacttgacattttagttatcagatcacctgtcagggtatgacagtgcttgtattcaagtaacccttgttttactaaataatggcctgaaattgcaagagcatttctggcatgttg

SEQ ID NO: 80059 - DNA, 120 bp, Artificial Sequence
  ENSG00000081386_26 (sequence is synthesized)
ttgtaattattccattattagtccttaatttataaattaggcacagcaagagattaaactatcataggcatgtgtatatgtaggaaaaaaatatagtatatacagggttcagtatacccg

SEQ ID NO: 80060 - DNA, 120 bp, Artificial Sequence
  ENSG00000081386_27 (sequence is synthesized)
tggtttcaaacatcaacttggaattcttggagagcattccttgtagttaagcagggactactgtattctgttgagctttcacatgtttgagtctatttgtttctacacataatttagtta

SEQ ID NO: 80061 - DNA, 120 bp, Artificial Sequence
  ENSG00000081386_28 (sequence is synthesized)
tcttctgctaggaaggcagaaagcttctgtgtaagccaggcttaagtcaatcagagggcacaaaccttattaggaggctagagagtcaaggagaacctcaaatatgatcagagaattgtg

SEQ ID NO: 80062 - DNA, 120 bp, Artificial Sequence
  ENSG00000081386_29 (sequence is synthesized)
gaaaagacatcctttcaatgtaatgaaattgatagtaccacctgatacagggctttgcatgaacctaaaagtcttttggctgaatggtgagcagccactgtgcagttcaacgtaagtgtg

SEQ ID NO: 80063 - DNA, 120 bp, Artificial Sequence
  ENSG00000081386_30 (sequence is synthesized)
ccttaattgcacagaggtactgcccccacacctcctgacacctccatataccccagctatatctgctttaaggagttttccctggctccaaaggccattggcacccacccaagtattatg

SEQ ID NO: 80064 - DNA, 120 bp, Artificial Sequence
  ENSG00000081386_31 (sequence is synthesized)
ggaaacctccagagaggggagggactcagatttatatggctttattgaatccatgcccaaggcaacatcttactagttcctgtgggggtacaggacacctagatttagctaatggggttt

SEQ ID NO: 80065 - DNA, 120 bp, Artificial Sequence
  ENSG00000081386_32 (sequence is synthesized)
ggcaatgggaaggcaaacaaatttaataactttatgggtgaggtactttgggccagtagagtatactacagttatgtttacatctgaaagtgtagtagggattaattcccataagttata

SEQ ID NO: 80066 - DNA, 120 bp, Artificial Sequence
  ENSG00000081386_33 (sequence is synthesized)
gagagaattctaattccctgtaattcgcataagtcatagaattctaatcaggaataattgtatgtaaagatacctctgaggtccaacagctctgatcattttgggcttcaagtctctctc

SEQ ID NO: 80067 - DNA, 120 bp, Artificial Sequence
  ENSG00000081386_34 (sequence is synthesized)
tgtgactggtgattttgtgggttgaaacttctggcaaaagggggcagcccttgggagctgggggccaggggattgacttggttccctgacaagggtaccaggtccaccccttctgaaaag

SEQ ID NO: 80068 - DNA, 120 bp, Artificial Sequence
  ENSG00000081386_35 (sequence is synthesized)
cagctgttagtttactcttgggctcttttacacattggatatctcttccttgggtagagggttctgacctaaaattccactttaggagtttgtcgtcttggactcaacaactaacaaaat

SEQ ID NO: 80069 - DNA, 120 bp, Artificial Sequence
  ENSG00000081386_36 (sequence is synthesized)
gaaaaggacccagcaagcctcacttgtggaatgaaaatggggcattcaggaaagcacctgtcctggccccacagtatgtcagctgtataggcaatagtagtagctgtctcttagaaggga

SEQ ID NO: 80070 - DNA, 120 bp, Artificial Sequence
  ENSG00000081386_37 (sequence is synthesized)
aataatgtatcacctctttccagaacgaagcaaagttgctggcttagtagagccctcaattcatagaggttactgtaattgggcctggctcactgatgctttcgccaactgaaactacta

SEQ ID NO: 80071 - DNA, 120 bp, Artificial Sequence
  ENSG00000081386_38 (sequence is synthesized)
ggatcctgtgtgtgttcaaactcagtgccattaacaaacccaaagtgaagcggtcactcctctcagtggaaagagcacgaggatgttctcagctctggccaatactccatttcataaacc

SEQ ID NO: 80072 - DNA, 120 bp, Artificial Sequence
  ENSG00000081386_39 (sequence is synthesized)
atgttacatttttgttaagccttggctctggatgtggcctagatatttgatattctaattggaaattacagattaaaaagcaccctttctttgtacagtgggggtaaaagtcacagctgc

SEQ ID NO: 80073 - DNA, 120 bp, Artificial Sequence
  ENSG00000081386_40 (sequence is synthesized)
ttagtacaaccatctgggttgctcaagtagatgcccataataagagactattttctgataagactgactggaatcaagctgccgacagctttctccatccagattgtgacggttgctacc

SEQ ID NO: 80074 - DNA, 120 bp, Artificial Sequence
  ENSG00000081386_41 (sequence is synthesized)
tggatccatcattttactggtatggcaaaaaatcacccatgtgacactgggtgacatggtaaaagtacatggtacttttacagtaccatgtactgtacaaaataaaggtctctttatctg

SEQ ID NO: 80075 - DNA, 120 bp, Artificial Sequence
  ENSG00000081386_42 (sequence is synthesized)
ggtgcagagggttcgcagctcaggtgagagcgccgggcctccacgcggattgcggacctgcagggagggatgtgctagtgtccagggggcgggaacgcgacgtcccgggaactcccccaa

SEQ ID NO: 80076 - DNA, 120 bp, Artificial Sequence
  ENSG00000081386_43 (sequence is synthesized)
agcaggccgtcgctccctgtgcctcggccggcccgggacctcagcctgagaagggccggtgggggcgggctccgggggcgttaggtggggctgagtcctagttggaagatgctcggtgcg

SEQ ID NO: 80077 - DNA, 120 bp, Artificial Sequence
  ENSG00000081386_44 (sequence is synthesized)
ggccgaggtatgggcgccagaatgcagccaggcgtcggaaaacgcggtgctggcttcaggaggggaatgcgcgtttattgtattgaccatgaacctgccacaaagcgcgtacagcccgtg

SEQ ID NO: 80078 - DNA, 120 bp, Artificial Sequence
  ENSG00000081386_45 (sequence is synthesized)
ggtctgcggtgagaggccgagcctaggagctagaaggacctcgtgaattttggctctgtcacttgagcgtttgaaaatgaggatattagtaaaaactgctttgtgtcgttcagaggaagg

SEQ ID NO: 80079 - DNA, 120 bp, Artificial Sequence
  ENSG00000081386_46 (sequence is synthesized)
aggtcactttaggggtgaacacctaaatattgcaagacttttcttagaaagcctaaaggcacaaaaagcagcagttaaaagaaaataattaataaagttgattccattaaaagtaagaaa

SEQ ID NO: 80080 - DNA, 120 bp, Artificial Sequence
  ENSG00000081479_0 (sequence is synthesized)
aggcttttggccactaggagctggcggaggtgcagacctaaaggagcgttcgctagcagaggcgctgccggtgcggtgtgctacgcgcgcccacctcccggggaaggaacggcgaggccg

SEQ ID NO: 80081 - DNA, 120 bp, Artificial Sequence
  ENSG00000081479_1 (sequence is synthesized)
gggaccgtcgcggagatggatcgcgggccggcagcagtggcgtgcacgctgctcctggctctcgtcgcctgcctagcgccggccagtggccaagaatgtgacagtgcgcattttcgctgt

SEQ ID NO: 80082 - DNA, 120 bp, Artificial Sequence
  ENSG00000081479_2 (sequence is synthesized)
ggaagtgggcattgcatccctgcagactggaggtgtgatgggaccaaagactgttcagatgacgcggatgaaattggctgcgctgttgtgacctgccagcagggctatttcaagtgccag

SEQ ID NO: 80083 - DNA, 120 bp, Artificial Sequence
  ENSG00000081479_3 (sequence is synthesized)
agtgagggacaatgcatccccaactcctgggtgtgtgaccaagatcaagactgtgatgatggctcagatgaacgtcaagattgctcacaaagtacatgctcaagtcatcagataacatgc

SEQ ID NO: 80084 - DNA, 120 bp, Artificial Sequence
  ENSG00000081479_4 (sequence is synthesized)
tccaatggtcagtgtatcccaagtgaatacaggtgcgaccacgtcagagactgccccgatggagctgatgagaatgactgccagtacccaacatgtgagcagcttacttgtgacaatggg

SEQ ID NO: 80085 - DNA, 120 bp, Artificial Sequence
  ENSG00000081479_5 (sequence is synthesized)
gcctgctataacaccagtcagaagtgtgattggaaagttgattgcagggactcctcagatgaaatcaactgcactgagatatgcttgcacaatgagttttcatgtggcaatggagagtgt

SEQ ID NO: 80086 - DNA, 120 bp, Artificial Sequence
  ENSG00000081479_6 (sequence is synthesized)
atccctcgtgcttatgtctgtgaccatgacaatgattgccaagacggcagtgacgaacatgcttgcaactatccgacctgcggtggttaccagttcacttgccccagtggccgatgcatt

SEQ ID NO: 80087 - DNA, 120 bp, Artificial Sequence
  ENSG00000081479_7 (sequence is synthesized)
tatcaaaactgggtttgtgatggagaagatgactgtaaagataatggagatgaagatggatgtgaaagcggtcctcatgatgttcataaatgttccccaagagaatggtcttgcccagag

SEQ ID NO: 80088 - DNA, 120 bp, Artificial Sequence
  ENSG00000081479_8 (sequence is synthesized)
tcgggacgatgcatctccatttataaagtttgtgatgggattttagattgcccaggaagagaagatgaaaacaacactagtaccggaaaatactgtagtatgactctgtgctctgccttg

SEQ ID NO: 80089 - DNA, 120 bp, Artificial Sequence
  ENSG00000081479_9 (sequence is synthesized)
aactgccagtaccagtgccatgagacgccgtatggaggagcgtgtttttgtcccccaggttatatcatcaaccacaatgacagccgtacctgtgttgagtttgatgattgccagatatgg

SEQ ID NO: 80090 - DNA, 120 bp, Artificial Sequence
  ENSG00000081479_10 (sequence is synthesized)
ggaatttgtgaccagaagtgtgaaagccgacctggccgtcacctgtgccactgtgaagaagggtatatcttggagcgtggacagtattgcaaagctaatgattcctttggcgaggcctcc

SEQ ID NO: 80091 - DNA, 120 bp, Artificial Sequence
  ENSG00000081479_11 (sequence is synthesized)
attatcttctccaatggtcgggatttgttaattggtgatattcatggaaggagcttccggatcctagtggagtctcagaatcgtggagtggccgtgggtgtggctttccactatcacctg

SEQ ID NO: 80092 - DNA, 120 bp, Artificial Sequence
  ENSG00000081479_12 (sequence is synthesized)
caaagagttttttggacagacaccgtgcaaaataaggttttttcagttgacattaatggtttaaatatccaagaggttctcaatgtttctgttgaaaccccagagaacctggctgtggac

SEQ ID NO: 80093 - DNA, 120 bp, Artificial Sequence
  ENSG00000081479_13 (sequence is synthesized)
tgggttaataataaaatctatctagtggaaaccaaggtcaaccgcatagatatggtaaatttggatggaagctatcgggttacccttataactgaaaacttggggcatcctagaggaatt

SEQ ID NO: 80094 - DNA, 120 bp, Artificial Sequence
  ENSG00000081479_14 (sequence is synthesized)
gccgtggacccaactgttggttatttatttttctcagattgggagagcctttctggggaacctaagctggaaagggcattcatggatggcagcaaccgtaaagacttggtgaaaacaaag

SEQ ID NO: 80095 - DNA, 120 bp, Artificial Sequence
  ENSG00000081479_15 (sequence is synthesized)
ctgggatggcctgctggggtaactctggatatgatatcgaagcgtgtttactgggttgactctcggtttgattacattgaaactgtaacttatgatggaattcaaaggaagactgtagtt

SEQ ID NO: 80096 - DNA, 120 bp, Artificial Sequence
  ENSG00000081479_16 (sequence is synthesized)
catggaggctccctcattcctcatccctttggagtaagcttatttgaaggtcaggtgttctttacagattggacaaagatggccgtgctgaaggcaaacaagttcacagagaccaaccca

SEQ ID NO: 80097 - DNA, 120 bp, Artificial Sequence
  ENSG00000081479_17 (sequence is synthesized)
caagtgtactaccaggcttccctgaggccctatggagtgactgtttaccattccctcagacagccctatgctaccaatccgtgtaaagataacaatgggggctgtgagcaggtctgtgtc

SEQ ID NO: 80098 - DNA, 120 bp, Artificial Sequence
  ENSG00000081479_18 (sequence is synthesized)
ctcagccacagaacagataatgatggtttgggtttccgttgcaagtgcacattcggcttccaactggatacagatgagcgccactgcattgctgttcagaatttcctcattttttcatcc

SEQ ID NO: 80099 - DNA, 120 bp, Artificial Sequence
  ENSG00000081479_19 (sequence is synthesized)
caagttgctattcgtgggatcccgttcaccttgtctacccaggaagatgtcatggttccagtttcggggaatccttctttctttgtcgggattgattttgacgcccaggacagcactatc

SEQ ID NO: 80100 - DNA, 120 bp, Artificial Sequence
  ENSG00000081479_20 (sequence is synthesized)
tttttttcagatatgtcaaaacacatgatttttaagcaaaagattgatggcacaggaagagaaattctcgcagctaacagggtggaaaatgttgaaagtttggcttttgattggatttca

SEQ ID NO: 80101 - DNA, 120 bp, Artificial Sequence
  ENSG00000081479_21 (sequence is synthesized)
aagaatctctattggacagactctcattacaagagtatcagtgtcatgaggctagctgataaaacgagacgcacagtagttcagtatttaaataacccacggtcggtggtagttcatcct

SEQ ID NO: 80102 - DNA, 120 bp, Artificial Sequence
  ENSG00000081479_22 (sequence is synthesized)
tttgccgggtatctattcttcactgattggttccgtcctgctaaaattatgagagcatggagtgacggatctcacctcttgcctgtaataaacactactcttggatggcccaatggcttg

SEQ ID NO: 80103 - DNA, 120 bp, Artificial Sequence
  ENSG00000081479_23 (sequence is synthesized)
gccatcgattgggctgcttcacgattgtactgggtagatgcctattttgataaaattgagcacagcacctttgatggtttagacagaagaagactgggccatatagagcagatgacacat

SEQ ID NO: 80104 - DNA, 120 bp, Artificial Sequence
  ENSG00000081479_24 (sequence is synthesized)
ccgtttggacttgccatctttggagagcatttattttttactgactggagactgggtgccattattcgagtcaggaaagcagatggtggagaaatgacagttatccgaagtggcattgct

SEQ ID NO: 80105 - DNA, 120 bp, Artificial Sequence
  ENSG00000081479_25 (sequence is synthesized)
tacatactgcatttgaaatcgtatgatgtcaacatccagactggttctaacgcctgtaatcaacccacgcatcctaacggtgactgcagccacttctgcttcccggtgccaaatttccag

SEQ ID NO: 80106 - DNA, 120 bp, Artificial Sequence
  ENSG00000081479_26 (sequence is synthesized)
cgagtgtgtgggtgcccttatggaatgaggctggcttccaatcacttgacatgcgagggggacccaaccaatgaaccacccacagagcagtgtggcttattttccttcccctgtaaaaat

SEQ ID NO: 80107 - DNA, 120 bp, Artificial Sequence
  ENSG00000081479_27 (sequence is synthesized)
ggcagatgtgtgcccaattactatctctgtgatggagtcgatgattgtcatgataacagtgatgagcaactatgtggcacacttaataatacctgttcatcttcggcgttcacctgtggc

SEQ ID NO: 80108 - DNA, 120 bp, Artificial Sequence
  ENSG00000081479_28 (sequence is synthesized)
catggggagtgcattcctgcacactggcgctgtgacaaacgcaacgactgtgtggatggcagtgatgagcacaactgccccacccacgcacctgcttcctgccttgacacccaatacacc

SEQ ID NO: 80109 - DNA, 120 bp, Artificial Sequence
  ENSG00000081479_29 (sequence is synthesized)
tgtgataatcaccagtgtatctcaaagaactgggtctgtgacacagacaatgattgtggggatggatctgatgaaaagaactgcaattcgacagagacatgccaacctagtcagtttaat

SEQ ID NO: 80110 - DNA, 120 bp, Artificial Sequence
  ENSG00000081479_30 (sequence is synthesized)
tgccccaatcatcgatgtattgacctatcgtttgtctgtgatggtgacaaggattgtgttgatggatctgatgaggttggttgtgtattaaactgtactgcttctcaattcaagtgtgcc

SEQ ID NO: 80111 - DNA, 120 bp, Artificial Sequence
  ENSG00000081479_31 (sequence is synthesized)
agtggggataaatgtattggcgtcacaaatcgttgtgatggtgtttttgattgcagtgacaactcggatgaagcaggctgtccaaccaggcctcctggtatgtgccactcagatgaattt

SEQ ID NO: 80112 - DNA, 120 bp, Artificial Sequence
  ENSG00000081479_32 (sequence is synthesized)
cagtgccaagaagatggtatctgcatcccgaacttctgggaatgtgatgggcatccagactgcctctatggatctgatgagcacaatgcctgtgtccccaagacttgcccttcatcatat

SEQ ID NO: 80113 - DNA, 120 bp, Artificial Sequence
  ENSG00000081479_33 (sequence is synthesized)
ttccactgtgacaacggaaactgcatccacagggcatggctctgtgatcgggacaatgactgcggggatatgagtgatgagaaggactgccctactcagccctttcgctgtcctagttgg

SEQ ID NO: 80114 - DNA, 120 bp, Artificial Sequence
  ENSG00000081479_34 (sequence is synthesized)
caatggcagtgtcttggccataacatctgtgtgaatctgagtgtagtgtgtgatggcatctttgactgccccaatgggacagatgagtccccactttgcaatgggaacagctgctcagat

SEQ ID NO: 80115 - DNA, 120 bp, Artificial Sequence
  ENSG00000081479_35 (sequence is synthesized)
ttcaatggtggttgtactcacgagtgtgttcaagagccctttggggctaaatgcctatgtccattgggattcttacttgccaatgattctaagacctgtgaagacatagatgaatgtgat

SEQ ID NO: 80116 - DNA, 120 bp, Artificial Sequence
  ENSG00000081479_36 (sequence is synthesized)
attctaggctcttgtagccagcactgttacaatatgagaggttctttccggtgctcgtgtgatacaggctacatgttagaaagtgatgggaggacttgcaaagttacagcatctgagagt

SEQ ID NO: 80117 - DNA, 120 bp, Artificial Sequence
  ENSG00000081479_37 (sequence is synthesized)
ctgctgttacttgtggcaagtcagaacaaaattattgccgacagtgtcacctcccaggtccacaatatctattcattggtcgagaatggttcttacattgtagctgttgattttgattca

SEQ ID NO: 80118 - DNA, 120 bp, Artificial Sequence
  ENSG00000081479_38 (sequence is synthesized)
attagtggtcgtatcttttggtctgatgcaactcagggtaaaacctggagtgcgtttcaaaatggaacggacagaagagtggtatttgacagtagcatcatcttgactgaaactattgca

SEQ ID NO: 80119 - DNA, 120 bp, Artificial Sequence
  ENSG00000081479_39 (sequence is synthesized)
atagattgggtaggtcgtaatctttactggacagactatgctctggaaacaattgaagtctccaaaattgatgggagccacaggactgtgctgattagtaaaaacctaacaaatccaaga

SEQ ID NO: 80120 - DNA, 120 bp, Artificial Sequence
  ENSG00000081479_40 (sequence is synthesized)
ggactagcattagatcccagaatgaatgagcatctactgttctggtctgactggggccaccaccctcgcatcgagcgagccagcatggacggcagcatgcgcactgtcattgtccaggac

SEQ ID NO: 80121 - DNA, 120 bp, Artificial Sequence
  ENSG00000081479_41 (sequence is synthesized)
aagatcttctggccctgcggcttaactattgactaccccaacagactgctctacttcatggactcctatcttgattacatggacttttgtgattataatggacaccatcggagacaggtg

SEQ ID NO: 80122 - DNA, 120 bp, Artificial Sequence
  ENSG00000081479_42 (sequence is synthesized)
atagccagtgatttgattatacggcacccctatgccctaactctctttgaagactctgtgtactggactgaccgtgctactcgtcgggttatgcgagccaacaagtggcatggagggaac

SEQ ID NO: 80123 - DNA, 120 bp, Artificial Sequence
  ENSG00000081479_43 (sequence is synthesized)
cagtcagttgtaatgtataatattcaatggccccttgggattgttgcggttcatccttcgaaacaaccaaattccgtgaatccatgtgccttttcccgctgcagccatctctgcctgctt

SEQ ID NO: 80124 - DNA, 120 bp, Artificial Sequence
  ENSG00000081479_44 (sequence is synthesized)
tcctcacaggggcctcatttttactcctgtgtttgtccttcaggatggagtctgtctcctgatctcctgaattgcttgagagatgatcaacctttcttaataactgtaaggcaacatata

SEQ ID NO: 80125 - DNA, 120 bp, Artificial Sequence
  ENSG00000081479_45 (sequence is synthesized)
atttttggaatctcccttaatcctgaggtgaagagcaatgatgctatggtccccatagcagggatacagaatggtttagatgttgaatttgatgatgctgagcaatacatctattgggtt

SEQ ID NO: 80126 - DNA, 120 bp, Artificial Sequence
  ENSG00000081479_46 (sequence is synthesized)
gaaaatccaggtgaaattcacagagtgaagacagatggcaccaacaggacagtatttgcttctatatctatggtggggccttctatgaacctggccttagattggatttcaagaaacctt

SEQ ID NO: 80127 - DNA, 120 bp, Artificial Sequence
  ENSG00000081479_47 (sequence is synthesized)
tattctaccaatcctagaactcagtcaatcgaggttttgacactccacggagatatcagatacagaaaaacattgattgccaatgatgggacagctcttggagttggctttccaattggc

SEQ ID NO: 80128 - DNA, 120 bp, Artificial Sequence
  ENSG00000081479_48 (sequence is synthesized)
ataactgttgatcctgctcgtgggaagctgtactggtcagaccaaggaactgacagtggggttcctgccaagatcgccagtgctaacatggatggcacatctgtgaaaactctctttact

SEQ ID NO: 80129 - DNA, 120 bp, Artificial Sequence
  ENSG00000081479_49 (sequence is synthesized)
gggaacctcgaacacctggagtgtgtcactcttgacatcgaagagcagaaactctactgggcagtcactggaagaggagtgattgaaagaggaaacgtggatggaacagatcgaatgatc

SEQ ID NO: 80130 - DNA, 120 bp, Artificial Sequence
  ENSG00000081479_50 (sequence is synthesized)
ctggtacaccagctttcccacccctggggaattgcagtccatgattctttcctttattatactgatgaacagtatgaggtcattgaaagagttgataaggccactggggccaacaaaata

SEQ ID NO: 80131 - DNA, 120 bp, Artificial Sequence
  ENSG00000081479_51 (sequence is synthesized)
gtcttgagagataatgttccaaatctgaggggtcttcaagtttatcacagacgcaatgccgccgaatcctcaaatggctgtagcaacaacatgaatgcctgtcagcagatttgcctgcct

SEQ ID NO: 80132 - DNA, 120 bp, Artificial Sequence
  ENSG00000081479_52 (sequence is synthesized)
gtaccaggaggattgttttcctgcgcctgtgccactggatttaaactcaatcctgataatcggtcctgctctccatataactctttcattgttgtttcaatgctgtctgcaatcagaggc

SEQ ID NO: 80133 - DNA, 120 bp, Artificial Sequence
  ENSG00000081479_53 (sequence is synthesized)
tttagcttggaattgtcagatcattcagaaaccatggtgccggtggcaggccaaggacgaaacgcactgcatgtggatgtggatgtgtcctctggctttatttattggtgtgattttagc

SEQ ID NO: 80134 - DNA, 120 bp, Artificial Sequence
  ENSG00000081479_54 (sequence is synthesized)
agctcagtggcatctgataatgcgatccgtagaattaaaccagatggatcttctctgatgaacattgtgacacatggaataggagaaaatggagtccggggtattgcagtggattgggta

SEQ ID NO: 80135 - DNA, 120 bp, Artificial Sequence
  ENSG00000081479_55 (sequence is synthesized)
gcaggaaatctttatttcaccaatgcctttgtttctgaaacactgatagaagttctgcggatcaatactacttaccgccgtgttcttcttaaagtcacagtggacatgcctaggcatatt

SEQ ID NO: 80136 - DNA, 120 bp, Artificial Sequence
  ENSG00000081479_56 (sequence is synthesized)
gttgtagatcccaagaacagatacctcttctgggctgactatgggcagagaccaaagattgagcgttctttccttgactgtaccaatcgaacagtgcttgtgtcagagggcattgtcaca

SEQ ID NO: 80137 - DNA, 120 bp, Artificial Sequence
  ENSG00000081479_57 (sequence is synthesized)
ccacggggcttggcagtggaccgaagtgatggctacgtttattgggttgatgattctttagatataattgcaaggattcgtatcaatggagagaactctgaagtgattcgttatggcagt

SEQ ID NO: 80138 - DNA, 120 bp, Artificial Sequence
  ENSG00000081479_58 (sequence is synthesized)
cgttacccaactccttatggcatcactgtttttgaaaattctatcatatgggtagataggaatttgaaaaagatcttccaagccagcaaggaaccagagaacacagagccacccacagtg

SEQ ID NO: 80139 - DNA, 120 bp, Artificial Sequence
  ENSG00000081479_59 (sequence is synthesized)
ataagagacaatatcaactggctaagagatgtgaccatctttgacaagcaagtccagccccggtcaccagcagaggtcaacaacaacccttgcttggaaaacaatggtgggtgctctcat

SEQ ID NO: 80140 - DNA, 120 bp, Artificial Sequence
  ENSG00000081479_60 (sequence is synthesized)
ctctgctttgctctgcctggattgcacaccccaaaatgtgactgtgcctttgggaccctgcaaagtgatggcaagaattgtgccatttcaacagaaaatttcctcatctttgccttgtct

SEQ ID NO: 80141 - DNA, 120 bp, Artificial Sequence
  ENSG00000081479_61 (sequence is synthesized)
aattccttgagaagcttacacttggaccctgaaaaccatagcccacctttccaaacaataaatgtggaaagaactgtcatgtctctagactatgacagtgtaagtgatagaatctacttc

SEQ ID NO: 80142 - DNA, 120 bp, Artificial Sequence
  ENSG00000081479_62 (sequence is synthesized)
acacaaaatttagcctctggagttggacagatttcctatgccaccctgtcttcagggatccatactccaactgtcattgcttcaggtatagggactgctgatggcattgcctttgactgg

SEQ ID NO: 80143 - DNA, 120 bp, Artificial Sequence
  ENSG00000081479_63 (sequence is synthesized)
attactagaagaatttattacagtgactacctcaaccagatgattaattccatggctgaagatgggtctaaccgcactgtgatagcccgcgttccaaaaccaagagcaattgtgttagat

SEQ ID NO: 80144 - DNA, 120 bp, Artificial Sequence
  ENSG00000081479_64 (sequence is synthesized)
ccctgccaagggtacctgtactgggctgactgggatacacatgccaaaatcgagagagccacattgggaggaaacttccgcgtacccattgtgaacagcagtctggtcatgcccagtggg

SEQ ID NO: 80145 - DNA, 120 bp, Artificial Sequence
  ENSG00000081479_65 (sequence is synthesized)
attgaacgcagcactctgacgggcgtggatcgtgaagtcattgtcaatgcagccgttcatgcttttggcttgactctctatggccagtatatttactggactgacttgtacacacaaaga

SEQ ID NO: 80146 - DNA, 120 bp, Artificial Sequence
  ENSG00000081479_66 (sequence is synthesized)
atttaccgagctaacaaatatgacgggtcaggtcagattgcaatgaccacaaatttgctctcccagcccaggggaatcaacactgttgtgaagaaccagaaacaacagtgtaacaatcct

SEQ ID NO: 80147 - DNA, 120 bp, Artificial Sequence
  ENSG00000081479_67 (sequence is synthesized)
tgtgaacagtttaatgggggctgcagccatatctgtgcaccaggtccaaatggtgccgagtgccagtgtccacatgagggcaactggtatttggccaacaacaggaagcactgcattgtg

SEQ ID NO: 80148 - DNA, 120 bp, Artificial Sequence
  ENSG00000081479_68 (sequence is synthesized)
gacaatggtgaacgatgtggtgcatcttccttcacctgctccaatgggcgctgcatctcggaagagtggaagtgtgataatgacaacgactgtggggatggcagtgatgagatggaaagt

SEQ ID NO: 80149 - DNA, 120 bp, Artificial Sequence
  ENSG00000081479_69 (sequence is synthesized)
gtctgtgcacttcacacctgctcaccgacagccttcacctgtgccaatgggcgatgtgtccaatactcttaccgctgtgattactacaatgactgtggtgatggcagtgatgaggcaggg

SEQ ID NO: 80150 - DNA, 120 bp, Artificial Sequence
  ENSG00000081479_70 (sequence is synthesized)
tgcctgttcagggactgcaatgccaccacggagtttatgtgcaataacagaaggtgcatacctcgtgagtttatctgcaatggtgtagacaactgccatgataataacacttcagatgag

SEQ ID NO: 80151 - DNA, 120 bp, Artificial Sequence
  ENSG00000081479_71 (sequence is synthesized)
aaaaattgccctgatcgcacttgccagtctggatacacaaaatgtcataattcaaatatttgtattcctcgcgtttatttgtgtgacggagacaatgactgtggagataacagtgatgaa

SEQ ID NO: 80152 - DNA, 120 bp, Artificial Sequence
  ENSG00000081479_72 (sequence is synthesized)
aaccctacttattgcaccactcacacgtgcagcagcagtgagttccaatgcgcatctgggcgctgtattcctcaacattggtattgtgatcaagaaacagattgttttgatgcctctgat

SEQ ID NO: 80153 - DNA, 120 bp, Artificial Sequence
  ENSG00000081479_73 (sequence is synthesized)
gaacctgcctcttgtggtcactctgagcgaacatgcctagctgatgagttcaagtgtgatggtgggaggtgcatcccaagcgaatggatctgtgacggtgataatgactgtggggatatg

SEQ ID NO: 80154 - DNA, 120 bp, Artificial Sequence
  ENSG00000081479_74 (sequence is synthesized)
agtgacgaggataaaaggcaccagtgtcagaatcaaaactgctcggattccgagtttctctgtgtaaatgacagacctccggacaggaggtgcattccccagtcttgggtctgtgatggc

SEQ ID NO: 80155 - DNA, 120 bp, Artificial Sequence
  ENSG00000081479_75 (sequence is synthesized)
gatgtggattgtactgacggctacgatgagaatcagaattgcaccaggagaacttgctctgaaaatgaattcacctgtggttacggactgtgtatcccaaagatattcaggtgtgaccgg

SEQ ID NO: 80156 - DNA, 120 bp, Artificial Sequence
  ENSG00000081479_76 (sequence is synthesized)
cacaatgactgtggtgactatagcgacgagaggggctgcttataccagacttgccaacagaatcagtttacctgtcagaacgggcgctgcattagtaaaaccttcgtctgtgatgaggat

SEQ ID NO: 80157 - DNA, 120 bp, Artificial Sequence
  ENSG00000081479_77 (sequence is synthesized)
aatgactgtggagacggatctgatgagctgatgcacctgtgccacaccccagaacccacgtgtccacctcacgagttcaagtgtgacaatgggcgctgcatcgagatgatgaaactctgc

SEQ ID NO: 80158 - DNA, 120 bp, Artificial Sequence
  ENSG00000081479_78 (sequence is synthesized)
aaccacctagatgactgtttggacaacagcgatgagaaaggctgtggcattaatgaatgccatgacccttcaatcagtggctgcgatcacaactgcacagacaccttaaccagtttctat

SEQ ID NO: 80159 - DNA, 120 bp, Artificial Sequence
  ENSG00000081479_79 (sequence is synthesized)
tgttcctgtcgtcctggttacaagctcatgtctgacaagcggacttgtgttgatattgatgaatgcacagagatgccttttgtctgtagccagaagtgtgagaatgtaataggctcctac

SEQ ID NO: 80160 - DNA, 120 bp, Artificial Sequence
  ENSG00000081479_80 (sequence is synthesized)
atctgtaagtgtgccccaggctacctccgagaaccagatggaaagacctgccggcaaaacagtaacatcgaaccctatctcatttttagcaaccgttactatttgagaaatttaactata

SEQ ID NO: 80161 - DNA, 120 bp, Artificial Sequence
  ENSG00000081479_81 (sequence is synthesized)
gatggctatttttactccctcatcttggaaggactggacaatgttgtggcattagattttgaccgagtagagaagagattgtattggattgatacacagaggcaagtcattgagagaatg

SEQ ID NO: 80162 - DNA, 120 bp, Artificial Sequence
  ENSG00000081479_82 (sequence is synthesized)
tttctgaataagacaaacaaggagacaatcataaaccacagactaccagctgcagaaagtctggctgtagactgggtttccagaaagctctactggttggatgcccgcctggatggcctc

SEQ ID NO: 80163 - DNA, 120 bp, Artificial Sequence
  ENSG00000081479_83 (sequence is synthesized)
tttgtctctgacctcaatggtggacaccgccgcatgctggcccagcactgtgtggatgccaacaacaccttctgctttgataatcccagaggacttgcccttcaccctcaatatgggtac

SEQ ID NO: 80164 - DNA, 120 bp, Artificial Sequence
  ENSG00000081479_84 (sequence is synthesized)
ctctactgggcagactggggtcaccgcgcatacattgggagagtaggcatggatggaaccaacaagtctgtgataatctccaccaagttagagtggcctaatggcatcaccattgattac

SEQ ID NO: 80165 - DNA, 120 bp, Artificial Sequence
  ENSG00000081479_85 (sequence is synthesized)
accaatgatctactctactgggcagatgcccacctgggttacatagagtactctgatttggagggccaccatcgacacacggtgtatgatggggcactgcctcaccctttcgctattacc

SEQ ID NO: 80166 - DNA, 120 bp, Artificial Sequence
  ENSG00000081479_86 (sequence is synthesized)
atttttgaagacactatttattggacagattggaatacaaggacagtggaaaagggaaacaaatatgatggatcaaatagacagacactggtgaacacaacacacagaccatttgacatc

SEQ ID NO: 80167 - DNA, 120 bp, Artificial Sequence
  ENSG00000081479_87 (sequence is synthesized)
catgtgtaccatccatataggcagcccattgtgagcaatccctgtggtaccaacaatggtggctgttctcatctctgcctcatcaagccaggaggaaaagggttcacttgcgagtgtcca

SEQ ID NO: 80168 - DNA, 120 bp, Artificial Sequence
  ENSG00000081479_88 (sequence is synthesized)
gatgacttccgcacccttcagctgagtggcagcacctactgcatgcccatgtgctccagcacccagttcctgtgcgctaacaatgaaaagtgcattcctatctggtggaaatgtgatgga

SEQ ID NO: 80169 - DNA, 120 bp, Artificial Sequence
  ENSG00000081479_89 (sequence is synthesized)
cagaaagactgctcagatggctctgatgaactggccctttgcccgcagcgcttctgccgactgggacagttccagtgcagtgacggcaactgcaccagcccgcagactttatgcaatgct

SEQ ID NO: 80170 - DNA, 120 bp, Artificial Sequence
  ENSG00000081479_90 (sequence is synthesized)
caccaaaattgccctgatgggtctgatgaagaccgtcttctttgtgagaatcaccactgtgactccaatgaatggcagtgcgccaacaaacgttgcatcccagaatcctggcagtgtgac

SEQ ID NO: 80171 - DNA, 120 bp, Artificial Sequence
  ENSG00000081479_91 (sequence is synthesized)
acatttaacgactgtgaggataactcagatgaagacagttcccactgtgccagcaggacctgccggccgggccagtttcggtgtgctaatggccgctgcatcccgcaggcctggaagtgt

SEQ ID NO: 80172 - DNA, 120 bp, Artificial Sequence
  ENSG00000081479_92 (sequence is synthesized)
gatgtggataatgattgtggagaccactcggatgagcccattgaagaatgcatgagctctgcccatctctgtgacaacttcacagaattcagctgcaaaacaaattaccgctgcatccca

SEQ ID NO: 80173 - DNA, 120 bp, Artificial Sequence
  ENSG00000081479_93 (sequence is synthesized)
aagtgggccgtgtgcaatggtgtagatgactgcagggacaacagtgatgagcaaggctgtgaggagaggacatgccatcctgtgggggatttccgctgtaaaaatcaccactgcatccct

SEQ ID NO: 80174 - DNA, 120 bp, Artificial Sequence
  ENSG00000081479_94 (sequence is synthesized)
cttcgttggcagtgtgatgggcaaaatgactgtggagataactcagatgaggaaaactgtgctccccgggagtgcacagagagcgagtttcgatgtgtcaatcagcagtgcattccctcg

SEQ ID NO: 80175 - DNA, 120 bp, Artificial Sequence
  ENSG00000081479_95 (sequence is synthesized)
cgatggatctgtgaccattacaacgactgtggggacaactcagatgaacgggactgtgagatgaggacctgccatcctgaatattttcagtgtacaagtggacattgtgtacacagtgaa

SEQ ID NO: 80176 - DNA, 120 bp, Artificial Sequence
  ENSG00000081479_96 (sequence is synthesized)
ctgaaatgcgatggatccgctgactgtttggatgcgtctgatgaagctgattgtcccacacgctttcctgatggtgcatactgccaggctactatgttcgaatgcaaaaaccatgtttgt

SEQ ID NO: 80177 - DNA, 120 bp, Artificial Sequence
  ENSG00000081479_97 (sequence is synthesized)
atcccgccatattggaaatgtgatggcgatgatgactgtggcgatggttcagatgaagaacttcacctgtgcttggatgttccctgtaattcaccaaaccgtttccggtgtgacaacaat

SEQ ID NO: 80178 - DNA, 120 bp, Artificial Sequence
  ENSG00000081479_98 (sequence is synthesized)
cgctgcatttatagtcatgaggtgtgcaatggtgtggatgactgtggagatggaactgatgagacagaggagcactgtagaaaaccgacccctaaaccttgtacagaatatgaatataag

SEQ ID NO: 80179 - DNA, 120 bp, Artificial Sequence
  ENSG00000081479_99 (sequence is synthesized)
tgtggcaatgggcattgcattccacatgacaatgtgtgtgatgatgccgatgactgtggtgactggtccgatgaactgggttgcaataaaggaaaagaaagaacatgtgctgaaaatata

SEQ ID NO: 80180 - DNA, 120 bp, Artificial Sequence
  ENSG00000081479_100 (sequence is synthesized)
tgcgagcaaaattgtacccaattaaatgaaggaggatttatctgctcctgtacagctgggttcgaaaccaatgtttttgacagaacctcctgtctagatatcaatgaatgtgaacaattt

SEQ ID NO: 80181 - DNA, 120 bp, Artificial Sequence
  ENSG00000081479_101 (sequence is synthesized)
gggacttgtccccagcactgcagaaataccaaaggaagttatgagtgtgtctgtgctgatggcttcacgtctatgagtgaccgccctggaaaacgatgtgcagctgagggtagctctcct

SEQ ID NO: 80182 - DNA, 120 bp, Artificial Sequence
  ENSG00000081479_102 (sequence is synthesized)
ttgttgctactgcctgacaatgtccgaattcgaaaatataatctctcatctgagaggttctcagagtatcttcaagatgaggaatatatccaagctgttgattatgattgggatcccaag

SEQ ID NO: 80183 - DNA, 120 bp, Artificial Sequence
  ENSG00000081479_103 (sequence is synthesized)
gacataggcctcagtgttgtgtattacactgtgcgaggggagggctctaggtttggtgctatcaaacgtgcctacatccccaactttgaatccggccgcaataatcttgtgcaggaagtt

SEQ ID NO: 80184 - DNA, 120 bp, Artificial Sequence
  ENSG00000081479_104 (sequence is synthesized)
gacctgaaactgaaatacgtaatgcagccagatggaatagcagtggactgggttggaaggcatatttactggtcagatgtcaagaataaacgcattgaggtggctaaacttgatggaagg

SEQ ID NO: 80185 - DNA, 120 bp, Artificial Sequence
  ENSG00000081479_105 (sequence is synthesized)
tacagaaagtggctgatttccactgacctggaccaaccagctgctattgctgtgaatcccaaactagggcttatgttctggactgactggggaaaggaacctaaaatcgagtctgcctgg

SEQ ID NO: 80186 - DNA, 120 bp, Artificial Sequence
  ENSG00000081479_106 (sequence is synthesized)
atgaatggagaggaccgcaacatcctggttttcgaggaccttggttggccaactggcctttctatcgattatttgaacaatgaccgaatctactggagtgacttcaaggaggacgttatt

SEQ ID NO: 80187 - DNA, 120 bp, Artificial Sequence
  ENSG00000081479_107 (sequence is synthesized)
gaaaccataaaatatgatgggactgataggagagtcattgcaaaggaagcaatgaacccttacagcctggacatctttgaagaccagttatactggatatctaaggaaaagggagaagta

SEQ ID NO: 80188 - DNA, 120 bp, Artificial Sequence
  ENSG00000081479_108 (sequence is synthesized)
tggaaacaaaataaatttgggcaaggaaagaaagagaaaacgctggtagtgaacccttggctcactcaagttcgaatctttcatcaactcagatacaataagtcagtgcccaacctttgc

SEQ ID NO: 80189 - DNA, 120 bp, Artificial Sequence
  ENSG00000081479_109 (sequence is synthesized)
aaacagatctgcagccacctctgccttctgagacctggaggatacagctgtgcctgtccccaaggctccagctttatagaggggagcaccactgagtgtgatgcagccatcgaactgcct

SEQ ID NO: 80190 - DNA, 120 bp, Artificial Sequence
  ENSG00000081479_110 (sequence is synthesized)
atcaacctgccccccccatgcaggtgcatgcacggaggaaattgctattttgatgagactgacctccccaaatgcaagtgtcctagcggctacaccggaaaatattgtgaaatggcgttt

SEQ ID NO: 80191 - DNA, 120 bp, Artificial Sequence
  ENSG00000081479_111 (sequence is synthesized)
tcaaaaggcatctctccaggaacaaccgcagtagctgtgctgttgacaatcctcttgatcgtcgtaattggagctctggcaattgcaggattcttccactatagaaggaccggctccctt

SEQ ID NO: 80192 - DNA, 120 bp, Artificial Sequence
  ENSG00000081479_112 (sequence is synthesized)
ttgcctgctctgcccaagctgccaagcttaagcagtctcgtcaagccctctgaaaatgggaatggggtgaccttcagatcaggggcagatcttaacatggatattggagtgtctggtttt

SEQ ID NO: 80193 - DNA, 120 bp, Artificial Sequence
  ENSG00000081479_113 (sequence is synthesized)
ggacctgagactgctattgacaggtcaatggcaatgagtgaagactttgtcatggaaatggggaagcagcccataatatttgaaaacccaatgtactcagccagagacagtgctgtcaaa

SEQ ID NO: 80194 - DNA, 120 bp, Artificial Sequence
  ENSG00000081479_114 (sequence is synthesized)
gtggttcagccaatccaggtgactgtatctgaaaatgtggataataagaattatggaagtcccataaacccttctgagatagttccagagacaaacccaacttcaccagctgctgatgga

SEQ ID NO: 80195 - DNA, 120 bp, Artificial Sequence
  ENSG00000081479_115 (sequence is synthesized)
actcaggtgacaaaatggaatctcttcaaacgaaaatctaaacaaactaccaactttgaaaatccaatctatgcacagatggagaacgagcaaaaggaaagtgttgctgcgacaccacct

SEQ ID NO: 80196 - DNA, 120 bp, Artificial Sequence
  ENSG00000081479_116 (sequence is synthesized)
ccatcaccttcgctccctgctaagcctaagcctccttcgagaagagacccaactccaacctattctgcaacagaagacacttttaaagacaccgcaaatcttgttaaagaagactctgaa

SEQ ID NO: 80197 - DNA, 120 bp, Artificial Sequence
  ENSG00000081479_117 (sequence is synthesized)
gtatagctataccagctatttagggaataattagaaacacacttttgcacatatattttttacaaacagatgaaaaaagttaacattcagtactttatgaaaaaaatatatttttccctg

SEQ ID NO: 80198 - DNA, 120 bp, Artificial Sequence
  ENSG00000081479_118 (sequence is synthesized)
tttgcctatagttggaggtatcctgtgtgtctttttttacttatgccgtctcatatttttacaaataattatcacaatgtactatatgtatatctttgcactgaagttgtctgaaggtaa

SEQ ID NO: 80199 - DNA, 120 bp, Artificial Sequence
  ENSG00000081479_119 (sequence is synthesized)
tactataaatatattgtatatttgtaaattttggaaagattatcctgttactgaatttgctaataaagatgtctgctgatttggttggtgatcattatagtaaatgatccaacaagaaaa

SEQ ID NO: 80200 - DNA, 120 bp, Artificial Sequence
  ENSG00000081479_120 (sequence is synthesized)
ggaattgactggggacctttagccgtgtctaaagaagaggcaccactcatatttcctataaaattatctaggaaaggaatccaggccccgctcttgggtccatttttacacattagcact

SEQ ID NO: 80201 - DNA, 120 bp, Artificial Sequence
  ENSG00000081479_121 (sequence is synthesized)
taattaatgttcaatattacatgtcaatttgattaatggctatgttgataggggccactatgtgttgtatagacatctggacttgactgtagactcctcagataatacagaaggtaggaa

SEQ ID NO: 80202 - DNA, 120 bp, Artificial Sequence
  ENSG00000081479_122 (sequence is synthesized)
aagcaattcagtttggcccttctgtgtgttggcattgtctaaccagaactctctgtttcatgtgtgttctctcactagctgccaagacaacatttttatttgtgatgtctatgaggaaat

SEQ ID NO: 80203 - DNA, 120 bp, Artificial Sequence
  ENSG00000081479_123 (sequence is synthesized)
cccatatcattaagtgccagtgtcctgcattgagtttgtggttaattaaatgagctcttctgctgatggaccctggagcaatttctcccctcacctgacattcaaggtggtcacctgccc

SEQ ID NO: 80204 - DNA, 120 bp, Artificial Sequence
  ENSG00000081479_124 (sequence is synthesized)
tagtagttggagctcagtagctgaatttctgaaaccaaatctgtgtcttcataaaataaggtgcaaaaaaaaaaaataccagttaagtaaagcctcaactgggtttttgtttctatgaaa

SEQ ID NO: 80205 - DNA, 120 bp, Artificial Sequence
  ENSG00000081479_125 (sequence is synthesized)
atatcattataatcactatttatttcctaagttgaacctgaatagaaagggaaaccattcttattaagctttttattaggccctgtggctaaatgtgtacatttatattagaatgtactg

SEQ ID NO: 80206 - DNA, 85 bp, Artificial Sequence
  ENSG00000081479_126 (sequence is synthesized)
gtccagatcttttctttaagatggagtcttgctatattgccaaggctgatcttgaagtcctgggctcaagtgatcctcccacctc

SEQ ID NO: 80207 - DNA, 120 bp, Artificial Sequence
  ENSG00000081479_127 (sequence is synthesized)
cctcagcctcctgagtggttggggttacgggcgtgagccactgtgcctggcttccagctctcctcttaaatagtgggtatagtctgcacaacaggaaccatggcaggaatatacactttc

SEQ ID NO: 80208 - DNA, 120 bp, Artificial Sequence
  ENSG00000081479_128 (sequence is synthesized)
ccatagcaaatagcatacctgactctctgtgctaatattgcacatttgttaaacaatgaatgaatggatggatggatggatggatgaatgaatgaaacatatactactgattattttatt

SEQ ID NO: 80209 - DNA, 120 bp, Artificial Sequence
  ENSG00000081479_129 (sequence is synthesized)
ccagagttctcaaaatatttgttgctgatattttgagtgctgactgtaattactttgattagataaacaactggaaataatgctgctgaaaaagttctaataaatgtgtattttatcaga

SEQ ID NO: 80210 - DNA, 120 bp, Artificial Sequence
  ENSG00000081479_130 (sequence is synthesized)
atttgtgacaagaaattatttagcttttcaggcatttaattgaactaactacagctttaattataataaagcaaaactaacaaattgtatgatatatatgtgtcttttataacaggaaga

SEQ ID NO: 80211 - DNA, 120 bp, Artificial Sequence
  ENSG00000081479_131 (sequence is synthesized)
cagtaagtttcctgaccacagtttactggccataaactcattctgaacagtagcctggtgtgcatcaccattgtcacagtcactgtgtagctttgtaggaaggatttcagttcctctatg

SEQ ID NO: 80212 - DNA, 120 bp, Artificial Sequence
  ENSG00000081479_132 (sequence is synthesized)
agttcacatctgtgtagggggtaaccataattgaattcaaatacatcaccattggataattttctgattaaatcctttgtacttggttatgtgtttttacttctttttatgtctttgttt

SEQ ID NO: 80213 - DNA, 120 bp, Artificial Sequence
  ENSG00000081665_0 (sequence is synthesized)
ctgctctgtgccgtcagctcctagaggcccagcctctgtggccctgtgacctgcaggtattaggagggtcacagctaggacgccgggaccccctggaagcctagaaatgggaccattgca

SEQ ID NO: 80214 - DNA, 120 bp, Artificial Sequence
  ENSG00000081665_1 (sequence is synthesized)
ctctctggaggagtggcattgcctggacgctgcacagcggaatctatatagggatgtgatgttagagaactacagaaacctgatcttccttggtattgttgtctctaaaccaaacctgat

SEQ ID NO: 80215 - DNA, 120 bp, Artificial Sequence
  ENSG00000081665_2 (sequence is synthesized)
tgttgtctctaaaccaaacctgatcacctgtctggagcaaggaaaaaaacctttaactatgaagaggcatgagatgattgccaaacccccagttatgtattctcattttgcccaagacct

SEQ ID NO: 80216 - DNA, 120 bp, Artificial Sequence
  ENSG00000081665_3 (sequence is synthesized)
ttggtcagagcagagcataaaagattctttccaaaaagtgatactaagaagatatgaaaaatgtagacatgacaatttacagttaaaaaaaggctgtgaaagtgtagatgagtgtccagt

SEQ ID NO: 80217 - DNA, 120 bp, Artificial Sequence
  ENSG00000081665_4 (sequence is synthesized)
gcacaaaagaggttataatggacttaaacaatgtttggcaactacccagagaaaaatatttcaatgtgatgaatatgtgaaattcttgcataaattttcaaattcaaacaaacataagat

SEQ ID NO: 80218 - DNA, 120 bp, Artificial Sequence
  ENSG00000081665_5 (sequence is synthesized)
aagagatactggaaaaaaatcttttaaatgtatagaatatgggaaaacttttaaccagtcttcaacccgtactacatataagaaaattgatgctggagagaaacgctataaatgtgaaga

SEQ ID NO: 80219 - DNA, 74 bp, Artificial Sequence
  ENSG00000081665_6 (sequence is synthesized)
agaaaattgatgctggagagaaacgctataaatgtgaagaatgtggtaaagcctataagcagtcctcacacctt

SEQ ID NO: 80220 - DNA, 89 bp, Artificial Sequence
  ENSG00000081665_7 (sequence is synthesized)
aattcatactggagagaaaccctacagatgtagagaatgtggcaaagcttttaaccaccctgcaacccttttttatacaagtgtgataa

SEQ ID NO: 80221 - DNA, 89 bp, Artificial Sequence
  ENSG00000081665_8 (sequence is synthesized)
ttatacaagtgtgataaatgtggcaaagcctttatttcatcctcaacccttactaaacatgagataattcatactggagagaaacccta

SEQ ID NO: 80222 - DNA, 120 bp, Artificial Sequence
  ENSG00000081665_9 (sequence is synthesized)
ctcaaaccttactaaacataagagaattcatactggagatgtaccctacaaatgtgacgaatgtggcaaaacctttacctggtactcaagcctctctaaacataagagagctcatactgg

SEQ ID NO: 80223 - DNA, 76 bp, Artificial Sequence
  ENSG00000081665_10 (sequence is synthesized)
agcctctctaaacataagagaggcctttactgcattctcaactctaactgaacataagataattcatactggagag

SEQ ID NO: 80224 - DNA, 120 bp, Artificial Sequence
  ENSG00000081665_11 (sequence is synthesized)
ttttaactggtcctcagcccttaataaacataagaaaattcatattagacagaaaccctgcatagtgaagaatgtggaaaatcttttaaatgttcctcaacccttaataagcataagata

SEQ ID NO: 80225 - DNA, 120 bp, Artificial Sequence
  ENSG00000081665_12 (sequence is synthesized)
attcatactggagagaaaccgtatgaatgtgatgaatgtgggaaagcctttaactagccctggactctgactaaatatgagaatttatatggaacataaaccctacaaatataaagaatg

SEQ ID NO: 80226 - DNA, 120 bp, Artificial Sequence
  ENSG00000081665_13 (sequence is synthesized)
tgacaaagctttttaaggaagttctcaacccttattacacataatttatactggacagaaaccctacaagtgtgaagaatatggcaaagcctataacaacctgtcaactctttttgtttt

SEQ ID NO: 80227 - DNA, 120 bp, Artificial Sequence
  ENSG00000081665_14 (sequence is synthesized)
atcctaaagtgctgagatgacaggcatgagccacgacgcccagccacaagttctcaattcttaagagacatggcgataattcatgctgaagaggaactctacaaacctgaaagatgcaac

SEQ ID NO: 80228 - DNA, 120 bp, Artificial Sequence
  ENSG00000081665_15 (sequence is synthesized)
acctccaacttttgtatacataaaaataaattatactaatgtgaaaccctggaaatgtatgaaatgagacaaagcgtttatatggttgccacacttgattgtagatggagtctcggtctt

SEQ ID NO: 80229 - DNA, 120 bp, Artificial Sequence
  ENSG00000081665_16 (sequence is synthesized)
cgtgagccaccgcacctggccattatgccactaactttaacctatcccaccttaatcaagggtgtacttaaaagatggtaacaatatactgtttggtacgtagtggaataacatctctac

SEQ ID NO: 80230 - DNA, 120 bp, Artificial Sequence
  ENSG00000081665_17 (sequence is synthesized)
ttgtcactttgccagtggctttaaactgcaaatgagttgaattgttcccatagcttaaattttttttcttattgaaatctattactagtatttgtgggtatacagtatgtgtatatcttt

SEQ ID NO: 80231 - DNA, 120 bp, Artificial Sequence
  ENSG00000081665_18 (sequence is synthesized)
atgccttatatggcatattttgattcaggcctacaatatgtagtaattacattagggtaaagtatccatcacctctagcatttatcctttgaattacagtgtaattatacatttttaatt

SEQ ID NO: 80232 - DNA, 120 bp, Artificial Sequence
  ENSG00000081665_19 (sequence is synthesized)
ttttaattattttaaaatgtacaattaaattgttactgactacaggtttatttttatggtcataataaaaattatacagaaaaataaataaaatatggccaggtgcagtggctcaggcct

SEQ ID NO: 80233 - DNA, 83 bp, Artificial Sequence
  ENSG00000081665_20 (sequence is synthesized)
gaggaagcgctcctttcgcgggggcactcgctgtggatgaataaagtacactgacacacattctgctctgccagtccagctga

SEQ ID NO: 80234 - DNA, 120 bp, Artificial Sequence
  ENSG00000081665_21 (sequence is synthesized)
tcgctgtggatgaataaagtacactgacacacattctgctctgccagtccagctgagggtccgagccgcttacaggctccaaggccaggcacggtggctcatgcctataattccagcact

SEQ ID NO: 80235 - DNA, 120 bp, Artificial Sequence
  ENSG00000081665_22 (sequence is synthesized)
ggcggatcatctgaggtcaggagttcacgcaaatcagggggcccgtgaaaggcaactgagcagggatccatgggaaagacaccctcagaggcacaagattctctcgttacctttcagttt

SEQ ID NO: 80236 - DNA, 120 bp, Artificial Sequence
  ENSG00000081665_23 (sequence is synthesized)
gctgatacttcagttaaagtctcctgggaaacgtctgcattaggttcttcctctgtagttcttcttaccttgcctgtaaaacaaaacctatctagtgtctgcataggtttccacttcttg

SEQ ID NO: 80237 - DNA, 120 bp, Artificial Sequence
  ENSG00000081665_24 (sequence is synthesized)
tccccacctgaggaatggaaagcaacggcacagtccttgctcatgttttggagtgaaaggagcttgaaggtcatgtgagctttgccaaggcttctcctggcctcatgtcagatacagctc

SEQ ID NO: 80238 - DNA, 120 bp, Artificial Sequence
  ENSG00000081665_25 (sequence is synthesized)
ggcttctcctggcctcatgtcagatacagctcctaactcccaagcagcctaccatagtgtcctcctttttttgcgtgtgtgatggggtttcgcacttgttgcccaggctggagtgcaatg

SEQ ID NO: 80239 - DNA, 76 bp, Artificial Sequence
  ENSG00000081665_26 (sequence is synthesized)
ctttaagggaggagaccactcctcatattgtcttatgcccaatttctgcttccaaagaaagaagaagtaaaaacta

SEQ ID NO: 80240 - DNA, 120 bp, Artificial Sequence
  ENSG00000081665_27 (sequence is synthesized)
gaaatccacaggcagacagcccagcgccacaccatgggcctggtagttaaagatcgagccctgacctaatcggttatgttatctacagattacagacattgtatagaaaagcactttgaa

SEQ ID NO: 80241 - DNA, 120 bp, Artificial Sequence
  ENSG00000081665_28 (sequence is synthesized)
attacagacattgtatagaaaagcactttgaaaatccctgtcctgttctgttccattctaattactggtgcatgcagccttcagtcacttactccctgcttgctcaatcgatcacgaccc

SEQ ID NO: 80242 - DNA, 120 bp, Artificial Sequence
  ENSG00000081665_29 (sequence is synthesized)
atgcaaacccccttagagttgtaagcccttaagagggataggaattgctcactcagggagctcagtttttgagacgtgagtcttgccaatgctcccggccgaataaagcccttccttctt

SEQ ID NO: 80243 - DNA, 120 bp, Artificial Sequence
  ENSG00000081665_30 (sequence is synthesized)
tgtggcaaaacttttgagtgcttacaccttatttcacaggaaagcttttatccttgagaaaaatcgtacagatataaagaatatggaaacgccattaacgcccactcacatctcaacaga

SEQ ID NO: 80244 - DNA, 120 bp, Artificial Sequence
  ENSG00000081665_31 (sequence is synthesized)
aggttcatagttaataaaagcaataaaagtgcaattactgtcaaaaaatctttcagaaaatataagcctttaaagaagaatatttattctgaaatcagctattacaaatataaggggggg

SEQ ID NO: 80245 - DNA, 120 bp, Artificial Sequence
  ENSG00000081665_32 (sequence is synthesized)
ttgtagtacctttacttgtatcacagatcttgttgcacacattgtgtactagaggaaaacctgaagcagttgctccagctttattcaacaacatggaatttatattggagaagagtcctg

SEQ ID NO: 80246 - DNA, 120 bp, Artificial Sequence
  ENSG00000081665_33 (sequence is synthesized)
cctgcaaatataatgaatttggaaagactttttttttcaaaatctatagcttagaaaacatcagagagtttatactaaagtatatttttgcagatgtaaatatgaaaaaaatatttaatt

SEQ ID NO: 80247 - DNA, 120 bp, Artificial Sequence
  ENSG00000081665_34 (sequence is synthesized)
attgattttacgtaaatatgagaatttacactagaataaggcactgacacttcagacattacactaaatcagagtattgagtataaaaatgaatccacaactaaagctgtttttgtatat

SEQ ID NO: 80248 - DNA, 120 bp, Artificial Sequence
  ENSG00000081665_35 (sequence is synthesized)
aactttaaaagggagattttctgaagcattgtaatttcattgaaagtgtacttgtttcttgaaaaaaatttttgaacagtgaataatgatgtaatacaactttcaaatttctttacgctg

SEQ ID NO: 80249 - DNA, 120 bp, Artificial Sequence
  ENSG00000081665_36 (sequence is synthesized)
ttattttattcctattgtggtcacatgtgaaagcatgtgatcaattgttgctgcatcagggatattacagattcttttttattgggtattatgaccttttctataaaagaataaggacat

SEQ ID NO: 80250 - DNA, 120 bp, Artificial Sequence
  ENSG00000081665_37 (sequence is synthesized)
taaaatgtaagatgcatgataaaaatgtaagtggagaggctctttgtagttaacttatattaagtaatgtataaggtgggggttctcatttgtataatcctagcctatgacttaatgttg

SEQ ID NO: 80251 - DNA, 120 bp, Artificial Sequence
  ENSG00000081665_38 (sequence is synthesized)
atgttttgctttgtcttttggatggcctaacctacattaacatgttggcagaccattttaaaactttttttttcaaaaattataatgaattactttattaataaagatttttaaaaagtg

SEQ ID NO: 80252 - DNA, 74 bp, Artificial Sequence
  ENSG00000081665_39 (sequence is synthesized)
aggtagtttttaaatttgtacaatcgagatggaaatttcctggttatgtaatcagagtttaattggcagtttat

SEQ ID NO: 80253 - DNA, 120 bp, Artificial Sequence
  ENSG00000081665_40 (sequence is synthesized)
atttcctggttatgtaatcagagtttaattggcagtttatagttgcttaagcctgaattttgtttcccctaatgtagtaatttaccaaagaatacacttgagttttgttttttttcctta

SEQ ID NO: 80254 - DNA, 120 bp, Artificial Sequence
  ENSG00000081665_41 (sequence is synthesized)
ttcttagtagtaccttgggggattatctaaaacctctaaaagatccaacaatatattttaatgtagtaaaaaattaacttcagttgcatacagaaattcctcattattacatctaccttc

SEQ ID NO: 80255 - DNA, 120 bp, Artificial Sequence
  ENSG00000081665_42 (sequence is synthesized)
gaatgttttatgagctattgagaaggctatgtatcctgatgatgttgaggagtgttctctataccttcattagaaataattgttttttactgccttctagtcctctgttcccttactaat

SEQ ID NO: 80256 - DNA, 120 bp, Artificial Sequence
  ENSG00000081665_43 (sequence is synthesized)
tcctactataattatattgctctattcaactttgttagtatttgctttatatatttgaaaccccaatttgagacacacacacgcacaaatacacacatggataaacaaatttgtcatagg

SEQ ID NO: 80257 - DNA, 120 bp, Artificial Sequence
  ENSG00000081665_44 (sequence is synthesized)
tttccatgaattaatctatatattgtttaatgtccttcttttttgaagttttaacttaaagtacattttataaaatatgacagcttttgactttaacaatgtagcttgtgtaatattatt

SEQ ID NO: 80258 - DNA, 120 bp, Artificial Sequence
  ENSG00000081665_45 (sequence is synthesized)
ttgacctcttctgctctcattttgttagtatttacatgaaatttctacttggtcttgccactttcagtcttttcttatcattagatctcagctgactcttgtaaaaaggcaagttgagtc

SEQ ID NO: 80259 - DNA, 120 bp, Artificial Sequence
  ENSG00000081665_46 (sequence is synthesized)
agtcttgatttttaaaattttttaatgagcctttttagaagtatgtctcttgattggaaagataattatatttaaatagttttctgaaagagaaaaacttactgttaataaaataattgt

SEQ ID NO: 80260 - DNA, 85 bp, Artificial Sequence
  ENSG00000081665_47 (sequence is synthesized)
tgtctggagcaaggaaaaaaacctttaactatgaagaggcatgagatgattgccaaacccccagatggagtctcggtctttcacc

SEQ ID NO: 80261 - DNA, 120 bp, Artificial Sequence
  ENSG00000081665_48 (sequence is synthesized)
tgtctattcattaacagatgttcataatttccatacttttatcttttaaactgtaccattatgattaacataactaattaacattagttaagtaagaaattccatttttatgaatgtgcc

SEQ ID NO: 80262 - DNA, 120 bp, Artificial Sequence
  ENSG00000081665_49 (sequence is synthesized)
tatcttttccagaaacttacatatcttcagatgattatgtgttgttttcttgcattatgttattttctgtggaaaaaaactcctttcagcatccttgatatgtagggcatatgcagtgcc

SEQ ID NO: 80263 - DNA, 120 bp, Artificial Sequence
  ENSG00000081665_50 (sequence is synthesized)
aatatactttctcaggatttggttattttggaaggacttctttttatttggtagtacaattttggtgatggtactattcccacttgacatctttttttattataactttaataacaatat

SEQ ID NO: 80264 - DNA, 120 bp, Artificial Sequence
  ENSG00000081665_51 (sequence is synthesized)
cacagtttccttttgacctacaaaaatgtttttgatcaatttattggttatctcataagactatgcttataaatgaccatcatttttatcttgcagctcccaaaattctcttcttatctg

SEQ ID NO: 80265 - DNA, 120 bp, Artificial Sequence
  ENSG00000081665_52 (sequence is synthesized)
tgatttttggaattttgtttatatatgtgtttgttataaatagatgtttgggtatatcctagtttgtttgttcagcttttcagctttgccctatttacacaattttttcttttaagaaat

SEQ ID NO: 80266 - DNA, 120 bp, Artificial Sequence
  ENSG00000081665_53 (sequence is synthesized)
ttttcacttagtttttgtattttttacacccacaatttttgttttctattttaatattttttcgttgttatcctcgtttttctaatcttcagtagttgtctgtgttcctgtttcactttg

SEQ ID NO: 80267 - DNA, 82 bp, Artificial Sequence
  ENSG00000081665_54 (sequence is synthesized)
tctaatcttcagtagttgtctgtgttcctgtttcactttgtgaaaattaagacggagtctcgccctggagtgcagtggcgta

SEQ ID NO: 80268 - DNA, 90 bp, Artificial Sequence
  ENSG00000081665_55 (sequence is synthesized)
cagctcactgcaacctccgcctcccacattcaagcaatactcctgcctcagccccctgaatagctgggattacaggtgcctgtcaacacg

SEQ ID NO: 80269 - DNA, 120 bp, Artificial Sequence
  ENSG00000081665_56 (sequence is synthesized)
ctcctgacctcatctgatttccccaccttggcctcccagtgtgttgggattacaggaatgagccaccaagcctggcctgttcaatttatttggaattttaaaaattatacactttttatt

SEQ ID NO: 80270 - DNA, 120 bp, Artificial Sequence
  ENSG00000081665_57 (sequence is synthesized)
gttgcttttgaaaattttataatttttttgatggggccatgttgccctaatattttgtatacattgtaatctttgagatttggacatgaacaaaaagctacctgttatgatttttataat

SEQ ID NO: 80271 - DNA, 120 bp, Artificial Sequence
  ENSG00000081665_58 (sequence is synthesized)
cctcgcatagtctgaaaatcaatcgtcttggatagcgattcttggaatttctcaaacatatttttaggatgtgtcttgtctaaaattttgtgttgtttagttaaatcggcttattcttat

SEQ ID NO: 80272 - DNA, 120 bp, Artificial Sequence
  ENSG00000081665_59 (sequence is synthesized)
ttcttcttaataaatcagtaatcacttgctacacccattccgtgtttgggatactgcagtttctttgcttctgaaacatttacctttagactcaaagtgtcattccaacgtatattacca

SEQ ID NO: 80273 - DNA, 85 bp, Artificial Sequence
  ENSG00000081665_60 (sequence is synthesized)
tacctttagactcaaagtgtcattccaacgtatattaccatttcatgtcgtgggagacattaaccagtattttaaaaagccccta

SEQ ID NO: 80274 - DNA, 120 bp, Artificial Sequence
  ENSG00000081665_61 (sequence is synthesized)
aataaaaaagcccctagaatccagaaataaagatgtatgtgccaatacttttcttgttttttaaaaaagaaaccaggggttggcaatttacatatttgtgtgcatgtgtgagacagagtc

SEQ ID NO: 80275 - DNA, 85 bp, Artificial Sequence
  ENSG00000081665_62 (sequence is synthesized)
ggctcactacaatctctgcctccacaactggattacaggtatctgttaccacacctggctaacgttttgtagttttgtagagacg

SEQ ID NO: 80276 - DNA, 120 bp, Artificial Sequence
  ENSG00000081665_63 (sequence is synthesized)
ggattacaggtatctgttaccacacctggctaacgttttgtagttttgtagagacggggtttcaccatctttgccaggctggtcttgaactgttgacctcatgatccacctgcctcagcc

SEQ ID NO: 80277 - DNA, 120 bp, Artificial Sequence
  ENSG00000081665_64 (sequence is synthesized)
tcacgggtgtgagctaccacaccgggcccgcaatttacttttaaaggcacaatgttatactggagagcaggaagagctgtgttgggtataagtaacagacttttctttttttctattttt

SEQ ID NO: 80278 - DNA, 120 bp, Artificial Sequence
  ENSG00000081665_65 (sequence is synthesized)
ctatgtggctctttgcattgtgctcacctggagccctttacacacttaactaatttataaattttttacaaatgtattttggtcagtatgtttttgttacagttatatatccaggaagaa

SEQ ID NO: 80279 - DNA, 120 bp, Artificial Sequence
  ENSG00000081665_66 (sequence is synthesized)
attacagcttgtggtattttgctgtgtcatcttgcttacgtagtttgtataattttataggttagatttgtgaagtatatttatctgagtctagcaattgaagtcatgtgtttttattgt

SEQ ID NO: 80280 - DNA, 120 bp, Artificial Sequence
  ENSG00000081692_0 (sequence is synthesized)
atgcgtgcaggcccggagccccaggcgctggcggggcagaaacgcggcgccctgcgtcttctggttccgaggctggtcctcaccgtttccgctccggcggaagtgaggaggagggtcctt

SEQ ID NO: 80281 - DNA, 120 bp, Artificial Sequence
  ENSG00000081692_1 (sequence is synthesized)
cgacccgtgctgagctggatggaccgcgagacgcgcgccctcgccgacagccacttccgaggcctgggggtcgatgtccccggcgtcggccaggctccgggccgggtagccttcgtctcg

SEQ ID NO: 80282 - DNA, 120 bp, Artificial Sequence
  ENSG00000081692_2 (sequence is synthesized)
gagccgggcgccttctcctacgccgactttgtgcggggcttcttgctgcccaacctgccctgcgtgttttccagcgccttcacgcagggctggggcagccggcggcgctgggtgacgccc

SEQ ID NO: 80283 - DNA, 120 bp, Artificial Sequence
  ENSG00000081692_3 (sequence is synthesized)
gcggggaggcccgacttcgaccacctgctacggacctacggagacgtggttgtaccagttgcaaactgtggggtccaggaatacaactcgaaccccaaagagcacatgactctcagagac

SEQ ID NO: 80284 - DNA, 120 bp, Artificial Sequence
  ENSG00000081692_4 (sequence is synthesized)
tacatcacctactggaaagagtacatacaggcgggctactcctctcccaggggctgtctctacctcaaagactggcacttgtgcagggactttccggtggaggacgttttcaccctgcct

SEQ ID NO: 80285 - DNA, 120 bp, Artificial Sequence
  ENSG00000081692_5 (sequence is synthesized)
gtgtacttctcgtccgactggctgaatgagttctgggatgcactggatgtggatgactaccgctttgtctacgcggggcctgcgggcagctggtccccgttccatgctgacatcttccgc

SEQ ID NO: 80286 - DNA, 120 bp, Artificial Sequence
  ENSG00000081692_6 (sequence is synthesized)
tccttcagctggtctgtcaatgtctgtgggaggaagaagtggctcctcttccccccagggcaggaagaggccctgcgggaccgccacggcaacctgccctacgacgtgacctccccagca

SEQ ID NO: 80287 - DNA, 120 bp, Artificial Sequence
  ENSG00000081692_7 (sequence is synthesized)
ctctgcgacacacacctgcacccacggaaccagcttgctggcccacccttggagatcacgcaggaagcgggcgagatggtgtttgtgcccagtggctggcaccaccaggtgcacaacctg

SEQ ID NO: 80288 - DNA, 120 bp, Artificial Sequence
  ENSG00000081692_8 (sequence is synthesized)
gatgacaccatctccatcaaccacaactgggtcaatggcttcaacctggccaacatgtggcgcttcttgcagcaggagctatgcgccgtgcaggaggaggtcagcgagtggagggactcc

SEQ ID NO: 80289 - DNA, 120 bp, Artificial Sequence
  ENSG00000081692_9 (sequence is synthesized)
atgcccgactggcaccaccactgccaggtcatcatgaggtcctgctcgggcatcaactttgaagagttttaccacttcctcaaggtcatcgctgagaagaggctcctggtcctgagggag

SEQ ID NO: 80290 - DNA, 120 bp, Artificial Sequence
  ENSG00000081692_10 (sequence is synthesized)
gcctccttggttgcgcaccccgacttccagagagtggacaccagcgcgttctcaccacagcccaaagagctgctgcagcagctgagagaggctgttgatgctgctgcggccccatagcac

SEQ ID NO: 80291 - DNA, 120 bp, Artificial Sequence
  ENSG00000081692_11 (sequence is synthesized)
ctgtcgtgaggatagaaggacgggtggaagagaggcagcctcctgctccggggcccttccagaaataaagaccgccctccctgtgacctggggcccacccctgtcgaggcttgtggcctg

SEQ ID NO: 80292 - DNA, 120 bp, Artificial Sequence
  ENSG00000081692_12 (sequence is synthesized)
gctgttcatggccactgcctgggtgcctgttttcaggtgaggcccaatgaggtcagggacccaagatgggatgtggcccttctgacctgcagcaggcctgctgggagctcggagatggtg

SEQ ID NO: 80293 - DNA, 120 bp, Artificial Sequence
  ENSG00000081692_13 (sequence is synthesized)
ccaggacctggctcttttgggggccctgcctccttaggccaggacgcctgagctgacaggagtctgtgtctggtgtgccttctctggtggctcctcttaataggccagccctgtcccctc

SEQ ID NO: 80294 - DNA, 120 bp, Artificial Sequence
  ENSG00000081692_14 (sequence is synthesized)
gtctcaggccattggaccacccctggctctgccctgtgggttcagggaggggttggagcagtgctgggcaagctcaccagggcctccaggcagggctggggttggcctccatcacctcca

SEQ ID NO: 80295 - DNA, 120 bp, Artificial Sequence
  ENSG00000081692_15 (sequence is synthesized)
ggtgatgggctgtggaaccagcggcctgcgccttcctctgggtacccagagtggagggctgggttgggctggcctttgccacctccctgcctttgcagggcctgtggacagctggagagg

SEQ ID NO: 80296 - DNA, 120 bp, Artificial Sequence
  ENSG00000081692_16 (sequence is synthesized)
ccacagatggggtggaatcccatctgctgctgaatcctcacctgggcctgagggactgtgcctgctgtgcactcacagctgggtcttcccaaggatgctgttctcaggagtggtgggtcc

SEQ ID NO: 80297 - DNA, 120 bp, Artificial Sequence
  ENSG00000081692_17 (sequence is synthesized)
ccagcccctcttcacactgggtatgatggaggtgtgggcgggctcgtccaggccgatcaaggcacagcagtgagcagcggaggcctgtggtggggaatggactctcgtgggatcctcttg

SEQ ID NO: 80298 - DNA, 120 bp, Artificial Sequence
  ENSG00000081692_18 (sequence is synthesized)
cagaggatgccccaggcctgaaccctctagtggatccacagtttgtggagactggcactctcccagccctgtccttgaccgagagtccagcattttttcagttggcccctggttggctgc

SEQ ID NO: 80299 - DNA, 120 bp, Artificial Sequence
  ENSG00000081692_19 (sequence is synthesized)
ctcaccccagcaggggaggaggcatccgaatccacagggacggcacgtgccatggctatgcacattgcctgcccgtggcatcaactggggccgctggcacttgtctaggatggaagcccc

SEQ ID NO: 80300 - DNA, 120 bp, Artificial Sequence
  ENSG00000081692_20 (sequence is synthesized)
caagaagggcaggggtttctgtctgctctgttcagtgaatcatgtgaagtgcttgcaaaggcagctttacacagtaggtgcttcatatgtgtctgtcgaatgaatgcgctccagccaaca

SEQ ID NO: 80301 - DNA, 80 bp, Artificial Sequence
  ENSG00000081692_21 (sequence is synthesized)
catccacctcagcatctcaaagcactgggattataggcatgatcagtactttctaataagcagaaccattgtagtcagac

SEQ ID NO: 80302 - DNA, 120 bp, Artificial Sequence
  ENSG00000081692_22 (sequence is synthesized)
gatcagtactttctaataagcagaaccattgtagtcagactgccccgccccctcccccgccagcagcgtctggctcagaggagggtctggggctctttgggggctgcagccatctggaag

SEQ ID NO: 80303 - DNA, 120 bp, Artificial Sequence
  ENSG00000081692_23 (sequence is synthesized)
cggatgtgggagtggaacccgaaggggcctggtgacagaacggactgggaggcccagggtggcaggaggggggctgcttggcacaggcctcacagtgggtgccatcccttgagaccaagg

SEQ ID NO: 80304 - DNA, 120 bp, Artificial Sequence
  ENSG00000081692_24 (sequence is synthesized)
ggccacccctccttcagttggaccaggcctctggggtgccaagcaaagcccataccagcccctacaggcatgaaccaggcgctcttgctgccgcaggtccccgttccatgctgacatctt

SEQ ID NO: 80305 - DNA, 120 bp, Artificial Sequence
  ENSG00000081692_25 (sequence is synthesized)
ctgaccccttcacaaggtggtgtcgctgaggcctagcctctgtttcacccactgccggtccctgggtctacttgctctgggttcactgtggcctgaggtggtccgagcccgccacccact

SEQ ID NO: 80306 - DNA, 120 bp, Artificial Sequence
  ENSG00000081692_26 (sequence is synthesized)
tccctgctgagcaagccctgctgggagacaggagggccctcttggctgcagagggctggaccccacagtgggttcctggcgcaggagatgtgggttggtcagggggcacctgccatgggc

SEQ ID NO: 80307 - DNA, 120 bp, Artificial Sequence
  ENSG00000081692_27 (sequence is synthesized)
ggacccctggtctgtacgggaatgccctgagacatccggcctcctacagatggagctggcgctgcccaaaccacgggcagcaaaggtgctttgtcggggaggagggggaggtagcaaaca

SEQ ID NO: 80308 - DNA, 120 bp, Artificial Sequence
  ENSG00000081692_28 (sequence is synthesized)
tgcacggctgcagccttgccaggaccaggcccaggctgagtgtgggcgtggctcacccatttagcccctccggtaacctctgagcttgggcctcttggcaccctgccacacaggcacacc

SEQ ID NO: 80309 - DNA, 120 bp, Artificial Sequence
  ENSG00000081692_29 (sequence is synthesized)
tgaggccaagagtgggggtatgtgcctcggacactgccagcaggcagctgaggtgacctgtccttcagcttctgtcatgatgagggcagcactgtggaccccagggcagccagggcccag

SEQ ID NO: 80310 - DNA, 120 bp, Artificial Sequence
  ENSG00000081692_30 (sequence is synthesized)
tgcgaactggcagcacaaggtagcacaggtcgcagcccattaccatccaggctgcttggtcctgcgctcctgaactgtatgtgaagaccctcatgcttccgcagtcaggaggcagtgcac

SEQ ID NO: 80311 - DNA, 120 bp, Artificial Sequence
  ENSG00000081692_31 (sequence is synthesized)
agacgctcccgagagccctgctagcctcagtcactttttcttggttaaagcaggcattgagaatctcaggctggggctgttacagatgcagcaaaaacagcaaatgccagaagctctgtg

SEQ ID NO: 80312 - DNA, 120 bp, Artificial Sequence
  ENSG00000081692_32 (sequence is synthesized)
gggggagatagagccctccacagggcaacggctgaactgcagccggcatcgatgactccatagtcaatgaccatgactccttttgcatacctcactccagattggcaaaaaaaaaaaaaa

SEQ ID NO: 80313 - DNA, 120 bp, Artificial Sequence
  ENSG00000081721_0 (sequence is synthesized)
gtctctgggcgcggccatgttggaggctccgggcccgagtgatggctgcgagctcagcaaccccagcgccagcagagtcagctgtgccgggcagatgctggaagtgcagccaggattgta

SEQ ID NO: 80314 - DNA, 120 bp, Artificial Sequence
  ENSG00000081721_1 (sequence is synthesized)
tttcggtggggccgcggccgtcgcggagccagatcacctgagggaagcgggcatcacggccgtgctaacagtggactcggaggagcccagcttcaaggcggggcctggggtcgaggatct

SEQ ID NO: 80315 - DNA, 120 bp, Artificial Sequence
  ENSG00000081721_2 (sequence is synthesized)
atggcgcctcttcgtgccagcgctggacaaacccgagacggacctactcagccatctggaccggtgcgtggccttcatcggtcaggcccgcgctgagggccgtgcggtgttggtgcactg

SEQ ID NO: 80316 - DNA, 120 bp, Artificial Sequence
  ENSG00000081721_3 (sequence is synthesized)
tcatgcaggagtcagtcgaagtgtggccataataactgcttttctcatgaagactgaccaacttccctttgaaaaagcctatgaaaagctccagattctcaaaccagaggctaagatgaa

SEQ ID NO: 80317 - DNA, 120 bp, Artificial Sequence
  ENSG00000081721_4 (sequence is synthesized)
tgaggggtttgagtggcaactgaaattataccaggcaatgggatacgaagtggatacctctagtgcaatttataagcaatatcgtttacaaaaggttacagagaagtatccagaattgca

SEQ ID NO: 80318 - DNA, 120 bp, Artificial Sequence
  ENSG00000081721_5 (sequence is synthesized)
caagaactctttgctgttgacccaactaccgtttcacaaggattgaaagatgaggttctctacaagtgtagaaagtgcaggcgatcattatttcgaagttctagtattctggatcaccgt

SEQ ID NO: 80319 - DNA, 120 bp, Artificial Sequence
  ENSG00000081721_6 (sequence is synthesized)
gaaggaagtggacctatagcctttgcccacaagagaatgacaccatcttccatgcttaccacagggaggcaagctcaatgtacatcttatttcattgaacctgtacagtggatggaatct

SEQ ID NO: 80320 - DNA, 120 bp, Artificial Sequence
  ENSG00000081721_7 (sequence is synthesized)
gctttgttgggagtgatggatggacagcttctttgcccaaaatgcagtgccaagttgggttccttcaactggtatggtgaacagtgctcttgtggtaggtggataacacctgcttttcaa

SEQ ID NO: 80321 - DNA, 120 bp, Artificial Sequence
  ENSG00000081721_8 (sequence is synthesized)
atacataagaatagagtggatgaaatgaaaatattgcctgttttgggatcacaaacaggaaaaatatgaacatgatattttatagcttgggaagaaacttgcagatgatatgtgctgcct

SEQ ID NO: 80322 - DNA, 120 bp, Artificial Sequence
  ENSG00000081721_9 (sequence is synthesized)
ttgcttcttatcattcatggcagattgtttgtgctttcaacatttcatttgaaatgggagaagataaaatcacttgatgtaacctggaaactatgctttacatggcaatcaaagcctttt

SEQ ID NO: 80323 - DNA, 120 bp, Artificial Sequence
  ENSG00000081721_10 (sequence is synthesized)
gatcatgtacattttatttgatattaaaatcttttataaccagatactgtctgtgtttcatatatttttaaaagttttgattgttggaatgttatatgatcttaaggtctgtatagacaa

SEQ ID NO: 80324 - DNA, 120 bp, Artificial Sequence
  ENSG00000081721_11 (sequence is synthesized)
attttattttatgatctatattttattccttcttgcattttaagctctattttaactagtgttttgctccatttcttaatttctttatttctgaagattatatctttctagtgtagataa

SEQ ID NO: 80325 - DNA, 120 bp, Artificial Sequence
  ENSG00000081721_12 (sequence is synthesized)
catctggaccgggtcttgctctgtcacccaggctacagtgtagtagcgtaattacggctcactgcagtctcaacctcccaggctcaagtgaacctcctgcctcggcctccagagtagctg

SEQ ID NO: 80326 - DNA, 120 bp, Artificial Sequence
  ENSG00000081721_13 (sequence is synthesized)
ctcactttgttgcccaggctggtctccaactcttggactcaaccaatcctctcacctcgcctcccaaagtgctgggatttcaggcgtaggtctctttttcagtcatgcaggagtcagtcg

SEQ ID NO: 80327 - DNA, 120 bp, Artificial Sequence
  ENSG00000081760_0 (sequence is synthesized)
ccttgttccccgccgccgccgtcgctgacccagcccgccaggcgctcctgaccgtcgcttcctccggtcccaggtccccggccctcgcctcagccccggcccctggtccccagccctcgt

SEQ ID NO: 80328 - DNA, 120 bp, Artificial Sequence
  ENSG00000081760_1 (sequence is synthesized)
tcgtcgcagccccggccgcccgccgccgccatgtccaaggaggagcgccccggtcgggaggagatcctggagtgccaggtgatgtgggagcctgacagtaagaagaacacgcagatggac

SEQ ID NO: 80329 - DNA, 120 bp, Artificial Sequence
  ENSG00000081760_2 (sequence is synthesized)
cgcttccgggcggctgtgggcgccgcctgcggcctggcgctggagagttatgatgacttgtaccattggtccgttgagtcatattcagacttctgggcagagttctggaaattcagtgga

SEQ ID NO: 80330 - DNA, 120 bp, Artificial Sequence
  ENSG00000081760_3 (sequence is synthesized)
attgtcttctcacgtgtgtatgatgaggttgtggacacatcgaaaggaatcgcagatgtccccgagtggttcaaaggcagtcggctcaactatgcagaaaacctcctgcggcacaaagag

SEQ ID NO: 80331 - DNA, 120 bp, Artificial Sequence
  ENSG00000081760_4 (sequence is synthesized)
aatgacagagttgccctttacattgcaagggaaggcaaagaggaaattgtgaaggtgacttttgaagagctgaggcaagaagtggctttgtttgcagcagcaatgaggaaaatgggtgtg

SEQ ID NO: 80332 - DNA, 120 bp, Artificial Sequence
  ENSG00000081760_5 (sequence is synthesized)
aagaaaggagatcgggttgttggttatttacccaacagtgagcacgctgtcgaggcgatgctggctgcggcaagcattggtgccatctggagctccacgtccccggacttcggtgtgaat

SEQ ID NO: 80333 - DNA, 120 bp, Artificial Sequence
  ENSG00000081760_6 (sequence is synthesized)
ggtgtgctggaccggttttctcaaattcagccaaagctcatcttctctgtggaggctgttgtctataatggcaaagagcacaaccacatggaaaagctgcagcaggtggttaaaggccta

SEQ ID NO: 80334 - DNA, 120 bp, Artificial Sequence
  ENSG00000081760_7 (sequence is synthesized)
ccagacttgaagaaagtggtggtgattccttatgtgtcctccagagagaacatagacctttcaaagattccaaacagtgtgtttctggatgactttcttgccaccggcaccagtgagcag

SEQ ID NO: 80335 - DNA, 120 bp, Artificial Sequence
  ENSG00000081760_8 (sequence is synthesized)
gccccgcagctggagttcgagcagctgcccttcagccacccactgttcatcatgttctcatcgggcaccacgggcgcacccaagtgcatggtgcattccgctgggggcaccctcatccag

SEQ ID NO: 80336 - DNA, 120 bp, Artificial Sequence
  ENSG00000081760_9 (sequence is synthesized)
catctgaaggagcacctgctgcacggcaacatgaccagcagtgacatcctcctgtgctacaccacggtcggctggatgatgtggaactggatggtgtcccttctggccacaggagcggcc

SEQ ID NO: 80337 - DNA, 120 bp, Artificial Sequence
  ENSG00000081760_10 (sequence is synthesized)
atggtcttgtacgatggctcccccctggtgcccacgcccaatgtgctctgggacctggttgacaggataggcatcactgtcctggtaactggggccaagtggctgtcagtgctggaagag

SEQ ID NO: 80338 - DNA, 120 bp, Artificial Sequence
  ENSG00000081760_11 (sequence is synthesized)
aaggccatgaagccggtggaaacccacagtctccagatgctccacacgatcctgtccactggctccccactgaaagcccagagctacgagtatgtctacaggtgcatcaagagcagcatc

SEQ ID NO: 80339 - DNA, 120 bp, Artificial Sequence
  ENSG00000081760_12 (sequence is synthesized)
ctcctgggctccatctcaggaggcaccgacatcatctcctgcttcatgggccacaatttttctcttcctgtgtataaaggggagattcaggcccggaacctgggcatggccgtggaagcg

SEQ ID NO: 80340 - DNA, 120 bp, Artificial Sequence
  ENSG00000081760_13 (sequence is synthesized)
aggcggtctggggagagagcggcgagctggtgtgtactaagccgatcccttgccagcccacacacttctggaacgatgagaacggcaacaagtacaggaaggcgtatttctccaaattcc

SEQ ID NO: 80341 - DNA, 120 bp, Artificial Sequence
  ENSG00000081760_14 (sequence is synthesized)
caggtatctgggctcatggcgactactgcagaatcaaccccaagaccgggggcatcgtcatgcttggccggagtgacggcaccctcaaccccaacggggtgcggttcggcagctcggaaa

SEQ ID NO: 80342 - DNA, 120 bp, Artificial Sequence
  ENSG00000081760_15 (sequence is synthesized)
tctataacattgtggaatccttcgaggaggtggaggacagcctgtgtgtcccccagtataacaagtacagggaggagagggtgatcctcttcctgaagatggcctccgggcacgccttcc

SEQ ID NO: 80343 - DNA, 120 bp, Artificial Sequence
  ENSG00000081760_16 (sequence is synthesized)
agcctgacttggttaagaggatccgtgacgccatccgcatgggcttgtctgcgcgacacgtgcccagcctcatcctggaaaccaagggcatcccgtatacgctcaacggcaagaaagtgg

SEQ ID NO: 80344 - DNA, 120 bp, Artificial Sequence
  ENSG00000081760_17 (sequence is synthesized)
aagttgccgtcaaacagatcatcgctggaaaagccgtggagcaaggaggtgctttctcgaaccccgagaccctggatctgtaccgggacatccctgagctgcagggcttctgagtcagac

SEQ ID NO: 80345 - DNA, 120 bp, Artificial Sequence
  ENSG00000081760_18 (sequence is synthesized)
tggctggcgtgtcactcagccgcacccgtgtgcactgtaacttttgtgtgctcaagaaattatacagaaacctacagctgttgtaaaaggatgctcgcaccaagtgttctgtaggcttgg

SEQ ID NO: 80346 - DNA, 120 bp, Artificial Sequence
  ENSG00000081760_19 (sequence is synthesized)
ggagggatcgtttctctgttttgttaaatctggtgggtacctggatcttccacacgagtgggattctggccttcagagaccaggagggagtgtctgggccgcaggtgtggcactgtggtg

SEQ ID NO: 80347 - DNA, 120 bp, Artificial Sequence
  ENSG00000081760_20 (sequence is synthesized)
agagtgtgtgtctttgcacacacagtgcagcgggaacggtggggctggctggtgctgaagacagacacactcctgagccaaggtcttgtcttcaacctccccgtcccgttgtcccatttt

SEQ ID NO: 80348 - DNA, 120 bp, Artificial Sequence
  ENSG00000081760_21 (sequence is synthesized)
gctctgtgaaggtgcaaatccctttcttcccttcccatctcaggctctcctgttttccctcagggtccagtatgcctttgagctttagctgttagaaaggaacccccgtgacttgacaca

SEQ ID NO: 80349 - DNA, 120 bp, Artificial Sequence
  ENSG00000081760_22 (sequence is synthesized)
gctttcacagctggctgctaggaccggcgggctgggtgttcacgtgtgtctgtgtcatggatgcaatgcaggccctggaggactgtgcgtcacccgtcaaccagagcgtgcctccgggcc

SEQ ID NO: 80350 - DNA, 120 bp, Artificial Sequence
  ENSG00000081760_23 (sequence is synthesized)
agcttccctccaaggaatgagtggatttcatacaggatctctttattgcacagactgaatggctttacatgtttctaatgtgaattaggcatgtgaagcagtgggtgtccacccgtgtcc

SEQ ID NO: 80351 - DNA, 120 bp, Artificial Sequence
  ENSG00000081760_24 (sequence is synthesized)
ctcatgggtgagccctccagctgtgagcccaggcagtgtggtcaccgagtgaggaccctcctcaccaggaaccgcatccctgtgctgcctccacctgagagttgctagggggttcttgtc

SEQ ID NO: 80352 - DNA, 120 bp, Artificial Sequence
  ENSG00000081760_25 (sequence is synthesized)
gagatcatgtcatcagcacccctaagtcaagtcacgggtttccatagccaggcagttggtatgtacaattcagttcagcgtatgaacttgtatctctaatctgatgtccatttttatatt

SEQ ID NO: 80353 - DNA, 120 bp, Artificial Sequence
  ENSG00000081760_26 (sequence is synthesized)
ttttgaaactgagcacaatgaaatcctttcttgaatcattttccttttggattataaaaatatgggggaaagtgctatgatgaattttatgcaataaatgtatacatgtgtgcacatgca

SEQ ID NO: 80354 - DNA, 120 bp, Artificial Sequence
  ENSG00000081760_27 (sequence is synthesized)
agctttgttggacaatgaggtggccaggaatgttatgctgcttggggcttccaggcactggtttcctctttgggaacagttcctcaataaaagaaattgaacgagtacattaagacctgt

SEQ ID NO: 80355 - DNA, 120 bp, Artificial Sequence
  ENSG00000081760_28 (sequence is synthesized)
aaaagaaattgaacgagtacattaagacctgttcagaaagcagctcaatggctaggtgtgatggcttatgcctgtaataccagcactttgtgaggctgaggcaggaggatcccttgaggc

SEQ ID NO: 80356 - DNA, 89 bp, Artificial Sequence
  ENSG00000081760_29 (sequence is synthesized)
cttgaggccaggagttcaagattagcctggacaacaaagtgagacctcatctacatcacatctgtggtcccagctacatgggaggctga

SEQ ID NO: 80357 - DNA, 120 bp, Artificial Sequence
  ENSG00000081760_30 (sequence is synthesized)
tgagctctgattgtgccacggcactccagcctgcgtgacagagtgagaccttgtttcaggggaaaaaaaaaaaaagaagaaagcacctcaactaaatggagacctttggctgtgtccttg

SEQ ID NO: 80358 - DNA, 120 bp, Artificial Sequence
  ENSG00000081760_31 (sequence is synthesized)
tgccctctgcctttgtgcgtggggagtaggtgtgggtgggccctccaggggacgctggttttgggtcactgtagcccgcatgatttggggatggcactaggctgtggcgggcgggaggca

SEQ ID NO: 80359 - DNA, 120 bp, Artificial Sequence
  ENSG00000081760_32 (sequence is synthesized)
ggttcccgacaccattcatcatggatgaacaatgtcttggggtggttccgtgtcagtccagacctcattctgtttcatgactgtgcaatggctgctgtcatactgctgggggtcaggtgc

SEQ ID NO: 80360 - DNA, 120 bp, Artificial Sequence
  ENSG00000081760_33 (sequence is synthesized)
tgttcagaacgcctcatgtgggttcagtgactgtgtaggagtgtcagtagcaagtgtgcacctcctgtggccttgcttgtgtcgataacacctacattgctttgtctctgtcaccagcaa

SEQ ID NO: 80361 - DNA, 120 bp, Artificial Sequence
  ENSG00000081760_34 (sequence is synthesized)
gttgccgggccagagtgtcctgcatttgaaatgggaagttagcaccaacctgtggctccatcttaggtggtttcccagggacacaggaagctgagggggcagcgctggggggagctgcct

SEQ ID NO: 80362 - DNA, 120 bp, Artificial Sequence
  ENSG00000081760_35 (sequence is synthesized)
tgtttggatttcctgccacctttctcctgagcccattggcaggaggagaaccctgtttgttcctagccgtcccttggggctggcagccacctgtcttctagggtcttcctcacctcatca

SEQ ID NO: 80363 - DNA, 120 bp, Artificial Sequence
  ENSG00000081760_36 (sequence is synthesized)
taactgcactgagtgcttcctggggcccctggaggtggtcatttatttcctgtggccctggctggatggtagacaggaatcccatgagcacaggcgagagccagttgggtacccttctgg

SEQ ID NO: 80364 - DNA, 120 bp, Artificial Sequence
  ENSG00000081760_37 (sequence is synthesized)
tgcctgagaattatgcaaatggggataggtgtagtggtccctgctcccccccgaccccaactccttctcatcatcatcattagaaaggcctcatgagatccagtctcgtcagcactttgc

SEQ ID NO: 80365 - DNA, 120 bp, Artificial Sequence
  ENSG00000081760_38 (sequence is synthesized)
tgatgaattaatcacaactggctggcgtgttctggccactgtggtcttggtcacccttggcctaatgacagtgtttccagagataagaatatagaagttgccagagctccaggggcccag

SEQ ID NO: 80366 - DNA, 120 bp, Artificial Sequence
  ENSG00000081760_39 (sequence is synthesized)
aaacaaccatgctctgtcctaattacatctgaatctgttcttgggggaaacaggagccactcatgtttttaaatccttggccattaaacattttaaatataacttggcctgggtaatatt

SEQ ID NO: 80367 - DNA, 120 bp, Artificial Sequence
  ENSG00000081760_40 (sequence is synthesized)
taaatcctgacatttggctcacaatcttagtgaggaaggctatttcctaatgagattgtttccagcaaaaggttaatcaaatccctgggaacttcagatggctttagaatctttaccctt

SEQ ID NO: 80368 - DNA, 120 bp, Artificial Sequence
  ENSG00000081760_41 (sequence is synthesized)
ttacccttaagccaggctccaggtggaggaacttttattggtgtgtcggggaggcaggcactgggtcgggggttactggaggaggggtggagagggaaatgtacatcagtgaggcccggt

SEQ ID NO: 80369 - DNA, 120 bp, Artificial Sequence
  ENSG00000081760_42 (sequence is synthesized)
gctaatgagatccagggatgaagcatcccagggagaccgtgctctgtgtgtgcatgggtgtgagtctgcgtgtgtgcacaaaagtgtatgtgaaagtgtgtgcgcgcgtgcatggagcgt

SEQ ID NO: 80370 - DNA, 120 bp, Artificial Sequence
  ENSG00000081760_43 (sequence is synthesized)
gatcttgtgaaagggagcgtgggagtgcgtatgtgcatgagtgtatgtgcacctacatgtgtaagtgcaagtgagtgcatggatgtgtgtgcatgtataggtgtcgggtgtgtgtgcatg

SEQ ID NO: 80371 - DNA, 120 bp, Artificial Sequence
  ENSG00000081760_44 (sequence is synthesized)
tgcatgcagctgtgagtgctgtacatgtggatgcatgtgtgccttgtgtatgtgtgcatgtacctgtgtacacgcgtacatgtgcaagtgttcacagcatggtggctggttccgtgccgt

SEQ ID NO: 80372 - DNA, 120 bp, Artificial Sequence
  ENSG00000081760_45 (sequence is synthesized)
aatcacgggccctgggttggccagagcgctgaggctgattgaggtgtggtcgtgctgtcgcagggctccctctggatgtggccatcgccccgcctgagagagcctcctgcgccgtttggc

SEQ ID NO: 80373 - DNA, 120 bp, Artificial Sequence
  ENSG00000081760_46 (sequence is synthesized)
gaggcaggtgtgacttggcaccctggcaggggctgcgggtgaggggctttcggaagaatgcaggctttaaaccactacactggtcgccaccagcagtgagagggagcgggtgctgggcgg

SEQ ID NO: 80374 - DNA, 120 bp, Artificial Sequence
  ENSG00000081760_47 (sequence is synthesized)
ggcaggacacttcagctcagttctgtccacctcctggaaactgaatgttgtgtaacagttgaaagcagtcatggcaaaccctgttttgtggcaagaggcatgcggggcaggcacagtcct

SEQ ID NO: 80375 - DNA, 120 bp, Artificial Sequence
  ENSG00000081760_48 (sequence is synthesized)
cgtgatgctgtctcagtgcctctgattaaaacccacatctgttagtaaatgaggggtgagatctctgttgattaccagcatgtcagctctcagccttattgacacattcgatcaaagagc

SEQ ID NO: 80376 - DNA, 120 bp, Artificial Sequence
  ENSG00000081760_49 (sequence is synthesized)
atttattttgtaggcacagacaagataatttgaaaagatgaattttcttcttcacaggggtgtgtttctgggttctagtgaggggactattctggacagaattagggccaggaccccggg

SEQ ID NO: 80377 - DNA, 120 bp, Artificial Sequence
  ENSG00000081760_50 (sequence is synthesized)
gactttgtccagtttgctagtagtggggcaggtgtggacgttgtctgggttgcccagttttgcccgtctctgaatggggccattgtctaagatggttctagagggcaggggcctcgtggg

SEQ ID NO: 80378 - DNA, 120 bp, Artificial Sequence
  ENSG00000081760_51 (sequence is synthesized)
cgagcaggcttgtccttctaaggaagtgcatgggttgggtagcactttgtcgggatctgcaccccgtgtgtgctggactacgtgctctgagccaagctccctggggggtcctgggggcca

SEQ ID NO: 80379 - DNA, 120 bp, Artificial Sequence
  ENSG00000081760_52 (sequence is synthesized)
cacagcagcgaccaggggccagcacgctctgtcctcatggggctggcactgggagggggaaggtaaggaaaagacagaggccaacctcaggctctgaggagtgctgtcagagacctgggg

SEQ ID NO: 80380 - DNA, 120 bp, Artificial Sequence
  ENSG00000081760_53 (sequence is synthesized)
tcagggagtcctcgagagtcctcgagaggtcttggcatttgggctgaggccgaaaggttcaggaactacttttgcaggactggggacgtgtacttcaggcagagggaaccacgaggagat

SEQ ID NO: 80381 - DNA, 120 bp, Artificial Sequence
  ENSG00000081760_54 (sequence is synthesized)
gggcctaagatccatgtgttgtggaagctgggaggggcctcctgtggaccgagtgtgaagggctgatgcggggctgggggcaggagcaggggtcagaggggcggggacttttggagctgc

SEQ ID NO: 80382 - DNA, 120 bp, Artificial Sequence
  ENSG00000081760_55 (sequence is synthesized)
ttggagggtgagtttttccccgagtggaatggaacagcagtggacactgaatcaggagaacactgatctggttcatgttattaaaagggcagtgtaggccaggcgtggtggttcacgcct

SEQ ID NO: 80383 - DNA, 120 bp, Artificial Sequence
  ENSG00000081760_56 (sequence is synthesized)
ctccatctcaaaaaaaaaaaaaaaaaaggcagtgtagcgcctgagtgaagagagcattgccagggctggggtaggggcagaagctgagagactcaggttgctggagcccacaggcgcagt

SEQ ID NO: 80384 - DNA, 120 bp, Artificial Sequence
  ENSG00000081760_57 (sequence is synthesized)
agcccacaggcgcagtggcgaccctggaggggctgcctgtgggctgatccacacttccctccgaacagggctctgggcagtctcgggcaccgggtcccaacggtttagggacctgagact

SEQ ID NO: 80385 - DNA, 120 bp, Artificial Sequence
  ENSG00000081760_58 (sequence is synthesized)
gtctcatgctttggtgcagcgacccctacagtacttgctagaaataagacgtggcatgagtgcccgcaggtgggctcccgtgcttccaagagctgaatggtgttgcatttcctaaccgtc

SEQ ID NO: 80386 - DNA, 120 bp, Artificial Sequence
  ENSG00000081760_59 (sequence is synthesized)
ttacctgcaccctggagatagatgggggactttgccgtttcttcagacaagcaggactgtgactcacaggccggagagcatcacctctgagtgctggcggagcttcaccaagatcagggt

SEQ ID NO: 80387 - DNA, 120 bp, Artificial Sequence
  ENSG00000081760_60 (sequence is synthesized)
gccttcgagttttctgggggtgggcagtggggggattgcacaaaacccgtgtgttgtttgggcgtggctgttgattggagagctttgtacctgtagctggaggtggtcactgctgctcag

SEQ ID NO: 80388 - DNA, 120 bp, Artificial Sequence
  ENSG00000081760_61 (sequence is synthesized)
ggccgggtgatcaccattagagtcatgaggtctccatcctctgttagtgatacttgcaaaggaagtgacaccttagtccttggctatgatgttgaagtagttaatcaaactctgagttta

SEQ ID NO: 80389 - DNA, 120 bp, Artificial Sequence
  ENSG00000081760_62 (sequence is synthesized)
tgaaagaagcatgggggatggtgggaggagctagtctccctcccccaaaactccagccatctctagggtacagtggtggctttgttggtggcagggtgtgtctggggaagtaagagaacg

SEQ ID NO: 80390 - DNA, 120 bp, Artificial Sequence
  ENSG00000081760_63 (sequence is synthesized)
aaggtgtgggaggtggaaggaccatggtaacccgcctccttgcgtggagggagacccaccctgccattgccttagccacgcccagcccagccagccctgaattccgggatgttctgtgcc

SEQ ID NO: 80391 - DNA, 120 bp, Artificial Sequence
  ENSG00000081760_64 (sequence is synthesized)
atgttgcctcgtggcttcagacagcgaatgctatgacggtcttccgtgggatgagtctctccaccgaatgtgcaggactgaggttctactgcccagagtgacccagaagagtctgaatct

SEQ ID NO: 80392 - DNA, 120 bp, Artificial Sequence
  ENSG00000081760_65 (sequence is synthesized)
cacagcctcctctaggccccgaagagaataacgttctttagttgggccgactgagtttacatgtgaagggccgcctggctggaggaaaagctgaggaaggaaatagcatattagacaggg

SEQ ID NO: 80393 - DNA, 120 bp, Artificial Sequence
  ENSG00000081760_66 (sequence is synthesized)
ctgcccttgaaagcgcagtgaggtatattcagcagcgtgtgttgttctgtgagcacaaatgcatagaacggtggattctgaatgttcaagaagagctggacttttctaagtttcataaaa

SEQ ID NO: 80394 - DNA, 120 bp, Artificial Sequence
  ENSG00000081760_67 (sequence is synthesized)
tctaagtttcataaaaatgtgatcttgtttaagaaaaggggatgggtggagagtttcaagtatggcacatgttttcacaaataaagaattctcccagcactttgggaggccaaagcagga

SEQ ID NO: 80395 - DNA, 87 bp, Artificial Sequence
  ENSG00000081760_68 (sequence is synthesized)
ggagaacatagcaagaccctgtctctcagctgggcatggtggcatacaccagtagctctagctacttgggaggctgaggtgggaaaa

SEQ ID NO: 80396 - DNA, 120 bp, Artificial Sequence
  ENSG00000081760_69 (sequence is synthesized)
gttggagactgcagtgagctgtgattgcacgactgcattccagcttggggcaacagaaggagaccctgtctaaaataataataataataattctgtagccttctcttcattggtgaatga

SEQ ID NO: 80397 - DNA, 120 bp, Artificial Sequence
  ENSG00000081760_70 (sequence is synthesized)
atgtgtgaggatagaatttgaggggacttgatttttatggcctcctttggtcccccaagatacaatactctgcagttgggaagataatgggttcgggtgagcgactgttttatgtgacgc

SEQ ID NO: 80398 - DNA, 120 bp, Artificial Sequence
  ENSG00000081760_71 (sequence is synthesized)
ctcgtggtaaagggagctggccctgcgtgctgaaatcagtgtaaagagcagtcaggtgcacctgtgaggaagtcaggtgccgtgactcagactcgagtaaacatgaagtatgagttcaac

SEQ ID NO: 80399 - DNA, 120 bp, Artificial Sequence
  ENSG00000081760_72 (sequence is synthesized)
ccagaaaactgctctctcttgggttttgcaaacttgtcagaaataaatcactaactttagaaagctttggtgcaagagccttgaagagtttctggtgttttctttcccgcctgcacccta

SEQ ID NO: 80400 - DNA, 120 bp, Artificial Sequence
  ENSG00000081760_73 (sequence is synthesized)
ctgcatctgaaccctggtgctggatacacaggcagcagccagctctgagcttctgagaacctggtcattgaagggatagtctcccgctatgctgggcctggcagctagaaatccagctgt

SEQ ID NO: 80401 - DNA, 120 bp, Artificial Sequence
  ENSG00000081760_74 (sequence is synthesized)
gctaggaggggtgagcagggctcagtgcacctgctctgcagagcaatgtgggaggagtcagtgaagctgaagatgcatacgtgccctgtgatctgggaatgccactcccagaagacttac

SEQ ID NO: 80402 - DNA, 120 bp, Artificial Sequence
  ENSG00000081760_75 (sequence is synthesized)
ttgtgatccatgcaagaatgtttgtagcgccccatgatttgtaatggaaaacaaaattgggaacaatagaaatgtccatctttgagaggaagaaactctgtgatcacatgtggagaatgc

SEQ ID NO: 80403 - DNA, 120 bp, Artificial Sequence
  ENSG00000081760_76 (sequence is synthesized)
ccaagtggtgaatacgaatgaaccagagtgagacctagtagcccgaacgagcccagatgtcatgctgagtgagcacaggaagatgcgggacacatagaaggacagcgtgtatgtgttcaa

SEQ ID NO: 80404 - DNA, 120 bp, Artificial Sequence
  ENSG00000081760_77 (sequence is synthesized)
aggcatgcagagtgacgacatatgctattcaaggatgcgtgtggatggagcagaaatgttaacacacatgggaataacaaatcactacgtccgagacagcgattttggggagcacacagg

SEQ ID NO: 80405 - DNA, 120 bp, Artificial Sequence
  ENSG00000081760_78 (sequence is synthesized)
gaggggacttcatctgggaggaacgcattattaggctgctgtgacaggtgtgtgggcgtggaccatctctgtacctttgtatatgtctggaatattgcataataagtaatagcttaagaa

SEQ ID NO: 80406 - DNA, 120 bp, Artificial Sequence
  ENSG00000081760_79 (sequence is synthesized)
gcagtccagttcccaccgagacttactgggacacatcttccggggctggggcccaggcttccatgtattttcaaagcccatgggcacttctgatgcacattcctggtgaagagccatgga

SEQ ID NO: 80407 - DNA, 120 bp, Artificial Sequence
  ENSG00000081760_80 (sequence is synthesized)
cactgtgcccggccacctgcctccttttttgggaggccgacagggtctcactctgttggccaggctggggggcagtggcgccatcataactcactgtagcctcgacctcctgggctcagg

SEQ ID NO: 80408 - DNA, 89 bp, Artificial Sequence
  ENSG00000081760_81 (sequence is synthesized)
ctgtctccagtggaatccttcgaggaggtggaggacagcctgtgtgtcccccagtataacaagtacagggaggagagggtgatcctctt

SEQ ID NO: 80409 - DNA, 120 bp, Artificial Sequence
  ENSG00000081760_82 (sequence is synthesized)
agattggaggttacatttcaacacgagatgagggtggggacaaacatccacactcttatcagcaccttcctctcaggctggctgggaggattaaataagctgctgctctgcaaagcgtgc

SEQ ID NO: 80410 - DNA, 120 bp, Artificial Sequence
  ENSG00000081760_83 (sequence is synthesized)
acagtcagctctcagtgatcctgcctgtcattgtgcggccgcggtgggctctgtcgcctgaagcacctgagtcagggtgggcagattcttcacaggcaggcccgggtgcctgtcccatgg

SEQ ID NO: 80411 - DNA, 120 bp, Artificial Sequence
  ENSG00000081760_84 (sequence is synthesized)
actgtgggaccctgccgaccttaataaattataaccaggtgccagagcgctggctttctttcatgcaacctcggattttgtgccccaggtgtatggatggaggccatgatgcatggaggc

SEQ ID NO: 80412 - DNA, 120 bp, Artificial Sequence
  ENSG00000081760_85 (sequence is synthesized)
taggaggaaaaccagacagggtttaccagccccctggttggcctggctattttttctgaataatattcatcagcagttgatataaaatgagggcatccagcagaatcatgttagccactt

SEQ ID NO: 80413 - DNA, 120 bp, Artificial Sequence
  ENSG00000081760_86 (sequence is synthesized)
catttagcccgacaccccaggggctggactcccactgcagtccatcctttgattgtggatgccacagataaagcagaaacgggtacgtgcccatctgtggagaattgacggggccggggg

SEQ ID NO: 80414 - DNA, 120 bp, Artificial Sequence
  ENSG00000081760_87 (sequence is synthesized)
gtactcattccctgtactgccaatcaaggaaattaaatccatcctatttcctgcttgcgagtgaggcttcaggcactgggtttagttttaatcttttggtgactctgcaccccagtggaa

SEQ ID NO: 80415 - DNA, 120 bp, Artificial Sequence
  ENSG00000081760_88 (sequence is synthesized)
ttcctggtactgtatgcctaacagagagcacccgctcccccgtgtctcccctgcagggcaccctcatccagcatctgaaggagcacctgctgcacggcaacatgaccagcagtgacatcc

SEQ ID NO: 80416 - DNA, 120 bp, Artificial Sequence
  ENSG00000081760_89 (sequence is synthesized)
ctttctccacaccgtgggaggagagatcagacacaggcccagaggagtgagactggccagccgtgcatcaggccgcagcaccagctgggctgatgatggagccctgctgggttcagggag

SEQ ID NO: 80417 - DNA, 120 bp, Artificial Sequence
  ENSG00000081760_90 (sequence is synthesized)
gttaattagttatcctaatgagcttaattaacttaatagtcccactgcaggcggtgctaccaggcagccagggtggagagcctgtgctgtgaagtccttactcacaggttctggggccac

SEQ ID NO: 80418 - DNA, 120 bp, Artificial Sequence
  ENSG00000081760_91 (sequence is synthesized)
tgtatgtgccctgggggtagccctaggtgttggtcttgaactgcttgcatcaggctcatgtgcgagggaatagcagccatctgggcgatggctacccatgtttgcagatggcagtctctt

SEQ ID NO: 80419 - DNA, 120 bp, Artificial Sequence
  ENSG00000081760_92 (sequence is synthesized)
aacacagtgtaaccttgaggatggccaggagggaagtgaatagaagccttgtctgagagtgctttaatctgttactaacattaataatctgttaataattaataatctggactaacactc

SEQ ID NO: 80420 - DNA, 120 bp, Artificial Sequence
  ENSG00000081760_93 (sequence is synthesized)
agggagtgtcagtgaatgttatgagttccaagaacaagcccatgcctgcatggaaggaatcccctgtttcaggaaagcagtgcccttggctggactgcagactccacgtgcagtacagac

SEQ ID NO: 80421 - DNA, 120 bp, Artificial Sequence
  ENSG00000081760_94 (sequence is synthesized)
cagagacatgggtgtggtgatcctgccttttaagatggggctcattaactagtgtatgcacgtgtaggcttatgccattggttggcataaatgcactgcttggaggattcaggttcctct

SEQ ID NO: 80422 - DNA, 120 bp, Artificial Sequence
  ENSG00000081760_95 (sequence is synthesized)
ttaattgaagattccgagaaccaaaatatggggccactttgctttgctgttgtggcctctttggaagatgaatcttcttttgtatacactagcagagctgtgctaacaggctctttctgt

SEQ ID NO: 80423 - DNA, 120 bp, Artificial Sequence
  ENSG00000081760_96 (sequence is synthesized)
aaggtggggaatctttttggtagtgtaaacacacactctatactcttcatatttcagtatatgtctgtaaatacttctggtatttcttgatattgatgccttccttggcatagtggttgt

SEQ ID NO: 80424 - DNA, 66 bp, Artificial Sequence
  ENSG00000081760_97 (sequence is synthesized)
tatttcttgatattgatgccttccttggcatagtggttgttctcagatataagttgtgctttgatc

SEQ ID NO: 80425 - DNA, 75 bp, Artificial Sequence
  ENSG00000081760_98 (sequence is synthesized)
ttgcctttttaaaaaaaaaaacaaaaaaaaaaccagaatcttgctcggttgcccaggctggagtgcaatggcacg

SEQ ID NO: 80426 - DNA, 74 bp, Artificial Sequence
  ENSG00000081760_99 (sequence is synthesized)
gaatcttgctcagcgattctcctgcgtcagcctctgaagtagctggggccacaggcatgtgccaccatgcctgg

SEQ ID NO: 80427 - DNA, 82 bp, Artificial Sequence
  ENSG00000081760_100 (sequence is synthesized)
tcaaagtgcttggattacaggtgtgagccagcgcgcccggcctcatcgactttctttattggctacgggtgctggggacaca

SEQ ID NO: 80428 - DNA, 120 bp, Artificial Sequence
  ENSG00000081760_101 (sequence is synthesized)
tcatcgactttctttattggctacgggtgctggggacacagggacctggtcatgcactgatgatgatgccctttctctcccgtgaaatgcagtggtcctattggctactgaaggtttttg

SEQ ID NO: 80429 - DNA, 120 bp, Artificial Sequence
  ENSG00000081760_102 (sequence is synthesized)
ttggctactgaaggtttttgccatttttttttttagagacagggtctcactcgtgcccaggctggaatgcagtggtgcaagcatagctcactccaaccttgaactcctgggctcaagcaa

SEQ ID NO: 80430 - DNA, 120 bp, Artificial Sequence
  ENSG00000081760_103 (sequence is synthesized)
atttgagtgaagagctgcaggatgagcgcacactgagtggagactgctggtgtgcgtggaggagtgttcagcagatcagacagctgtgcaaaggcaggaggttatttacccaacagtgag

SEQ ID NO: 80431 - DNA, 120 bp, Artificial Sequence
  ENSG00000081760_104 (sequence is synthesized)
tagggtacagtcttaatttatgcagccattagaagtgcatgaaatacactgatggacatcgaaacatggccattggccatgatgagtgaaaaaatcagattgcagaattacaaggtgcgg

SEQ ID NO: 80432 - DNA, 120 bp, Artificial Sequence
  ENSG00000081760_105 (sequence is synthesized)
tcatttttgcaggtggaaaacaggtatatatggatgtgtacatgcacactcatgtatgtatatatatgggtgtattatatgtggattccaagtgaatttttttttttttttttgaggtag

SEQ ID NO: 80433 - DNA, 76 bp, Artificial Sequence
  ENSG00000081760_106 (sequence is synthesized)
tcacccaggctggagtgcagtgcagttcttgtgcctcagcctcccaagtggctgggatcacaggcatgtgccacca

SEQ ID NO: 80434 - DNA, 78 bp, Artificial Sequence
  ENSG00000081760_107 (sequence is synthesized)
ttgtgcctcagcctcccaagtgctatatttttagtagagatgagatttcaccgtgttggtcaggctggtctcgagctc

SEQ ID NO: 80435 - DNA, 120 bp, Artificial Sequence
  ENSG00000081760_108 (sequence is synthesized)
acaggtgtgagccactgtgtctggcccccaagtgcattttttctcataacttttttcttaacataaagttgtgctttagaaaatggttcacgcacgtggtaaaaaattcagtccacaaag

SEQ ID NO: 80436 - DNA, 120 bp, Artificial Sequence
  ENSG00000081760_109 (sequence is synthesized)
cagtccacaaaggtgtcctcatggctgccgtcccccttccccaaggaagccgacgtcgttcccttcagagatgttctgtgcataggtgagcgtgtgtgcttgagtgtgtgtgagtgtgtg

SEQ ID NO: 80437 - DNA, 120 bp, Artificial Sequence
  ENSG00000081760_110 (sequence is synthesized)
taaatggggcgagagcaccccatttttacacagatgtagtttagggtacacacctcaattccccttcacatgacttaagagttgattccattgctgcccatagaaatctttgggtcagtt

SEQ ID NO: 80438 - DNA, 120 bp, Artificial Sequence
  ENSG00000081760_111 (sequence is synthesized)
tagaaatctttgggtcagtttttttttttttttttaaagacagggttttgctctgttgcccagcctggagtgcacactgacacgatcatggcttactgcagcctccacctcccaggctca

SEQ ID NO: 80439 - DNA, 120 bp, Artificial Sequence
  ENSG00000081760_112 (sequence is synthesized)
ctcctgagtagctaggaccacaggtgcatgccaccacgctcagttatgtttttttattttttgtagagacggggttccaccatgttgcccaggctgttcttgaactcctaacctcaagtg

SEQ ID NO: 80440 - DNA, 120 bp, Artificial Sequence
  ENSG00000081760_113 (sequence is synthesized)
caggcatgagccaccgtgcctggcctgggtcacttttattttatttttacatatttgtagttctgatttttctccttgtgatttaaaaacatactctcaaagcacctctttaagaggtgc

SEQ ID NO: 80441 - DNA, 81 bp, Artificial Sequence
  ENSG00000081760_114 (sequence is synthesized)
ttttacatatttgtagttctgatttttctccttgtgatttaaaaacatactctcaaagcacctctttaagaggtgctattt

SEQ ID NO: 80442 - DNA, 71 bp, Artificial Sequence
  ENSG00000081760_115 (sequence is synthesized)
ggtgccatttgcccgaagcctgaggccgacccctcagccttcctccccaccgttggttcctcggcctgagg

SEQ ID NO: 80443 - DNA, 120 bp, Artificial Sequence
  ENSG00000081760_116 (sequence is synthesized)
gggggtctgagccattcccaccagcagagtgagcagcaggaaggaggtcaggagccctgctcaaccttgatggtggcagaaacgaacgtgactcactcattttcgtgggacacatcagtc

SEQ ID NO: 80444 - DNA, 120 bp, Artificial Sequence
  ENSG00000081760_117 (sequence is synthesized)
agtgacatgaaatggcagagaagacatcacattttattctctgcctgaaggaagaaataaaatcacactccacaatcttgcagctgggaactttttgttttgtttgtttgtttgttttga

SEQ ID NO: 80445 - DNA, 120 bp, Artificial Sequence
  ENSG00000081760_118 (sequence is synthesized)
aaagtgctaggattatagacgtcagccacctcgcccagccacatttctgtttttccaaccattaagtccacataaaccatggcactcgagccttcccatgtgatgggtctgtctaggcag

SEQ ID NO: 80446 - DNA, 120 bp, Artificial Sequence
  ENSG00000081760_119 (sequence is synthesized)
tgcctgccaggtatgtatcacaggcaaagcttccattttctgcgatcctgagtcttgaatttcagcatgaccacaggaggtcatttacttagcggatcctctggcaggaaggctcggcta

SEQ ID NO: 80447 - DNA, 120 bp, Artificial Sequence
  ENSG00000081760_120 (sequence is synthesized)
aaacgtcaatcaccagatgtggggggttcattctaatttccatatcacctctcccactgctccctgaagagaagccccacctgtctgggatgttgcagtgtttgtctgggagagtagata

SEQ ID NO: 80448 - DNA, 120 bp, Artificial Sequence
  ENSG00000081791_0 (sequence is synthesized)
ggggcatcgcggcggcctttctagccgctgtcccaagggttggtctcgcgctttcggctgcgagctctctgtggtgctggcagcgacatgtggcgcctcccgggactcctgggccgagct

SEQ ID NO: 80449 - DNA, 120 bp, Artificial Sequence
  ENSG00000081791_1 (sequence is synthesized)
cttccccgtacactgggacctagcctctggagggtgactcctaagtccaccagcccagatgggcctcagactacctcctccactttgctggttcctgtgcctaacctcgacaggtcaggt

SEQ ID NO: 80450 - DNA, 120 bp, Artificial Sequence
  ENSG00000081791_2 (sequence is synthesized)
ccccatggcccaggcacgagcgggggtccaaggtcccatggatggaaggatgccttccaatggatgtcttcccgtgtctccccgaacaccctatgggatgccatatcttggggcactctg

SEQ ID NO: 80451 - DNA, 120 bp, Artificial Sequence
  ENSG00000081791_3 (sequence is synthesized)
gccgtgctggccctgcagctggcaaggcagatccacttccaggcatccctgccagcaggacctcagcgggtagaacactgctcctggcacagtcccctggaccgtttcttctcatctccc

SEQ ID NO: 80452 - DNA, 120 bp, Artificial Sequence
  ENSG00000081791_4 (sequence is synthesized)
ttgtggcacccatgctcctcactgcgacaacacatcctccccagccccgatggcccagctcccaggcacactggcctcagggaacccaggcttggccaggaagaagcctcagctcagccc

SEQ ID NO: 80453 - DNA, 120 bp, Artificial Sequence
  ENSG00000081791_5 (sequence is synthesized)
cggaacttctcacacaactctttgagaggagctcgtcctcaggacccctctgaggaaggtcccggtgattttggcttcctgcatgccagtagtagcatcgagtccgaggcaaaaccagcc

SEQ ID NO: 80454 - DNA, 120 bp, Artificial Sequence
  ENSG00000081791_6 (sequence is synthesized)
cagcctcagcccactggtgaaaaggaacaagataaatcaaaaactctttcccttgaggaggctgtgacttccattcagcagctcttccagctcagtgtttccatcgctttcaacttcctg

SEQ ID NO: 80455 - DNA, 120 bp, Artificial Sequence
  ENSG00000081791_7 (sequence is synthesized)
ggaacagagaacatgaagagtggcgaccacacggcagccttttcttacttccagaaagctgcagcccgcggctacagcaaagcgcagtacaatgcgggcttgtgtcatgagcatggcaga

SEQ ID NO: 80456 - DNA, 120 bp, Artificial Sequence
  ENSG00000081791_8 (sequence is synthesized)
ggcacccccagggacattagcaaggcggtcctttattatcagttggctgccagccagggccacagcctggctcagtaccgctatgccaggtgcctactacgagacccagcctcttcgtgg

SEQ ID NO: 80457 - DNA, 120 bp, Artificial Sequence
  ENSG00000081791_9 (sequence is synthesized)
cagactcaggcttgagagaggcccaagctttcctcggggtgcttttcaccaaggagccctacctggatgagcagagagctgtgaaatatctttggcttgcagccaacaatggggactcac

SEQ ID NO: 80458 - DNA, 120 bp, Artificial Sequence
  ENSG00000081791_10 (sequence is synthesized)
agagcaggtaccaccttggaatttgctatgagaaaggccttggtgtgcagaggaatctgggagaggccttgagatgttaccagcagtcagccgctctgggaaatgaggccgcccaggaga

SEQ ID NO: 80459 - DNA, 120 bp, Artificial Sequence
  ENSG00000081791_11 (sequence is synthesized)
ggctgcgagccctcttttccatgggggctgcagccccggggcccagcgacctgacagttacaggactgaagtctttctccagcccctccctctgcagcttgaacaccctgctagcaggaa

SEQ ID NO: 80460 - DNA, 120 bp, Artificial Sequence
  ENSG00000081791_12 (sequence is synthesized)
cctcacgcctaccacatgcctcgagcacaggcaaccttggcctcctctgcagaagtgggcatctcggagccagcctggaagcctccagcagggctattcccccacacccctacccactgg

SEQ ID NO: 80461 - DNA, 120 bp, Artificial Sequence
  ENSG00000081791_13 (sequence is synthesized)
aaaggagtgttgtaagactaggttttggctaagaacttctcacctcagccctaaagagggagcctgtgggttctcagagagatatcacaatttgagtcccaaagaagaggccagataccc

SEQ ID NO: 80462 - DNA, 120 bp, Artificial Sequence
  ENSG00000081791_14 (sequence is synthesized)
acccaccttcccccaaatcttaagcacctgcgccagtacagtcaagaagaggaaagtgtgtgaagacccaggtctggctctgccacttgcctggccatgtcaccttgaagctgtgacctg

SEQ ID NO: 80463 - DNA, 120 bp, Artificial Sequence
  ENSG00000081791_15 (sequence is synthesized)
actccctatattgtttcctcagttgtagaccaaaggcaatggtgtctgccctcctaccttagaagacaaatgcaagggcatttcaccacagagaggacctttgtgctcactttggcccag

SEQ ID NO: 80464 - DNA, 120 bp, Artificial Sequence
  ENSG00000081791_16 (sequence is synthesized)
gaggcagtgatgctcatggttgcatgactttatgagtcgctgggccagggtgaggacctgggcctcctgactcctggcccagagttcttgtccatcagttcatactgcaattttatgtga

SEQ ID NO: 80465 - DNA, 120 bp, Artificial Sequence
  ENSG00000081791_17 (sequence is synthesized)
aagcattatgactgtcctacccatgggagagtaaatgtagattgaatgctaggagtcttaaagctggagagtatagattttgaggtccccatttgggaaacatgtgccagaaatgtctag

SEQ ID NO: 80466 - DNA, 120 bp, Artificial Sequence
  ENSG00000081791_18 (sequence is synthesized)
acaaaaatagagcatcagcaaccctttccaggtagaaattccagcgggagttcaggttcccaagcaatttcacgtacatggctggtaagtgactgatctttccccccgcttggtagcctc

SEQ ID NO: 80467 - DNA, 120 bp, Artificial Sequence
  ENSG00000081791_19 (sequence is synthesized)
acagatgagtcttggatgcattcacagtcatttctggtctgtgcaccaaaggatgcattcagtgacctatgaaaaaccctactgaagggtccagagaccctggtgctcaccttagccttt

SEQ ID NO: 80468 - DNA, 120 bp, Artificial Sequence
  ENSG00000081791_20 (sequence is synthesized)
gtctttgagcaaataacttaccttcttccttcttatgcctgggttttctcacacttaaatctgtactactgtttgccaatgtctgatgtgtgtatccctggttcacaagaagattttaga

SEQ ID NO: 80469 - DNA, 120 bp, Artificial Sequence
  ENSG00000081791_21 (sequence is synthesized)
tatatttaatgtataatataaaaatatgattagcatattgacctgtagtttgatagatgttctgtctaggataaagctaactgtaaaaaaaaatagtgaatcagtttaaagaaaaacata

SEQ ID NO: 80470 - DNA, 120 bp, Artificial Sequence
  ENSG00000081791_22 (sequence is synthesized)
aaaaatagtgaatcagtttaaagaaaaacataacgtaaaagtgggcacagatccagagaggtagcaaaaatcacaggggtggttccatgaatggctgacacttaggaaactctgaattag

SEQ ID NO: 80471 - DNA, 120 bp, Artificial Sequence
  ENSG00000081791_23 (sequence is synthesized)
gccatcctcgagactagcccaccattcacctctgttcatcccccgtgggctcataatcgttttcatttcacctttgatttggaaggaagaagtttcttgcccaaatgcctggatgtgtct

SEQ ID NO: 80472 - DNA, 120 bp, Artificial Sequence
  ENSG00000081791_24 (sequence is synthesized)
ataaaacagatattggattatctcatcactcttgcccttgagtattatgggaagagccagggagacgggcagggggagctgaaagctgaggctccgtcctcatctctaaactctccacta

SEQ ID NO: 80473 - DNA, 120 bp, Artificial Sequence
  ENSG00000081791_25 (sequence is synthesized)
accaatttaaaggatcttaaaagcttctccaggagagagacttaggaaaaaaaaagatttctgagtcagtgctaatgagtccagttactgaatttgtgaatagctattccctggcttctg

SEQ ID NO: 80474 - DNA, 120 bp, Artificial Sequence
  ENSG00000081791_26 (sequence is synthesized)
gatgttagcccaagttgaatagcatagatgtggttgagagtggggtctgggagggatagagagcccaccgcccaccccccacaatcccatgactgagtggagaccaaccagcctggccaa

SEQ ID NO: 80475 - DNA, 120 bp, Artificial Sequence
  ENSG00000081791_27 (sequence is synthesized)
ttcaaaggcaagaagatttgaggggggaaagttgtccacgtttccctctctgcttcccaccccatctctctcaacttcttagtggtcctgccatactttcctagcacctctctttcaccc

SEQ ID NO: 80476 - DNA, 120 bp, Artificial Sequence
  ENSG00000081791_28 (sequence is synthesized)
ggggagcccaagcgtcctctagctccatctcctcgcctgctccctgcctccttttcagggctgccctgcacactggctcaccactgttggaccctgcacatggccaccttccacagatgg

SEQ ID NO: 80477 - DNA, 120 bp, Artificial Sequence
  ENSG00000081791_29 (sequence is synthesized)
cactccttgggagcagggtccttgtctttgtattccagtgtccccagcactgagtgcaaggccccatgcagggtaggaaacctgaggtttcaagctcagggttttaagctgtgcagtgca

SEQ ID NO: 80478 - DNA, 120 bp, Artificial Sequence
  ENSG00000081791_30 (sequence is synthesized)
ctaagctctctgccaaaaaacaaacaaaaaaaggtttctgtggttaaataagtttgggaaatgctgcaccagacgtcccctttttatagattcacaatacacatcagcatatttgaggtt

SEQ ID NO: 80479 - DNA, 120 bp, Artificial Sequence
  ENSG00000081791_31 (sequence is synthesized)
ccaagaagtcctccagtaaagaacttggttaacccaatgttttctctcactgaattgagcccagagcccgtttccctacagattgcttttgagccttcctggggcaccctctgcgtgaaa

SEQ ID NO: 80480 - DNA, 120 bp, Artificial Sequence
  ENSG00000081791_32 (sequence is synthesized)
tgtcaccgtgtgccctccctgtggagccccactccccagcctcctcccctctgtggtcattttggattttctgactacttccttctagccatagctggggccgagggctggttcacagtc

SEQ ID NO: 80481 - DNA, 120 bp, Artificial Sequence
  ENSG00000081791_33 (sequence is synthesized)
tggccactgggcgtcctgtggtgaaggccagatgcagccctccctgagtggctctccctcccactcagtcactactgagctaagtactgattcaatttggggtgccaaaggttgggggta

SEQ ID NO: 80482 - DNA, 120 bp, Artificial Sequence
  ENSG00000081791_34 (sequence is synthesized)
ggatatttttaagctctccaatttaaaaaggaagggcctctcctgtggaaagggaaggatggcagagtcgtgagaaaggtgttgtcaagggaccaaaaatccttggctgttcagtcactg

SEQ ID NO: 80483 - DNA, 120 bp, Artificial Sequence
  ENSG00000081791_35 (sequence is synthesized)
cggtcttgatccagccccagggggatgggcttcactggcagagctgggtactgctgtgcttttgccattaaaattctgttattaatgactcatcatcagtgccccagaggaagtgtgaga

SEQ ID NO: 80484 - DNA, 120 bp, Artificial Sequence
  ENSG00000081791_36 (sequence is synthesized)
ggacgagagggaggtggctcccatcagcagggccagcctgggtcaggatgctgggttaaagcccggcgccctcaccaatgagacctttgtgggaagctctactgcctcagtttccctatc

SEQ ID NO: 80485 - DNA, 120 bp, Artificial Sequence
  ENSG00000081791_37 (sequence is synthesized)
cggagatgctgttttcagggagtcctgacactatgatgggaacaaggctatttggtttactatatcattagtgctaatatagtgtggggcactcagatgttcagtaaatatacattcaac

SEQ ID NO: 80486 - DNA, 120 bp, Artificial Sequence
  ENSG00000081791_38 (sequence is synthesized)
aaataagtgagtgattatactcaactccccccacccaatgcccagcaccaagcctacccagcacatagtaggtactttaagtaatttgaatgaataattttaaataacttgaatgaataa

SEQ ID NO: 80487 - DNA, 90 bp, Artificial Sequence
  ENSG00000081791_39 (sequence is synthesized)
gtaatttgaatgaataattttaaataacttgaatgaataattctgtattgccccccactcgccgcctatggtttcctgtgctacttctgg

SEQ ID NO: 80488 - DNA, 120 bp, Artificial Sequence
  ENSG00000081791_40 (sequence is synthesized)
agggattttggaactggtactgagttcttctgtgcttaggagattgttggataggagccttggcctggcttcaagccttagcgctcactgacttactgtgtgaccgttgggcagttgcag

SEQ ID NO: 80489 - DNA, 120 bp, Artificial Sequence
  ENSG00000081791_41 (sequence is synthesized)
tagtacgccagagctggcttgcaccaggctgtgagagctgttggcagcttaaaatctgctatggtgggaatatttgcaccacagaaattgctaaatgccataaaacagggctttttccct

SEQ ID NO: 80490 - DNA, 120 bp, Artificial Sequence
  ENSG00000081791_42 (sequence is synthesized)
cctcgagagccagttgttcaacatttaccagcacactactgggcctggtcacttcttgattcaaacctgtttcctcgtctttaaaatcagaataataatgcttgccttacctgtccagta

SEQ ID NO: 80491 - DNA, 120 bp, Artificial Sequence
  ENSG00000081791_43 (sequence is synthesized)
ctgcgaaggaaaaataagaaagaagctcctaacttccaggaatttagactcaaaattcagggagggcagggattttgcctttcttctttgcaactacatcctcagcctagaatagcatct

SEQ ID NO: 80492 - DNA, 120 bp, Artificial Sequence
  ENSG00000081791_44 (sequence is synthesized)
tgatgaatggattaattaatttttaaaaagtgggataagaacacaaagaggttatatataagaatgtatttcgtagagttgtatgtgaaggcaaaaaaacccaaaaaaacctgaaagttt

SEQ ID NO: 80493 - DNA, 120 bp, Artificial Sequence
  ENSG00000081791_45 (sequence is synthesized)
cttcaatggaaaactggttaattacatctatttgggccttaaaatgatgtgctagatctgtatgtcagggaaagacattcatggtgtactattaaagttaaaaaaataggttataaagta

SEQ ID NO: 80494 - DNA, 120 bp, Artificial Sequence
  ENSG00000081791_46 (sequence is synthesized)
ggagtgttgtaagactaggttttggctaagaaattccagcgggagttcaggttcccaagcaatttcacgtacatggctggaagaagtttcttgcccaaatgcctggatgtgtctgcttga

SEQ ID NO: 80495 - DNA, 120 bp, Artificial Sequence
  ENSG00000081791_47 (sequence is synthesized)
actgggccttgaccgtgtgtggatgaagtcccagcatgcctgacttcatcttcctcctcccttagcatgtcagttcctcattcctgcatgtgtgtatctgtttgtctgtccattttctcc

SEQ ID NO: 80496 - DNA, 120 bp, Artificial Sequence
  ENSG00000081800_0 (sequence is synthesized)
attgaagccacctgctcaggacaatgaaattcttcagttacattctggtttatcgccgatttctcttcgtggttttcactgtgttggttttactacctctgcccatcgtcctccacacca

SEQ ID NO: 80497 - DNA, 120 bp, Artificial Sequence
  ENSG00000081800_1 (sequence is synthesized)
aggaagcagaatgtgcctacacactctttgtggtcgccacattttggctcacagaagcattgcctctgtcggtaacagctttgctacctagtttaatgttacccatgtttgggatcatgc

SEQ ID NO: 80498 - DNA, 120 bp, Artificial Sequence
  ENSG00000081800_2 (sequence is synthesized)
cttctaagaaggtggcatctgcttatttcaaggattttcacttactgctaattggagttatctgtttagcaacatccatagaaaaatggaatttgcacaagagaattgctctgaaaatgg

SEQ ID NO: 80499 - DNA, 120 bp, Artificial Sequence
  ENSG00000081800_3 (sequence is synthesized)
tgatgatggttggtgtaaatcctgcatggctgacgctggggttcatgagcagcactgcctttttgtctatgtggctcagcaacacctcgacggctgccatggtgatgcccattgcggagg

SEQ ID NO: 80500 - DNA, 120 bp, Artificial Sequence
  ENSG00000081800_4 (sequence is synthesized)
ctgtagtgcagcagatcatcaatgcagaagcagaggtcgaggccactcagatgacttacttcaacggatcaaccaaccacggactagaaattgatgaaagtgttaatggacatgaaataa

SEQ ID NO: 80501 - DNA, 120 bp, Artificial Sequence
  ENSG00000081800_5 (sequence is synthesized)
atgagaggaaagagaaaacaaaaccagttccaggatacaataatgatacagggaaaatttcaagcaaggtggagttggaaaagaactcaggcatgagaaccaaatatcgaacaaagaagg

SEQ ID NO: 80502 - DNA, 120 bp, Artificial Sequence
  ENSG00000081800_6 (sequence is synthesized)
gccacgtgacacgtaaacttacgtgtttgtgcattgcctactcttctaccattggtggactgacaacaatcactggtacctccaccaacttgatctttgcagagtatttcaatacacgct

SEQ ID NO: 80503 - DNA, 120 bp, Artificial Sequence
  ENSG00000081800_7 (sequence is synthesized)
atcctgactgtcgttgcctcaactttggatcatggtttacgttttccttcccagctgcccttatcattctactcttatcctggatctggcttcagtggcttttcctaggattcaatttta

SEQ ID NO: 80504 - DNA, 120 bp, Artificial Sequence
  ENSG00000081800_8 (sequence is synthesized)
aggagatgttcaaatgtggcaaaaccaaaacagtccaacaaaaagcttgtgctgaggtgattaagcaagaataccaaaagcttgggccaataaggtatcaagaaattgtgaccttggtcc

SEQ ID NO: 80505 - DNA, 120 bp, Artificial Sequence
  ENSG00000081800_9 (sequence is synthesized)
tcttcattataatggctctgctatggtttagtcgagaccccggatttgttcctggttggtctgcacttttttcagagtaccctggttttgctacagattcaactgttgctttacttatag

SEQ ID NO: 80506 - DNA, 120 bp, Artificial Sequence
  ENSG00000081800_10 (sequence is synthesized)
ggctgctattctttcttatcccagctaagacactgactaaaactacacctacaggagaaattgttgcttttgattactctccactgattacttggaaagaattccagtcattcatgccct

SEQ ID NO: 80507 - DNA, 120 bp, Artificial Sequence
  ENSG00000081800_11 (sequence is synthesized)
gggatatagccattcttgttggtggagggtttgccctggcagatggttgtgaggagtctggattatctaagtggataggaaataaattatctcctctgggttcattaccagcatggctaa

SEQ ID NO: 80508 - DNA, 120 bp, Artificial Sequence
  ENSG00000081800_12 (sequence is synthesized)
taattctgatatcttctttgatggtgacatctttaactgaggtagccagcaatccagctaccattacactctttctcccaatattatctccattggccgaagccattcatgtgaaccctc

SEQ ID NO: 80509 - DNA, 120 bp, Artificial Sequence
  ENSG00000081800_13 (sequence is synthesized)
tttatattctgataccttctactctgtgtacttcatttgcattcctcctaccagtagcaaatccacccaatgctattgtcttttcatatggtcatctgaaagtcattgacatggttaaag

SEQ ID NO: 80510 - DNA, 120 bp, Artificial Sequence
  ENSG00000081800_14 (sequence is synthesized)
ctggacttggtgtcaacattgttggtgttgctgtggttatgcttggcatatgtacttggattgtacccatgtttgacctctacacttacccttcgtgggctcctgctatgagtaatgaga

SEQ ID NO: 80511 - DNA, 120 bp, Artificial Sequence
  ENSG00000081800_15 (sequence is synthesized)
ggctctaaataactaatgacacacatttaaatcagttatggtgtagctgctgcaattcctgtgaatacccgaaacctgctgttataactcagagtccatatttgttattgcagtgcaact

SEQ ID NO: 80512 - DNA, 120 bp, Artificial Sequence
  ENSG00000081800_16 (sequence is synthesized)
aaagagcatctatgtgccttcatcaagaagcccatgttttgagattttgctcatgaaccatctgcaacttgcttcatcataagaataatttataacttgaccttcaaagagattagagca

SEQ ID NO: 80513 - DNA, 120 bp, Artificial Sequence
  ENSG00000081800_17 (sequence is synthesized)
tttgtttcatcttacagttggagttcaatgtaacattttaaatgcaatttattatttcagaaatttcccatgaaactaaaaatagaaaataagatatacaagttaattcggtacttggat

SEQ ID NO: 80514 - DNA, 120 bp, Artificial Sequence
  ENSG00000081800_18 (sequence is synthesized)
aaatcatttctgcattgttgttccagagaatttgctgagaaatcaaagccatggtcatctggtgatgaagagaaaagtttaatctaaatgatatgtgcatttcctcatttaaaaaatcca

SEQ ID NO: 80515 - DNA, 120 bp, Artificial Sequence
  ENSG00000081800_19 (sequence is synthesized)
attggattattcttaatatatacatgtaatatgaaaattgagattgaagcactaattccaaaattatggctgaatatactaaataacagaaaagttacagataagaatttatttctactg

SEQ ID NO: 80516 - DNA, 120 bp, Artificial Sequence
  ENSG00000081800_20 (sequence is synthesized)
aactctatagttagtgtaatataattcatatttttatgatattggcacactgagaaattcattttgtagagctatggataaggcttgctatgatttgcactattagtacagtatagttag

SEQ ID NO: 80517 - DNA, 120 bp, Artificial Sequence
  ENSG00000081800_21 (sequence is synthesized)
aaaggaaagctgaacactataaaactattaacatattttcgtatatgagtaacaactttgcttaagtgtttatcttagttcagaaatacataatgtcatatgttaaaaataaagagatgt

SEQ ID NO: 80518 - DNA, 120 bp, Artificial Sequence
  ENSG00000081800_22 (sequence is synthesized)
agaaatctaaatgaattatcactgtgtatacagacagaaaaatcacataactctggtgtgttaacattgcaatgaaaaaatgaaaaaaagaaggaaaaaagaataagaatgaaaactgct

SEQ ID NO: 80519 - DNA, 120 bp, Artificial Sequence
  ENSG00000081800_23 (sequence is synthesized)
gacgtattacaaaacagaaaaataaatgatttaaaatcaaatcaaaaagaaaaaactaaacatttaaacaaaaatgggataagaatagtcttctagaagtgaggatgcgaaaaagaatga

SEQ ID NO: 80520 - DNA, 120 bp, Artificial Sequence
  ENSG00000081800_24 (sequence is synthesized)
gtttccaattaccctgatgtgacaattacacattgtagacaggtagcaaaatatcacatacacccccaaaatatgtacaaatattatatatcaataaataaatttttaaagagtaagtgc

SEQ ID NO: 80521 - DNA, 120 bp, Artificial Sequence
  ENSG00000081800_25 (sequence is synthesized)
tattggcattccaaaattcagctaaaggaaaaatgatcaaaaacaaagtaaggtgcacagttagcaaaagatgcagatgttatatcacagcaattctcatgctaaaaatacaacaaaaga

SEQ ID NO: 80522 - DNA, 120 bp, Artificial Sequence
  ENSG00000081800_26 (sequence is synthesized)
gttcacgccattctcctgcctcagccaaacctttgctatttttaatcttcgttggcactttccagctgttactgaccttgtcattttttattcaaataagattatttacaaacttattct

SEQ ID NO: 80523 - DNA, 120 bp, Artificial Sequence
  ENSG00000081800_27 (sequence is synthesized)
ttcttgaaactaaatatagtaaagagggtttttaaaataatatttaacatacgaattattaattggccatgttcattatttatctatgtttattaatgggccaatgcaaaaaatcatttt

SEQ ID NO: 80524 - DNA, 120 bp, Artificial Sequence
  ENSG00000081800_28 (sequence is synthesized)
ttcaaagaaaaatttgtccatgtaaagcttaaattataatattgctgctttgtataactcttctatgtttattctattcatttgttcctttccctaccatattttacacatgtatttata

SEQ ID NO: 80525 - DNA, 120 bp, Artificial Sequence
  ENSG00000081800_29 (sequence is synthesized)
atctgtagtatttattacatttctgcttttttctagtcattcaatttatcactgctgaattgcatcagatcatggatgcatttttattatgaaaaaataaaatgacttttcaaattataa

SEQ ID NO: 80526 - DNA, 120 bp, Artificial Sequence
  ENSG00000081800_30 (sequence is synthesized)
gaaaagtacttgcaagtgaggtgaccaaaaaacagctttagactcttaaacttagtgtttaaaatgagaaggctgagagacagtctgcttatggagaaagttggagtatttccccagtgc

SEQ ID NO: 80527 - DNA, 120 bp, Artificial Sequence
  ENSG00000081800_31 (sequence is synthesized)
cccaaccccctgccacttgtaccatcacagtcgaaagaagggaagagtctcctacttaacaaggaagaggaagaatcaaaccaacaaagggtgtttacagggtcatgggtgagaaaaaga

SEQ ID NO: 80528 - DNA, 120 bp, Artificial Sequence
  ENSG00000081800_32 (sequence is synthesized)
atgaagttgcttttggcttacaccctagaaagtcatctcttaaataaaacacttacatttggactagtgattccccaagtgaaaccatttcaggatgtgccattgtccaagaactcaggc

SEQ ID NO: 80529 - DNA, 120 bp, Artificial Sequence
  ENSG00000081803_0 (sequence is synthesized)
ttttcctttcgttctgcggccgctgcagccagccccgcggctccctcagacccgcgggcgcagccgccgggggtgaggcgcttggggaccgcgggccgagcggcggggatccccgagcac

SEQ ID NO: 80530 - DNA, 120 bp, Artificial Sequence
  ENSG00000081803_1 (sequence is synthesized)
catgctggacccgtcttccagcgaagaggagtcggacgaggggctggaagaggaaagccgcgatgtgctggtggcagccggcagctcgcagcgagctcctccagccccgactcgggaagg

SEQ ID NO: 80531 - DNA, 120 bp, Artificial Sequence
  ENSG00000081803_2 (sequence is synthesized)
cgggacgcgccggggcgcgcgggcggcggcggcgcggccagatctgtgagcccgagcccctctgtgctcagcgaggggcgagacgagccccagcggcagctggacgatgagcaggagcgg

SEQ ID NO: 80532 - DNA, 120 bp, Artificial Sequence
  ENSG00000081803_3 (sequence is synthesized)
gcggaggatccgcctgcagctctacgtcttcgtcgtgaggtgcatcgcgtaccccttcaacgccaagcagcccaccgacatggcccggaggcagcagaagcttaacaaacaacagttgca

SEQ ID NO: 80533 - DNA, 120 bp, Artificial Sequence
  ENSG00000081803_4 (sequence is synthesized)
gttactgaaagaacggttccaggccttcctcaatggggaaacccaaattgtagctgacgaagcattttgcaacgcagttcggagttattatgaggtttttctaaagagtgaccgagtggc

SEQ ID NO: 80534 - DNA, 120 bp, Artificial Sequence
  ENSG00000081803_5 (sequence is synthesized)
cagaatggtacagagtggagggtgttctgctaatgacttcagagaagtatttaagaaaaacatagaaaaacgtgtgcggagtttgccagaaatagatggcttgagcaaagagacagtgtt

SEQ ID NO: 80535 - DNA, 120 bp, Artificial Sequence
  ENSG00000081803_6 (sequence is synthesized)
gagctcatggatagccaaatatgatgccatttacagaggtgaagaggacttgtgcaaacagccaaatagaatggccctaagtgcagtgtctgaacttattctgagcaaggaacaactcta

SEQ ID NO: 80536 - DNA, 120 bp, Artificial Sequence
  ENSG00000081803_7 (sequence is synthesized)
tgaaatgtttcagcagattctgggtattaaaaaactggaacaccagctcctttataatgcatgtcagctggataacgcagatgaacaagcagcccagatcagaagggaacttgatggccg

SEQ ID NO: 80537 - DNA, 120 bp, Artificial Sequence
  ENSG00000081803_8 (sequence is synthesized)
gctgcaattggcagataaaatggcaaaggaaagaaaattccccaaatttatagcaaaagatatggagaatatgtatatagaagagttgcggtcttcagtgaatttgctaatggccaattt

SEQ ID NO: 80538 - DNA, 120 bp, Artificial Sequence
  ENSG00000081803_9 (sequence is synthesized)
ggaaagtcttccagtttcgaaaggtggtccggaatttaaattacaaaaattaaaacgttcacagaactctgcatttttggacataggagatgagaatgagattcagctgtcaaagtccga

SEQ ID NO: 80539 - DNA, 120 bp, Artificial Sequence
  ENSG00000081803_10 (sequence is synthesized)
cgtggtactgtcattcaccttagagattgtcataatggaagtgcaaggcctgaagtcagttgctcccaatcgaattgtttactgtacaatggaagtggaaggagaaaaacttcagacaga

SEQ ID NO: 80540 - DNA, 120 bp, Artificial Sequence
  ENSG00000081803_11 (sequence is synthesized)
ccaggccgaagcctcaaggccacaatgggggactcaaggagatttcaccaccacccatcctcggcctgtggtcaaagtgaaactcttcacagaaagcactggagttctggccctggaaga

SEQ ID NO: 80541 - DNA, 120 bp, Artificial Sequence
  ENSG00000081803_12 (sequence is synthesized)
taaagaactgggaagggtgatattatacccaacttctaatagctccaaatcagctgaattacaccgaatggtagttccaaaaaatagccaggattctgacttaaaaatcaaactggcagt

SEQ ID NO: 80542 - DNA, 120 bp, Artificial Sequence
  ENSG00000081803_13 (sequence is synthesized)
gcgaatggataaaccagcacatatgaagcatagtggatatctgtatgcccttggacagaaggtttggaaaagatggaaaaaacgttactttgttctagttcaggttagccaatatacctt

SEQ ID NO: 80543 - DNA, 120 bp, Artificial Sequence
  ENSG00000081803_14 (sequence is synthesized)
tgctatgtgcagttatagagaaaagaagtctgaaccacaagaattaatgcagcttgaaggctatactgtggattataccgatccccacccaggccttcagggtggttgtatgttctttaa

SEQ ID NO: 80544 - DNA, 120 bp, Artificial Sequence
  ENSG00000081803_15 (sequence is synthesized)
tgctgttaaagaaggagatactgtaatctttgccagtgatgatgaacaggacagaatattatgggttcaagccatgtatagggccacaggtcaatcatataaaccagttcctgcaattca

SEQ ID NO: 80545 - DNA, 120 bp, Artificial Sequence
  ENSG00000081803_16 (sequence is synthesized)
aacccagaaactgaatcctaaaggaggaactctccatgcagatgctcagctttatgcagatcgttttcagaaacatggtatggatgagtttatttctgcaaacccctgcaagcttgatca

SEQ ID NO: 80546 - DNA, 120 bp, Artificial Sequence
  ENSG00000081803_17 (sequence is synthesized)
gtactgtgcccgttatggtgtgagaggctgtcacagacatctctgctaccttgcagaactgatggaacattcagaaaatggtgctgtcattgaccctaccctgctccattacagctttgc

SEQ ID NO: 80547 - DNA, 120 bp, Artificial Sequence
  ENSG00000081803_18 (sequence is synthesized)
attctgtgcctctcatgtgcacggcaacaggcctgatggaattgggactgtttcagtggaagaaaaagaaagatttgaggagataaaagagagactctcttcccttttagaaaatcagat

SEQ ID NO: 80548 - DNA, 120 bp, Artificial Sequence
  ENSG00000081803_19 (sequence is synthesized)
aagccatttcagatactgttttccctttggacgacctgaaggtgctctaaaagctacactttcattacttgaaagggttttaatgaaagatattgccactcccataccagcagaagaggt

SEQ ID NO: 80549 - DNA, 120 bp, Artificial Sequence
  ENSG00000081803_20 (sequence is synthesized)
gaagaaagtggtcagaaaatgtctcgagaaagctgccttgatcaattacactagactcacagaatatgccaaaatagaagagaccatgaaccaggcatctcctgctagaaagctggaaga

SEQ ID NO: 80550 - DNA, 120 bp, Artificial Sequence
  ENSG00000081803_21 (sequence is synthesized)
gattcttcatctggcagagctctgcatagaagtcttacagcagaatgaagagcatcatgcagaggcatttgcctggtggcctgatttattggctgaacatgcagagaaattttgggcttt

SEQ ID NO: 80551 - DNA, 120 bp, Artificial Sequence
  ENSG00000081803_22 (sequence is synthesized)
atttacagtggatatggacactgcactagaggctcaaccgcaagactcctgggatagttttcctcttttccaactgcttaataatttcctccgaaatgacacacttttgtgtaatggaaa

SEQ ID NO: 80552 - DNA, 120 bp, Artificial Sequence
  ENSG00000081803_23 (sequence is synthesized)
atttcacaaacacttgcaagaaatctttgtacccttggttgtccgctatgtggatctcatggagtcttccatcgcccagtcaattcacagaggttttgagcaggagacatggcagcctgt

SEQ ID NO: 80553 - DNA, 120 bp, Artificial Sequence
  ENSG00000081803_24 (sequence is synthesized)
caacaatggctcagcaacatcagaagaccttttttggaagcttgatgcactgcaaatgtttgtctttgatctgcactggccagaacaggaatttgcccaccacttagagcaaagacttaa

SEQ ID NO: 80554 - DNA, 120 bp, Artificial Sequence
  ENSG00000081803_25 (sequence is synthesized)
actaatggccagtgatatgctagaggcctgtgtcaaaagaacaagaactgcatttgaactcaagctacaaaaggcaagcaaaacaactgacttgcgcattccagcttccgtttgcactat

SEQ ID NO: 80555 - DNA, 120 bp, Artificial Sequence
  ENSG00000081803_26 (sequence is synthesized)
gtttaatgtattagtcgatgccaaaaagcaaagcaccaaactctgtgccctggatggaggacaagagtttggtagtcaatggcaacagtaccattcaaaaatagatgatctgatcgacaa

SEQ ID NO: 80556 - DNA, 120 bp, Artificial Sequence
  ENSG00000081803_27 (sequence is synthesized)
cagtgtaaaagaaatcatttcactgttagtttcaaagtttgtttcagtgttggaaggcgtgttgtctaagctgtcaaggtatgatgaaggcactttcttttcatccattctgtcattcac

SEQ ID NO: 80557 - DNA, 120 bp, Artificial Sequence
  ENSG00000081803_28 (sequence is synthesized)
tgtgaaagcagctgcaaaatatgttgatgttccaaaaccaggaatggatctggcagacacctatattatgtttgttcggcaaaaccaagatattcttcgagaaaaggtcaatgaggaaat

SEQ ID NO: 80558 - DNA, 120 bp, Artificial Sequence
  ENSG00000081803_29 (sequence is synthesized)
gtatatagaaaagttatttgatcaatggtacagcagttccatgaaagtcatttgcgtgtggttgactgatagattagacctccaactccatatttaccagctgaagacgctcatcaagat

SEQ ID NO: 80559 - DNA, 120 bp, Artificial Sequence
  ENSG00000081803_30 (sequence is synthesized)
tgtgaagaaaacctacagggactttcgattgcagggtgtgttggaaggaacactgaacagtaagacttatgatactgtgcacagacgtttaacagtagaggaggccacagcctctgtttc

SEQ ID NO: 80560 - DNA, 120 bp, Artificial Sequence
  ENSG00000081803_31 (sequence is synthesized)
agaaggaggaggacttcagggcattactatgaaagacagtgacgaagaagaagaaggctgatatcacacagctttgcagaaggaaggaagaccttgatcgacattgttttttattttttt

SEQ ID NO: 80561 - DNA, 120 bp, Artificial Sequence
  ENSG00000081803_32 (sequence is synthesized)
aaccttgtccttgtaattacattcattgtttgttttggccaaataaaaatgcttgtatttctttaaaaagtaagcctgaatgtagagtaaaaggggaaatgccaagattttggggttttt

SEQ ID NO: 80562 - DNA, 120 bp, Artificial Sequence
  ENSG00000081803_33 (sequence is synthesized)
tttgtttgtttgtttgtttgtttttttggagaagagcatcctcttttgtgtagtttgacctaaaaatgaaccttggctctgcttgtgatcagaacatgaacttttttttttaaagaagat

SEQ ID NO: 80563 - DNA, 120 bp, Artificial Sequence
  ENSG00000081803_34 (sequence is synthesized)
tttaaagaagatttgagcatttttctgtaatcacatcaaaatgatgttttctgtgtaaagcgagatacatatttctcataatgcagcattgtgagaagtcagttcggaccactgcaccaa

SEQ ID NO: 80564 - DNA, 120 bp, Artificial Sequence
  ENSG00000081803_35 (sequence is synthesized)
caagaatatcgccaacagtcttcccaatgtagctcttccaaaagttccaagtctgcctcttaatcttccacagattcctaacatttctactgcttcgtggatgccttctttatatgagtc

SEQ ID NO: 80565 - DNA, 120 bp, Artificial Sequence
  ENSG00000081803_36 (sequence is synthesized)
gttaaaatggtgtgtaccttacaaattataatttatgtgccaggttcgttttgtacttaatttgctattattgtgatgtgtataaaatctttaatcttggttcttagtactttgaattgg

SEQ ID NO: 80566 - DNA, 120 bp, Artificial Sequence
  ENSG00000081803_37 (sequence is synthesized)
tctacaggtatattcctgggatgaaaggattgccaaacccaaatatagactagattatccaatgggtttgtgtctttgttccattctcaacatttcttctttcaactataagtaatcccc

SEQ ID NO: 80567 - DNA, 120 bp, Artificial Sequence
  ENSG00000081803_38 (sequence is synthesized)
aggtgtggggtagcaagtgtgcttccgtcaagataccatattctcctgctccagtataacagcttgcaggcaataaaaatctatttgctcataactacttctgtatttattagacttata

SEQ ID NO: 80568 - DNA, 120 bp, Artificial Sequence
  ENSG00000081803_39 (sequence is synthesized)
tagagcaaatgcagtaaaagaggtttgcagtgtttcaaacatcccaactatctgactctgtgtttttgtttcttgagttttttgtttgttttgtttgtaatattttgtttttaatcaaat

SEQ ID NO: 80569 - DNA, 120 bp, Artificial Sequence
  ENSG00000081803_40 (sequence is synthesized)
gagtaaaagatagtaacactgactgttctttgtacctaataggcacatacattgttaaaagaattactatgacagcatatttccatagcagaggaaatatatatttcatatattattagt

SEQ ID NO: 80570 - DNA, 120 bp, Artificial Sequence
  ENSG00000081803_41 (sequence is synthesized)
attagtaatcaatgttaactaataattagtaatgttagtaatattaactagtaattcacattattagtggttctctcaaaatattttcttgctagggtttgagagataattgtattatgt

SEQ ID NO: 80571 - DNA, 120 bp, Artificial Sequence
  ENSG00000081803_42 (sequence is synthesized)
atgttgcgtaagttctctatgaattatttttgtgatatttcccaaaacatattggcagattgtgctactgcatttattaataagtaatttttaaatgaaggcagttaatgcagaataagt

SEQ ID NO: 80572 - DNA, 120 bp, Artificial Sequence
  ENSG00000081803_43 (sequence is synthesized)
ggaggtatccctgcatttatgaaaacgtttattctgaaactttagaaatgaaacaacttggacctccagattcgttctcccatggtgtaataagtggtcgttaggtacctagactagcct

SEQ ID NO: 80573 - DNA, 120 bp, Artificial Sequence
  ENSG00000081803_44 (sequence is synthesized)
taaaaatctatttaatctacagttactatttagcattgttttggctcattttctgggccctagggctaagataacaaacaaggaaatttcttccttcttccgggattaaagactaactct

SEQ ID NO: 80574 - DNA, 120 bp, Artificial Sequence
  ENSG00000081803_45 (sequence is synthesized)
accaactcactatctttgaaaggcagtttgggaatgttctccctccttttcttctctattcacacaccaaatactattttctccaaaccctcaaatgtccagtcatgctatcccaaactc

SEQ ID NO: 80575 - DNA, 120 bp, Artificial Sequence
  ENSG00000081803_46 (sequence is synthesized)
tccaatggcaccatccccaagcttgctgttccacgacacattgctctgtacttagtaattacccacccttcttttcctttcaataaaatgtccatttccttgatacagatcatctccaaa

SEQ ID NO: 80576 - DNA, 120 bp, Artificial Sequence
  ENSG00000081803_47 (sequence is synthesized)
attcaattccacgtgttgcttgttgtaggcgccacaggttccccacctgcgtccgggcgctcgggcggctccgcctctgccggcgggctctggggaaccgctgggtcggcgcgcccgggg

SEQ ID NO: 80577 - DNA, 120 bp, Artificial Sequence
  ENSG00000081803_48 (sequence is synthesized)
ctggcggagcaattcctgaggcgcccaagctcacccccaacgctaactccgcctattcagtcccggcggctccccctctcccccctcccaatcctcctcccggctcctgcccgccccttt

SEQ ID NO: 80578 - DNA, 120 bp, Artificial Sequence
  ENSG00000081803_49 (sequence is synthesized)
attacactagactcacagaatatgccaaaatagaaggcccagcagaaaaggaaacagagaccatgaaccaggcatctcctgctagaaagctggaagagattcttcatctggcagagctct

SEQ ID NO: 80579 - DNA, 120 bp, Artificial Sequence
  ENSG00000081803_50 (sequence is synthesized)
aaaggtgctttgtagatttttattcattcgaacatttaccttggaattctgaatcctcataaataatacattcagagaagtggagaaaggcaatacgttttgagtcaacacaaaatgaca

SEQ ID NO: 80580 - DNA, 120 bp, Artificial Sequence
  ENSG00000081803_51 (sequence is synthesized)
gcaagataatgtattcttttgtcataaaatattgagaaaatgggaagacaataactggtattaattaccgacagggtttaaatatgccaattaagtagaaaataaggagatgtcttggtg

SEQ ID NO: 80581 - DNA, 120 bp, Artificial Sequence
  ENSG00000081818_0 (sequence is synthesized)
acacggaagaagcgttacaagcagtgcaggtttaccaacggcttggggcagcgatatactaaacaaatttaatattaaaagcaactgtgtgacgattcctccaagcaagaaattggaatt

SEQ ID NO: 80582 - DNA, 120 bp, Artificial Sequence
  ENSG00000081818_1 (sequence is synthesized)
gaatgtctcaagtctcgttgcggttgctgaggggattggatatagggacctggactccaacatgaagaagctagggagaattcatccaaacaggcaagtgttggcctttattttgatggt

SEQ ID NO: 80583 - DNA, 120 bp, Artificial Sequence
  ENSG00000081818_2 (sequence is synthesized)
gttcttgtctcaggttcgcctcgagcctattcgttattctgtgttggaggaaacagagagcggctcctttgtagcccatctggccaaggatctgggcctgggaattggggaactggcctc

SEQ ID NO: 80584 - DNA, 120 bp, Artificial Sequence
  ENSG00000081818_3 (sequence is synthesized)
ccggtcagcccgggtgctgtctgacgatgacaagcagcgtttgcagctggatcgtcagactggagatttgcttctgagggagaaactagaccgggaagagctctgtggtcctattgaacc

SEQ ID NO: 80585 - DNA, 120 bp, Artificial Sequence
  ENSG00000081818_4 (sequence is synthesized)
gtgtgtactgcatttccaagtgttcctggaaatgccggtgcaattttttcaaggagaattattgatccaggacataaatgatcactctccaatattccctgaaagggaagtgctcttgaa

SEQ ID NO: 80586 - DNA, 120 bp, Artificial Sequence
  ENSG00000081818_5 (sequence is synthesized)
aatactagaaaatagccagccgggtactctatttccgttgctaatagctgaggatttggatgtgggcagcaatggtcttcaaaaatacacaatcagccccaattctcattttcacattct

SEQ ID NO: 80587 - DNA, 120 bp, Artificial Sequence
  ENSG00000081818_6 (sequence is synthesized)
cactcgaaatcatagtgagggcaagaaatacccagatttggtgcaggacaaaccactggatcgagaggagcagcctgagttcagcttaaccctcgtggcgctggatggtgggtcaccacc

SEQ ID NO: 80588 - DNA, 120 bp, Artificial Sequence
  ENSG00000081818_7 (sequence is synthesized)
taggtctggcacggtcatggttcgaatcctgatcatggacatcaatgacaatgctcctgagtttgtgcacactccatatggggtgcaggtcctggaaaacagccccctagactctccaat

SEQ ID NO: 80589 - DNA, 120 bp, Artificial Sequence
  ENSG00000081818_8 (sequence is synthesized)
tgttagggtcttagctagagatatagatgctggaaacttcgggagtgtttcttatggcttattccaagcatcagatgaaattaaacaaactttctcaataaatgaagtcacgggagaaat

SEQ ID NO: 80590 - DNA, 120 bp, Artificial Sequence
  ENSG00000081818_9 (sequence is synthesized)
actgttgaaaaaaaaattggatttcgaaaaaattaaatcttaccatgtagaaattgaggccacagatggaggaggcctttctggaaaaggcactgtagtcatagaggtggtggatgtgaa

SEQ ID NO: 80591 - DNA, 120 bp, Artificial Sequence
  ENSG00000081818_10 (sequence is synthesized)
tgacaatcccccagaacttatcatatcttcactcaccagctccatcccagaaaatgctcctgagacggtagtctctatcttccgaattcgagatagagattccggagaaaatggaaagat

SEQ ID NO: 80592 - DNA, 120 bp, Artificial Sequence
  ENSG00000081818_11 (sequence is synthesized)
gatttgctctattccagataatctaccgtttattctaaaaccaactttgaagaatttttacaccctggtaacagagagaccactggaccgagagaccagcgctgagtacaacatcaccat

SEQ ID NO: 80593 - DNA, 120 bp, Artificial Sequence
  ENSG00000081818_12 (sequence is synthesized)
atcaccatcgccgtcactgacttggggacacccaggctgaaaacccagcagaacataaccgtgcaggtctccgacgtcaatgacaacgcccccgccttcacccaaacctcctacaccctg

SEQ ID NO: 80594 - DNA, 120 bp, Artificial Sequence
  ENSG00000081818_13 (sequence is synthesized)
acagccccgccctgcacatcggcagtgtcagcgccacagacagagactcgggcaccaacgcccaggtcacctactcgctgctgccgccccaggacccgcacctgcccctcgcctccctgg

SEQ ID NO: 80595 - DNA, 120 bp, Artificial Sequence
  ENSG00000081818_14 (sequence is synthesized)
ctccctggtctccatcaacgcagacaacggccacctgttcgccctcaggtcgctggactacgaggccctgcaggcgttcgagttccgcgtgggcgcctcagaccgcggttctccggcttt

SEQ ID NO: 80596 - DNA, 68 bp, Artificial Sequence
  ENSG00000081818_15 (sequence is synthesized)
gggctgttcgggacgcagccaagcacaggctcgtggtgcttgtcaaggacaatggcgagcctccgcgc

SEQ ID NO: 80597 - DNA, 120 bp, Artificial Sequence
  ENSG00000081818_16 (sequence is synthesized)
cgccacgctgcacgtgctcctggtggatggcttctcccagccctacctgcctctccctgaggcggccccggcccaggcccaggccgactctctcaccgtctacctggtggtggcgttggc

SEQ ID NO: 80598 - DNA, 80 bp, Artificial Sequence
  ENSG00000081818_17 (sequence is synthesized)
gccccggcccaggcccaggccgactctctcaccgtctacctggtggtggcgttggcctcggtgtcgtcgctcttcctctt

SEQ ID NO: 80599 - DNA, 120 bp, Artificial Sequence
  ENSG00000081818_18 (sequence is synthesized)
gcccctttccagggcatctggtggacgtaagcggcaccgggaccctgtcccagagctaccagtacgaggtgtgtctgacaggagactctgggactggtgagttcaagttcctgaagccaa

SEQ ID NO: 80600 - DNA, 120 bp, Artificial Sequence
  ENSG00000081818_19 (sequence is synthesized)
tatttcctaatctcttggttcaggacaccgggagggaagttaaggaaaaccccaagttcagaaatagcttggtattcagttaagtattgtatttagttcagtgaaccgcccgttagtttt

SEQ ID NO: 80601 - DNA, 120 bp, Artificial Sequence
  ENSG00000081818_20 (sequence is synthesized)
gtcaaacttcccactgcaatgcctttatttaaaaaaattgtctacttatctaaatattcataccacaatttcaaacctactcatgtccctgataaagctaaatttgtcccttttttattg

SEQ ID NO: 80602 - DNA, 120 bp, Artificial Sequence
  ENSG00000081818_21 (sequence is synthesized)
attgttattaattgcacttaacatttttagttatactggatattgagtatggattttctctatatttgatctattggtgattaatctttttgtaatcataaattactcaattaggataaa

SEQ ID NO: 80603 - DNA, 120 bp, Artificial Sequence
  ENSG00000081818_22 (sequence is synthesized)
aattatgttttaatgaaattcttaaattaacatctttttaatggaacatttaagtgaatatatgaatattgaatttctaaatatttgttgtgcctgtctttaccatgtaacttaatgttt

SEQ ID NO: 80604 - DNA, 120 bp, Artificial Sequence
  ENSG00000081818_23 (sequence is synthesized)
gcaaggccagagtgtttgaaagttttgtatttaactttataattaccttgtcctttctggttgactatactaggctaagccctcttaatagccatgagtgtaaaatttagtttactcatt

SEQ ID NO: 80605 - DNA, 120 bp, Artificial Sequence
  ENSG00000081818_24 (sequence is synthesized)
tttcacaaattgtatataaacatgcacttcactacattggtaatacactaaaattgtggtccttttcctcttgtgaccaccacatgtctagtgattattttgtttatttggttgctactt

SEQ ID NO: 80606 - DNA, 120 bp, Artificial Sequence
  ENSG00000081818_25 (sequence is synthesized)
tgctacttacctagcacattgtaatgttccatgaatgctaatattaaattttgtaaaaataacttatttataaataatttttaaagagaaaaatctcatataatttgtcataacctttca

SEQ ID NO: 80607 - DNA, 120 bp, Artificial Sequence
  ENSG00000081818_26 (sequence is synthesized)
aactgttaaatcatggcctgatatcatcttaaaaaaaaatctcagaatctgaaataagccctaaatttctccccaaaatcaagactcttgagagcatcataggtctccttgtgctacctt

SEQ ID NO: 80608 - DNA, 120 bp, Artificial Sequence
  ENSG00000081818_27 (sequence is synthesized)
ttactccctataaatagaaatccaagtatactttaatatgtgtatattttttggttttcctacagcttctccccatctttcaaaagaatcacgaaatttcttctgcaccttggctattct

SEQ ID NO: 80609 - DNA, 120 bp, Artificial Sequence
  ENSG00000081818_28 (sequence is synthesized)
gtttaaatctgataatcagttgatctcaggtttttcactgtacattactttgcagatatggacagcctttacaaaaataatttttaaatgcttaattattttaatttgttctttaaggta

SEQ ID NO: 80610 - DNA, 120 bp, Artificial Sequence
  ENSG00000081818_29 (sequence is synthesized)
accttcagttattttgaattaatttaacttctcaattatgccaaagttgcacttgcatgaaataaatattattttgtccttgtatagactggaacagtaataaatttatctgaattaaaa

SEQ ID NO: 80611 - DNA, 120 bp, Artificial Sequence
  ENSG00000081842_0 (sequence is synthesized)
attactgcatcattccctgactgttgaatgatggcggacgcagaagaaatggattaataaattccggaacatacagtattttatctttatgcggaagatcttctaatggaaataaaacca

SEQ ID NO: 80612 - DNA, 120 bp, Artificial Sequence
  ENSG00000081842_1 (sequence is synthesized)
gaggtatttgacatggtgtttaccccggaggatagattgggaaagcaatgtctgctcctcccgcttctgctcctcgcagcctggaaggtggggagcggccagctccactactccgtaccc

SEQ ID NO: 80613 - DNA, 120 bp, Artificial Sequence
  ENSG00000081842_2 (sequence is synthesized)
gaggaggccaaacacggcaccttcgtgggccggatcgcgcaggacctggggctggagctggcggagctggtgccgcgcctgttcaggatggcctccaaagaccgcgaggaccttctggag

SEQ ID NO: 80614 - DNA, 120 bp, Artificial Sequence
  ENSG00000081842_3 (sequence is synthesized)
gcattttgtttgtgaattctcggatcgaccgcgaggagctgtgcgggcggagcgcggagtgcagcatccacctggaggtgatcgtggacaggccgctgcaggttttccatgtggacgtgg

SEQ ID NO: 80615 - DNA, 120 bp, Artificial Sequence
  ENSG00000081842_4 (sequence is synthesized)
ttccatgtggacgtggaggtgagggacattaacgacaacccgcccttgttcccggtagaggaacaaagagtgctgatttacgaatctaggctgccagattctgtgtttccactggagggc

SEQ ID NO: 80616 - DNA, 120 bp, Artificial Sequence
  ENSG00000081842_5 (sequence is synthesized)
gcgtccgatgcagatgttggctcaaattccatcttaacctataaactcagttctagcgaatacttcgggctagatgtgaaaataaacagtgatgacaataaacaaattgggctcttatta

SEQ ID NO: 80617 - DNA, 120 bp, Artificial Sequence
  ENSG00000081842_6 (sequence is synthesized)
aagaaatccttggacagagaggaagctcctgcacacaacttattcctgacagccacagatgggggcaaacctgagctcacaggcactgttcagctgctggtcacagtgctggatgtgaat

SEQ ID NO: 80618 - DNA, 120 bp, Artificial Sequence
  ENSG00000081842_7 (sequence is synthesized)
gataatgctcccactttcgaacagtctgaatacgaagtaagaatattcgaaaatgcagacaacggaacaacagttatcagactgaatgcttctgatcgggatgaaggagcgaatggggca

SEQ ID NO: 80619 - DNA, 120 bp, Artificial Sequence
  ENSG00000081842_8 (sequence is synthesized)
atttcatattcttttaatagccttgttgcagccatggttattgaccactttagcatagatcgaaatacgggagaaatagtgattcggggtaatttggattttgaacaagaaaacttatac

SEQ ID NO: 80620 - DNA, 120 bp, Artificial Sequence
  ENSG00000081842_9 (sequence is synthesized)
aaaatcctcattgacgccacggacaaaggccatcctcccatggcgggtcattgcaccgttttagtgagaattttggataaaaatgataacgtccctgagatagcactgacttccttatcc

SEQ ID NO: 80621 - DNA, 120 bp, Artificial Sequence
  ENSG00000081842_10 (sequence is synthesized)
ttgcctgtacgtgaagacgctcaatttggtactgtcatcgccctaattagcgtgaacgacctcgattcaggtgccaacgggcaggtgaactgctcgctgacgcctcacgtccctttcaag

SEQ ID NO: 80622 - DNA, 120 bp, Artificial Sequence
  ENSG00000081842_11 (sequence is synthesized)
ctggtgtccaccttcaagaattactactcgttggtgctggacagtgccctggaccgcgagagcgtgtcggcctatgagttggtggtaaccgcgcgggacgggggctcgccttcgctgtgg

SEQ ID NO: 80623 - DNA, 120 bp, Artificial Sequence
  ENSG00000081842_12 (sequence is synthesized)
gccaccgccagcttgtctgtggaggtggccgacatgaatgacaatgctccggcgttcgcgcagcccgagtacacagtgttcgtgaaggagaacaacccgccgggctgccacatcttcacg

SEQ ID NO: 80624 - DNA, 120 bp, Artificial Sequence
  ENSG00000081842_13 (sequence is synthesized)
gtgtctgcgcgagacgcggacgcgcaggagaacgcgctggtgtcctactcgctggtggagcggcgggtgggcgagcgcgcgttgtcgagctacatttcggtgcacgcggagagcggcaag

SEQ ID NO: 80625 - DNA, 120 bp, Artificial Sequence
  ENSG00000081842_14 (sequence is synthesized)
gagagcggcaaggtgtacgcgctgcagccgctggaccacgaggagctagagctgctgcagtttcaggtgagcgcgcgcgacgcgggcgtgccgcctctgggcagcaacgtgacgctgcag

SEQ ID NO: 80626 - DNA, 120 bp, Artificial Sequence
  ENSG00000081842_15 (sequence is synthesized)
gacgagaacgacaacgcgccggcgctgctggcgcctcgggtgggtggtactggtggtgcagtgagcgagctggtgccgcggtcactgggtgcaggccaagtggtggcgaaggtgcgcgca

SEQ ID NO: 80627 - DNA, 120 bp, Artificial Sequence
  ENSG00000081842_16 (sequence is synthesized)
gttgacgccgactcaggctacaacgcgtggctttcgtatgagctgcagcccccggcaagcagcgctcgcttcccgtttcgcgtggggctgtacacgggcgagatcagcaccactcgtgtc

SEQ ID NO: 80628 - DNA, 120 bp, Artificial Sequence
  ENSG00000081842_17 (sequence is synthesized)
ctggacgaagcggactctccgcgccaccggctgctggtgctggtgaaagaccacggtgagccggcgctgacagcgacggccacggttctggtgtcgctggtggagagtggccaggctcca

SEQ ID NO: 80629 - DNA, 120 bp, Artificial Sequence
  ENSG00000081842_18 (sequence is synthesized)
aaggcgtcatcacgggcgtcggtgggcgccgcgggcccagaggcggcgctggtggatgtcaacgtgtacctgatcatcgccatctgcgcggtatccagcctgctggtcctcacgctactg

SEQ ID NO: 80630 - DNA, 120 bp, Artificial Sequence
  ENSG00000081842_19 (sequence is synthesized)
ctgtacacagcgctgcggtgctcggcgccacccaccgagggcgcgtgcacggcggacaagcccacgctggtgtgctccagcgcagtggggagctggtcgtactcgcagcagaggcggcag

SEQ ID NO: 80631 - DNA, 120 bp, Artificial Sequence
  ENSG00000081842_20 (sequence is synthesized)
agggtgtgctccggggagggcccacccaagatggatctcatggcctttagccccagcctttcaccttgtcctattatgatgggtaaggcggagaatcaggatttaaatgaagatcatgat

SEQ ID NO: 80632 - DNA, 120 bp, Artificial Sequence
  ENSG00000081842_21 (sequence is synthesized)
gccaaaccacgacagcccaaccctgactggcgttactctgcctccctgagagcaggcatgcacagctctgtgcacctagaggaggctggcattctacgggctggtccaggagggcctgat

SEQ ID NO: 80633 - DNA, 120 bp, Artificial Sequence
  ENSG00000081842_22 (sequence is synthesized)
accccaaacaatccggtcccggtgagttgcccgacaaattcattatcccaggatctcctgcaatcatctccatccggcaggagcctactaacagccaaattgacaaaagtgacttcataa

SEQ ID NO: 80634 - DNA, 120 bp, Artificial Sequence
  ENSG00000081842_23 (sequence is synthesized)
ccttcggcaaaaaggaggagaccaagaaaaagaagaaaaagaagaagggtaacaagacccaggagaaaaaagagaaagggaacagcacgactgacaacagtgaccagtgaggtcctcaaa

SEQ ID NO: 80635 - DNA, 120 bp, Artificial Sequence
  ENSG00000081842_24 (sequence is synthesized)
tggaaacaagccacttagccagtttttgtaataatggcaaatctctcccatgtagcaattccctgctcctttttcctatctacatgagccctcttagagacctcagaaatctgcagaaag

SEQ ID NO: 80636 - DNA, 120 bp, Artificial Sequence
  ENSG00000081842_25 (sequence is synthesized)
ttccctgtgtctgtctagaacgcatttaacaggttttgtcgtaaaagctttactaagtctggtgttaactctttctctccactctggcttgttttcagaacctaaaaagcagacccaagt

SEQ ID NO: 80637 - DNA, 120 bp, Artificial Sequence
  ENSG00000081842_26 (sequence is synthesized)
ttcctttctcctccgccgcaaaggagaggcttcccagccccgccagtgagaggttggactctctgccctgtgctccggggatcctgtcttgatgacacttgcagggcaggctgaaaagtt

SEQ ID NO: 80638 - DNA, 120 bp, Artificial Sequence
  ENSG00000081842_27 (sequence is synthesized)
ttgagattgagcagcttgggagtttgtggccactgggtatgtgtggctaccgcgggtatgcgagtgccagatattggctgagacgagccagcttagactaattggtacaaggaaggcaag

SEQ ID NO: 80639 - DNA, 120 bp, Artificial Sequence
  ENSG00000081842_28 (sequence is synthesized)
aaaacaaagacaaataaacagcggaagttatcagtatggaggggaagtgtaaacttaaagggaccagactttctaaatcttacaactcaagaggtggcagccaccctctaggagacaaaa

SEQ ID NO: 80640 - DNA, 120 bp, Artificial Sequence
  ENSG00000081842_29 (sequence is synthesized)
ctacccccactgacaaggctttaggagaccctaaagtctgttggctgtgacgtcattatacctaaaatctgcatcatacctgcaagccaacagttcagtgttttaacagagaaccaccct

SEQ ID NO: 80641 - DNA, 120 bp, Artificial Sequence
  ENSG00000081842_30 (sequence is synthesized)
gggaaacagaagcagatctgatgtgtttcctatacatgtcctgtgctcactttattaaaaattcttttgcacacaatgtttatgaaaaggccagatccttttccaatacttatgcaaaag

SEQ ID NO: 80642 - DNA, 120 bp, Artificial Sequence
  ENSG00000081842_31 (sequence is synthesized)
caaaagaaaaccccgacacctcacctttcgctgtttgttgtttcatagatttatttaaaaaaagagaaagtctatagctataaatctttaaagagaaatatgaatacaattcccctaaac

SEQ ID NO: 80643 - DNA, 120 bp, Artificial Sequence
  ENSG00000081842_32 (sequence is synthesized)
tctcctcaaaagagaattcagtctacagccatttaaatgatcattgctgctacagaagtgctttaagagaattgcctgaaacatctgtattatatcggccacctgccaatcacagcttta

SEQ ID NO: 80644 - DNA, 120 bp, Artificial Sequence
  ENSG00000081842_33 (sequence is synthesized)
ctctttcaggtcactctggggctgcctcttgcatgtattactaaataaaatgatctctctttctctctctctctctcttttctaagaaacaattatgtgcactttgatacacaaccttct

SEQ ID NO: 80645 - DNA, 120 bp, Artificial Sequence
  ENSG00000081842_34 (sequence is synthesized)
ctaaccaactatatatcaagacccaaaaattgaagaaaaatattgttttctcatacagtgagcagatttttcaatctactaattctgtgacttgtcttggtgtgctagcctacaccttct

SEQ ID NO: 80646 - DNA, 120 bp, Artificial Sequence
  ENSG00000081842_35 (sequence is synthesized)
ctttggtttagttttccttttctataacactctgaattgctaatcttactaacacctatgatgttacctgaaatcaatctcccatatgtatgctgtatgctatgctaagactcctgaaat

SEQ ID NO: 80647 - DNA, 120 bp, Artificial Sequence
  ENSG00000081842_36 (sequence is synthesized)
atacttactctgtgcttgtgtatgtgaatgttaatgcaactattacctagagtgaactttaagctttattgttgaatgtaattccattatatttccttttgtacacctgtgaaaaagtgg

SEQ ID NO: 80648 - DNA, 120 bp, Artificial Sequence
  ENSG00000081842_37 (sequence is synthesized)
agtagtgtttttttaaccattgttaatcagcttttgtgtatgaaagacacagtaaaatttctttcttaaatcaagatactggtgattcaaggaattttatttatggtccagccaagagcc

SEQ ID NO: 80649 - DNA, 120 bp, Artificial Sequence
  ENSG00000081842_38 (sequence is synthesized)
atctcgtgccaagacttctgctggcaagggaatggataaagctgttttgttctagtaacaattttggaatgaatactgacaatattccatgagggtgtgcaagcacaaattttaccaatc

SEQ ID NO: 80650 - DNA, 120 bp, Artificial Sequence
  ENSG00000081842_39 (sequence is synthesized)
tgacctctttgaagttgcagaatgctttgaaattctaatggtatctgaaatatcagctcatagaaagtaacaaaatttgctgtcaccttaaataagacattttaattttgttataatgta

SEQ ID NO: 80651 - DNA, 120 bp, Artificial Sequence
  ENSG00000081842_40 (sequence is synthesized)
ttagaagtttgattaattatattatctatttaggcattaatataaaagaggtaggagtctgttatttaaaaaaagcattaaatttaaaaaaaaactgtcttgtctacttttagcttcatt

SEQ ID NO: 80652 - DNA, 120 bp, Artificial Sequence
  ENSG00000081842_41 (sequence is synthesized)
cattctcccatattttgaagggtgtgtaacttcagctctgcaggattgcatggggtaaaacttgttaccaacacatgtgaaccattgctacattgtaggttgtgatcattttgccccact

SEQ ID NO: 80653 - DNA, 120 bp, Artificial Sequence
  ENSG00000081842_42 (sequence is synthesized)
gaagcccatgtatctgaccttacgtgccttttgaactaggagaatcgggctaatttattaatgatgataattataatgtatctgtacagcactttttacatttgcgaagtgctttccaat

SEQ ID NO: 80654 - DNA, 120 bp, Artificial Sequence
  ENSG00000081842_43 (sequence is synthesized)
ccatgttagttactagttattacagctgtaaggataaaacacgtcatgtggattcattttgaattggtgctattggtatttcctctgttattgctaataaatgaaaatggtggtatgaaa

SEQ ID NO: 80655 - DNA, 120 bp, Artificial Sequence
  ENSG00000081842_44 (sequence is synthesized)
attttaatctctttgcttctttaatattcataatttaagtgaaattagaaatcactgtccacaatctgcacctcagaatttttgtcttcaaaccaaaatattcttggatatgtcgttttc

SEQ ID NO: 80656 - DNA, 120 bp, Artificial Sequence
  ENSG00000081842_45 (sequence is synthesized)
tgttgcattttaattcagaatcatagtagcatttttttctgattaattatatgggattttcatttgtttgcctttgagctttaggataatttttttacatatactcttttttgatcatat

SEQ ID NO: 80657 - DNA, 120 bp, Artificial Sequence
  ENSG00000081842_46 (sequence is synthesized)
attgaaatttgagcaccagtgtatcacttatgtttttacactttccatttcaatgtttttctgtcgacacttttattaagctaacgctttgattttatccattttgtgtaagaactctga

SEQ ID NO: 80658 - DNA, 120 bp, Artificial Sequence
  ENSG00000081842_47 (sequence is synthesized)
tcatcatagtttttatctgtggttcccttttcagacttgtgattccgggaggcaatagtgttcatttattgtcccccttttaaaccattgaggaataaaggacaaaaacaatagttatca

SEQ ID NO: 80659 - DNA, 120 bp, Artificial Sequence
  ENSG00000081842_48 (sequence is synthesized)
gcctgaatacttctggttgttatggttattgatttatttactaccgatctaaataatggaaaaatagtgattcaacagaatttagaccttgtgatcaagtaaatttatatgaaaactgca

SEQ ID NO: 80660 - DNA, 120 bp, Artificial Sequence
  ENSG00000081853_0 (sequence is synthesized)
aatccagcaatacggctcccacagcacaagggggtggaggtttggccctaaagcttcaggacaccaaagaaattcagtcgaacagcccaccagttctctccatagggacctgggtcccgt

SEQ ID NO: 80661 - DNA, 120 bp, Artificial Sequence
  ENSG00000081853_1 (sequence is synthesized)
gaatgctggttatctcacaccctgaggaataaagattggaatccgcactggatgctggaagttgactcggagaaaattgcgacaggagggaaatggcggctctgcaaaagttgccacact

SEQ ID NO: 80662 - DNA, 120 bp, Artificial Sequence
  ENSG00000081853_2 (sequence is synthesized)
gcagaaagctggtcctgctgtgcttccttttggcgaccctgtgggaggccagggccgggcagattcgctattctgtgcgggaagagatcgacagaggctccttcgtaggcaacatcgcca

SEQ ID NO: 80663 - DNA, 120 bp, Artificial Sequence
  ENSG00000081853_3 (sequence is synthesized)
aggacttgggtttggagcccctggcactggcagagcagggagtccgcatcgtctccagaggtaggtcccagctctttgctctgaacccgcgaagcggcagcttggtcactgcgaacagga

SEQ ID NO: 80664 - DNA, 120 bp, Artificial Sequence
  ENSG00000081853_4 (sequence is synthesized)
tagaccgggaggagctctgcgctcagagcgcaccctgtctgttgaattttaacattctgctggaggataaattgactatttattcagtagaggtggaaataacagatattaacgataatg

SEQ ID NO: 80665 - DNA, 120 bp, Artificial Sequence
  ENSG00000081853_5 (sequence is synthesized)
cccctcgctttggagtagaggaactggagctaaaaatcagtgaaaccactacgccaggattccggattcctcttaagaatgcgcatgatgcagacgtaggtgagaacgcccttcagaagt

SEQ ID NO: 80666 - DNA, 120 bp, Artificial Sequence
  ENSG00000081853_6 (sequence is synthesized)
acgcactcaacccaaatgaccacttctccctggacgtgcgaaggggagctgatgggaacaagtacccagaactggtgctggagcgctctctggaccgcgaggaagaggctgttcaccacc

SEQ ID NO: 80667 - DNA, 120 bp, Artificial Sequence
  ENSG00000081853_7 (sequence is synthesized)
tcgttctcgtggcttctgatgggggtgacccagtgctatctggcacctcccgcatctgcgtgaaggtcctggatgcgaacgacaatgcgcctgtttttacacagcccgagtaccgcataa

SEQ ID NO: 80668 - DNA, 120 bp, Artificial Sequence
  ENSG00000081853_8 (sequence is synthesized)
gcattccggagaatacgctcgtgggcacccggatactcacggtgaccgccactgacgcagatgagggctactacgctcaagtggtatattttctagagaaaagccctggagaaacctcag

SEQ ID NO: 80669 - DNA, 120 bp, Artificial Sequence
  ENSG00000081853_9 (sequence is synthesized)
aggtatttgagcttaagtcaacatctggagaactgacaatcataaaagatctagattatgaggatgctacattccatgaaattgatattgaagctcaggatggtccgggccttctaacca

SEQ ID NO: 80670 - DNA, 120 bp, Artificial Sequence
  ENSG00000081853_10 (sequence is synthesized)
gagcgaaggttatcgtcacggttctggatgtgaatgacaatgccccagaattttacatgacatctgctactagctcagtttctgaagactctcttccaggaaccataattgggcttttta

SEQ ID NO: 80671 - DNA, 120 bp, Artificial Sequence
  ENSG00000081853_11 (sequence is synthesized)
atgtacatgatagagactctgggcagaacgcattcaccacctgttcactccccgaggatcttccttttaagttagaaaagtcagtagacaattactaccgactggttacaaccagagccc

SEQ ID NO: 80672 - DNA, 120 bp, Artificial Sequence
  ENSG00000081853_12 (sequence is synthesized)
ttgacagggaacagttttccttttacaacatcactctaaccgctaaagatggagggaacccctccctgtccacggatgctcacattttgctccaggtggcagacatcaacgacaacgcac

SEQ ID NO: 80673 - DNA, 120 bp, Artificial Sequence
  ENSG00000081853_13 (sequence is synthesized)
ccgccttctcccgcacatcctactccacctacattcccgaaaacaaccccagaggagcctctgtcttctcagtgacggcccatgaccccgacagcaacgacaatgctcatgtaacttact

SEQ ID NO: 80674 - DNA, 120 bp, Artificial Sequence
  ENSG00000081853_14 (sequence is synthesized)
ctttcgcggaggacactgttcagggggcacccttatcctcttacatctctatcaactccgacactggagtactctatgcactgcgctcctttgattatgagcagttgcgagacttgcaag

SEQ ID NO: 80675 - DNA, 120 bp, Artificial Sequence
  ENSG00000081853_15 (sequence is synthesized)
tgtgggtgatagcgcgggacagcgggaaccctccactcagtagcaatgtatcattaagcctgttcgtgctggaccagaacgacaacgcgcccgagatcctgtaccctgccttccccacag

SEQ ID NO: 80676 - DNA, 87 bp, Artificial Sequence
  ENSG00000081853_16 (sequence is synthesized)
gacaacgcgcccgagatcctgtaccctgccttccccacagacggttccactggcgtggagctggcgccccgctccgcagagcccaga

SEQ ID NO: 80677 - DNA, 120 bp, Artificial Sequence
  ENSG00000081853_17 (sequence is synthesized)
aggccagcgagccgggactcttctcggtgggtctgcacacgggcgaggtgcgcacggcgcgagccctgctggacagagacgcgctcaagcagagcctcgtggtggccatccaggaccacg

SEQ ID NO: 80678 - DNA, 120 bp, Artificial Sequence
  ENSG00000081853_18 (sequence is synthesized)
gccagccccctctctccgccactgtcacgctcaccgtggccgtggccgacaggatccccgacatcctggccgacctgggcagcctcgagccctccgccatacccaacgattcggacctca

SEQ ID NO: 80679 - DNA, 120 bp, Artificial Sequence
  ENSG00000081853_19 (sequence is synthesized)
ctctgtacctggtggtggcggtggccgcggtctcctgcgtcttcctggccttcgtcatcgtgttgctggcgcacaggctgcggcgctggcacaagtcacgcctgctgcaggcttcaggag

SEQ ID NO: 80680 - DNA, 120 bp, Artificial Sequence
  ENSG00000081853_20 (sequence is synthesized)
catgcagagctcgcactttgtgggcgtggacggggttcgggctttcctgcagacctattcccacgaggtctccctcactgcggactcgcggaagagccacctgattttcccccagcccaa

SEQ ID NO: 80681 - DNA, 120 bp, Artificial Sequence
  ENSG00000081853_21 (sequence is synthesized)
ctatgcggacacgctcatcagccaggagagctgtgagaaaaaggattttttatcagcgcctcaatctctactcgaagaagaaagagaagaaacgttttctcagcaagccccgcccaacac

SEQ ID NO: 80682 - DNA, 120 bp, Artificial Sequence
  ENSG00000081853_22 (sequence is synthesized)
ggactggcgtttctctcaggcccagagacccggcaccagcggctcccaaaatggcgatgacaccggcacctggcccaacaaccagtttgacacagagatgctgcaagccatgatcttggc

SEQ ID NO: 80683 - DNA, 120 bp, Artificial Sequence
  ENSG00000081853_23 (sequence is synthesized)
gtccgccagtgaagctgctgatgggagctccaccctgggagggggtgccggcaccatgggattgagcgcccgctacggaccccagttcaccctgcagcacgtgcccgactaccgccagaa

SEQ ID NO: 80684 - DNA, 120 bp, Artificial Sequence
  ENSG00000081853_24 (sequence is synthesized)
tgtctacatcccaggcagcaatgccacactgaccaacgcagctggcaagcgggatggcaaggccccagcaggtggcaatggcaacaagaagaagtcgggcaagaaggagaagaagtaaca

SEQ ID NO: 80685 - DNA, 120 bp, Artificial Sequence
  ENSG00000081853_25 (sequence is synthesized)
tggaggccaggccaagagccacagggcggcctctccccaaccagcccagcttctccttacctgcacccaggcctcagagtttcagggctaacccccagaatactggtaggggccaaggcc

SEQ ID NO: 80686 - DNA, 120 bp, Artificial Sequence
  ENSG00000081853_26 (sequence is synthesized)
atgctccccttgggaaacagaaacaagtgcccagtcagcacctaccccttcccccccagggggttgaatatgcaaaagcagttccgctgggaacccccatccaatcaactgctgtaccca

SEQ ID NO: 80687 - DNA, 120 bp, Artificial Sequence
  ENSG00000081853_27 (sequence is synthesized)
tgggggtagtggggttactgtagacaccaagaaccatttgccacaccccgtttagttacagctgaactcctccatcttccaaatcaatcaggcccatccatcccatgcctccctcctccc

SEQ ID NO: 80688 - DNA, 120 bp, Artificial Sequence
  ENSG00000081853_28 (sequence is synthesized)
caccccactccaacagttcctctttcccgagtaaggtggttggggtgttgaagtaccaagtaacctacaagcctcctagttctgaaaagttggaagggcatcatgacctcttggcctctc

SEQ ID NO: 80689 - DNA, 120 bp, Artificial Sequence
  ENSG00000081853_29 (sequence is synthesized)
ctttgattctcaatcttcccccaaagcatggtttggtgccagccccttcacctccttccagagcccaagatcaatgctcaagttttggaggacatgatcaccatccccatggtactgatg

SEQ ID NO: 80690 - DNA, 120 bp, Artificial Sequence
  ENSG00000081853_30 (sequence is synthesized)
cttgctggatttagggagggcattttgctaccaagcctcttcccaacgccctggggaccagtcttctgttttgtttttcattgtttgacgtttccactgcatgccttgacttcccccacc

SEQ ID NO: 80691 - DNA, 120 bp, Artificial Sequence
  ENSG00000081853_31 (sequence is synthesized)
tcctcctcaaacaagagactccactgcatgttccaagacagtatggggtggtaagataaggaagggaagtgtgtggatgtggatggtgggggcatggacaaagcttgacacatcaagtta

SEQ ID NO: 80692 - DNA, 120 bp, Artificial Sequence
  ENSG00000081853_32 (sequence is synthesized)
tcaaggccttggaggaggctctgtatgtcctcaggggactgacaacatcctccagattccagccataaaccaataactaggctggacccttcccactacataatagggctcagcccaggc

SEQ ID NO: 80693 - DNA, 120 bp, Artificial Sequence
  ENSG00000081853_33 (sequence is synthesized)
agccagctttgggctgagctaacaggaccaatggattaaactggcatttcagtccaaggaagctcgaagcaggtttaggaccaggtccccttgagaggtcagaggggcctctgtgggtgc

SEQ ID NO: 80694 - DNA, 120 bp, Artificial Sequence
  ENSG00000081853_34 (sequence is synthesized)
tgggtactccagaggtgccactggtggaagggtcagcggagccccagcaggaagggtgggccagccaggccattcttagtccctgggttggggaggcagggagctagggcagggaccaaa

SEQ ID NO: 80695 - DNA, 120 bp, Artificial Sequence
  ENSG00000081853_35 (sequence is synthesized)
tgaacagaaagtctcagcccaggatggggcttcttcaacagggcccctgccctcctgaagcctcagtccttcaccttgccaggtgccgtttctcttccgtgaaggccactgcccaggtcc

SEQ ID NO: 80696 - DNA, 120 bp, Artificial Sequence
  ENSG00000081853_36 (sequence is synthesized)
ccagtgcgccccctagtggccatagcctggttaaagttccccagtgcctccttgtgcatagaccttcttctcccacccccttctgcccctgggtccccggccatccagcggggctgccag

SEQ ID NO: 80697 - DNA, 120 bp, Artificial Sequence
  ENSG00000081853_37 (sequence is synthesized)
agaaccccagacctgcccttacagtagtgtagcgccccctccctctttcggctggtgtagaatagccagtagtgtagtgcggtgtgcttttacgtgatggcgggtgggcagcgggcggcg

SEQ ID NO: 80698 - DNA, 120 bp, Artificial Sequence
  ENSG00000081853_38 (sequence is synthesized)
ggctccgcgcagccgtctgtccttgatctgcccgcggcggcccgtgttgtgttttgtgctgtgtccacgcgctaaggcgaccccctcccccgtactgacttctcctataagcgcttctct

SEQ ID NO: 80699 - DNA, 120 bp, Artificial Sequence
  ENSG00000081853_39 (sequence is synthesized)
tcgcatagtcacgtagctcccaccccaccctcttcctgtgtctcacgcaagttttatactctaatatttatatggctttttttcttcgacaaaaaaataataaaacgtttcttctgaaaa

SEQ ID NO: 80700 - DNA, 120 bp, Artificial Sequence
  ENSG00000081853_40 (sequence is synthesized)
aacgttttctcaggtaatctatcttttcacaacatacgtactagctagtttgctgaagtaattcacttacttgtttactatatctattttgttccccatatttccttgagggtagagtca

SEQ ID NO: 80701 - DNA, 120 bp, Artificial Sequence
  ENSG00000081853_41 (sequence is synthesized)
agttttaggaagtgagtcttggtgaattatttcttggtaggtcttagtgttcacaggctgtaagaggaagaagagacgtgagaatctttgtgcaatgaatgtaaaccaggagttaataga

SEQ ID NO: 80702 - DNA, 120 bp, Artificial Sequence
  ENSG00000081853_42 (sequence is synthesized)
taagattatccaaagagcactgcattaggaactagggtgtctggtttcttatactttcttctccatccctgggcaaatcatctcatccacccagatcaacaattttttctttgttaaaaa

SEQ ID NO: 80703 - DNA, 120 bp, Artificial Sequence
  ENSG00000081853_43 (sequence is synthesized)
tataaagattggagtttatgtttactcaagtcctttcttcttttaagttatgactcttactctatatttgaatctgtatatgaacagtgaaacatgttagttggctagttctttctcatt

SEQ ID NO: 80704 - DNA, 120 bp, Artificial Sequence
  ENSG00000081853_44 (sequence is synthesized)
cagtcttaatacatttctttcagtttggcagcaaaattgttttccttaacttgcatgcccttccctgttaaaaatatggaaatttagaaatatacattccttacagtgtttcaggaaggt

SEQ ID NO: 80705 - DNA, 120 bp, Artificial Sequence
  ENSG00000081853_45 (sequence is synthesized)
atgtcatattattttggcttagttttaaaaatcacattaacctctaagctatatgcttcttgaagaagtgactgacttatcatctgctctataataaagctgtagagtggtaataaacag

SEQ ID NO: 80706 - DNA, 120 bp, Artificial Sequence
  ENSG00000081853_46 (sequence is synthesized)
gtttctcctttttttttatctttctcatacgtgggaaccatactgtattttaatctttaaaataatatatatcctcaatatagttttgcttaaagaaaagatacaaaagattcatatcat

SEQ ID NO: 80707 - DNA, 120 bp, Artificial Sequence
  ENSG00000081853_47 (sequence is synthesized)
acaattgcccagaaccaacttctttatacatctctcttctcaaggtttctactcacaatagctgctagaaatgttcccaatccctcacccaatcccagtgcccctctgatcaattttctt

SEQ ID NO: 80708 - DNA, 120 bp, Artificial Sequence
  ENSG00000081853_48 (sequence is synthesized)
ttcccattcctcttcctatattggcttttagtatgttggttatgtatttaataacagagaataataagcacactaatgttctatgtaactggcatcattttttatttttatttgaaaatt

SEQ ID NO: 80709 - DNA, 120 bp, Artificial Sequence
  ENSG00000081853_49 (sequence is synthesized)
atcatgtaccaattgagccttttattgaatgataccatatttctcaaagtgctgtgattctttccgttgcatttgatcaagaaaaaattttctgagacaaggtgttgttttggttactat

SEQ ID NO: 80710 - DNA, 120 bp, Artificial Sequence
  ENSG00000081853_50 (sequence is synthesized)
tacataattgtctatgagtaaaattggaactcactgtggaataatatgtcataatagctttacttgtaagtgaataataaagtataaacaggaaaattaaagcaaagttatttttagtgt

SEQ ID NO: 80711 - DNA, 120 bp, Artificial Sequence
  ENSG00000081853_51 (sequence is synthesized)
gtgtagtaactccacaagaataaatgtcttatgcatagatatgtaatgcatcatgattgaaacgacaaatatattgtatttatatttctgtgcttggaaacttatggggaaagagattct

SEQ ID NO: 80712 - DNA, 120 bp, Artificial Sequence
  ENSG00000081853_52 (sequence is synthesized)
ggaacataaaagcttatttctactagtttcagttggttttgaaaaaacatccttacagtctagatttaaacaaaggaaacttctttcagtaccctgaaggtctgtgatttctctctcaca

SEQ ID NO: 80713 - DNA, 120 bp, Artificial Sequence
  ENSG00000081853_53 (sequence is synthesized)
cctaggcattgtcatgctgttctctcccacatccaggccttttcactgatccactcctctcatgtttcctgggaaagcgtttgctaacattaaaggcccaattgaaggcccccctaaccc

SEQ ID NO: 80714 - DNA, 120 bp, Artificial Sequence
  ENSG00000081853_54 (sequence is synthesized)
ccttggcttctcccattatggtaattatctcagtacactgcaattccctgtttgcttttatatccttataatctctgtgaaggaagctactgtgtctatattgttcaccttaaatcccca

SEQ ID NO: 80715 - DNA, 120 bp, Artificial Sequence
  ENSG00000081853_55 (sequence is synthesized)
aacatattgtctgatgcctaattatgtgtttgtttaatgaatattaaataacaacaaatatcgaaactaagttatcaggtcaccaagaacaaacttaaagaaatataatgtataaatatg

SEQ ID NO: 80716 - DNA, 120 bp, Artificial Sequence
  ENSG00000081870_0 (sequence is synthesized)
gggaactcggtggagcgagcgcgcccgggaactcggtggaggccgcggtggcggggtggggcggggctgagggcagggcggggcctgtgggagtcgtggcgcaaagagctcggggtagga

SEQ ID NO: 80717 - DNA, 120 bp, Artificial Sequence
  ENSG00000081870_1 (sequence is synthesized)
gcaaagagctcggggtaggagcgcgcgcccggaaactcagcggtggccgcggcgaaggggcggggctgagggtgggacggggcttgtgggaggcgtggcgcgaagatttcagagttggag

SEQ ID NO: 80718 - DNA, 120 bp, Artificial Sequence
  ENSG00000081870_2 (sequence is synthesized)
cgcgcgcgaccccggactccacggaggccgcggcgagcaggcggagctgcgggtcgggacgctctgcgtggggcggggcgcaagggaggtttcgagcccggaaggtccggcgcccagagc

SEQ ID NO: 80719 - DNA, 120 bp, Artificial Sequence
  ENSG00000081870_3 (sequence is synthesized)
attttagctacatcaagtgatgaaaaacacccacctgaaaatatcattgatgggaatccagaaacgttttggaccaccacaggaatgtttccccaggaattcattatttgtttccacaaa

SEQ ID NO: 80720 - DNA, 120 bp, Artificial Sequence
  ENSG00000081870_4 (sequence is synthesized)
catgtaaggattgaaaggcttgtaatccaaagttactttgtacagaccttgaagattgaaaaaagcacgtctaaagagccagttgattttgagcaatggattgaaaaagatttggtacac

SEQ ID NO: 80721 - DNA, 120 bp, Artificial Sequence
  ENSG00000081870_5 (sequence is synthesized)
acagaggggcagcttcaaaatgaagaaattgtggcacatgatggctccgctacttacttgagattcattattgtatcagcctttgatcattttgcatctgtgcatagcgtttctgcagaa

SEQ ID NO: 80722 - DNA, 120 bp, Artificial Sequence
  ENSG00000081870_6 (sequence is synthesized)
ggaacagtagtctcaaatctttcctcataatgataacaaaatgctcttgcatgattttttaacaatatatttaaacaggaagttgtcactgatatactttattaaaaggatttttatcaa

SEQ ID NO: 80723 - DNA, 120 bp, Artificial Sequence
  ENSG00000081870_7 (sequence is synthesized)
taattttttttttttttttttggtgctccaggtaaggctaatattttagttttcattatcctttcattttttccacaggcagaaggcatatatgtaaacttttggcaaaacactagtttt

SEQ ID NO: 80724 - DNA, 120 bp, Artificial Sequence
  ENSG00000081870_8 (sequence is synthesized)
gggattatgaggtaaatgccttgagctcagttggcctctctcaaactgcaaattcgaaacccttccaaagcacataataatttccatgcaatttactatgtaaaagtctttggcaaaagg

SEQ ID NO: 80725 - DNA, 120 bp, Artificial Sequence
  ENSG00000081870_9 (sequence is synthesized)
ccctattaggaacataagactccagcttgctagaacactattccatgacatctttattctagattcatttgtcctggagttatttgtcaaattcttgttgaaaatctgataactctgatt

SEQ ID NO: 80726 - DNA, 120 bp, Artificial Sequence
  ENSG00000081870_10 (sequence is synthesized)
atttacattggatagttgagattcttctattactagtggcattttctcaggaatttagggggataatctcccttgggacatcattctaatcctatttatttaaagataaaatgtatcaga

SEQ ID NO: 80727 - DNA, 120 bp, Artificial Sequence
  ENSG00000081870_11 (sequence is synthesized)
tactttatagaattaaaaattaacctgcacaatgtatttagactttaacctatctccatagtcatagttaataaatttcctcatgatattataggtttgtacctaaatcaaccggtagag

SEQ ID NO: 80728 - DNA, 120 bp, Artificial Sequence
  ENSG00000081870_12 (sequence is synthesized)
aaagttattctcaataataatataagctaaatgtacattcataaattaggttcttacctttcatagagagtgacggcaagataaaacaattcatttattttttgttttatttttctcatt

SEQ ID NO: 80729 - DNA, 120 bp, Artificial Sequence
  ENSG00000081870_13 (sequence is synthesized)
catttactttgaagtatttatttggtttgctttctttcatttgattctgtaggcattttagaataggaatgaaaaaagggtcgcgatgccaaaattgaatgttaatttaagcatgaaagg

SEQ ID NO: 80730 - DNA, 85 bp, Artificial Sequence
  ENSG00000081870_14 (sequence is synthesized)
ggaaaagcaaattttaaatggagaagagtaggaaaggcatttcaaaagccaccttggtataccagataagagatgtgaaggtgag

SEQ ID NO: 80731 - DNA, 120 bp, Artificial Sequence
  ENSG00000081870_15 (sequence is synthesized)
aagccaccttggtataccagataagagatgtgaaggtgagtagtcattcataatgatgaatttggggaaagatgaataaaaaagtctgagtagagcaaaaagtgaaactaaaactgaaca

SEQ ID NO: 80732 - DNA, 120 bp, Artificial Sequence
  ENSG00000081870_16 (sequence is synthesized)
ttacggctagatcacaggctttcaggtattttcttgtaacactggaaccatttaaggtttttgagaaggaatgtgaattatagcaattgtgttcatgttcaataaaatgaaatgctgagc

SEQ ID NO: 80733 - DNA, 120 bp, Artificial Sequence
  ENSG00000081870_17 (sequence is synthesized)
cagtttagaaggaagatgactgtattcctgataagtctcttctctcattaatcgtggaggttctagagtcatacctaaagtttgaattccatttctggcacttatgagctgtatatcatt

SEQ ID NO: 80734 - DNA, 120 bp, Artificial Sequence
  ENSG00000081870_18 (sequence is synthesized)
gaacaccttgcttggctcctctaaacctgttttctcaccagtaaagtgggttaaagtacctttctcataagattgtagtcaaaagtgaatggataaatatgtttgactcatcataggctc

SEQ ID NO: 80735 - DNA, 120 bp, Artificial Sequence
  ENSG00000081870_19 (sequence is synthesized)
tccataaatgtttatgaccaagaccaccaatagtagtattatcgccatacacacaaaaaaatcggaacaatgccaaattcagaaaagctctacttgctctgtgttgtatggttgcgaaca

SEQ ID NO: 80736 - DNA, 120 bp, Artificial Sequence
  ENSG00000081870_20 (sequence is synthesized)
ggttttttggaaacatacagagtaacttccatgttgtttctgatcccagtgctctgtgtagttccactgtgcatgataatctcaggcagagggaaaaagaaatatagggacaaaaacata

SEQ ID NO: 80737 - DNA, 120 bp, Artificial Sequence
  ENSG00000081870_21 (sequence is synthesized)
ctgtgttttataacaacttgccctattaaacatagtttaataaatgtttggtggattacctgatatccacttttggtaccatttctgaaactaattgagttgtgtatatttaggtttttg

SEQ ID NO: 80738 - DNA, 120 bp, Artificial Sequence
  ENSG00000081870_22 (sequence is synthesized)
atccttttctttataatgcctaaactgaactcttgatacaaataggtttttttagaagtggtttaccaaggcaaaaactcaaacaacttcattttatggaagtgtaaattttaaggtctg

SEQ ID NO: 80739 - DNA, 120 bp, Artificial Sequence
  ENSG00000081913_0 (sequence is synthesized)
cataatcccctggaacggccgcgcacaacgccattggcttctcccttctccgcgcgccgccgccgtctcccacctccgcctcatcgcctccctctccgcccgctgcctccggagctgggg

SEQ ID NO: 80740 - DNA, 120 bp, Artificial Sequence
  ENSG00000081913_1 (sequence is synthesized)
gggaaacgcgaagccccactgcaatggagcccgccgccgcggccacggtacagcgactccccgagctcggcagggaggaccgagcttcggctccggcggccgccgctgcggcagcagcag

SEQ ID NO: 80741 - DNA, 80 bp, Artificial Sequence
  ENSG00000081913_2 (sequence is synthesized)
gccccagcccattgccggcggggctgcccccgtacccggggccggcggcggcgccaactccctcctgctgaggagagggc

SEQ ID NO: 80742 - DNA, 120 bp, Artificial Sequence
  ENSG00000081913_3 (sequence is synthesized)
gcggcggcgccaactccctcctgctgaggagagggcggctgaagaggaatctgtccgcggccgccgcggccgcctcctcgtcgtcgtcgtcctcggccgctgctgcctcgcactcccccg

SEQ ID NO: 80743 - DNA, 120 bp, Artificial Sequence
  ENSG00000081913_4 (sequence is synthesized)
gcgctgccggcctccccgcctcctgctcggcctcggcgtcgctgtgcacccggagcctggacaggaagacgctgcttctgaagcaccggcagacgctgcagctgcagccgtcggaccggg

SEQ ID NO: 80744 - DNA, 120 bp, Artificial Sequence
  ENSG00000081913_5 (sequence is synthesized)
actgggtgaggcaccagctccagcgcggctgcgtgcacgtcttcgaccgccacatggcctcgacctacctgcgcccggtgctctgcacactggacaccacggccggcgaggtggccgccc

SEQ ID NO: 80745 - DNA, 80 bp, Artificial Sequence
  ENSG00000081913_6 (sequence is synthesized)
gcctgctgcagctgggccacaaaggcggcggcgtggtgaaggtgctgggccaggggcccggagccgccgccgcccgggag

SEQ ID NO: 80746 - DNA, 80 bp, Artificial Sequence
  ENSG00000081913_7 (sequence is synthesized)
gggactcggaggtaccgcccgcgaggagcgcgccgggtgccttcggggggcctccgcgcgcgccccccgccgacctaccc

SEQ ID NO: 80747 - DNA, 120 bp, Artificial Sequence
  ENSG00000081913_8 (sequence is synthesized)
cgcgccgcgccagcccagcgccctcggactccagccccggcgagccgttcgttgggggccctgtctcttcgccccgcgccccacggcctgtggtctccgacaccgagagcttcagtctga

SEQ ID NO: 80748 - DNA, 120 bp, Artificial Sequence
  ENSG00000081913_9 (sequence is synthesized)
gtcccagcgccgagagcgtgtctgaccggttggacccctacagcagcggcggcggctcctcgtcgtcgtcggaagagctcgaggccgacgcagcctcggccccgacgggggtcccgggcc

SEQ ID NO: 80749 - DNA, 120 bp, Artificial Sequence
  ENSG00000081913_10 (sequence is synthesized)
ccgccgtcccggccaccccgcgcagcccctcccgcttccccagacggcttcctcgcctcagccgcagcagaaagccccgagggccattgacagcccgggcggggccgtccgcgaggggtc

SEQ ID NO: 80750 - DNA, 120 bp, Artificial Sequence
  ENSG00000081913_11 (sequence is synthesized)
ggtcgtgcgaggagaaggcagcggcagccgtggccccgggaggcctccagtctacccccgggaggagcggggtgaccgcggagaaggcgcctccgccgcccccgccgcccaccctgtacg

SEQ ID NO: 80751 - DNA, 120 bp, Artificial Sequence
  ENSG00000081913_12 (sequence is synthesized)
tgcagctccacggagagaccacccggcgcttggaggcggaggagaagccattgcagatccaaaatgactacctcttccaactgggatttggggagctgtggagggtgcaggaggaaggca

SEQ ID NO: 80752 - DNA, 120 bp, Artificial Sequence
  ENSG00000081913_13 (sequence is synthesized)
tggactcggagattggctgcctcatccgcttctatgcaggaaaacctcacagcacgggtagctctgaacggattcagctctcaggaatgtataatgtccgtaaaggcaagatgcagttgc

SEQ ID NO: 80753 - DNA, 120 bp, Artificial Sequence
  ENSG00000081913_14 (sequence is synthesized)
cagtgaaccgatggacaagacgccaagtcatcctatgtgggacctgcctgatagtatcatctgtgaaagacagcttgaccggaaagatgcatgttctgccactaattggtggaaaagtag

SEQ ID NO: 80754 - DNA, 120 bp, Artificial Sequence
  ENSG00000081913_15 (sequence is synthesized)
aagaagtgaaaaagcaccaacactgtttagcatttagctcctctggaccccaaagccagacttactacatttgctttgatactttcacagaatacttaaggtggctgcgacaagtctcca

SEQ ID NO: 80755 - DNA, 120 bp, Artificial Sequence
  ENSG00000081913_16 (sequence is synthesized)
aggttgcatcccagcgcattagctcagtggacctctcgtgttgtagcctggaacatctgcctgccaacctcttctacagccaagacctcactcatctcaatttaaaacaaaacttcctaa

SEQ ID NO: 80756 - DNA, 120 bp, Artificial Sequence
  ENSG00000081913_17 (sequence is synthesized)
ggcagaaccctagccttccagctgccagggggcttaatgaactgcaaaggttcaccaagttgaagagtcttaacctttccaataatcatttaggggacttcccactggcagtctgcagta

SEQ ID NO: 80757 - DNA, 120 bp, Artificial Sequence
  ENSG00000081913_18 (sequence is synthesized)
ttccaaccctggcagagctgaacgtgtcctgcaatgccctgcgatcagtcccggcagccgttggagtgatgcacaacttacagacatttttgttggatggaaactttctccaatcccttc

SEQ ID NO: 80758 - DNA, 120 bp, Artificial Sequence
  ENSG00000081913_19 (sequence is synthesized)
ctgctgagttggagaacatgaagcagcttagttatctgggtctttctttcaatgaatttactgacattcccgaagtattggagaaattgactgctgtggataaactttgtatgtctggaa

SEQ ID NO: 80759 - DNA, 120 bp, Artificial Sequence
  ENSG00000081913_20 (sequence is synthesized)
actgtgtggagacccttaggctacaggctttaagaaaaatgcctcacattaaacatgtggatctaaggttgaacgtaattaggaagctgatagcagatgaagtggactttctacagcatg

SEQ ID NO: 80760 - DNA, 120 bp, Artificial Sequence
  ENSG00000081913_21 (sequence is synthesized)
ttactcagcttgacctacgagacaataagcttggtgatctagatgctatgattttcaacaacattgaagttttacactgtgaaaggaatcaactggtcacattagacatctgtggctatt

SEQ ID NO: 80761 - DNA, 120 bp, Artificial Sequence
  ENSG00000081913_22 (sequence is synthesized)
tcctaaaagcgctctatgcctcttctaatgaacttgttcaacttgatgtttacccagttccaaattatctgtcctacatggatgtttcaaggaaccgcttagaaaatgtgcctgagtggg

SEQ ID NO: 80762 - DNA, 120 bp, Artificial Sequence
  ENSG00000081913_23 (sequence is synthesized)
tatgtgaaagccgaaagctagaagttttggatattggccataatcaaatatgtgaacttcctgcccgcttattttgtaatagcagtctccggaaactactggcaggacacaaccagttgg

SEQ ID NO: 80763 - DNA, 120 bp, Artificial Sequence
  ENSG00000081913_24 (sequence is synthesized)
caaggctgcctgaaaggctagaaagaacctcggtggaggtcttggatgtgcaacacaaccagctccttgagctcccacctaaccttctgatgaaggctgacagcctgagattcctgaacg

SEQ ID NO: 80764 - DNA, 120 bp, Artificial Sequence
  ENSG00000081913_25 (sequence is synthesized)
atcttacaagagttgtatttgacaaataacagcctcacagacaaatgtgtgcccttgttaacgggacacccccatttgaagatccttcacatggcctataaccgacttcagagttttcca

SEQ ID NO: 80765 - DNA, 120 bp, Artificial Sequence
  ENSG00000081913_26 (sequence is synthesized)
gcaagtaaaatggcgaaactggaggaacttgaagaaattgatctcagtgggaataagctgaaagccatcccaacaacgatcatgaattgcaggcgcatgcacaccgtgattgctcactcc

SEQ ID NO: 80766 - DNA, 120 bp, Artificial Sequence
  ENSG00000081913_27 (sequence is synthesized)
aactgcatcgaggtctttcccgaagttatgcagctcccagagatcaagtgtgtggacctgagctgtaatgagctaagtgaagtcacattaccagaaaacctgcctcccaaactgcaggag

SEQ ID NO: 80767 - DNA, 120 bp, Artificial Sequence
  ENSG00000081913_28 (sequence is synthesized)
ctagacctgactggaaacccgcgccttgtccttgatcacaaaaccctggaactactgaataatatccgctgtttcaagattgatcagccttctacaggagacgcttccggagccccagct

SEQ ID NO: 80768 - DNA, 120 bp, Artificial Sequence
  ENSG00000081913_29 (sequence is synthesized)
gtatggagtcatggttacactgaagcttcgggggtaaaaaacaagttgtgtgtcgcagccctgtcggtgaataacttctgtgacaaccgcgaagccctgtatggtgtgtttgacggagac

SEQ ID NO: 80769 - DNA, 120 bp, Artificial Sequence
  ENSG00000081913_30 (sequence is synthesized)
cggaatgtggaggtgccctaccttctccagtgcactatgagtgacattttggctgaagagctgcaaaaaacaaaaaacgaagaagaatacatggtcaatacattcattgtcatgcaaagg

SEQ ID NO: 80770 - DNA, 120 bp, Artificial Sequence
  ENSG00000081913_31 (sequence is synthesized)
aaacttggaactgctgggcagaagcttggtggtgccgctgtcctttgtcatatcaagcatgaccctgtggatccaggaggatccttcaccttgacctctgctaatgtgggcaagtgccaa

SEQ ID NO: 80771 - DNA, 120 bp, Artificial Sequence
  ENSG00000081913_32 (sequence is synthesized)
acagttctctgtcgaaatggaaagccgctgcctctgtccagatcttacatcatgagctgtgaagaagagctgaagaggattaaacagcacaaggccattatcactgaggatggcaaggtg

SEQ ID NO: 80772 - DNA, 120 bp, Artificial Sequence
  ENSG00000081913_33 (sequence is synthesized)
aacggagtgactgagtccacgcgcatcctgggctacaccttcctccatcccagtgtggtgcctcgcccccacgtgcagtccgtgctcctgactccccaggatgagttcttcatcctaggc

SEQ ID NO: 80773 - DNA, 120 bp, Artificial Sequence
  ENSG00000081913_34 (sequence is synthesized)
agtaaggggttgtgggacagcctgtccgtcgaggaggccgtggaagccgtgcgcaacgtgcccgatgccctggctgctgccaagaagctgtgtaccctggcccagagctacggctgccac

SEQ ID NO: 80774 - DNA, 120 bp, Artificial Sequence
  ENSG00000081913_35 (sequence is synthesized)
gacagcatcagcgctgtggtggtgcagctcagtgtcactgaggacagcttctgctgctgcgagctcagcgccggtggggctgtgccaccacccagtcctggcatctttcctccctcagtg

SEQ ID NO: 80775 - DNA, 120 bp, Artificial Sequence
  ENSG00000081913_36 (sequence is synthesized)
aacatggtgatcaaggatcggccctcagatgggctgggcgtgccgtcctccagcagcggcatggcttccgagattagcagtgagctctccacttctgagatgagcagcgaggtggggtca

SEQ ID NO: 80776 - DNA, 120 bp, Artificial Sequence
  ENSG00000081913_37 (sequence is synthesized)
acagcctccgatgagcccccgcccggagccctaagcgagaacagccctgcctaccccagtgagcagcgctgcatgctccaccccatctgtctgtccaactccttccagcgccagctatcc

SEQ ID NO: 80777 - DNA, 120 bp, Artificial Sequence
  ENSG00000081913_38 (sequence is synthesized)
agcgccacgttctctagcgccttctccgacaacggccttgacagtgacgatgaggagcccatcgagggcgtcttcaccaacggcagccgggtggaggtggaggtggacatccactgcagc

SEQ ID NO: 80778 - DNA, 120 bp, Artificial Sequence
  ENSG00000081913_39 (sequence is synthesized)
cgggccaaggagaaggagaaacagcagcacctgcttcaggtgccagcagaggccagtgatgagggcattgtcatcagcgccaacgaggatgagccaggtctgcccaggaaggcagacttc

SEQ ID NO: 80779 - DNA, 120 bp, Artificial Sequence
  ENSG00000081913_40 (sequence is synthesized)
tctgccgttgggaccattgggcgccggagggccaatggctctgttgcgccccaggaaaggagccacaatgtgatagaggtggctacagacgcacctcttcgaaagcctggaggctatttt

SEQ ID NO: 80780 - DNA, 120 bp, Artificial Sequence
  ENSG00000081913_41 (sequence is synthesized)
gctgccccggctcagccggatcctgatgatcagtttatcatacccccggagctggaagaggaggtcaaagaaatcatgaagcatcaccaggagcaacagcagcagcagcagccgccacca

SEQ ID NO: 80781 - DNA, 120 bp, Artificial Sequence
  ENSG00000081913_42 (sequence is synthesized)
ccccctcagctccagccgcagctgccgcggcactaccagctggaccagctgccagattattacgacacgccactatgacccagccgagctgtttaacaaataaactaaccacaaaagact

SEQ ID NO: 80782 - DNA, 120 bp, Artificial Sequence
  ENSG00000081913_43 (sequence is synthesized)
gagttgcaagagtctcccaggctcacattaaaccaggggttttactccacatccttcccccagacactgttcccaacctgtcatcgcagctaatctgtaggttctctttctttgggttat

SEQ ID NO: 80783 - DNA, 120 bp, Artificial Sequence
  ENSG00000081913_44 (sequence is synthesized)
ttttttaagtaatcaccactttcttctagtgatgctttaccaatatgatttacatttgttaacttctccccctaacatatcagatatgtaaagacaaagaacaaaaggtttaatatatta

SEQ ID NO: 80784 - DNA, 120 bp, Artificial Sequence
  ENSG00000081913_45 (sequence is synthesized)
cagagaaacagttaatgataatgtaatattttttaaaatggctttttgttgtttgtttggaaggcagggcaggctgccgttgctaaatgatttaataatattgtaattctgtatttcttt

SEQ ID NO: 80785 - DNA, 120 bp, Artificial Sequence
  ENSG00000081913_46 (sequence is synthesized)
tttgttttgttttgttttgtttttgtcttgaaaataatagacatttgtagaatatggagactaactcctaggagttgctttactctgtcaggtgacttaagtcactgggattcactaatt

SEQ ID NO: 80786 - DNA, 120 bp, Artificial Sequence
  ENSG00000081913_47 (sequence is synthesized)
ttaagtcactgggattcactaattttctctgagagaacagctgattgagaatttccattgtaaatagctcagtgttgtatagtgaggcttacgatgttttgtagtcttggcgtaaggaca

SEQ ID NO: 80787 - DNA, 120 bp, Artificial Sequence
  ENSG00000081913_48 (sequence is synthesized)
cagcccaagtaactgacgtttcccctccccctcccctctgaggagcctgcctgcctcacaactcaccctcacttcactgaatgaggaggctgagcagctgcagtgtttctgtccggagga

SEQ ID NO: 80788 - DNA, 120 bp, Artificial Sequence
  ENSG00000081913_49 (sequence is synthesized)
aatggatcttaggccactggacaagaacctgcacccaagggccctgaacccattttcctcccctgtcccagccttcccactttgacagacacttttaactgtgttccttactgctgccac

SEQ ID NO: 80789 - DNA, 120 bp, Artificial Sequence
  ENSG00000081913_50 (sequence is synthesized)
aatcagcatggttgtatagtgccccattaggccatttacatacccagagttatactcaagcagaatgcacaaatggacatgtcataatttttgttacaataaatatgaaatttacaagta

SEQ ID NO: 80790 - DNA, 120 bp, Artificial Sequence
  ENSG00000081913_51 (sequence is synthesized)
tgtgcttggcaccccagaaatactaacatagctaaataaccctgcctgcctttgaagagcttatgattttgtatcagaagatgaagtaggcacaatgatatctgttgtaagaaagatgca

SEQ ID NO: 80791 - DNA, 120 bp, Artificial Sequence
  ENSG00000081913_52 (sequence is synthesized)
gggggcttaatgaactgcaaagctccattcctcaccgtaccaggggtgtggacactgcagcccatatgtccaagctctgcccatgctagggcacatgggtgcacacactggtgggaggat

SEQ ID NO: 80792 - DNA, 120 bp, Artificial Sequence
  ENSG00000081913_53 (sequence is synthesized)
agtaatcctcaggagagtggttgccttgctgtatggtttacttactgcagtatcccagtgcatggagacacacagcaggtgcttggtgagtgtgcagagggatgaatgtcatctgtatca

SEQ ID NO: 80793 - DNA, 66 bp, Artificial Sequence
  ENSG00000081913_54 (sequence is synthesized)
gctcctagctgtaaggttttttttgtatttttagtagagaggggttttaccatgttgaccaggctg

SEQ ID NO: 80794 - DNA, 120 bp, Artificial Sequence
  ENSG00000081913_55 (sequence is synthesized)
attacaggcgtgagccaccacgcccaggcttccttccaagttcttaaggtgcatgccgagcaaattaatgttctaccttcttttccaatatgactatcaaaagatacacgagttcaattg

SEQ ID NO: 80795 - DNA, 120 bp, Artificial Sequence
  ENSG00000081913_56 (sequence is synthesized)
tacacgagttcaattgaaaaaaatatatatatatataaatttccctttgtatatcttcttttattgcaacatacagattttgatatgtagtttttctagaattatttagttctaagcgtt

SEQ ID NO: 80796 - DNA, 120 bp, Artificial Sequence
  ENSG00000081913_57 (sequence is synthesized)
cgttttaagattttggttgtaatttctccttgcacctgtgagttgtttagaagtttgttattaagtttccaaacatagaagtttgtataatgttacttttggtgtgtatttttccccttg

SEQ ID NO: 80797 - DNA, 120 bp, Artificial Sequence
  ENSG00000081913_58 (sequence is synthesized)
tgaagaacttacaaggagtggaaatttgatttgactgtatttcactgcatcattaggacttgaaagttctcatggtagggttttattacaggttaatttcagtttaacagtaatgttttc

SEQ ID NO: 80798 - DNA, 120 bp, Artificial Sequence
  ENSG00000081913_59 (sequence is synthesized)
aatacttatttaatatgcttgaagacttcttaagtaaaaattcctaagtaaaatcttaagtaaaaattctaagaggaagtaagaaccccagcaccctattgtgaggttagaagaataaga

SEQ ID NO: 80799 - DNA, 120 bp, Artificial Sequence
  ENSG00000081913_60 (sequence is synthesized)
aagggagtctggactaattttaaacagaaagaggagaatttcactgtggtggggaaatatagtaaagataaaactcccccttttttggtttctttgtaattcaaattgggtgatcatatg

SEQ ID NO: 80800 - DNA, 120 bp, Artificial Sequence
  ENSG00000081913_61 (sequence is synthesized)
caggaacttagttctcattaatgagtaacatatatagggaaacatgcaaatccatgcaggctccttgatcagaggcatagttagtgaaatacatcagtggttctgctgtctgacttgttt

SEQ ID NO: 80801 - DNA, 120 bp, Artificial Sequence
  ENSG00000081913_62 (sequence is synthesized)
aagcacttaatccaggaatccactcagcttctagctggctacaaagttcctttctgctttagctgggtctaaaatatggttagttacacacactttttttttcctccccagatactgcca

SEQ ID NO: 80802 - DNA, 120 bp, Artificial Sequence
  ENSG00000081913_63 (sequence is synthesized)
gtgattagcaatttttagttttttaaaaactaattttgcctgaaaagtggctttttaaaaattgttttttacttgcccagtttatacttaaaaataaattggtctgtaaacaggcattac

SEQ ID NO: 80803 - DNA, 120 bp, Artificial Sequence
  ENSG00000081913_64 (sequence is synthesized)
tatcttaatgttgtagataaaaaacatgagattgggaatatttgagggactgacccaggctaagacaactataaaaccacaaaatacccagagaattgttacaaatttcccttctttctc

SEQ ID NO: 80804 - DNA, 120 bp, Artificial Sequence
  ENSG00000081913_65 (sequence is synthesized)
tgactgttttttcatataaatagtctaatattataccatctccccttcacctttattctgccttttcagtgatttaattttttatcttattttggccattttatattcctctgatttaat

SEQ ID NO: 80805 - DNA, 90 bp, Artificial Sequence
  ENSG00000081913_66 (sequence is synthesized)
tttatcttattttggccattttatattcctctgatttaataagatcaccatgtcccatgaaataatatatagtacttttggccaggcaca

SEQ ID NO: 80806 - DNA, 120 bp, Artificial Sequence
  ENSG00000081913_67 (sequence is synthesized)
ggttgcaatgagccgagattgcaccattacactacagccttggtgacagagtgagactctgacttaaaaaaaaaatatatatatatgtatatatataatataatatataattatatataa

SEQ ID NO: 80807 - DNA, 80 bp, Artificial Sequence
  ENSG00000081913_68 (sequence is synthesized)
taatatctagtgcttttgtgtttaatgtaaaccagaatcacattataaataagacaaataaatgctgatatttcaggtaa

SEQ ID NO: 80808 - DNA, 120 bp, Artificial Sequence
  ENSG00000081923_0 (sequence is synthesized)
agaggcacctccccgagcggagaaaccagtttggccggtccggcggagcggaggcaaaagggcggctgcagaggaagggtgcacggacgcggggcggggaaaggcgggggagccactagc

SEQ ID NO: 80809 - DNA, 120 bp, Artificial Sequence
  ENSG00000081923_1 (sequence is synthesized)
gggaaaggcgggggagccactagcgagccgcgagagccggaggtgccgccgccaactagacacgcttccccgggcccccggccagcccccgtgcgccatgcagcgctagcgcggcggcca

SEQ ID NO: 80810 - DNA, 120 bp, Artificial Sequence
  ENSG00000081923_2 (sequence is synthesized)
cagcggccaggtgcgcagcgagcgctccgagcggcgcgcaccaggcggatgccccagccggggcccagcgaacgccaggtagttccaatttgccagcagaatgagtacagaaagagactc

SEQ ID NO: 80811 - DNA, 120 bp, Artificial Sequence
  ENSG00000081923_3 (sequence is synthesized)
agaaacgacatttgacgaggattctcagcctaatgacgaagtggttccctacagtgatgatgaaacagaagatgaacttgatgaccaggggtctgctgttgaaccagaacaaaaccgagt

SEQ ID NO: 80812 - DNA, 120 bp, Artificial Sequence
  ENSG00000081923_4 (sequence is synthesized)
caacagggaagcagaggagaaccgggagccattcagaaaagaatgtacatggcaagtcaaagcaaacgatcgcaagtaccacgaacaacctcactttatgaacacaaaattcttgtgtat

SEQ ID NO: 80813 - DNA, 120 bp, Artificial Sequence
  ENSG00000081923_5 (sequence is synthesized)
taaggagagtaaatatgcgaataatgcaattaaaacatacaagtacaacgcatttacctttataccaatgaatctgtttgagcagtttaagagagcagccaatttatatttcctggctct

SEQ ID NO: 80814 - DNA, 120 bp, Artificial Sequence
  ENSG00000081923_6 (sequence is synthesized)
tcttatcttacaggcagttcctcaaatctctaccctggcttggtacaccacactagtgcccctgcttgtggtgctgggcgtcactgcaatcaaagacctggtggacgatgtggctcgcca

SEQ ID NO: 80815 - DNA, 120 bp, Artificial Sequence
  ENSG00000081923_7 (sequence is synthesized)
taaaatggataaggaaatcaacaataggacgtgtgaagtcattaaggatggcaggttcaaagttgctaagtggaaagaaattcaagttggagacgtcattcgtctgaaaaaaaatgattt

SEQ ID NO: 80816 - DNA, 120 bp, Artificial Sequence
  ENSG00000081923_8 (sequence is synthesized)
tgttccagctgacattctcctgctgtctagctctgagcctaacagcctctgctatgtggaaacagcagaactggatggagaaaccaatttaaaatttaagatgtcacttgaaatcacaga

SEQ ID NO: 80817 - DNA, 120 bp, Artificial Sequence
  ENSG00000081923_9 (sequence is synthesized)
ccagtacctccaaagagaagatacattggctacatttgatggttttattgaatgtgaagaacccaataacagactagataagtttacaggaacactattttggagaaacacaagttttcc

SEQ ID NO: 80818 - DNA, 120 bp, Artificial Sequence
  ENSG00000081923_10 (sequence is synthesized)
tttggatgctgataaaattttgttacgtggctgtgtaattaggaacaccgatttctgccacggcttagtcatttttgcaggtgctgacactaaaataatgaagaatagtgggaaaaccag

SEQ ID NO: 80819 - DNA, 120 bp, Artificial Sequence
  ENSG00000081923_11 (sequence is synthesized)
atttaaaagaactaaaattgattacttgatgaactacatggtttacacgatctttgttgttcttattctgctttctgctggtcttgccatcggccatgcttattgggaagcacaggtggg

SEQ ID NO: 80820 - DNA, 120 bp, Artificial Sequence
  ENSG00000081923_12 (sequence is synthesized)
caattcctcttggtacctctatgatggagaagacgatacaccctcctaccgtggattcctcattttctggggctatatcattgttctcaacaccatggtacccatctctctctatgtcag

SEQ ID NO: 80821 - DNA, 120 bp, Artificial Sequence
  ENSG00000081923_13 (sequence is synthesized)
cgtggaagtgattcgtcttggacagagtcacttcatcaactgggacctgcaaatgtactatgctgagaaggacacacccgcaaaagctagaaccaccacactcaatgaacagctcgggca

SEQ ID NO: 80822 - DNA, 120 bp, Artificial Sequence
  ENSG00000081923_14 (sequence is synthesized)
gatccattatatcttctctgataagacggggacactcacacaaaatatcatgacctttaaaaagtgctgtatcaacgggcagatatatggggaccatcgggatgcctctcaacacaacca

SEQ ID NO: 80823 - DNA, 120 bp, Artificial Sequence
  ENSG00000081923_15 (sequence is synthesized)
caacaaaatagagcaagttgattttagctggaatacatatgctgatgggaagcttgcattttatgaccactatcttattgagcaaatccagtcagggaaagagccagaagtacgacagtt

SEQ ID NO: 80824 - DNA, 120 bp, Artificial Sequence
  ENSG00000081923_16 (sequence is synthesized)
cttcttcttgctcgcagtttgccacacagtcatggtggataggactgatggtcagctcaactaccaggcagcctctcccgatgaaggtgccctggtaaacgctgccaggaactttggctt

SEQ ID NO: 80825 - DNA, 120 bp, Artificial Sequence
  ENSG00000081923_17 (sequence is synthesized)
tgccttcctcgccaggacccagaacaccatcaccatcagtgaactgggcactgaaaggacttacaatgttcttgccattttggacttcaacagtgaccggaagcgaatgtctatcattgt

SEQ ID NO: 80826 - DNA, 120 bp, Artificial Sequence
  ENSG00000081923_18 (sequence is synthesized)
aagaaccccagaaggcaatatcaagctttactgtaaaggtgctgacactgttatttatgaacggttacatcgaatgaatcctactaagcaagaaacacaggatgccctggatatctttgc

SEQ ID NO: 80827 - DNA, 120 bp, Artificial Sequence
  ENSG00000081923_19 (sequence is synthesized)
aaatgaaactcttagaaccctatgcctttgctacaaggaaattgaagaaaaagaatttacagaatggaataaaaagtttatggctgccagtgtggcctccaccaaccgggacgaagctct

SEQ ID NO: 80828 - DNA, 120 bp, Artificial Sequence
  ENSG00000081923_20 (sequence is synthesized)
ggataaagtatatgaggagattgaaaaagacttaattctcctgggagctacagctattgaagacaagctacaggatggagttccagaaaccatttcaaaacttgcaaaagctgacattaa

SEQ ID NO: 80829 - DNA, 120 bp, Artificial Sequence
  ENSG00000081923_21 (sequence is synthesized)
gatctgggtgcttactggagacaaaaaggaaactgctgaaaatataggatttgcttgtgaacttctgactgaagacaccaccatctgctatggggaggatattaattctcttcttcatgc

SEQ ID NO: 80830 - DNA, 120 bp, Artificial Sequence
  ENSG00000081923_22 (sequence is synthesized)
aaggatggaaaaccagaggaatagaggtggcgtctacgcaaagtttgcacctcctgtgcaggaatctttttttccacccggtggaaaccgtgccttaatcatcactggttcttggttgaa

SEQ ID NO: 80831 - DNA, 120 bp, Artificial Sequence
  ENSG00000081923_23 (sequence is synthesized)
tgaaattcttctcgagaaaaagaccaagagaaataagattctgaagctgaagttcccaagaacagaagaagaaagacggatgcggacccaaagtaaaaggaggctagaagctaagaaaga

SEQ ID NO: 80832 - DNA, 120 bp, Artificial Sequence
  ENSG00000081923_24 (sequence is synthesized)
gcagcggcagaaaaactttgtggacctggcctgcgagtgcagcgcagtcatctgctgccgcgtcacccccaagcagaaggccatggtggtggacctggtgaagaggtacaagaaagccat

SEQ ID NO: 80833 - DNA, 120 bp, Artificial Sequence
  ENSG00000081923_25 (sequence is synthesized)
tgatcaaaactgcccacattggcgttggaataagtggacaagaaggaatgcaagctgtcatgtcgagtgactattcctttgctcagttccgatatctgcagaggctactgctggtgcatg

SEQ ID NO: 80834 - DNA, 120 bp, Artificial Sequence
  ENSG00000081923_26 (sequence is synthesized)
gccgatggtcttacataaggatgtgcaagttcctacgatacttcttttacaaaaactttgcctttactttggttcatttctggtactccttcttcaatggctactctgcgcagactgcat

SEQ ID NO: 80835 - DNA, 120 bp, Artificial Sequence
  ENSG00000081923_27 (sequence is synthesized)
acgaggattggttcatcaccctctacaacgtgctgtacaccagcctgcccgtgctcctcatggggctgctcgaccaggatgtgagtgacaaactgagcctccgattccctgggttataca

SEQ ID NO: 80836 - DNA, 120 bp, Artificial Sequence
  ENSG00000081923_28 (sequence is synthesized)
tagtgggacaaagagacttactattcaactataagagattctttgtaagcttgttgcatggggtcctaacatcgatgatcctcttcttcatacctcttggagcttatctgcaaaccgtag

SEQ ID NO: 80837 - DNA, 120 bp, Artificial Sequence
  ENSG00000081923_29 (sequence is synthesized)
ggcaggatggagaggcaccttccgactaccagtcttttgccgtcaccattgcctctgctcttgtaataacagtcaatttccagattggcttggatacttcttattggacttttgtgaatg

SEQ ID NO: 80838 - DNA, 120 bp, Artificial Sequence
  ENSG00000081923_30 (sequence is synthesized)
ctttttcaatttttggaagcattgcactttattttggcatcatgtttgactttcatagtgctggaatacatgttctctttccatctgcatttcaatttacaggcacagcttcaaacgctc

SEQ ID NO: 80839 - DNA, 120 bp, Artificial Sequence
  ENSG00000081923_31 (sequence is synthesized)
tgagacagccatacatttggttaactatcatcctggctgttgctgtgtgcttactacccgtcgttgccattcgattcctgtcaatgaccatctggccatcagaaagtgataagatccaga

SEQ ID NO: 80840 - DNA, 120 bp, Artificial Sequence
  ENSG00000081923_32 (sequence is synthesized)
agcatcgcaagcggttgaaggcggaggagcagtggcagcgacggcagcaggtgttccgccggggcgtgtcaacgcggcgctcggcctacgccttctcgcaccagcggggctacgcggacc

SEQ ID NO: 80841 - DNA, 120 bp, Artificial Sequence
  ENSG00000081923_33 (sequence is synthesized)
tcatctcctccgggcgcagcatccgcaagaagcgctcgccgcttgatgccatcgtggcggatggcaccgcggagtacaggcgcaccggggacagctgatcccttacccccaggctgggat

SEQ ID NO: 80842 - DNA, 120 bp, Artificial Sequence
  ENSG00000081923_34 (sequence is synthesized)
gcggccacaaagcacgtctatttttttatgaaagactctcaggactttgtgtgtgtgtgtgaattgcattcatcacaaagatattgaagacaataaataatctttataacaaactccttg

SEQ ID NO: 80843 - DNA, 120 bp, Artificial Sequence
  ENSG00000081923_35 (sequence is synthesized)
ataatctttataacaaactccttgggttggactattaaacaatagcagagccaagaaataggacttttaaaagtcctattattcggccgggcgtggtggctcaggtctgtaatcccagca

SEQ ID NO: 80844 - DNA, 120 bp, Artificial Sequence
  ENSG00000081923_36 (sequence is synthesized)
gccaacatggtgaaaccctgtctctaccataaattaaaaattagccgggcttggtggtgggcacccgtaatcccacctatttgagaagctgaagcagaagaatcgcttgaacctgggaga

SEQ ID NO: 80845 - DNA, 120 bp, Artificial Sequence
  ENSG00000081923_37 (sequence is synthesized)
aggtggaggttccagtgagccgagatcgtggcactgcactccaacctgagcaacagagtgagacaccagctcaaaaaaaattttttaataataataaaagtcctattattcaactggtta

SEQ ID NO: 80846 - DNA, 120 bp, Artificial Sequence
  ENSG00000081923_38 (sequence is synthesized)
taataataaaagtcctattattcaactggttatgtacattatggttgaaagggaacgttttaatccagtctcaatccagggcaatagaattacaaagcatgttgtatttcagttcaaatg

SEQ ID NO: 80847 - DNA, 120 bp, Artificial Sequence
  ENSG00000081923_39 (sequence is synthesized)
gtattgtattataaaattacagttacattttcctttcggtgatcttcagcataatttcccagaggcccctttttcctccctataggccatcttattaacagattttaaaatttatagtaa

SEQ ID NO: 80848 - DNA, 120 bp, Artificial Sequence
  ENSG00000081923_40 (sequence is synthesized)
tgacaaatgacttatcagtgttcatcatctgaaagctaagtggttcgttcaatcactttttcaaagttgatagtagattgcatggtttcatgtttcctcatattggtttattaattctat

SEQ ID NO: 80849 - DNA, 120 bp, Artificial Sequence
  ENSG00000081923_41 (sequence is synthesized)
ttaatcaaggaaaataacttcagattccataaagtttcagtttatttttagtttactactaggtgagatagcacattacatacttttactatcaaatattattttagcagcttcccatag

SEQ ID NO: 80850 - DNA, 120 bp, Artificial Sequence
  ENSG00000081923_42 (sequence is synthesized)
taccaaatgatttgattccctactctcattttttaaagcatataaatatttatgggcttaaaaagggggtttttaaaaactgaggatatcagtaataaattgcagaatattttgcaaagc

SEQ ID NO: 80851 - DNA, 120 bp, Artificial Sequence
  ENSG00000081923_43 (sequence is synthesized)
tttcttttggaaagcaaacttttgtgcctgcctatatgcaaagtattttatcagggacttgaacaaagacctcactctttttcacttgtcttatgtcgagagaaaaggttattggcagcc

SEQ ID NO: 80852 - DNA, 120 bp, Artificial Sequence
  ENSG00000081923_44 (sequence is synthesized)
acattcctaagactggggaatggtgtgtccttttaaatttgaagataactttaggtaattatggaaactcctcaaagaggagaaagtaatttttttccagacatttttctcattctgtgt

SEQ ID NO: 80853 - DNA, 120 bp, Artificial Sequence
  ENSG00000081923_45 (sequence is synthesized)
ctttcacacactagtttccatagttcgagaattctgttttttaccattgggctgtgaatgttcacaatatcagtcctgttgaattcctatgaggtaatcacaatgtgtatatgttcattt

SEQ ID NO: 80854 - DNA, 120 bp, Artificial Sequence
  ENSG00000081923_46 (sequence is synthesized)
tctaggtatgataaaagaatgtatggctttttattctgtggaagtaaaatcctgaacgtttacaacttttccttaacttgtaaataaaaaattgtaagttttttctttttttacagaaaa

SEQ ID NO: 80855 - DNA, 120 bp, Artificial Sequence
  ENSG00000081923_47 (sequence is synthesized)
cttagcttgtgtaattctgttagtttcagatttctctcctgtttttgcaaattgtgggaaagattgacaatgcaaatgtgtcaaagacatactgttgggtgcaatattaacaattttaaa

SEQ ID NO: 80856 - DNA, 120 bp, Artificial Sequence
  ENSG00000081923_48 (sequence is synthesized)
agacatactgttgggtgcaatattaacaattttaaatgcaaatttctttggataaattatttctatattctgtaaatctgagatttaatgtatattttgtttaaaaaaatgatttagtaa

SEQ ID NO: 80857 - DNA, 120 bp, Artificial Sequence
  ENSG00000081923_49 (sequence is synthesized)
tggccatcggagatggggccaatgacgtgaacatgatcaaaatctcctcctcctccttgatgtatactaagaatattccaactttatcttcctcaacaggagtcagctgtatgacctgcc

SEQ ID NO: 80858 - DNA, 120 bp, Artificial Sequence
  ENSG00000081923_50 (sequence is synthesized)
gactccatctcaaaaaataaagcagcaaggttcaggaactcaggcttattttaaaaaaaagaaaatgaagaagaagaaagaaggaaaaggggctggatatggtagctcatgcctgtaatc

SEQ ID NO: 80859 - DNA, 120 bp, Artificial Sequence
  ENSG00000081923_51 (sequence is synthesized)
ccagtattttgtgaggccaaggagggaggattgcttgacctcaggagttcaagagcatcctgagcaaactagcaagacctcatctctactaaaaaccaaaaaaattagctgggtgtgatg

SEQ ID NO: 80860 - DNA, 84 bp, Artificial Sequence
  ENSG00000081923_52 (sequence is synthesized)
cctgggagattgaggctgcagtgagcttgatcaccccagtgtactccagcctaggtgacagagcaagaacttgaatcaaccaaa

SEQ ID NO: 80861 - DNA, 120 bp, Artificial Sequence
  ENSG00000081923_53 (sequence is synthesized)
gaagcaaaccacctcatgtgtatgccacactcacaggaaattaaagatgtgaacaccaaaagcaggtagttccaatttgccagcagaatgagtacagaaagagactcagaaacgacattt

SEQ ID NO: 80862 - DNA, 120 bp, Artificial Sequence
  ENSG00000081923_54 (sequence is synthesized)
ggggattgggtttcaacatatgaatttggagggggattctaacattcagaccatagcagtaaataagcagcttgctctcgtctgtacaatgagaataaaatctctactacttgccactcg

SEQ ID NO: 80863 - DNA, 120 bp, Artificial Sequence
  ENSG00000081985_0 (sequence is synthesized)
tgcagagcacagagaaaggacatctgcgaggaaagttccctgatggctgtcaacaaagtgccacgtctctatggctgtgaacgctgagcacacgattttatcgcgcctatcatatcttgg

SEQ ID NO: 80864 - DNA, 120 bp, Artificial Sequence
  ENSG00000081985_1 (sequence is synthesized)
tgcataaacgcacctcacctcggtcaacccttgctccgtcttatgagacaggctttattatccgcattttatatgaggggaaactgacggtggagagagaattatcttgctcaaggcgac

SEQ ID NO: 80865 - DNA, 120 bp, Artificial Sequence
  ENSG00000081985_2 (sequence is synthesized)
acagcagagcccacaggtggcagaatcccacccgagcccgcttcgacccgcggggtggaaaccacgggcgcccgcccggctgcgcttccagagctgaactgagaagcgagtcctctccgc

SEQ ID NO: 80866 - DNA, 120 bp, Artificial Sequence
  ENSG00000081985_3 (sequence is synthesized)
gagaagcgagtcctctccgccctgcggccaccgcccagccccgacccccgccccggcccgatcctcactcgccgccagctccccgcgcccaccccggagttggtggcgcagaggcgggag

SEQ ID NO: 80867 - DNA, 120 bp, Artificial Sequence
  ENSG00000081985_4 (sequence is synthesized)
aacgcccgagcgccggcagagagcgcggagagcgcgacacgtgcggcccagagcaccggggccacccggtccccgcaggcccgggaccgcgcccgctggcaggcgacacgtggaagaata

SEQ ID NO: 80868 - DNA, 120 bp, Artificial Sequence
  ENSG00000081985_5 (sequence is synthesized)
cgtggaagaatacggagttctataccagagttgattgttgatggcacatacttttagaggatgctcattggcatttatgtttataatcacgtggctgttgattaaagcaaaaatagatgc

SEQ ID NO: 80869 - DNA, 120 bp, Artificial Sequence
  ENSG00000081985_6 (sequence is synthesized)
gtgcaagagaggcgatgtgactgtgaagccttcccatgtaattttacttggatccactgtcaatattacatgctctttgaagcccagacaaggctgctttcactattccagacgtaacaa

SEQ ID NO: 80870 - DNA, 120 bp, Artificial Sequence
  ENSG00000081985_7 (sequence is synthesized)
gttaatcctgtacaagtttgacagaagaatcaattttcaccatggccactccctcaattctcaagtcacaggtcttccccttggtacaaccttgtttgtctgcaaactggcctgtatcaa

SEQ ID NO: 80871 - DNA, 120 bp, Artificial Sequence
  ENSG00000081985_8 (sequence is synthesized)
tagtgatgaaattcaaatatgtggagcagagatcttcgttggtgttgctccagaacagcctcaaaatttatcctgcatacagaagggagaacaggggactgtggcctgcacctgggaaag

SEQ ID NO: 80872 - DNA, 120 bp, Artificial Sequence
  ENSG00000081985_9 (sequence is synthesized)
aggacgagacacccacttatacactgagtatactctacagctaagtggaccaaaaaatttaacctggcagaagcaatgtaaagacatttattgtgactatttggactttggaatcaacct

SEQ ID NO: 80873 - DNA, 120 bp, Artificial Sequence
  ENSG00000081985_10 (sequence is synthesized)
cacccctgaatcacctgaatccaatttcacagccaaggttactgctgtcaatagtcttggaagctcctcttcacttccatccacattcacattcttggacatagtgaggcctcttcctcc

SEQ ID NO: 80874 - DNA, 120 bp, Artificial Sequence
  ENSG00000081985_11 (sequence is synthesized)
gtgggacattagaatcaaatttcaaaaggcttctgtgagcagatgtaccctttattggagagatgagggactggtactgcttaatcgactcagatatcggcccagtaacagcaggctctg

SEQ ID NO: 80875 - DNA, 120 bp, Artificial Sequence
  ENSG00000081985_12 (sequence is synthesized)
gaatatggttaatgttacaaaggccaaaggaagacatgatttgctggatctgaaaccatttacagaatatgaatttcagatttcctctaagctacatctttataagggaagttggagtga

SEQ ID NO: 80876 - DNA, 120 bp, Artificial Sequence
  ENSG00000081985_13 (sequence is synthesized)
ttggagtgaatcattgagagcacaaacaccagaagaagagcctactgggatgttagatgtctggtacatgaaacggcacattgactacagtagacaacagatttctcttttctggaagaa

SEQ ID NO: 80877 - DNA, 120 bp, Artificial Sequence
  ENSG00000081985_14 (sequence is synthesized)
tctgagtgtctcagaggcaagaggaaaaattctccactatcaggtgaccttgcaggagctgacaggagggaaagccatgacacagaacatcacaggacacacctcctggaccacagtcat

SEQ ID NO: 80878 - DNA, 120 bp, Artificial Sequence
  ENSG00000081985_15 (sequence is synthesized)
tcctagaaccggaaattgggctgtggctgtgtctgcagcaaattcaaaaggcagttctctgcccactcgtattaacataatgaacctgtgtgaggcagggttgctggctcctcgccaggt

SEQ ID NO: 80879 - DNA, 120 bp, Artificial Sequence
  ENSG00000081985_16 (sequence is synthesized)
acgtggtggaatggagagagctccatccagggggtgacacacaggtccctctaaactggctacggagtcgaccctacaatgtgtctgctctgatttcagagaacataaaatcctacatct

SEQ ID NO: 80880 - DNA, 120 bp, Artificial Sequence
  ENSG00000081985_17 (sequence is synthesized)
gttatgaaatccgtgtgtatgcactctcaggggatcaaggaggatgcagctccatcctgggtaactctaagcacaaagcaccactgagtggcccccacattaatgccatcacagaggaaa

SEQ ID NO: 80881 - DNA, 120 bp, Artificial Sequence
  ENSG00000081985_18 (sequence is synthesized)
aggggagcattttaatttcatggaacagcattccagtccaggagcaaatgggctgcctcctccattataggatatactggaaggaacgggactccaactcccagcctcagctctgtgaaa

SEQ ID NO: 80882 - DNA, 120 bp, Artificial Sequence
  ENSG00000081985_19 (sequence is synthesized)
ttccctacagagtctcccaaaattcacatccaataaacagcctgcagccccgagtgacatatgtcctgtggatgacagctctgacagctgctggtgaaagttcccacggaaatgagaggg

SEQ ID NO: 80883 - DNA, 120 bp, Artificial Sequence
  ENSG00000081985_20 (sequence is synthesized)
aattttgtctgcaaggtaaagccaattggatggcgtttgtggcaccaagcatttgcattgctatcatcatggtgggcattttctcaacgcattacttccagcaaaaggtgtttgttctcc

SEQ ID NO: 80884 - DNA, 120 bp, Artificial Sequence
  ENSG00000081985_21 (sequence is synthesized)
tagcagccctcagacctcagtggtgtagcagagaaattccagatccagcaaatagcacttgcgctaagaaatatcccattgcagaggagaagacacagctgcccttggacaggctcctga

SEQ ID NO: 80885 - DNA, 120 bp, Artificial Sequence
  ENSG00000081985_22 (sequence is synthesized)
tagactggcccacgcctgaagatcctgaaccgctggtcatcagtgaagtccttcatcaagtgaccccagttttcagacatcccccctgctccaactggccacaaagggaaaaaggaatcc

SEQ ID NO: 80886 - DNA, 120 bp, Artificial Sequence
  ENSG00000081985_23 (sequence is synthesized)
aaggtcatcaggcctctgagaaagacatgatgcacagtgcctcaagcccaccacctccaagagctctccaagctgagagcagacaactggtggatctgtacaaggtgctggagagcaggg

SEQ ID NO: 80887 - DNA, 120 bp, Artificial Sequence
  ENSG00000081985_24 (sequence is synthesized)
gctccgacccaaagcccgaaaacccagcctgtccctggacggtgctcccagcaggtgaccttcccacccatgatggctacttaccctccaacatagatgacctcccctcacatgaggcac

SEQ ID NO: 80888 - DNA, 120 bp, Artificial Sequence
  ENSG00000081985_25 (sequence is synthesized)
ctctcgctgactctctggaagaactggagcctcagcacatctccctttctgttttcccctcaagttctcttcacccactcaccttctcctgtggtgataagctgactctggatcagttaa

SEQ ID NO: 80889 - DNA, 120 bp, Artificial Sequence
  ENSG00000081985_26 (sequence is synthesized)
agatgaggtgtgactccctcatgctctgagtggtgaggcttcaagccttaaagtcagtgtgccctcaaccagcacagcctgccccaattcccccagcccctgctccagcagctgtcatct

SEQ ID NO: 80890 - DNA, 120 bp, Artificial Sequence
  ENSG00000081985_27 (sequence is synthesized)
ctgggtgccaccatcggtctggctgcagctagaggacaggcaagccagctctgggggagtcttaggaactgggagttggtcttcactcagatgcctcatcttgcctttcccagggcctta

SEQ ID NO: 80891 - DNA, 120 bp, Artificial Sequence
  ENSG00000081985_28 (sequence is synthesized)
aaattacatccttcactgtgtggacctagagactccaacttgaattcctagtaactttcttggtatgctggccagaaagggaaatgaggaggagagtagaaaccacagctcttagtagta

SEQ ID NO: 80892 - DNA, 120 bp, Artificial Sequence
  ENSG00000081985_29 (sequence is synthesized)
atggcatacagtctagaggaccattcatgcaatgactatttctaaagcacctgctacacagcaggctgtacacagcagatcagtactgttcaacagaacttcctgagatgatggaaatgt

SEQ ID NO: 80893 - DNA, 120 bp, Artificial Sequence
  ENSG00000081985_30 (sequence is synthesized)
tctacctctgcactcactgtccagtacattagacactaggcacattggctgttaatcacttggaatgtgtttagcttgactgaggaattaaattttgattgtaaatttaaatcgccacac

SEQ ID NO: 80894 - DNA, 120 bp, Artificial Sequence
  ENSG00000081985_31 (sequence is synthesized)
atggctagtggctactgtattggagtgcacagctctagatggctcctagattattgagagccttcaaaacaaatcaacctagttctatagatgaagacataaaagacactggtaaacacc

SEQ ID NO: 80895 - DNA, 120 bp, Artificial Sequence
  ENSG00000081985_32 (sequence is synthesized)
acataaaagacactggtaaacaccaaggtaaaagggcccccaaggtggtcatgactggtctcatttgcagaagtctaagaatgtacctttttctggccgggcgtggtagctcatgcctgt

SEQ ID NO: 80896 - DNA, 120 bp, Artificial Sequence
  ENSG00000081985_33 (sequence is synthesized)
agagcaccggggccacccggtccccgcaggcccgggaccgcgcccgctggcaggcgacacgtggtcacggtgatccatttgtaaagtcgggaataaatgacctctgaagtgttgtctgta

SEQ ID NO: 80897 - DNA, 120 bp, Artificial Sequence
  ENSG00000082014_0 (sequence is synthesized)
ctggcatcttcctcccctcctcctttccagatcctcagaatggcccttggtgctgcaggcgcggtgggctccgggcccaggcaccgagggggcactggatgactctccaggtgcaggacc

SEQ ID NO: 80898 - DNA, 120 bp, Artificial Sequence
  ENSG00000082014_1 (sequence is synthesized)
ctgccatctatgactccaggtcttcagcacccacccaccgtggtacagcgccccgggatgccgtctggagcccggatgccccaccagggggcgcccatgggccccccgggctccccgtac

SEQ ID NO: 80899 - DNA, 120 bp, Artificial Sequence
  ENSG00000082014_2 (sequence is synthesized)
gcatggagcccgcccgcaagcgagcagcgcccccgcccgggcagagccaggcacagagccagggccagccggtgcccaccgcccccgcgcggagccgcagtgccaagaggaggaagatgg

SEQ ID NO: 80900 - DNA, 120 bp, Artificial Sequence
  ENSG00000082014_3 (sequence is synthesized)
gcccccgcgcggagccgcagtgccaagaggaggaagatggctgacaaaatcctccctcaaaggattcgggagctggtccccgagtcccaggcttacatggacctcttggcatttgagagg

SEQ ID NO: 80901 - DNA, 120 bp, Artificial Sequence
  ENSG00000082014_4 (sequence is synthesized)
aaactggatcaaaccatcatgcggaagcgggtggacatccaggaggctctgaagaggcccatgaagcaaaagcggaagctgcgactctatatctccaacacttttaaccctgcgaagcct

SEQ ID NO: 80902 - DNA, 120 bp, Artificial Sequence
  ENSG00000082014_5 (sequence is synthesized)
gatgctgaggattccgacggcagcattgcctcctgggagctacgggtggaggggaagctcctggatgatcccagcaaacagaagcggaagttctcttctttcttcaagagtttggtcatc

SEQ ID NO: 80903 - DNA, 120 bp, Artificial Sequence
  ENSG00000082014_6 (sequence is synthesized)
gtgtgcgctgcacgctgctcctcatgctggactaccagcctccccagttcaaactggatccccgcctagcccggctgctggggctgcacacacagagccgctcagccattgtccaggccc

SEQ ID NO: 80904 - DNA, 120 bp, Artificial Sequence
  ENSG00000082014_7 (sequence is synthesized)
tgtggcagtatgtgaagaccaacaggctgcaggactcccatgacaaggaatacatcaatggggacaagtatttccagcagatttttgattgtccccggctgaagttttctgagattcccc

SEQ ID NO: 80905 - DNA, 120 bp, Artificial Sequence
  ENSG00000082014_8 (sequence is synthesized)
agcgcctcacagccctgctattgccccctgacccaattgtcatcaaccatgtcatcagcgtggacccttcagaccagaagaagacggcgtgctatgacattgacgtggaggtggaggagc

SEQ ID NO: 80906 - DNA, 120 bp, Artificial Sequence
  ENSG00000082014_9 (sequence is synthesized)
cattaaaggggcagatgagcagcttcctcctatccacggccaaccagcaggagatcagtgctctggacagtaagatccatgagacgattgagtccataaaccagctcaagatccagaggg

SEQ ID NO: 80907 - DNA, 120 bp, Artificial Sequence
  ENSG00000082014_10 (sequence is synthesized)
acttcatgctaagcttctccagagaccccaaaggctatgtccaagacctgctccgctcccagagccgggacctcaaggtgatgacagatgtagccggcaaccctgaagaggagcgccggg

SEQ ID NO: 80908 - DNA, 120 bp, Artificial Sequence
  ENSG00000082014_11 (sequence is synthesized)
ctgagttctaccaccagccctggtcccaggaggccgtcagtcgctacttctactgcaagatccagcagcgcaggcaggagctggagcagtcgctggttgtgcgcaacacctaggagccca

SEQ ID NO: 80909 - DNA, 120 bp, Artificial Sequence
  ENSG00000082014_12 (sequence is synthesized)
aaaataagcagcacgacggaactttcagccgtgtcccgggccccagcattttgccccgggctccagcatcactcctctgccaccttggggtgtggggctggattaaaagtcattcatctg

SEQ ID NO: 80910 - DNA, 120 bp, Artificial Sequence
  ENSG00000082014_13 (sequence is synthesized)
gtgcgcgcccacgtgcatgcgcgtgtgtggtcctagtgtaggtgatgtctgcggccacacaggatgctgactgcgtgtgtgactcgtgggcgtgcagatgcaagcacaggcctacgacac

SEQ ID NO: 80911 - DNA, 120 bp, Artificial Sequence
  ENSG00000082014_14 (sequence is synthesized)
atctgtgtacaggctgaagatcacaacgggtctggccagggcccgccgagggcctccgagctggcgagcacaccgacggctggatggggcgacgcttcctgctccggtccctaactcatt

SEQ ID NO: 80912 - DNA, 120 bp, Artificial Sequence
  ENSG00000082014_15 (sequence is synthesized)
cattattaagctcctcgctctttgcagacgctccctgcgcctcccccgctccgggctgcagcggcgcaggcgccgggccgagccgagcgccgagcagggagcgggcggccgcgctccggg

SEQ ID NO: 80913 - DNA, 120 bp, Artificial Sequence
  ENSG00000082014_16 (sequence is synthesized)
cgcgggcctcggcggcttcgggctgcagcactgctgcccagcgcccgcggccgggctggtcggcgcgcctcgccgcttatctgcgctgtttggacagcgggcttggaaaggcaggcggcc

SEQ ID NO: 80914 - DNA, 120 bp, Artificial Sequence
  ENSG00000082014_17 (sequence is synthesized)
ccgtccccgccgagtcaacaggcagaccccgggccgccggactatttctgtcttatcagtgcaggaatgcggcagccgcggcggcggcggcggcggcgggcgggcggcggcggcgtgggc

SEQ ID NO: 80915 - DNA, 120 bp, Artificial Sequence
  ENSG00000082014_18 (sequence is synthesized)
cgtgggccgtcagggcagccctgaaggggccccctccccactccgctcgagtagaagtgtgagagagcccagcaggactcagaggggagagttggaggaaaaaaaaaggcagaaaaggga

SEQ ID NO: 80916 - DNA, 120 bp, Artificial Sequence
  ENSG00000082014_19 (sequence is synthesized)
aagaaagaggaagagagagagagagtgagaggagccgctgagcccaccccgatggccgcggacgaagttgccggaggggcgcgcaaagccacgaaaagcaaactttttgagtttctggtc

SEQ ID NO: 80917 - DNA, 120 bp, Artificial Sequence
  ENSG00000082014_20 (sequence is synthesized)
ctccccattcccttcccttggattcttctccttactcaattttccctagacctaaaaacagtttggcagaagacatgtttaataacattttcatatttaaaaaatacagcaacaattctc

SEQ ID NO: 80918 - DNA, 120 bp, Artificial Sequence
  ENSG00000082014_21 (sequence is synthesized)
ggcggagttctccagcaggggaagtacctctaccaaggtaactaccacccctcccttctagattcctgagtagcagaagcagtacacagtcatggtcttggagccaagagaccgaccagg

SEQ ID NO: 80919 - DNA, 120 bp, Artificial Sequence
  ENSG00000082014_22 (sequence is synthesized)
attctagttcaggccctactgtggattagctctgtgctgcagccaatccatgttagcccccccaagttaggaagacctggaaaccctacaaagccaaccgctttctggaatgtaatattc

SEQ ID NO: 80920 - DNA, 120 bp, Artificial Sequence
  ENSG00000082014_23 (sequence is synthesized)
ttggcacttggagttaggatccccaggttctagtcctgagtctggactctgggtaagtgactcagcgattctgaaccttgtttccttatctttgaagtggagtgacaatacctgtcctat

SEQ ID NO: 80921 - DNA, 120 bp, Artificial Sequence
  ENSG00000082014_24 (sequence is synthesized)
gttaggaaaatcaaattgctgcaaaagtgattgagcaaaattccaccaaaacagagaatattcttattaatgcatttaaaaataaatacagcagataaacctgaggagtaaaaatagcag

SEQ ID NO: 80922 - DNA, 120 bp, Artificial Sequence
  ENSG00000082014_25 (sequence is synthesized)
ttgatatttattgggcacttaccatgtgccaggcactgtcccaagcactttatgtgtattagttcactgacttctcacggcagccctgggagataggtattcttttcatccccactctag

SEQ ID NO: 80923 - DNA, 120 bp, Artificial Sequence
  ENSG00000082014_26 (sequence is synthesized)
agatgaagacactgagccctgaggtgttaacttgctccaggttgcatagtaagtggcagaggcaggactgatacataagcaggctgacccagggcccgcactctcaacccctgccccaca

SEQ ID NO: 80924 - DNA, 120 bp, Artificial Sequence
  ENSG00000082014_27 (sequence is synthesized)
ctgacccaccccctatcttgtcagccataccggtggctccaccaccagaccagcccaccccaatcccatccccatgcgcactgaggaatcagacttcctctcagcttcttgtggcctttc

SEQ ID NO: 80925 - DNA, 120 bp, Artificial Sequence
  ENSG00000082014_28 (sequence is synthesized)
ccctgacccaattgtcatcaaccatgtcatcaggtgaggtggccccagcttgcttctcagaccagggaatgatctcgttcctgccttccctgcccctccctctcctcccactcccatctc

SEQ ID NO: 80926 - DNA, 120 bp, Artificial Sequence
  ENSG00000082014_29 (sequence is synthesized)
ttctccctccctgttggatctgccccagccccggggccctggggccgtatgggggcatcgtggacacgaagggctggacttccctggcagcgtggacccttcagaccagaagaagacggc

SEQ ID NO: 80927 - DNA, 120 bp, Artificial Sequence
  ENSG00000082014_30 (sequence is synthesized)
gggcccccaggaggcagcccttcaggggctgcctgggccaggatgagctgtgtgaccttggcgaggtcatttttctccttgagccacagtggccccatccgtcaagtggggatgaaagga

SEQ ID NO: 80928 - DNA, 120 bp, Artificial Sequence
  ENSG00000082014_31 (sequence is synthesized)
agtactggagtggaagacaagcacagcgggaaagagagtaaacgttgtactccaggggcaggtgaggggattcagggctcagggctcaccccacgctccctcccaggtgatgacagatgt

SEQ ID NO: 80929 - DNA, 120 bp, Artificial Sequence
  ENSG00000082014_32 (sequence is synthesized)
gccgggctgagttctaccaccagccctggtcccaggaggccgtcagtcgctacttctactgcaaggtatgcagggacccttgccctgaggcttccccatcctcaactccaagagaaacct

SEQ ID NO: 80930 - DNA, 120 bp, Artificial Sequence
  ENSG00000082014_33 (sequence is synthesized)
ccctgttcagcttgtgggcagccctcgcagctccccacagtaaagcttcaccacgctgcctcaccatgcaatggccctccctgctcccagatgctctttcagggcaggcggtgtcagtag

SEQ ID NO: 80931 - DNA, 120 bp, Artificial Sequence
  ENSG00000082014_34 (sequence is synthesized)
ccccgtacacgccacacaaggccctcagggcagggctaggtcccaaagtggtgcatcttgagagacctccttcccctcccaaacctatccttccccaggggcatgtttcctcaatcaaca

SEQ ID NO: 80932 - DNA, 120 bp, Artificial Sequence
  ENSG00000082014_35 (sequence is synthesized)
aaatgcttggcaggctccctgcccgctggctgcttagggaggtgctcccacttcccccgccgttgcctgagctctctagggctccttcactctgcagatcctcagaatggcccttggtgc

SEQ ID NO: 80933 - DNA, 120 bp, Artificial Sequence
  ENSG00000082014_36 (sequence is synthesized)
ggagctacgggtggaggggaagctcctggatgatgtacgtcccggcccaggtctctccaggtgtcctggggtgggcatgggctgcactgagaacagaacaaggtgtctgcactaagggct

SEQ ID NO: 80934 - DNA, 120 bp, Artificial Sequence
  ENSG00000082014_37 (sequence is synthesized)
cctgtcggctgccaacttggcctccttctgctcctcccacctcgtccctgttctgcccccatggtccctgttgctctcccacagcccagcaaacagaagcggaagttctcttctttcttc

SEQ ID NO: 80935 - DNA, 120 bp, Artificial Sequence
  ENSG00000082014_38 (sequence is synthesized)
gagggaaggcagcagcaccctcatgtcacagatgaggacagagctccagggaggaaacggcattccccgggccacatggcccgacatgagcagatcccaagtcgaccagaagccacaagg

SEQ ID NO: 80936 - DNA, 120 bp, Artificial Sequence
  ENSG00000082068_0 (sequence is synthesized)
gcagttgtttgggctgtccctgtggctggttctggggtgtgcggccagccatggagcgctctgggcccagcgaagtgacaggctcagacgcgtcgggaccggacccgcagcttgcggtca

SEQ ID NO: 80937 - DNA, 120 bp, Artificial Sequence
  ENSG00000082068_1 (sequence is synthesized)
ccatgggcttcacggggttcggtaaaaaagctcgcacatttgacttggaagcaatgtttgaacaaactcgaaggacagctgtggaaagaagtcgcaaaacactggaagcaagagaaaaag

SEQ ID NO: 80938 - DNA, 120 bp, Artificial Sequence
  ENSG00000082068_2 (sequence is synthesized)
aggaagaaatgaacagagagaaagaattaagaagacaaaatgaagatattgagccaacatcctcaagatcaaatgtggtcagagattgctccaaatcatcttccagggatacgagcagca

SEQ ID NO: 80939 - DNA, 120 bp, Artificial Sequence
  ENSG00000082068_3 (sequence is synthesized)
gtgaaagtgaacagagttctgactcttctgatgatgagttaattggccctcctttaccccctaaaatggtaggaaaaccagttaattttatggaggaagatatcctcggtcctttacctc

SEQ ID NO: 80940 - DNA, 120 bp, Artificial Sequence
  ENSG00000082068_4 (sequence is synthesized)
cacctcttaatgaagaagaagaagaagcagaggaagaagaagaggaagaggaggaagaggaaaatcctgttcacaagattcctgactcgcatgagataacgctgaagcatggcactaaaa

SEQ ID NO: 80941 - DNA, 120 bp, Artificial Sequence
  ENSG00000082068_5 (sequence is synthesized)
cagtgtctgctttgggtctggatccctcaggtgcccgtttggtgacaggaggatatgactatgatgttaagttttgggattttgctggaatggatgcttcttttaaggcatttcgatccc

SEQ ID NO: 80942 - DNA, 120 bp, Artificial Sequence
  ENSG00000082068_6 (sequence is synthesized)
ttcagccctgtgagtgccatcagatcaagtcattacagtatagtaacacaggagacatgattcttgttgtatctggaagctctcaggccaaggtgattgacagagatggttttgaagtaa

SEQ ID NO: 80943 - DNA, 120 bp, Artificial Sequence
  ENSG00000082068_7 (sequence is synthesized)
tggaatgtataaaaggagaccagtatattgtggacatggccaacaccaagggtcatacagcaatgcttcatactggctcatggcatcccaaaataaagggagaatttatgacttgctcaa

SEQ ID NO: 80944 - DNA, 120 bp, Artificial Sequence
  ENSG00000082068_8 (sequence is synthesized)
atgatgcgactgtgaggacgtgggaagttgaaaatccaaagaagcaaaaaagtgtgtttaaaccacggacgatgcaaggcaaaaaagtcattcccactacgtgcacatatagtagagatg

SEQ ID NO: 80945 - DNA, 120 bp, Artificial Sequence
  ENSG00000082068_9 (sequence is synthesized)
gaaacctcatagcagctgcctgccagaatggaagcatacagatctgggaccgaaatttgactgttcatcctaagttccactataaacaggctcatgactcgggcacagacacttcttgcg

SEQ ID NO: 80946 - DNA, 120 bp, Artificial Sequence
  ENSG00000082068_10 (sequence is synthesized)
tgactttttcctatgatggtaatgtccttgcctctcgtggaggtgacgattcattaaaattatgggacatccgacaatttaataaaccacttttttcagcctcgggtcttcccaccatgt

SEQ ID NO: 80947 - DNA, 120 bp, Artificial Sequence
  ENSG00000082068_11 (sequence is synthesized)
gggtgtatgaaatagacatcacagatgcgagtgttgttcgctgcctgtggcatccaaagctgaaccagatcatggttggaactggaaatggattggctaaagtctattacgaccccaaca

SEQ ID NO: 80948 - DNA, 120 bp, Artificial Sequence
  ENSG00000082068_12 (sequence is synthesized)
agagtcagaggggagcaaaattatgtgtggttaaaacccagcggaaggcaaaacaagctgagactctaactcaggactacatcatcacccctcatgccttgcctatgttccgtgagcccc

SEQ ID NO: 80949 - DNA, 120 bp, Artificial Sequence
  ENSG00000082068_13 (sequence is synthesized)
gccaacggagtacaaggaaacagctggagaaggacagactggatcccctgaagtcgcataaacctgaacctcctgtagcaggcccaggtcgtggtggccgagttggaacccacgggggca

SEQ ID NO: 80950 - DNA, 120 bp, Artificial Sequence
  ENSG00000082068_14 (sequence is synthesized)
ctctctcttcctatattgtgaagaacattgctttggacaagaccgatgacagtaatcctcgggaagccattttgcgtcatgccaaagcagcagaagacagcccatattgggtttctccag

SEQ ID NO: 80951 - DNA, 120 bp, Artificial Sequence
  ENSG00000082068_15 (sequence is synthesized)
catattccaagactcagcccaaaaccatgtttgcccaagttgaatctgatgatgaggaagcaaagaatgagccagaatggaaaaaacgtaaaatttgaagaatctcatttgagagctgtt

SEQ ID NO: 80952 - DNA, 120 bp, Artificial Sequence
  ENSG00000082068_16 (sequence is synthesized)
tgcatgagtgggaggggtatgggacaggtttgggttttttttttatgctcatgaaattaaaaattcatttttatgaacaggttttgtcctttgcattattgaactggtcaaaagtttggt

SEQ ID NO: 80953 - DNA, 120 bp, Artificial Sequence
  ENSG00000082068_17 (sequence is synthesized)
ggctaggcttcactaaaattgtgcttaaattttcttacctgcaactattaaactgattacagataaacaagaaacagattcttagtctattaccaagtactttaggtatttggaaacttt

SEQ ID NO: 80954 - DNA, 120 bp, Artificial Sequence
  ENSG00000082068_18 (sequence is synthesized)
attcaacaattattggtcttgtccagattctcataaccttagagaggaaaatgtacattaagatgtgcatctgtctctagcaattctaggaacataatatagaaatagagatcaaaaagt

SEQ ID NO: 80955 - DNA, 120 bp, Artificial Sequence
  ENSG00000082068_19 (sequence is synthesized)
ttaatgtttctgtataatttcacaacagttgtttacatgactgtaattaattaggctgagttcaaaccaaatacattgccatactgggaaagagcattatctcattatccttcaatagca

SEQ ID NO: 80956 - DNA, 120 bp, Artificial Sequence
  ENSG00000082068_20 (sequence is synthesized)
gaatacagtggttaagagttaggagtgggctttgaagtcagactcatgtggattcaagtcctggctttgctctttacttctgggtcatcttaagagagttatttaacttttcttttctag

SEQ ID NO: 80957 - DNA, 120 bp, Artificial Sequence
  ENSG00000082068_21 (sequence is synthesized)
cctcagatgatgaaatagtacgtactttgcaggttcgtcagaagaattaaatgggacatgcctcacagagcatttagtacagtacctggaacacagtaaatgtataccaaatatttgcta

SEQ ID NO: 80958 - DNA, 120 bp, Artificial Sequence
  ENSG00000082068_22 (sequence is synthesized)
ttttaaaatagggctaatatttactttgcttggtttttatcagtattaaattagaaaggtatagaattgctttgtaaatgtaaagactaaacagaagacattaaaaattattctaaaaaa

SEQ ID NO: 80959 - DNA, 120 bp, Artificial Sequence
  ENSG00000082068_23 (sequence is synthesized)
atttgccgcaagttattggcaagttcccctgcagttgtttgggctgtccctgtggctggttctggggtgtgcggccagccatggagcgctctgggcccagcgaaggtaaaaaagctcgca

SEQ ID NO: 80960 - DNA, 120 bp, Artificial Sequence
  ENSG00000082068_24 (sequence is synthesized)
ggatgacaacaactggggggagggatttccctcccacccccgcttttatttatttcccactttgatggagatccacccatttagaaaatgcagctggaacaaagtaaagcctcaaactcc

SEQ ID NO: 80961 - DNA, 120 bp, Artificial Sequence
  ENSG00000082068_25 (sequence is synthesized)
tggtattgtgctttaaaaaggatttgaatattgcccttgatccacactgaattcaaagcgaaagtttcctgggaatttgcagttgtttagctgaaatgttgagtgcaagggggaaaaacg

SEQ ID NO: 80962 - DNA, 120 bp, Artificial Sequence
  ENSG00000082068_26 (sequence is synthesized)
ttctgcccactttgcataccaccctggacagaggcattagcagtgatacatgtaagagatttaacaaagcagggaactaaccacttacaggaaatggaatcagcttgtccattttgcttc

SEQ ID NO: 80963 - DNA, 120 bp, Artificial Sequence
  ENSG00000082068_27 (sequence is synthesized)
tttcttttttggcttctagcagtttggatgtttggcaagattattctctgtccgcagaaagggacagcacagatacgtttcccctccacccccatgcccacccaagtttcaaacttaagc

SEQ ID NO: 80964 - DNA, 120 bp, Artificial Sequence
  ENSG00000082068_28 (sequence is synthesized)
ataccactgtatttcaaaagtctgaaaacgtaactagaggttcagtcatttcctcagttatttccgttttgcttaggcacaaagatggatatgtgtcatcacccagaaaagatggttttg

SEQ ID NO: 80965 - DNA, 120 bp, Artificial Sequence
  ENSG00000082068_29 (sequence is synthesized)
tttctctctcttaaagtacagtgactgataagctttctttagagtaagacttggttaactagcattaaaattcacatgtgaaatttactggggtcccatataaacctgttttaaggtccc

SEQ ID NO: 80966 - DNA, 120 bp, Artificial Sequence
  ENSG00000082068_30 (sequence is synthesized)
acatcctttgaggaaaggaaagccagcctctattaatgaatattcattggccataattttgctctgaatagaagcagacagccccatcttccttcagagcttcctggactagagttggaa

SEQ ID NO: 80967 - DNA, 120 bp, Artificial Sequence
  ENSG00000082068_31 (sequence is synthesized)
tcctggccttatacaataaagtatatttatggtatttgaaaacaaataggattttatttgttttttaaaaaagaaattaaaaatgctaatgtacttaggatgggagtctgtttcacttga

SEQ ID NO: 80968 - DNA, 120 bp, Artificial Sequence
  ENSG00000082068_32 (sequence is synthesized)
gaaaatgatgagcctcatttgatagcacccatttagaaggcactttctgtggaagctttgctttaagaaatttacttatttgtatttgcttctcttgaaaaggataactctgtactacta

SEQ ID NO: 80969 - DNA, 120 bp, Artificial Sequence
  ENSG00000082068_33 (sequence is synthesized)
aggagaagtgcaatgttctaagcacatttttggttaatcccacacattcttgggccatagcccctcggcaacactgccaagccaactcagttccagacacttgtactcttgtatttgaaa

SEQ ID NO: 80970 - DNA, 120 bp, Artificial Sequence
  ENSG00000082068_34 (sequence is synthesized)
tgacctttagagtgaaaaggttgggtaattttattatttaagatcttaaaatttcacattattcctataggttttgtaaacttgtgtcctgttgccctgttacctctccaaccctcttgc

SEQ ID NO: 80971 - DNA, 120 bp, Artificial Sequence
  ENSG00000082068_35 (sequence is synthesized)
ttgttaataaccactgactgacagacttgcttttccataagtttaagcttttatcactgagagcccatctgttgccatccctcagaaagtcaagtacttgtgtagatggagtgcatgcac

SEQ ID NO: 80972 - DNA, 120 bp, Artificial Sequence
  ENSG00000082068_36 (sequence is synthesized)
gctttagagacagagaaagccctcagaattcaggcatatattacaaaattgcccattcatgtggataggactacgagtcatgtaacagctaacctctgtggcttctgtgactcatcacag

SEQ ID NO: 80973 - DNA, 120 bp, Artificial Sequence
  ENSG00000082068_37 (sequence is synthesized)
ggacagggttatttcatgcagctttcaacccaaaagggaaaagcctgttcgagtccaatacattactttatagcagttttttcaagagtaacagtctattccaagtgtgaacaagaaaga

SEQ ID NO: 80974 - DNA, 120 bp, Artificial Sequence
  ENSG00000082068_38 (sequence is synthesized)
gtgctggtcttggaatcaggaggcctgggtttgtccagttccaccactgagtggcaatgtgatgttgaacaacttaacttttaatcagggaagtgtggcgaccagaggaagggtctcttc

SEQ ID NO: 80975 - DNA, 120 bp, Artificial Sequence
  ENSG00000082068_39 (sequence is synthesized)
cagctttctctgaaattctatgaccatgtgctagactgatccacaggaatttgtatataaaattaactacctggggtatgagtagaaagcttactagggcagagtggtttctctcacgta

SEQ ID NO: 80976 - DNA, 120 bp, Artificial Sequence
  ENSG00000082068_40 (sequence is synthesized)
tgtcacacaacctcattaatctggcagatgtgtgttcccagagccacaatctcaaacctgcaacaggtgacagctaggaaagaaataatggatgctacagcgattatcattagtggatgg

SEQ ID NO: 80977 - DNA, 120 bp, Artificial Sequence
  ENSG00000082068_41 (sequence is synthesized)
ccctgtggactttatcagtgactcagtctggagcccagggggcgctgtactgctgggttttctcactggtggtgggtctcatatgagaccaagtcccttggagcttatgaccagtaaaga

SEQ ID NO: 80978 - DNA, 120 bp, Artificial Sequence
  ENSG00000082068_42 (sequence is synthesized)
gatcccatgacactttttgcaagagtagaagtgttaaagtcagtgtcataactagtctagctcatgtaattacatgcggcctacttaaattcctccagtcgtttgaagtgaaaagctatt

SEQ ID NO: 80979 - DNA, 120 bp, Artificial Sequence
  ENSG00000082068_43 (sequence is synthesized)
ttccccctcctaaaaatactgttgtgttgtgttgcccaactgagtgacgggtggctatgtttctcagctcccctgactcaaggcaggcatgttttactggtgagtgatatggtctggcct

SEQ ID NO: 80980 - DNA, 120 bp, Artificial Sequence
  ENSG00000082068_44 (sequence is synthesized)
cagttggcagtataggtagaaggtaggaggggatactggaagaggttttgaggtgttatagacattttattgatattataaattccctttaacctttcccttccttcccctggtcccccg

SEQ ID NO: 80981 - DNA, 120 bp, Artificial Sequence
  ENSG00000082068_45 (sequence is synthesized)
ggaaaagtttcttttaaagggggtttaatctgcacgtaagagtcaaaagaaactgctagtacttttctggggcaaaaaaagggagttatttaatacttcccctaataactctttcctttt

SEQ ID NO: 80982 - DNA, 120 bp, Artificial Sequence
  ENSG00000082068_46 (sequence is synthesized)
cccctagaatattatactgttttcctttttaaattcttataatcttttatattctgaaatttaattttgacattgagtaaacagtaacagcaattgaacgcatattactttggtttttat

SEQ ID NO: 80983 - DNA, 120 bp, Artificial Sequence
  ENSG00000082068_47 (sequence is synthesized)
tttcttattttgctaccatatagcaggagggataaggccccattaagtccccatgccaagagatttaggcacctcttgcattcatggcaacctttatcccagtttcagtgggataagtgt

SEQ ID NO: 80984 - DNA, 120 bp, Artificial Sequence
  ENSG00000082068_48 (sequence is synthesized)
tcctcccttccggttactcagtgttgtcaactcctcctgagaggtggtcacatttcagaaacgtgtgaagtgattccagtgtttatgagacatctgaggaaacttcagggctgacagcaa

SEQ ID NO: 80985 - DNA, 120 bp, Artificial Sequence
  ENSG00000082068_49 (sequence is synthesized)
gctgttggcattattcacatttgggtcctgtaagaaaaaataagaggcagtcccaatatgtgtttcttttcaaaaccacggtaattaagttttaactgctacccatggtttgggagatgg

SEQ ID NO: 80986 - DNA, 120 bp, Artificial Sequence
  ENSG00000082068_50 (sequence is synthesized)
ggagcctcaccgatgtttccatgacaatatttgacagtatttcctgagtgctgttagctgccaggagaggtgaccagtgagtctggtctcaagcaaaattggctaattggttacagtaag

SEQ ID NO: 80987 - DNA, 120 bp, Artificial Sequence
  ENSG00000082068_51 (sequence is synthesized)
actgtcttttattatcagatcaagactgtcattatgacttccatttcatctttcagttagtcatgctttaactatgtttttggatgggaaggttattgttataatgaaatttttcaaatg

SEQ ID NO: 80988 - DNA, 120 bp, Artificial Sequence
  ENSG00000082068_52 (sequence is synthesized)
gcaaaacactgggtaagaagctcagatatttgttcttttattggtttaagtactatgtatacctcatgcaagtatattaaaaaagagaaaagaatgttggctgggcgcggtggctcatgc

SEQ ID NO: 80989 - DNA, 120 bp, Artificial Sequence
  ENSG00000082068_53 (sequence is synthesized)
aatttgactagcaacaagttaagactgtcatatggaactgtctgcatgctctgggctcacactgaagtttgtgtgatgtgaatccactggactctataacttttaaggttcatcctaagt

SEQ ID NO: 80990 - DNA, 120 bp, Artificial Sequence
  ENSG00000082068_54 (sequence is synthesized)
tccactataaacaggctcatgactcgggcacagacacttcttgcgtgactttttcctatgatggtaatgtccttgcctctcgtggaggtaggttaaaagctttctttttgatgtatttct

SEQ ID NO: 80991 - DNA, 120 bp, Artificial Sequence
  ENSG00000082068_55 (sequence is synthesized)
ctatataaaataatcatctttaacaaatatgacaataatatcctagtgcttagtaaagcttgctttgatttttgttaatgcacctttgccagtctgatttcttcattaaaatacatttct

SEQ ID NO: 80992 - DNA, 120 bp, Artificial Sequence
  ENSG00000082074_0 (sequence is synthesized)
accactgaccgggacaaaaccctgccaggcatcagaaagctccgcagttcttgagttccacatgcagagcagatgcgacagctagaagtgagtagggcccagaccctggcccaggaagat

SEQ ID NO: 80993 - DNA, 120 bp, Artificial Sequence
  ENSG00000082074_1 (sequence is synthesized)
ccactaaaggaggccatccttccgccttcttctgcaggagtcaggatggaaaggcagatgtaaagtccctcatggcgaaatataacacggggggcaacccgacagaggatgtctcagtca

SEQ ID NO: 80994 - DNA, 120 bp, Artificial Sequence
  ENSG00000082074_2 (sequence is synthesized)
atagccgacccttcagagtcacagggccaaactcatcttcaggaatacaagcaagaaagaacttattcaacaaccaaggaaatgccagccctcctgcaggacccagcaatgtacctaagt

SEQ ID NO: 80995 - DNA, 120 bp, Artificial Sequence
  ENSG00000082074_3 (sequence is synthesized)
ttgggtccccaaagccacctgtggcagtcaaaccttcttctgaggaaaagcctgacaaggaacccaagcccccgtttctaaagcccactggagcaggccaaagattcggaacaccagcca

SEQ ID NO: 80996 - DNA, 120 bp, Artificial Sequence
  ENSG00000082074_4 (sequence is synthesized)
gcttgaccaccagagaccccgaggcgaaagtgggatttctgaaacctgtaggccccaagcccatcaacttgcccaaagaagattccaaacctacatttccctggcctcctggaaacaagc

SEQ ID NO: 80997 - DNA, 120 bp, Artificial Sequence
  ENSG00000082074_5 (sequence is synthesized)
catctcttcacagtgtaaaccaagaccatgacttaaagccactaggcccgaaatctgggcctactcctccaacctcagaaaatgaacagaagcaagcgtttcccaaattgactggggtta

SEQ ID NO: 80998 - DNA, 120 bp, Artificial Sequence
  ENSG00000082074_6 (sequence is synthesized)
aagggaaatttatgtcagcatcacaagatcttgaacccaagcccctcttccccaaacccgcctttggccagaagccgcccctaagtaccgagaactcccatgaagacgaaagccccatga

SEQ ID NO: 80999 - DNA, 120 bp, Artificial Sequence
  ENSG00000082074_7 (sequence is synthesized)
agaatgtgtcttcatcaaaagggtccccagctcccctgggagtcaggtccaaaagcggccctttaaaaccagcaagggaagactcagaaaataaagaccatgcaggggagatttcaagtt

SEQ ID NO: 81000 - DNA, 120 bp, Artificial Sequence
  ENSG00000082074_8 (sequence is synthesized)
tgccctttcctggagtggttttgaaacctgctgcgagcaggggaggcccaggtctctccaaaaatggtgaagaaaaaaaggaagataggaagatagatgctgctaagaacaccttccaga

SEQ ID NO: 81001 - DNA, 120 bp, Artificial Sequence
  ENSG00000082074_9 (sequence is synthesized)
gcaaaataaatcaggaagagttggcctcagggactcctcctgccaggttccctaaggccccttctaagctgacagtgggggggccatggggccaaagtcaggaaaaggaaaagggagaca

SEQ ID NO: 81002 - DNA, 120 bp, Artificial Sequence
  ENSG00000082074_10 (sequence is synthesized)
agaattcagccaccccgaaacagaagccattgcctcccttgtttaccttgggtccacctccaccaaaacccaacagaccaccaaatgttgacctgacgaaattccacaaaacctcttctg

SEQ ID NO: 81003 - DNA, 120 bp, Artificial Sequence
  ENSG00000082074_11 (sequence is synthesized)
gaaacagtactagcaaaggccagacgtcttactcaacaacttccctgccaccacctccaccatcccatccggccagccaaccaccattgccagcatctcacccatcacaaccaccagtcc

SEQ ID NO: 81004 - DNA, 120 bp, Artificial Sequence
  ENSG00000082074_12 (sequence is synthesized)
caagcctacctcccagaaacattaaacctccgtttgacctaaaaagccctgtcaatgaagacaatcaagatggtgtcacgcactctgatggtgctggaaatctagatgaggaacaagaca

SEQ ID NO: 81005 - DNA, 120 bp, Artificial Sequence
  ENSG00000082074_13 (sequence is synthesized)
gtgaaggagaaacatatgaagacatagaagcatccaaagaaagagagaagaaaagggaaaaggaagaaaagaagaggttagagctggagaaaaaggaacagaaagagaaagaaaagaaag

SEQ ID NO: 81006 - DNA, 120 bp, Artificial Sequence
  ENSG00000082074_14 (sequence is synthesized)
aacaagaaataaagaagaaatttaaactaacaggccctattcaagtcatccatcttgcaaaagcttgttgtgatgtcaaaggaggaaagaatgaactgagcttcaagcaaggagagcaaa

SEQ ID NO: 81007 - DNA, 120 bp, Artificial Sequence
  ENSG00000082074_15 (sequence is synthesized)
ttgaaatcatccgcatcacagacaacccagaaggaaaatggttgggcagaacagcaaggggttcatatggctatattaaaacaactgctgtagagattgactatgattctttgaaactga

SEQ ID NO: 81008 - DNA, 120 bp, Artificial Sequence
  ENSG00000082074_16 (sequence is synthesized)
aaaaagactctcttggtgccccttcaagacctattgaagatgaccaagaagtatatgatgatgttgcagagcaggatgatattagcagccacagtcagagtggaagtggagggatattcc

SEQ ID NO: 81009 - DNA, 120 bp, Artificial Sequence
  ENSG00000082074_17 (sequence is synthesized)
ctccaccaccagatgatgacatttatgatgggattgaagaggaagatgctgatgatggtttccctgctcctcctaaacaattggacatgggagatgaagtttacgatgatgtggatacct

SEQ ID NO: 81010 - DNA, 120 bp, Artificial Sequence
  ENSG00000082074_18 (sequence is synthesized)
ctgatttccctgtttcatcagcagagatgagtcaaggaactaatgttggaaaagctaagacagaagaaaaggaccttaagaagctaaaaaagcaggaaaaagaagaaaaagacttcagga

SEQ ID NO: 81011 - DNA, 120 bp, Artificial Sequence
  ENSG00000082074_19 (sequence is synthesized)
caacttccataacttctaaaaagtggggaaccagagatctacaggtaaaacctggtgaatctctagaagttatacaaaccacagatgacacaaaagttctctgcagaaatgaagaaggga

SEQ ID NO: 81012 - DNA, 120 bp, Artificial Sequence
  ENSG00000082074_20 (sequence is synthesized)
aatatggttatgtccttcggagttacctagcggacaatgatggagagatctatgatgatattgctgatggctgcatctatgacaatgactagcactcaactttggtcattctgctgtgtt

SEQ ID NO: 81013 - DNA, 120 bp, Artificial Sequence
  ENSG00000082074_21 (sequence is synthesized)
cattaggtgccaatgtgaagtctggattttaattggcatgttattgggtatcaagaaaattaatgcacaaaaccacttattatcatttgttatgaaatcccaattatctttacaaagtgt

SEQ ID NO: 81014 - DNA, 120 bp, Artificial Sequence
  ENSG00000082074_22 (sequence is synthesized)
ttaaagtttgaacatagaaaataatctctctgcttaattgttaactcagaagactacattagtgagatgtaagaattattaaatattccatttccgctttggctacaattatgaagaagt

SEQ ID NO: 81015 - DNA, 120 bp, Artificial Sequence
  ENSG00000082074_23 (sequence is synthesized)
tgaaggtacttcttttagaccaccagtaaataatcctccttcaaaaaataaaaataaaagaaaaaggaaaatcattcaggaagaaatgacctgtctaaaaaaacctaaggaagaataata

SEQ ID NO: 81016 - DNA, 120 bp, Artificial Sequence
  ENSG00000082074_24 (sequence is synthesized)
atataagaaaggaaatttaaaaacattccacaagaagaaaaattattgtttatacttctacttatggttatatcttatattctctattcaagtgacctgtcttttaaaaaggcagtgctg

SEQ ID NO: 81017 - DNA, 120 bp, Artificial Sequence
  ENSG00000082074_25 (sequence is synthesized)
tcttacctcttgctagtgggttaaatgttttcaaaaattatagcagtagtagaagttttgtataaaatttgtccttatttgttaattgtatataaatgttaattatttgatacgaatgtt

SEQ ID NO: 81018 - DNA, 120 bp, Artificial Sequence
  ENSG00000082074_26 (sequence is synthesized)
atgcatttagtatgcacattgaagtctaaactgtagaagagtctaaaacaagttctctttttgcagattcacatactaatggtttaattctgtgctctgtttaaagtactattataacta

SEQ ID NO: 81019 - DNA, 120 bp, Artificial Sequence
  ENSG00000082074_27 (sequence is synthesized)
gagtagatctgaatgaggataaccctaaaatcatgaggaatggaagaatggaccttgaaactacctaggcttttatgcatggcacctctttataatgaagacactttttaaagtttttgt

SEQ ID NO: 81020 - DNA, 120 bp, Artificial Sequence
  ENSG00000082074_28 (sequence is synthesized)
ttttgtttcaattaccgctagatttttttttctctttttttaaaatccattttactggaaagttggccagcagagggagtagaaattattaaaattctagtgtttggattgggcccttct

SEQ ID NO: 81021 - DNA, 120 bp, Artificial Sequence
  ENSG00000082074_29 (sequence is synthesized)
ctaacagtacatactcattcccaaagcaatccaaaaacaaaatgtgaaccatttgggtttcaaatgttaagaacactaaatagcatgatttaaaaaatgaaaaatgctaacacccaagaa

SEQ ID NO: 81022 - DNA, 120 bp, Artificial Sequence
  ENSG00000082074_30 (sequence is synthesized)
aagaagatattaagtgctttttaacaactcctagagtacaaaatgagtacatcataatgctggctcttctactaatgaaccatcgagtgatattgaataaattatttatcttctcagttt

SEQ ID NO: 81023 - DNA, 120 bp, Artificial Sequence
  ENSG00000082074_31 (sequence is synthesized)
ccttatctgtaaattacaatattagactaagtaagtttttccaactcttcactaccaattaccttaggcttttataatgctccgcctacttcagtcccatgtttcagaagcttttgtcta

SEQ ID NO: 81024 - DNA, 120 bp, Artificial Sequence
  ENSG00000082074_32 (sequence is synthesized)
ttttttaaactcattgattaaataatgattaatgcattctccacattttaatattgcaaaggcccattggagtttctgaagtggctccacagaattgaaataatttcaaataactgtaaa

SEQ ID NO: 81025 - DNA, 120 bp, Artificial Sequence
  ENSG00000082074_33 (sequence is synthesized)
ggaactgaaaatcttcacagagatgaagtggggtttccattaggtgctttgaaatttgataacaaatcatcaacttccactggtcaatatatagattttgggtgtctgaggccccaagat

SEQ ID NO: 81026 - DNA, 120 bp, Artificial Sequence
  ENSG00000082074_34 (sequence is synthesized)
tagatgccactaatctccaaagattccctccaattatgaaatattttaatgtctacttttagagagcactagccagtatatgaccatgtgattaatttcttttcacactagataaaatta

SEQ ID NO: 81027 - DNA, 120 bp, Artificial Sequence
  ENSG00000082074_35 (sequence is synthesized)
cctggttcaaaagtggtttttgtttattaaatttggtaataaatatatataatacacagacaggatagtttttatgctgaagtttttggccagctttagtttgaggactccttgataagc

SEQ ID NO: 81028 - DNA, 120 bp, Artificial Sequence
  ENSG00000082074_36 (sequence is synthesized)
ttgctaaactttcagagtgccctgagacacttccagccatccctcctcctgccttcattggggcagacttgcattgcagtctgacagtaattttttttctgattgagaattatgtaaatt

SEQ ID NO: 81029 - DNA, 120 bp, Artificial Sequence
  ENSG00000082074_37 (sequence is synthesized)
cagtacaatgtcagtttttaaaagtcaaagttagatcaagagaatatttcagagttttggtttacacatcaagaaacagacacacatacctaggaaagatttacacaatagataatcatc

SEQ ID NO: 81030 - DNA, 120 bp, Artificial Sequence
  ENSG00000082074_38 (sequence is synthesized)
ttaatgtgaaagatatttgaagtattaattttaatatattaaatatgatttctgttatagtcttctgtatggaattttgtcacttaagatgagctgcaaataaataataccttcaatgga

SEQ ID NO: 81031 - DNA, 120 bp, Artificial Sequence
  ENSG00000082074_39 (sequence is synthesized)
agatgctgatgatggctccacactacaggttcaagagaagagtaatacgtggtcctgggggattttgaagatgttaaagggaaaagatgacagaaagaaaagtatacgagagaaacctaa

SEQ ID NO: 81032 - DNA, 120 bp, Artificial Sequence
  ENSG00000082074_40 (sequence is synthesized)
aacttgcacattcactatccaagctgcaccatcttcggggtcattgtgtgccaggcatatcaactcttttcaataaaaatggatggaaaggcagatgtaaagtccctcatggcgaaatat

SEQ ID NO: 81033 - DNA, 120 bp, Artificial Sequence
  ENSG00000082074_41 (sequence is synthesized)
gggggcgtgtaaaggtgatttgttcgccaagaaaagcacttttagtaaagcacagatgttaatctagatcatggaaaagtgccacacactagatttagcacataagcaaggagtctctag

SEQ ID NO: 81034 - DNA, 120 bp, Artificial Sequence
  ENSG00000082074_42 (sequence is synthesized)
gtggctgagtgctaagagcagggtgaacaccatggaaaacttgaaattgaaaacatcacaattttaatgagaaaaagcgcaacccaaagtgaagagcaccattataacaaaggtcatgca

SEQ ID NO: 81035 - DNA, 120 bp, Artificial Sequence
  ENSG00000082074_43 (sequence is synthesized)
ggctgagtgaattatcctaaacaaatgatggaaaggcagatgtaaagtccctcatggcgaaatataacacggggggcaacccgacagaggatgtctcagtcaatagccgacccttcagag

SEQ ID NO: 81036 - DNA, 120 bp, Artificial Sequence
  ENSG00000082074_44 (sequence is synthesized)
gtaatgcagaatcctattgctctataaaaatttgaattgcttgaatctattacaaatttttgccagtgtgcttcctgcctcaaggatggatggaaaggcagatgtaaagtccctcatggc

SEQ ID NO: 81037 - DNA, 120 bp, Artificial Sequence
  ENSG00000082074_45 (sequence is synthesized)
aatacaattagagaaccataaagggcaaacatattaaaagagcttaattttgtagtgtggcctgcaggcttccagaaaaaaacaggagatcagtgagctagcagcagagaagccttcctg

SEQ ID NO: 81038 - DNA, 120 bp, Artificial Sequence
  ENSG00000082074_46 (sequence is synthesized)
gtggcctgcaggcttccagaaaaaaacaggagatcagtgagctagcagcagagaagccttcctggaaaagtcttcaaagctacatctatacctgttcctgtattattgaaaaataataac

SEQ ID NO: 81039 - DNA, 120 bp, Artificial Sequence
  ENSG00000082074_47 (sequence is synthesized)
aagataaacctggccagctatacaaatgctctgagggttgagataacatgcaaatgtagcctcacatatcaatgtgtgaaagctggacagaccacacagctcagaaaaggaagtacactc

SEQ ID NO: 81040 - DNA, 120 bp, Artificial Sequence
  ENSG00000082074_48 (sequence is synthesized)
atccaagctgcaccatcttcggggtcattgtgtgccaggcatatcaactcttttcaataaaaatgcccccagaagactggaaactggttattccttctcttattacggagaggatacctg

SEQ ID NO: 81041 - DNA, 120 bp, Artificial Sequence
  ENSG00000082074_49 (sequence is synthesized)
ccttttgtcagcccccagtgagaagacaggagttgagacgatgactcctgtgcttgctcaattggagattgtgcattgcagacattggaacagggagaataaagggatcattcaatgatg

SEQ ID NO: 81042 - DNA, 120 bp, Artificial Sequence
  ENSG00000082074_50 (sequence is synthesized)
taggtctttgatctctttgcagtcccctttgaggagttagtagaaatccagaattgcctcatgtatggagccagttttctccttactgtactctaaacaatccatccttttctcattaat

SEQ ID NO: 81043 - DNA, 120 bp, Artificial Sequence
  ENSG00000082074_51 (sequence is synthesized)
ttatagtgctacctttatattatatcagctctatgtgtgtgtatgtgtatattatgggtgtgtttatgtacatttgtgtatgtcactgaattttctgctctattccattggtctatttgc

SEQ ID NO: 81044 - DNA, 120 bp, Artificial Sequence
  ENSG00000082074_52 (sequence is synthesized)
ctgttcttataccaacaccacactgtttttattattaatattattatattattgctcttaatattggattctgtttcaatattcagtaattagttttgatattacactgaactcttatta

SEQ ID NO: 81045 - DNA, 120 bp, Artificial Sequence
  ENSG00000082074_53 (sequence is synthesized)
aatttttttaatccaattaacttgatttgtttgatacataaaaacaaatccttgggaactaataagtaaaaaggtgtgaaacagtgattttttaatacctttttccatgcaagcccagaa

SEQ ID NO: 81046 - DNA, 120 bp, Artificial Sequence
  ENSG00000082074_54 (sequence is synthesized)
aaccaaatggacatcccttttcataaaggtaataaacagtgtattaattatttttcgccctttgcattattttatgaaagccaatgaaatgattttataattaagtcaccagcacaaata

SEQ ID NO: 81047 - DNA, 120 bp, Artificial Sequence
  ENSG00000082074_55 (sequence is synthesized)
aaagccatagtaaagatctaaagtacgtatttgattttctatttctgtatctttgataaagcataagttctgttagattatgaactattttgaatattattatatcatatccaataatct

SEQ ID NO: 81048 - DNA, 120 bp, Artificial Sequence
  ENSG00000082074_56 (sequence is synthesized)
tacattaaagtgcttccttattacaaatgtattaaattttatttttttaatcttttaggtgctggaaatctagatgaggtcagatttttttctcttctcatattatattgacataatcag

SEQ ID NO: 81049 - DNA, 120 bp, Artificial Sequence
  ENSG00000082074_57 (sequence is synthesized)
aatatttcacaagtattatgattcactccgtattggtacaaaacaaacaaatgaaaatccttatgagcaatgatatttttccatttctaatcttatttcatctaaaatgcttaagatgtt

SEQ ID NO: 81050 - DNA, 120 bp, Artificial Sequence
  ENSG00000082074_58 (sequence is synthesized)
acacactagtcatcacactgactcattataatgctgtagtgctgaacaaacttaagtctgactacacgtctgatttatatagcaagatagaaaaggaaattttgtttttgctttcccagt

SEQ ID NO: 81051 - DNA, 120 bp, Artificial Sequence
  ENSG00000082074_59 (sequence is synthesized)
ctatttctaaggagaaaaaaaatattttaaataagccaaacttacatacaatagttgttttactgagtatttgaattattctttcaaaaataattcacagtatggctcctttaagtagtt

SEQ ID NO: 81052 - DNA, 120 bp, Artificial Sequence
  ENSG00000082074_60 (sequence is synthesized)
aaattaatcattatcaatgtttttctttacaggaacaagacagtgaaggagaaacatatgaagacatgtatgaattacattttttaccatgacagttttcttcaaagatgaatataatgt

SEQ ID NO: 81053 - DNA, 120 bp, Artificial Sequence
  ENSG00000082074_61 (sequence is synthesized)
tttgtatgagggagagtgggtatataacaacactaggagggaagcttgatttgttcaaatgactggcgtataataacttttatttcaatttaaaggacccaaaattatttagttctctaa

SEQ ID NO: 81054 - DNA, 120 bp, Artificial Sequence
  ENSG00000082074_62 (sequence is synthesized)
gaattctacaaaggactctgttaaaaagctattgtgtgagaggccagagacatgcctctgagataaaccacagtcagggaatcagagacagaaatctgatttcttactcttagtgtatcc

SEQ ID NO: 81055 - DNA, 120 bp, Artificial Sequence
  ENSG00000082074_63 (sequence is synthesized)
ttgggcagatgagttaatttatgttacgccttcttcacctgaacagagctccacccacggggtgctatgaaaaataatttatcatgacgcccagaggtcagagtgtcagctgctaaagtg

SEQ ID NO: 81056 - DNA, 120 bp, Artificial Sequence
  ENSG00000082074_64 (sequence is synthesized)
gaaagatgttaaacaaagaagtttcttggaaacgaaatttcttggaaagtgggtgaaagtagaaatgaatatattatcttactttatcatatgttgatctcagataccttaattttctct

SEQ ID NO: 81057 - DNA, 120 bp, Artificial Sequence
  ENSG00000082074_65 (sequence is synthesized)
acccagtgtttattcaaccaattctgactcaagtttcagagccaaggtttatatgtgtacctgtgaatgcacaggcacgtgtgcatatgaaagagagaaaaagagatggattctatttat

SEQ ID NO: 81058 - DNA, 120 bp, Artificial Sequence
  ENSG00000082074_66 (sequence is synthesized)
gcgaacatacagcaagaatggggcctctataaacggtggcttccacttgctggcacaagttgtcagggaaagcagagcctttggaaggtatcctcagcagtgtgcctcctactggtttta

SEQ ID NO: 81059 - DNA, 120 bp, Artificial Sequence
  ENSG00000082074_67 (sequence is synthesized)
aaaataatctcacacattccggattttgacaacctttcgctttttaccttcaactgtacttcagataccaccttttctgttgtgagtagaaacttctaggtagggagttccgacgcatca

SEQ ID NO: 81060 - DNA, 120 bp, Artificial Sequence
  ENSG00000082074_68 (sequence is synthesized)
aaacttacatagttgaagaattacttattcattattctctaaagagtaattatcttcataacagtacttttttgtccaatacaccattttatccctgaactaatataataaaatttaaat

SEQ ID NO: 81061 - DNA, 120 bp, Artificial Sequence
  ENSG00000082074_69 (sequence is synthesized)
gcacattcactatccaagctgcaccatcttcggggtcattgtgtgccaggcatatcaactcttttcaataaaaatgtttttctagccacttcccagcactcgcagcatgaagctcacacc

SEQ ID NO: 81062 - DNA, 120 bp, Artificial Sequence
  ENSG00000082074_70 (sequence is synthesized)
agaagtttccagagatcaccccagaggtgataagatctcgcccgcccttccgtcccaggatagtgtgattgcgggaccatggaatttacaaggatggaaaggcagatgtaaagtccctca

SEQ ID NO: 81063 - DNA, 120 bp, Artificial Sequence
  ENSG00000082074_71 (sequence is synthesized)
aaggggaaaggaggaaaggttgaaattggagaaaaaagagacatactggagaaagagaaaagttagggagaaaaggagaagaaaggaaggacacaaaagtagacacaagtaagaaaaatg

SEQ ID NO: 81064 - DNA, 120 bp, Artificial Sequence
  ENSG00000082074_72 (sequence is synthesized)
ggtcatttccagagatagatacaattattcaatatactatgattactctcttgtgttttgatttcctgaaaaaagtactaaagatttttcaacctgtattattgatacaatttatttcct

SEQ ID NO: 81065 - DNA, 120 bp, Artificial Sequence
  ENSG00000082126_0 (sequence is synthesized)
gtatcctactaaagcttttgtctggataggagcaacatgcatgtttacagtcttgcagtgtgctgagagctggtggccagtgggactgagtgagctgtgtgccgtgtattgacccgcttc

SEQ ID NO: 81066 - DNA, 120 bp, Artificial Sequence
  ENSG00000082126_1 (sequence is synthesized)
ctagtcctgaattcctttcagaagctccggcagggaggatgatacagtcagacaaaggagcagatccaccagacaagaaggacatgaagctttctacagccaccaatccacagaatggcc

SEQ ID NO: 81067 - DNA, 120 bp, Artificial Sequence
  ENSG00000082126_2 (sequence is synthesized)
tctcccagatcctgaggcttgtgctgcaagagctgagtctgttctacggcagagatgtgaatggagtgtgtctcttgtacgatctcctccactcgccgtggcttcaggctctgctaaaga

SEQ ID NO: 81068 - DNA, 120 bp, Artificial Sequence
  ENSG00000082126_3 (sequence is synthesized)
tttatgactgcctccaggaatttaaagaaaagaaactagttcctgccacaccacatgcacaggtgttatcctatgaggtagtggagttattacgtgaaacccctacttcccctgagatcc

SEQ ID NO: 81069 - DNA, 120 bp, Artificial Sequence
  ENSG00000082126_4 (sequence is synthesized)
aagagctgagacaaatgctccaggctccacacttcaaggccttgctcagtgcccatgacacgatagctcagaaagattttgaaccccttctccctccactgccagacaatatccctgaga

SEQ ID NO: 81070 - DNA, 120 bp, Artificial Sequence
  ENSG00000082126_5 (sequence is synthesized)
gtgaggaagcaatgaggattgtttgtttagtgaaaaaccaacagcccctgggagccaccatcaagcgccacgagatgacaggggacatcttggtggccaggatcatccacggtgggctgg

SEQ ID NO: 81071 - DNA, 120 bp, Artificial Sequence
  ENSG00000082126_6 (sequence is synthesized)
cggagagaagtgggttgctatatgctggagacaaactggtagaagtgaatggagtttcagttgagggactggaccctgaacaagtgatccatattctggccatgtctcgaggcacaatca

SEQ ID NO: 81072 - DNA, 120 bp, Artificial Sequence
  ENSG00000082126_7 (sequence is synthesized)
tgttcaaggtggttccagtctctgaccctcctgtgaatagccagcagatggtgtacgtccgtgccatgactgagtactggccccaggaggatcccgacatcccctgcatggacgctggat

SEQ ID NO: 81073 - DNA, 120 bp, Artificial Sequence
  ENSG00000082126_8 (sequence is synthesized)
tgcctttccagaagggggacatcctccagattgtggaccagaatgatgccctctggtggcaggcccgaaaaatctcagaccctgctacctgcgctgggcttgtcccttctaaccaccttc

SEQ ID NO: 81074 - DNA, 120 bp, Artificial Sequence
  ENSG00000082126_9 (sequence is synthesized)
tgaagaggaagcaacgggaattctggtggtctcagccgtaccagcctcacacctgcctcaagtcaaccctatcaatttctatggaagaagaagatgacatgaagattgatgagaaatgtg

SEQ ID NO: 81075 - DNA, 120 bp, Artificial Sequence
  ENSG00000082126_10 (sequence is synthesized)
gatgaagaaacatttgaatctgaggaactttcagaagacaaggaggagtttgttggctacggtcagaagttctttatagctggcttccgccgcagcatgcgcctttgtcgcaggaagtct

SEQ ID NO: 81076 - DNA, 120 bp, Artificial Sequence
  ENSG00000082126_11 (sequence is synthesized)
cacctcagcccgctgcatgccagtgtgtgctgcaccggcagctgctacagtgcagtgggtgccccttacgaggaggtggtgaggtaccagcgacgcccttcagacaagtaccgcctcata

SEQ ID NO: 81077 - DNA, 120 bp, Artificial Sequence
  ENSG00000082126_12 (sequence is synthesized)
gtgctcatgggaccctctggtgttggagtaaatgagctcagaagacaacttattgaatttaatcccagccattttcaaagtgctgtgccacacactactcgtactaaaaagagttacgaa

SEQ ID NO: 81078 - DNA, 120 bp, Artificial Sequence
  ENSG00000082126_13 (sequence is synthesized)
atgaatgggcgtgagtatcactatgtgtccaaggaaacatttgaaaacctcatatatagtcacaggatgctggagtatggtgagtacaaaggccacctgtatggcactagtgtggatgct

SEQ ID NO: 81079 - DNA, 120 bp, Artificial Sequence
  ENSG00000082126_14 (sequence is synthesized)
gttcaaacagtccttgtcgaaggaaagatctgtgtcatggacctagagcctcaggatattcaaggggttcgaacccatgaactgaagccctatgtcatatttataaagccatcgaatatg

SEQ ID NO: 81080 - DNA, 120 bp, Artificial Sequence
  ENSG00000082126_15 (sequence is synthesized)
aggtgtatgaaacaatctcggaaaaatgccaaggttattactgactactatgtggacatgaagttcaaggatgaagacctacaagagatggaaaatttagcccaaagaatggaaactcag

SEQ ID NO: 81081 - DNA, 120 bp, Artificial Sequence
  ENSG00000082126_16 (sequence is synthesized)
tttggccaattttttgatcatgtgattgtgaatgacagcttgcacgatgcatgtgcccagttgttgtctgccatacagaaggctcaggaggagcctcagtgggtaccagcaacatggatt

SEQ ID NO: 81082 - DNA, 120 bp, Artificial Sequence
  ENSG00000082126_17 (sequence is synthesized)
tcctcagatactgagtctcaatgagacttcttgtttaatgctggagttttaacactgtacccttgatacagcgatccatagttgcaatctaaaacaacagtatttgacccattttaatgt

SEQ ID NO: 81083 - DNA, 120 bp, Artificial Sequence
  ENSG00000082126_18 (sequence is synthesized)
gtacaactttaaaagtgcagcaatttattaattaatcttatttgaaaaaaatttttattgtatggttatgtggttacctattttaacttaattttttttcctttacctcatatgcagctg

SEQ ID NO: 81084 - DNA, 120 bp, Artificial Sequence
  ENSG00000082126_19 (sequence is synthesized)
tggtagaaatatgaataatgttaagtcactgagtatgagaacctttcgcagatttcacatgatctttttaagatttaaataaagagctttcctaaataaaataagcaatagttaacttta

SEQ ID NO: 81085 - DNA, 120 bp, Artificial Sequence
  ENSG00000082126_20 (sequence is synthesized)
tctgtgtactcagtccggaattgcatgtggtgggtgcttacttatttgcagtctcaatcaagaattctcactctcaagatagcagaaatagataagcttcaactgacaaatttggtacag

SEQ ID NO: 81086 - DNA, 120 bp, Artificial Sequence
  ENSG00000082126_21 (sequence is synthesized)
ctcttgattgctttgctgttagaagaaatatgaagcatgtcaattatagattatctgaagcagaggtgtccaaaggggccatgggcctttcctctagaaatgtgtaaaatgaccctccac

SEQ ID NO: 81087 - DNA, 120 bp, Artificial Sequence
  ENSG00000082126_22 (sequence is synthesized)
ttcccactgatctactagaaaatgttctagaaagcagtgctttgtaaatgatctcaagaacacttagtaactctcagcatatccgatggtagaacacttggaaacctctgctctttgtga

SEQ ID NO: 81088 - DNA, 120 bp, Artificial Sequence
  ENSG00000082126_23 (sequence is synthesized)
aataccataaaatattgcagtatcaaatttttaaagagcaatatatatattttattattaagtttgatgccatcttctggtggattctagtatagataaatagtagtaggttccaaaatg

SEQ ID NO: 81089 - DNA, 120 bp, Artificial Sequence
  ENSG00000082126_24 (sequence is synthesized)
atgagacatgcatgaaagttttttacatttctactctttaatttttttgtaaattgggaaaagatttttcaaatttagtggcagaactaagattggcttaagaatcactaggattttgtt

SEQ ID NO: 81090 - DNA, 120 bp, Artificial Sequence
  ENSG00000082126_25 (sequence is synthesized)
aggagaccagttggagaaccttagtctgacaggtgaatctgtctttgctttacaggctagtctagtttttagaagtgagagaacaatgtaaaattttaaaacagtgggcatttcaatgat

SEQ ID NO: 81091 - DNA, 120 bp, Artificial Sequence
  ENSG00000082126_26 (sequence is synthesized)
tcacatatattttccagagcaacagcagaatactgctgacattatgtttattttaccaagtatacatttttttaaacttgcagtaatattcatttcttttctacaatttccattatattt

SEQ ID NO: 81092 - DNA, 120 bp, Artificial Sequence
  ENSG00000082126_27 (sequence is synthesized)
ttattaggtaacaattcacatagttcaaaatttaataactacaaaggtatattcagtaagaagttcctctctttccatgttctcctactcatttttctttcttggggcaataaattttaa

SEQ ID NO: 81093 - DNA, 90 bp, Artificial Sequence
  ENSG00000082126_28 (sequence is synthesized)
tctcctactcatttttctttcttggggcaataaattttaatagtttcttcagtatcaccccagacatattctgtgcacataaaagcaatg

SEQ ID NO: 81094 - DNA, 120 bp, Artificial Sequence
  ENSG00000082126_29 (sequence is synthesized)
gtttttcttgggtttctgttacctcaagatgagataaagagggacaagcagatgaatgaacacacacacactggtttataaatccaaatgtcaacttatcgataaaccctaagcatctta

SEQ ID NO: 81095 - DNA, 120 bp, Artificial Sequence
  ENSG00000082126_30 (sequence is synthesized)
aataccaaggagacgagaataatcatatcagctagaaaacagggaaaagtcttgggaaactaaattaaacttaaaaagtgctatggcctgaatgtttgtgtcctctccaaaattcatatg

SEQ ID NO: 81096 - DNA, 120 bp, Artificial Sequence
  ENSG00000082126_31 (sequence is synthesized)
tcctctccaaaattcatatgttgagacctaatccccaatgcaatagtattaagaggcggggcctttagcaggtggttaggtcatgagcactctgccctcatgaatgggattagtgccctt

SEQ ID NO: 81097 - DNA, 120 bp, Artificial Sequence
  ENSG00000082126_32 (sequence is synthesized)
cttattttccccttccaccatgggaggacccagctaaaaggtgccatttatgagtcacggagtggccctcgccagacactgcatccactggctccttgatcttggacttcccagcttcca

SEQ ID NO: 81098 - DNA, 120 bp, Artificial Sequence
  ENSG00000082126_33 (sequence is synthesized)
gaactatgagcaaatacatctctgttgtttgtaagtgacccagtttacggtactttgttatagcagcctgcacagactaagacaaaaaaggattcatctttcaaggctgagttgagacct

SEQ ID NO: 81099 - DNA, 120 bp, Artificial Sequence
  ENSG00000082126_34 (sequence is synthesized)
caatttcaacccaccaccctcaccttatgctactgagttttgacaagctaccaagggagggcgtgcaaatagaaagaagcagcagtcccaggctcagccactgttaagagatcaagaaga

SEQ ID NO: 81100 - DNA, 120 bp, Artificial Sequence
  ENSG00000082126_35 (sequence is synthesized)
ttgatgagaaatgtgtggaagcagctcctgctgcacccctgactgtcatcatggctcaactgccgaataccatgtgtttcatgtaaagctgatatatgccatagagacaccatcgattcg

SEQ ID NO: 81101 - DNA, 120 bp, Artificial Sequence
  ENSG00000082146_0 (sequence is synthesized)
gttcccagcgggtagcctgggactggtgcagagttccaagcccacggccccggtcgcggcctcgccgccctcccgcgccccgcgccgggagcgggcctagagcgctcgcctcgcccctcc

SEQ ID NO: 81102 - DNA, 120 bp, Artificial Sequence
  ENSG00000082146_1 (sequence is synthesized)
gcgagcagggctctggcgcccgcccctgtccgcaccgctggcagcctgaagagagtcgctggccgtggtcgccgctaggtaggatatatctgcatcttgaaaggaagataaaacaaaagc

SEQ ID NO: 81103 - DNA, 120 bp, Artificial Sequence
  ENSG00000082146_2 (sequence is synthesized)
cttctttggaatagatggatttttgtcactttctgtgtgaactaaagtgattcaatgtctcttttggattgcttctgcacttcaagaacacaagttgaatcactcagacctgaaaaacag

SEQ ID NO: 81104 - DNA, 120 bp, Artificial Sequence
  ENSG00000082146_3 (sequence is synthesized)
tctgaaaccagtatccatcaatacttggttgatgagccaaccctttcctggtcacgtccatccactagagccagtgaagtactatgttccaccaacgtttctcactatgagctccaagta

SEQ ID NO: 81105 - DNA, 120 bp, Artificial Sequence
  ENSG00000082146_4 (sequence is synthesized)
gaaataggaagaggatttgacaacttgacttctgtccatcttgcacggcatactcccacaggaacactggtaactataaaaattacaaatctggaaaactgcaatgaagaacgcctgaaa

SEQ ID NO: 81106 - DNA, 120 bp, Artificial Sequence
  ENSG00000082146_5 (sequence is synthesized)
gctttacagaaagccgtgattctatcccactttttccggcatcccaatattacaacttattggacagttttcactgttggcagctggctttgggttatttctccatttatggcctatggt

SEQ ID NO: 81107 - DNA, 120 bp, Artificial Sequence
  ENSG00000082146_6 (sequence is synthesized)
tcagcaagtcaactcttgaggacctattttcctgaaggaatgagtgaaactttaataagaaacattctctttggagccgtgagagggttgaactatctgcaccaaaatggctgtattcac

SEQ ID NO: 81108 - DNA, 120 bp, Artificial Sequence
  ENSG00000082146_7 (sequence is synthesized)
aggagtattaaagccagccatatcctcatttctggtgatggcctagtgaccctctctggcctgtcccatctgcatagtttggttaagcatggacagaggcatagggctgtgtatgatttc

SEQ ID NO: 81109 - DNA, 120 bp, Artificial Sequence
  ENSG00000082146_8 (sequence is synthesized)
ccacagttcagcacatcagtgcagccgtggctgagtccagaactactgagacaggatttacatgggtataatgtgaagtcagatatttacagtgttgggattacagcatgtgaattagcc

SEQ ID NO: 81110 - DNA, 120 bp, Artificial Sequence
  ENSG00000082146_9 (sequence is synthesized)
tcctccttatagcccattggatatcagtattttccctcaatcagaatccagaatgaaaaattcccagtcaggtgtagactctgggattggagaaagtgtgcttgtctccagtggaactca

SEQ ID NO: 81111 - DNA, 120 bp, Artificial Sequence
  ENSG00000082146_10 (sequence is synthesized)
cacagtaaatagtgaccgattacacacaccatcctcaaaaactttctctcctgccttctttagcttggtacagctctgtttgcaacaagatcctgagaaaaggccatcagcaagcagttt

SEQ ID NO: 81112 - DNA, 120 bp, Artificial Sequence
  ENSG00000082146_11 (sequence is synthesized)
attgtcccatgttttcttcaaacagatgaaagaagaaagccaggattcaatactttcactgttgcctcctgcttataacaagccatcaatatcattgcctccagtgttaccttggactga

SEQ ID NO: 81113 - DNA, 120 bp, Artificial Sequence
  ENSG00000082146_12 (sequence is synthesized)
gccagaatgtgattttcctgatgaaaaagactcatactgggaattctagggctgccaaatcattttatgtcctatatacttgacactttctccttgctgctttttcttctgtatttctag

SEQ ID NO: 81114 - DNA, 120 bp, Artificial Sequence
  ENSG00000082146_13 (sequence is synthesized)
gtacaaataccagaattatacttgaaaatacagttggtgcactggagaatctattatttaaaaccactctgttcaaaggggcaccagtttgtagtccctctgtttcgcacagagtactat

SEQ ID NO: 81115 - DNA, 120 bp, Artificial Sequence
  ENSG00000082146_14 (sequence is synthesized)
gacaaggaaacatcagaattactaatctagctagtgtcatttattctggaatttttttctaagctgtgactaactctttttatctctcaatataatttttgagccagttaatttttttca

SEQ ID NO: 81116 - DNA, 120 bp, Artificial Sequence
  ENSG00000082146_15 (sequence is synthesized)
gtattttgctgtcccttgggaatgggccctcagaggacagtgcttccaagtacatcttctcccagattctctggcctttttaatgagctattgttaaaccaacaggctagtttatcttac

SEQ ID NO: 81117 - DNA, 120 bp, Artificial Sequence
  ENSG00000082146_16 (sequence is synthesized)
atcagacccttttctggtagagggaaaatgtttgtgctttccctttttcttctgttaatacttatggtaacacctaactgagcctcactcacattaaatgattcacttgaaatatataca

SEQ ID NO: 81118 - DNA, 120 bp, Artificial Sequence
  ENSG00000082146_17 (sequence is synthesized)
gaaattgtaatttgcttttttttaaacaagggggctaaagtaacactttcctacttatgtaaattatagatcctaaattcacgcaccccgtgggagctcaataaagatttactgaattga

SEQ ID NO: 81119 - DNA, 120 bp, Artificial Sequence
  ENSG00000082146_18 (sequence is synthesized)
caataaaaatgagagtaaaaatcagttactctttctagacattaattagcacatttacgttaagactctaagtagtataaaatgtaaattgctgctaccctactaagttactgtcagtaa

SEQ ID NO: 81120 - DNA, 120 bp, Artificial Sequence
  ENSG00000082146_19 (sequence is synthesized)
atactgtgtgcagtaaatgttgagtatggattaattgaaggatacctctacaattatttcctttagtcaaggttgtagctaagaattgggcttctgacatacattctttttaatcttttt

SEQ ID NO: 81121 - DNA, 120 bp, Artificial Sequence
  ENSG00000082146_20 (sequence is synthesized)
tccctgagctacttgcctttcataagactgcttacattctagataatttctgttaaacatgtttgctatagactcttaggagctttattgttgttactgttttaatattttgcctgaaaa

SEQ ID NO: 81122 - DNA, 120 bp, Artificial Sequence
  ENSG00000082146_21 (sequence is synthesized)
ctcttttggaagccattagaaactctgcagaggaatcagttgtacagctatcttgacattgttagcgtctattcttcagggattgcttctgcacttcaagaacacaagttgaatcactca

SEQ ID NO: 81123 - DNA, 120 bp, Artificial Sequence
  ENSG00000082146_22 (sequence is synthesized)
agaacctggatcttccgctgccattcttcagcaaagaactgcttctcacttaaatagttttgtcgacgcaagctaaggcgatgcagtgctgtagccaaatcactatctcctgagggtcct

SEQ ID NO: 81124 - DNA, 120 bp, Artificial Sequence
  ENSG00000082153_0 (sequence is synthesized)
accaccgctgcggccgccgcctccgccgctgctttcgctggagggcgggcggatgtacggggcgcctggggccccggcgcaaagcgcctcagtgactgtggtccgctcgttgcggcggcc

SEQ ID NO: 81125 - DNA, 120 bp, Artificial Sequence
  ENSG00000082153_1 (sequence is synthesized)
gccaccgcaggcgacaggggtgtcttttatgaataatcaaaagcagcaaaagccaacgctatcaggccagcgttttaaaactagaaaaagagatgaaaaagagaggtttgaccctactca

SEQ ID NO: 81126 - DNA, 120 bp, Artificial Sequence
  ENSG00000082153_2 (sequence is synthesized)
gtttcaagactgtattattcaaggcttaactgaaaccggtactgatttggaagcagtagctaagtttcttgatgcttctggagcaaaacttgattaccgtcgatatgcagaaacactctt

SEQ ID NO: 81127 - DNA, 120 bp, Artificial Sequence
  ENSG00000082153_3 (sequence is synthesized)
tgacattctggtggctggtggaatgctggccccaggtggtacactggcagatgacatgatgcgtacagatgtctgcgtgtttgcagcccaagaagatctagagaccatgcaagcatttgc

SEQ ID NO: 81128 - DNA, 120 bp, Artificial Sequence
  ENSG00000082153_4 (sequence is synthesized)
tcaggtttttaacaagttaatcaggcgctacaaatacctggagaaaggttttgaagatgaagtaaaaaagctgctgctgttcttgaagggtttttcagagtcggagaggaacaagctagc

SEQ ID NO: 81129 - DNA, 120 bp, Artificial Sequence
  ENSG00000082153_5 (sequence is synthesized)
tatgttgactggtgttcttctggctaatggaacacttaatgcatccattcttaatagcctttataatgaaaatttggttaaagaaggagtttcagcagcttttgctgtgaagctctttaa

SEQ ID NO: 81130 - DNA, 120 bp, Artificial Sequence
  ENSG00000082153_6 (sequence is synthesized)
agctgcaagtcttcggaaagtcagcatggataacagactgatggaactctttcctgccaataagcaaagtgttgaacacttcacaaaatattttactgaggcaggcttgaaagagctttc

SEQ ID NO: 81131 - DNA, 120 bp, Artificial Sequence
  ENSG00000082153_7 (sequence is synthesized)
agaatatgttcggaatcagcaaaccatcggagctcgtaaggagctccagaaagaacttcaagaacagatgtcccgtggtgatccatttaaggatataattttatatgtcaaggaggagat

SEQ ID NO: 81132 - DNA, 120 bp, Artificial Sequence
  ENSG00000082153_8 (sequence is synthesized)
gaaaaaaaacaacatcccagagccagttgtcatcggaatagtctggtcaagtgtaatgagcactgtggaatggaacaaaaaagaggagcttgtagcagagcaagccatcaagcacttgaa

SEQ ID NO: 81133 - DNA, 120 bp, Artificial Sequence
  ENSG00000082153_9 (sequence is synthesized)
gcaatacagccctctacttgctgcctttactactcaaggtcagtctgagctgactctgttactgaagattcaggagtattgctatgacaacattcatttcatgaaagccttccagaaaat

SEQ ID NO: 81134 - DNA, 120 bp, Artificial Sequence
  ENSG00000082153_10 (sequence is synthesized)
agtggtgcttttttataaagctgaagtcctgagcgaggagcccattttgaagtggtataaagatgcacatgttgcaaaggggaagagtgttttccttgagcaaatgaaaaagtttgtaga

SEQ ID NO: 81135 - DNA, 120 bp, Artificial Sequence
  ENSG00000082153_11 (sequence is synthesized)
atggctcaaaaatgctgaagaagaatctgaatctgaagctgaagaaggtgactgaattttgaaactacaccctcagtaaagcaaacaggagttgtagataaaatgtcatgtctcatgtgt

SEQ ID NO: 81136 - DNA, 120 bp, Artificial Sequence
  ENSG00000082153_12 (sequence is synthesized)
ccctgtatcaagcatgatataagggctttcatggcaaattttattttaactgtttctatggttgctggaaatgttgggtttagtttctaaaaccatgttttaagtagctacaggagctat

SEQ ID NO: 81137 - DNA, 120 bp, Artificial Sequence
  ENSG00000082153_13 (sequence is synthesized)
agatttgaatctaatgttgcattagtcttttcagttatcttctacctcctgtattttctactgtaataatgtaatttaaggccttccacaatgaacagttcactttattccctgggtttt

SEQ ID NO: 81138 - DNA, 120 bp, Artificial Sequence
  ENSG00000082153_14 (sequence is synthesized)
ctataaacagttttaaggatatgatttggttaaaaaataatttgttataaaaattctgtttgcaaattaaactggaaaagtatccagagtctcaaaaggcaatgatttgtgagataatat

SEQ ID NO: 81139 - DNA, 120 bp, Artificial Sequence
  ENSG00000082153_15 (sequence is synthesized)
ggcatgcccggagccctgctcatcaatgaaaaacccatatgtaataatcgaattcatttaacatgaatcttgagtacgtggaccattgcttgcatgttaactttttgttttgttttgttt

SEQ ID NO: 81140 - DNA, 120 bp, Artificial Sequence
  ENSG00000082153_16 (sequence is synthesized)
tgttttgttttgcatttttaactccagatatcctaaagctcaattgtttggtctctggttttcatccttagagaagccatggagaacagacttgaaaagtttaggaaatcataatgtggc

SEQ ID NO: 81141 - DNA, 120 bp, Artificial Sequence
  ENSG00000082153_17 (sequence is synthesized)
agaggtggtgggaagaagaaagttgagctttttccccttgagaaacttctgcatttagtttctatctttccaggcaaaacaaatgggtattcttttcatacaaccattttcaaatgaacc

SEQ ID NO: 81142 - DNA, 120 bp, Artificial Sequence
  ENSG00000082153_18 (sequence is synthesized)
ttagaaaagtcttaacatttaaggtattttatgcacagaatacacttagattgataggaaagaactcgtaatggagtttgagtaaagaaaatgactgatgtactaaacccagtaaaaatt

SEQ ID NO: 81143 - DNA, 120 bp, Artificial Sequence
  ENSG00000082153_19 (sequence is synthesized)
gttgaaaatgttaaaggtcagcatgttctaattgggaatctagatatagcttagatttcctattggcttagagtatttgctataacaaatgaagtgcaatgacaattatatattcctact

SEQ ID NO: 81144 - DNA, 120 bp, Artificial Sequence
  ENSG00000082153_20 (sequence is synthesized)
cggtcatactggactggcttcgttctcttaatatactcagtaatgactcaagcctctggctattaacataccctagttgccgttttttaattgccatgagccaaatacttcttggtatac

SEQ ID NO: 81145 - DNA, 120 bp, Artificial Sequence
  ENSG00000082153_21 (sequence is synthesized)
aattgatccatttattttaatggctgccttttcattttcatcttttcttgctgctacccatctatgtatgtagtcattggggggaaaatgtagccacattttttatgggaagactttgtg

SEQ ID NO: 81146 - DNA, 120 bp, Artificial Sequence
  ENSG00000082153_22 (sequence is synthesized)
ttaaaagtgaacattttgaaggtttttaactggtgaaactagcctggaataatgccaccagagactgagtggaaatcgccccttttgaaggtgccattcttatgagccaaaagtttgtca

SEQ ID NO: 81147 - DNA, 120 bp, Artificial Sequence
  ENSG00000082153_23 (sequence is synthesized)
tttaaaagttcattttgagggaataacatgtaatataatttgaaataaaggtatagtaaccttaaaaagaacattataactgattgttgtgaatggggtgaatttgttaaaatgagtaac

SEQ ID NO: 81148 - DNA, 120 bp, Artificial Sequence
  ENSG00000082153_24 (sequence is synthesized)
tttgataaagtttttcatgcacaggcaaaatgtattcactagatttctacgtagtgatctgcttttactttgtaatttgtagttctcaaaagacttttttttaaaaaaataaagtccata

SEQ ID NO: 81149 - DNA, 120 bp, Artificial Sequence
  ENSG00000082153_25 (sequence is synthesized)
cttacacttaggctttatacatcagtctttttttttttaaattccatgttaatacctagtggtattgtatgttgtgtgttcagatgtctttactgtatctgtataccattaagtaataat

SEQ ID NO: 81150 - DNA, 120 bp, Artificial Sequence
  ENSG00000082153_26 (sequence is synthesized)
tagactcccaaactgtaaaccacctacacagaattctggtgtagctaaaactacattaatatttctacaaccaattcattgcatgtttcttccatacaaagtgtgccattttatactgtg

SEQ ID NO: 81151 - DNA, 120 bp, Artificial Sequence
  ENSG00000082153_27 (sequence is synthesized)
tacattattatctttgatcgtagtttgtttcttcataatgacactgtagtgtttacttagtagaacattatagtaagtggatatcacttgtgacagtaatagtgtaaagaaagggaatgc

SEQ ID NO: 81152 - DNA, 120 bp, Artificial Sequence
  ENSG00000082153_28 (sequence is synthesized)
tttataaaaagattgcagattccattccatataaaaagattccattctgaatcttaagtggtaattttagaattcaggtgccagtgccagcctatggcctcaagtatgtaattcttaata

SEQ ID NO: 81153 - DNA, 120 bp, Artificial Sequence
  ENSG00000082153_29 (sequence is synthesized)
tagatgttaaattgtacttttaattatgattggataaatgttttttctaactgtcagtttctaaggctgtctccttagaaactaaatgagtttttagagctggttgtaagtttcttagcc

SEQ ID NO: 81154 - DNA, 120 bp, Artificial Sequence
  ENSG00000082153_30 (sequence is synthesized)
ttactctgtgagttatagatgttatttcattctatatatagatgtttattccattcttatttaaaaaaaaaaacctccatataccaaaaatgctacaggatattttgaaatagcatattt

SEQ ID NO: 81155 - DNA, 120 bp, Artificial Sequence
  ENSG00000082153_31 (sequence is synthesized)
tagttaggggaaatgcatgtgaccaagaggttggacttctaattcagtttttcaaaagcttttttccattatcatacccccagcctttttaggcttttttttttttttttttgagacgga

SEQ ID NO: 81156 - DNA, 120 bp, Artificial Sequence
  ENSG00000082153_32 (sequence is synthesized)
tgggattatgggcttgagccaccgcgcccagctagacttttttctaatagagtcccccataaattttattaccatagatacgctgtgtatgtactgtttctgtgctttgtacatgaaaag

SEQ ID NO: 81157 - DNA, 89 bp, Artificial Sequence
  ENSG00000082153_33 (sequence is synthesized)
cgctgtgtatgtactgtttctgtgctttgtacatgaaaagagtaaaatgtttttgtttttgttttggagacagtctcactctgttacct

SEQ ID NO: 81158 - DNA, 120 bp, Artificial Sequence
  ENSG00000082153_34 (sequence is synthesized)
tacaggcgtgagccaccatgcccaaccaattttttttttttaaatccttggtagtgattgacccccattgagaatgcatgctctaatattttttaaaagggaagaagacctagtgataga

SEQ ID NO: 81159 - DNA, 120 bp, Artificial Sequence
  ENSG00000082153_35 (sequence is synthesized)
ttttttaaaagggaagaagacctagtgatagacctttgcattggcaggcatgtctttatgtttatacagtgaagtagtattttttctgtcagggtcaatagaaagtagacgaaattcatt

SEQ ID NO: 81160 - DNA, 120 bp, Artificial Sequence
  ENSG00000082153_36 (sequence is synthesized)
ttcagccaatctttcaccagttgtgctttgttccttaccccaccacaggcaacagacaaagcatttcctgctgtctttcaaggtcttaacagattctttcttgattataaatgtattact

SEQ ID NO: 81161 - DNA, 120 bp, Artificial Sequence
  ENSG00000082153_37 (sequence is synthesized)
aagtagaatcatttgggttctttctataaaaatcagtgaaaatcctctagatgaatgaattaaagttgtaggcataacactgataaacctctgctctcatactgaagtaggctgcttgca

SEQ ID NO: 81162 - DNA, 120 bp, Artificial Sequence
  ENSG00000082153_38 (sequence is synthesized)
ggaactgacaactattggttggctttaaatgtaatgtagatgccaaagttttagtgtacagtgttacttaaattaccaaattacctttgtacaaatattcctcagatgctgtctacaggt

SEQ ID NO: 81163 - DNA, 120 bp, Artificial Sequence
  ENSG00000082153_39 (sequence is synthesized)
gccatataaaataggttgataagtatttgcaaattctggtaaattgccttgctatgatttttcatgctcagtattagtcctctagtatcaatacgaagtttttctattccccagcctact

SEQ ID NO: 81164 - DNA, 120 bp, Artificial Sequence
  ENSG00000082153_40 (sequence is synthesized)
aaggcctacaggttaaaataccaggaataaaaaggttttcagtggacttgatttaagtggaatctggatgatgtgacaagtacctttgtctttggagtaatgagtttataattggctttt

SEQ ID NO: 81165 - DNA, 120 bp, Artificial Sequence
  ENSG00000082153_41 (sequence is synthesized)
gtccaaaaactcttaagtggattaatatctgaacaatcttagacataattatatgaaactggatcagaaaggctttctgactcctttctcttcacttttttctcccagcttaactagagg

SEQ ID NO: 81166 - DNA, 120 bp, Artificial Sequence
  ENSG00000082153_42 (sequence is synthesized)
caattaacagtcatttcaaatctaattatttttattttccagtgtacttatcatcctttcatctttatgctaggagtatagtctcagttcttaatgagttgatgggatgaagatatagat

SEQ ID NO: 81167 - DNA, 120 bp, Artificial Sequence
  ENSG00000082153_43 (sequence is synthesized)
cacaccattctcctgtctcagcctcctagctgggattacaggcgcccaccaaccaagcccggctaaggtatttttaaatgtactcaatcactgtcattttagtaaccttgaatcagaacc

SEQ ID NO: 81168 - DNA, 120 bp, Artificial Sequence
  ENSG00000082153_44 (sequence is synthesized)
ttttagtaaccttgaatcagaacctcagttgttaaaggcttaactgcttgtggcaactactatagtgctctagtggggacagtggttaaaatctgcagaatcccttgctttgtcatctta

SEQ ID NO: 81169 - DNA, 120 bp, Artificial Sequence
  ENSG00000082153_45 (sequence is synthesized)
tccagaaggactgatagcttgttaaactgtggtatgattagaatgttggtggttgtgtagtgcatttggggtgctacaacgttaatcaaatataattgagctgttctgtttccagtcagt

SEQ ID NO: 81170 - DNA, 120 bp, Artificial Sequence
  ENSG00000082153_46 (sequence is synthesized)
gtaaccatttaaaaataccttggcaaaacaagctaggagctagttcatgctaatattcttaaggacaaaaatagtttacagcttttttttttttaatctgaaatcctgaaggctatgctt

SEQ ID NO: 81171 - DNA, 120 bp, Artificial Sequence
  ENSG00000082153_47 (sequence is synthesized)
aaaagttagagataaacctgttggaaataagtgattcatttatagactgaagcctctatgacttcaaaaagatactcaacagtctctggcatttgaagaacaaaatattttctctgtaaa

SEQ ID NO: 81172 - DNA, 120 bp, Artificial Sequence
  ENSG00000082153_48 (sequence is synthesized)
tacacctcatttccattctagttaggagcaatggcgcccaggacggcacacagaatggagaaaactggatagctggtaactcatttagctcttggcactctaaaaaacctcaaatacagc

SEQ ID NO: 81173 - DNA, 120 bp, Artificial Sequence
  ENSG00000082153_49 (sequence is synthesized)
catccaagccagtaattctattgctgcgttatttctgtgtttaactgtgaaacttgcttcttgtctgtacccttgaaatggaataaaatttcatgagactccttgttaatgtagagaaaa

SEQ ID NO: 81174 - DNA, 120 bp, Artificial Sequence
  ENSG00000082153_50 (sequence is synthesized)
cgggtggggaggtggggtccgggtgtgcgccgcggcgctggctgcgaaggcagtggccgaggcgggctccctctgggccgtgcccggcctggctaacaaagccgccgcggcctctgttgt

SEQ ID NO: 81175 - DNA, 120 bp, Artificial Sequence
  ENSG00000082153_51 (sequence is synthesized)
cctagggatggcccaccagtaaataaacaaatagtaacattagctattgatgataatgctctgaattgggctgtggttcacaggttaaaaacaagaatatggcctggccaggcacaatgg

SEQ ID NO: 81176 - DNA, 120 bp, Artificial Sequence
  ENSG00000082153_52 (sequence is synthesized)
ctatttggcaaacttgttaaaatggagtgatttttttggttttgttgtattttggttttatccaactttagccccaggtggtacactggcagatgacatgatgcgtacagatgtctgcgt

SEQ ID NO: 81177 - DNA, 120 bp, Artificial Sequence
  ENSG00000082153_53 (sequence is synthesized)
gacttccggtgctggaggagggggccggcggcgagggactccaggaggacgcgtccaacttcgagaccggcgggggccggctccgctcttccaacccctccatgtgtgaagagggcggac

SEQ ID NO: 81178 - DNA, 120 bp, Artificial Sequence
  ENSG00000082153_54 (sequence is synthesized)
agttttgcaggcctgagtggtgcaaggcggccgctgttgcggtcacaggcatgacctagggtaggatggtgctgcccgtaaccaggcttgtcagaagaaggggttcaccttttgacagtg

SEQ ID NO: 81179 - DNA, 120 bp, Artificial Sequence
  ENSG00000082153_55 (sequence is synthesized)
gacgcagcgggggaagaaaaataagctagtctaggacaagtgtccaggcgacgtggaacccagtaagggaataaagaagactggaaacgtctctcccctcccctatcccagtccctcacc

SEQ ID NO: 81180 - DNA, 120 bp, Artificial Sequence
  ENSG00000082153_56 (sequence is synthesized)
ctaatccgcgcgcaatagaaaaggcggaagcgcctgtccacgatcagggcggggcaaggggaagaaatctcgcgataggagagcggtccgggcgggggtggcacctctccctcctcctgg

SEQ ID NO: 81181 - DNA, 120 bp, Artificial Sequence
  ENSG00000082153_57 (sequence is synthesized)
aatatttacgttttaatgtctctcttcaaacctccagaacatcttgtgtatcttgccttctctgacaggtacttgcatattactaaagcctcaaaagaagataccagaaagaaacttgaa

SEQ ID NO: 81182 - DNA, 120 bp, Artificial Sequence
  ENSG00000082153_58 (sequence is synthesized)
agaaagaaaaggtatcagtacagaaaagaagagtcagaaaataccgtgcaaaggcacattcagaacgtaaccaggatagctggagccaggattcaaggagagagggtgtcttttatgaat

SEQ ID NO: 81183 - DNA, 120 bp, Artificial Sequence
  ENSG00000082175_0 (sequence is synthesized)
agtccacagctgtcactaatcggggtaagccttgttgtatttgtgcgtgtgggtggcattctcaatgagaactagcttcacttgtcatttgagtgaaatctacaacccgaggcggctagt

SEQ ID NO: 81184 - DNA, 120 bp, Artificial Sequence
  ENSG00000082175_1 (sequence is synthesized)
gctcccgcactactgggatctgagatcttcggagatgactgtcgcccgcagtacggagccagcagaagtccgacccttcctgggaatgggctgtaccgagaggtccgactagccccaggg

SEQ ID NO: 81185 - DNA, 120 bp, Artificial Sequence
  ENSG00000082175_2 (sequence is synthesized)
ttttagtgagggggcagtggaactcagcgagggactgagagcttcacagcatgcacgagtttgatgccagagaaaaagtcgggagataaaggagccgcgtgtcactaaattgccgtcgca

SEQ ID NO: 81186 - DNA, 120 bp, Artificial Sequence
  ENSG00000082175_3 (sequence is synthesized)
gccgcagccactcaagtgccggacttgtgagtactctgcgtctccagtcctcggacagaagttggagaactctcttggagaactccccgagttaggagacgagatctcctaacaattact

SEQ ID NO: 81187 - DNA, 120 bp, Artificial Sequence
  ENSG00000082175_4 (sequence is synthesized)
actttttcttgcgctccccacttgccgctcgctgggacaaacgacagccacagttcccctgacgacaggatggaggccaagggcaggagctgaccagcgccgccctcccccgcccccgac

SEQ ID NO: 81188 - DNA, 120 bp, Artificial Sequence
  ENSG00000082175_5 (sequence is synthesized)
ccaggaggtggagatccctccggtccagccacattcaacacccactttctcctccctctgcccctatattcccgaaaccccctcctccttcccttttccctcctcctggagacgggggag

SEQ ID NO: 81189 - DNA, 120 bp, Artificial Sequence
  ENSG00000082175_6 (sequence is synthesized)
gagaaaaggggagtccagtcgtcatgactgagctgaaggcaaagggtccccgggctccccacgtggcgggcggcccgccctcccccgaggtcggatccccactgctgtgtcgcccagccg

SEQ ID NO: 81190 - DNA, 120 bp, Artificial Sequence
  ENSG00000082175_7 (sequence is synthesized)
caggtccgttcccggggagccagacctcggacaccttgcctgaagtttcggccatacctatctccctggacgggctactcttccctcggccctgccagggacaggacccctccgacgaaa

SEQ ID NO: 81191 - DNA, 120 bp, Artificial Sequence
  ENSG00000082175_8 (sequence is synthesized)
agacgcaggaccagcagtcgctgtcggacgtggagggcgcatattccagagctgaagctacaaggggtgctggaggcagcagttctagtcccccagaaaaggacagcggactgctggaca

SEQ ID NO: 81192 - DNA, 120 bp, Artificial Sequence
  ENSG00000082175_9 (sequence is synthesized)
gtgtcttggacactctgttggcgccctcaggtcccgggcagagccaacccagccctcccgcctgcgaggtcaccagctcttggtgcctgtttggccccgaacttcccgaagatccaccgg

SEQ ID NO: 81193 - DNA, 120 bp, Artificial Sequence
  ENSG00000082175_10 (sequence is synthesized)
ctgcccccgccacccagcgggtgttgtccccgctcatgagccggtccgggtgcaaggttggagacagctccgggacggcagctgcccataaagtgctgccccggggcctgtcaccagccc

SEQ ID NO: 81194 - DNA, 120 bp, Artificial Sequence
  ENSG00000082175_11 (sequence is synthesized)
ggcagctgctgctcccggcctctgagagccctcactggtccggggccccagtgaagccgtctccgcaggccgctgcggtggaggttgaggaggaggatggctctgagtccgaggagtctg

SEQ ID NO: 81195 - DNA, 120 bp, Artificial Sequence
  ENSG00000082175_12 (sequence is synthesized)
cgggtccgcttctgaagggcaaacctcgggctctgggtggcgcggcggctggaggaggagccgcggctgtcccgccgggggcggcagcaggaggcgtcgccctggtccccaaggaagatt

SEQ ID NO: 81196 - DNA, 120 bp, Artificial Sequence
  ENSG00000082175_13 (sequence is synthesized)
cccgcttctcagcgcccagggtcgccctggtggagcaggacgcgccgatggcgcccgggcgctccccgctggccaccacggtgatggatttcatccacgtgcctatcctgcctctcaatc

SEQ ID NO: 81197 - DNA, 120 bp, Artificial Sequence
  ENSG00000082175_14 (sequence is synthesized)
acgccttattggcagcccgcactcggcagctgctggaagacgaaagttacgacggcggggccggggctgccagcgcctttgccccgccgcggagttcaccctgtgcctcgtccaccccgg

SEQ ID NO: 81198 - DNA, 120 bp, Artificial Sequence
  ENSG00000082175_15 (sequence is synthesized)
tcgctgtaggcgacttccccgactgcgcgtacccgcccgacgccgagcccaaggacgacgcgtaccctctctatagcgacttccagccgcccgctctaaagataaaggaggaggaggaag

SEQ ID NO: 81199 - DNA, 120 bp, Artificial Sequence
  ENSG00000082175_16 (sequence is synthesized)
gcgcggaggcctccgcgcgctccccgcgttcctaccttgtggccggtgccaaccccgcagccttcccggatttcccgttggggccaccgcccccgctgccgccgcgagcgaccccatcca

SEQ ID NO: 81200 - DNA, 120 bp, Artificial Sequence
  ENSG00000082175_17 (sequence is synthesized)
gacccggggaagcggcggtgacggccgcacccgccagtgcctcagtctcgtctgcgtcctcctcggggtcgaccctggagtgcatcctgtacaaagcggagggcgcgccgccccagcagg

SEQ ID NO: 81201 - DNA, 80 bp, Artificial Sequence
  ENSG00000082175_18 (sequence is synthesized)
cgggacggcctgccctccacctccgcctctgccgccgccgccggggcggcccccgcgctctaccctgcactcggcctcaa

SEQ ID NO: 81202 - DNA, 120 bp, Artificial Sequence
  ENSG00000082175_19 (sequence is synthesized)
ctgcactcggcctcaacgggctcccgcagctcggctaccaggccgccgtgctcaaggagggcctgccgcaggtctacccgccctatctcaactacctgaggccggattcagaagccagcc

SEQ ID NO: 81203 - DNA, 120 bp, Artificial Sequence
  ENSG00000082175_20 (sequence is synthesized)
agagcccacaatacagcttcgagtcattacctcagaagatttgtttaatctgtggggatgaagcatcaggctgtcattatggtgtccttacctgtgggagctgtaaggtcttctttaaga

SEQ ID NO: 81204 - DNA, 120 bp, Artificial Sequence
  ENSG00000082175_21 (sequence is synthesized)
gggcaatggaagggcagcacaactacttatgtgctggaagaaatgactgcatcgttgataaaatccgcagaaaaaactgcccagcatgtcgccttagaaagtgctgtcaggctggcatgg

SEQ ID NO: 81205 - DNA, 120 bp, Artificial Sequence
  ENSG00000082175_22 (sequence is synthesized)
tccttggaggtcgaaaatttaaaaagttcaataaagtcagagttgtgagagcactggatgctgttgctctcccacagccagtgggcgttccaaatgaaagccaagccctaagccagagat

SEQ ID NO: 81206 - DNA, 120 bp, Artificial Sequence
  ENSG00000082175_23 (sequence is synthesized)
tcactttttcaccaggtcaagacatacagttgattccaccactgatcaacctgttaatgagcattgaaccagatgtgatctatgcaggacatgacaacacaaaacctgacacctccagtt

SEQ ID NO: 81207 - DNA, 120 bp, Artificial Sequence
  ENSG00000082175_24 (sequence is synthesized)
ctttgctgacaagtcttaatcaactaggcgagaggcaacttctttcagtagtcaagtggtctaaatcattgccaggttttcgaaacttacatattgatgaccagataactctcattcagt

SEQ ID NO: 81208 - DNA, 120 bp, Artificial Sequence
  ENSG00000082175_25 (sequence is synthesized)
attcttggatgagcttaatggtgtttggtctaggatggagatcctacaaacacgtcagtgggcagatgctgtattttgcacctgatctaatactaaatgaacagcggatgaaagaatcat

SEQ ID NO: 81209 - DNA, 120 bp, Artificial Sequence
  ENSG00000082175_26 (sequence is synthesized)
cattctattcattatgccttaccatgtggcagatcccacaggagtttgtcaagcttcaagttagccaagaagagttcctctgtatgaaagtattgttacttcttaatacaattcctttgg

SEQ ID NO: 81210 - DNA, 120 bp, Artificial Sequence
  ENSG00000082175_27 (sequence is synthesized)
aagggctacgaagtcaaacccagtttgaggagatgaggtcaagctacattagagagctcatcaaggcaattggtttgaggcaaaaaggagttgtgtcgagctcacagcgtttctatcaac

SEQ ID NO: 81211 - DNA, 120 bp, Artificial Sequence
  ENSG00000082175_28 (sequence is synthesized)
ttacaaaacttcttgataacttgcatgatcttgtcaaacaacttcatctgtactgcttgaatacatttatccagtcccgggcactgagtgttgaatttccagaaatgatgtctgaagtta

SEQ ID NO: 81212 - DNA, 120 bp, Artificial Sequence
  ENSG00000082175_29 (sequence is synthesized)
ttgctgcacaattacccaagatattggcagggatggtgaaaccccttctctttcataaaaagtgaatgtcatctttttcttttaaagaattaaattttgtggtatgtctttttgttttgg

SEQ ID NO: 81213 - DNA, 120 bp, Artificial Sequence
  ENSG00000082175_30 (sequence is synthesized)
tcaggattatgaggtcttgagtttttataatgttcttctgaaagccttacatttataacatcatagtgtgtaaatttaaaagaaaaattgtgaggttctaattattttcttttataaagt

SEQ ID NO: 81214 - DNA, 120 bp, Artificial Sequence
  ENSG00000082175_31 (sequence is synthesized)
ataattagaatgtttaactgttttgtttacccatattttcttgaagaatttacaagattgaaaaagtactaaaattgttaaagtaaactatcttatccatattatttcataccatgtagg

SEQ ID NO: 81215 - DNA, 120 bp, Artificial Sequence
  ENSG00000082175_32 (sequence is synthesized)
tgaggatttttaacttttgcatctaacaaatcatcgacttaagagaaaaaatcttacatgtaataacacaaagctattatatgttatttctaggtaactccctttgtgtcaattatattt

SEQ ID NO: 81216 - DNA, 120 bp, Artificial Sequence
  ENSG00000082175_33 (sequence is synthesized)
ccaaaaatgaacctttaaaatggtatgcaaaattttgtctatatatatttgtgtgaggaggaaattcataactttcctcagattttcaaaagtatttttaatgcaaaaaatgtagaaaga

SEQ ID NO: 81217 - DNA, 120 bp, Artificial Sequence
  ENSG00000082175_34 (sequence is synthesized)
gtttaaaaccactaaaatagattgatgttcttcaaactaggcaaaacaactcatatgttaagaccattttccagattggaaacacaaatctcttaggaagttaataagtagattcatatc

SEQ ID NO: 81218 - DNA, 120 bp, Artificial Sequence
  ENSG00000082175_35 (sequence is synthesized)
attatgcaaatagtattgtgggttttgtaggtttttaaaataaccttttttggggagagaattgtcctctaatgaggtattgcgagtggacataagaaatcagaagattatggcctaact

SEQ ID NO: 81219 - DNA, 120 bp, Artificial Sequence
  ENSG00000082175_36 (sequence is synthesized)
gtactccttaccaactgtggcatgctgaaagttagtcactcttactgattctcaattctctcacctttgaaagtagtaaaatatctttcctgccaattgctcctttgggtcagagcttat

SEQ ID NO: 81220 - DNA, 120 bp, Artificial Sequence
  ENSG00000082175_37 (sequence is synthesized)
taacatcttttcaaatcaaaggaaagaagaaagggagaggaggaggagggaggtatcaattcacatacctttctcctctttatcctccactatcatgaattcatattatgtttcagccat

SEQ ID NO: 81221 - DNA, 120 bp, Artificial Sequence
  ENSG00000082175_38 (sequence is synthesized)
gcaaatctttttaccatgaaatttcttccagaattttccccctttgacacaaattccatgcatgtttcaaccttcgagactcagccaaatgtcatttctgtaaaatcttccctgagtctt

SEQ ID NO: 81222 - DNA, 120 bp, Artificial Sequence
  ENSG00000082175_39 (sequence is synthesized)
ccaagcagtaatttgccttctcctagagtttacctgccattttgtgcacatttgagttacagtagcatgttattttacaattgtgactctcctgggagtctgggagccatataaagtggt

SEQ ID NO: 81223 - DNA, 120 bp, Artificial Sequence
  ENSG00000082175_40 (sequence is synthesized)
caatagtgtttgctgactgagagttgaatgacattttctctctgtcttggtattactgtagatttcgatcattctttggttacatttctgcatatttctgtacccatgactttatcactt

SEQ ID NO: 81224 - DNA, 120 bp, Artificial Sequence
  ENSG00000082175_41 (sequence is synthesized)
tcttctcccatgctttatctccatcaattatcttcattacttttaaattttccacctttgcttcctactttgtgagatctctccctttactgactataacatagaagaatagaagtgtat

SEQ ID NO: 81225 - DNA, 120 bp, Artificial Sequence
  ENSG00000082175_42 (sequence is synthesized)
tttatgtgtcttaaggacaatactttagattccttgttctaagtttttaaactgaatgaatggaatattatttctctccctaagcaaaattccacaaaacaattatttcttatgtttatg

SEQ ID NO: 81226 - DNA, 120 bp, Artificial Sequence
  ENSG00000082175_43 (sequence is synthesized)
tagccttaaattgttttgtactgtaaacctcagcataaaaactttcttcatttctaatttcattcaacaaatattgattgaatacctggtattagcacaagaaaaatgtgctaataagcc

SEQ ID NO: 81227 - DNA, 120 bp, Artificial Sequence
  ENSG00000082175_44 (sequence is synthesized)
ttatgagaatttggagctgaagaaagacatataactcaggaaagttacagtccagtagtaggtataaattacagtgcctgataaataggcattttaatatttgtacactcaacgtatact

SEQ ID NO: 81228 - DNA, 120 bp, Artificial Sequence
  ENSG00000082175_45 (sequence is synthesized)
aggtaggtgcaaaacatttacatataattttactgatacccatgcagcacaaaggtactaactttaaatattaaataacacctttatgtgtcagtaattcatttgcattaaatcttattg

SEQ ID NO: 81229 - DNA, 120 bp, Artificial Sequence
  ENSG00000082175_46 (sequence is synthesized)
aaaaggctttcaatatattttccccacaaatgtcatcccaagaaaaaagtatttttaacatctcccaaatataatagttacaggaaatctacctctgtgagagtgacacctctcagaatg

SEQ ID NO: 81230 - DNA, 120 bp, Artificial Sequence
  ENSG00000082175_47 (sequence is synthesized)
aactgtgtgacacaagaaaatgaatgtaggtctatccaaaaaaaaccccaagaaacaaaaacaatattattagccctttatgcttaagtgatggactcagggaacagttgatgttgtgat

SEQ ID NO: 81231 - DNA, 120 bp, Artificial Sequence
  ENSG00000082175_48 (sequence is synthesized)
tgatcattttattatctgattcttgttactttgaattaaaccaatattttgatgatataaatcatttccaccagcatatatttaatttccataataactttaaaattttctaatttcact

SEQ ID NO: 81232 - DNA, 120 bp, Artificial Sequence
  ENSG00000082175_49 (sequence is synthesized)
tatgagggaatagaatgtggtggccacaggtttggcttttgttaaaatgtttgatatcttcgatgttgatctctgtctgcaatgtagatgtctaaacactaggatttaatatttaaggct

SEQ ID NO: 81233 - DNA, 120 bp, Artificial Sequence
  ENSG00000082175_50 (sequence is synthesized)
aagctttaaaaataaagtacctttttaaaaagaatatggcttcaccaaatggaaaatacctaatttctaaatctttttctctacaaagtcctatctactaatgtctccattactatttag

SEQ ID NO: 81234 - DNA, 120 bp, Artificial Sequence
  ENSG00000082175_51 (sequence is synthesized)
tcatcataaccattatcttcattttacatgtcgtgttctttctggtagctctaaaatgacactaaatcataagaagacaggttacatatcaggaaatacttgaaggttactgaaatagat

SEQ ID NO: 81235 - DNA, 120 bp, Artificial Sequence
  ENSG00000082175_52 (sequence is synthesized)
tcttgagttaatgaaaatattttctgtaaaaaggtttgaaaagccatttgagtctaaagcattatacctccattatcagtagttatgtgacaattgtgtgtgtgtttaatgtttaaagat

SEQ ID NO: 81236 - DNA, 120 bp, Artificial Sequence
  ENSG00000082175_53 (sequence is synthesized)
gtggcactttttaataaggcaatgctatgctattttttcccatttaacattaagataatttattgctatacagatgatatggaaatatgatgaacaatattttttttgccaaaactatgc

SEQ ID NO: 81237 - DNA, 120 bp, Artificial Sequence
  ENSG00000082175_54 (sequence is synthesized)
ggagataactgacataggactgtgccccccttctctgccacttactagctggatgagattaagcaagtcatttaactgctctgattaaacctgcctttcccaagtgctttgtaatgaata

SEQ ID NO: 81238 - DNA, 120 bp, Artificial Sequence
  ENSG00000082175_55 (sequence is synthesized)
gaaatggaaaccaaaaaaaacgtatacaggccttcagaaatagtaattgctactattttgttttcattaagccatagttctggctataattttatcaaactcaccagctatattctacag

SEQ ID NO: 81239 - DNA, 120 bp, Artificial Sequence
  ENSG00000082175_56 (sequence is synthesized)
tgaaagcaggattctagaaagtctcactgttttatttatgtcaccatgtgctatgatatatttggttgaattcatttgaaattagggctggaagtattcaagtaatttcttctgctgaaa

SEQ ID NO: 81240 - DNA, 120 bp, Artificial Sequence
  ENSG00000082175_57 (sequence is synthesized)
aaatacagtgttttgagtttagggcctgttttatcaaagttctaaagagcctatcactcttccattgtagacattttaaaataatgacactgattttaacatttttaagtgtctttttag

SEQ ID NO: 81241 - DNA, 120 bp, Artificial Sequence
  ENSG00000082175_58 (sequence is synthesized)
aacagagagcctgactagaacacagcccctccaaaaacccatgctcaaattatttttactatggcagcaattccacaaaagggaacaatgggtttagaaattacaatgaagtcatcaacc

SEQ ID NO: 81242 - DNA, 120 bp, Artificial Sequence
  ENSG00000082175_59 (sequence is synthesized)
caaaaaacatccctatccctaagaaggttatgatataaaatgcccacaagaaatctatgtctgctttaatctgtcttttattgctttggaaggatggctattacatttttagtttttgct

SEQ ID NO: 81243 - DNA, 120 bp, Artificial Sequence
  ENSG00000082175_60 (sequence is synthesized)
gtgaatacctgagcagtttctctcatccatacttatccttcacacatcagaagtcaggatagaatatgaatcattttaaaaacttttacaactccagagccatgtgcataagaagcattc

SEQ ID NO: 81244 - DNA, 120 bp, Artificial Sequence
  ENSG00000082175_61 (sequence is synthesized)
aaaacttgccaaaacatacattttttttcaaatttaaagatactctatttttgtattcaatagctcaacaactgtggtccccactgataaagtgaagtggacaaggagacaagtaatggc

SEQ ID NO: 81245 - DNA, 120 bp, Artificial Sequence
  ENSG00000082175_62 (sequence is synthesized)
ataagtttgtttttcccaaagtatgcctgttcaatagccattggatgtgggaaatttctacatctcttaaaattttacagaaaatacatagccagatagtctagcaaaagttcaccaagt

SEQ ID NO: 81246 - DNA, 120 bp, Artificial Sequence
  ENSG00000082175_63 (sequence is synthesized)
cctaaattgcttatccttacttcactaagtcatgaaatcattttaatgaaaagaacatcacctaggttttgtggtttctttttttcttattcatggctgagtgaaaacaacaatctctgt

SEQ ID NO: 81247 - DNA, 120 bp, Artificial Sequence
  ENSG00000082175_64 (sequence is synthesized)
ttctccctagcatctgtggactatttaatgtaccattattccacactctatggtccttactaaatacaaaattgaacaaaaagcagtaaaacaactgactcttcacccatattataaaat

SEQ ID NO: 81248 - DNA, 120 bp, Artificial Sequence
  ENSG00000082175_65 (sequence is synthesized)
ataatccaagccagattagtcaacatccataagatgaatccaagctgaactgggcctagattattgagttcaggttggatcacatccctatttattaataaacttaggaaagaaggcctt

SEQ ID NO: 81249 - DNA, 120 bp, Artificial Sequence
  ENSG00000082175_66 (sequence is synthesized)
acagaccatcagttagctggagctaatagaacctacacttctaaagttcggcctagaatcaatgtggccttaaaagctgaaaagaagcaggaaagaacagttttcttcaataatttgtcc

SEQ ID NO: 81250 - DNA, 120 bp, Artificial Sequence
  ENSG00000082175_67 (sequence is synthesized)
accctgtcactggagaaaatttaagaatttgggggtgttggtagtaagttaaacacagcagctgttcatggcagaaattattcaatacataccttctctgaatatcctataaccaaagca

SEQ ID NO: 81251 - DNA, 120 bp, Artificial Sequence
  ENSG00000082175_68 (sequence is synthesized)
aagaaaaacaccaaggggtttgttctcctccttggagttgacctcattccaaggcagagctcaggtcacaggcacaggggctgcgcccaagcttgtccgcagccttatgcagctgtggag

SEQ ID NO: 81252 - DNA, 120 bp, Artificial Sequence
  ENSG00000082175_69 (sequence is synthesized)
tctggaagactgttgcaggactgctggcctagtcccagaatgtcagcctcattttcgatttactggctcttgttgctgtatgtcatgctgaccttattgttaaacacaggtttgtttgct

SEQ ID NO: 81253 - DNA, 120 bp, Artificial Sequence
  ENSG00000082175_70 (sequence is synthesized)
ttttttccactcatggagacatgggagaggcattatttttaagctggttgaaagctttaaccgataaagcatttttagagaaatgtgaatcaggcagctaagaaagcatactctgtccat

SEQ ID NO: 81254 - DNA, 120 bp, Artificial Sequence
  ENSG00000082175_71 (sequence is synthesized)
tacggtaaagaaaatgcacagattattaactctgcagtgtggcattagtgtcctggtcaatattcggatagatatgaataaaatatttaaatggtattgtaaatagttttcaggacatat

SEQ ID NO: 81255 - DNA, 120 bp, Artificial Sequence
  ENSG00000082175_72 (sequence is synthesized)
gctatagcttatttttattatcttttgaaattgctcttaatacatcaaatcctgatgtattcaatttatcagatataaattattctaaatgaagcccagttaaatgtttttgtcttgtca

SEQ ID NO: 81256 - DNA, 120 bp, Artificial Sequence
  ENSG00000082175_73 (sequence is synthesized)
gttatatgttaagtttctgatctctttgtctatgacgtttactaatctgcatttttactgttatgaattattttagacagcagtggtttcaagctttttgccactaaaaataccttttat

SEQ ID NO: 81257 - DNA, 120 bp, Artificial Sequence
  ENSG00000082175_74 (sequence is synthesized)
tttctcctcccccagaaaagtctataccttgaagtatctatccaccaaactgtacttctattaagaaatagttattgtgttttcttaatgttttgttattcaaagacatatcaatgaaag

SEQ ID NO: 81258 - DNA, 120 bp, Artificial Sequence
  ENSG00000082175_75 (sequence is synthesized)
ctgctgagcagcatgaataacaattatatccacacagatttgatatattttgtgcagccttaacttgatagtataaaatgtcattgctttttaaataatagttagtcaatggacttctat

SEQ ID NO: 81259 - DNA, 120 bp, Artificial Sequence
  ENSG00000082175_76 (sequence is synthesized)
catagctttcctaaactaggttaagatccagagctttggggtcataatatattacatacaattaagttatctttttctaagggctttaaaattcatgagaataaccaaaaaaggtatgtg

SEQ ID NO: 81260 - DNA, 120 bp, Artificial Sequence
  ENSG00000082175_77 (sequence is synthesized)
gagagttaatacaaacataccatattcttgttgaaacagagatgtggctctgcttgttctccataaggtagaaatactttccagaatttgcctaaactagtaagccctgaatttgctatg

SEQ ID NO: 81261 - DNA, 120 bp, Artificial Sequence
  ENSG00000082175_78 (sequence is synthesized)
attagggataggaagagattttcacatggcagactttagaattcttcactttagccagtaaagtatctccttttgatcttagtattctgtgtattttaacttttctgagttgtgcatgtt

SEQ ID NO: 81262 - DNA, 120 bp, Artificial Sequence
  ENSG00000082175_79 (sequence is synthesized)
tataagaaaaatcagcacaaagggtttaagttaaagcctttttactgaaatttgaaagaaacagaagaaaatatcaaagttctttgtattttgagaggattaaatatgatttacaaaagt

SEQ ID NO: 81263 - DNA, 120 bp, Artificial Sequence
  ENSG00000082175_80 (sequence is synthesized)
tacatggagggctctctaaaacattaaattaattattttttgttgaaaagtcttactttaggcatcattttattcctcagcaactagctgtgaagcctttactgtgctgtatgccagtca

SEQ ID NO: 81264 - DNA, 120 bp, Artificial Sequence
  ENSG00000082175_81 (sequence is synthesized)
ctctgctagattgtggagattaccagtgttcccgtcttctccgagcttagagttggatggggaataaagacaggtaaacagatagctacaatattgtactgtgaatgcttatgctggagg

SEQ ID NO: 81265 - DNA, 120 bp, Artificial Sequence
  ENSG00000082175_82 (sequence is synthesized)
aagtacagggaactattggagcacctaagaggagcacctaccttgaatttaggggttagcagaggcatcctgaaaaaagtcaaagctaagccacaatctataagcagtttaggaattagc

SEQ ID NO: 81266 - DNA, 120 bp, Artificial Sequence
  ENSG00000082175_83 (sequence is synthesized)
agaacgtgcgtggtgaggagatgccaaaggcaagaagagaagagtattccaaacaggagggattccaaagagagaagagtatcccaaacaacatttgcacaaacctgatggggagagaga

SEQ ID NO: 81267 - DNA, 120 bp, Artificial Sequence
  ENSG00000082175_84 (sequence is synthesized)
atgtggggtggggatggatgatgagactgaagaagaaagccaggtctagataatcagtggccttgtacaccatgttaaagagtgtagacttgattctgttgtaaacaggaaagcagcaca

SEQ ID NO: 81268 - DNA, 120 bp, Artificial Sequence
  ENSG00000082175_85 (sequence is synthesized)
attcatatgaatattttagaagactcccactggaatatggagaataaagttggagatgactaatcctggaagcagggagaacatttttgaggaagttgcactattttggtgaaaatgatg

SEQ ID NO: 81269 - DNA, 120 bp, Artificial Sequence
  ENSG00000082175_86 (sequence is synthesized)
atcataaacatgaagaattgtaggtgatcatgacctcctctctaattttccagaagggttttggaagatataacataggaacattgacaggactgacgaaaggagatgaaatacaccata

SEQ ID NO: 81270 - DNA, 120 bp, Artificial Sequence
  ENSG00000082175_87 (sequence is synthesized)
taaattgtcaaacacaaggccagatgtctaattattttgcttatgtgttgaaattacaaatttttcatcaggaaaccaaaaactacaaaacttagttttcccaagtcccagaattctatc

SEQ ID NO: 81271 - DNA, 120 bp, Artificial Sequence
  ENSG00000082175_88 (sequence is synthesized)
tgtccaaacaatctgtaccactccacctatatccctacctttgcatgtctgtccaacctcaaagtccaggtctatacacacgggtaagactagagcagttcaagtttcagaaaatgagaa

SEQ ID NO: 81272 - DNA, 120 bp, Artificial Sequence
  ENSG00000082175_89 (sequence is synthesized)
agaggaactgagttgtgctgaacccatacaaaataaacacattctttgtatagattcttggaacctcgagaggaattcacctaactcataggtatttgatggtatgaatccatggctggg

SEQ ID NO: 81273 - DNA, 120 bp, Artificial Sequence
  ENSG00000082175_90 (sequence is synthesized)
ctcggcttttaaaaagccttatctgggattccttctatggaaccaagttccatcaaagcccatttaaaagcctacattaaaaacaaaattcttgctgcattgtatacaaataatgatgtc

SEQ ID NO: 81274 - DNA, 120 bp, Artificial Sequence
  ENSG00000082175_91 (sequence is synthesized)
atgatcaaataatcagatgccattatcaagtggaattacaaaatggtatacccactccaaaaaaaaaaaaaaagctaaattctcagtagaacattgtgacttcatgagccctccacagcc

SEQ ID NO: 81275 - DNA, 120 bp, Artificial Sequence
  ENSG00000082175_92 (sequence is synthesized)
ttggagctgaggagggagcactggtgagcagtaggttgaagagaaaacttggcgcttaataatctatccatgttttttcatctaaaagagccttctttttggattaccttattcaatttc

SEQ ID NO: 81276 - DNA, 120 bp, Artificial Sequence
  ENSG00000082175_93 (sequence is synthesized)
catcaaggaaattgttagttccactaaccagacagcagctgggaaggcagaagcttactgtatgtacatggtagctgtgggaaggaggtttctttctccaggtcctcactggccatacac

SEQ ID NO: 81277 - DNA, 120 bp, Artificial Sequence
  ENSG00000082175_94 (sequence is synthesized)
cagtcccttgttagttatgcctggtcatagacccccgttgctatcatctcatatttaagtctttggcttgtgaatttatctattctttcagcttcagcactgcagagtgctgggactttg

SEQ ID NO: 81278 - DNA, 120 bp, Artificial Sequence
  ENSG00000082175_95 (sequence is synthesized)
ctaacttccatttcttgctggcttagcacattcctcataggcccagctcttttctcatctggccctgctgtggagtcaccttgccccttcaggagagccatggcttaccactgcctgcta

SEQ ID NO: 81279 - DNA, 120 bp, Artificial Sequence
  ENSG00000082175_96 (sequence is synthesized)
agcctccactcagctgccaccacactaaatccaagcttctctaagatgttgcagactttacaggcaagcataaaaggcttgatcttcctggacttccctttacttgtctgaatctcacct

SEQ ID NO: 81280 - DNA, 120 bp, Artificial Sequence
  ENSG00000082175_97 (sequence is synthesized)
ccttcaactttcagtctcagaatgtaggcatttgtcctctttgccctacatcttccttcttctgaatcatgaaagcctctcacttcctcttgctatgtgctggaggcttctgtcaggttt

SEQ ID NO: 81281 - DNA, 120 bp, Artificial Sequence
  ENSG00000082175_98 (sequence is synthesized)
tagaatgagttctcatctagtcctagtagcttttgatgcttaagtccaccttttaaggatacctttgagatttagaccatgtttttcgcttgagaaagccctaatctccagacttgcctt

SEQ ID NO: 81282 - DNA, 120 bp, Artificial Sequence
  ENSG00000082175_99 (sequence is synthesized)
tctgtggatttcaaagaccaactgaggaagtcaaaagctgaatgttgactttctttgaacatttccgctataacaattccaattctcctcagagcaatatgcctgcctccaactgaccag

SEQ ID NO: 81283 - DNA, 120 bp, Artificial Sequence
  ENSG00000082175_100 (sequence is synthesized)
gagaaaggtccagtgccaaagagaaaaacacaaagattaattatttcagttgagcacatactttcaaagtggtttgggtattcatatgaggttttctgtcaagagggtgagactcttcat

SEQ ID NO: 81284 - DNA, 120 bp, Artificial Sequence
  ENSG00000082175_101 (sequence is synthesized)
ctatccatgtgtgcctgacagttctcctggcactggctggtaacagatgcaaaactgtaaaaattaagtgatcatgtattttaacgatatcatcacatacttattttctatgtaatgttt

SEQ ID NO: 81285 - DNA, 120 bp, Artificial Sequence
  ENSG00000082175_102 (sequence is synthesized)
taaatttcccctaacatactttgactgttttgcacatggtagatattcacatttttttgtgttgaagttgatgcaatcttcaaagttatctaccccgttgcttattagtaaaactagtgt

SEQ ID NO: 81286 - DNA, 120 bp, Artificial Sequence
  ENSG00000082175_103 (sequence is synthesized)
taatacttggcaagagatgcagggaatctttctcatgactcacgccctatttagttattaatgctactaccctattttgagtaagtagtaggtccctaagtacattgtccagagttatac

SEQ ID NO: 81287 - DNA, 120 bp, Artificial Sequence
  ENSG00000082175_104 (sequence is synthesized)
ttttaaagatatttagccccatatacttcttgaatctaaagtcatacaccttgctcctcatttctgagtgggaaagacatttgagagtatgttgacaattgttctgaaggtttttgccaa

SEQ ID NO: 81288 - DNA, 120 bp, Artificial Sequence
  ENSG00000082175_105 (sequence is synthesized)
gaaggtgaaactgtcctttcatctgtgtatgcctggggctgggtccctggcagtgatggggtgacaatgcaaagctgtaaaaactaggtgctagtgggcacctaatatcatcatcatata

SEQ ID NO: 81289 - DNA, 120 bp, Artificial Sequence
  ENSG00000082175_106 (sequence is synthesized)
cttattttcaagctaatatgcaaaatcccatctctgtttttaaactaagtgtagatttcagagaaaatattttgtggttcacataagaaaacagtctactcagcttgacaagtgttttat

SEQ ID NO: 81290 - DNA, 120 bp, Artificial Sequence
  ENSG00000082175_107 (sequence is synthesized)
gttaaattggctggtggtttgaaatgaatcatcttcacataatgttttctttaaaaatattgtgaatttaactctaattcttgttattctgtgtgataataaagaataaactaatttcta

SEQ ID NO: 81291 - DNA, 120 bp, Artificial Sequence
  ENSG00000082175_108 (sequence is synthesized)
atttctataactttttaaatgttacatgtaaattttactttgtatgattttctcagattaatacttgtatgttaaaagtgtttggatcatgctgctcagactttttattgtgtttttttt

SEQ ID NO: 81292 - DNA, 120 bp, Artificial Sequence
  ENSG00000082175_109 (sequence is synthesized)
tcattttcaatatagaccactcaaatattcttttacaagtatttgtataatgtgagggtaatttaatagctgatagaaattatggtacatttcctgaatatgttctaaaatatttgtgcc

SEQ ID NO: 81293 - DNA, 120 bp, Artificial Sequence
  ENSG00000082175_110 (sequence is synthesized)
aagtataatcctttttctttatgacaataccctgagttcagaaatctcagagacaaatgtttacagagaccaggtaaataagtagctagagtgacaagacttaagaaaagagaccattgg

SEQ ID NO: 81294 - DNA, 120 bp, Artificial Sequence
  ENSG00000082175_111 (sequence is synthesized)
cgtaccaccagtttgtggagggaactggaaaaactggaatacacatgccccatccaaaagcaaccattgcaactaaactttaacagattgttgccacctaagtaattcacggatggtctc

SEQ ID NO: 81295 - DNA, 120 bp, Artificial Sequence
  ENSG00000082175_112 (sequence is synthesized)
ataattctggtcagcattgtctgagccaaacaaaatgtatctatgggcatgatcagatactagagccagcagattgcaacctctgcttagataattgcaggtatcagccttcccttggct

SEQ ID NO: 81296 - DNA, 120 bp, Artificial Sequence
  ENSG00000082175_113 (sequence is synthesized)
aaacagctacttcatactgataagtagcccttgcctggcacaaagcaggtggggctgaatccagcctgatatcacatcaccacaactttctctaattctcctcaaggcgtctgtgaacta

SEQ ID NO: 81297 - DNA, 120 bp, Artificial Sequence
  ENSG00000082175_114 (sequence is synthesized)
ccagcagcccaaataagcatccttttctccttcaatcatttctcataaagcagattctactcatctcaccatccatctttttcccctaacatatcagaattcatcaaagtagaaactcca

SEQ ID NO: 81298 - DNA, 120 bp, Artificial Sequence
  ENSG00000082175_115 (sequence is synthesized)
gaaatcatccagaaatacaaatgtgatctgaccagcacgggtataaactttctctttccttaatttagaaaaaggattattaattttgagtcttagatctcataaaagtagagctggatt

SEQ ID NO: 81299 - DNA, 120 bp, Artificial Sequence
  ENSG00000082175_116 (sequence is synthesized)
gattttaagggatcaatgaacctactgaaattgtataaaaagattttgtggggctggcaaacaaatgcttttcttttaacatattcttaaaagaacaaaacctcaaagaagatttaacaa

SEQ ID NO: 81300 - DNA, 120 bp, Artificial Sequence
  ENSG00000082175_117 (sequence is synthesized)
ccactatagactaagtttcaattaatgtagtctgtagcattagattttggaaggctgttctatcagaatatggaccaatactgagcgtagtcgctactaaaactctttgtctttttattc

SEQ ID NO: 81301 - DNA, 120 bp, Artificial Sequence
  ENSG00000082175_118 (sequence is synthesized)
atatcttctcctaaaaagctccatgacccctgcagaatactggtataattacccacacctcacccacccagtgattgttgatgtaactaattatttaatccaagtctgaggcctaaattt

SEQ ID NO: 81302 - DNA, 120 bp, Artificial Sequence
  ENSG00000082175_119 (sequence is synthesized)
tattctatttcattcgattgatgctaaaatgcataatgctatgattctaagacttaggaaaaataatactatactgggatatggagtttatatatatttacatgaatttcttttttttct

SEQ ID NO: 81303 - DNA, 120 bp, Artificial Sequence
  ENSG00000082196_0 (sequence is synthesized)
agctccagtcctggcatctgcccgaggagaccacgctcctggagctctgctgtcttctcagggagactctgaggctctgttgagaatcatgctttggaggcagctcatctattggcaact

SEQ ID NO: 81304 - DNA, 120 bp, Artificial Sequence
  ENSG00000082196_1 (sequence is synthesized)
gctggctttgtttttcctccctttttgcctgtgtcaagatgaatacatggagtctccacaaaccggaggactacccccagactgcagtaagtgttgtcatggagactacagctttcgagg

SEQ ID NO: 81305 - DNA, 120 bp, Artificial Sequence
  ENSG00000082196_2 (sequence is synthesized)
ctaccaaggcccccctgggccaccgggccctcctggcattccaggaaaccatggaaacaatggcaacaatggagccactggtcatgaaggagccaaaggtgagaagggcgacaaaggtga

SEQ ID NO: 81306 - DNA, 120 bp, Artificial Sequence
  ENSG00000082196_3 (sequence is synthesized)
cctggggcctcgaggggagcgggggcagcatggccccaaaggagagaagggctacccggggattccaccagaacttcagattgcattcatggcttctctggcaacccacttcagcaatca

SEQ ID NO: 81307 - DNA, 120 bp, Artificial Sequence
  ENSG00000082196_4 (sequence is synthesized)
gaacagtgggattatcttcagcagtgttgagaccaacattggaaacttctttgatgtcatgactggtagatttggggccccagtatcaggtgtgtatttcttcaccttcagcatgatgaa

SEQ ID NO: 81308 - DNA, 120 bp, Artificial Sequence
  ENSG00000082196_5 (sequence is synthesized)
gcatgaggatgttgaggaagtgtatgtgtaccttatgcacaatggcaacacagtcttcagcatgtacagctatgaaatgaagggcaaatcagatacatccagcaatcatgctgtgctgaa

SEQ ID NO: 81309 - DNA, 120 bp, Artificial Sequence
  ENSG00000082196_6 (sequence is synthesized)
gctagccaaaggggatgaggtttggctgcgaatgggcaatggcgctctccatggggaccaccaacgcttctccacctttgcaggattcctgctctttgaaactaagtaaatatatgacta

SEQ ID NO: 81310 - DNA, 120 bp, Artificial Sequence
  ENSG00000082196_7 (sequence is synthesized)
gaatagctccactttggggaagacttgtagctgagctgatttgttacgatctgaggaacattaaagttgagggttttacattgctgtattcaaaaaattattggttgcaatgttgttcac

SEQ ID NO: 81311 - DNA, 120 bp, Artificial Sequence
  ENSG00000082196_8 (sequence is synthesized)
cagaagaatcaaccacaaaatagtcttctcagatgaccttgactaatatactcagcatctttatcactctttccttggcacctaaaagataattctcctctgacgcaggttggaaatatt

SEQ ID NO: 81312 - DNA, 120 bp, Artificial Sequence
  ENSG00000082196_9 (sequence is synthesized)
tttttctatcacagaagtcatttgcaaagaattttgactactctgcttttaatttaataccagttttcaggaacccctgaagttttaagttcattattctttataacatttgagagaatc

SEQ ID NO: 81313 - DNA, 120 bp, Artificial Sequence
  ENSG00000082196_10 (sequence is synthesized)
ggatgtagtgatatgacagggctggggcaagaacaggggcactagctgccttattagctaatttagtgccctccgtgttcagcttagcctttgaccctttccttttgatccacaaaatac

SEQ ID NO: 81314 - DNA, 120 bp, Artificial Sequence
  ENSG00000082196_11 (sequence is synthesized)
attaaaactctgaattcacatacaatgctattttaaagtcaatagattttagctataaagtgcttgaccagtaatgtggttgtaattttgtgtatgttcccccacatcgcccccaacttc

SEQ ID NO: 81315 - DNA, 120 bp, Artificial Sequence
  ENSG00000082196_12 (sequence is synthesized)
ggatgtggggtcaggaggttgaggttcactattaacaaatgtcataaatatctcatagaggtacagtgccaatagatattcaaatgttgcatgttgaccagagggattttatatctgaag

SEQ ID NO: 81316 - DNA, 120 bp, Artificial Sequence
  ENSG00000082196_13 (sequence is synthesized)
aacatacactattaataaataccttagagaaagattttgacctggctttagataaaactgtggcaagaaaaatgtaatgagcaatatatggaaataaacacacctttgttaaagatactt

SEQ ID NO: 81317 - DNA, 120 bp, Artificial Sequence
  ENSG00000082196_14 (sequence is synthesized)
tctaaacttgtgtttaataaactttaatagtcatagaattgtaaatcactatggttaacagaaagtgaaaatattttcatgcagatgatgtgaacagccatgtgaataggtgacttgggc

SEQ ID NO: 81318 - DNA, 120 bp, Artificial Sequence
  ENSG00000082196_15 (sequence is synthesized)
acacagcagggtcatatgacttcagaaaacttcgcttttcagttattccattgttataatgtcaaccctttaagacattgatgtttagagggctcacaaataaaatctgaatacctgtaa

SEQ ID NO: 81319 - DNA, 120 bp, Artificial Sequence
  ENSG00000082196_16 (sequence is synthesized)
ttttggcttttgggaagtcatggggaaaagaagtaaagctgagggtggcgaaatacctttgctaaacccagagacactgcacctgaatcctgctcagtgttttgtaggcaaccaactgcc

SEQ ID NO: 81320 - DNA, 120 bp, Artificial Sequence
  ENSG00000082196_17 (sequence is synthesized)
ttctgccactggtatccggaaggggaaatgagttaccttaagtgggccaaagtggggaaatactaacagtacagctagaaaccaagagctgtcgtgaaagccctgaatgggttcccactg

SEQ ID NO: 81321 - DNA, 120 bp, Artificial Sequence
  ENSG00000082196_18 (sequence is synthesized)
ctatttcagacaaaactgatgcagttaagcctgaatttcctggcaagcacaagggtagatttttccaaaaggctttttagactgcaaatacacagcctttccatgtctaatcacaaaagc

SEQ ID NO: 81322 - DNA, 120 bp, Artificial Sequence
  ENSG00000082196_19 (sequence is synthesized)
aaactgctggacacatgctctctgttcccagctggttgtgtatgttttcttcacacttcaacagaaacgtgccaaggtgtgacatttatgaatttcgccaactgggaactgtgcacacaa

SEQ ID NO: 81323 - DNA, 120 bp, Artificial Sequence
  ENSG00000082196_20 (sequence is synthesized)
atcgttcttgcttgtggtgtgggaaaatgatgaatgggggctgttctgcctggggaggagggctgctgtcactctggcatgcctacagccttatttattacacaccaaagtataaaacca

SEQ ID NO: 81324 - DNA, 120 bp, Artificial Sequence
  ENSG00000082196_21 (sequence is synthesized)
agcagactggccgtagcggctccaggagggagaaagtgagagagcggagccatcctaaaactgggactgtggataataacacttctacagacctaaaatccctgagaccagatgagctac

SEQ ID NO: 81325 - DNA, 120 bp, Artificial Sequence
  ENSG00000082196_22 (sequence is synthesized)
tttcttaagtcatggagcatcgttgttcaaccacaaacatctctgcaccttggtaacacgagttctgtggtacatgaggatgatcgctaacctatgcccaggaacaacgcctactttgcc

SEQ ID NO: 81326 - DNA, 120 bp, Artificial Sequence
  ENSG00000082196_23 (sequence is synthesized)
ctaagcactttgtcagggtacaaggcagtgagatacagttaaaatgaggtaggctccttcccttaaagacttttaagtcttattcgggatacacagtgtacacattgaaagcacttggaa

SEQ ID NO: 81327 - DNA, 120 bp, Artificial Sequence
  ENSG00000082196_24 (sequence is synthesized)
ggggagtagatatagggacattcctgcaaattaaggccaaggagagacaccatactacaaagaatatcaataaaagacatgtgaaggcagttggcaaatctccaggtatctccaggtcct

SEQ ID NO: 81328 - DNA, 120 bp, Artificial Sequence
  ENSG00000082196_25 (sequence is synthesized)
ctccatagattgatgtttattcccaatcttgctgttatgtataatgtttaacaaactaatctgcataaaaacttgacttctttaagataaattgcctatttattgaccaataattctttc

SEQ ID NO: 81329 - DNA, 120 bp, Artificial Sequence
  ENSG00000082196_26 (sequence is synthesized)
ggtaaaccatcctcggtacatctcctggtggctttccaacctgcctgaccaaaaggggccaggaatcaggatgttcgagcgcttcctcaagtcttccccaatcctgagtaaatctgagtc

SEQ ID NO: 81330 - DNA, 120 bp, Artificial Sequence
  ENSG00000082196_27 (sequence is synthesized)
tcagtttgttcatctacatcacaggatgtttgcataaggcccatactgtccaaaaggaggacttagatactattcttagggaggagagacatttatgaagggtgaaatctaagtccctca

SEQ ID NO: 81331 - DNA, 120 bp, Artificial Sequence
  ENSG00000082196_28 (sequence is synthesized)
agaacttcaggtaaaccatcctcggtacatctcctggtggctttccaacctgcctgaccaaaaggggccaggaatcaggatgttcgagcgcttcctcaagtcttccccaatcctgaattg

SEQ ID NO: 81332 - DNA, 120 bp, Artificial Sequence
  ENSG00000082212_0 (sequence is synthesized)
ctctcggccgctcttcgggccgcctctgcgtgtggggccgcccgcgccagtgtgagcctgagctgacggcggctccgggaggctcgcagaaggggagggccgggcggcgcgggagctgag

SEQ ID NO: 81333 - DNA, 120 bp, Artificial Sequence
  ENSG00000082212_1 (sequence is synthesized)
catcgccagggcgggcggcagggcgcggcctctccgccgggtgtaccacctgtcgcggcgcgagacctctggtgaaagaaaagatgttgtcccggttaagagtagtttccaccacttgta

SEQ ID NO: 81334 - DNA, 120 bp, Artificial Sequence
  ENSG00000082212_2 (sequence is synthesized)
ctttggcatgtcgacatttgcacataaaagaaaaaggcaagccacttatgctgaacccaagaacaaacaagggaatggcatttactttacaagaacgacaaatgcttggtcttcaaggac

SEQ ID NO: 81335 - DNA, 120 bp, Artificial Sequence
  ENSG00000082212_3 (sequence is synthesized)
ttctacctcccaaaatagagacacaagatattcaagccttacgatttcatagaaacttgaagaaaatgactagccctttggaaaaatatatctacataatgggaatacaagaaagaaatg

SEQ ID NO: 81336 - DNA, 120 bp, Artificial Sequence
  ENSG00000082212_4 (sequence is synthesized)
agaaattgttttatagaatactgcaagatgacattgagagtttaatgccaattgtatatacaccgacggttggtcttgcctgctcccagtatggacacatctttagaagacctaagggat

SEQ ID NO: 81337 - DNA, 120 bp, Artificial Sequence
  ENSG00000082212_5 (sequence is synthesized)
tatttatttcgatctcagacagaggtcatgttagatcaattgtggataactggccagaaaatcatgttaaggctgttgtagtgactgatggagagagaattctgggtcttggagatctgg

SEQ ID NO: 81338 - DNA, 120 bp, Artificial Sequence
  ENSG00000082212_6 (sequence is synthesized)
gtgtctatggaatgggaattccagtaggaaaactttgtttgtatacagcttgtgcaggaatacggcctgatagatgcctgccagtgtgtattgatgtgggaactgataatatcgcactct

SEQ ID NO: 81339 - DNA, 120 bp, Artificial Sequence
  ENSG00000082212_7 (sequence is synthesized)
taaaagacccattttacatgggcttgtaccagaaacgagatcgcacacaacagtatgatgacctgattgatgagtttatgaaagctattactgacagatatggccggaacacactcattc

SEQ ID NO: 81340 - DNA, 120 bp, Artificial Sequence
  ENSG00000082212_8 (sequence is synthesized)
agttcgaagactttggaaatcataatgcattcaggttcttgagaaagtaccgagaaaaatattgtactttcaatgatgatattcaagggacagctgcagtagctctagcaggtcttcttg

SEQ ID NO: 81341 - DNA, 120 bp, Artificial Sequence
  ENSG00000082212_9 (sequence is synthesized)
cagcacaaaaagttattagtaaaccaatctccgaacacaaaatcttattccttggagcaggagaggctgctcttggaattgcaaatcttatagttatgtctatggtagaaaatggcctgt

SEQ ID NO: 81342 - DNA, 120 bp, Artificial Sequence
  ENSG00000082212_10 (sequence is synthesized)
cagaacaagaggcacaaaagaaaatctggatgtttgacaagtatggtttattagttaagggacggaaagcaaaaatagatagttatcaggaaccatttactcactcagccccagagagca

SEQ ID NO: 81343 - DNA, 120 bp, Artificial Sequence
  ENSG00000082212_11 (sequence is synthesized)
tacctgatacttttgaagatgcagtgaatatactgaagccttcaactataattggagttgcaggtgctggccgtcttttcactcctgatgtaatcagagccatggcctctatcaatgaaa

SEQ ID NO: 81344 - DNA, 120 bp, Artificial Sequence
  ENSG00000082212_12 (sequence is synthesized)
ggcctgtaatatttgcattaagtaatcctacagcacaggcagagtgcacggctgaagaagcatatacacttacagagggcaggtgtttgtttgccagtggcagtccatttgggccagtga

SEQ ID NO: 81345 - DNA, 120 bp, Artificial Sequence
  ENSG00000082212_13 (sequence is synthesized)
aacttacagatgggcgagtctttacaccaggtcaaggaaacaatgtttatatttttccaggtgtggctttagctgttattctctgtaacacccggcatattagtgacagtgttttcctag

SEQ ID NO: 81346 - DNA, 120 bp, Artificial Sequence
  ENSG00000082212_14 (sequence is synthesized)
aagctgcaaaggccctgacaagccaattgacagatgaagagctagcccaagggagactttacccaccgcttgctaatattcaggaagtttctattaacattgctattaaagttacagaat

SEQ ID NO: 81347 - DNA, 120 bp, Artificial Sequence
  ENSG00000082212_15 (sequence is synthesized)
acctatatgctaataaaatggctttccgatacccagaacctgaagacaaggccaaatatgttaaagaaagaacatggcggagtgaatatgattccctgctgccagatgtgtatgaatggc

SEQ ID NO: 81348 - DNA, 120 bp, Artificial Sequence
  ENSG00000082212_16 (sequence is synthesized)
cagaatctgcatcaagccctcctgtgataacagaatagaagcactcccctgataaatactttctgtgctccagggaaccccttttttcagacaagaagagataatgtcttcagttttatg

SEQ ID NO: 81349 - DNA, 120 bp, Artificial Sequence
  ENSG00000082212_17 (sequence is synthesized)
gtgttttctgtgttttgttctccctgaccactttggttgatgtattttttccatgcgtctccacatctgttggggtagacgtgttgattgattgcattgcccaccagcaccctacagtca

SEQ ID NO: 81350 - DNA, 120 bp, Artificial Sequence
  ENSG00000082212_18 (sequence is synthesized)
gatagttgtgatgctttaattctaacatacagcccgtaccacatccaggagatgtaaaaagtgtgtttgtgaatgtcttcacttgtactctaattcagacttgccaaagtatttgctatt

SEQ ID NO: 81351 - DNA, 120 bp, Artificial Sequence
  ENSG00000082212_19 (sequence is synthesized)
tactattatgggtaatactcttctctggcctagttcttacagagctactaaaatagaaatttacttttatggatagaagtacagaattttgagaagaaactaaattttcaccaaatttta

SEQ ID NO: 81352 - DNA, 120 bp, Artificial Sequence
  ENSG00000082212_20 (sequence is synthesized)
aggaaaaattgtcattatctaaaaatgttcttatatatctgcttcatcttaccttcatactctgaaattccctatagcagacagagctagggaaatattaaaaatttaccctatttattt

SEQ ID NO: 81353 - DNA, 120 bp, Artificial Sequence
  ENSG00000082212_21 (sequence is synthesized)
tctggaactaaatcaagccttaactataacattatgagagtaatgggaactactgctggctttaagtaaataaaagtcattgttttcaacagtgtataaaaatcatagtgtaaccttttt

SEQ ID NO: 81354 - DNA, 120 bp, Artificial Sequence
  ENSG00000082212_22 (sequence is synthesized)
atttaataaatatcttacatttaattgcttcagttatgctatcttattgcccaactagaaatttagatttgcttatgaaaaacacatatttttgttacttctagatgattctaggaggga

SEQ ID NO: 81355 - DNA, 120 bp, Artificial Sequence
  ENSG00000082212_23 (sequence is synthesized)
gtataagatacctaatcatatgggaacatcacgtgactttttaaatctaaattagtcatgcttcacatcaaaatgagtcatatttaactggagaaactatgcccttattccagaactgat

SEQ ID NO: 81356 - DNA, 120 bp, Artificial Sequence
  ENSG00000082212_24 (sequence is synthesized)
gctctttattgcttgagataattttggaatgttactatgatactgtttctttgaatatcattagtagtgacaactctttctccattgaaggcagacttaatttttttaaaccaccaacat

SEQ ID NO: 81357 - DNA, 120 bp, Artificial Sequence
  ENSG00000082212_25 (sequence is synthesized)
taatttagagctaaatggggatgaataaggttggtgttcatctgggaaatgccttttttaatcccagtaaaatgggtaataatggctatccagaacagttttcttgtgtggcttgcatat

SEQ ID NO: 81358 - DNA, 120 bp, Artificial Sequence
  ENSG00000082212_26 (sequence is synthesized)
tgaagaattctaaaggaaaatatatctgcctaccatgcttgctcttagggaagaaaacttaaatgctcattctaggatagtaacaacaacagataattcatcgataatatgagcatgcac

SEQ ID NO: 81359 - DNA, 120 bp, Artificial Sequence
  ENSG00000082212_27 (sequence is synthesized)
ataattcatcgataatatgagcatgcacagtatttgatattgctctgtaggaaaaaagagacttcatttttttcatcttctgcctatgaatacaaattgattcttttttttttttttttt

SEQ ID NO: 81360 - DNA, 88 bp, Artificial Sequence
  ENSG00000082212_28 (sequence is synthesized)
gtcgcccagtctggagtgtagtggcatgatctctgcaacctctgcctcctcggttcaggcgattcttctgccttagcctcccaagtag

SEQ ID NO: 81361 - DNA, 86 bp, Artificial Sequence
  ENSG00000082212_29 (sequence is synthesized)
aattcatcataattctgaatataatttaataattttaaaatggtcgcaatggcattgccatttggagtatgggaaaatgcagttgg

SEQ ID NO: 81362 - DNA, 120 bp, Artificial Sequence
  ENSG00000082212_30 (sequence is synthesized)
caatggcattgccatttggagtatgggaaaatgcagttggttaattcattgaacagattagtaaagtcagaagtctttttcataacatacggtcacaattcctttcttttaattaaagac

SEQ ID NO: 81363 - DNA, 120 bp, Artificial Sequence
  ENSG00000082212_31 (sequence is synthesized)
aaaaggtttatgggttttggtttgtttgttttagatatggggttttgctatgtcacccttgctggagggcggtggctgttcacaggcgtgggtcatagagcactgcagcctggaactcct

SEQ ID NO: 81364 - DNA, 120 bp, Artificial Sequence
  ENSG00000082212_32 (sequence is synthesized)
gggttcaagctctcctcctgcctcagcctcctgagcagcttggactaaaggtgtgcaccaccgcacctggctgagaggcttctgtttttcatgttccctttatcaaaacaaaatcacgcc

SEQ ID NO: 81365 - DNA, 120 bp, Artificial Sequence
  ENSG00000082212_33 (sequence is synthesized)
taaacatactctctgtgtgaaatcttgattttagttcaacctaagaaatataataaatataaacctgtttcttgcttagtgtttattgaaggcaggaacgtatgctgaattaaagtaatt

SEQ ID NO: 81366 - DNA, 120 bp, Artificial Sequence
  ENSG00000082212_34 (sequence is synthesized)
ggtacagtcttcatggaagttattaagtattttaaggaaaaaaataggctaaatggcatatagcctgcttaaataaaataattctatttttttaaaaagctcccaattgtcattgttatt

SEQ ID NO: 81367 - DNA, 120 bp, Artificial Sequence
  ENSG00000082212_35 (sequence is synthesized)
taccagtcaatctttcaacaagtatcaattattggatgtaaattaaagtaaaattgcttaatatttaagctaagaatacaggaaggactatgagcattgaggaaatcgggggaggccaga

SEQ ID NO: 81368 - DNA, 120 bp, Artificial Sequence
  ENSG00000082212_36 (sequence is synthesized)
atggcatcaagctggaaaagaaattaaaacattaccttcgatgagactttacctagcaagaaggtaattattttgaataacagcaatagagaatcttttattttgaattgagaagaaatt

SEQ ID NO: 81369 - DNA, 120 bp, Artificial Sequence
  ENSG00000082212_37 (sequence is synthesized)
ctgatgattagagtgtcagtaagtagtaggaaaaggtaagaatacatgtgtttctaatctcccaccaccacctgttgtatggaacaaattggattactagcaagggtaaggtttattgac

SEQ ID NO: 81370 - DNA, 120 bp, Artificial Sequence
  ENSG00000082212_38 (sequence is synthesized)
aatgagaagttttagtccaagattttagttaaaatattttaaaattttttgattcataaccaagaagttgcctcagatcactgtgaagctttaaaatgcaggtgcctttgctcctcctcc

SEQ ID NO: 81371 - DNA, 120 bp, Artificial Sequence
  ENSG00000082212_39 (sequence is synthesized)
ctccaggcccccgggggcagagccctggctggtgtctcttcaggaggacccctgacacaccgattctgccctcacaatcactgccttaaagcaggcagcagaatcttttggagaactaac

SEQ ID NO: 81372 - DNA, 82 bp, Artificial Sequence
  ENSG00000082212_40 (sequence is synthesized)
ctgccttaaagcaggcagcagaatcttttggagaactaacaagattctgatgctgatgcatagggcctggggtggggcctca

SEQ ID NO: 81373 - DNA, 120 bp, Artificial Sequence
  ENSG00000082212_41 (sequence is synthesized)
tgcacccagccaagaatgtccacttctgacaagctcccaggtgatgcctatgctgctggtacagtgaacaacatgctgagaggcattgctccaggatactgcatgtagtgagcagttctt

SEQ ID NO: 81374 - DNA, 120 bp, Artificial Sequence
  ENSG00000082212_42 (sequence is synthesized)
tagcgtttatgtgtcatatacttcaagttacatgaaaaagatcaactgaaattatgttcttacacagaatagttttcatctagttttattatgtttttacaggctgtttacaagaacaaa

SEQ ID NO: 81375 - DNA, 120 bp, Artificial Sequence
  ENSG00000082212_43 (sequence is synthesized)
agaacaaaaatagagaatttttgaacatatttttctgaaaacataaaaactagagtactctttaattctaaattatagatttgtagcatacttagtaaacttagtaaccaattttcattt

SEQ ID NO: 81376 - DNA, 120 bp, Artificial Sequence
  ENSG00000082212_44 (sequence is synthesized)
ttagctatcaaatggacatttatttctcttagttttcttatgacatgacttgccttatatcctttgtcctttttctgtaacttgtcagcctctggagaaataggattttacatttttgca

SEQ ID NO: 81377 - DNA, 120 bp, Artificial Sequence
  ENSG00000082212_45 (sequence is synthesized)
aatgagttgccaatgaattaagatcaaaacgtcattattaaggagtatgaagcattatttactggctctcagataacagaaaacccaaaagggatggtggcggagtgaagaaagccttgc

SEQ ID NO: 81378 - DNA, 120 bp, Artificial Sequence
  ENSG00000082212_46 (sequence is synthesized)
cttgggaaaaatacttcaaatgctcccatagttttttttcctcaagcccagtcagtatccttcaaggataactttttcataccttttttttggtttgtttgtttctgctagctttatgac

SEQ ID NO: 81379 - DNA, 120 bp, Artificial Sequence
  ENSG00000082212_47 (sequence is synthesized)
agaggttataatattcttttctcctctcttctttgacgtgttacgttgtctttttttttttttttttaacttcttcatactcttaaaaagctccagaatggccaggcgcagtggctcacg

SEQ ID NO: 81380 - DNA, 120 bp, Artificial Sequence
  ENSG00000082212_48 (sequence is synthesized)
aaaaaaaaaaaaaaaaaaaaaatctccagggttctgttgaattcaccaaaatggggtcagctctggtgagcctatgtaatactcgagaacattaatataaacccatagctctttactggg

SEQ ID NO: 81381 - DNA, 120 bp, Artificial Sequence
  ENSG00000082212_49 (sequence is synthesized)
ataaacccatagctctttactgggcttccatttaaagggaagtcctaagaatgaaatggcaccagcatcctgtttccatccaagacaagaccacacgtgttcaggtgccatgtattcata

SEQ ID NO: 81382 - DNA, 120 bp, Artificial Sequence
  ENSG00000082212_50 (sequence is synthesized)
tagctctcaactgattggtgatttgcactttgtgcatctaattattaaaatgaaactctctacaggtgagctgaagtaacatacttcatatttaaaaagttcacagcaatttgaccatag

SEQ ID NO: 81383 - DNA, 120 bp, Artificial Sequence
  ENSG00000082212_51 (sequence is synthesized)
aaaactttctcatctgaaatcagggtaagtttttttaatgtaagcagagaaaaaaataaagcagtgttttatttcaaatttcagtaagttcaggtgggcctaattaagacatgactatta

SEQ ID NO: 81384 - DNA, 120 bp, Artificial Sequence
  ENSG00000082212_52 (sequence is synthesized)
ttacaaatcctattcttgccagaagttacttagatagattagtgattagattttaaaaacattattttcctttcttgaataaggaaaattgtgcatctcaaagagaaaagtaaatatgga

SEQ ID NO: 81385 - DNA, 120 bp, Artificial Sequence
  ENSG00000082212_53 (sequence is synthesized)
aatatgttcatagttcagttgcataaaatagacacattaagtcaagtgatttgaatgcttagtgtcttttggtaaacagcattttgtcaacaaacttttcatatggctatagaatcttgt

SEQ ID NO: 81386 - DNA, 120 bp, Artificial Sequence
  ENSG00000082212_54 (sequence is synthesized)
tttttccaaataaaaactttgcaattgggagttattcctccattcagcacactttttaatgttaagactaggggaaacttgtgggtatatattcagtggttttcaggattttcttttatg

SEQ ID NO: 81387 - DNA, 120 bp, Artificial Sequence
  ENSG00000082212_55 (sequence is synthesized)
ttctagaaaagtaatttttcctttcctagttttaagtatatattcaagcaaatcgttgattcctatacagccattggattatcaccaacacatttggtatatacagtgggccgataatga

SEQ ID NO: 81388 - DNA, 120 bp, Artificial Sequence
  ENSG00000082212_56 (sequence is synthesized)
caaactaaagtttgtggttaatacctactctataccagacactgttctaaggatccgacatatttaatcctctgtttaccctctgtttctgtgcctgatttacagacagagacagaggca

SEQ ID NO: 81389 - DNA, 120 bp, Artificial Sequence
  ENSG00000082212_57 (sequence is synthesized)
cagagaggttaaatgacttgtcaaaggtcttatgatgtgtggcagagcctgggtttttagctcaaacccctctcagtgaagaaagccttctgtgtaggcaatttcatctaataccttcat

SEQ ID NO: 81390 - DNA, 82 bp, Artificial Sequence
  ENSG00000082212_58 (sequence is synthesized)
gaaagccttctgtgtaggcaatttcatctaataccttcatgaattgttacttcagatgagaattctcacagccttgctctgt

SEQ ID NO: 81391 - DNA, 120 bp, Artificial Sequence
  ENSG00000082212_59 (sequence is synthesized)
tcatctgatttttactttgttcccatttataattcaaatataatataaacgtcttattcatttagtcttcagcattttaagtattcgacacgaacattaaagatttggtgttgaatttaa

SEQ ID NO: 81392 - DNA, 120 bp, Artificial Sequence
  ENSG00000082212_60 (sequence is synthesized)
taaattacaccaaaaagtctcagtagccaattcactaacatcttttgatttggtaatcttcacagaatcaacaactgttaacacttctgtgcaaataaatttcagttgtgcttatatatt

SEQ ID NO: 81393 - DNA, 120 bp, Artificial Sequence
  ENSG00000082212_61 (sequence is synthesized)
ataatattcactttaggaatccacctgtcaatttgcaattcaattataaggtatattttaagtgatatctatgtattgtatacacatattccattgaaaggtgagaataattagaaagta

SEQ ID NO: 81394 - DNA, 120 bp, Artificial Sequence
  ENSG00000082212_62 (sequence is synthesized)
gtaatataaaaatgtgtatgaaataagaactttcttaaaagacctagtttagctaaatatatgacaatataaaatgtctgcccaatgttttattatactttgtctaatgacctttaaatt

SEQ ID NO: 81395 - DNA, 120 bp, Artificial Sequence
  ENSG00000082212_63 (sequence is synthesized)
taactgaaattaaaaccgtacttttgcagttgatatttttgtgttccctttgttaacataccaagcactaattattgacttcaaggaagccacgtattgcaagtcattgcttagcctttc

SEQ ID NO: 81396 - DNA, 120 bp, Artificial Sequence
  ENSG00000082212_64 (sequence is synthesized)
acatctgagtgttgataagatgacggaatgggtagtcttgtagtaattgcttatgggaatgctagtttaagaggaatgccttgtatagaacatattataccagattgacttgttaaaaat

SEQ ID NO: 81397 - DNA, 120 bp, Artificial Sequence
  ENSG00000082212_65 (sequence is synthesized)
ggttccaagaatcagtctaaaaacttcagaattatgtgaattattttttctctgttgtgatatgttgtaatgagatgtgtgttcttatattttcttagtaaaattttcttaagcataaaa

SEQ ID NO: 81398 - DNA, 120 bp, Artificial Sequence
  ENSG00000082212_66 (sequence is synthesized)
aaaaaaagaaaaaaaaaaagagagagagagagaaaaaaaaatcacaagaaacataagttatttaagagtgagagagagaaacaatcagctaaaaaaaattgtcattgcctctgtagagca

SEQ ID NO: 81399 - DNA, 120 bp, Artificial Sequence
  ENSG00000082212_67 (sequence is synthesized)
ttgcctctgtagagcaagaagtggagtgttagaggtgggctgggaactggagttaaaacaagcgttgatgaattgtatgtatttgtcattttcataaatgtaaaaactaaactgagaaaa

SEQ ID NO: 81400 - DNA, 120 bp, Artificial Sequence
  ENSG00000082212_68 (sequence is synthesized)
gccatttgatatttctgaaattacttagcgaataagaattattaaagatcgtttgattttaactcagatttctgtttcttcttggctgttttctgtttggggggagctgtttgcgatgtg

SEQ ID NO: 81401 - DNA, 120 bp, Artificial Sequence
  ENSG00000082212_69 (sequence is synthesized)
gatggattaccatttatttgcctgaatataggaatttacttctttcataatttgaaaagtgaccatactagtaaactttaaaatgtgttctaggtgtggctttagctgttattctctgta

SEQ ID NO: 81402 - DNA, 120 bp, Artificial Sequence
  ENSG00000082212_70 (sequence is synthesized)
acacccggcatattagtgacagtgttttcctagaagctgcaaaggtaaatgttttaaatgttgtttattttataaaggatgaattataaagatgagtagatctgaaaattaaaggcagag

SEQ ID NO: 81403 - DNA, 120 bp, Artificial Sequence
  ENSG00000082212_71 (sequence is synthesized)
agagaatgggttaaatctgccttattaatgaaaaggaagttactcaaattacttttatgatttgcctatttatgcataaaattaatttttttaatcatgacttaaatttttgtaaactga

SEQ ID NO: 81404 - DNA, 120 bp, Artificial Sequence
  ENSG00000082212_72 (sequence is synthesized)
atcctctcgttttaataacacttagactatacttgcaatttgtatatctgaatatattgtgacagcatagataactccttgcatgtttttaatggacaagtactggtattatttggagtg

SEQ ID NO: 81405 - DNA, 120 bp, Artificial Sequence
  ENSG00000082212_73 (sequence is synthesized)
ctggcctatgggagctccagactttgaagtatttctgaagaactcacattaatacaattaatgtctgttttcaaagtagccattgcaattaagccaagctctacatgtgtaatataaagc

SEQ ID NO: 81406 - DNA, 120 bp, Artificial Sequence
  ENSG00000082212_74 (sequence is synthesized)
cagttttaatttctgcagtggtttaagtgtattccttcaagaaataagaggaattatattacctgttttactctctgtttccccaatgctttttccatttactgggtccttattctgtta

SEQ ID NO: 81407 - DNA, 120 bp, Artificial Sequence
  ENSG00000082212_75 (sequence is synthesized)
tctattttatgtttgttagccaaatcacatttcccacctcagaaaaacgtaattttgattaaaagagattaacaaaatcccaacatattcataacttttatctttgtaaaaatagcataa

SEQ ID NO: 81408 - DNA, 120 bp, Artificial Sequence
  ENSG00000082212_76 (sequence is synthesized)
ttcatttctaatcttctttaaattattgtgattgttagaggaattacatacatacttctggaacctgctcccccaccaaaaaaagtcttaattctggtgggagattatccagaattatca

SEQ ID NO: 81409 - DNA, 120 bp, Artificial Sequence
  ENSG00000082212_77 (sequence is synthesized)
tatttgaacatgagatgtggttacatttcttcttgggtaaaatgactgtatcatttaacaataatctttgttgcatctgctatgaacagtaattacagtttgaagtacttgaaaatgttt

SEQ ID NO: 81410 - DNA, 120 bp, Artificial Sequence
  ENSG00000082212_78 (sequence is synthesized)
gaaaataaaccagtgtgacttagctaaatctgcttggaaattataccatgtcttgatattttattaaaatatcaaaatatttcaattatgaacaaaaacttagaaacaaagctgttgtga

SEQ ID NO: 81411 - DNA, 120 bp, Artificial Sequence
  ENSG00000082212_79 (sequence is synthesized)
ccctccttttcacaatgttttctcttttcttgtaaattacctctaaatctccaagaacagtttttcattgttgctctcatttattttgcacttatatacatgcagatttagtgctttgca

SEQ ID NO: 81412 - DNA, 120 bp, Artificial Sequence
  ENSG00000082212_80 (sequence is synthesized)
gctgaagtgatgataatagtagtagttataaaatgggctactggtataaagtttgactctgagaaagaaattagagctagaatacaaggtgagccctctcggtatcagcaccactggtgt

SEQ ID NO: 81413 - DNA, 120 bp, Artificial Sequence
  ENSG00000082212_81 (sequence is synthesized)
ctcctgccttctcaatctccttttctatttcactaatattattctaggtaaagaaaatacattaaaatgccataaaaacttttgtttatgaatggtgttagagaagtttggttatgcctt

SEQ ID NO: 81414 - DNA, 120 bp, Artificial Sequence
  ENSG00000082212_82 (sequence is synthesized)
tcttttaaatctaagatttagaaccttagcaaatataaaaatgttaaatatagcaaatataagccctggcctatttagttatctttcataaaataaaatgtaataacttatttcaagatc

SEQ ID NO: 81415 - DNA, 120 bp, Artificial Sequence
  ENSG00000082212_83 (sequence is synthesized)
gatctttgggtaggcttttgtaaattttattgtaggcaataatcttacctgcctttatactcctttccaaaataaacattgaatgatcgttggtttgaatactctagcaaaaatttggtc

SEQ ID NO: 81416 - DNA, 120 bp, Artificial Sequence
  ENSG00000082212_84 (sequence is synthesized)
aaataattaaactcacagtatcatcttaagaccttccttataagtaggtattttttttgttctagacctttttctttttcacagttgctaaggttttttttgtttggcctaggttattgt

SEQ ID NO: 81417 - DNA, 120 bp, Artificial Sequence
  ENSG00000082212_85 (sequence is synthesized)
gttggagtaccatgctgtttatttctaaactcttatttttctcttatggtaatctctccatcagaatcttgttcatctctgccatatttaatctttctgaagatatttaagttggtcctc

SEQ ID NO: 81418 - DNA, 120 bp, Artificial Sequence
  ENSG00000082212_86 (sequence is synthesized)
tagtcagaagaattctattcctaaaccgaagtcagagggaaatcaaatctagttaatgtctcataatactcagaagtcctagaattttaagtatgctttgttggtttacattggaaatta

SEQ ID NO: 81419 - DNA, 120 bp, Artificial Sequence
  ENSG00000082212_87 (sequence is synthesized)
gccaagaaacaattttatttttaagagcaaagagtaaatatatatgaagtgaatcaatcttttaaaaaatgcttttctttagtgccccatttttgacaacttttaatttgcatttttttg

SEQ ID NO: 81420 - DNA, 120 bp, Artificial Sequence
  ENSG00000082212_88 (sequence is synthesized)
aatgccaccattatttatgttatagagcaatagttaattatgtaaaaatacttaatggaattctttggaatgggagactgaactgagcaacagtattacagaattttggtataaatgtac

SEQ ID NO: 81421 - DNA, 120 bp, Artificial Sequence
  ENSG00000082212_89 (sequence is synthesized)
aaggaaactcaaggaattcatcaaattcagcatgctccactttctctgaaaatttattcatattgttaattaaatttgtttttattatagaaataatatattgcatgatttgtaaaaatg

SEQ ID NO: 81422 - DNA, 120 bp, Artificial Sequence
  ENSG00000082212_90 (sequence is synthesized)
cagaggaacagaatggcacaaaattatgtaaccctttctatctccccttggtgtacctccttaatcatacttctcagaaccattgtcaataatttgctgggagttcttctgatggttacc

SEQ ID NO: 81423 - DNA, 84 bp, Artificial Sequence
  ENSG00000082212_91 (sequence is synthesized)
cattgtcaataatttgctgggagttcttctgatggttaccatcgtgactgatagatttatttcccaggttcaagcagttccatg

SEQ ID NO: 81424 - DNA, 70 bp, Artificial Sequence
  ENSG00000082212_92 (sequence is synthesized)
gttctgctgttcttattttgtaagatacacccagtatactggtatcacaccaaaggaaattaataataat

SEQ ID NO: 81425 - DNA, 120 bp, Artificial Sequence
  ENSG00000082212_93 (sequence is synthesized)
ccagtatactggtatcacaccaaaggaaattaataataattgcttaatatcgtttatcattacctcagttcaacaacttatttttattcccaataccttttttattctagaattgctctt

SEQ ID NO: 81426 - DNA, 120 bp, Artificial Sequence
  ENSG00000082212_94 (sequence is synthesized)
tctaaatagctacttttaaagcaaaaatggttacagtactcattgagctttttctggagaattattaggattcctttcaatgtttctgcctttgtgctgtattttccataaatttctagt

SEQ ID NO: 81427 - DNA, 120 bp, Artificial Sequence
  ENSG00000082212_95 (sequence is synthesized)
gatcctcagttgtctctttcttttaagcaagactgtgttgagtaaaacaggaattttgtatgattttcttttgcacttgtgtcttttttcttctggtaggtctttccctgactagctgac

SEQ ID NO: 81428 - DNA, 120 bp, Artificial Sequence
  ENSG00000082212_96 (sequence is synthesized)
agcaggctctaattaagatatgacaagtttatataggctggcatcaggcaagcatgtataactgttgtcaaagtaaagagggtatttagtctgtgaatatcctggtacttttctatattt

SEQ ID NO: 81429 - DNA, 120 bp, Artificial Sequence
  ENSG00000082212_97 (sequence is synthesized)
ttctccttttttttgcccctcatgttttcctatatgtctcttgagacctaacttctataatagaaactgtcctgtcatccataatctctttctagaacttgataatgttcaaaattaatg

SEQ ID NO: 81430 - DNA, 120 bp, Artificial Sequence
  ENSG00000082212_98 (sequence is synthesized)
tgttctattcagtaacatttctatggcctaaaagacatgagggcaggaaaggaaatacttttctgctgattttaacaaagctatttttttaaactttttttttttagttccaggggtaca

SEQ ID NO: 81431 - DNA, 120 bp, Artificial Sequence
  ENSG00000082212_99 (sequence is synthesized)
tatgaaggtttgttatataggtaaattgtgtgttgcagggggtttcatgtatagattatttcatcacccggctaataagcatgctacccgataggtagttgtttgatccttaccctcttc

SEQ ID NO: 81432 - DNA, 79 bp, Artificial Sequence
  ENSG00000082212_100 (sequence is synthesized)
tgtctgttgttcccttctttgtgtccatgagttcttatcacttagctccacttgcaagtgagaacatacggagcctcca

SEQ ID NO: 81433 - DNA, 120 bp, Artificial Sequence
  ENSG00000082212_101 (sequence is synthesized)
gttagttcacttaggataatagcctccagctccatgcatgttactgcaaaggacgtgatctcattcatttttttggctgcatagtatttttttttatttatacacatggtgtatatgtgc

SEQ ID NO: 81434 - DNA, 120 bp, Artificial Sequence
  ENSG00000082212_102 (sequence is synthesized)
tatttttttttatttatacacatggtgtatatgtgccacatttactttatccagtttaccattgatgggcatttagattaattctatgtctttactattgtgaatagtgctgcagtgaac

SEQ ID NO: 81435 - DNA, 120 bp, Artificial Sequence
  ENSG00000082212_103 (sequence is synthesized)
tattcctttgagtatatacccaataataggattgctgggtcgaatggttgttctaaattcagcaaaaccatattttatatcatatctgagtattaaggaatttagcagttgattattttt

SEQ ID NO: 81436 - DNA, 120 bp, Artificial Sequence
  ENSG00000082212_104 (sequence is synthesized)
ttttatataacactttaaaatcctaacttaaataacagctatggataccataaatatagacattaaaaatgacctggtcaggcatggtggctctcgcctgtaatcccaacattttgggag

SEQ ID NO: 81437 - DNA, 120 bp, Artificial Sequence
  ENSG00000082212_105 (sequence is synthesized)
cagcctgggcaacatagtgagaccttgtttcttccaaaaattaaaaaaattaaccaggtgtagtggtgcacacccctattcccagctagtcaggaggctgagatggaaggatcgcatgag

SEQ ID NO: 81438 - DNA, 120 bp, Artificial Sequence
  ENSG00000082212_106 (sequence is synthesized)
cacacccctattcccagctagtcaggaggctgagatggaaggatcgcatgagcctgggaggtccaggctgcagtgagccatcatcatgccagtgcactccagcctgggcaacaaagtgag

SEQ ID NO: 81439 - DNA, 120 bp, Artificial Sequence
  ENSG00000082212_107 (sequence is synthesized)
aaaataaaatgacctggcatttgaggcagaaatgagcctaaaagcaggaggattggctgaaagtctgtttataaagcaacttaaaaaaaaaactgttaatatttgaatgacctagttgag

SEQ ID NO: 81440 - DNA, 120 bp, Artificial Sequence
  ENSG00000082212_108 (sequence is synthesized)
caactataacaaccggatgaaaattttttttaagactttaaaagggtcaaagggataagatattgactctaatggaatattggagaattctggaccaaggttagggagggaacaaatgca

SEQ ID NO: 81441 - DNA, 120 bp, Artificial Sequence
  ENSG00000082212_109 (sequence is synthesized)
cagaacaagcttttgaagccagttttacagtggaaatatagaccaggaagaaagtggctaagaggtacagctgtgcttttcatggaaagtggacaagatcggcaccatgtccgagtctgg

SEQ ID NO: 81442 - DNA, 120 bp, Artificial Sequence
  ENSG00000082212_110 (sequence is synthesized)
cactacctcccactctggactgaaaccctaaagtgctgtaccttggattgggggtatagtttgcagcagcaatgggtgatttagaaaacctcaagcctctgttcgggactgccagtgccc

SEQ ID NO: 81443 - DNA, 120 bp, Artificial Sequence
  ENSG00000082212_111 (sequence is synthesized)
acaagtgcccagcggaagcaaacaaaaatttctctgaaataagataatggcatcctagtcctcaaattatttttataaattttcaagtacaacctaagtagaaaaataaaaaaaaagata

SEQ ID NO: 81444 - DNA, 120 bp, Artificial Sequence
  ENSG00000082212_112 (sequence is synthesized)
atgaggcacataaagagacataacaacagaagccaaaaccagcaaaaacaagaaaaacagacacactgaaaccctggatataccgtaaatgctatgaaacaaatatgcttattatgttta

SEQ ID NO: 81445 - DNA, 120 bp, Artificial Sequence
  ENSG00000082212_113 (sequence is synthesized)
tttatagagataaaagccaatcttaaaaacttaagacaagtaccactaaattctagaattgaaaaatgtagtagtctataagaactgagtgagctgggtgtagtggctcatgcctgtaat

SEQ ID NO: 81446 - DNA, 120 bp, Artificial Sequence
  ENSG00000082212_114 (sequence is synthesized)
cccaggagtttgagaccagccctggcaacgtagtgagacccccatctctataaaattaaaaaaaaaaaaaaaattagccaggcatagtggcatatgcctgtagtcctagctattcaggag

SEQ ID NO: 81447 - DNA, 120 bp, Artificial Sequence
  ENSG00000082212_115 (sequence is synthesized)
ggcatagtggcatatgcctgtagtcctagctattcaggaggctgagatgggaagatcactcgagcttgggaggtcaaggctggagtgagtcatgattgggccactgcactccagcctggg

SEQ ID NO: 81448 - DNA, 120 bp, Artificial Sequence
  ENSG00000082212_116 (sequence is synthesized)
ggctgaggcaggagaattgcttgaaccctcggtggaggggcagaggttgcagcgagccgagatcgtaccacttcactgcagcatgggtgaaagagcaaaactccaagtcaaaaaagaaaa

SEQ ID NO: 81449 - DNA, 120 bp, Artificial Sequence
  ENSG00000082212_117 (sequence is synthesized)
aaaattgttagtcaatctgtgtgttactggtaaggcttctggtcagtaataggccattagtagttaagtttttggaaaatcatatgtaaatttttgatttgattttctaacacccacatt

SEQ ID NO: 81450 - DNA, 120 bp, Artificial Sequence
  ENSG00000082212_118 (sequence is synthesized)
gttcaagggtcaactgtatatccaatttttgccaattaaaaaataatattaaataagtaaaagtaacttcactttttcctgatgcttcaggtgtctcatcttttgtgtgattttactgta

SEQ ID NO: 81451 - DNA, 120 bp, Artificial Sequence
  ENSG00000082212_119 (sequence is synthesized)
attttcttctctcccttcctgctccttcaaatttcaaattttcagtttcagtaagtcttaacaatagtttagttggccttgtactgctctcctgcattggtggcttgctttagatttttt

SEQ ID NO: 81452 - DNA, 120 bp, Artificial Sequence
  ENSG00000082213_0 (sequence is synthesized)
gcccggagagagctggccgggatgaggcgccggctttcccgggtcttctccagctgccaccgctttactgcaaaactgacgggcgcaaaaacatgagtgactccgcgggagggcgcgctg

SEQ ID NO: 81453 - DNA, 120 bp, Artificial Sequence
  ENSG00000082213_1 (sequence is synthesized)
gtctccggcgttaccccaagctcccagtgtgggtggtggaggatcatcaggaggttctaccctttatataccgggccataggctcaaagcatcttcctgccagtaatgtaagttttttac

SEQ ID NO: 81454 - DNA, 120 bp, Artificial Sequence
  ENSG00000082213_2 (sequence is synthesized)
atttcgactcacatccagacctccttattcctgtgaatatgccagcagacaccgtgtttgataaggaaacactctttggagaattaagtattgaaaattggattatgcctgcagtttatg

SEQ ID NO: 81455 - DNA, 120 bp, Artificial Sequence
  ENSG00000082213_3 (sequence is synthesized)
ctggccatttttcacatgtaatatggtttcatcccacatgggctcagcagatcagagagggcagacaccactttttagtaggcaaagacacttctaccacaacaatcagggttacaagta

SEQ ID NO: 81456 - DNA, 120 bp, Artificial Sequence
  ENSG00000082213_4 (sequence is synthesized)
cagatcattatttcctaagtgatggtctgtatgtacctgaagaccagctagagaaccaaaaacctttacaattggatgtaattatggtaaaaccttataaactctgtaacaatcaagaag

SEQ ID NO: 81457 - DNA, 120 bp, Artificial Sequence
  ENSG00000082213_5 (sequence is synthesized)
aaaacgatgcagtgtcttctgctaagaaaccaaagctagccctggaagattcggaaaacactgcctctactaactgtgactcttcttcagaaggactggaaaaggacacagcaacacaga

SEQ ID NO: 81458 - DNA, 120 bp, Artificial Sequence
  ENSG00000082213_6 (sequence is synthesized)
gaagtgaccagacttgcctagaaccatcatgttcatgttcttctgaaaatcaggaatgccagactgctgccagcactggggaaattctggaaattttgaagaaagggaaggcatttgttt

SEQ ID NO: 81459 - DNA, 120 bp, Artificial Sequence
  ENSG00000082213_7 (sequence is synthesized)
tagatattgacttggattttttttcagtcaagaatcccttcaaagaaatgttcactcaggaagagtacaaaatcttacaagagctgtaccaatttaagaaacctggcaccaacctaacag

SEQ ID NO: 81460 - DNA, 120 bp, Artificial Sequence
  ENSG00000082213_8 (sequence is synthesized)
aggaagatttggtagatattgttgatactcgaattcatcaattagaggatttagaagccactttcgctgatttgtgtgatggtgatgatgaagaaacggtacagagatgggcttcaaacc

SEQ ID NO: 81461 - DNA, 120 bp, Artificial Sequence
  ENSG00000082213_9 (sequence is synthesized)
ctggaatggaatcactagttccccttgtacagagtttgaaaaaacggatggaagtaccagactatgaaatggttcaccaggctggtttaacctgcgattattcagaacttcctcaccata

SEQ ID NO: 81462 - DNA, 120 bp, Artificial Sequence
  ENSG00000082213_10 (sequence is synthesized)
tcagcacagaacaagaaatagagtgtcttattcaatctgtgcattatttgctgaaaaatttaccaaatcctactcttgtgacaattgcaaggtcaagtctggatgattactgtccttctg

SEQ ID NO: 81463 - DNA, 120 bp, Artificial Sequence
  ENSG00000082213_11 (sequence is synthesized)
accaagttgacactattcaagaaaaggtcctcaatatgctacgtgccctctatggaaatctagacctccaagtgtatgcagcagagtctcctccatcttgaaacaaacaaaacattaggc

SEQ ID NO: 81464 - DNA, 120 bp, Artificial Sequence
  ENSG00000082213_12 (sequence is synthesized)
tcctgttgtatcttggtttagtaacaggcccttaattaacttatttgtacatgagtcttccagagaacactgttttatattaactttcagttgaaatctttcagatattttgaatctctg

SEQ ID NO: 81465 - DNA, 120 bp, Artificial Sequence
  ENSG00000082213_13 (sequence is synthesized)
aacaaccattgtcagttgtgaatgatggtaaattttttggcatcaagtctcataaccccaactgatagaactgttgcttatctgtcttccttaagtattttttagggttttgtttttttt

SEQ ID NO: 81466 - DNA, 120 bp, Artificial Sequence
  ENSG00000082213_14 (sequence is synthesized)
tttgttgaacacttacatgtaccagacattattaagtgctgggtatatggtaatgaacagaatagacaaggcccctgcccttttaggggagacagatgagaagtaaattacgggttatga

SEQ ID NO: 81467 - DNA, 120 bp, Artificial Sequence
  ENSG00000082213_15 (sequence is synthesized)
gaaatgttatgaaggaaaggacaacaacagacatgtcttagtacttagggtatcatggctttataggaaagtaacattctctatctttttttttttttttaattttataaaaatagagat

SEQ ID NO: 81468 - DNA, 120 bp, Artificial Sequence
  ENSG00000082213_16 (sequence is synthesized)
acccaggctggtctcaaactcctgggcacaagcaatccacctgccttcgcctcccgaagtgctgggattacagatgtaagtcactaccccagccagaaactaacattctcaaaagctact

SEQ ID NO: 81469 - DNA, 120 bp, Artificial Sequence
  ENSG00000082213_17 (sequence is synthesized)
attctcaaaagctactaccaaaaaaaccccacaaatttgccaatccatgaaagtatcataggaagtctacctttccaaggaatttggcattgtggccctgctcttgccaaatgctctcca

SEQ ID NO: 81470 - DNA, 120 bp, Artificial Sequence
  ENSG00000082213_18 (sequence is synthesized)
gcattgttggtatcaaggtggtctggttgagtaaacttgaccaaacaaaaattaactgttttttgcttttctgtttttgttttgctgatcaaaaaagcccttcagggtctcttgtgcatc

SEQ ID NO: 81471 - DNA, 120 bp, Artificial Sequence
  ENSG00000082213_19 (sequence is synthesized)
caggaggtcattgtagatatcaataatatagtgcctaagtgccactttattgccaagtctagattgatacttttttcagataaaccagctttttatgtaaagagtaagggaaaaagttaa

SEQ ID NO: 81472 - DNA, 120 bp, Artificial Sequence
  ENSG00000082213_20 (sequence is synthesized)
atctttaattctgacctgccataaatacccaaagatataaactgtcttccaccacccccctcataactaagacatccttcctgagtcactcttaatcatgaaacttgattttctcaattg

SEQ ID NO: 81473 - DNA, 120 bp, Artificial Sequence
  ENSG00000082213_21 (sequence is synthesized)
gccagtcttctgatctttagtatctctttagttcagtaatttttacctacctacttgatttattttcctttaaaaggtgaaatgacatttaaagaaaaacaaacacccatcattcctcag

SEQ ID NO: 81474 - DNA, 120 bp, Artificial Sequence
  ENSG00000082213_22 (sequence is synthesized)
tcccaacacagcagttcttttcactcttgcttgtaactttcaggccttacccacatgtgttcctatagagttgcatgtagctaaaattatagtgtgctgcctaactttgtgctaataacg

SEQ ID NO: 81475 - DNA, 120 bp, Artificial Sequence
  ENSG00000082213_23 (sequence is synthesized)
aaggacacacattatcattgcctcacagtggatggcacctgaccccatttttccaaggattctattttccagtgaatttttgtcaccgagttaatttcccaagtctgatagcatgaatgc

SEQ ID NO: 81476 - DNA, 120 bp, Artificial Sequence
  ENSG00000082213_24 (sequence is synthesized)
ttatttgtgctgtgaaaagcagagcagcctgactcagctttccattttcataggataatatgtgccaaaaaaggtttattttcttggtaaaatcagaattgtagaattgtgctattttta

SEQ ID NO: 81477 - DNA, 120 bp, Artificial Sequence
  ENSG00000082213_25 (sequence is synthesized)
atttttaaaatttttggttagagcttatagacattacttttatgattattttgcgtgctaaataagttaaagggtatgttttgaactatagcactaattaatgtgtgtgatcctagtatg

SEQ ID NO: 81478 - DNA, 120 bp, Artificial Sequence
  ENSG00000082213_26 (sequence is synthesized)
ttgatagctttgattttgtgagtggtttactagtcatttattatgattcccatgaactctgatatgattcattgtggttttaactcaggttgaataaaagcatccatttcttttatagga

SEQ ID NO: 81479 - DNA, 120 bp, Artificial Sequence
  ENSG00000082213_27 (sequence is synthesized)
aggtttgtttaattctcatgttctgtgatcatctctttgagaataaaattcagtccctaatagttgaaaagaatcaacttagtaaattatgtcttgcacattccaaataggaaggtattt

SEQ ID NO: 81480 - DNA, 120 bp, Artificial Sequence
  ENSG00000082213_28 (sequence is synthesized)
actttatcaagatgtgtttcatttgtgttctgagtaccagtgaggggataccgtggtacagtgttttgaattgtgtactaatatcattaaagcatgggattttagtggctttttaaaaaa

SEQ ID NO: 81481 - DNA, 120 bp, Artificial Sequence
  ENSG00000082213_29 (sequence is synthesized)
ccattggattctcacgtctatttctgcatttagtccattgccatatgctgttttggttgaaatatatgatgaagattcaggctttcacagagaattaagtattgaaaattggattatgcc

SEQ ID NO: 81482 - DNA, 120 bp, Artificial Sequence
  ENSG00000082213_30 (sequence is synthesized)
agcaattataggaaatagactttgctaaactcatgggtttgggggttttttgtttgtctttttgtctttttcattttatttagaacaagtgttgacaactttcttaaagagccagattag

SEQ ID NO: 81483 - DNA, 67 bp, Artificial Sequence
  ENSG00000082213_31 (sequence is synthesized)
ctatgaaatgttcccagtcattatcagcattttggtccaagccattcaacaagtctctaggaagttc

SEQ ID NO: 81484 - DNA, 85 bp, Artificial Sequence
  ENSG00000082213_32 (sequence is synthesized)
tggatttcattgtccatgtcattatcagcattttggtccgtccaacatttccctgccttcttctgagccctccaaactgttccaa

SEQ ID NO: 81485 - DNA, 120 bp, Artificial Sequence
  ENSG00000082258_0 (sequence is synthesized)
gtgaatgaaggagcgggcggaggaggaagtgtcatggcgtcgggccgtggagcttcttctcgctggttctttactcgggaacagctggagaacacgccgagccgccgctgcggagtggag

SEQ ID NO: 81486 - DNA, 120 bp, Artificial Sequence
  ENSG00000082258_1 (sequence is synthesized)
gcggataaagagctctcgtgccgccagcaggcggccaacctcatccaggagatgggacagcgtctcaatgtctctcagcttacaataaacactgcgattgtttatatgcacaggttttat

SEQ ID NO: 81487 - DNA, 120 bp, Artificial Sequence
  ENSG00000082258_2 (sequence is synthesized)
atgcaccattctttcaccaaattcaacaaaaatataatatcgtctactgcattatttttggctgcaaaagtggaagaacaggctcgaaaacttgaacatgttatcaaagtagcacatgct

SEQ ID NO: 81488 - DNA, 120 bp, Artificial Sequence
  ENSG00000082258_3 (sequence is synthesized)
tgtcttcatcctctagagccactgctggatactaaatgtgatgcttaccttcaacagactcaagaactggttatacttgaaaccataatgctacaaactctaggttttgagatcaccatt

SEQ ID NO: 81489 - DNA, 120 bp, Artificial Sequence
  ENSG00000082258_4 (sequence is synthesized)
gaacacccacacacagatgtggtgaaatgtacccagttagtaagagcaagcaaggatttggcacagacatcctatttcatggctaccaacagtctgcatcttacaaccttctgtcttcag

SEQ ID NO: 81490 - DNA, 120 bp, Artificial Sequence
  ENSG00000082258_5 (sequence is synthesized)
tacaaaccaacagtgatagcatgtgtatgcattcatttggcttgcaaatggtccaattgggagatccctgtatcaactgatggaaagcattggtgggaatatgtggatcctacagttact

SEQ ID NO: 81491 - DNA, 120 bp, Artificial Sequence
  ENSG00000082258_6 (sequence is synthesized)
ctagaattattagatgagctaacacatgagtttctacaaatattggagaaaacgcctaataggttgaagaagattcgaaactggagggctaatcaggcagctaggaaaccaaaagtagat

SEQ ID NO: 81492 - DNA, 120 bp, Artificial Sequence
  ENSG00000082258_7 (sequence is synthesized)
ggacaggtatcagagacaccacttcttggttcatctttggtccagaattccattttagtagatagtgtcactggtgtgcctacaaacccaagttttcagaaaccatctacatcagcattc

SEQ ID NO: 81493 - DNA, 120 bp, Artificial Sequence
  ENSG00000082258_8 (sequence is synthesized)
cctgcgccagtacctctaaattcaggaaatatttctgttcaagacagccatacatctgataatttgtcaatgctagcaacaggaatgccaagtacttcatacggtttatcatcacaccag

SEQ ID NO: 81494 - DNA, 120 bp, Artificial Sequence
  ENSG00000082258_9 (sequence is synthesized)
gaatggcctcaacatcaagactcagcaaggacagaacagctatattcacagaaacaggagacatctttgtctggtagccagtacaacatcaacttccagcagggaccttctatatcactg

SEQ ID NO: 81495 - DNA, 120 bp, Artificial Sequence
  ENSG00000082258_10 (sequence is synthesized)
cattcaggattacatcacagacctgacaaaatttcagatcattcttctgttaagcaagaatatactcataaagcagggagcagtaaacaccatgggccaatttccactactccaggaata

SEQ ID NO: 81496 - DNA, 120 bp, Artificial Sequence
  ENSG00000082258_11 (sequence is synthesized)
attcctcagaaaatgtctttagataaatatagagaaaagcgtaaactagaaactcttgatctcgatgtaagggatcattatatagctgcccaggtagaacagcagcacaaacaagggcag

SEQ ID NO: 81497 - DNA, 120 bp, Artificial Sequence
  ENSG00000082258_12 (sequence is synthesized)
tcacaggcagccagcagcagttctgttacttctcccattaaaatgaaaatacctatcgcaaatactgaaaaatacatggcagacaaaaaggaaaagagtgggtcactgaaattacggatt

SEQ ID NO: 81498 - DNA, 120 bp, Artificial Sequence
  ENSG00000082258_13 (sequence is synthesized)
ccaataccacccactgataaaagcgccagtaaagaagaactgaaaatgaaaataaaagtttcttcttcagaaagacacagctcttctgatgaaggcagtgggaagagcaaacattcaagc

SEQ ID NO: 81499 - DNA, 120 bp, Artificial Sequence
  ENSG00000082258_14 (sequence is synthesized)
ccacatattagcagagaccataaggagaagcacaaggagcatccttcaagccgccaccacaccagcagccacaagcattcccactcgcatagtggcagcagcagcggtggcagtaaacac

SEQ ID NO: 81500 - DNA, 120 bp, Artificial Sequence
  ENSG00000082258_15 (sequence is synthesized)
agtgccgacggaataccacccactgttctgaggagtcctgttggcctgagcagtgatggcatttcctctagctccagctcttcaaggaagaggctgcatgtcaatgatgcatctcacaac

SEQ ID NO: 81501 - DNA, 120 bp, Artificial Sequence
  ENSG00000082258_16 (sequence is synthesized)
caccactccaaaatgagcaaaagttccaaaagttcaggtagttcatctagttcttcctcctctgttaagcagtatatatcctctcacaactctgtttttaaccatcccttaccccctcct

SEQ ID NO: 81502 - DNA, 120 bp, Artificial Sequence
  ENSG00000082258_17 (sequence is synthesized)
ccccctgtcacataccaggtgggctacggacatctcagcaccctcgtgaaactggacaagaagccagtggagaccaacggtcctgatgccaatcacgagtacagtacaagcagccagcat

SEQ ID NO: 81503 - DNA, 120 bp, Artificial Sequence
  ENSG00000082258_18 (sequence is synthesized)
atggactacaaagacacattcgacatgctggactcactgttaagtgcccaaggaatgaacatgtaataatttgtttaggtcaatttttcctttacttttttaatttaaaaattgttagaa

SEQ ID NO: 81504 - DNA, 120 bp, Artificial Sequence
  ENSG00000082258_19 (sequence is synthesized)
tggaaaaattccttctgatctagcagtggtaacccctgctgttgctgccactgcttcaatatttgtaagtgctgctttattcttcattctgaaaagaagagattatagtaaacaagtctt

SEQ ID NO: 81505 - DNA, 120 bp, Artificial Sequence
  ENSG00000082258_20 (sequence is synthesized)
tatctccacatatgatagtgttataaatactgtaaaagcatggaaggtgcaaaactcagtatttctacaattgcagctaagaacattaggatgaatggctggctgcttctaggaatataa

SEQ ID NO: 81506 - DNA, 120 bp, Artificial Sequence
  ENSG00000082258_21 (sequence is synthesized)
gatgcctcaagcattcattatttatgatttgaatactgtagctattttttgttgcttggcttttgaatgagtgtaaattgttttcttttgtgtatttatacttgtatgtatgatttgcat

SEQ ID NO: 81507 - DNA, 120 bp, Artificial Sequence
  ENSG00000082258_22 (sequence is synthesized)
gtttcaatgataaagggataaaacagtatactgacaactgtttacaagaaagtggagaaaaatgtacatacatttttgtatgtttagatattaccgtaaatactcaggattggagctgct

SEQ ID NO: 81508 - DNA, 120 bp, Artificial Sequence
  ENSG00000082258_23 (sequence is synthesized)
tgtaagtataacaatatacagaataactttattttatcttgtcagagtccatcactaatctaaaacaaaggtggcacttttttatgttaaccttaaactctaggccttactggaagccac

SEQ ID NO: 81509 - DNA, 120 bp, Artificial Sequence
  ENSG00000082258_24 (sequence is synthesized)
tgataggggacacttcactaccagatgtgtgcagtgcaacagatggtcatatacactgtgaggcactgaaattttgccttcagaggttctgaccagattggctgctgaaatagcccctaa

SEQ ID NO: 81510 - DNA, 120 bp, Artificial Sequence
  ENSG00000082258_25 (sequence is synthesized)
ctttctgaaggcttgaagaggaaaaaataaagtttacatactcttgatgtgaagtgcatttaaatgtttgttggcttgttgcagttctatgaaacagagctgttaataatggttatgtgg

SEQ ID NO: 81511 - DNA, 120 bp, Artificial Sequence
  ENSG00000082258_26 (sequence is synthesized)
attactgtgatttgaaaactaaattcacaataacttacctagtagagatttagtgagttgtttcctttaaagaattttacactacatattttaatagtaaacagggatcacttttccttt

SEQ ID NO: 81512 - DNA, 120 bp, Artificial Sequence
  ENSG00000082258_27 (sequence is synthesized)
agcattcagaatgacaccatattcttaaatatactccttccctgaagcgtgtttgtgtgtgatgccatatttctttttcaggtaaatgtagtcttccttataaaaatgaaattaaaccta

SEQ ID NO: 81513 - DNA, 120 bp, Artificial Sequence
  ENSG00000082258_28 (sequence is synthesized)
tatggttatcaggaagctctgtaagaaagaaaaggtcagcctcccaggcaaaccagtagtggaggttttacatttgtttgcacatctcagtatatttctgttgaggtaaagtttgcacag

SEQ ID NO: 81514 - DNA, 120 bp, Artificial Sequence
  ENSG00000082258_29 (sequence is synthesized)
tcatctgacttctgatcaagcattagattttaacttgtttagattttgtcttaaacaccagtaatatggctcttgtttatcagctaatcttgaatttattctgtggtaaatcttttgagt

SEQ ID NO: 81515 - DNA, 120 bp, Artificial Sequence
  ENSG00000082258_30 (sequence is synthesized)
tgttgagtatatttgagattgattggattcgacctcttgttgaactgaaaacttaattttttctctgtatttttgttacaaagccactgatacgtgcacaattgtaattaagtatgttgc

SEQ ID NO: 81516 - DNA, 120 bp, Artificial Sequence
  ENSG00000082258_31 (sequence is synthesized)
agttgtaaatattagagtttaatctcatgctctacctttatttagcaattacctaatttgccagtagctttataatttttaaagataattgttcattattttgtcaatgttatttgaact

SEQ ID NO: 81517 - DNA, 120 bp, Artificial Sequence
  ENSG00000082258_32 (sequence is synthesized)
tggggtacttaggagcctctttgtagggactgtgcctaggtagcatgtcctaacatttgttctggtcttgcataacttcagtaatctttgtcattatatgtaactttgttgctctgtatg

SEQ ID NO: 81518 - DNA, 120 bp, Artificial Sequence
  ENSG00000082258_33 (sequence is synthesized)
gcataatattgtatccataaacatggtaattttgatacagttatacttttacagtggtacataatccaaggactagtatagaattaagctgagtgcaagatgagggagggaagggctttc

SEQ ID NO: 81519 - DNA, 120 bp, Artificial Sequence
  ENSG00000082258_34 (sequence is synthesized)
ttggtaatttagatgtgaaacctctacagagctatcatgtaaaaactacataaggtggttgtgctactgtataattgggggtgataataccaggaattttaataagattttgtaaagaat

SEQ ID NO: 81520 - DNA, 120 bp, Artificial Sequence
  ENSG00000082258_35 (sequence is synthesized)
atccagaaaagtagtgaacttattttcagtagacatagaaaacaatgtgaatatttaaggtctgtgactatagttaaacttcactaagaatttgcagaattgttttgagatgtgtgaata

SEQ ID NO: 81521 - DNA, 120 bp, Artificial Sequence
  ENSG00000082258_36 (sequence is synthesized)
aaggtaattttattgaatcttcattggtgctaatgatggacagttaaaaagatagctagtgtatattgttatgggtcagtacttattagtacttccaaaattgaatttgaaatgctatgt

SEQ ID NO: 81522 - DNA, 120 bp, Artificial Sequence
  ENSG00000082258_37 (sequence is synthesized)
attcacttttcactctgtaaatgtaattctttacaatgactttatttattaaagggcagccagttgtcatttttacaggattgtgtgagctattcaaactcttcaacccctgaacagggt

SEQ ID NO: 81523 - DNA, 120 bp, Artificial Sequence
  ENSG00000082258_38 (sequence is synthesized)
attaagcttccaaaataatgatggggataaatatggaaatcctttttaagttgtatttccattaaacaaaaacccttataattcatactatcatgaatttgctttatccatctcatttgc

SEQ ID NO: 81524 - DNA, 120 bp, Artificial Sequence
  ENSG00000082258_39 (sequence is synthesized)
ataacagttcatctgtctggtcccattaggctctaccaaagaaagactctgatgagtggacattattactgtgactcttgtaagtagccataaataaaccaaaatagtatcaaatttagg

SEQ ID NO: 81525 - DNA, 120 bp, Artificial Sequence
  ENSG00000082258_40 (sequence is synthesized)
tatgaaattccacatgtgcaaagtactgttaaggtgataacatttttgatgagatttaaaaaaatatttgaaatattaaaaagcattatctttaaacatcctataaaagagtgagtcatt

SEQ ID NO: 81526 - DNA, 120 bp, Artificial Sequence
  ENSG00000082258_41 (sequence is synthesized)
tttaagttgtgttttccctagatcactgatttgttacctttacacagaagcacattgcaaagaaaggctttatttctacctcttccattcagttttccaatattgagctgtgtccctctg

SEQ ID NO: 81527 - DNA, 120 bp, Artificial Sequence
  ENSG00000082258_42 (sequence is synthesized)
aatatttgccttagctatttcaaaataggtattttcagaaccaaagcaaagggtggtttgttcactgaaacattcttagaggcctacttaacgggcggcagtatccggtagtggtaaaac

SEQ ID NO: 81528 - DNA, 120 bp, Artificial Sequence
  ENSG00000082258_43 (sequence is synthesized)
ctcacagtttcctaattgcaggtatgtaaataccaaaaaagtcctgttgtcagccctaggtttatctttgaaagcagttaaatgtgcaccttggtcttcctccgtgtgttcagattcctt

SEQ ID NO: 81529 - DNA, 120 bp, Artificial Sequence
  ENSG00000082258_44 (sequence is synthesized)
ctggttaaagttcttattcagagtcatctaaaagaaatttctaacatgatgtatggtttcttgaatgtcatgagtggctgcgtatattgctttgtagcaacagattgtattaataattaa

SEQ ID NO: 81530 - DNA, 120 bp, Artificial Sequence
  ENSG00000082258_45 (sequence is synthesized)
tagaatacctaatttttttggcctatcctctttgaactagaaatgactacttgagggctatttcagagaaccaatatgaaatgtttttgttagtacaaaataccattgccttaaaaggtt

SEQ ID NO: 81531 - DNA, 120 bp, Artificial Sequence
  ENSG00000082258_46 (sequence is synthesized)
tcaagcacattttcttttctatttgagaacttaaattgctgacttgtattcgttaagcaaccttagaaataaaccactgcttatatctgcatgaatattatgcatttcatgagtacagtt

SEQ ID NO: 81532 - DNA, 120 bp, Artificial Sequence
  ENSG00000082258_47 (sequence is synthesized)
agttgattagatatttcagggttttgcattttctatagacatggggacttttttaacatggtaacgtcttaggaaaaccattctctcaaggtattacaccatttccaattttatccaaat

SEQ ID NO: 81533 - DNA, 120 bp, Artificial Sequence
  ENSG00000082258_48 (sequence is synthesized)
gaaaagcatatctgcttaaatttaggatgtctttgctgagaatatttggaggctcttgttaggaagaatcatggattcagtatttctaacctgattactgcctcagaggctgtcttgaag

SEQ ID NO: 81534 - DNA, 120 bp, Artificial Sequence
  ENSG00000082258_49 (sequence is synthesized)
ggagacagtaggattcactgactacctttacccagatgagggatcaacaaatctcacacttaaactaaatgagttgacaggacaataggtgctaatctcatgtgccctaagatggactta

SEQ ID NO: 81535 - DNA, 120 bp, Artificial Sequence
  ENSG00000082258_50 (sequence is synthesized)
tttagatagggatttttgcattggaaaagcagcacattctctgaccttgggtaccaagctatgatactaatttgagaatcacattctgatacgttaatatcagaaatcagtgagcaacct

SEQ ID NO: 81536 - DNA, 120 bp, Artificial Sequence
  ENSG00000082258_51 (sequence is synthesized)
aattgctgtaagctgacatacatggaagccgaaatcaaaaggttgcttttgttagtttccctggagcatctatttttgtaatacattttgccagtgggactgaaaagctcaaaatgtttt

SEQ ID NO: 81537 - DNA, 120 bp, Artificial Sequence
  ENSG00000082258_52 (sequence is synthesized)
agacctaatatcatacattaattttctgctctgcagtgtcaatttgggcacagccagtttttacctctgtggcaccttctttataatttactgttacctattctgcctgacagattgatt

SEQ ID NO: 81538 - DNA, 120 bp, Artificial Sequence
  ENSG00000082258_53 (sequence is synthesized)
aagtaggttgataagatccatcgaagattgaatggctaggagtaattctgttctcgtataggcaacttaacttcactgtggaatccatttatctcaaagtttgagggctgtctactttat

SEQ ID NO: 81539 - DNA, 120 bp, Artificial Sequence
  ENSG00000082258_54 (sequence is synthesized)
tttcaagtttggggcggaaactcaaaatcccgagcattgccactttagtagtttgtttgatttgcctattgtttaataatgagtacattcttattaagtgatgagtacattcttaatttt

SEQ ID NO: 81540 - DNA, 120 bp, Artificial Sequence
  ENSG00000082258_55 (sequence is synthesized)
aaggtatgtttttttcaagcagcttcattttattaggaaaaatacatactcatttgttgtaaacagtgattgtggggtttcattttctgaatgtactcaaaactcccaacaacaattgaa

SEQ ID NO: 81541 - DNA, 120 bp, Artificial Sequence
  ENSG00000082258_56 (sequence is synthesized)
caggatgtttgctaatagaaaatctaaaacaggaatatgtgtatatggcatgaattagtcattgactttaagcttcttatccatacaaggaactaataaaatgtttattgacaacataaa

SEQ ID NO: 81542 - DNA, 120 bp, Artificial Sequence
  ENSG00000082258_57 (sequence is synthesized)
tgttggtggcggaggccggagtcgcacgcctacgagactgcgcggacccgcccaaaaggaaaatggaagtagtggcgtgaggctgcgacagtgaagataatatcgtctactgcattattt

SEQ ID NO: 81543 - DNA, 120 bp, Artificial Sequence
  ENSG00000082258_58 (sequence is synthesized)
gttgaagaagattcgaaactggagggtaagagaattgacagggtttaacagaatttcagtcttttatgtaacatttacatagctaaccagtttgaatttttgtggttaaataatctttgc

SEQ ID NO: 81544 - DNA, 120 bp, Artificial Sequence
  ENSG00000082258_59 (sequence is synthesized)
tacatatactcacatattcaactactgagtccagtggactttgctaaagtacattatacttttaaaaaattttttgcagtgattatgacaaaagtatcctcttcattttacaaatgggga

SEQ ID NO: 81545 - DNA, 120 bp, Artificial Sequence
  ENSG00000082258_60 (sequence is synthesized)
aactgaagcctagacaagttaaattactttctgaagtgctgggctaggatttaacttgtatctgattctaaaatgggtgttttcaattttttatagccttttatgcctctaaggcattta

SEQ ID NO: 81546 - DNA, 120 bp, Artificial Sequence
  ENSG00000082258_61 (sequence is synthesized)
ggcatttatttactgacaacataaaatcttgaaccccaggtcattttatttccatatgtttaatatataatgtttttaatatataacttttataagacaagaaatttgcattaaattatt

SEQ ID NO: 81547 - DNA, 120 bp, Artificial Sequence
  ENSG00000082258_62 (sequence is synthesized)
gtgaaatgtacccagttagtaagaggtaggtgatccttgaaacttttaagataagtattaatgctttttattatctgtaattgatttgggtgctattttgtttttctagccttttgttag

SEQ ID NO: 81548 - DNA, 120 bp, Artificial Sequence
  ENSG00000082258_63 (sequence is synthesized)
ggagactgttggtggcggaggccggagtcgcacgcctacgagactgcgcggacccgcccaaaaggaaaatggaagtagtggcgtgaggctgcgacagtgaaggttatttttctcttttta

SEQ ID NO: 81549 - DNA, 120 bp, Artificial Sequence
  ENSG00000082258_64 (sequence is synthesized)
aagggccgctagacctcccgtctaaaggaagcgcccgacgggcctccgaagtacacgcccaggcccccacagcgcagccgcccgaccgcctctcttcacaccggccagagtccaccctct

SEQ ID NO: 81550 - DNA, 120 bp, Artificial Sequence
  ENSG00000082258_65 (sequence is synthesized)
cccactttcccctcccctcccctccccgccccttccctccccaccccttcgccccgccaaccctagacccggcatgcgctgcgccgaccttttccttccgagccgacctctccaccttcg

SEQ ID NO: 81551 - DNA, 120 bp, Artificial Sequence
  ENSG00000082258_66 (sequence is synthesized)
gcgcctcccaatgacaagcggcgcggagcattgtggtcccgtgcgcaagagcgaggccgagggcagaaaaagaaagcaaaagactagggcgagtcggtagagcgggccccgcgcatgcgc

SEQ ID NO: 81552 - DNA, 120 bp, Artificial Sequence
  ENSG00000082258_67 (sequence is synthesized)
cagatgtggtgaaatgtacccagttagtaagagatctttgggggatagcaagaaacatttgagtgaatgttgttgaagattttcagtagtatagaaaatgatggcgctcttgtgatattt

SEQ ID NO: 81553 - DNA, 120 bp, Artificial Sequence
  ENSG00000082258_68 (sequence is synthesized)
caagcaaggatttggcacagacatcctatttcatggctaccaacaggttgttatcctgaccctctttgttgcactgttgtagcacactatagcttcctttaatgcagggccccctcaatg

SEQ ID NO: 81554 - DNA, 120 bp, Artificial Sequence
  ENSG00000082258_69 (sequence is synthesized)
tgtctcttacccttgttgcgacaggagactggaccatctactgtggtggtaccttcctgtttgctttgcggtgtattgtacaagggactttgggcacagaggggttaaatgcacaatgtg

SEQ ID NO: 81555 - DNA, 120 bp, Artificial Sequence
  ENSG00000082258_70 (sequence is synthesized)
aagtgtagtggtgctttctgatgacatattctcgatttgtgagtgcataagtctaaaattggtagcctgaatagcagctaaagattacaaagagctaaacttaacgtagaaattcgagca

SEQ ID NO: 81556 - DNA, 120 bp, Artificial Sequence
  ENSG00000082258_71 (sequence is synthesized)
gctagctaaaagcaaatcggcttgtttctcagatctttgggggatagcaagaaacatttgagtgaatgttgttgaagattttcagtagtatagaaaatgatggcgctcttgtgatatttg

SEQ ID NO: 81557 - DNA, 120 bp, Artificial Sequence
  ENSG00000082258_72 (sequence is synthesized)
taagtacaagcaaggatttggcacagacatcctatttcatggctaccaacaggttgttatcctgaccctctttgttgcactgttgtagcacactatagcttcctttaatgcagggccccc

SEQ ID NO: 81558 - DNA, 120 bp, Artificial Sequence
  ENSG00000082258_73 (sequence is synthesized)
ttcaacaaaaatgtaagtactagttgtctgtttttactgtccgcaaatttgagggtaaatcgatacgcagaaaaaaagttggtcattgcgttgttggatttagtgttctgaattaacggt

SEQ ID NO: 81559 - DNA, 120 bp, Artificial Sequence
  ENSG00000082258_74 (sequence is synthesized)
cgtatatcacgtgataaatattttgcttcagatgcggtgtttttgtgtttttaaaatttatgatgaattaaactgcaaggcactgttaagctctgccaggccttttaagctaaaaaagaa

SEQ ID NO: 81560 - DNA, 120 bp, Artificial Sequence
  ENSG00000082258_75 (sequence is synthesized)
aaacatttatttctttacagagttattacataggttttcttcatttaaattctatacttaacatttgaataatttcagtagtgatgtacagtggaattgggcaagcctggtcgttctgtg

SEQ ID NO: 81561 - DNA, 120 bp, Artificial Sequence
  ENSG00000082258_76 (sequence is synthesized)
atacatcttaattatgttggactcattgtttaaaagactgtcaattgagattaaattaattatgacattcttttgaaagagctatttagtagaaataattcatttcttcatttgctaacc

SEQ ID NO: 81562 - DNA, 120 bp, Artificial Sequence
  ENSG00000082269_0 (sequence is synthesized)
ctgtgatggcgatgtgagggggcccggggcgggatggtgctgacccgggtcgggccgtcttcttgcagctggacaacgagctcctccgttcgacaggcgggggaagaggccgagccgggc

SEQ ID NO: 81563 - DNA, 120 bp, Artificial Sequence
  ENSG00000082269_1 (sequence is synthesized)
gagagggttgaagatcaactggattatgtatttggttctggaatctcaaagcagtccacaaacaaattcttccttatgttgtctgtgtcagggggaacggtgtatttttaacaacgggaa

SEQ ID NO: 81564 - DNA, 120 bp, Artificial Sequence
  ENSG00000082269_2 (sequence is synthesized)
tcagtaactggaagtacaagattggttatttaataatgttaaaaatgaggctttgaaaagcagaggtgctgttatcagaatagtcttctgggtataaattaaaaatgactgaagttcaag

SEQ ID NO: 81565 - DNA, 120 bp, Artificial Sequence
  ENSG00000082269_3 (sequence is synthesized)
caatggtagaattctctgtggagctaaacaagttctacaatgtggatttgtttcagagaggtttttaccagattcgtgcttctatgaaaattccatcaagaattccccacagagtagaag

SEQ ID NO: 81566 - DNA, 120 bp, Artificial Sequence
  ENSG00000082269_4 (sequence is synthesized)
ctagtttgttgcatgcaacaggtatgactttagcctttccagcctcagttcatgattctctaatttgcagtaaaacatttcaaattttgtacaaaaatgaagaggttgttttaaatgatg

SEQ ID NO: 81567 - DNA, 120 bp, Artificial Sequence
  ENSG00000082269_5 (sequence is synthesized)
ttatgatcttcaaagtaaaaatgctattggatgaaagaaagattgaagaaacccttgaggaaatgaattttctattatccttggatctacacttcacagatggagattattcggcagatg

SEQ ID NO: 81568 - DNA, 120 bp, Artificial Sequence
  ENSG00000082269_6 (sequence is synthesized)
atctgaatgccttgcaactaataagtagccgaacattgaagctgcactttagcccccatagaggccttcatcatcatgttaatgttatgtttgattacttccacctttctgttgtgtctg

SEQ ID NO: 81569 - DNA, 120 bp, Artificial Sequence
  ENSG00000082269_7 (sequence is synthesized)
ttacagttcatgcatcattggttgcactacaccagccactaataagctttcctcgccctgtgaagacaacttggttaaatagaaatgcaccagcacaaaacaaagattccgtgattccta

SEQ ID NO: 81570 - DNA, 120 bp, Artificial Sequence
  ENSG00000082269_8 (sequence is synthesized)
ctcttgaaagtgtggtctttggtattaactacacaaaacagttatcaccagatggttgtagcttcatcattgcagactccttcctacatcatgcgtatcgttttcattatacactttgtg

SEQ ID NO: 81571 - DNA, 120 bp, Artificial Sequence
  ENSG00000082269_9 (sequence is synthesized)
ccactttgctgctagccttcaagggattgcacagctacttcattacagtaacagaagagattccttcttgtcagaaactagaactggaggaaatggatgtagaagctcgacttactgaac

SEQ ID NO: 81572 - DNA, 120 bp, Artificial Sequence
  ENSG00000082269_10 (sequence is synthesized)
tatgtgaagaagttaagaaaatagagaatcctgatgaactggcagaacttataaatatgaatcttgcgcaactttgctcacttttgatggctttatggggacagtttctggaagttataa

SEQ ID NO: 81573 - DNA, 120 bp, Artificial Sequence
  ENSG00000082269_11 (sequence is synthesized)
cgctacacgaagaactaagaatattattagcacaagagcaccatactttgagggtacgcagattttctgaggcattcttttgttttgagcatccaagagaagctgccattgcataccagg

SEQ ID NO: 81574 - DNA, 120 bp, Artificial Sequence
  ENSG00000082269_12 (sequence is synthesized)
aacttcatgctcagagtcatctacagatgtgcaccgctatcaaaaatacttccttctgcagttctcttccacccttacctattgaatgtagtgaattagatggagatctcaattcattac

SEQ ID NO: 81575 - DNA, 120 bp, Artificial Sequence
  ENSG00000082269_13 (sequence is synthesized)
ctataatctttgaagataggtatttagattcagttactgaaggtaaacttgatatctcccaggacgatagtgaaattacacaaatggaacacaatctggcatccagaaggtcatcagacg

SEQ ID NO: 81576 - DNA, 120 bp, Artificial Sequence
  ENSG00000082269_14 (sequence is synthesized)
attgccatgatcatcaaacaaccccatctttgggagttagaacaattgaaataaagcccagtaataaagatcctttcagtggagagaatataactgtcaaactaggaccttggacagagc

SEQ ID NO: 81577 - DNA, 120 bp, Artificial Sequence
  ENSG00000082269_15 (sequence is synthesized)
ttcgacaagaggaaatacttgtggataatttactacccaactttgagtccttagaatctaatggtaaatctaaatctatagaaataacatttgaaaaggaagctttgcaagaagcaaagt

SEQ ID NO: 81578 - DNA, 120 bp, Artificial Sequence
  ENSG00000082269_16 (sequence is synthesized)
gtctttctattggagaatcattaactaaattacgaagtaatctacctgccccttctacaaaagaatatcatgttgtagtaagtggagatacaattaagttaccagatattagtgccacat

SEQ ID NO: 81579 - DNA, 120 bp, Artificial Sequence
  ENSG00000082269_17 (sequence is synthesized)
atgcctcatctagattttcagattcaggtgttgaaagtgaaccgagttcttttgcgacacatccaaacactgatttagtctttgaaactgtgcaagggcaaggtccttgcaatagtgaaa

SEQ ID NO: 81580 - DNA, 120 bp, Artificial Sequence
  ENSG00000082269_18 (sequence is synthesized)
gattatttcctcagcttttgatgaaacctgattataatgtaaaattttcattaggaaatcattgtactgagagtacaagtgctataagtgaaatacagtcatctttgacatccataaact

SEQ ID NO: 81581 - DNA, 120 bp, Artificial Sequence
  ENSG00000082269_19 (sequence is synthesized)
ctctaccctccgatgatgaactgtcacctgatgaaaattctaagaaatctgttgtacctgaatgccatctaaatgatagcaaaactgtattaaatctaggaacgactgatttgccaaaat

SEQ ID NO: 81582 - DNA, 120 bp, Artificial Sequence
  ENSG00000082269_20 (sequence is synthesized)
gtgatgatactaaaaagtcaagtatcactttgcaacagcagagtgttgtattttcagggaacttggacaatgaaactgtagcaatacattccttaaattcaagcattaaagaccctttac

SEQ ID NO: 81583 - DNA, 120 bp, Artificial Sequence
  ENSG00000082269_21 (sequence is synthesized)
tttgttttttcagatgaagagacttccagtgatgtgaaaagtagttgcagctccaaacctaacttggatactatgtgtaaaggcttccagagtcctgataaatctaataactctacaggg

SEQ ID NO: 81584 - DNA, 120 bp, Artificial Sequence
  ENSG00000082269_22 (sequence is synthesized)
acagcaattacattaaattcaaaactgatttgtttaggcactccttgtgtcatttcaggttccatttctagtaatacagatgttagtgaagatagaactatgaaaaaaaatagtgatgta

SEQ ID NO: 81585 - DNA, 120 bp, Artificial Sequence
  ENSG00000082269_23 (sequence is synthesized)
ttaaatctcacacagatgtattcagaaatccctacagttgaaagtgaaactcatctgggtacaagtgatcctttttcagccagtactgatatagtaaagcaagggcttgtggaaaattat

SEQ ID NO: 81586 - DNA, 120 bp, Artificial Sequence
  ENSG00000082269_24 (sequence is synthesized)
tttggttctcaaagcagtacggatatttctgacacatgtgctgttagctacagcaatgcacttagccctcagaaggaaacttctgaaaaagaaattagtaatcttcagcaggaacaggat

SEQ ID NO: 81587 - DNA, 120 bp, Artificial Sequence
  ENSG00000082269_25 (sequence is synthesized)
aaagaggatgaggaggaagagcaggatcaacaaatggttcaaaatgggtactatgaagaaacagattattcagctttggatggaacaataaatgctcactatacaagcagagatgaacta

SEQ ID NO: 81588 - DNA, 120 bp, Artificial Sequence
  ENSG00000082269_26 (sequence is synthesized)
atggaagaaagacttacaaaatctgaaaaaataaacagtgactatctgagagatggtataaacatgcctactgtctgtacttctggttgtttgtccttcccgtctgcaccacgagagtct

SEQ ID NO: 81589 - DNA, 120 bp, Artificial Sequence
  ENSG00000082269_27 (sequence is synthesized)
ccttgtaatgttaaatattcttccaaaagtaaatttgatgccattacaaagcagccaagcagtacttcttacaacttcacttcttcgatttcctggtatgaaagttcaccaaaacctcaa

SEQ ID NO: 81590 - DNA, 120 bp, Artificial Sequence
  ENSG00000082269_28 (sequence is synthesized)
atacaagccttccttcaggcaaaagaagaactgaagctactaaaacttcctgggttcatgtacagtgaagttcctctgctggcatcctcagtaccttattttagtgtagaagaagaggat

SEQ ID NO: 81591 - DNA, 120 bp, Artificial Sequence
  ENSG00000082269_29 (sequence is synthesized)
ggttctgaagatggagtacatctgattgtctgtgtgcacggtttagatggaaacagtgcagatctccgattagtaaaaacttacattgaacttggattgcctgggggaagaattgatttt

SEQ ID NO: 81592 - DNA, 120 bp, Artificial Sequence
  ENSG00000082269_30 (sequence is synthesized)
cttatgtctgagagaaatcagaatgatacttttgctgattttgatagcatgactgatcgtcttttggatgagataatacagtatattcagatatatagtctaacagtctcaaaaataagc

SEQ ID NO: 81593 - DNA, 120 bp, Artificial Sequence
  ENSG00000082269_31 (sequence is synthesized)
tttattggacattcgttgggcaatttaataattcgttcagtgcttacaaggccaaggtttaaatattacctcaacaaacttcatacctttctgtctctttctggacctcaccttggtaca

SEQ ID NO: 81594 - DNA, 120 bp, Artificial Sequence
  ENSG00000082269_32 (sequence is synthesized)
ctctacaacagcagtgctcttgttaatacaggtctctggtttatgcagaaatggaaaaaatcaggttcgcttttgcagctgacatgtcgagatcactcagaccctcgccaaactttttta

SEQ ID NO: 81595 - DNA, 120 bp, Artificial Sequence
  ENSG00000082269_33 (sequence is synthesized)
tataagcttagtaacaaagcagggcttcattatttcaaaaatgttgtgctagtgggatccctacaggatcgctatgttccttatcactctgcccgcattgaaatgtgtaaaacagcttta

SEQ ID NO: 81596 - DNA, 120 bp, Artificial Sequence
  ENSG00000082269_34 (sequence is synthesized)
aaggacaaacagtcaggacagatctattcagaaatgatccacaacttgcttcgacccgttctgcaaagcaaggactgtaatttggttcgctataatgtcatcaatgcattgcccaataca

SEQ ID NO: 81597 - DNA, 120 bp, Artificial Sequence
  ENSG00000082269_35 (sequence is synthesized)
gctgattcactcattgggagagctgcacatatagctgttcttgattcggaaatatttttagagaaattctttctggttgctgccctcaaatatttccaatagtataaaagcattgttagc

SEQ ID NO: 81598 - DNA, 120 bp, Artificial Sequence
  ENSG00000082269_36 (sequence is synthesized)
gactggacaattacctcattcaacaatgtttcaaataatgtattatattaaaatgtagatgctgataagttctaagaaatatttatacctttttatatggaagataatttatatcatcca

SEQ ID NO: 81599 - DNA, 120 bp, Artificial Sequence
  ENSG00000082269_37 (sequence is synthesized)
tgtttagtgctttttaaacatcaactttactttctaggtaatgtggctgtgcaatatttttttaattttatctttttacttttctattactttttcatatattttgctacctaagtattt

SEQ ID NO: 81600 - DNA, 120 bp, Artificial Sequence
  ENSG00000082269_38 (sequence is synthesized)
cagtgaaactttaagcccatacctgtgtctgattgtttattattggctttccacaattcttacatcagactacattatattagagaccattattgctagaatagcatgggatttaaaatt

SEQ ID NO: 81601 - DNA, 120 bp, Artificial Sequence
  ENSG00000082269_39 (sequence is synthesized)
ttctaatactgggggtattatttagttaattataaatttttcttttcacattttactgtgttttaactggaaataaaattatggctgctacaatatattttttgaaatcaacttctgtag

SEQ ID NO: 81602 - DNA, 120 bp, Artificial Sequence
  ENSG00000082269_40 (sequence is synthesized)
ttctaaaatacaactttatcatacaatcaaaccaggtagttcatataaaacagtgtaatacaagttttctataaagtcattactgttgcttaaacatatttcatgcctattaaaatatat

SEQ ID NO: 81603 - DNA, 120 bp, Artificial Sequence
  ENSG00000082269_41 (sequence is synthesized)
tttctactggtgatttcaacattatttctcatactgacttttattactggaaatgttcctgtacatgttggcagcagataaagatttttgaatgtttgaatgccctctgccttgatttgg

SEQ ID NO: 81604 - DNA, 120 bp, Artificial Sequence
  ENSG00000082269_42 (sequence is synthesized)
cagtaaaatggataaatatgagactgaagaaagctctgtagcaggactttctagcccagagttgaaagtcagacctgctggtgcctccagtatttggtatacagaaggtgaaaagcagct

SEQ ID NO: 81605 - DNA, 120 bp, Artificial Sequence
  ENSG00000082269_43 (sequence is synthesized)
aacaaaatctctaaaaggaaagaatgaagaatcaaataaatccaaagttaaggttactaagcttatgaaaacaatgaaatctgaaaacacaaaaaaattaataaaacagaactctaagga

SEQ ID NO: 81606 - DNA, 120 bp, Artificial Sequence
  ENSG00000082269_44 (sequence is synthesized)
ttctgtggttttggtaggctacaaatgtttgaaaagtacagcatcaaatgatctcattaaatgctttgaaggcaatccttcacatagtcagaaggaaggtctggatcccacaatatgtgg

SEQ ID NO: 81607 - DNA, 120 bp, Artificial Sequence
  ENSG00000082269_45 (sequence is synthesized)
atataattttgacccaaagacctacatgagacagacaagtcaaaaggaagctagctgtttgccaactaatacagagagaactgaacaaaagtctccagatattgaaaatgttcaaccaga

SEQ ID NO: 81608 - DNA, 120 bp, Artificial Sequence
  ENSG00000082269_46 (sequence is synthesized)
ggtaatgttgcttgaactttatgactacattttcttttaacttttttcatggacttccttatatgtacataataattaaatgttgaaatttatgaaatacttttatgaatttagataatt

SEQ ID NO: 81609 - DNA, 120 bp, Artificial Sequence
  ENSG00000082269_47 (sequence is synthesized)
taaaatttattgaactaaaaagtaatgtaaataaaataattcatgttaaagatggaacaaaataattaactttacatgtttggtgatacagatgcaaatgtttttgatatatggagatgt

SEQ ID NO: 81610 - DNA, 120 bp, Artificial Sequence
  ENSG00000082269_48 (sequence is synthesized)
tgagtcttttgactttactaaaggtgctgaatagcattaaattcactattttccttttctgttttacttgtgaaaataaaaatgcactaaggttgggtagaagttctgtttgcactcact

SEQ ID NO: 81611 - DNA, 120 bp, Artificial Sequence
  ENSG00000082269_49 (sequence is synthesized)
aattgtgacagacagaggtttttgtaagtatttattgtacaattgatgcatgtttatttttagcgttgttattgcctctggtgttaataaatgaacaaatggctatctggaggaacagct

SEQ ID NO: 81612 - DNA, 120 bp, Artificial Sequence
  ENSG00000082269_50 (sequence is synthesized)
gctggaggggcagttgaagctcctgaagggcggggcacggagcttgaaggggcggggcctagcctcagagaggggagggaagaggcgggaggaggaggtgagagaggccgggggcggggc

SEQ ID NO: 81613 - DNA, 120 bp, Artificial Sequence
  ENSG00000082269_51 (sequence is synthesized)
cgtgcggccggggacctgttgatcgcaggtatagccggctggcccgggctccctcgggactggggcgactgcgcatgctcgctggccgcgctgggccagtagccgagccgcggtgacgaa

SEQ ID NO: 81614 - DNA, 120 bp, Artificial Sequence
  ENSG00000082269_52 (sequence is synthesized)
taatctaactaaaatatacaagctatgtgtatagttttcagtatattcttcctaatatacataaaaccattccctaatgtggaatagtttttttccctctctagttttatttatgtttga

SEQ ID NO: 81615 - DNA, 120 bp, Artificial Sequence
  ENSG00000082269_53 (sequence is synthesized)
ggatattagaagttatagttagaaaaagaagtcttaatcatatgagttctcacaccttgttttaaacctgaatctttttttctttggataaaagacttagatgcaccctggatgggaatt

SEQ ID NO: 81616 - DNA, 120 bp, Artificial Sequence
  ENSG00000082269_54 (sequence is synthesized)
tgcttcaagaattgggaagggtctgagattttaccccacttgcaagctgacaagttagtctgccacggtgccatggatgttggcaggacatgagagtcatggatcaaggtgctgttatca

SEQ ID NO: 81617 - DNA, 120 bp, Artificial Sequence
  ENSG00000082269_55 (sequence is synthesized)
aacagtcaggtaatggaataaaattatttcaaagagttataggtattaatgagctctttccaaaatttttcttgtagtcactttctctcgtatctgtcacccttctctttcctgttactt

SEQ ID NO: 81618 - DNA, 120 bp, Artificial Sequence
  ENSG00000082269_56 (sequence is synthesized)
cctttccacccacttatattaacagctgtcctttttccattcttctcacctgccacgtgaactgcctttaccaatgaagtaatactttcatctaattacaaatgcctctccattttgctg

SEQ ID NO: 81619 - DNA, 120 bp, Artificial Sequence
  ENSG00000082269_57 (sequence is synthesized)
cctcagaagtagttcatactttgatttcctctgaattaatgggattgacaattgtagtcatccttgtcatatgttctgctgtacctcgcttttacgcaaaggtggcagcaaggatttgcc

SEQ ID NO: 81620 - DNA, 120 bp, Artificial Sequence
  ENSG00000082269_58 (sequence is synthesized)
cctctttactgatagtaaatgataaagactttatttgttcttttgctatttgtgaataacaaaataaatttaaagtatagccatttggagccagaaggaaacttgagtcctgtttactca

SEQ ID NO: 81621 - DNA, 120 bp, Artificial Sequence
  ENSG00000082269_59 (sequence is synthesized)
cctgtttactcattttataactaaagcccagagatactaagtggcttagcccgaatcagttaattacagacttaggtcaagaacctggtctccgggcgtggtggctcctgcctgtaatcc

SEQ ID NO: 81622 - DNA, 77 bp, Artificial Sequence
  ENSG00000082269_60 (sequence is synthesized)
cgggagggaaaggttgcagtgagccaagatcatgctgttgcactgcagcctgagagacaagaacgaaactctgtctc

SEQ ID NO: 81623 - DNA, 120 bp, Artificial Sequence
  ENSG00000082269_61 (sequence is synthesized)
aaacactgggtcccgaaaggcatctgtcctgccccggcgcagatcccctgcagcctcctttcctactgcacaaatcgactagcgcagggaccgggctctctacccgggactgcacggagg

SEQ ID NO: 81624 - DNA, 120 bp, Artificial Sequence
  ENSG00000082269_62 (sequence is synthesized)
aagaagtaaataatttgtgtatgtacctaagaaggcaaatatgtaatctagtcattatattattatctttaatacgtacttatatctaagcagttacaaactatgagtaaaagttttcag

SEQ ID NO: 81625 - DNA, 120 bp, Artificial Sequence
  ENSG00000082269_63 (sequence is synthesized)
attaatatgttgtttctataaacatttaaattatgtaataatgaggatcttctatacattctcacattttttccttcaaaatgtggtatatcatttcaaagtatcactatacttttacaa

SEQ ID NO: 81626 - DNA, 120 bp, Artificial Sequence
  ENSG00000082269_64 (sequence is synthesized)
tcttgtcagaaactagaactggccaaggccaacatgcagctcctatatgagcgtcttctcagaagaaaacagctacgaacacagaaagacaaccatctagaggaaatggatgtagaagct

SEQ ID NO: 81627 - DNA, 120 bp, Artificial Sequence
  ENSG00000082269_65 (sequence is synthesized)
gaaaatttttatgaaaacaaacctgatttttacctatatattgataaatcagaaaagagacatttgtcatattgttattgtttgacttccaaaattaataatagaatagaacaatacagt

SEQ ID NO: 81628 - DNA, 120 bp, Artificial Sequence
  ENSG00000082269_66 (sequence is synthesized)
taagcatatgacctatttcaatcacaatccctgctgctaagaaaaaccacctaaaagtaagtaaaataggaaaatatatgatacagaatagaataggaacctaagaataggaattaatag

SEQ ID NO: 81629 - DNA, 120 bp, Artificial Sequence
  ENSG00000082269_67 (sequence is synthesized)
ccaagcctcattagggacaggaatcaggaactagagagctgtctcaaacttatatctccctcttctccttttccttcccttcttctaccactgacctaatataggaatgtgtattattaa

SEQ ID NO: 81630 - DNA, 120 bp, Artificial Sequence
  ENSG00000082269_68 (sequence is synthesized)
cttagcaggatggagggggcagtccacacattacacatatatgtttactgtagacctagtatggacattatgcaggtatttctatgtaattttattgtatagcatctcaagaggttttac

SEQ ID NO: 81631 - DNA, 120 bp, Artificial Sequence
  ENSG00000082269_69 (sequence is synthesized)
gtgttaaataactatctttccatcttgtttccttatatactctgcatgcaccctgattttactttacgtactaggagttcctccaaacatcattaatttttttccttttttaaaaaaatt

SEQ ID NO: 81632 - DNA, 120 bp, Artificial Sequence
  ENSG00000082269_70 (sequence is synthesized)
ttttaattataaaacataacacataaagtcagaaaatgcataaaacaggcacattttatcaaataattaaagcatacaccctttcagttattatccagatcaagaagtagaacactctca

SEQ ID NO: 81633 - DNA, 120 bp, Artificial Sequence
  ENSG00000082269_71 (sequence is synthesized)
atgctacagatgttctctctgtatcttttccaattaccatacccttcctaatacttagaagtaatcactatactgtcttttgtgatgatgagttccttccattttagttttatcacctat

SEQ ID NO: 81634 - DNA, 120 bp, Artificial Sequence
  ENSG00000082269_72 (sequence is synthesized)
ctctatcttgctttttcactcaagacattaggatattaatccatcttttttgacagtacctgtagattgttcattatcattgctgtaatatatctccatttgaatatacccacatttatt

SEQ ID NO: 81635 - DNA, 120 bp, Artificial Sequence
  ENSG00000082269_73 (sequence is synthesized)
tatccattctactgttgatagattcttggattacttctaacttgtggctattacaaaccaagctgctatgaacattcttatgtatatgtcctggcataccagtttctctgaaatacttac

SEQ ID NO: 81636 - DNA, 120 bp, Artificial Sequence
  ENSG00000082269_74 (sequence is synthesized)
ctgtgaggcaaattgctgagtcataggttatgcataacttcaattttactagctaatgtgacagttttcagagttgtaccaatttttactcccaccagcacagtttgttactccacacac

SEQ ID NO: 81637 - DNA, 120 bp, Artificial Sequence
  ENSG00000082269_75 (sequence is synthesized)
tctccaactcttgatactggcaagctttttaaactttgccaaactgatggatgcgaaatggtatattattgtggctttaatttgcatttctctgattacccatgcagttgagcactgctt

SEQ ID NO: 81638 - DNA, 120 bp, Artificial Sequence
  ENSG00000082269_76 (sequence is synthesized)
tgtgtgattattggttatgtaggtttgctccatatgaagtgcctattctaatgttttgcccatttctaataagataacttttttcttctttatttctgatacttttctgtgtcctttgtt

SEQ ID NO: 81639 - DNA, 120 bp, Artificial Sequence
  ENSG00000082269_77 (sequence is synthesized)
atgtgtttttactaatagatcctctctcatttcatggtttattattttcattgactttatattgttttttaatgaactggaggtcttaattttagaatagaaggaaactaagagaaaggc

SEQ ID NO: 81640 - DNA, 120 bp, Artificial Sequence
  ENSG00000082269_78 (sequence is synthesized)
cagacatggacatagccatttttggacataacatatgtggatcggtgtaaaagatggagatttttcaataaatgatgtttgagacaattgggtatccatatggtaagtattaaataaaat

SEQ ID NO: 81641 - DNA, 120 bp, Artificial Sequence
  ENSG00000082269_79 (sequence is synthesized)
tcagttccaagtggattgaagatttaaatgtgaaaggcaaaactgtaaagcttctaaagtataatcagaaacttacagaagactttaaaaagttggccaggagcagtggctcacactgtc

SEQ ID NO: 81642 - DNA, 120 bp, Artificial Sequence
  ENSG00000082293_0 (sequence is synthesized)
actcgcagggagctcactcctcggcggtgccgcagccctgtccggactccactgcgcctctgaggggctcaaatacgaattcaagatccgtggccgttcacatggtttcaaggcacaatg

SEQ ID NO: 81643 - DNA, 120 bp, Artificial Sequence
  ENSG00000082293_1 (sequence is synthesized)
agactcactggcccttggaaactttggctttggatgtcaatatttctgcttcctgcttccacttccgtgaccgttagggacaagacagaagagtcatgccctatcctgagaatagaggga

SEQ ID NO: 81644 - DNA, 120 bp, Artificial Sequence
  ENSG00000082293_2 (sequence is synthesized)
catcagctgacatatgacaacataaacaaacttgaagtttcaggttttgatctaggagacagcttttctctaagacgtgcattttgtgaaagtgataaaacctgtttcaaattgggaagt

SEQ ID NO: 81645 - DNA, 120 bp, Artificial Sequence
  ENSG00000082293_3 (sequence is synthesized)
gcacttcttattagagacactattaagatatttcccaaaggccttcctgaggagtactcagtagctgccatgtttcgagtacgaagaaacgccaaaaaggaacggtggtttctgtggcag

SEQ ID NO: 81646 - DNA, 120 bp, Artificial Sequence
  ENSG00000082293_4 (sequence is synthesized)
gttttaaaccagcagaatattccacagatttctatagtagttgatggtggaaagaaggtggtggaatttatgtttcaagccacagagggagatgtgttgaactacatttttagaaatcga

SEQ ID NO: 81647 - DNA, 120 bp, Artificial Sequence
  ENSG00000082293_5 (sequence is synthesized)
gaactccgtcctttgtttgatcgtcagtggcacaaacttggcattagtatacaatcccaggtcatttcactttatatggattgtaatttaattgcgaggaggcagactgatgaaaaggac

SEQ ID NO: 81648 - DNA, 120 bp, Artificial Sequence
  ENSG00000082293_6 (sequence is synthesized)
actgtggatttccatggacggacagttattgctacgcgagcttcagatggcaagcctgtggatattgaacttcaccaacttaaaatctactgcagtgcaaacctcatagctcaagaaaca

SEQ ID NO: 81649 - DNA, 120 bp, Artificial Sequence
  ENSG00000082293_7 (sequence is synthesized)
tgttgtgaaatatcagatactaagtgcccagagcaggatggctttggaaatattgcatcatcatgggtaactgctcatgccagtaaaatgtcttcatatctgccagcaaagcaggaactt

SEQ ID NO: 81650 - DNA, 120 bp, Artificial Sequence
  ENSG00000082293_8 (sequence is synthesized)
aaagaccagtgccagtgcattccaaacaagggagaagcaggattaccaggagctccgggttcacctgggcagaaagggcataaaggagagccgggtgaaaatggtttacatggtgctcca

SEQ ID NO: 81651 - DNA, 120 bp, Artificial Sequence
  ENSG00000082293_9 (sequence is synthesized)
ggattccctggtcaaaagggagagcaaggttttgaaggcagcaaaggagaaactggtgaaaagggtgaacaaggagaaaaaggagatccagctctggctggccttaatggagaaaatggt

SEQ ID NO: 81652 - DNA, 120 bp, Artificial Sequence
  ENSG00000082293_10 (sequence is synthesized)
ttgaaaggtgacttgggtcctcatggtccacctggcccaaaaggagaaaagggagatacaggacccccaggaccaccagccttacctggttccctggggatacaaggcccccaaggtcca

SEQ ID NO: 81653 - DNA, 120 bp, Artificial Sequence
  ENSG00000082293_11 (sequence is synthesized)
cctggaaaagagggtcagaggggaagacgagggaaaacaggacctcccggaaaaccaggacccccaggaccacctggacctcctggaatacaaggaatacaccaaactcttggtggatat

SEQ ID NO: 81654 - DNA, 120 bp, Artificial Sequence
  ENSG00000082293_12 (sequence is synthesized)
tataacaaggataacaagggaaatgatgaacatgaagctggaggcctgaaaggagacaagggtgaaactggactaccaggatttccagggtctgttggccctaaaggacaaaaaggagaa

SEQ ID NO: 81655 - DNA, 120 bp, Artificial Sequence
  ENSG00000082293_13 (sequence is synthesized)
cctggagagccttttacaaaaggagaaaaaggagatagaggagaacctggggtaataggatcacagggagtaaagggtgaacctggagatcccggaccccctggtttaataggaagccca

SEQ ID NO: 81656 - DNA, 120 bp, Artificial Sequence
  ENSG00000082293_14 (sequence is synthesized)
ggactaaagggtcagcaaggatctgcaggctccatgggacccagaggaccgccaggagatgttggattgccaggagaacatggtatcccaggaaaacaaggcattaaaggagaaaaggga

SEQ ID NO: 81657 - DNA, 120 bp, Artificial Sequence
  ENSG00000082293_15 (sequence is synthesized)
gatccgggtgggatcataggccctcccgggcttccaggtccaaaaggtgaggctggtcctccagggaaaagcctgccaggggaaccaggattagatggaaatcctggagcacctggtcca

SEQ ID NO: 81658 - DNA, 120 bp, Artificial Sequence
  ENSG00000082293_16 (sequence is synthesized)
cgtgggccaaagggtgaaagaggacttccaggtgttcacggttccccaggggacataggcccacaagggataggaattcctggcagaacaggcgcccaaggaccagctggagagccaggt

SEQ ID NO: 81659 - DNA, 120 bp, Artificial Sequence
  ENSG00000082293_17 (sequence is synthesized)
attcagggtcctcgaggtctccctgggttgccaggaactccagggactccagggaatgatggagttccagggagagatggaaagccaggcctgccaggccccccaggtgacccgattgca

SEQ ID NO: 81660 - DNA, 120 bp, Artificial Sequence
  ENSG00000082293_18 (sequence is synthesized)
cttcctctcttgggagacatcggtgctttgctcaagaatttctgtggcaactgccaagccagtgtcccagggctgaaaagcaacaaaggagaagaaggaggtgctggtgagcctggaaag

SEQ ID NO: 81661 - DNA, 120 bp, Artificial Sequence
  ENSG00000082293_19 (sequence is synthesized)
tatgattccatggcccggaagggtgatatagggccacggggtcctccaggaatcccaggaagagagggaccaaagggaagcaaaggagagcggggctaccctgggatacctggggagaaa

SEQ ID NO: 81662 - DNA, 120 bp, Artificial Sequence
  ENSG00000082293_20 (sequence is synthesized)
ggcgatgagggtcttcaaggaattccaggcattccaggtgctccaggcccgactggaccccctggcttaatgggaagaactggacatcctggtcccacaggagcaaaaggtgaaaagggc

SEQ ID NO: 81663 - DNA, 120 bp, Artificial Sequence
  ENSG00000082293_21 (sequence is synthesized)
agcgacggaccccctgggaaacccggaccacctggaccacctggtattccatttaatgaacgaaacggcatgagcagtttatataaaattaagggaggtgtgaatgttcccagttaccca

SEQ ID NO: 81664 - DNA, 120 bp, Artificial Sequence
  ENSG00000082293_22 (sequence is synthesized)
gggccacccggtcctcctggcccaaaaggcgatcctggcccagtgggagagcctggtgcaatggggttgccaggattagaaggatttccaggtgtaaagggagatcgaggcccagcaggt

SEQ ID NO: 81665 - DNA, 120 bp, Artificial Sequence
  ENSG00000082293_23 (sequence is synthesized)
cccccaggaatagcagggatgtcgggaaaacctggtgccccagggcctccaggagttccaggggaaccgggtgagagaggacctgttggagatataggtttccctggaccagaaggaccc

SEQ ID NO: 81666 - DNA, 120 bp, Artificial Sequence
  ENSG00000082293_24 (sequence is synthesized)
tcaggaaagccaggaataaatggaaaagatggaataccaggtgctcagggcatcatgggtaagcctggagacagaggccccaaaggagaacgtggtgatcaggggattccaggagacaga

SEQ ID NO: 81667 - DNA, 120 bp, Artificial Sequence
  ENSG00000082293_25 (sequence is synthesized)
ggctcacaaggtgaacggggaaaaccaggccttacaggcatgaagggggccatcggtcctatgggtccaccaggaaacaagggctccatgggatcccctggccaccaaggccctccaggc

SEQ ID NO: 81668 - DNA, 120 bp, Artificial Sequence
  ENSG00000082293_26 (sequence is synthesized)
tctccaggcatccctggcattccggctgatgcagtttcatttgaagaaataaagaagtatattaatcaagaggtcctaaggatttttgaagagaggatggctgtattcctatcccagctc

SEQ ID NO: 81669 - DNA, 120 bp, Artificial Sequence
  ENSG00000082293_27 (sequence is synthesized)
aagctgccagcagcaatgttggctgcccaagcttatgggagacctgggccaccagggaaggatgggttgcctgggccaccaggagaccctggaccccaaggctacagaggacagaaggga

SEQ ID NO: 81670 - DNA, 120 bp, Artificial Sequence
  ENSG00000082293_28 (sequence is synthesized)
gaaagaggtgaacctggaattgggctgccagggagtccaggtcttcctgggacttcagctctgggtttgccaggctcaccaggtgccccaggcccacagggccccccaggacccagtgga

SEQ ID NO: 81671 - DNA, 120 bp, Artificial Sequence
  ENSG00000082293_29 (sequence is synthesized)
agatgtaacccagaagattgcctctatcctgtgtctcatgcccatcagcgcacaggtgggaattgaacacacctgaagaagacttggttcctggtaacatttccttgccactggagctct

SEQ ID NO: 81672 - DNA, 120 bp, Artificial Sequence
  ENSG00000082293_30 (sequence is synthesized)
tttttttttttttttttttttttgggagtaagccaggcattaaaagcaaccgtttgaatcctattcctatagcaattgcaaatcagcattttttgatttttcccaaattcattccatatg

SEQ ID NO: 81673 - DNA, 120 bp, Artificial Sequence
  ENSG00000082293_31 (sequence is synthesized)
agcattttttgatttttcccaaattcattccatatgttttgctttacaattgctatgatttttactcagagttttatatgaaatatgcaagtaaatcttatcgttagttcttcttcaaaa

SEQ ID NO: 81674 - DNA, 120 bp, Artificial Sequence
  ENSG00000082293_32 (sequence is synthesized)
ggaaattgcatcttgtgacttagtagactgatgatgatatccattttgtagactcatcaacatgtggttggcctttgatttctgaattttaaagtttcagacttatcttttccttggtgt

SEQ ID NO: 81675 - DNA, 120 bp, Artificial Sequence
  ENSG00000082293_33 (sequence is synthesized)
ttaaatttactatcattgctaaacatctcgtcaacttttttgatatagtgcattgctcctgttgaatgttttttgactactttttataacttaagaatttttataccatctacatctatc

SEQ ID NO: 81676 - DNA, 120 bp, Artificial Sequence
  ENSG00000082293_34 (sequence is synthesized)
ctacttatgcagaaaaataggcaataagaacttcattttacaatttatgttttcaaaaaaaaaatgcaggaaactgttttatcagggagcccaaacacccagcatagccaactactgaaa

SEQ ID NO: 81677 - DNA, 120 bp, Artificial Sequence
  ENSG00000082293_35 (sequence is synthesized)
tgattttgttaattctgtataatgagctcaattcaaagcaatcaccactggcatgaataagtactgcatgaaaagggagtatcaaattccagttttgtatgagttctgcaaaaaaagcct

SEQ ID NO: 81678 - DNA, 120 bp, Artificial Sequence
  ENSG00000082293_36 (sequence is synthesized)
ctcttaaagcttcagtggcctagcaagatctttgggcccttgtatccattatccttatgacctcatcaccctcagactttaagacaagaagccaccatcaaaacaaaggatgggatacgt

SEQ ID NO: 81679 - DNA, 120 bp, Artificial Sequence
  ENSG00000082293_37 (sequence is synthesized)
atagaatggactcacttgtcctagaagatgaatgtgtagtgtcagcaaatgcatgttaagaaggtgaagcccaaaagctcttaaggagaattgtatttctccagaagctgcagcaagagg

SEQ ID NO: 81680 - DNA, 120 bp, Artificial Sequence
  ENSG00000082293_38 (sequence is synthesized)
tacagctcaacaaaggaaaaccacaggactggatatgcaactagtgctcagaccaaagagttcacacccactctaaaaccatgtcctctgaaaagaaacaaaaatacagtgatcatcaaa

SEQ ID NO: 81681 - DNA, 120 bp, Artificial Sequence
  ENSG00000082293_39 (sequence is synthesized)
tgcctaaacagtctttctgttggttagctgtacattcattgaggaactgttgattggcaggcactgattctctagaacactgggcatgaggatgttgcagaaatctagatggtgggtccc

SEQ ID NO: 81682 - DNA, 120 bp, Artificial Sequence
  ENSG00000082293_40 (sequence is synthesized)
acagatgtgagaacatgctgcaagagcctgccagccacagcaatcaggactcacagctcttcaaggagcagtgcagatttcaatttggctaaaacaggatgattgcttttgtctgtttac

SEQ ID NO: 81683 - DNA, 120 bp, Artificial Sequence
  ENSG00000082293_41 (sequence is synthesized)
tgaaaaatgagtttagaaaggctagcccactgacattggaaaaagctgtgaacagagttgtgtctgaggaatgtgcctaatttaaggcagggtttgttccaatgcatccgtgatttgaac

SEQ ID NO: 81684 - DNA, 120 bp, Artificial Sequence
  ENSG00000082293_42 (sequence is synthesized)
cggttttcattatagattaatgaactgctggtcaggtactgtctacaatggctgtgcatacctataacattttaggtatttcatattgaattatgctgtatatttcaattccaagtttat

SEQ ID NO: 81685 - DNA, 120 bp, Artificial Sequence
  ENSG00000082293_43 (sequence is synthesized)
ttattttccaaggttattttatttattgtaagcattttgacattgattttttttttttcgttttctttcttgtgcaatacctacaatggtgctgtgttttaaacttacacaattgggaca

SEQ ID NO: 81686 - DNA, 120 bp, Artificial Sequence
  ENSG00000082293_44 (sequence is synthesized)
tacgtatgtgttttcttagtaaaatggtaatttatcccgaaaaagtgtacatagatctaaaatttggtgctatgtgtatatcttgagcttttaatttgttgaattttctaaacgcttaca

SEQ ID NO: 81687 - DNA, 120 bp, Artificial Sequence
  ENSG00000082293_45 (sequence is synthesized)
acttatctgccactcatattaatttacttgaatttgtcataaagctaaatattttatatgttttcaaagattattttttcatattaataggttgtttatctttttgcctgtttgctaatt

SEQ ID NO: 81688 - DNA, 120 bp, Artificial Sequence
  ENSG00000082293_46 (sequence is synthesized)
taaaaatatttattttatcattttaatgttttcatggacttttttgctgatggtaatcaactttttttgttttttggtttttgagttgttcttgtcatagacataaaaagacaattcatt

SEQ ID NO: 81689 - DNA, 120 bp, Artificial Sequence
  ENSG00000082293_47 (sequence is synthesized)
ttcttgttttattaactctgttcatttttattctacaaaatatgtcatgcattctttcttatgaattgtatatttagaaatctttctaaataccattaaggcttgactggttaattccta

SEQ ID NO: 81690 - DNA, 120 bp, Artificial Sequence
  ENSG00000082293_48 (sequence is synthesized)
tttcaaggatttggatttattcaggtaatttgatgggatggggaaatataatattgtgtgatgcatattacaaagtggacttgtcacaatgacacaaactcattttttgtaactgggaaa

SEQ ID NO: 81691 - DNA, 120 bp, Artificial Sequence
  ENSG00000082293_49 (sequence is synthesized)
tatgactaaatttgacgtaactagagaaacaaggctgtatccacatggtacaagcctttctcaccctactctattatttaccttcagatactttttcctgcctcagctctgtacacatga

SEQ ID NO: 81692 - DNA, 120 bp, Artificial Sequence
  ENSG00000082293_50 (sequence is synthesized)
tatgcaacaaagggcagcaagaaatgctgggtccacctaatttaacacaaaatgaagttgagattcggcagttgcccaattcctttaataaaaagaaactaaataatttgggccccaaag

SEQ ID NO: 81693 - DNA, 120 bp, Artificial Sequence
  ENSG00000082293_51 (sequence is synthesized)
tagggtgggaagttttcctctaaatgacttgatggttgccaaatcccttgcaccattttattccattccaaaacatgtgtttatttccacatagatgttaatgatgttcaaagcagggga

SEQ ID NO: 81694 - DNA, 120 bp, Artificial Sequence
  ENSG00000082293_52 (sequence is synthesized)
gaagaattattcaatttcatgaataactcttgtttgcactccagaaaacaacatacatgtttaaatacaaaataattatgggccatgacgacgattaatattaaaactgtgatttccata

SEQ ID NO: 81695 - DNA, 120 bp, Artificial Sequence
  ENSG00000082293_53 (sequence is synthesized)
tacaagtatgtttgagttccaatcttacattttataccaagttcaaaacactttcagatagaagtctttctatgcaaagattaaagtatgacttcaattcatatttatggcctttggaat

SEQ ID NO: 81696 - DNA, 120 bp, Artificial Sequence
  ENSG00000082293_54 (sequence is synthesized)
ccaaagaaaaacagaagaataattcatggatttgttcattgttctttccaactgaaggcagtaaccattacttctaaccgtaacacaaacacagcaagttttaaccttttaaacttttca

SEQ ID NO: 81697 - DNA, 120 bp, Artificial Sequence
  ENSG00000082293_55 (sequence is synthesized)
ctttgtgagcaaagtaaccccataagtttatttccctatttcatggtattgtttaaactttaaaattttagtcacttaaagaacttaagcaattatattaaaatacgttgtctgtgaaaa

SEQ ID NO: 81698 - DNA, 120 bp, Artificial Sequence
  ENSG00000082293_56 (sequence is synthesized)
ttatcatttgatatttggcttataaagtaatttttatgaatctgttttatgagttaggtaagatttagcctttctgcagtctgtctcatctgttgggaacctgtgatatacctccatttg

SEQ ID NO: 81699 - DNA, 120 bp, Artificial Sequence
  ENSG00000082293_57 (sequence is synthesized)
tccacaagatggtgtttaaaacaatttgttcagaagaactgagcaaactaacagaaatacaaggctacgaacagtttagtggacaactaaatcagactcttgcctttgcactttttttta

SEQ ID NO: 81700 - DNA, 120 bp, Artificial Sequence
  ENSG00000082293_58 (sequence is synthesized)
acttttgtagataatttttgttaatttgttttgttaatttatgtttttcctaattttaagcatctttatgaaacaggcacagtaccctttggtttgttgactgttttgattttatttctt

SEQ ID NO: 81701 - DNA, 120 bp, Artificial Sequence
  ENSG00000082293_59 (sequence is synthesized)
tggtggatatatatgtacttatacacttagttaacatgcagattaactagtcataactgtttatacaccactctcatattttagtgatcaatatgaagacagctaaataattatcctact

SEQ ID NO: 81702 - DNA, 120 bp, Artificial Sequence
  ENSG00000082293_60 (sequence is synthesized)
ttttagacaggacagatactctcaacagacaagaaaaaagatttagcttatcacaagaagcagacaatttataaaactacacaatgtctaaactctatgttgctcagtgtacttaaaatt

SEQ ID NO: 81703 - DNA, 120 bp, Artificial Sequence
  ENSG00000082293_61 (sequence is synthesized)
agttatatttgtataacgtttatatttttctagaatacatcactatttacaaaagtacaattagaaacactgttttttttaagtaccgtttttattttcataacactaataatacactgg

SEQ ID NO: 81704 - DNA, 120 bp, Artificial Sequence
  ENSG00000082293_62 (sequence is synthesized)
ctgggattgagaatttctgttaagtgttttgctgacgttgttttaatgaatactcaaaaaagctttgcagatttgtccattgctcttgttcttaaattatttttcatacttgtctgtatc

SEQ ID NO: 81705 - DNA, 120 bp, Artificial Sequence
  ENSG00000082293_63 (sequence is synthesized)
caccttctgaagacacacaagtgtttactgtcgcagtttcccagcgttatttcttaatacttgagtgttgacacatttttgtaccatcccccttttgtaccatctctgctcacaaagatt

SEQ ID NO: 81706 - DNA, 120 bp, Artificial Sequence
  ENSG00000082293_64 (sequence is synthesized)
atatgcaggctttgaagaggaggagatgcagaagataattgaatttgtatcttgtatgcctatgtaattcaaagtgacttagtccattgaattgtgttcatttattagttggctggttaa

SEQ ID NO: 81707 - DNA, 120 bp, Artificial Sequence
  ENSG00000082293_65 (sequence is synthesized)
gatagcattaattatcttaaatttattcaactactaaaagtctcaggcaataggacagatgagtgtcatcatttttattgtgtggcatacttggagctataatccaaacgttttactcaa

SEQ ID NO: 81708 - DNA, 120 bp, Artificial Sequence
  ENSG00000082293_66 (sequence is synthesized)
caaaataatgctagagtaactgatcaatttggttaaattgaatgaagaaccaagtgaacacagagaaaacttattcggacaagtagacccagcacagcaaaaatttgtctgaaagataag

SEQ ID NO: 81709 - DNA, 120 bp, Artificial Sequence
  ENSG00000082293_67 (sequence is synthesized)
acaagcttataagaccaaagctaagtctaagaaaatctaaatggaaaaaaaattgcgtgttcagatccaatagtgagtgatgtggtacaactggaggagttagctacttgcttcatgaat

SEQ ID NO: 81710 - DNA, 120 bp, Artificial Sequence
  ENSG00000082293_68 (sequence is synthesized)
ttgtcaaaagtgaatactaataaagtgggaggcttcactaaatgagggggtaaataagatttaagtttatcagaagtgtgtgtattgtgtgaccatactaagcttctgggtgtaagtaaa

SEQ ID NO: 81711 - DNA, 120 bp, Artificial Sequence
  ENSG00000082293_69 (sequence is synthesized)
gatgctggctattttacaactttttattgtattgtgttatgcaaagtacattttggagataaatgtttttcagcacattaatgtctttaaattcaggttgtattgggtgtattttacaac

SEQ ID NO: 81712 - DNA, 120 bp, Artificial Sequence
  ENSG00000082293_70 (sequence is synthesized)
tatttatttttaaataacatttagggtgtgttttcccccattttgtttgttctctatcttacctcatcaaactctttacgatttaattgaatatactcatgttaagtgcaatggcattag

SEQ ID NO: 81713 - DNA, 120 bp, Artificial Sequence
  ENSG00000082293_71 (sequence is synthesized)
ttttattcaaaatcccacatgggcataatgctttgaggccttgattcctacatgttcattatgcataatgagcttgtcacctatctcagcaataaaggttctgaccctatgtcagggaaa

SEQ ID NO: 81714 - DNA, 120 bp, Artificial Sequence
  ENSG00000082293_72 (sequence is synthesized)
agaggtgttagtgcagctgctgttccaagtggatgttgtacagtgactagctgttttgtaagttattgtctaggcttatggtggtctattgcttcttagtctaatatcttaaaaaaaatc

SEQ ID NO: 81715 - DNA, 120 bp, Artificial Sequence
  ENSG00000082293_73 (sequence is synthesized)
attggtttttattttccttgatatccttgatatttccttacaatctcctttaagaacctccccatcaatgatctgttctaatatcagtaaaggatcaatgaaacaagacagaaatcaaat

SEQ ID NO: 81716 - DNA, 120 bp, Artificial Sequence
  ENSG00000082293_74 (sequence is synthesized)
ctagggcgctgcagggtcgcgaggaagtttgttggcccggaaccaagcacgccgtcgggcacgctagctccccgagagcaggcgggcgcatccgtggccgttcacatggtttcaaggcac

SEQ ID NO: 81717 - DNA, 89 bp, Artificial Sequence
  ENSG00000082293_75 (sequence is synthesized)
caccacctttaagagctgtaacacttgccgcgaaggtccacggcttcattcttgaagtcaacctggacacatcggaaggaacaaactcc

SEQ ID NO: 81718 - DNA, 60 bp, Artificial Sequence
  ENSG00000082293_76 (sequence is synthesized)
gaccggacacagttttacataggatttatatgtcagtcactcccaaatgtacttcacagc

SEQ ID NO: 81719 - DNA, 120 bp, Artificial Sequence
  ENSG00000082293_77 (sequence is synthesized)
aggatttatatgtcagtcactcccaaatgtacttcacagccctcacctctcttttgaattccattcctaactgtctatttgataactccattgtttcaatttcttaatggcatgtcagat

SEQ ID NO: 81720 - DNA, 120 bp, Artificial Sequence
  ENSG00000082293_78 (sequence is synthesized)
ttaacacttctaatttctcctctttcccactacagattaacttacgccttgccaagttttcttttatttttctagtgggatttatttcagtcaactaatctccctcctccctacattcaa

SEQ ID NO: 81721 - DNA, 120 bp, Artificial Sequence
  ENSG00000082293_79 (sequence is synthesized)
tgtcatctctagtccaagctaccatcatatctggcatcacagagtatggcagtatgactaagtttaccaggtaaaatacagatgcccagttaaatttgaagtttaaacaataaataattt

SEQ ID NO: 81722 - DNA, 120 bp, Artificial Sequence
  ENSG00000082293_80 (sequence is synthesized)
tttagtataagtatgttccaaatattgcgtgggacatacttgtactaaaaatatttttatttatctgacattcacatttaactgggaatcctgtattttattagctatgtttggtaattt

SEQ ID NO: 81723 - DNA, 120 bp, Artificial Sequence
  ENSG00000082293_81 (sequence is synthesized)
tatatatgtgagggagaagaggttatttattacacagagtggtcagggaaggctgccctccaacctcactgggcaggctggttggagtttctccaaggaccccctcccacctggctgact

SEQ ID NO: 81724 - DNA, 120 bp, Artificial Sequence
  ENSG00000082293_82 (sequence is synthesized)
cattcctccctctaaaaaagtacatctaattgccattacattaaggataaggatgaagactgatctcaacttcttcctgctgacaggggttgctgttttggggaaacggaagtcggagct

SEQ ID NO: 81725 - DNA, 120 bp, Artificial Sequence
  ENSG00000082293_83 (sequence is synthesized)
ccttcagaggcctatctaagggttcctagcagaaggggccattgtcagaggctccagttgcatgaccatttggagtttgatggcctgaaggcaagaacagacaaacccatttgttagaaa

SEQ ID NO: 81726 - DNA, 120 bp, Artificial Sequence
  ENSG00000082293_84 (sequence is synthesized)
acacatatcaacatgaaacaaggggagggataaggacagctcaaaaattccaaggccttttaccagtttgcacagggagagggaggccaaacacccagctagcaaaaaaaaaaaaaaaaa

SEQ ID NO: 81727 - DNA, 120 bp, Artificial Sequence
  ENSG00000082293_85 (sequence is synthesized)
agtcgcggcgcgaggaagacgcggccccagcctctgccgcctccgctgtcagagtcccgaggccaccgccgagagcgcgccggcgccgcagccacagcggccgagaaccaggaggcggcg

SEQ ID NO: 81728 - DNA, 120 bp, Artificial Sequence
  ENSG00000082293_86 (sequence is synthesized)
ccaggccaactctttgcctaatcaccaaatgttatttatagcctttaagtcattaaaacaaatcttgttaagattgaaaaggccatagattaatgtactataacagaataaattacaatt

SEQ ID NO: 81729 - DNA, 120 bp, Artificial Sequence
  ENSG00000082293_87 (sequence is synthesized)
cattgctttcttccattgatcttcccatgatgcacattaggaattcctaaaattacctcatttttttcatacgcatagtatattagtctatgtttcctttcatcttcaatatttacaagt

SEQ ID NO: 81730 - DNA, 120 bp, Artificial Sequence
  ENSG00000082293_88 (sequence is synthesized)
ggacctcctggaatacaaggaatacaccaaactcttggtggatattataacaaggataacaagggaaatgatgaacatgaagctggaggcctgaaaggagacaaggtttaattatcatag

SEQ ID NO: 81731 - DNA, 120 bp, Artificial Sequence
  ENSG00000082293_89 (sequence is synthesized)
ttcacttccccattcaataagatgtttcactcctgtttgattctgaaattgtaatgaccttggattccatgtgaatgtgccattgtcagaaaaaaaatgcacattaaatctacaggcaga

SEQ ID NO: 81732 - DNA, 120 bp, Artificial Sequence
  ENSG00000082397_0 (sequence is synthesized)
cgtcgtccgcggagcctgaccctgcgccaggacggaggaggctgtgcccatgtaactgtcctgaagtactgcggtggccccctcccccgcggctgggagggcaggcaggacgaggttggc

SEQ ID NO: 81733 - DNA, 120 bp, Artificial Sequence
  ENSG00000082397_1 (sequence is synthesized)
tttcctcgcacggtctctgggcgtgggcccccgccgcagctccgcggagcctcggtgtctcctgcaacagggggcggggggaacagcggcgagcagccctgggctgcggcttcctcccca

SEQ ID NO: 81734 - DNA, 120 bp, Artificial Sequence
  ENSG00000082397_2 (sequence is synthesized)
cgcccgagtctcctgcgcaccgccgccgaggacgcgcgcccgagcctagtccccacgccgcggcgcgcccgggctccctgctgatcccagaacaatcaaccatgacgaccgaatctggat

SEQ ID NO: 81735 - DNA, 120 bp, Artificial Sequence
  ENSG00000082397_3 (sequence is synthesized)
ggatcagactcggaatccaagccggaccaggaggccgagccccaggaggcggcgggggcgcaggggcgcgcgggggcgcccgtgccggagccgcccaaggaggagcagcagcaggccctg

SEQ ID NO: 81736 - DNA, 120 bp, Artificial Sequence
  ENSG00000082397_4 (sequence is synthesized)
agttcgccgccgctgcagcgcacagcaccccggtgcggagggaggtcactgacaaggaacaggagtttgctgccagggctgcaaaacagctcgaatatcagcaattagaagacgataaac

SEQ ID NO: 81737 - DNA, 120 bp, Artificial Sequence
  ENSG00000082397_5 (sequence is synthesized)
tttctcagaaatcatctagcagtaaactctctcggtctccattaaagattgtcaaaaagcctaaaagcatgcagtgcaaagtgatacttctcgatggatcagaatatacctgtgatgtag

SEQ ID NO: 81738 - DNA, 120 bp, Artificial Sequence
  ENSG00000082397_6 (sequence is synthesized)
agaaacgctccagaggacaagtgctgtttgataaagtgtgtgaacacttgaacttgctagagaaagactactttgggcttacgtatcgagatgctgaaaaccagaagaattggttggacc

SEQ ID NO: 81739 - DNA, 120 bp, Artificial Sequence
  ENSG00000082397_7 (sequence is synthesized)
ctgctaaggaaataaaaaaacaggttcgaagtggtgcttggcacttttcatttaatgtgaaattttatccaccagaccctgcccaactatctgaagatatcaccaggtactacctctgct

SEQ ID NO: 81740 - DNA, 120 bp, Artificial Sequence
  ENSG00000082397_8 (sequence is synthesized)
tgcagttgcgagatgacatcgtgtccggaaggctgccctgctcctttgttaccctggccttgctgggctcctacactgtccagtcagagctcggagactatgacccagatgaatgtggga

SEQ ID NO: 81741 - DNA, 120 bp, Artificial Sequence
  ENSG00000082397_9 (sequence is synthesized)
gcgattacattagtgagttccgctttgcaccaaaccacactaaagaactggaagacaaagtgatcgagctgcacaagagccacagaggaatgacgccagcagaagcagagatgcatttct

SEQ ID NO: 81742 - DNA, 120 bp, Artificial Sequence
  ENSG00000082397_10 (sequence is synthesized)
tggaaaatgccaaaaaattatcaatgtatggggtagatttacatcatgctaaggactcagaaggggtagaaattatgttaggagtttgtgcaagtggtctgttgatatatcgcgaccggc

SEQ ID NO: 81743 - DNA, 120 bp, Artificial Sequence
  ENSG00000082397_11 (sequence is synthesized)
tgcgaataaacagatttgcctggcccaaggttctaaagatttcatacaaacggaacaacttttacattaagatccggccgggagagtttgaacaatttgaaagcaccattgggtttaagc

SEQ ID NO: 81744 - DNA, 120 bp, Artificial Sequence
  ENSG00000082397_12 (sequence is synthesized)
tgccaaaccatcgagctgccaagcgtttatggaaagtatgtgttgagcatcatacatttttcagactactgttaccagaagcacctcccaagaaattcctaaccttgggttccaagtttc

SEQ ID NO: 81745 - DNA, 120 bp, Artificial Sequence
  ENSG00000082397_13 (sequence is synthesized)
gttatagtggcaggacacaagcgcaaacgagaagagccagtgcgttgatagatcgcccagcaccttactttgaacgctcatccagcaaacgttataccatgtctcgcagcttggatggag

SEQ ID NO: 81746 - DNA, 120 bp, Artificial Sequence
  ENSG00000082397_14 (sequence is synthesized)
aggttggtactggccagtacgccacaacaaaaggcatctctcagaccaacttgatcaccactgtgactccggagaagaaggctgaggaggagcgggacgaggaagaggacaaacggagga

SEQ ID NO: 81747 - DNA, 120 bp, Artificial Sequence
  ENSG00000082397_15 (sequence is synthesized)
agggggaagaagtcacgcccatctcggccatccggcacgagggaaagtcacctgggcttggcactgactcatgtcccttgtcacccccatccacccattgtgcccccacatctcccacag

SEQ ID NO: 81748 - DNA, 120 bp, Artificial Sequence
  ENSG00000082397_16 (sequence is synthesized)
agctccgtaggaggtgtaaggagaatgactgcaaactgccaggttatgagccgtccagagctgagcacctgcctggagagcccgccttggactctgatggcccagggaggccttacctag

SEQ ID NO: 81749 - DNA, 120 bp, Artificial Sequence
  ENSG00000082397_17 (sequence is synthesized)
gggatcaagatgtggcttttagctacagacagcaaactggcaaggggaccaccctgttctccttctccttgcagctccctgagtcattcccctccctcctagatgatgatggatacctct

SEQ ID NO: 81750 - DNA, 120 bp, Artificial Sequence
  ENSG00000082397_18 (sequence is synthesized)
ctttccccaacctttctgaaaccaacctcctgccccagagcttgcagcattacctcccgatccgctcaccgtcccttgtgccctgtttcctcttcatctttttctttctgctgtctgcct

SEQ ID NO: 81751 - DNA, 120 bp, Artificial Sequence
  ENSG00000082397_19 (sequence is synthesized)
ctctccttccctctggctctgtgcctctgctacctggagcccaaggcggcctccttgagcgcctccctagacaatgacccgagtgacagttcagaggaagagactgacagtgagcgcacg

SEQ ID NO: 81752 - DNA, 120 bp, Artificial Sequence
  ENSG00000082397_20 (sequence is synthesized)
gacaccgcagccgacggggagaccactgccactgagtcggaccaggaggaagatgcagagctcaaggcacaggagctagaaaaaactcaagatgacctgatgaaacatcaaaccaacatt

SEQ ID NO: 81753 - DNA, 120 bp, Artificial Sequence
  ENSG00000082397_21 (sequence is synthesized)
agcgagctgaaaagaaccttcttagaaacctcaacagacactgccgtaacgaatgaatgggagaagaggctttccacctcccccgtgcgactggccgccaggcaggaggatgcccccatg

SEQ ID NO: 81754 - DNA, 120 bp, Artificial Sequence
  ENSG00000082397_22 (sequence is synthesized)
atcgaaccacttgtccctgaagagactaagcagtcttctggggaaaagctcatggatggctctgaaatcttcagtttattagagtctgcgcgaaaaccaacagaattcataggaggggtt

SEQ ID NO: 81755 - DNA, 120 bp, Artificial Sequence
  ENSG00000082397_23 (sequence is synthesized)
acttctacttctcaaagctgggttcagaaaatggaaaccaagacggagtccagtggaatagagacggaacccaccgtgcaccacctgccgcttagcactgagaaggtggtgcaggagacc

SEQ ID NO: 81756 - DNA, 120 bp, Artificial Sequence
  ENSG00000082397_24 (sequence is synthesized)
gtgttggtggaggagcggcgtgtggtgcacgcgagtggggatgcttcttactcggcgggagacagcggggatgctgcagcacagcccgcattcacaggcattaaagggaaagagggctct

SEQ ID NO: 81757 - DNA, 120 bp, Artificial Sequence
  ENSG00000082397_25 (sequence is synthesized)
gccttgacggagggggctaaagaggaaggaggggaggaggtcgctaaagctgtcctggaacaggaagagacagccgctgcttcccgtgagcgacaagaggagcagagtgcagccatccac

SEQ ID NO: 81758 - DNA, 120 bp, Artificial Sequence
  ENSG00000082397_26 (sequence is synthesized)
atttcagaaactttggaacaaaaacctcattttgagtcctcaacggtgaagacggaaaccatcagttttggcagtgtttcaccgggaggagtaaagctagaaatttccacgaaggaagtg

SEQ ID NO: 81759 - DNA, 120 bp, Artificial Sequence
  ENSG00000082397_27 (sequence is synthesized)
ccagtagttcacaccgaaaccaaaaccatcacatatgaatcatcacaggtcgatccaggcacagatctggagccaggcgtgctgatgagtgcacagacgatcacatctgaaaccaccagt

SEQ ID NO: 81760 - DNA, 120 bp, Artificial Sequence
  ENSG00000082397_28 (sequence is synthesized)
accaccaccactacgcacatcaccaaaactgtgaaagggggcatttcagagacaagaattgagaagcgaatagtcatcacgggggatgcagacattgaccatgaccaggcgctggctcag

SEQ ID NO: 81761 - DNA, 120 bp, Artificial Sequence
  ENSG00000082397_29 (sequence is synthesized)
gcaattaaagaggccaaagagcagcaccctgacatgtcagtgaccaaagtagtggtccataaagagacagagatcacaccagaagatggagaggattgaccagaggaataacttagcttg

SEQ ID NO: 81762 - DNA, 120 bp, Artificial Sequence
  ENSG00000082397_30 (sequence is synthesized)
cacatgaatgcagtcatgcaaaccgttaggaaaaccagagcctatatggagttccctcttctaacccaactgacttgtatctgtccgtggaaaatttcagtccagaagaattgaccttga

SEQ ID NO: 81763 - DNA, 120 bp, Artificial Sequence
  ENSG00000082397_31 (sequence is synthesized)
ccattaataaagacactggcagagagatcttcccataataaagcaatctgattcagcatcactaaaccgataatgcatgaagcaacgataaaattacaaaagagcagcatttttaatttt

SEQ ID NO: 81764 - DNA, 120 bp, Artificial Sequence
  ENSG00000082397_32 (sequence is synthesized)
cacaaaatgtctcagttttcagctatacctgcacgttcataaccaacaatataaaccgtggtctcatgtaacacataaacaattcatgcctttcatagtttattattattaaagtctaaa

SEQ ID NO: 81765 - DNA, 120 bp, Artificial Sequence
  ENSG00000082397_33 (sequence is synthesized)
caaaattgcaatttcttaggtaaccttatatttacaataaatgaagattaccctcaaatgctagaagctgtctaggtccgtccggtgtgtcagattttcctcagattagatgtgccaata

SEQ ID NO: 81766 - DNA, 120 bp, Artificial Sequence
  ENSG00000082397_34 (sequence is synthesized)
accaagtttattcagtaaacaacttgtacttgtttcatctggttttattactctcacccataaacagtaatgactctctgaccctctggaaatatgtaatgcttccaatcttgctttgtg

SEQ ID NO: 81767 - DNA, 120 bp, Artificial Sequence
  ENSG00000082397_35 (sequence is synthesized)
tatctcatttaatttgttataaggtagtactgattttagcatattaatgcgatttcttccttgttgtttgctttggtctgtgttcaatccagagagcttaaattgtcattattttgggaa

SEQ ID NO: 81768 - DNA, 120 bp, Artificial Sequence
  ENSG00000082397_36 (sequence is synthesized)
gaaaacctgtatttttgttagtttacaatattatgaaatttcacttcaggagaaactgctgggcttcctgtggctttgttttcttagttactttttccgtgccgtgtattttttaattga

SEQ ID NO: 81769 - DNA, 120 bp, Artificial Sequence
  ENSG00000082397_37 (sequence is synthesized)
tttttcttcttttacttgaaaagaaagtgttttattttcaaatctggtccatatttacattctagttcagagccaagccttaaactgtacagaatttccactgtaattaaaactatttag

SEQ ID NO: 81770 - DNA, 120 bp, Artificial Sequence
  ENSG00000082397_38 (sequence is synthesized)
tgttagttataaatagccttcaaaaagagagattctccattacacgatcacctgcatcacagcccatggtgaatgtatgtttctgcatagcgaaataaaaatggcaaatgcactgaaagc

SEQ ID NO: 81771 - DNA, 120 bp, Artificial Sequence
  ENSG00000082397_39 (sequence is synthesized)
gttatttgatttgccttggctgtggggaattctgtgctcagaagcaaggactggagcagtgaagtcattgtcctgcctggtgttgtgacatcactatggctcaaaggaaacaagggtggg

SEQ ID NO: 81772 - DNA, 120 bp, Artificial Sequence
  ENSG00000082397_40 (sequence is synthesized)
gcaggcaaaaccagaccatctgaagcatcttgctggctttaaaactttgcctgatcaatcaatgagactcctttctcaagttgaactgcattgcgagaacaatcaaccatgacgaccgaa

SEQ ID NO: 81773 - DNA, 120 bp, Artificial Sequence
  ENSG00000082397_41 (sequence is synthesized)
ctttggcgcgtcctgctcagaagccggggagctcctggccggcggctggcggggaagcgcggcgcgggaggaggtattgggagacaaaagaagctcatctataaacattttccatgaatc

SEQ ID NO: 81774 - DNA, 120 bp, Artificial Sequence
  ENSG00000082397_42 (sequence is synthesized)
ccatccggcacgagggaaagactgacagtgagcgcacggacaccgcagccgacggggagaccactgccactgaggagctagaaaaaactcaagatgacctgatgaaacatcaaaccaaca

SEQ ID NO: 81775 - DNA, 120 bp, Artificial Sequence
  ENSG00000082397_43 (sequence is synthesized)
gttccttgtcttttccatgactgacatttttcatgggaaaacacagcttggaaagtaaagaagattttttgttattgttttatcatgccgtttagaagctaaatgaagaagacaaagtat

SEQ ID NO: 81776 - DNA, 120 bp, Artificial Sequence
  ENSG00000082397_44 (sequence is synthesized)
agcagttcgccgccgctgcagcgcacagcaccccggtgcggagggaggtgagcccaggccagaaaactaatgacgcagtgtttgctgagctgctccaggatcggctttaaccttggtctc

SEQ ID NO: 81777 - DNA, 120 bp, Artificial Sequence
  ENSG00000082397_45 (sequence is synthesized)
aaggctgaggaggagcgggacgaggaagaggacaaacggaggaagggggaagaagtcacgcccatctcggccatccggcacgagggaaaggagctagaaaaaactcaagatgacctgatg

SEQ ID NO: 81778 - DNA, 120 bp, Artificial Sequence
  ENSG00000082397_46 (sequence is synthesized)
agtttcaggatttggctaacacaaatgccctacagtccagtgtctgattggcatgtggagagagaaacgctccagaggacaagtgctgtttgataaagtgtgtgaacacttgaacttgct

SEQ ID NO: 81779 - DNA, 120 bp, Artificial Sequence
  ENSG00000082397_47 (sequence is synthesized)
aaccttggtctcttagccctagaggcagctatgaggggtcatctgctgttccccttctagccccaggcagatgaaaatgtatgctattttaaggctttcagtgaatgacattccacaacc

SEQ ID NO: 81780 - DNA, 120 bp, Artificial Sequence
  ENSG00000082397_48 (sequence is synthesized)
atagtttatcatttcagaggagaagagattgcagccataattattagataataacatgagcactgtatggtcccatcacagacctgcatgtagcagttgccctgattttcttaaaggatt

SEQ ID NO: 81781 - DNA, 120 bp, Artificial Sequence
  ENSG00000082397_49 (sequence is synthesized)
cttattttagaaatgagataccatcagaatttctaatttagcttttatatttcaaatatagggcacagaggattgggttattgtagacagaataccaactgaggtagttgatggtgattt

SEQ ID NO: 81782 - DNA, 120 bp, Artificial Sequence
  ENSG00000082397_50 (sequence is synthesized)
gaaaaagattgtgacttacaaggtggtgaccgtgagcagtaaaactggtgatctcccagctgacatgttaaaatctggcactattaaaatgcaaagcttcgaagaattggctcgagaaat

SEQ ID NO: 81783 - DNA, 120 bp, Artificial Sequence
  ENSG00000082397_51 (sequence is synthesized)
gcaactgaaagaagacagcaaacagaaaatatacactctaggaaaatcctatgacactgtctccgggagaattgttactatgactgggaaagctaaagagggtgagaaagtggagcagcc

SEQ ID NO: 81784 - DNA, 120 bp, Artificial Sequence
  ENSG00000082397_52 (sequence is synthesized)
ctccactacagaagcacttcagaaaatggagaaagaaataccagagtccatgaagatcattcccggcctggcagaatatgaggtcctggaaaccctcgctgatgagaaatccaagagagg

SEQ ID NO: 81785 - DNA, 120 bp, Artificial Sequence
  ENSG00000082397_53 (sequence is synthesized)
accagaggtccagacgacacagcggaaattgtccgaatccctggcccccatcaaggaggccgagtctcgccggcagagtcctgaagaagatgacctcaagaaggctccacagctggagaa

SEQ ID NO: 81786 - DNA, 120 bp, Artificial Sequence
  ENSG00000082397_54 (sequence is synthesized)
ggatgtggccgtcctccctggcctggaaggcagacgcttcagcaaaacagagcaagtgcccgagagtgaggtcttaaaagtgggcctctttggtccccgaaggaagagcctgtccgaatg

SEQ ID NO: 81787 - DNA, 120 bp, Artificial Sequence
  ENSG00000082397_55 (sequence is synthesized)
gagatattcccaggaaccagcctttaccgttgctactgcccattacgttactgagtcatccgcctcccgagtagtggtaaccagtgtcactcattggggccacagtttgcaattccagca

SEQ ID NO: 81788 - DNA, 120 bp, Artificial Sequence
  ENSG00000082397_56 (sequence is synthesized)
tgacagtttttgaggcagtccccttccaccccaaacctttccgtttctcttgctgcttggctttatgttgagagcagccaacccagcttcttaattttttttcatggttaaatcaatacc

SEQ ID NO: 81789 - DNA, 120 bp, Artificial Sequence
  ENSG00000082397_57 (sequence is synthesized)
gcagtgcaaagtcagcattaaaacactttccattttatttccagctccctgttcccaagatgtgatagtgctgctgtggcttgcaatgaaggggaaaaaatatatatatctgcttaaatc

SEQ ID NO: 81790 - DNA, 120 bp, Artificial Sequence
  ENSG00000082397_58 (sequence is synthesized)
ggcgccaccctgatcctaataaccgtctctgctttaccaaacaagagcacctggttttctattttatttcccattcttttcgtttccaaactctgagattccttcgttcttcctcctccc

SEQ ID NO: 81791 - DNA, 120 bp, Artificial Sequence
  ENSG00000082397_59 (sequence is synthesized)
tgtctcctctgcctacgattttgtctaacaagctgtgaatgtttatgtgcctgagtttgtgtctctcttttgtgcttgactctgcctctctttgttcactcagactaagcagtcttctgg

SEQ ID NO: 81792 - DNA, 120 bp, Artificial Sequence
  ENSG00000082397_60 (sequence is synthesized)
tggtcctacagtttcaatgctattcctctagtccagcatgtattccgaagaaaattccgaattaactttccaatatatgatttatgattccttttgtaatcattgtacctcatttgtaaa

SEQ ID NO: 81793 - DNA, 120 bp, Artificial Sequence
  ENSG00000082397_61 (sequence is synthesized)
tgccgattctctaggcttgcctaggctggcatgaggcatggggcacttccctctcatccttcacctgatccctcctttcctctgttctctcactggcatttgttgggctggttaccaaga

SEQ ID NO: 81794 - DNA, 120 bp, Artificial Sequence
  ENSG00000082397_62 (sequence is synthesized)
ggatggagaattggtttatgggtttgtctcacatttggagcttccattcttgtggagtttttgcatgcactgccagttagaggataaaggaagagcagagtctatgcttctatgcttgtg

SEQ ID NO: 81795 - DNA, 120 bp, Artificial Sequence
  ENSG00000082397_63 (sequence is synthesized)
tggtcttcctggtgttcccttttattccatggcctgcactctttgattatccaaatttgtaatggcaaatttgattttacttgccatgtggcctaattggaacaaaggcagttttgctct

SEQ ID NO: 81796 - DNA, 120 bp, Artificial Sequence
  ENSG00000082397_64 (sequence is synthesized)
gagaggctcaatttgtgtgttccaaatactagggaaataatatatacccctttctccttctgatggcaacattatcccgtcgtaagctttctcttcaactgtgtttgattgtaacctgtt

SEQ ID NO: 81797 - DNA, 120 bp, Artificial Sequence
  ENSG00000082397_65 (sequence is synthesized)
tatgcttttgtctttagttttgtttttttaatttgaaagctgagcactcactttctttttggatgtcttatatttcctgtattctttgggatgatttttctccctagcgtagcactgtct

SEQ ID NO: 81798 - DNA, 120 bp, Artificial Sequence
  ENSG00000082397_66 (sequence is synthesized)
cagaaggaggcaaaaaaaatgcagtcttgtggtcctgtagaaagcacatacctttccagtgactgtttggccagcatcatgagcagactatatcatctatgtgagcacagacttgtcatg

SEQ ID NO: 81799 - DNA, 120 bp, Artificial Sequence
  ENSG00000082397_67 (sequence is synthesized)
catagtcacctgccatgcaagatctcatggggccatgagcgtttctgagagggctttgaatgctgaatgcagcagtcgagcgacttgcacaacttggtgatgtgataaaatgtttaagag

SEQ ID NO: 81800 - DNA, 120 bp, Artificial Sequence
  ENSG00000082397_68 (sequence is synthesized)
atttcatatattagtaagttttctaacatcggtttaagaaacaaattgatgagtggcatctcttaaaagagaaatataaaaaatactcattttactcaaatgaataatatattttggacg

SEQ ID NO: 81801 - DNA, 120 bp, Artificial Sequence
  ENSG00000082397_69 (sequence is synthesized)
atagcaaaaaaaataaaacagatttcttccatgagcttcagccacttgggcgttgttgtaattacttaagagaaagcatgtaattggcagtgacttaacgctggaatgtcatggcatctt

SEQ ID NO: 81802 - DNA, 120 bp, Artificial Sequence
  ENSG00000082397_70 (sequence is synthesized)
gtccaaacgagcattctaacttccaggatactttttttgtgtccttgatctgagaaaatctttcagttgttttcaaatgagtaactaatcaaatgtcttttttgcaggaataacttagct

SEQ ID NO: 81803 - DNA, 120 bp, Artificial Sequence
  ENSG00000082397_71 (sequence is synthesized)
gtggtacatctcctaagcttgatacaacgtctctgatgacctctggacatcacacatccataggaaattacctaaacatgaaatgtgcaagtagcaaaaggaaattgcagttctaggatg

SEQ ID NO: 81804 - DNA, 120 bp, Artificial Sequence
  ENSG00000082397_72 (sequence is synthesized)
cgggcccgcgagggctgagcggcgcgggctgtcacaggcgcccgaagcgcgctgcaggtggcaacttggaggtgccgccaccgcagctgcgggaggagcccgggtctggcggccccttcc

SEQ ID NO: 81805 - DNA, 120 bp, Artificial Sequence
  ENSG00000082397_73 (sequence is synthesized)
ttccagcctccaggagctctttcccgccgccgagcccgagactggaccccggagaattcgaaggaaagagcccctgcggagggacctgtgagcagccctacctctctctgcccttgcgct

SEQ ID NO: 81806 - DNA, 120 bp, Artificial Sequence
  ENSG00000082397_74 (sequence is synthesized)
ccatctcagtggtgaagttgacaagtcatctgtccagtgtgtggaataggatggggtttggtagcatctccctctctgtggttctcttgagcctttcacgaacaatcaaccatgacgacc

SEQ ID NO: 81807 - DNA, 120 bp, Artificial Sequence
  ENSG00000082397_75 (sequence is synthesized)
acagtcatgcggagaagctacactgggaaccaggggaaatattagaagaagaatctgaaggacactataaaatactgtgcagttattgcttcctgccccggcttgatttttggagtgttg

SEQ ID NO: 81808 - DNA, 120 bp, Artificial Sequence
  ENSG00000082397_76 (sequence is synthesized)
aatttaaggagagaatctggatgtgatagaaagcaattgcttttacctttccgggatctttctgtgtttcacagagaatattcctggaggaatagaagccggagagtcaatgctacagta

SEQ ID NO: 81809 - DNA, 120 bp, Artificial Sequence
  ENSG00000082397_77 (sequence is synthesized)
ctggcgggccgcgggaggggccctgcgctcagcgcgcggcggcagcgggctcgtcccgggtgcaggcgcgggcgggcgcagcgcggggccgataagaacaatcaaccatgacgaccgaat

SEQ ID NO: 81810 - DNA, 120 bp, Artificial Sequence
  ENSG00000082397_78 (sequence is synthesized)
gctgcagatgttccttgtcttttccatgactgacatttttcattcccaggcattcttctaggactgaagatggaagagaagcaagcagatacaaacccctgctgttctggagcttctatt

SEQ ID NO: 81811 - DNA, 120 bp, Artificial Sequence
  ENSG00000082397_79 (sequence is synthesized)
agtggggatgacttctcagcttctgatttgttattcgctcctagatatagatcccttttcctgtgtgtatatttattttaattctctcaggatacatgtgaattgtactctttatagttt

SEQ ID NO: 81812 - DNA, 120 bp, Artificial Sequence
  ENSG00000082397_80 (sequence is synthesized)
gccttctaaaattcttttggtatccatgtttgtgtgaactagatttttttttctgtttcctttccatgggaaaatcacattttcaccagagtgtttgtggtagtgccatgagccttgatc

SEQ ID NO: 81813 - DNA, 120 bp, Artificial Sequence
  ENSG00000082397_81 (sequence is synthesized)
aaaattttgttttattttgactactaataagattgacattacttttaaagcaaacaaaagagctgaaaggaacacaaatgtaaaacattgactgttggatactttatgttctgaatatag

SEQ ID NO: 81814 - DNA, 120 bp, Artificial Sequence
  ENSG00000082397_82 (sequence is synthesized)
cgctccattccttgagtctcaggtaaaaaccaaacataaaggattttccagaagaaattggtcttcagacttcagtgtcattaaaatgctcttagtttttattttccctttaacatttat

SEQ ID NO: 81815 - DNA, 120 bp, Artificial Sequence
  ENSG00000082397_83 (sequence is synthesized)
cttgtttaaaaccaaggtaggtacataattttgatttagattctggggaagggaaaattgaattttcttaatattttagttatcagttatgcatcatttcttcatggcttctaatccaag

SEQ ID NO: 81816 - DNA, 120 bp, Artificial Sequence
  ENSG00000082397_84 (sequence is synthesized)
ctgatttttctctgtatgttgtcattgacttactttctgataataatcttgctgaaatgttgttttactgcctgtttttacctgtagagtcgtgctaatttagatgaagttgactgattt

SEQ ID NO: 81817 - DNA, 120 bp, Artificial Sequence
  ENSG00000082397_85 (sequence is synthesized)
tgaaagttctgaattcttattggtttccccactagccaagtgtgataaagaaaatgcaggaaggagactctgctgactctgtggttacttctcgtcaaataattttccagaaaactgtcc

SEQ ID NO: 81818 - DNA, 120 bp, Artificial Sequence
  ENSG00000082397_86 (sequence is synthesized)
catcaaccctagaggttattctttcaattcatttcatttaatctagcaacaacatgtagatcaatctgtagtggtatttttaaaggcacacgtatttctagatttaagttttcaggctgt

SEQ ID NO: 81819 - DNA, 120 bp, Artificial Sequence
  ENSG00000082397_87 (sequence is synthesized)
aaaaaacagaaaagtttctagaaaacattctagtttaaaatgtaaaccagggcactcacctgctcctggtttgatatctcttccctctgtaatctgtgaagctattaacctacctggtca

SEQ ID NO: 81820 - DNA, 120 bp, Artificial Sequence
  ENSG00000082397_88 (sequence is synthesized)
tattgtattatgcctccctgaatacaaaagtttcttagctttcctttcttttgccttattggaactaacactaaagaaagtgagagagaaactcctgagacagtgaacttcagttgtaaa

SEQ ID NO: 81821 - DNA, 85 bp, Artificial Sequence
  ENSG00000082397_89 (sequence is synthesized)
tgagagagaaactcctgagacagtgaacttcagttgtaaataagattggagcgggcacaatggcatgtgcctgtagtcccagctc

SEQ ID NO: 81822 - DNA, 120 bp, Artificial Sequence
  ENSG00000082397_90 (sequence is synthesized)
tcttttaaaaaaaaaatgtaagactcgaacactgtacagatcactgtaagaggctctaatagtgtcctatttgtgggaaatatttcattacaatgccttgaacacagtcacactcaatat

SEQ ID NO: 81823 - DNA, 120 bp, Artificial Sequence
  ENSG00000082397_91 (sequence is synthesized)
ttattgaataataagtgctattatggattcatttccctgtataaagaaatacaatttacaaatatggaaaatatttacataaatttgtagaatgttgggaagctctctgtgataacagta

SEQ ID NO: 81824 - DNA, 120 bp, Artificial Sequence
  ENSG00000082397_92 (sequence is synthesized)
tatgaagtatagattatatttaacgaggaaaacttttatccccacacatgtaaagctaagtaacttatagagcaacatcaataatgttatttaatcttgaaatataaaatgatccaaaat

SEQ ID NO: 81825 - DNA, 120 bp, Artificial Sequence
  ENSG00000082397_93 (sequence is synthesized)
tttggtactaagctagataatgttgggggttaacttgatgagctgaatgttagcctactctggacctgaactgtaatcttccagtggacattactaggcatgcgccattcacccaagaaa

SEQ ID NO: 81826 - DNA, 120 bp, Artificial Sequence
  ENSG00000082397_94 (sequence is synthesized)
ccggttatgagcgagatgcctcgcttctgttgacggtgtgaaagaccctgagctttacaatccatttaaaaattctgatctggaatcctgtatgaagaataaatacccatattacacaaa

SEQ ID NO: 81827 - DNA, 120 bp, Artificial Sequence
  ENSG00000082397_95 (sequence is synthesized)
tcacctccacacttacacacatcctcagcagagagtctgaggatagatgaaattccaagacatgagcatttcacgaattttaaagcactcatataggaaatacaggaaggtcatgctctc

SEQ ID NO: 81828 - DNA, 80 bp, Artificial Sequence
  ENSG00000082438_0 (sequence is synthesized)
cgcacccgggaggcgggccggccggggctggagcggctcgggcgggctcttgacgctcagccagcttcgctccggcctcg

SEQ ID NO: 81829 - DNA, 120 bp, Artificial Sequence
  ENSG00000082438_1 (sequence is synthesized)
cggcctctcccaccccagcagtgacgcgccgcctgggagctggagcccgcgcagcgccccgcagggcgatggacggccgaaccccgcgcccgcaggacgccccagccaggagaaaaccaa

SEQ ID NO: 81830 - DNA, 120 bp, Artificial Sequence
  ENSG00000082438_2 (sequence is synthesized)
caggacgccccagccaggagaaaaccaaaagccaaggcaccacttcctccagctgagaccaaatatactgatgtctcttcagctgctgattctgtagaatccactgctttcatcatggaa

SEQ ID NO: 81831 - DNA, 120 bp, Artificial Sequence
  ENSG00000082438_3 (sequence is synthesized)
cagaaagaaaacatgatagataaagacgttgaactctcagtggtcctacctggggatattatcaaatctactactgttcatggcagtaaacctatgatggacttgttgatattcctttgt

SEQ ID NO: 81832 - DNA, 120 bp, Artificial Sequence
  ENSG00000082438_4 (sequence is synthesized)
gcacagtatcacttaaatccatcaagttacacaatcgatctgttgtcagctgaacagaaccacattaaatttaagccaaacacaccaataggaatgttggaggtagagaaggtaatttta

SEQ ID NO: 81833 - DNA, 120 bp, Artificial Sequence
  ENSG00000082438_5 (sequence is synthesized)
aagccaaaaatgttggataagaaaaaacctacacctataataccagagaaaactgtgagagtagtgattaattttaagaaaacacagaagaccatagtgagagtgagtccacatgcatcg

SEQ ID NO: 81834 - DNA, 120 bp, Artificial Sequence
  ENSG00000082438_6 (sequence is synthesized)
cttcaagagcttgcccctattatatgtagcaaatgtgagtttgatccgttgcatacactattgttgaaagattatcaatcgcaggagcctcttgacttgacaaaatctcttaatgacctg

SEQ ID NO: 81835 - DNA, 120 bp, Artificial Sequence
  ENSG00000082438_7 (sequence is synthesized)
ggactaagagaattatatgcgatggatgtcaacagagagtcctgccaaatatcacaaaacctagatattatgaaggagaaagaaaataaagggtttttcagtttttttcaacgcagtaag

SEQ ID NO: 81836 - DNA, 120 bp, Artificial Sequence
  ENSG00000082438_8 (sequence is synthesized)
aaaaagcgagaccaaactgcaagtgcccctgcaacccctctagtaaataagcaccgcccaacttttacaaggtccaataccatttccaaaccatatatttccaacaccctgccgtcggat

SEQ ID NO: 81837 - DNA, 120 bp, Artificial Sequence
  ENSG00000082438_9 (sequence is synthesized)
gcacccaagaagaggcgggctccactgcccccgatgccagcatctcagagtgtcccccaagaccttgcacacatccaggagaggcctgcttcttgtatagtgaaatccatgagcgtggat

SEQ ID NO: 81838 - DNA, 120 bp, Artificial Sequence
  ENSG00000082438_10 (sequence is synthesized)
gagacagataagagtccctgtgaagcaggaagagtgagggcaggttcactgcagctcagcagcatgtctgcagggaattcatctttgagaaggacaaagcgaaaagcaccttccccaccc

SEQ ID NO: 81839 - DNA, 120 bp, Artificial Sequence
  ENSG00000082438_11 (sequence is synthesized)
tccaaaatacccccgcatcaaagtgatgaaaatagtcgtgtgactgccttacagccagtagatggagttcctccagacagtgcttcagaagcaaactctcctgaggagctatccagccca

SEQ ID NO: 81840 - DNA, 120 bp, Artificial Sequence
  ENSG00000082438_12 (sequence is synthesized)
gaaacctttcaccctgggctttccagtcaggagcagtgcactgcgcccaaactgatggaggaaacctctgtctttgagtgccctgggacacctgaggcagccataacatcattgacatct

SEQ ID NO: 81841 - DNA, 120 bp, Artificial Sequence
  ENSG00000082438_13 (sequence is synthesized)
ggaataagctctgattatagccttgaagagatagatgaaaaggaagaactgagtgaagtgcctaaagttgaagctgaaaatatttctccgaagtcacaagatattccttttgtatctact

SEQ ID NO: 81842 - DNA, 120 bp, Artificial Sequence
  ENSG00000082438_14 (sequence is synthesized)
gatataataaatacactgaaaaatgatcctgactcagcccttggcaatggtagtggagagttctcacaaaactccatggaagaaaaacaagaaactaaaagcacagatggacaagaacca

SEQ ID NO: 81843 - DNA, 120 bp, Artificial Sequence
  ENSG00000082438_15 (sequence is synthesized)
cacagtgtagtatatgatacaagcaatggaaagaaggtagttgacagtataagaaacttgaagtcgttgggcccaaaccaagagaatgttcaaaatgaaataattgtctatccagagaac

SEQ ID NO: 81844 - DNA, 120 bp, Artificial Sequence
  ENSG00000082438_16 (sequence is synthesized)
acagaagacaatatgaaaaatggagtgaagaaaacagaaatcaatgtagaaggtgttgccaaaaataacaacattgatatggaagttgagagaccatcaaactctgaggcacatgaaact

SEQ ID NO: 81845 - DNA, 120 bp, Artificial Sequence
  ENSG00000082438_17 (sequence is synthesized)
gatactgctataagttacaaggaaaaccatctagcagcttcatcagtaccagatcaaaaactgaatcaacccagtgcagaaaagacaaaagatgcagcaattcagacaaccccttcttgt

SEQ ID NO: 81846 - DNA, 120 bp, Artificial Sequence
  ENSG00000082438_18 (sequence is synthesized)
aacagttttgatgggaaacaccaagatcataatttatctgactccaaagttgaagaatgtgtgcaaacttcaaataacaacatatcaactcaacactcatgcttaagttcacaagattct

SEQ ID NO: 81847 - DNA, 120 bp, Artificial Sequence
  ENSG00000082438_19 (sequence is synthesized)
gtaaatacctcaagggaattcaggagtcaaggcaccctaattatacattcagaagatccgcttaccgtaaaagatccaatttgtgcacatggtaatgatgatcttttgcctcctgtagat

SEQ ID NO: 81848 - DNA, 120 bp, Artificial Sequence
  ENSG00000082438_20 (sequence is synthesized)
agagtatatacccaaaattggcatgactacttataaaatagtgcctcccaaatccttggaaatatcgaaagactggcaatcagaaaccatagagtataaagatgatcaggacatgcatgc

SEQ ID NO: 81849 - DNA, 120 bp, Artificial Sequence
  ENSG00000082438_21 (sequence is synthesized)
tttagggaaaaagcacactcatgagaatgtgaaagaaactgccatccaaacagaagattctgctatttctgaaagcccagaagagccactgccaaaccttaaaccgaagcctaacctgag

SEQ ID NO: 81850 - DNA, 120 bp, Artificial Sequence
  ENSG00000082438_22 (sequence is synthesized)
aacagagcatcaagtgcccagttctgtgagctcacctgatgatgccatggttagtcctctgaaacctgctcccaaaatgacaagagacactggcacagctccttttgcaccaaatttgga

SEQ ID NO: 81851 - DNA, 120 bp, Artificial Sequence
  ENSG00000082438_23 (sequence is synthesized)
agaaataaacaatattttggaatcaaaatttaaatctcgggcttcaaatgcccaggccaaacccagctctttttttttgcagatgcagaagagagtatcgggtcactatgtgacatctgc

SEQ ID NO: 81852 - DNA, 120 bp, Artificial Sequence
  ENSG00000082438_24 (sequence is synthesized)
agctgccaagagtgtccatgctgcccctaatcctgctccaaaagaactgacaaataaagaggcagaaagggatatgctgccttctccggagcagactctttctcccttaagtaaaatgcc

SEQ ID NO: 81853 - DNA, 120 bp, Artificial Sequence
  ENSG00000082438_25 (sequence is synthesized)
tcactctgttccacaaccccttgttgaaaaaactgatgatgatgtcatcggtcaggctcctgctgaagcctcccctcctcccatagctccaaaacctgtgacaattcctgctagtcaggt

SEQ ID NO: 81854 - DNA, 120 bp, Artificial Sequence
  ENSG00000082438_26 (sequence is synthesized)
atccacacaaaatctgaagactttgaaaacttttggtgccccacgaccatactcaagttctggtccttcaccgtttgctcttgctgtagtgaaaaggtcacagtctttcagtaaagagcg

SEQ ID NO: 81855 - DNA, 120 bp, Artificial Sequence
  ENSG00000082438_27 (sequence is synthesized)
caccgagtcacctagtgccagtgcattggtccaacctccagccaacacagaggaagggaagactcattctgtaaataaatttgtggacatcccacagcttggtgtgtctgataaggaaaa

SEQ ID NO: 81856 - DNA, 120 bp, Artificial Sequence
  ENSG00000082438_28 (sequence is synthesized)
taactctgcacataatgaacagaattcccaaataccaactccaactgatggcccatcattcactgttatgagacaaagttctttaacattccaaagctctgacccagaacagatgcgaca

SEQ ID NO: 81857 - DNA, 120 bp, Artificial Sequence
  ENSG00000082438_29 (sequence is synthesized)
gagtttgctgactgcaatccgttcgggagaggctgctgccaaattgaaaagggttaccattccatcaaatacaatatctgtgaatggaaggtcaagactcagccattccatgtcccctga

SEQ ID NO: 81858 - DNA, 120 bp, Artificial Sequence
  ENSG00000082438_30 (sequence is synthesized)
tgcccaggacggccattaaatgttaccctgccacaccactgcacttcacttccacttcagaccaacttcatactaatggaacattttggcaaatgtatattcagatgtacactaatatat

SEQ ID NO: 81859 - DNA, 120 bp, Artificial Sequence
  ENSG00000082438_31 (sequence is synthesized)
tatctattaaaatattagaatttgtgttgtggcttttaatgccagaagaaaagttaccagaatttataatttatagtaattttttgatcttttttttgccttaagagttgaatatgctgc

SEQ ID NO: 81860 - DNA, 120 bp, Artificial Sequence
  ENSG00000082438_32 (sequence is synthesized)
tttagaactttaaaacaaggtgtaaatgattttcattttttacaaatgaaaaataattcctttgtattgatttcacttaccagcacattctctacaatggtgacttagacaaaagtataa

SEQ ID NO: 81861 - DNA, 120 bp, Artificial Sequence
  ENSG00000082438_33 (sequence is synthesized)
gattcatagactttatatttgtatgacatacaactaggacaaacatagatatgacatttgctgcctcagtgtagcaattggaaatatttataagttatatgaaagcctgttttgggctga

SEQ ID NO: 81862 - DNA, 120 bp, Artificial Sequence
  ENSG00000082438_34 (sequence is synthesized)
aagaatgatttagaaaactagtgataccaaataagtatattcagttcaataattattttcaatgatgaatcacttagtgtgaaagacttgccttgtgtattctttatgtaattacaaatc

SEQ ID NO: 81863 - DNA, 120 bp, Artificial Sequence
  ENSG00000082438_35 (sequence is synthesized)
tacaaatcactgtcaattttatgggaagctcatagtattttaatattttattaacatggaactcttgtttttttaatctttagaacttaaattctacaagaattttaaatattttctgta

SEQ ID NO: 81864 - DNA, 120 bp, Artificial Sequence
  ENSG00000082438_36 (sequence is synthesized)
tgacattgtcacacagaaattacacattttatgtgccagaagccttaaacatctttctgtgaaaatgctgatatattgtgacagttatttcacatttgatatgtagagaggaataggggt

SEQ ID NO: 81865 - DNA, 120 bp, Artificial Sequence
  ENSG00000082438_37 (sequence is synthesized)
tagtttatgtttatattgaaaaactttaaagactatttggaagttccagaaattctggttttaattcaagtaaaatgataaaatagtcattatatagttcagatgctaatattctaagta

SEQ ID NO: 81866 - DNA, 120 bp, Artificial Sequence
  ENSG00000082438_38 (sequence is synthesized)
ataatatatatttacattgaagctaaaactgttaagcaaaacaatgcccatttgtcggcttacagctcttccggagtctagagcctgttggtgttctgtccctactttaagaatttaatt

SEQ ID NO: 81867 - DNA, 120 bp, Artificial Sequence
  ENSG00000082438_39 (sequence is synthesized)
gctcacttattctgaaagctttgttcaaacaagatgatattaaatttgttttcactaaaactactgggatatctgcctcttggggatttttttttcaatttaataaaagcaagttgtata

SEQ ID NO: 81868 - DNA, 120 bp, Artificial Sequence
  ENSG00000082438_40 (sequence is synthesized)
aatatatagtttgtgtcaaccagcatatttatttcccttacctgatgcatacatttctattagccagtgaacaaacaagaaatttgtaagatttaccatttatcagggatccctagtgta

SEQ ID NO: 81869 - DNA, 120 bp, Artificial Sequence
  ENSG00000082438_41 (sequence is synthesized)
catttaagccctggcattctgactccaaaatgcatggtctaagcatttaaaatgtttagcatagttcctgatacatggcatggccatcttaaatgctaaatgttgctgctgttttccttg

SEQ ID NO: 81870 - DNA, 120 bp, Artificial Sequence
  ENSG00000082438_42 (sequence is synthesized)
aatcagttggagagaccctcatatatagatacttaagttatgttgttataagcaagtagagaaaggagtgaattttttttaaaaaattgtgttgtcataattatctacttataaaaatat

SEQ ID NO: 81871 - DNA, 120 bp, Artificial Sequence
  ENSG00000082438_43 (sequence is synthesized)
aaatttggatccctaatttaaaccttcatatattttgagttggattgaagacttaaagacaagcgacatgtaagatgttttcaatatattaatatataagaaaggcttaatttatgaaga

SEQ ID NO: 81872 - DNA, 120 bp, Artificial Sequence
  ENSG00000082438_44 (sequence is synthesized)
tatgaaagttcctacaactcatgataagtctacctaatagaaatatcagcacattattcttacaagaggaaattcaaaaggccaacaaacatggaaaaaaaatactcttcactgataatc

SEQ ID NO: 81873 - DNA, 120 bp, Artificial Sequence
  ENSG00000082438_45 (sequence is synthesized)
agggaaatacaagttaaaaacatggaaaggtaccacatcaaattagcaaaaacggaagtttcaaaatagcaagtgttgtcaggaacatcaaacagtgggaactctactgttggtgggaaa

SEQ ID NO: 81874 - DNA, 120 bp, Artificial Sequence
  ENSG00000082438_46 (sequence is synthesized)
atacactggcataactaccagttctgcaatatctagtaaaattaaagattccttaccatgttaccttaaataagtacttatgcacatgcataaggagacatctgcaaaaatgttcacggc

SEQ ID NO: 81875 - DNA, 120 bp, Artificial Sequence
  ENSG00000082438_47 (sequence is synthesized)
agccttgtgtaaaacagcagaaaggggtcctaacccgtgctcagctttagtaatgcatatattcatatgatagacttccacacagcagtccaaatgaacaagctagagctatatatgtca

SEQ ID NO: 81876 - DNA, 120 bp, Artificial Sequence
  ENSG00000082438_48 (sequence is synthesized)
gcatgaatacatctcaaaaacaagtgacaagagtgagtggtggaacaagtcgtgttttatgaaattagttacataaagtataaatataaaaaatgatactataaattatggctgtatatg

SEQ ID NO: 81877 - DNA, 120 bp, Artificial Sequence
  ENSG00000082438_49 (sequence is synthesized)
taggaaaaaaatttgctggtggttacctgtgggaaccaagaaagactgaattgagatttataagaggcatcaattgtgttcgtagtattttataaactgctgtttgaaaacaagtgctta

SEQ ID NO: 81878 - DNA, 120 bp, Artificial Sequence
  ENSG00000082438_50 (sequence is synthesized)
attctaaattctagtatacttgtagtttataattataataaaataatgttttaaaggtcacataggatttagggggctatgtatataaaccattaatacatgtatgttctgaaaagttgc

SEQ ID NO: 81879 - DNA, 120 bp, Artificial Sequence
  ENSG00000082438_51 (sequence is synthesized)
ttgccttatcgacaccattttaggagaacatgtgctatcctgtcaatggggaaagaaatttgtgacaagtagttttcactcatcatatcctaaaataacagcacaaggaagatacaggaa

SEQ ID NO: 81880 - DNA, 120 bp, Artificial Sequence
  ENSG00000082438_52 (sequence is synthesized)
tggtctagaaccaacttttgactttcatgtataatttttagcatctaggcattttgcttttccttctttcctccaatcaagttatttatttatataatattaaaattataattcagatta

SEQ ID NO: 81881 - DNA, 120 bp, Artificial Sequence
  ENSG00000082438_53 (sequence is synthesized)
catatatatgatagagtataaaatacattctttttcatccccagcatcccactctcctctccaaagatagctgttaatattttgatatgaagccctatatagatgtatttatatgaagta

SEQ ID NO: 81882 - DNA, 88 bp, Artificial Sequence
  ENSG00000082438_54 (sequence is synthesized)
cttaacatgaaaggaggtcacactctaatactatgtaacaacttgccttttataccagcagtgttctggaagagcttttctttttaca

SEQ ID NO: 81883 - DNA, 120 bp, Artificial Sequence
  ENSG00000082438_55 (sequence is synthesized)
tttataccagcagtgttctggaagagcttttctttttacacatacagatcgatcgtatttctgttagccattctattgtttcttgctgcggtacataatgttggctggagtgaagagatt

SEQ ID NO: 81884 - DNA, 120 bp, Artificial Sequence
  ENSG00000082438_56 (sequence is synthesized)
ggggttcagatcacaagtctgccacttatgagtcatgggatcttgggcaaattactttctctatgcttcattttctcttctgaaaaatgaattaatatgaataaaaatgaaccttatttt

SEQ ID NO: 81885 - DNA, 120 bp, Artificial Sequence
  ENSG00000082438_57 (sequence is synthesized)
aaaaacggcaggcaattcatcttttaaagttacctgatgtcaatactataagtgaacaggtattatttgcctaatatactccctattctttgaggagtgacccttcttccgatttcacct

SEQ ID NO: 81886 - DNA, 120 bp, Artificial Sequence
  ENSG00000082438_58 (sequence is synthesized)
cttcatgaactgccagatctggccttggccactaggcactggcaacagcatacacactctgtcatcttatccaagtccttgaaatgagaccaatctttgtcctgagacttagttacttat

SEQ ID NO: 81887 - DNA, 120 bp, Artificial Sequence
  ENSG00000082438_59 (sequence is synthesized)
aggtgcttaaaacccaaagcgtcccaattgatacaattatgtatgtgtctaattccagtttactttgtacccactaccagtagagaaaataagtatcaaagaactaagaatcaaactcat

SEQ ID NO: 81888 - DNA, 120 bp, Artificial Sequence
  ENSG00000082438_60 (sequence is synthesized)
catttttaaaatctactgattttgataactgacttgaaagaaaagaacttgcaattagaggtcatagtgaagatttccagggtcaaagtgatttctgaggttttagatgtaaaaatatct

SEQ ID NO: 81889 - DNA, 120 bp, Artificial Sequence
  ENSG00000082438_61 (sequence is synthesized)
cctatttatttgctatttcagagttgacaacaagatttttatttgatccacatatttaaaaggtgtgcaaagattgctactttacaaaggtcacagaagcagaggagtctcagagtccca

SEQ ID NO: 81890 - DNA, 120 bp, Artificial Sequence
  ENSG00000082438_62 (sequence is synthesized)
catccaattactaatttgttcttccccatgactaaatgtagcaaatgatgaagaaactggtgctagatttcaagggataccagaataggaagttatttgttctgaatcttcagttggttt

SEQ ID NO: 81891 - DNA, 120 bp, Artificial Sequence
  ENSG00000082438_63 (sequence is synthesized)
tccttttctcttaaatgttaccactttcctgcaaatttccatccttaatatgttagactgttcatatagatacattgtgtttacaacaaggaaaaaatgccaccatgtgctcagaacttt

SEQ ID NO: 81892 - DNA, 120 bp, Artificial Sequence
  ENSG00000082438_64 (sequence is synthesized)
tttgacaggtattttgagaagagttgtggaacattctggtaatttgtagagatctgttggcatctctgcttcacaaactggaaaaaatcatttgtaagtcttgctaattacttttcttgg

SEQ ID NO: 81893 - DNA, 120 bp, Artificial Sequence
  ENSG00000082438_65 (sequence is synthesized)
agaagaaaaaaaatgctacagttgcaaacaaatgtatagttttcaaaaagaagcaacttttttgctccccagtttattcttagtttccagcccacgccttgcgatagcgataggcatagt

SEQ ID NO: 81894 - DNA, 120 bp, Artificial Sequence
  ENSG00000082438_66 (sequence is synthesized)
gatggcctcaattctttctctcttgcatccataccttttgctgtgatagcagtgatggcctcagttctttccctctcttgcatccgtaccttttgctgtgtgactttgcagctcctctca

SEQ ID NO: 81895 - DNA, 120 bp, Artificial Sequence
  ENSG00000082438_67 (sequence is synthesized)
ttaaagaggcagagccccctctcccacccataggagcaggttttgagagtaacagaatgaagtgaaaatgacactgtgccagttctaagaccagccctcaaaggttcatgtgtttctgct

SEQ ID NO: 81896 - DNA, 120 bp, Artificial Sequence
  ENSG00000082438_68 (sequence is synthesized)
tgctttcactgtatttgaaatgttgctgtgagaaagacatctctgaaacagctgaatggtcctaagaaaaggatgagagatgcagggagcagagctcccaactgaggccagcctagatca

SEQ ID NO: 81897 - DNA, 120 bp, Artificial Sequence
  ENSG00000082438_69 (sequence is synthesized)
cctaagagccaggcccccagtttactctgatgtgtaagcaataaatgcttaccccagcaataccaccaaggtttgtggttggtttatatacagcattaatgtggcaataggtgcaataca

SEQ ID NO: 81898 - DNA, 120 bp, Artificial Sequence
  ENSG00000082438_70 (sequence is synthesized)
ccctgttaaacaaaccatacacatatgactctaaccctaatcataaattgattcagtctgttcagttccacaacgctgtttcctccagaatctcacagatgacttactaaatccaacaca

SEQ ID NO: 81899 - DNA, 120 bp, Artificial Sequence
  ENSG00000082438_71 (sequence is synthesized)
aatacacctcagactttctgtctagctcccaaccagttaaaagcaattctaaatattttttttcttagtcgtagtgcaaaagtatattctctccctttctctatagttttctctcatttt

SEQ ID NO: 81900 - DNA, 120 bp, Artificial Sequence
  ENSG00000082438_72 (sequence is synthesized)
gtcttcagacctagaagcatgagagcccagctgtcaaagtcatctagacccccttcagaaggtcattaaatttgtctatttcacaggattgcaagataaaatacagaatgcccagttaaa

SEQ ID NO: 81901 - DNA, 120 bp, Artificial Sequence
  ENSG00000082438_73 (sequence is synthesized)
tttgaacttcggataaacaacaaatttttttttagtataagcatatcccatacaatatttgggatatacttatatttttatattgtttatctgacgttcaagctaactaggcatcctgta

SEQ ID NO: 81902 - DNA, 120 bp, Artificial Sequence
  ENSG00000082438_74 (sequence is synthesized)
tttttcttagctaaatctggcaactgtgctatttcattgaaaacctgaaagtgtacaaagaaggaagaagcagaatctgccatatgagtaatagaagtgagcaggcccaggactccctaa

SEQ ID NO: 81903 - DNA, 120 bp, Artificial Sequence
  ENSG00000082438_75 (sequence is synthesized)
gtcaagaaaccaagaggcgtcattacggaaaagagtaactcaccctgtgtgctccttggtagttctccctcagcgatgcccccatgttatgaatggggaaaagttcactgaagggttcat

SEQ ID NO: 81904 - DNA, 120 bp, Artificial Sequence
  ENSG00000082438_76 (sequence is synthesized)
agtgaagaaactttttggatgatttctgttggtgggttttggataccttcaagggatcagaaaataatatacttaggaaattttggtaatgtcatcattactctctacattattattatg

SEQ ID NO: 81905 - DNA, 120 bp, Artificial Sequence
  ENSG00000082438_77 (sequence is synthesized)
acggttacaattgttaaatctaggtggtgggtatgtgggttatattgtacatgatttttaacttgtctgcatgtttgaaattataataaagtcaataaataaattattgagacactcctg

SEQ ID NO: 81906 - DNA, 120 bp, Artificial Sequence
  ENSG00000082438_78 (sequence is synthesized)
ctttcggttcagcttccccagccggaccccaaagacccgaagccctgggggaaggaaattccaacttgctcccggcccacccccgccccgttcctctctccggctcgctgcttccctcgc

SEQ ID NO: 81907 - DNA, 120 bp, Artificial Sequence
  ENSG00000082438_79 (sequence is synthesized)
tccaatgccgccgagctggtccccacttatgtgcggccgtgctgcagaggcggcggcgagctcccggactccgggcagggaaatggggcaggcagtgacgcgccgcctgggagctggagc

SEQ ID NO: 81908 - DNA, 120 bp, Artificial Sequence
  ENSG00000082438_80 (sequence is synthesized)
attcaagtcctggcttgagagccgagcggcaagagcgcgggccggggaagggaagagtaggagaggaagccgcgagggagaacaggcgagctactgtctcctttggaaaagaaccagtga

SEQ ID NO: 81909 - DNA, 120 bp, Artificial Sequence
  ENSG00000082438_81 (sequence is synthesized)
agcccgcgcagcgccccgcagggcgatggacggccgaaccccgcgcccgcaggacgccccagccagagagcaaaaatgttggagacactggttggaaaattgaaatgctgcattggagaa

SEQ ID NO: 81910 - DNA, 120 bp, Artificial Sequence
  ENSG00000082438_82 (sequence is synthesized)
actggactttaatccagtactaatgacttgaagcacactgtgaactacaaacatattttcattcatcatggcagatgctctttgagacttgcattgtgaggacagaagttcaattaatgt

SEQ ID NO: 81911 - DNA, 120 bp, Artificial Sequence
  ENSG00000082438_83 (sequence is synthesized)
gtttcccatttgttcttctgacagatagaggccaaatgacacaatgggaagatcttcaactaagtgtcaagaaaaaaaactagtgttctagtgttctagagtcctctttgccacttaaaa

SEQ ID NO: 81912 - DNA, 120 bp, Artificial Sequence
  ENSG00000082438_84 (sequence is synthesized)
atggcaggtacgctggagtaaatgaaatatcaggacctccccttcttattccaccattgaaagtctctgtgatatacgtcttgatgtttgttctttgacaaaacacttcatttatcactc

SEQ ID NO: 81913 - DNA, 120 bp, Artificial Sequence
  ENSG00000082438_85 (sequence is synthesized)
agtttagttacctgttaaaaaaaaagactgctaaaatggtgttaaaaattttctatcaatgttttaatatcagtgctatgaattccacaaacccaattaaatgactcttgaaatttggaa

SEQ ID NO: 81914 - DNA, 120 bp, Artificial Sequence
  ENSG00000082438_86 (sequence is synthesized)
attcaagtcctggcttgagagccgagcggcaagagcgcgggccggggaagggaagagtaggagaggaagccgcgagggagaacaggcgagctactgtctcctttggaaaagaactgacgc

SEQ ID NO: 81915 - DNA, 120 bp, Artificial Sequence
  ENSG00000082438_87 (sequence is synthesized)
gccgcctgggagctggagcccgcgcagcgccccgcagggcgatggacggccgaaccccgcgcccgcaggacgccccagccaggctcagttattgggacagaggctgatgaagaaagacct

SEQ ID NO: 81916 - DNA, 120 bp, Artificial Sequence
  ENSG00000082438_88 (sequence is synthesized)
aaaaacacaaatttaaaaaaacgatcctggacgtcgagggtcggactctagggggggcaagctgcaggccccactctgcgagtttctgaccgcattccgcggaggccccaatcctccccg

SEQ ID NO: 81917 - DNA, 120 bp, Artificial Sequence
  ENSG00000082438_89 (sequence is synthesized)
taggcatgcaaaaaaactttaaccataaagtgctatctacgtgttcgttattattagttgctagcattgtcaaactcattgtgcagaatgtatgctgcttatttaatatttgaatcatca

SEQ ID NO: 81918 - DNA, 120 bp, Artificial Sequence
  ENSG00000082438_90 (sequence is synthesized)
gatttaaaagttttactttgtaaaatagttttcctttcatatgttattgaggcatattgtattattgtatttatttggtgttaactagctttcctttcctgaagtagtccctattttgcc

SEQ ID NO: 81919 - DNA, 120 bp, Artificial Sequence
  ENSG00000082438_91 (sequence is synthesized)
ccctattttgccataatttattttggttttcttagacaggtattttaaataaaagcatttaagactatatatttatctattagtttagctttagttatgtctcacaaattttaatacaca

SEQ ID NO: 81920 - DNA, 120 bp, Artificial Sequence
  ENSG00000082438_92 (sequence is synthesized)
aaatgttattgaaattatattgtgatttaccataaaatccatatgttgcttagtagaagaaatatttttttagttttacagatcaccactcattgtttttccaaccttttagaaaaattt

SEQ ID NO: 81921 - DNA, 120 bp, Artificial Sequence
  ENSG00000082438_93 (sequence is synthesized)
gctactcatttattgaagaaactaggtcatttgttttatagcttcccgtgttcagatttttactgtttgcctcctgtggtgtcacttaatgtttaacttattgccaatgtcattgaaatt

SEQ ID NO: 81922 - DNA, 120 bp, Artificial Sequence
  ENSG00000082438_94 (sequence is synthesized)
ttatttcaatgtaaatttcccctctctttcctgtaaattgatggttaaatctagaggcttgatcagattttggcgagagattttttggcaagaatacttcacaagtgttgctgtgtactt

SEQ ID NO: 81923 - DNA, 120 bp, Artificial Sequence
  ENSG00000082438_95 (sequence is synthesized)
ccatcagcaaacatgtaacaacgagttatttttttctgatgttagccatcaatgatctttgtctacatcttagttaattaagatttgaaaaatggtgaaagtctattgcagtcaatatta

SEQ ID NO: 81924 - DNA, 120 bp, Artificial Sequence
  ENSG00000082438_96 (sequence is synthesized)
cagtcaatattactgaaaaagtaaggttctccgtgtcagctatatgactgctacataagtcgaattcaatcagaaaaaggtagaataggctggatgaggtggctcatgcctgtaatccta

SEQ ID NO: 81925 - DNA, 120 bp, Artificial Sequence
  ENSG00000082438_97 (sequence is synthesized)
ctgtctcaataaataaataaataaataagaaaagaaaaaggtataataaaagttggatgatttcctttcatcagtttttaaaataatggactggttctctagcataacacaaaggtgaaa

SEQ ID NO: 81926 - DNA, 120 bp, Artificial Sequence
  ENSG00000082438_98 (sequence is synthesized)
aaagagttttttttttttagtatcattatgaacatatgaaattaaacacatgtgacatgtttcagtttattgagttacttttatgatgtccaaattatccttatttttaccagtagaaac

SEQ ID NO: 81927 - DNA, 120 bp, Artificial Sequence
  ENSG00000082438_99 (sequence is synthesized)
tgtctcaagttggttcctgagtccttttaacacaacctggtagactttgatagcattctttctagtatggctagatgtcccaagtttatcttgtagattctttgataccaacagagaatc

SEQ ID NO: 81928 - DNA, 120 bp, Artificial Sequence
  ENSG00000082438_100 (sequence is synthesized)
aaccattctcaagtaatcatggtttcttttaatgggaaatggaatttatagccaatttgggccagggaggctcagcactactggctgtgtcattgtttgtaggcccttcagttgatatta

SEQ ID NO: 81929 - DNA, 120 bp, Artificial Sequence
  ENSG00000082438_101 (sequence is synthesized)
ggagatgctttttggaaaattttatataaatattatgtatacaaccttgaggtttgacatttgcccttctaactaaagtagggcttcctaattttcagcactattaacatttgagacaag

SEQ ID NO: 81930 - DNA, 120 bp, Artificial Sequence
  ENSG00000082438_102 (sequence is synthesized)
ataattctgtcattagggactgtcttttgcaatgtgctatgtttggaatcctcactggcctctacccagtaaatgcagacagcacagtctcctaacctcattgccaatggtggcaatcaa

SEQ ID NO: 81931 - DNA, 120 bp, Artificial Sequence
  ENSG00000082438_103 (sequence is synthesized)
attgtccccagactttgtcaaatgtcctctgggggacaaaattggtcccagttgagacccaccctattaaagaaataacttttatgaaacatttaacaaagtactgagcaattataatga

SEQ ID NO: 81932 - DNA, 120 bp, Artificial Sequence
  ENSG00000082438_104 (sequence is synthesized)
ctcacattttgtagaataagatatttcatagttgtttagctgtgagacaaaagtataatcaaaataaaggaacaaactgtgtggtagcgatttcatgtcttgtgtaatttgaagtgtcct

SEQ ID NO: 81933 - DNA, 120 bp, Artificial Sequence
  ENSG00000082438_105 (sequence is synthesized)
ttctattttgcttctatacttcaaaagcagaacacagactctgagtcaaaaaaattgagtttgtgtcgtagctctgtcatttcctgagtgttggcctggattatgtatcttagtttttta

SEQ ID NO: 81934 - DNA, 120 bp, Artificial Sequence
  ENSG00000082438_106 (sequence is synthesized)
agcttcagtttcctctgctgtgaaataggaacaatatttgcttgttgctttgagaacttaataagatttaaggtgcttctttgtagactataattagtagcttttagcattagataagtt

SEQ ID NO: 81935 - DNA, 120 bp, Artificial Sequence
  ENSG00000082438_107 (sequence is synthesized)
tattttgtttttttggatgaggcagtgtaccatttatttttcctcttacctaacatcttttctaggtagactagtaagaagtagtcctataacagttggtaattagtaacagttactaat

SEQ ID NO: 81936 - DNA, 120 bp, Artificial Sequence
  ENSG00000082438_108 (sequence is synthesized)
atgtaataagatgaatagctcattctaagattggtactaggaatagatcttctatgtacatacaggtctgtgatgcagtaaaggataaatgtccattttaagtaactttcatattcaagc

SEQ ID NO: 81937 - DNA, 120 bp, Artificial Sequence
  ENSG00000082438_109 (sequence is synthesized)
tcatactgagaaggtctaaaagcaaataattttttcattcttttccacttgagtcagtttttcacagcatgtactgtgatggcaatagcattcctattgagaaattatgatttaaaagct

SEQ ID NO: 81938 - DNA, 120 bp, Artificial Sequence
  ENSG00000082438_110 (sequence is synthesized)
gcttctttctctttaaaacaatagtcaagttgtatcatttttgttaagacttttgttgtcaagttagtgccagagtcacaagtacatttacgtagtactttgatttgcatatggtttgtt

SEQ ID NO: 81939 - DNA, 120 bp, Artificial Sequence
  ENSG00000082438_111 (sequence is synthesized)
ttgctacgacttttgtcaactctagttgttttttaaagtaaataatgtctattattcttaaagtagttttattctgttttcctttttacctacccttatctaaatcaccttcttgtaagt

SEQ ID NO: 81940 - DNA, 120 bp, Artificial Sequence
  ENSG00000082438_112 (sequence is synthesized)
ttgtcaatgtcagtgtcacttttgagtagagggtcactatagtataaaagataccttctccctctactggccattcttggaaaatgatctagccatttataaacacttggttaacatcat

SEQ ID NO: 81941 - DNA, 120 bp, Artificial Sequence
  ENSG00000082438_113 (sequence is synthesized)
tgtcagttgtatatgaggatggattctgggtttccaggactgccaatcactggaaatgatcatgaaatgttgagaagaaattcagagttagacaatggtaaagtaggtgtaacctaccaa

SEQ ID NO: 81942 - DNA, 120 bp, Artificial Sequence
  ENSG00000082438_114 (sequence is synthesized)
aaatatgaaaaagagagacttataattctaaaaccaataaattagggtttttaaacggggattcaatttaaaatatatgtttacattgactttctttcttttggaaaatatttctgggaa

SEQ ID NO: 81943 - DNA, 120 bp, Artificial Sequence
  ENSG00000082438_115 (sequence is synthesized)
atacatatactcagtggaaaattagaaataagaaagaaagaaggaaatacatttagactcatttcctgctgccagagattgtttcttaaattctttcatgcttataactgttcaaaatag

SEQ ID NO: 81944 - DNA, 120 bp, Artificial Sequence
  ENSG00000082438_116 (sequence is synthesized)
tgtttttcatatgaacattgaaaaatacttatgaaccaagtaaattgagagcagaggcagaaatgtgcctcttctatggttcctaagaacatgggtctttaattttgtaaatcaaaatag

SEQ ID NO: 81945 - DNA, 120 bp, Artificial Sequence
  ENSG00000082438_117 (sequence is synthesized)
ttaataataattggtcattgagaaaagaattcacctaagtagatggtacgtattctgatactcagttgcattttatctgggaagaataaaaatgagttccattttaaaattacatgttta

SEQ ID NO: 81946 - DNA, 120 bp, Artificial Sequence
  ENSG00000082438_118 (sequence is synthesized)
atataggaatcttgcaacacaatatagaatattaactgccacaaccaaataactgtgcaatcaggcagagtttaaaaatgtgaagatatgtttttaaattgtatacaaatttacctaaca

SEQ ID NO: 81947 - DNA, 120 bp, Artificial Sequence
  ENSG00000082438_119 (sequence is synthesized)
tgatatttttctgcatgcatatcttttttctttttctttttttaagagagaaactatataatatagcttattacattttaggcagtgtacttcatctcattcttataggtaatagtgggt

SEQ ID NO: 81948 - DNA, 120 bp, Artificial Sequence
  ENSG00000082438_120 (sequence is synthesized)
aatgataaaactatagagaaataacttgacataatttcacagtttgacccccaaggctcacatttaacttgtgctgtgcaaactattgccatatgtgaaaaggccactagggttttgaag

SEQ ID NO: 81949 - DNA, 120 bp, Artificial Sequence
  ENSG00000082438_121 (sequence is synthesized)
ataagcacagtgatggtgcaggaagcatgattcttcagggcatttgaatagaggagcagaggaatgacttaattcggtactgggcacatggtgcagactccaaaccctgtttccttccac

SEQ ID NO: 81950 - DNA, 120 bp, Artificial Sequence
  ENSG00000082438_122 (sequence is synthesized)
atgcctcctgccagtgctttgccatcatgttgttgactggaagctgttgctctgttaacctagacactggcaaatgagttttgttttcaggaggtctgaattagaatcaagaggaaaagt

SEQ ID NO: 81951 - DNA, 120 bp, Artificial Sequence
  ENSG00000082438_123 (sequence is synthesized)
agtgcaagggagaggaaggttattttctctactttgattttgactctgactgtagaataaggatgcctatttccaacagagaaaaatcaaaaccattatgactgatttcatgtcattgaa

SEQ ID NO: 81952 - DNA, 120 bp, Artificial Sequence
  ENSG00000082438_124 (sequence is synthesized)
atcacccatgttataactaaaaataaagtcctctaacagccttcagcaaagatacctagttaacaagacaatcaactgagattctgtttttactataaatcttaatgttttctgttaagg

SEQ ID NO: 81953 - DNA, 120 bp, Artificial Sequence
  ENSG00000082438_125 (sequence is synthesized)
ccttcattaaaactgcatttgctgggattcttttccttttaatgttaggtatgaaaatataaatatgctaggggctatagaaaagacagtcaaaatagaggaaaaatacagtttttgaat

SEQ ID NO: 81954 - DNA, 120 bp, Artificial Sequence
  ENSG00000082438_126 (sequence is synthesized)
ttgtcaatttctattttttgtcatgaacaatgactgaatgacatcttctaagaagtaaaaactttatttaccttctatggagtgtttattctggtcaatatactaatgagcatgctatct

SEQ ID NO: 81955 - DNA, 120 bp, Artificial Sequence
  ENSG00000082438_127 (sequence is synthesized)
agggattccaaacttcagtctgtatgaatccaaagcacgtactgttttctctgtatgctactacctacctttatatagtcagtgagttgaaaattatctgtagaattcaaaccaaactat

SEQ ID NO: 81956 - DNA, 120 bp, Artificial Sequence
  ENSG00000082438_128 (sequence is synthesized)
gagcctcgcaggggttgccgcttctccattcaagtcctggcttgagagccgagcggcaagagcgcgggccggggaagggaagagtaggagaggaagccgcgagggagaacagtgacgcgc

SEQ ID NO: 81957 - DNA, 120 bp, Artificial Sequence
  ENSG00000082438_129 (sequence is synthesized)
attcaagtcctggcttgagagccgagcggcaagagcgcgggccggggaagggaagagtaggagaggaagccgcgagggagaacagcagtgacgcgccgcctgggagctggagcccgcgca

SEQ ID NO: 81958 - DNA, 120 bp, Artificial Sequence
  ENSG00000082438_130 (sequence is synthesized)
aacaagtttttaaaaataagcctttcctggaggaatggccattagttatattgattttgtaaaccaaacttacaaaacaagcccagtgacccacaggaaaatcctatccttttcttctca

SEQ ID NO: 81959 - DNA, 120 bp, Artificial Sequence
  ENSG00000082438_131 (sequence is synthesized)
aattgttcttcccactttaagctgcttctttaagtttacaaaactcttaattttaagagttttattactcttaaaatgtaatacttttgtatgtatcaaaacagttaaatctgtctgtaa

SEQ ID NO: 81960 - DNA, 120 bp, Artificial Sequence
  ENSG00000082438_132 (sequence is synthesized)
cttatgagtcctctacattacagttagttgtttgtgtggcagtttcccattctagcccaagtttcttgagaaaggccgtattttatttttctttacatatctatcccatagcccagcttc

SEQ ID NO: 81961 - DNA, 120 bp, Artificial Sequence
  ENSG00000082438_133 (sequence is synthesized)
tgtgtgtggcagatgcttcataaacgtttttaaggaatgactgttatgttccatttggatatatcctgtgcttgacgtaaagttcagtgtcttcctaaagtttgctactgatttctaaat

SEQ ID NO: 81962 - DNA, 120 bp, Artificial Sequence
  ENSG00000082438_134 (sequence is synthesized)
aaggaagaggagaaggtacctcttggtgtcttgtttactcccactatgcatacgttctttagaaagcaaattactgaaccatatggaaaaggaaaaagctaagatggagtttcactcttg

SEQ ID NO: 81963 - DNA, 120 bp, Artificial Sequence
  ENSG00000082438_135 (sequence is synthesized)
ttacccaggctcgagtgcaatgatgcgagcttggctctttcgctcttgttactcaggctcgagtgcaatgatgcgagcttggctcactgcaacctctgcttcccagcttcaagtgattct

SEQ ID NO: 81964 - DNA, 120 bp, Artificial Sequence
  ENSG00000082458_0 (sequence is synthesized)
actccactcagatccatcctggggaccagagcagaagcggtcctcacagcacccattctctgcttgagctcccgcttcttctttgccgctgggcctcggcccagaagccacgacgggcga

SEQ ID NO: 81965 - DNA, 80 bp, Artificial Sequence
  ENSG00000082458_1 (sequence is synthesized)
cacgacgggcgacacggagccgccagtgctggagggggagccgtgggtgcggggcagcgtgggggccgaggccccgggac

SEQ ID NO: 81966 - DNA, 80 bp, Artificial Sequence
  ENSG00000082458_2 (sequence is synthesized)
cccttcttggtccgagcagtgtgagtgtgccagggagcccggcggcggcggcggcggtggtggcggcggtggcggcggcg

SEQ ID NO: 81967 - DNA, 120 bp, Artificial Sequence
  ENSG00000082458_3 (sequence is synthesized)
cagtgccatgcacaagcaccagcactgctgtaagtgccctgagtgctatgaggtgacccgcctggccgccctgcggcgcctcgagcctccgggctacggcgactggcaagtccccgaccc

SEQ ID NO: 81968 - DNA, 120 bp, Artificial Sequence
  ENSG00000082458_4 (sequence is synthesized)
ttacgggccaggtgggggcaacggcgccagcgcgggttatgggggctacagctcgcagaccttgccctcgcaggcgggggccacccccacccctcgcaccaaggccaagctcatccccac

SEQ ID NO: 81969 - DNA, 120 bp, Artificial Sequence
  ENSG00000082458_5 (sequence is synthesized)
cggccgggatgtggggccggtgcctcctaagccagtcccgggcaagagcacccccaaactcaacggcagcggccccagctggtggccagagtgcacctgtaccaaccgggactggtatga

SEQ ID NO: 81970 - DNA, 120 bp, Artificial Sequence
  ENSG00000082458_6 (sequence is synthesized)
gcaggtgaatggcagtgatggcatgttcaaatatgaggaaatcgtacttgagaggggcaactctggcctgggcttcagtatcgcaggtggcatcgacaatccccatgtccctgatgaccc

SEQ ID NO: 81971 - DNA, 120 bp, Artificial Sequence
  ENSG00000082458_7 (sequence is synthesized)
tggcatctttattaccaagattatccctggtggagcagctgccatggatgggaggctgggggtgaatgactgtgtgctgcgggtgaatgaggtggacgtgtcggaggtggtacacagccg

SEQ ID NO: 81972 - DNA, 120 bp, Artificial Sequence
  ENSG00000082458_8 (sequence is synthesized)
ggcggtggaggcgctgaaggaggcaggccctgtggtgcgattggtggtgcggaggcgacagcctccacccgagaccatcatggaggtcaacctgctcaaagggcccaaaggcctgggttt

SEQ ID NO: 81973 - DNA, 120 bp, Artificial Sequence
  ENSG00000082458_9 (sequence is synthesized)
cagcattgctgggggtattggcaaccagcacatcccaggagacaacagcatctacatcaccaagatcattgaggggggtgctgctcagaaggatggacgcctacagattggggaccggct

SEQ ID NO: 81974 - DNA, 120 bp, Artificial Sequence
  ENSG00000082458_10 (sequence is synthesized)
gctggcggtgaacaacaccaatctgcaggatgtgaggcacgaggaagctgtggcctcactgaagaacacatctgatatggtgtatttgaaggtggccaagccaggcagcctccacctcaa

SEQ ID NO: 81975 - DNA, 120 bp, Artificial Sequence
  ENSG00000082458_11 (sequence is synthesized)
cgacatgtacgctccccctgactacgccagcacttttactgccttggctgacaaccacataagccataattccagcctgggttatctcggggctgtggagagcaaggtcagctaccctgc

SEQ ID NO: 81976 - DNA, 120 bp, Artificial Sequence
  ENSG00000082458_12 (sequence is synthesized)
tcctcctcaggttccccccacccgctactctcctattcccaggcacatgctggctgaggaggacttcaccagagagcctcgcaagatcatcctgcacaaaggctccacaggcctgggctt

SEQ ID NO: 81977 - DNA, 120 bp, Artificial Sequence
  ENSG00000082458_13 (sequence is synthesized)
caacatcgtaggaggagaggatggagaaggcatttttgtctccttcatcctggcaggaggcccagctgacctgagtggggagctgcgcaggggagaccggatcttatcggtgaatggagt

SEQ ID NO: 81978 - DNA, 120 bp, Artificial Sequence
  ENSG00000082458_14 (sequence is synthesized)
gaatctgaggaatgcaactcatgagcaggctgcagctgctctgaaacgggccggccagtcagtcaccattgtggcccagtacagacctgaagaatacagtcgctttgaatcgaagataca

SEQ ID NO: 81979 - DNA, 120 bp, Artificial Sequence
  ENSG00000082458_15 (sequence is synthesized)
tgacttacgagaacaaatgatgaacagcagcatgagctctgggtctgggtccctccgaacaagtgaaaagaggtccttgtatgtcagggccctgtttgattatgatcggactcgggacag

SEQ ID NO: 81980 - DNA, 120 bp, Artificial Sequence
  ENSG00000082458_16 (sequence is synthesized)
ctgcctgccaagccaggggctcagcttctcttatggtgacattctgcatgtcattaatgcctctgatgatgagtggtggcaggcaaggctggtgaccccacacggagaaagtgagcagat

SEQ ID NO: 81981 - DNA, 120 bp, Artificial Sequence
  ENSG00000082458_17 (sequence is synthesized)
cggtgtgatccccagtaagaagagggtggaaaagaaagaaagagctcgattgaaaactgtgaagttccatgccaggacggggatgattgagtctaacagggacttcccggggttaagtga

SEQ ID NO: 81982 - DNA, 120 bp, Artificial Sequence
  ENSG00000082458_18 (sequence is synthesized)
cgattattatggagcaaagaacctgaaaggacaagaggatgctattttgtcatatgagccagtgacacggcaagaaattcactatgcaaggcctgtgatcatcctgggcccaatgaagga

SEQ ID NO: 81983 - DNA, 120 bp, Artificial Sequence
  ENSG00000082458_19 (sequence is synthesized)
ccgagtcaatgatgacctgatctccgaatttccacataaatttggatcctgtgtgccacatactacccggcctcgacgtgataatgaggtggatggacaagactaccactttgtggtgtc

SEQ ID NO: 81984 - DNA, 120 bp, Artificial Sequence
  ENSG00000082458_20 (sequence is synthesized)
ccgagaacaaatggagaaagatattcaggacaacaagttcatcgaggcgggccaatttaatgataacctctatgggaccagcatccagtcagtgcgggcagttgcagagaggggcaagca

SEQ ID NO: 81985 - DNA, 120 bp, Artificial Sequence
  ENSG00000082458_21 (sequence is synthesized)
ctgcatcttagatgtttccggcaatgctatcaagagactgcagcaagcacaactttaccccattgccattttcatcaagcccaagtccattgaagcccttatggaaatgaaccgaaggca

SEQ ID NO: 81986 - DNA, 120 bp, Artificial Sequence
  ENSG00000082458_22 (sequence is synthesized)
gacatatgaacaagcaaataagatctatgacaaagccatgaaactggagcaggaatttggagagtactttacagccattgtacagggtgactcactggaagagatttataacaaaatcaa

SEQ ID NO: 81987 - DNA, 120 bp, Artificial Sequence
  ENSG00000082458_23 (sequence is synthesized)
acaaatcattgaggaccagtctgggcactacatttgggtcccatcccctgaaaaactctgaagaatcccctccaaccattctcttgtgaacagaagaaatcaagtccctcttccctcctc

SEQ ID NO: 81988 - DNA, 120 bp, Artificial Sequence
  ENSG00000082458_24 (sequence is synthesized)
cctcttcattcctgtccccatggggagaacaaatgctactgttcttgtccccttttttagatatgtcaaaaaaaattaagttttctagtcctgttctttttttttttttaagtttttgtt

SEQ ID NO: 81989 - DNA, 120 bp, Artificial Sequence
  ENSG00000082458_25 (sequence is synthesized)
tgtgactgtgcccattcctgcatggacctttcccaagcgctagcacaggtgcaaaatccatcagagccattgttttcataaaaaccaagcagaagtgaagagaaaagaggaggactgatg

SEQ ID NO: 81990 - DNA, 120 bp, Artificial Sequence
  ENSG00000082458_26 (sequence is synthesized)
gaaagacagactctggacagctgcacggcttgtgaagtgagctaaatgcaccacatgatgagatgctcctgggcatttctccctatctgtactgctgtcttgcagctctgaacggtgcaa

SEQ ID NO: 81991 - DNA, 120 bp, Artificial Sequence
  ENSG00000082458_27 (sequence is synthesized)
gtactgctgtcttgcagctctgaacggtgcaacgtaatggcgacagaaagtatcttatttatatatagatatatatatgtaatttatataaaatatatagaaattattatatatatatat

SEQ ID NO: 81992 - DNA, 120 bp, Artificial Sequence
  ENSG00000082458_28 (sequence is synthesized)
acacatttgggttagaaaatctatggagacttcatcaatggtactatgttattagagaaatgctttaattttcatattccaatcagatggcatcttctatcccagctggttgggaaggga

SEQ ID NO: 81993 - DNA, 120 bp, Artificial Sequence
  ENSG00000082458_29 (sequence is synthesized)
ttgaagatggtagcaagtgctgcactaagggcactcgcatttggtcattctcttgagagctaggaggggtcagcctgaggccggagaggaagggcttttgcctggggtgagagggtgaga

SEQ ID NO: 81994 - DNA, 120 bp, Artificial Sequence
  ENSG00000082458_30 (sequence is synthesized)
gacttgacctgaaagcagctgctgcccctgaggtgcagccagagtcctgtgtgcggacagagagaatggctaatgatgctccgcgtggaattgcctattgttttatgccacctgatgtgt

SEQ ID NO: 81995 - DNA, 120 bp, Artificial Sequence
  ENSG00000082458_31 (sequence is synthesized)
ctgcatgagaggtttcctttttgttcctttttaagctgctgttaaaccaaaaccatgttgtgctactgtgtcagccttttcattattgcaaattttacttttactatttaagtgaatgca

SEQ ID NO: 81996 - DNA, 120 bp, Artificial Sequence
  ENSG00000082458_32 (sequence is synthesized)
tagaatccaatttgccaaggttctaaaggcttatgaggtcctgaaggagccaggccttgtgatggagtaggtgacacaggcctggttgtcctgtcagcagaagggaaagcaggggctggg

SEQ ID NO: 81997 - DNA, 120 bp, Artificial Sequence
  ENSG00000082458_33 (sequence is synthesized)
ctgagaggaggacacggagggctctgctgaggttccttcctgggttccaccaacagggacagggagtcacttgccttccagttctgtgctgggatggcgggacagcacttggcttgcttg

SEQ ID NO: 81998 - DNA, 120 bp, Artificial Sequence
  ENSG00000082458_34 (sequence is synthesized)
gccagctgcgtcatgagtttgatttggtttttttttttttgcagctgcttcatatgctctgctccagcccctccccaacagctggtagcttatggtttcttcaagaggaaagtagacttt

SEQ ID NO: 81999 - DNA, 120 bp, Artificial Sequence
  ENSG00000082458_35 (sequence is synthesized)
atgctgtacatttgagctgtagagctaagattcgcttactggtgagctgtgaaaccttgttgctttttcccagagtctgatggcagtgactgtgatcaagggaatcttcaccgccacaag

SEQ ID NO: 82000 - DNA, 120 bp, Artificial Sequence
  ENSG00000082458_36 (sequence is synthesized)
tgcaggcagcaggtgtggttcaggtccccccccaccccactgtgctcctttgaagccaacgtgcctccctcgcctccatactggagggacgacgcaggggagaacagagaagtgcttggc

SEQ ID NO: 82001 - DNA, 120 bp, Artificial Sequence
  ENSG00000082458_37 (sequence is synthesized)
cctaggattgaggcacttgtttcctagcccgctgggttagggctggtgcaagcgaggcaatgttgaggatgctttaagcactaccagccgaatccgggaactctgttaacagttgtccaa

SEQ ID NO: 82002 - DNA, 120 bp, Artificial Sequence
  ENSG00000082458_38 (sequence is synthesized)
ccagcagaatgaggctaactgtataaagcatgggacccaggatgaggataaggaaaggacagcggctttccctgggcagtacaatggcttgaaggcaaaaagggataaagtgacagccga

SEQ ID NO: 82003 - DNA, 120 bp, Artificial Sequence
  ENSG00000082458_39 (sequence is synthesized)
ctgtgactctggtgaggaggggtgagcagggaggttgattctctgatgttaactaagtggcaaagtctcaaccgtgctcagccctccccctcccagggaagagaaacaaagattcaaagt

SEQ ID NO: 82004 - DNA, 120 bp, Artificial Sequence
  ENSG00000082458_40 (sequence is synthesized)
aagcatgatactagtgggtttaccagtgtttcttccaaggagacatatattttttaataaacgatagttgcaatgaactgtggctcagagaccttcttaaagtagttgagaagggagggc

SEQ ID NO: 82005 - DNA, 120 bp, Artificial Sequence
  ENSG00000082458_41 (sequence is synthesized)
gtgggcaaagcagtgggaagaacatcccaaacttttgggggccagagggctctctccttagtgatgatcagctagccgagctgggccgtcctggggatcggtacagctccctggggtggt

SEQ ID NO: 82006 - DNA, 120 bp, Artificial Sequence
  ENSG00000082458_42 (sequence is synthesized)
gacaggccctttgtgaaagttgtgtgcttggtcttccaccccagccccagacactgcttcaaatagcaccaaccagatgggagtccacatctgtggtggcaaaatgctgacattttccca

SEQ ID NO: 82007 - DNA, 120 bp, Artificial Sequence
  ENSG00000082458_43 (sequence is synthesized)
agaggtacacaaggtgggagaggcctgctgtagcagaggtgtgtgttagagaaagcaggggcctgatttagtagcagagaactgggtgagaaaaatggccagagaaagtgacctgccagc

SEQ ID NO: 82008 - DNA, 120 bp, Artificial Sequence
  ENSG00000082458_44 (sequence is synthesized)
taccagtgtttccgaaaatgagggtgggatgggcccatttgcagagcaggacagcagtcatccccatagccctctgaggaggggagggatgcttagagcaggcagttctggcagttctga

SEQ ID NO: 82009 - DNA, 120 bp, Artificial Sequence
  ENSG00000082458_45 (sequence is synthesized)
cgtggcaggtgccattgcaacttgtgcggaggagtcttaggaagtgctgtcataattcataaggtcaagagcaacatctggatgaatgagccacctgaaatgtgtgtgggctgagccaca

SEQ ID NO: 82010 - DNA, 120 bp, Artificial Sequence
  ENSG00000082458_46 (sequence is synthesized)
ggaagggtgagtcctcttgcttgtggtgctttatggtgtgcaggttgcttgctttcccacattctctcatttgcttgaaggcagcctaacaaaagggagtccccaaagagctccatgaga

SEQ ID NO: 82011 - DNA, 120 bp, Artificial Sequence
  ENSG00000082458_47 (sequence is synthesized)
gcttaagaaaattcatctcctgaggacaaagagaacaaagatctgtcctgtggtcacactgttgaggctctgtcttcacagctgatgttctcctagtggaggtacagctgaagaacattc

SEQ ID NO: 82012 - DNA, 120 bp, Artificial Sequence
  ENSG00000082458_48 (sequence is synthesized)
agccccagcacgagaagatacagagcaacttggaaaccccaaagggagacacacccttaacactgccgtgctgtgctgtgccgtgtcctgaaggaggagagagccctatctcctcctggt

SEQ ID NO: 82013 - DNA, 120 bp, Artificial Sequence
  ENSG00000082458_49 (sequence is synthesized)
tttgttgctgacattgcagctgatcatgccttgactccttcatctctaacagaggaagaactgtattatcaaaccttatggtctacccatgaataaataaaatatttgttcaagcacaaa

SEQ ID NO: 82014 - DNA, 120 bp, Artificial Sequence
  ENSG00000082458_50 (sequence is synthesized)
cgcgcctcaggcgtctcctcctcctccctccttccccctcctctctcctcccctcctcccgcgcgccccgctttgtgtccgtggtctcccgcgcgggacggagggactggccggagctgg

SEQ ID NO: 82015 - DNA, 120 bp, Artificial Sequence
  ENSG00000082458_51 (sequence is synthesized)
aacgaaacgtaaaaagagtttccgcctctctcgaaagtttccattttacaagagcaaagaaaacatggcccaggagagcagcatacaggaacgacttcccggggttaagtgacgattatt

SEQ ID NO: 82016 - DNA, 120 bp, Artificial Sequence
  ENSG00000082458_52 (sequence is synthesized)
ggggctgaggaggcgagggcagcggagtttcctgccctgagatagttgcagcccgctctgctgcaaccatttcaaattagagaagaaagcagttcagccggtggggctggcgggactctg

SEQ ID NO: 82017 - DNA, 80 bp, Artificial Sequence
  ENSG00000082458_53 (sequence is synthesized)
ggcggcagcggcggcggcagcggctgcgcggggcctggaactggtcgggccggctggggttccgggggacaggtttgcag

SEQ ID NO: 82018 - DNA, 120 bp, Artificial Sequence
  ENSG00000082458_54 (sequence is synthesized)
ggtggggcccgagaggctggcgggcaggcagcagtggagccggaagggtaggcagccaggggagagagagaggagctatggagagggcccgcaagttctcgggctccggcttggccatgg

SEQ ID NO: 82019 - DNA, 120 bp, Artificial Sequence
  ENSG00000082458_55 (sequence is synthesized)
gcttgggctccgcctccgcttcggcctggaggagggcttcgcagaggtgggcctggccgctccgctccctgcggcccggaggggatgccagagagcctcgcaagatcatcctgcacaaag

SEQ ID NO: 82020 - DNA, 120 bp, Artificial Sequence
  ENSG00000082458_56 (sequence is synthesized)
gaagggaaatggagaagaaagtgatttgctgggcagaaacttgaaagaaactctgtgccccagctctggtcactgggcgctcctgttttgagggcttgtgcatatgttcatggttggact

SEQ ID NO: 82021 - DNA, 120 bp, Artificial Sequence
  ENSG00000082458_57 (sequence is synthesized)
tttgaacgcaggtttgaggagttagctacgggccactgctgctctgagagggcagcttagcagatttttagggatcctggaataatcctttatggttaatcagaacataagatctggttc

SEQ ID NO: 82022 - DNA, 120 bp, Artificial Sequence
  ENSG00000082458_58 (sequence is synthesized)
agaactatttttcttctgtctttggcagggaaatgaaccgaaggcagacatatgaacaagcaaataagatctatgacaaagccatgaaactggagcaggaatttggagagtactttacag

SEQ ID NO: 82023 - DNA, 120 bp, Artificial Sequence
  ENSG00000082458_59 (sequence is synthesized)
ttctcagcactagatctggactccgacccggcgccagggctgcagcgcctgggctcctgggacacctaggccctgtgggccgattactaaggtggaagggaccgacctctccctggcagg

SEQ ID NO: 82024 - DNA, 120 bp, Artificial Sequence
  ENSG00000082458_60 (sequence is synthesized)
caagatcctgaagggaaagaagagagagcctgcgaccttttccacgaggctcttctgatcgaggacagaagtgcagggaggtaactcacaggagagagagcttgttggtctgagaataca

SEQ ID NO: 82025 - DNA, 120 bp, Artificial Sequence
  ENSG00000082458_61 (sequence is synthesized)
agtaccccttactccgcctaaacctcactcagggatgaggcatcatgggggaatttcaagagttatcatctgtgttgtgtttgcccagatacaaaggccctaattctttctgtggccagg

SEQ ID NO: 82026 - DNA, 120 bp, Artificial Sequence
  ENSG00000082458_62 (sequence is synthesized)
gtcttgccctatcccctacctcctgcctctgctcctcacagcactatacttgggcctttgttagcatgctgttgaatttcactgaaaaggcatccctcgagttccctggagaagcctctc

SEQ ID NO: 82027 - DNA, 120 bp, Artificial Sequence
  ENSG00000082482_0 (sequence is synthesized)
ggcctccgcctcgccctctgcccagcccgccggtgtcccctccttcccgcgatttcgtttcttctcacgctcccccccccgccccctcccgcgtccagccccgctctccccaccttgtaa

SEQ ID NO: 82028 - DNA, 120 bp, Artificial Sequence
  ENSG00000082482_1 (sequence is synthesized)
aacaaagccggggaaaatgcctgcccgtgcagctcggagcgcgcagcccgtctctgaataagaatggcggcacctgacttgctggatcctaaatctgccgctcagaactccaaaccgagg

SEQ ID NO: 82029 - DNA, 120 bp, Artificial Sequence
  ENSG00000082482_2 (sequence is synthesized)
ctctcgttttccacgaaacccacagtgcttgcttcccgggtggagagtgacacgaccattaatgttatgaaatggaagacggtctccacgatattcctggtggttgtcctctatctgatc

SEQ ID NO: 82030 - DNA, 120 bp, Artificial Sequence
  ENSG00000082482_3 (sequence is synthesized)
atcggagccaccgtgttcaaagcattggagcagcctcatgagatttcacagaggaccaccattgtgatccagaagcaaacattcatatcccaacattcctgtgtcaattcgacggagctg

SEQ ID NO: 82031 - DNA, 120 bp, Artificial Sequence
  ENSG00000082482_4 (sequence is synthesized)
gatgaactcattcagcaaatagtggcagcaataaatgcagggattataccgttaggaaacacctccaatcaaatcagtcactgggatttgggaagttccttcttctttgctggcactgtt

SEQ ID NO: 82032 - DNA, 120 bp, Artificial Sequence
  ENSG00000082482_5 (sequence is synthesized)
attacaaccataggatttggaaacatctcaccacgcacagaaggcggcaaaatattctgtatcatctatgccttactgggaattcccctctttggttttctcttggctggagttggagat

SEQ ID NO: 82033 - DNA, 120 bp, Artificial Sequence
  ENSG00000082482_6 (sequence is synthesized)
attaagtggaatgttagtcagaccaagattcgcatcatctcaacaatcatatttatactatttggctgtgtactctttgtggctctgcctgcgatcatattcaaacacatagaaggctgg

SEQ ID NO: 82034 - DNA, 120 bp, Artificial Sequence
  ENSG00000082482_7 (sequence is synthesized)
agtgccctggacgccatttattttgtggttatcactctaacaactattggatttggtgactacgttgcaggtggatccgatattgaatatctggacttctataagcctgtcgtgtggttc

SEQ ID NO: 82035 - DNA, 120 bp, Artificial Sequence
  ENSG00000082482_8 (sequence is synthesized)
tggatccttgtagggcttgcttactttgctgctgtcctgagcatgattggagattggctccgagtgatatctaaaaagacaaaagaagaggtgggagagttcagagcacacgctgctgag

SEQ ID NO: 82036 - DNA, 120 bp, Artificial Sequence
  ENSG00000082482_9 (sequence is synthesized)
tggacagccaacgtcacagccgaattcaaagaaaccaggaggcgactgagtgtggagatttatgacaagttccagcgggccacctccatcaagcggaagctctcggcagaactggctgga

SEQ ID NO: 82037 - DNA, 120 bp, Artificial Sequence
  ENSG00000082482_10 (sequence is synthesized)
aaccacaatcaggagctgactccttgtaggaggaccctgtcagtgaaccacctgaccagcgagagggatgtcttgcctcccttactgaagactgagagtatctatctgaatggtttgacg

SEQ ID NO: 82038 - DNA, 120 bp, Artificial Sequence
  ENSG00000082482_11 (sequence is synthesized)
ccacactgtgctggtgaagagattgctgtgattgagaacatcaaatagccctctctttaaataaccttaggcatagccataggtgaggacttctctatgctctttatgactgttgctggt

SEQ ID NO: 82039 - DNA, 120 bp, Artificial Sequence
  ENSG00000082482_12 (sequence is synthesized)
gaaaccttggaggaagaacggcattaaagatcaaaagcatgatgactcctgatgaaaacatcaccaaatgatgaacccacgagcaaaaagggatttctacttggcggcacctgacttgct

SEQ ID NO: 82040 - DNA, 120 bp, Artificial Sequence
  ENSG00000082482_13 (sequence is synthesized)
ccttgtaaaacaaagccggggaaaatgcctgcccgtgcagctcggagcgcgcagcccgtctctgaataagaagtgagtacaatggcgtgtttgtaaaaaaaagcttcaagtccgtctttt

SEQ ID NO: 82041 - DNA, 120 bp, Artificial Sequence
  ENSG00000082482_14 (sequence is synthesized)
tcaaaaaacattttgaatgctgcatgcctcatgcttcccagcgcctcgcgggagagacccggctatagagcaggagtggcggcacctgacttgctggatcctaaatctgccgctcagaac

SEQ ID NO: 82042 - DNA, 120 bp, Artificial Sequence
  ENSG00000082482_15 (sequence is synthesized)
tggtcatctatcatcaagagaatttggaattctgagccagcactttctttctgatgatgcttgttgaacggtccactttctttgatgagtggaatgacaagcaatgtctgatgccttttt

SEQ ID NO: 82043 - DNA, 120 bp, Artificial Sequence
  ENSG00000082482_16 (sequence is synthesized)
ctctctttccctaatgtgccataaggcctcagaatgaatgagaattgtttctggtaacaatgtagctttgagggatcagttcttaacttttcagggtctacctaactgagcctagatatg

SEQ ID NO: 82044 - DNA, 120 bp, Artificial Sequence
  ENSG00000082482_17 (sequence is synthesized)
gaccatttatggatgacaacaattttttttttgtaaatgacaagaaattcttatgcagccttttacctaagaaattttctgtcagtgccttatcttatgaagaaacagaacctctctagc

SEQ ID NO: 82045 - DNA, 120 bp, Artificial Sequence
  ENSG00000082482_18 (sequence is synthesized)
taatgtgtggtttctccttccctgcccccacccctaggctcacctctgcagtcttttaccccagttctcccatttgaataccataccttgctggaaacagtgtgtaaaatgactgaagtg

SEQ ID NO: 82046 - DNA, 120 bp, Artificial Sequence
  ENSG00000082482_19 (sequence is synthesized)
atgatgcccgaagatgaaatagatgccaaattagatggacattgaagcaacactcagcgttgcctagcgttaaaggcactgcagagaaatgaggtgcagaggtggcccctctgagtattt

SEQ ID NO: 82047 - DNA, 120 bp, Artificial Sequence
  ENSG00000082482_20 (sequence is synthesized)
atttgactcaggtaccagtggtacatatatacagtgtaattatgaccaggctggtaaaattggctgctcgcaaacaatccccttttttcctggcagtatttggaatttatcatttattaa

SEQ ID NO: 82048 - DNA, 72 bp, Artificial Sequence
  ENSG00000082482_21 (sequence is synthesized)
gacctgacagaagaaaactgttaaaaatggatattattggaggggatttaaaacagtgggtgtgaattatca

SEQ ID NO: 82049 - DNA, 120 bp, Artificial Sequence
  ENSG00000082482_22 (sequence is synthesized)
attattggaggggatttaaaacagtgggtgtgaattatcattctgatggaaagaaaatagcaaaacaatgtgttacaagtatttgctaataaacagtatactgccagcttctaattgctt

SEQ ID NO: 82050 - DNA, 120 bp, Artificial Sequence
  ENSG00000082482_23 (sequence is synthesized)
tttgatgtatgaaaggcttatataattttcttttcgttgggtgacttttgccagatgagaggaggtggcacagtggtgagtgcagggcacagtcctagccttctgtgggtatacttttgg

SEQ ID NO: 82051 - DNA, 120 bp, Artificial Sequence
  ENSG00000082482_24 (sequence is synthesized)
agttgtgacttggctgtgagggcagaagttgaagttgggatcactgtgactttgcacatggaaaaatgcagattgcaggcataattcatctctgacattagagaaaaagctgttatagca

SEQ ID NO: 82052 - DNA, 120 bp, Artificial Sequence
  ENSG00000082482_25 (sequence is synthesized)
caatttaaattttgagagtttgctgtgtttttttttcacataaaagaggctgattattctttttagtttaattttatatcctgtaattctttggatggttccaagattcagaaaaaattc

SEQ ID NO: 82053 - DNA, 120 bp, Artificial Sequence
  ENSG00000082482_26 (sequence is synthesized)
agtaaatgcaccccgtaaattgctaccctttcctttattttcatacttagatctgctgtacattgtatatatatataatttttaaaatgcagaaagaaaataatttccctaaatataatt

SEQ ID NO: 82054 - DNA, 120 bp, Artificial Sequence
  ENSG00000082482_27 (sequence is synthesized)
gcaaactgatttcttttacttttttgtgtgtgggggtgggagctgtatctgaataagtggcattcagattagggtcttgaaaaataaacccagaatctttaaaagaagcaaataaactaa

SEQ ID NO: 82055 - DNA, 120 bp, Artificial Sequence
  ENSG00000082482_28 (sequence is synthesized)
tagacgcttattttccaaaatttaaatttaagctagaaatgtaaatattcaattaatttgttaaaagtacttttataaagttaaaaaaaatccaaccaaaattttagaaagtcaggctct

SEQ ID NO: 82056 - DNA, 120 bp, Artificial Sequence
  ENSG00000082482_29 (sequence is synthesized)
tttagaaagaaagctacacccatttcctcaaataactgttccgaaaatttatatggtggaatgcgccatgtataaactgtgaattgtattgacaaataaagtttgtaattaaagtcagca

SEQ ID NO: 82057 - DNA, 120 bp, Artificial Sequence
  ENSG00000082482_30 (sequence is synthesized)
tctcagcaagcggccgtttcccatcttcgcttcgcgtccaaagtgttgggtcataatctggatttggaggcaaacccttgccagatcctctccacgccgcttctcccccctctcccgccg

SEQ ID NO: 82058 - DNA, 120 bp, Artificial Sequence
  ENSG00000082482_31 (sequence is synthesized)
gtgttgttagagaattcgcctattacgacgacagcaacgtctgatctcctggctttcttcccctccttgatgtcttcgccctggctccagtggcggcacctgacttgctggatcctaaat

SEQ ID NO: 82059 - DNA, 80 bp, Artificial Sequence
  ENSG00000082497_0 (sequence is synthesized)
attaccataaccgtctgcagcgacggcggcgcagcgccccagtcgcggcggcgggacctgccgggacccttgcccgccgc

SEQ ID NO: 82060 - DNA, 120 bp, Artificial Sequence
  ENSG00000082497_1 (sequence is synthesized)
ccgcgagtgtgcaccggcggccgggctggcgccgagcccagagcggaccagcagcagctcaagcgctgcggccgccgcctccccgctgaccccgcgatctgaggctgtcagagatgactc

SEQ ID NO: 82061 - DNA, 120 bp, Artificial Sequence
  ENSG00000082497_2 (sequence is synthesized)
tggttctgtccatgaatagattctgcgagcccattgtctcggaaggagctgctgaaattgctgggtaccaaacactatgggaggctgacagctacggaggcccaagccccccagggccag

SEQ ID NO: 82062 - DNA, 120 bp, Artificial Sequence
  ENSG00000082497_3 (sequence is synthesized)
cacaagctcctttgcagggagaccggggagctggtcccccactggcaggatcacattacaggggaatttcaaatcctataacaacatccaagatcacatactttaagaggaagtatgtgg

SEQ ID NO: 82063 - DNA, 120 bp, Artificial Sequence
  ENSG00000082497_4 (sequence is synthesized)
aagaagaggattttcacccaccactcagcagctgtagccataaaaccatctcaatttttgaggaacgagcccacatcctttatatgtccttagaaaagctaaagtttatcgatgatcctg

SEQ ID NO: 82064 - DNA, 120 bp, Artificial Sequence
  ENSG00000082497_5 (sequence is synthesized)
aagtgtacctccgaagatctgtccttataaacaatttgatgaaaaggatccatggagaaattatcatgcagaataactggtgcttccctgcctgctctttcaatggcacctctgcccaag

SEQ ID NO: 82065 - DNA, 120 bp, Artificial Sequence
  ENSG00000082497_6 (sequence is synthesized)
agtggtttatggctcaagactgcccttaccgaaaacgaccacggatggccaaagaggaatgtgaaaagtttcatgcctgctgcttttaccaagaatgtggtggccactacctaaatttac

SEQ ID NO: 82066 - DNA, 120 bp, Artificial Sequence
  ENSG00000082497_7 (sequence is synthesized)
ccctttctgtcaatgctaatgttggaagtgcctccactgctgcctcctctccctccgcctcttcttcctcctcatcttcctcttcctctccccctttgcctttaccgagttgttcccgcc

SEQ ID NO: 82067 - DNA, 120 bp, Artificial Sequence
  ENSG00000082497_8 (sequence is synthesized)
aggtggattttgatgtaggtagtgcatctatttacaagagtgatggccagatacctgccaatgaaatctttgtcactaatgtcagatcacttggtgttcaggaaaaggccaaattaaatg

SEQ ID NO: 82068 - DNA, 120 bp, Artificial Sequence
  ENSG00000082497_9 (sequence is synthesized)
atgagaaagcaaatgatgacaccaacagagatggtggccccctcagccacgaacctgtgggaaatgaccttgcttttgagtgcaaaggccaattttatgattattttgagaccggatata

SEQ ID NO: 82069 - DNA, 120 bp, Artificial Sequence
  ENSG00000082497_10 (sequence is synthesized)
atgaaagaaacaatgtaaatgaatcttggaaaaagtccttacggaaaaaggaggcttcaccaccaagtaacaaactgtgctgcagcaaaggaagtaaaatatgagccatcttctcaccga

SEQ ID NO: 82070 - DNA, 120 bp, Artificial Sequence
  ENSG00000082497_11 (sequence is synthesized)
actttgaagcatgcacagcatgatcagttagctctcgtaaattttattttgaatggattttgtagttttgtacaacagataaaattatgccatgaacatgccatgtcgttttaatgcctg

SEQ ID NO: 82071 - DNA, 120 bp, Artificial Sequence
  ENSG00000082497_12 (sequence is synthesized)
gagagcagattgcgtaaaacatctgtatagcaggcatcagcgagcttcttataaatgtggtgatttttaccaaggaaacgattgacttaatgcttaaaagtatatcatagttttcttacg

SEQ ID NO: 82072 - DNA, 120 bp, Artificial Sequence
  ENSG00000082497_13 (sequence is synthesized)
gaaaagatcagtagatgagattgggggacaatgtgcccttgcaatatttccattgccccccaaggagcctgtcactagctaagaaatttctacatgtttgccagttaattagggagttat

SEQ ID NO: 82073 - DNA, 120 bp, Artificial Sequence
  ENSG00000082497_14 (sequence is synthesized)
ttggtaagcaaatcaatataaccagcaaagatacctgcttcttctatatgatacaatattttttttaaataaaagactaaagacagggagctagatgaaatggcttaatggtgctgttaa

SEQ ID NO: 82074 - DNA, 120 bp, Artificial Sequence
  ENSG00000082497_15 (sequence is synthesized)
gtatttgtacctaacagtcttgtgtgacagatgaaaataggatgtaacataatgaaacacacctgtctaggggcggcaatcaacagtcttacacagagagggtattccctgcaagtttct

SEQ ID NO: 82075 - DNA, 120 bp, Artificial Sequence
  ENSG00000082497_16 (sequence is synthesized)
ggcttgcctgtgatgggtgatgaggcttttagagaggtgttatacagggcgatttttggtgccttacttttatcttaatttttgccaatgtgaaaattaaggataaatcagagttacagc

SEQ ID NO: 82076 - DNA, 120 bp, Artificial Sequence
  ENSG00000082497_17 (sequence is synthesized)
aaaaaaaaaaaaaaaaaaaaaaccacagggtggatcaatatggtttggaaactgttaactttgaactattgtgttcagcttttgattcgacatctctattctttatttttgatgcccaat

SEQ ID NO: 82077 - DNA, 120 bp, Artificial Sequence
  ENSG00000082497_18 (sequence is synthesized)
ctttatttttgatgcccaattgcttttggattcgccgttttttcaatagggatggaggaaatgagagagagagctgttagaaagcagcacgggctgctcgagcttttctatggcaactgt

SEQ ID NO: 82078 - DNA, 120 bp, Artificial Sequence
  ENSG00000082497_19 (sequence is synthesized)
gtgttgctggggttggggttttctgggttttgggttgttttgttttgttttcttgtccaatgaagttcacgaaccagtggcatgcattatacttttctctgttttgcatcatttcacttg

SEQ ID NO: 82079 - DNA, 120 bp, Artificial Sequence
  ENSG00000082497_20 (sequence is synthesized)
tttagattataaaagcatgtgggtttttatatatgaactttgctgttgattaagaagcacaatgttaataaatgatgtggtgatcaataaggtttatcttaaagaatgtaaagactttag

SEQ ID NO: 82080 - DNA, 120 bp, Artificial Sequence
  ENSG00000082497_21 (sequence is synthesized)
tacattttccaaataatatctttaacttgtacatttgaaaagtgttcagagtggccctcctaccatccttccttccactccagccaactcttcctgctaaactgtattccagtttccaag

SEQ ID NO: 82081 - DNA, 120 bp, Artificial Sequence
  ENSG00000082497_22 (sequence is synthesized)
tttactaattgacttgggcctgttcaaataatacttcacagaaaccaaatgccaaacggaggaaataagtaagccctcccagtttctccaagataaagctttttttattattgctattaa

SEQ ID NO: 82082 - DNA, 120 bp, Artificial Sequence
  ENSG00000082497_23 (sequence is synthesized)
tattaaatataggtctcattcatacagtgtatgagtaggatcatttggacaattgtccacaaagaccaatttttaaaacattttcttgtgttatagttaaatagtctagtaatgttttgt

SEQ ID NO: 82083 - DNA, 120 bp, Artificial Sequence
  ENSG00000082497_24 (sequence is synthesized)
cctttattttcaatatttgataaacatttgatgttcaaaacttagctaatagatgcttgtatatgaatgtgttgtaataaagtgaggttttcttgatatatatttattaagatgataaaa

SEQ ID NO: 82084 - DNA, 120 bp, Artificial Sequence
  ENSG00000082497_25 (sequence is synthesized)
attcattaagttttttaaattttaatggctattggctatgtttctcttttccattattctctctcctttaaaaaactcaaaacatctagaaactgtagtggatagtggccacacaggagt

SEQ ID NO: 82085 - DNA, 120 bp, Artificial Sequence
  ENSG00000082497_26 (sequence is synthesized)
tttctaaattaaagagtattttaaaatgccaatctgacaggtgtttcagaatgatcctagttcgtaagtttaagtttctattgattaagaagcacaatgttaatagatgatgtggtgatc

SEQ ID NO: 82086 - DNA, 120 bp, Artificial Sequence
  ENSG00000082497_27 (sequence is synthesized)
aataaggttatgtctgaaagaatgtaaagattttcctttctggagtgtctctgaaaaaaattgtataacacgaagccataaatactgaatcttagctgattgcattatgaactgtcaaac

SEQ ID NO: 82087 - DNA, 120 bp, Artificial Sequence
  ENSG00000082497_28 (sequence is synthesized)
tgtgaagatgacccatatgtaaacagttataacagctacagattattgctagtagcattccatacaattccatattaatgttcttaggagctaatatttgataaaggggaaagctagtta

SEQ ID NO: 82088 - DNA, 120 bp, Artificial Sequence
  ENSG00000082497_29 (sequence is synthesized)
aaaactaattaatttgtcaaatgtagcattcttattatgagtgtaatatctcatggagatttaaatatgaacgaaaggacttatccttctgctttttaaaagccccagcattactagata

SEQ ID NO: 82089 - DNA, 120 bp, Artificial Sequence
  ENSG00000082497_30 (sequence is synthesized)
gtgtttttcttgaaggccaaagctgtaaaatgacaaagttggtgattttcagcagcactcacctgagctgtgagcgcctgcacctgttcggtagaacccactagaatcacttctctgtag

SEQ ID NO: 82090 - DNA, 120 bp, Artificial Sequence
  ENSG00000082497_31 (sequence is synthesized)
gataagtgatgcctttgaatccagcagcataaaaatctgttctttttagtcatcaagtttttgtttccaggatatttctagcattgcaaaaaaaaatttcttcaccaaacactaattcct

SEQ ID NO: 82091 - DNA, 120 bp, Artificial Sequence
  ENSG00000082497_32 (sequence is synthesized)
aaacacccatccaaaccacaaaaattctcttgttagtaggcgagagtgctaggacttcctgtgttcacctcccatgcacccagcattgtcttttatgcatgagatattccattagatttt

SEQ ID NO: 82092 - DNA, 120 bp, Artificial Sequence
  ENSG00000082497_33 (sequence is synthesized)
cctagagtggccaggacacccttcatagtaagttatatctcttaactggattctatagttttatctcgagcaacttggaaaagctaagacatcctccacccacactggtatctacgcgcc

SEQ ID NO: 82093 - DNA, 120 bp, Artificial Sequence
  ENSG00000082497_34 (sequence is synthesized)
tggaagctgcaccttctctcattgctgtgctctgctttaaggaaaacctgatatgacagaatcaagactattaaaagataaatgaggggaaatcttcatttaagaaagttgccttgctcc

SEQ ID NO: 82094 - DNA, 120 bp, Artificial Sequence
  ENSG00000082497_35 (sequence is synthesized)
ccaagagtgcctttaattgctattcccctaggcatctgggtgcatatcattaatgaaatcattaacctttgtctctggtccttcctttctaaaaacagcagattatagaaggtggtctgg

SEQ ID NO: 82095 - DNA, 120 bp, Artificial Sequence
  ENSG00000082497_36 (sequence is synthesized)
caaagggattttcaaagggcaaaagtctcatcatcatctttccactcaaaatcctattattctacatttcactttgcaggggtcctagggacaggattgcagggacaggggacatgggag

SEQ ID NO: 82096 - DNA, 120 bp, Artificial Sequence
  ENSG00000082497_37 (sequence is synthesized)
gaagacagaaaaattcaaaaccagcagatgccactacctggcaatgaattgaaaattaggggaaagcatctttggcgtgaccttttattaagacaacagaaatttagaacattttacatg

SEQ ID NO: 82097 - DNA, 120 bp, Artificial Sequence
  ENSG00000082497_38 (sequence is synthesized)
cttctttgttaaatggtgaagcaagggaatgaaagtatttatttttagagctcatagttaactccatcaagacatggctacccacccctccagttatgaacttgtattacagctccactt

SEQ ID NO: 82098 - DNA, 120 bp, Artificial Sequence
  ENSG00000082497_39 (sequence is synthesized)
ggtgacttcctttctgtgtatcaggagcagagcagaggacaacttgtagaagacatgaccattaagagacatcaacttcgcaacaaatataagacaaggatacaaggattcctatgtgat

SEQ ID NO: 82099 - DNA, 120 bp, Artificial Sequence
  ENSG00000082497_40 (sequence is synthesized)
gcagctaggtttttatatccttctaacaaatggtgagcaggagacttttttggaaataattagttgtgaaattccatttttctgacagccccttaaatttgaagttatttcatttgtagt

SEQ ID NO: 82100 - DNA, 120 bp, Artificial Sequence
  ENSG00000082497_41 (sequence is synthesized)
taaggttatcacatccctgccaattttactagattttttcagagacaagcattcagcatggcattagtaatgatggtttaaactaggtgcagaactgtcccatgaagagaagaatgatat

SEQ ID NO: 82101 - DNA, 120 bp, Artificial Sequence
  ENSG00000082497_42 (sequence is synthesized)
cagtatttaaataataaaagaagagacaatgtatggtttatagtgattcattttaagattgctgtattttgattttgtggtttaaaataaatgcattaaggatcttttaagttactacaa

SEQ ID NO: 82102 - DNA, 120 bp, Artificial Sequence
  ENSG00000082497_43 (sequence is synthesized)
atccagttcaggccgatcagggctggtggaaacaactaccaagtgtctctctgtctgctttgctttgggagaagaaagtggagggagccccagcatgttgtagaggaactggcctgcgga

SEQ ID NO: 82103 - DNA, 120 bp, Artificial Sequence
  ENSG00000082512_0 (sequence is synthesized)
aggagcagcagccgcgcctgcagaccggcctcgcggagcccgcgcgccgagccccacaatggcttattcagaagagcataaaggtatgccctgtggtttcatccgccagaattccggcaa

SEQ ID NO: 82104 - DNA, 120 bp, Artificial Sequence
  ENSG00000082512_1 (sequence is synthesized)
ctccatttccttggactttgagcccagtatagagtaccagtttgtggagcggttggaagagcgctacaaatgtgccttctgccactcggtgcttcacaacccccaccagacaggatgtgg

SEQ ID NO: 82105 - DNA, 120 bp, Artificial Sequence
  ENSG00000082512_2 (sequence is synthesized)
gcaccgcttctgccagcactgcatcctgtccctgagagaattaaacacagtgccaatctgccctgtagataaagaggtcatcaaatctcaggaggtttttaaagacaattgttgcaaaag

SEQ ID NO: 82106 - DNA, 120 bp, Artificial Sequence
  ENSG00000082512_3 (sequence is synthesized)
agaagtcctcaacttatatgtatattgcagcaatgctcctggatgtaatgccaaggttattctgggccggtaccaggatcaccttcagcagtgcttatttcaacctgtgcagtgttctaa

SEQ ID NO: 82107 - DNA, 120 bp, Artificial Sequence
  ENSG00000082512_4 (sequence is synthesized)
tgagaagtgccgggagccagtcctacggaaagacctgaaagagcatttgagtgcatcctgtcagtttcgaaaggaaaaatgcctttattgcaaaaaggatgtggtagtcatcaatctaca

SEQ ID NO: 82108 - DNA, 120 bp, Artificial Sequence
  ENSG00000082512_5 (sequence is synthesized)
gaatcatgaggaaaacttgtgtcctgaatacccagtattttgtcccaacaattgtgcgaagattattctaaaaactgaggtagatgaacacctggctgtatgtcctgaagctgagcaaga

SEQ ID NO: 82109 - DNA, 120 bp, Artificial Sequence
  ENSG00000082512_6 (sequence is synthesized)
ctgtccttttaagcactatggctgtgctgtaacggataaacggaggaacctgcagcaacatgagcattcagccttacgggagcacatgcgtttggttttagaaaagaatgtccaattaga

SEQ ID NO: 82110 - DNA, 120 bp, Artificial Sequence
  ENSG00000082512_7 (sequence is synthesized)
agaacagatttctgacttacacaagagcctagaacagaaagaaagtaaaatccagcagctagcagaaactataaagaaacttgaaaaggagttcaagcagtttgcacagttgtttggcaa

SEQ ID NO: 82111 - DNA, 120 bp, Artificial Sequence
  ENSG00000082512_8 (sequence is synthesized)
aaatggaagcttcctcccaaacatccaggtttttgccagtcacattgacaagtcagcttggctagaagctcaagtgcatcaattattacaaatggttaaccagcaacaaaataaatttga

SEQ ID NO: 82112 - DNA, 120 bp, Artificial Sequence
  ENSG00000082512_9 (sequence is synthesized)
cctgagacctttgatggaagcagttgatacagtgaaacagaaaattaccctgctagaaaacaatgatcaaagattagccgttttagaagaggaaactaacaaacatgatacccacattaa

SEQ ID NO: 82113 - DNA, 120 bp, Artificial Sequence
  ENSG00000082512_10 (sequence is synthesized)
tattcataaagcacagctgagtaaaaatgaagagcgatttaaactgctggagggtacttgctataatggaaagctcatttggaaggtgacagattacaagatgaagaagagagaggcggt

SEQ ID NO: 82114 - DNA, 120 bp, Artificial Sequence
  ENSG00000082512_11 (sequence is synthesized)
ggatgggcacacagtgtccatcttcagccagtccttctacaccagccgctgtggctaccggctctgtgctagagcatacctgaatggggatgggtcagggagggggtcacacctgtccct

SEQ ID NO: 82115 - DNA, 120 bp, Artificial Sequence
  ENSG00000082512_12 (sequence is synthesized)
atactttgtggtcatgcgaggagagtttgactcactgttgcagtggccattcaggcagagggtgaccctgatgcttctggaccagagtggcaaaaagaacattatggagaccttcaaacc

SEQ ID NO: 82116 - DNA, 120 bp, Artificial Sequence
  ENSG00000082512_13 (sequence is synthesized)
tgaccccaatagcagcagctttaaaagacctgatggggagatgaacattgcatctggctgtccccgctttgtggctcattctgttttggagaatgccaagaacgcctacattaaagatga

SEQ ID NO: 82117 - DNA, 120 bp, Artificial Sequence
  ENSG00000082512_14 (sequence is synthesized)
cactctgttcttgaaagtggccgtggacttaactgacctggaggatctctagtcactgttatggggtgataagaggacttcttggggccagaactgtggaggagagcacatttgattatc

SEQ ID NO: 82118 - DNA, 120 bp, Artificial Sequence
  ENSG00000082512_15 (sequence is synthesized)
atattgacctggatttagactcaaagcacatttgtatttgcctttttccttaacgtttgaagtcagtttaaaacttctgaagtgctgtctttttacattttactctgtcccagtttgaaa

SEQ ID NO: 82119 - DNA, 120 bp, Artificial Sequence
  ENSG00000082512_16 (sequence is synthesized)
tattctcttattatttatatttttatatttcttgaaagatggtaagtttcttgaagtttttggggcgtttctcttttactggtgcttagcgcagtgtctcgggcactctaaatattgagt

SEQ ID NO: 82120 - DNA, 120 bp, Artificial Sequence
  ENSG00000082512_17 (sequence is synthesized)
gttatggaggacacagaggtagcagaatcccagttgaaaatgttttgatattttattgtttggcctattgattctagacctggccttaagtctgcaaaagccatctttataaggtaggct

SEQ ID NO: 82121 - DNA, 120 bp, Artificial Sequence
  ENSG00000082512_18 (sequence is synthesized)
gttccagttaagtagtgggtgatgtagttacaaagataatatgctcagtttggacctttttttcagttaaatgctaaatatatgaaaattactatacctctaagtattttcatgaaattc

SEQ ID NO: 82122 - DNA, 120 bp, Artificial Sequence
  ENSG00000082512_19 (sequence is synthesized)
accagcagtttgcaagcacagttttgcaaggctgcataagaactggtgaatggggtaagcattttcattcttcctgctgaagtaaagcagaaagtactgcatagtatatgagatatagcc

SEQ ID NO: 82123 - DNA, 120 bp, Artificial Sequence
  ENSG00000082512_20 (sequence is synthesized)
agctagctaaagttcagattttgttaggttcaaccctatgaaaaaaactattttcataggtcaaaaatggtaaaaaattagcagtttcataagattcaaccaaataaatatatatataca

SEQ ID NO: 82124 - DNA, 120 bp, Artificial Sequence
  ENSG00000082512_21 (sequence is synthesized)
cacacacatacatatacacctatatatgtgtgtatacaaacagttcgaatgtattttggtgacagtaataaatcaatgtgaggatggatagaatttagtatatgatagagaaaatgtcat

SEQ ID NO: 82125 - DNA, 120 bp, Artificial Sequence
  ENSG00000082512_22 (sequence is synthesized)
aaatggataaaaggaatttacaacttgaggagaaaacctttacaatttcctatgggtgtcagaagtactctcagcgaaaactgatggctaaaacagtatctactattctctgataacttt

SEQ ID NO: 82126 - DNA, 60 bp, Artificial Sequence
  ENSG00000082512_23 (sequence is synthesized)
ctgatggctaaaacagtatctactattctctgataactttttttttgagacagagtttca

SEQ ID NO: 82127 - DNA, 120 bp, Artificial Sequence
  ENSG00000082512_24 (sequence is synthesized)
ccaaagtgctgagattacaggcatgacccaccgcgtcaagcctctgacaactattgaatttgtaagctgctatgcaaatgggcatttatataaacttgtgatgtttcttgtcagaattct

SEQ ID NO: 82128 - DNA, 120 bp, Artificial Sequence
  ENSG00000082512_25 (sequence is synthesized)
ttctgagtactctgtgaagaacagaaatgatcatattcttatgcatctatctgtatgggtctgaaggtgtatatacaaactgagatgagtccttatgactcttgataagcctgagtttaa

SEQ ID NO: 82129 - DNA, 120 bp, Artificial Sequence
  ENSG00000082512_26 (sequence is synthesized)
caacaacaaaaatgccaagttgtcctgagcccttctgcgttgttatgccacttccctactgctcatatgcacgctggctcccctgggcacgcaaggatgagtatgggccatgggcccctg

SEQ ID NO: 82130 - DNA, 120 bp, Artificial Sequence
  ENSG00000082512_27 (sequence is synthesized)
tagagctgcttacctggtgatgaccatgcaccttacaatttctgaacagttaaccctatagaagcatgctttatatgagtgtcttctgggaagaggaaccttcttaatctcttctgtggg

SEQ ID NO: 82131 - DNA, 120 bp, Artificial Sequence
  ENSG00000082512_28 (sequence is synthesized)
attttcaaaatgctaaagactcacactgcagcaatcatcccagatgattaaattcaaagaaataggttcacaacaggaatatactgaagaactagagtgtcactgctggtgaactgtggc

SEQ ID NO: 82132 - DNA, 120 bp, Artificial Sequence
  ENSG00000082512_29 (sequence is synthesized)
acggttgctcaacacatcacctcggacaaattcaggaagcatttctttagcccacaagtccagacccaggtgctctgtatgtttgtttttaatattcatcatatccaagttcactctgtc

SEQ ID NO: 82133 - DNA, 120 bp, Artificial Sequence
  ENSG00000082512_30 (sequence is synthesized)
ttcctgagcagtggaagatcatattgctgtaacttcttttaagtagttgatgtggaaaacattttaaagtgaatttgtcaaaatgctggttttgtgttttatccaacttttgtgcatata

SEQ ID NO: 82134 - DNA, 120 bp, Artificial Sequence
  ENSG00000082512_31 (sequence is synthesized)
tataaagtatgtcatggcatggtttgcttaggagttcagagttccttcatcatcgaaatagtgattaagtgatcccagaacaaggaatactagagtaaaaagcacctctttttcacaaaa

SEQ ID NO: 82135 - DNA, 120 bp, Artificial Sequence
  ENSG00000082512_32 (sequence is synthesized)
gcatccaggtggcaactgtggccactcaactgttttcatgggttttggagttgttttacttggccacagaaccatgactgtaaggaaggactctcccagatcccctctgtgagggcctga

SEQ ID NO: 82136 - DNA, 120 bp, Artificial Sequence
  ENSG00000082512_33 (sequence is synthesized)
caggaatgtgtgttgaacccctttatgtgacagttactgagctaagcatggtacagggattcagtgaattgccctcaaggattcccagtctagcaatacaggtggctacagtgctgtagc

SEQ ID NO: 82137 - DNA, 120 bp, Artificial Sequence
  ENSG00000082512_34 (sequence is synthesized)
ccacctacggctgaggtgtgagtgaagaggttcgtcctgtatggagcgcatggaggacatcttgtatccactagaccttaattgtgtggtagggatcattgagccaaaagagagggcgtg

SEQ ID NO: 82138 - DNA, 120 bp, Artificial Sequence
  ENSG00000082512_35 (sequence is synthesized)
ggacatgctggacaaaacaaacactcaagaatatgccattttgggggaactgtgtgggacccagggcatgactacagaaagacacaattgtgaggtccttccccaaaagcatttgctctc

SEQ ID NO: 82139 - DNA, 120 bp, Artificial Sequence
  ENSG00000082512_36 (sequence is synthesized)
tcacttggtgctgtcgtaggtgtttcccagcaactgtgggacctggcctcatggggtttatgatctaacggagatcactcagaccaggacagagacaggctgtgggttaaaggtgaagca

SEQ ID NO: 82140 - DNA, 120 bp, Artificial Sequence
  ENSG00000082512_37 (sequence is synthesized)
ttgataggagagacaaaccaacaaggtgtaggggaaatgtgagtgaaggggaattgatgcctttcaaatgaagtgaccccagctgctcttccttccagctagggaaggtggttaaagggg

SEQ ID NO: 82141 - DNA, 120 bp, Artificial Sequence
  ENSG00000082512_38 (sequence is synthesized)
aagctggaagtgtggcgctgcctggcaggcccatgtcaagtttgatcacactgcaagtgaacatgactcaggcttctctaacttctagggaattgctgagaggctgctgaaatttctccc

SEQ ID NO: 82142 - DNA, 120 bp, Artificial Sequence
  ENSG00000082512_39 (sequence is synthesized)
gcacacccacacattttggaacacatatttcagatgattcagtcttttctctatcacacctccaaatccctcagggactgagcttataaatgtgtaaatgatttccttgttaatccagga

SEQ ID NO: 82143 - DNA, 120 bp, Artificial Sequence
  ENSG00000082512_40 (sequence is synthesized)
atttatttggaggttcatagaacttttgttatgttttcatgtgtcttttgccccttgttttgaatagtcgagtcctagagcaaggccttttttccaactttgttgtcactaagcctaaaa

SEQ ID NO: 82144 - DNA, 120 bp, Artificial Sequence
  ENSG00000082512_41 (sequence is synthesized)
agtaagtgaggctcaaatggaccattgaacagctttagtgaccaaaactggcttatggagagcagggcctgggttctctccacctgtttcttttatatttcccctcattccttgtttccc

SEQ ID NO: 82145 - DNA, 120 bp, Artificial Sequence
  ENSG00000082512_42 (sequence is synthesized)
acccacccacttctatggtaaggtgtagaatcttacaggtagcagagttttgatgaatgttgactgtttgggtgagagttgaggagtaatatcaaccaattttggagaagagatggattc

SEQ ID NO: 82146 - DNA, 120 bp, Artificial Sequence
  ENSG00000082512_43 (sequence is synthesized)
caactgtgatcaccatatgattcttactaccagaggtgaaggagaatagctgcatttgtttatctcactgtcaaaaaactgtttgctttttcttctgagaagggatcagcaaactctctt

SEQ ID NO: 82147 - DNA, 120 bp, Artificial Sequence
  ENSG00000082512_44 (sequence is synthesized)
aagagtcaaacaataataataataatcatcatcataatcataaaagagccagatagtaactattttaggctttgcaggccatacagtctctgtcacaattactcagctctcccattttag

SEQ ID NO: 82148 - DNA, 120 bp, Artificial Sequence
  ENSG00000082512_45 (sequence is synthesized)
aggcaaagcagctatagacaatatgtgaaggaataggtgtggctcctctccaataaaactttaattataaaaacaagtagcaggccagatttggcctgtgagtcttagcttgccaatttt

SEQ ID NO: 82149 - DNA, 120 bp, Artificial Sequence
  ENSG00000082512_46 (sequence is synthesized)
gtcttaaaggaccctcagggggacaagttctctaacattttgttaacttgccagcatcacaataactgcagtgattcaaaggttttcactgagatatgcctgcttttaaacctctagaat

SEQ ID NO: 82150 - DNA, 120 bp, Artificial Sequence
  ENSG00000082512_47 (sequence is synthesized)
caacccaggaggtggaggttgcagtgaacggagattgcgccacttcactccagcttgggtgacagagagagaccctgactcaaaaataaaattaaaaaaaataaaatagaatgtgaagaa

SEQ ID NO: 82151 - DNA, 120 bp, Artificial Sequence
  ENSG00000082512_48 (sequence is synthesized)
gagaccctgactcaaaaataaaattaaaaaaaataaaatagaatgtgaagaaccctggaatgaacactgtccatgtaatcattctctaatattaaataatattaaatagtatatatagtt

SEQ ID NO: 82152 - DNA, 68 bp, Artificial Sequence
  ENSG00000082512_49 (sequence is synthesized)
tactcaactgatcctcccacctcagcctcctgtgtagttgggaccataggtgtacaccgcaacacttg

SEQ ID NO: 82153 - DNA, 120 bp, Artificial Sequence
  ENSG00000082512_50 (sequence is synthesized)
cctgtgtagttgggaccataggtgtacaccgcaacacttggctaattaaaaaaaaaaaattgtggagacaaggtattggggtctcactgtgttgcccaggctggacttgagtcctggcct

SEQ ID NO: 82154 - DNA, 120 bp, Artificial Sequence
  ENSG00000082512_51 (sequence is synthesized)
tgatcctcccatctcagcctcccaaatttctgggattacaagcatgagccaccacacgtggccaataaagtattattaatggttaaaaatatttcctgactttaccagtctgaccattcc

SEQ ID NO: 82155 - DNA, 120 bp, Artificial Sequence
  ENSG00000082512_52 (sequence is synthesized)
ttcctagcttctcttgggcttgcacacctatatttcctctgcctccttttctttatcatttctggaatagcttactgtcccttcttttcatcttcttaatcctttccctttcttccttga

SEQ ID NO: 82156 - DNA, 120 bp, Artificial Sequence
  ENSG00000082512_53 (sequence is synthesized)
gttaggatatgcccttctctccttttttccttttcctgtgtccttttaccatctgctatgcagagacccatacctgatgctggaggttgggatgaagagtccacaaaagaaataaaaatg

SEQ ID NO: 82157 - DNA, 120 bp, Artificial Sequence
  ENSG00000082512_54 (sequence is synthesized)
tccttgaagaactggtaaattaaggaaaatatccaagaactaacctgagaatatgagcacattattagatcatctaaaacaaacttggtgtacttccctcttcacctatcttcccctgtc

SEQ ID NO: 82158 - DNA, 120 bp, Artificial Sequence
  ENSG00000082512_55 (sequence is synthesized)
ctctgaatttcccccagccaagactggctttcccatctctggtacaagcagccctccccatgccctctcctcagcagagacagtgggcagcatcccctgagagcctaccctctgccttgc

SEQ ID NO: 82159 - DNA, 120 bp, Artificial Sequence
  ENSG00000082512_56 (sequence is synthesized)
cctgtgcaagcctttctgcccagctgcccaccctgttctctctccctccctaggccttccagctgacttctttcctaccaccctggtcagcaggtcccactggcctgttgttatctgttg

SEQ ID NO: 82160 - DNA, 120 bp, Artificial Sequence
  ENSG00000082512_57 (sequence is synthesized)
ggaatgccagaagaacattcctgcatttatttttgtacagaattaggtctaaagaatttgctttttggagagaagttctgtgaaaagcttaaaaccttcttgttggtagcactccattta

SEQ ID NO: 82161 - DNA, 120 bp, Artificial Sequence
  ENSG00000082512_58 (sequence is synthesized)
ttattggcaaaaatattatttgaacacatgctgtgtatgtgtaatgaatgctgggtgctgagtcacaaggaggtgacaataatgtctactctctgaattctgcagtgtagctggggaggc

SEQ ID NO: 82162 - DNA, 120 bp, Artificial Sequence
  ENSG00000082512_59 (sequence is synthesized)
aggatgcaggcataaaaagaaagcatgggtaccttttacatgtcccgaaggagctatgctggcagttccccaatctaccttctttgaatcctgtgttctatgactttcttttggaataat

SEQ ID NO: 82163 - DNA, 120 bp, Artificial Sequence
  ENSG00000082512_60 (sequence is synthesized)
tggaaaatttaatattttaattaagttcatttacacctagaaagtggacatctttaatccttttttggaattaggcaataacttcctgtagagagtaagccacgtgacatataatcccca

SEQ ID NO: 82164 - DNA, 80 bp, Artificial Sequence
  ENSG00000082512_61 (sequence is synthesized)
gatgacggtctcagcctcctcccgaccccttcctgcgcgtccgctcttcccctgcgcccgcccgcgcccctccgcccgcg

SEQ ID NO: 82165 - DNA, 120 bp, Artificial Sequence
  ENSG00000082512_62 (sequence is synthesized)
tttgtcattattacttttgctactgtgcatgtaacatttaatgtggtatggtgatcagtactctttggtggtagttttattttgttttaagagacaaggtgtcactatgttgcccaggct

SEQ ID NO: 82166 - DNA, 120 bp, Artificial Sequence
  ENSG00000082512_63 (sequence is synthesized)
agactcaatctcctggactcaagtgatcctccccatcagcttcccaggtacctgagattacaggggcctggcttctgtggttgcttaataagtccatgttgaatgaatgaagagaaccag

SEQ ID NO: 82167 - DNA, 120 bp, Artificial Sequence
  ENSG00000082512_64 (sequence is synthesized)
ttcagtaaattcagtcaggtgatgtctgtcattaggtgaaccatcatagtaggttaggtatagaaaaggctgatgagaaattctgtagatgtggctttttggaaccacctgtgaatatct

SEQ ID NO: 82168 - DNA, 120 bp, Artificial Sequence
  ENSG00000082512_65 (sequence is synthesized)
tcctataattatgtaggaatctaccctgtaaatattttcctagaaataaatatgtagattttttcctagaaatactttcttagctgcaagtgcatgcatattttaactatatgcatgcag

SEQ ID NO: 82169 - DNA, 120 bp, Artificial Sequence
  ENSG00000082515_0 (sequence is synthesized)
gcttgaactcggcggcttccgtagcgggagggcgaaagatggcggcggcagtactgggacagttgggtgcgttatggatacataacctgaggagccgggggaagctggccttgggtgttt

SEQ ID NO: 82170 - DNA, 120 bp, Artificial Sequence
  ENSG00000082515_1 (sequence is synthesized)
tacctcaatcatatatccacacaagtgcttctcttgacatttctcgaaaatgggagaagaagaataaaattgtttatcctccacaactgcctggagaacctcggagaccagcagaaatct

SEQ ID NO: 82171 - DNA, 120 bp, Artificial Sequence
  ENSG00000082515_2 (sequence is synthesized)
accactgtcgaagacaaataaaatatagcaaagacaagatgtggtatttggcaaaattgatacgaggaatgtctattgaccaggctttggctcagttggaattcaatgacaaaaaagggg

SEQ ID NO: 82172 - DNA, 120 bp, Artificial Sequence
  ENSG00000082515_3 (sequence is synthesized)
ccaaaataattaaagaggttctcttagaagcacaagatatggcagtgagagaccataacgtggaattcaggtccaatttatatatagctgagtccacctcaggacgaggccagtgcctga

SEQ ID NO: 82173 - DNA, 120 bp, Artificial Sequence
  ENSG00000082515_4 (sequence is synthesized)
aacgcatccgctaccatggcagaggtcgctttgggatcatggagaaggtttattgccattattttgtgaagttggtggaagggcccccacctccacctgagccaccaaagacggcagttg

SEQ ID NO: 82174 - DNA, 120 bp, Artificial Sequence
  ENSG00000082515_5 (sequence is synthesized)
cccatgccaaagagtatattcagcagcttcgcagccggaccatcgttcacactctatgatgaggagattcagactccacagtgtatatattttgccatttattttctaaaaataaacaaa

SEQ ID NO: 82175 - DNA, 120 bp, Artificial Sequence
  ENSG00000082515_6 (sequence is synthesized)
aattgaaggcaaatgctttttatgatttctcattgaattattgaaacagtgtataactgctagttgtaaatgaatatttataaggctttgcccatttcttttgagcctctgggcatattt

SEQ ID NO: 82176 - DNA, 120 bp, Artificial Sequence
  ENSG00000082515_7 (sequence is synthesized)
gtatgcatttgcgacttggaaggggaaatcagctttaaacatagtaacagactatatttcaaaaggcttttggagtaactttgaaagggaatgttaactttccaactagtgtcctgcagg

SEQ ID NO: 82177 - DNA, 120 bp, Artificial Sequence
  ENSG00000082515_8 (sequence is synthesized)
tggctgttttgatactggacttgaatacagtgttatgaggtaagaaaattgcttttatttcacttaattttctcttgggaccatgggaagttagagtggctgcatgttgtttcattacag

SEQ ID NO: 82178 - DNA, 120 bp, Artificial Sequence
  ENSG00000082515_9 (sequence is synthesized)
tattttagggtgttcagtggtaccgtttttcctttcactgttggcacaggccagtgagtcaaaaattatattttcctttactgttttagcagtaactcgaaactacaggagtttattaga

SEQ ID NO: 82179 - DNA, 120 bp, Artificial Sequence
  ENSG00000082515_10 (sequence is synthesized)
tatacgaatctaaaactccaaaaacctttaactttgaaaattttcttttggttaagcaaagcctgtttttatttcttcttccaacagtgctttatattgtttggatatcttgtttaggat

SEQ ID NO: 82180 - DNA, 120 bp, Artificial Sequence
  ENSG00000082515_11 (sequence is synthesized)
tgatttatttttcagggtaaattcaattactgagagaggaattgaaccaatctcagcattgcattctaaaatggggcagtaggtggcactcaaccttttattagcagaaaattgttagtt

SEQ ID NO: 82181 - DNA, 120 bp, Artificial Sequence
  ENSG00000082515_12 (sequence is synthesized)
tcaaattagagtgttcaacactgcttccctctcattcatacacgtcttcattaagaagaagtactctttgtctacagccctagtccaacttttgcatgcaaaagaagaatcgaggatgct

SEQ ID NO: 82182 - DNA, 120 bp, Artificial Sequence
  ENSG00000082515_13 (sequence is synthesized)
cttatggggggctggtttcagaaatctatgttttaaacaaacacttccaggtaattctgttgtaggggactacgctttgagaatacggctttaggagaatgaaaaaatgtagttttattg

SEQ ID NO: 82183 - DNA, 120 bp, Artificial Sequence
  ENSG00000082515_14 (sequence is synthesized)
ccatgttttaagatggcattaataatagttactgtttactgggaacttgttatttgcaagctctgtgctagtattttacataattcttcacaacatcctgaaaatgtagcttttgtttta

SEQ ID NO: 82184 - DNA, 120 bp, Artificial Sequence
  ENSG00000082515_15 (sequence is synthesized)
ccactttacaaaggaataaaccgaagcacacagaattcaaataactatcacaagtcacacagcatgtaaatattggggctatgattgaaaggtttctaaagtagctggttctgcatacct

SEQ ID NO: 82185 - DNA, 120 bp, Artificial Sequence
  ENSG00000082515_16 (sequence is synthesized)
tttgagtatacagctgggtttttgtgtctctccagttaacctaatgcatgggtaaaaagacatcaggggtcagtggaataaaccaaggtgtaggacagattcattctgggtcctaagctg

SEQ ID NO: 82186 - DNA, 120 bp, Artificial Sequence
  ENSG00000082515_17 (sequence is synthesized)
ttgtagcatggagtcagggaaataacactggaatattaaaaggtaaccttcattctagtctgtgcattctcattagccagaaagaagactggataggtctcttcccttgctggcctccat

SEQ ID NO: 82187 - DNA, 120 bp, Artificial Sequence
  ENSG00000082515_18 (sequence is synthesized)
ttcattcatttatgaaacaagagactcaatgttctctgtagaaaaccttttttagaatcacttgaagaatttgtttaaaaatgcaaattcctgggctctactctcagactaagtgaatca

SEQ ID NO: 82188 - DNA, 120 bp, Artificial Sequence
  ENSG00000082515_19 (sequence is synthesized)
gaagctttggtgtgggagaccatggaacctgcagttttaataaatgccccagtgatttgcatgttggagaattatcacaccaggtcactgtgctctcatgtggtggggatgctccacgat

SEQ ID NO: 82189 - DNA, 120 bp, Artificial Sequence
  ENSG00000082515_20 (sequence is synthesized)
tgctcttggagttgtgacttccttgggtgtgactaaagccaggtggtgccatggacatcataaatataaattatgtaagtgaaggcactgcttcagtcaggctgtaaaagctattttgaa

SEQ ID NO: 82190 - DNA, 120 bp, Artificial Sequence
  ENSG00000082515_21 (sequence is synthesized)
agtggtaaggaaaaagtaggattgtaatgaagaaaatttccttcccaggttaagccttcatttggaactgcttccagtacgttacaaaaagtaataatagctaacctgtgtcactgactg

SEQ ID NO: 82191 - DNA, 120 bp, Artificial Sequence
  ENSG00000082515_22 (sequence is synthesized)
tatctggtactattttaagcactatatatacattatctcaatgaatctttcccattgtgacatccggctagttttcgtggctaagagtgtactttctaacatccatgaacattgtggtcc

SEQ ID NO: 82192 - DNA, 120 bp, Artificial Sequence
  ENSG00000082515_23 (sequence is synthesized)
tatggtttggctctgtgttcccacccaatcttatctcaaattgtaatccccatgtgtccagggagggacctgtaatccccacctagtgacggagggaggtgattgatgatgggtgtggtg

SEQ ID NO: 82193 - DNA, 120 bp, Artificial Sequence
  ENSG00000082515_24 (sequence is synthesized)
gggagggacctgtaatccccacctagtgacggagggaggtgattgatgatgggtgtggtgtaccccatgctgttctcgtgatagtgagtgggttctcatgagatctgatggttttataag

SEQ ID NO: 82194 - DNA, 74 bp, Artificial Sequence
  ENSG00000082515_25 (sequence is synthesized)
tggttttataagtgtttgaaagttccctcttcactcgctgtcttgcctgctgccatgtaaaatgtgcctacttc

SEQ ID NO: 82195 - DNA, 120 bp, Artificial Sequence
  ENSG00000082515_26 (sequence is synthesized)
attgctgaaaatgtaattaggctattgctatagtttcaggctgtctgcttctattgcaactgaaatctgccacatattaaaagatggccacttgagaaaactgctctttctaaggcattt

SEQ ID NO: 82196 - DNA, 120 bp, Artificial Sequence
  ENSG00000082515_27 (sequence is synthesized)
gaaaatttccagcaggagtcagaatgttagaaagttttgagacctccttgctatagttttccataacacatgttttctaatttttttttaaatggcagtttggtatagtagtggaaagaa

SEQ ID NO: 82197 - DNA, 120 bp, Artificial Sequence
  ENSG00000082515_28 (sequence is synthesized)
agtgggttttagagtcaatagaggaacttttgaaagtagatgtgctagacattgtatcaggtgtatcatacttctctgttctttgaattccaactttgtctcttgcaaacctctggtctt

SEQ ID NO: 82198 - DNA, 120 bp, Artificial Sequence
  ENSG00000082515_29 (sequence is synthesized)
agacaagtcacttgatttctctgattttcagtttatatgtaaaatgtttcatccctcaactcatagagttagactaaatgaaataatgagtgaaaagtgctttttgaactatacattgta

SEQ ID NO: 82199 - DNA, 120 bp, Artificial Sequence
  ENSG00000082515_30 (sequence is synthesized)
attaaacaggacatacctacaactttaaatagaagataataaaagctaacatttactgagaagttaccatgtgccaagcactataaaatggtttcttgaaataggttactttatttccct

SEQ ID NO: 82200 - DNA, 120 bp, Artificial Sequence
  ENSG00000082515_31 (sequence is synthesized)
ctaattatcgttttatttattttacagaagaggaaaattagagagaggttaagtagcttgctcaagattatgtagctagtaaatggcagagttaggattcaaatccaggcaggcagtctg

SEQ ID NO: 82201 - DNA, 120 bp, Artificial Sequence
  ENSG00000082515_32 (sequence is synthesized)
attctagaacctatgctgttggccaaacacctagaatattggcttttcacatgaaaacacttgtccattttgccatttttctcctcattaataatgaacgttttcttgtactttttcttt

SEQ ID NO: 82202 - DNA, 120 bp, Artificial Sequence
  ENSG00000082515_33 (sequence is synthesized)
tgttcttttaatcagctaaatgttttaaagatactttcatttaaatcttttaggatttctttggatagaaatgttgcaagtgttgacacaaaccagccattgtatagtttctatttctcc

SEQ ID NO: 82203 - DNA, 120 bp, Artificial Sequence
  ENSG00000082515_34 (sequence is synthesized)
cgtagtaatcttttaacatagtgagactttggaaaaatacaactttgtgtaggggaaaataatctctaaattcttagtaatgtttctatttcttatggcagcattttctttaggcctaga

SEQ ID NO: 82204 - DNA, 120 bp, Artificial Sequence
  ENSG00000082515_35 (sequence is synthesized)
ttctgtccttttttttccaatttgtaaggaaatctaccactgtcgaagacaaataaaatatagcaaagacaagatgtggtatttggcaaaattggtaagctgcaatgactattaccatat

SEQ ID NO: 82205 - DNA, 120 bp, Artificial Sequence
  ENSG00000082515_36 (sequence is synthesized)
aattaataatttaggaaagaagctatgagttcccctccccacccctcaccccaggatttgaaaaataaaaaagatttgtgaggaatgtgatataattggtaggttgtcaaaagaatgatt

SEQ ID NO: 82206 - DNA, 120 bp, Artificial Sequence
  ENSG00000082515_37 (sequence is synthesized)
gttcagagatgtatgattttccttaattttcacctttttctgagaaactaaatcacattggatagatagatactaaaaggcatcaggagtttggctataaccagagaatccaggaaaccc

SEQ ID NO: 82207 - DNA, 120 bp, Artificial Sequence
  ENSG00000082515_38 (sequence is synthesized)
acctatttatctgtaaacttgattcaacctgttttaaaactgttgcttttaagtttttttccctaggaaatgaaatttatagatgaggggagactgaagcagcaaatatacatgtaatac

SEQ ID NO: 82208 - DNA, 120 bp, Artificial Sequence
  ENSG00000082515_39 (sequence is synthesized)
atttatcctataggagaaggagatgccttgaatgcctagtgtggttgttaccaacctgtggtctctctgtcatgtttgctgtcttttaatgttattgaaactattataatctcagtttta

SEQ ID NO: 82209 - DNA, 120 bp, Artificial Sequence
  ENSG00000082515_40 (sequence is synthesized)
tggttaaaatgtttgtttcattttgactgaaagagaatagtgtctcctctcaaacttgttttcttctcttttatttgggttcaattcactgtttttagaagttactcaaattatgtaaga

SEQ ID NO: 82210 - DNA, 120 bp, Artificial Sequence
  ENSG00000082515_41 (sequence is synthesized)
ctttcattgaaaaggaaacattgactttgtaaactaatttattttcttttgtctctcaccctttaattctagatacgaggaatgtctattgaccaggctttggctcagttggaattcaat

SEQ ID NO: 82211 - DNA, 120 bp, Artificial Sequence
  ENSG00000082515_42 (sequence is synthesized)
agcgggagggcgaaagatggcggcggcagtactgggacagttgggtaaggatttcttagtggttaagcgacagaagggagtcgagatggaatctgagttgacggcttgtgttgatgttgc

SEQ ID NO: 82212 - DNA, 120 bp, Artificial Sequence
  ENSG00000082515_43 (sequence is synthesized)
aggcagggtgtcactccattgcccagggctggagtatagtggcatgatcacagctcactgcagctttaacttcctgagctcaagggattttcgtccttcagcttcccaaatagctggaac

SEQ ID NO: 82213 - DNA, 120 bp, Artificial Sequence
  ENSG00000082516_0 (sequence is synthesized)
gccccgctccctacctaaggcgtgaggctacgagcggtcggctgtggcagcttctcttgtctctgacggcttgtagttatggggcaggagccgcggacgctgccgccctcccccaactgg

SEQ ID NO: 82214 - DNA, 120 bp, Artificial Sequence
  ENSG00000082516_1 (sequence is synthesized)
tactgcgcccgctgcagcgatgccgtgcccgggggcctctttggcttcgccgcgcggacctccgtcttccttgtccgcgtgggcccgggcgcaggcgagagtccagggacacccccgttt

SEQ ID NO: 82215 - DNA, 120 bp, Artificial Sequence
  ENSG00000082516_2 (sequence is synthesized)
cgagtcataggagagttggtgggacacaccgaaagggtctctggcttcacattttctcatcaccctggtcagtacaacctctgtgccaccagctccgacgatgggactgtgaaaatatgg

SEQ ID NO: 82216 - DNA, 120 bp, Artificial Sequence
  ENSG00000082516_3 (sequence is synthesized)
gatgtagagacaaaaacagttgtgacagaacatgcactccatcagcatacgatatcaacattacattggtctcctcgagtaaaggacttaatagtatctggggatgaaaaaggagtagtt

SEQ ID NO: 82217 - DNA, 120 bp, Artificial Sequence
  ENSG00000082516_4 (sequence is synthesized)
ttctgttactggtttaacagaaatgacagccagcacctctttatagaacccaggacaattttctgtcttacttgttcacctcatcatgaagatttagtagccattggctacaaggatggc

SEQ ID NO: 82218 - DNA, 120 bp, Artificial Sequence
  ENSG00000082516_5 (sequence is synthesized)
atagtggtgataattgacatcagtaagaaaggagaagttattcataggcttcgaggccatgatgatgaaatccactccatagcctggtgtcccctgcctggtgaagattgtttatctata

SEQ ID NO: 82219 - DNA, 120 bp, Artificial Sequence
  ENSG00000082516_6 (sequence is synthesized)
aaccaagaggaaacttcagaagaagctgaaattaccaacgggaatgctgtagcacaagctccagtaacaaaaggttgctacttagccactggaagcaaagatcaaaccattcgaatctgg

SEQ ID NO: 82220 - DNA, 120 bp, Artificial Sequence
  ENSG00000082516_7 (sequence is synthesized)
agctgttctagaggccgaggggtgatgattttgaaattgccctttctgaagagaagaggagggggtatagacccaactgttaaagagcgcctttggttgacactccattggcccagcaat

SEQ ID NO: 82221 - DNA, 120 bp, Artificial Sequence
  ENSG00000082516_8 (sequence is synthesized)
caaccaacacagctggtatctagctgttttggaggtgaactgttgcaatgggatctcactcaatcttggagacggaaatacaccctcttcagtgcctcatcagaagggcaaaatcattca

SEQ ID NO: 82222 - DNA, 120 bp, Artificial Sequence
  ENSG00000082516_9 (sequence is synthesized)
agaattgtgtttaatttatgtcctttacaaacagaggatgacaaacagctattactttctacatcaatggatagagatgtaaaatgttgggacatagccaccttggagtgcagctggacc

SEQ ID NO: 82223 - DNA, 120 bp, Artificial Sequence
  ENSG00000082516_10 (sequence is synthesized)
cttccttcccttggtgggtttgcatacagcctggctttctcttctgtggacataggctctttggccataggtgttggggatggcatgatccgtgtatggaatacactctccataaagaac

SEQ ID NO: 82224 - DNA, 120 bp, Artificial Sequence
  ENSG00000082516_11 (sequence is synthesized)
aactatgatgtgaaaaatttttggcaaggcgtgaagtccaaggttacagcgctgtgctggcacccaaccaaggaaggttgcttagcttttggaactgatgatggaaaagtgggattgtat

SEQ ID NO: 82225 - DNA, 120 bp, Artificial Sequence
  ENSG00000082516_12 (sequence is synthesized)
gacacctactccaacaagcctccacagatttctagcacatatcataagaagactgtatatactttagcctgggggccaccagtaccccccatgtcacttggaggagaaggagacagacct

SEQ ID NO: 82226 - DNA, 120 bp, Artificial Sequence
  ENSG00000082516_13 (sequence is synthesized)
tcccttgctttatacagctgtggaggagaagggattgtcttacagcataatccctggaagcttagtggagaagcctttgacatcaacaaactcatcagggacaccaattcaatcaaatac

SEQ ID NO: 82227 - DNA, 120 bp, Artificial Sequence
  ENSG00000082516_14 (sequence is synthesized)
aaattgcctgtacacacagagataagttggaaagcagatggcaaaatcatggctcttggcaatgaagatggatcaatagaaatatttcagattcccaacctgaaactgatctgtactatc

SEQ ID NO: 82228 - DNA, 120 bp, Artificial Sequence
  ENSG00000082516_15 (sequence is synthesized)
caacagcatcacaagcttgtgaataccattagctggcatcatgagcatggcagccagccagaattgagctatctgatggcctctggctccaacaatgcagtcatttacgtgcacaacctg

SEQ ID NO: 82229 - DNA, 120 bp, Artificial Sequence
  ENSG00000082516_16 (sequence is synthesized)
aagactgtcatagagagcagccctgagtctccagtgaccattacagagccctaccggaccctctcagggcatacggccaagattaccagtgtggcgtggagcccacatcatgatggaagg

SEQ ID NO: 82230 - DNA, 120 bp, Artificial Sequence
  ENSG00000082516_17 (sequence is synthesized)
ctggtatctgcttcctatgatggtacagcccaggtgtgggatgctctccgggaagagcccctgtgcaatttccgaggacatcgaggtcgactgctttgtgtggcatggtctcctttggat

SEQ ID NO: 82231 - DNA, 120 bp, Artificial Sequence
  ENSG00000082516_18 (sequence is synthesized)
ccagactgcatctattcaggggcagatgacttttgtgtgcacaagtggctcacttccatgcaagatcattcccggcctcctcaaggcaaaaaaagtattgaattggagaaaaaacggctc

SEQ ID NO: 82232 - DNA, 120 bp, Artificial Sequence
  ENSG00000082516_19 (sequence is synthesized)
tctcaacctaaggcaaagcccaaaaagaagaaaaagcccaccttgagaactcctgtaaagctggaatcgattgatggaaatgaagaagaaagcatgaaggagaactcaggacctgttgag

SEQ ID NO: 82233 - DNA, 120 bp, Artificial Sequence
  ENSG00000082516_20 (sequence is synthesized)
aatggtgtgtcagaccaagaaggggaggagcaagcacgggagccggaattaccctgtggccttgctccagcggtttctagagaaccagttatctgcactccagtttcctcaggctttgaa

SEQ ID NO: 82234 - DNA, 120 bp, Artificial Sequence
  ENSG00000082516_21 (sequence is synthesized)
aagtcaaaagtcaccattaataacaaagtcattttactgaaaaaggagccaccaaaagagaagccagaaaccttaatcaagaagagaaaagctcgttccttgcttcccctgagtacaagc

SEQ ID NO: 82235 - DNA, 120 bp, Artificial Sequence
  ENSG00000082516_22 (sequence is synthesized)
accacagatccaaagaggagcttcatcaggactgtttggtactagcaactgcaaagcactccagagagctgaatgaagatgtgtctgctgatgttgaggaaagatttcatctggggcttt

SEQ ID NO: 82236 - DNA, 120 bp, Artificial Sequence
  ENSG00000082516_23 (sequence is synthesized)
tcacagacagggctaccctgtatagaatgattgatattgaaggaaaaggtcacttagaaaatggccaccctgagttatttcaccagcttatgctttggaaaggagatctcaaaggtgttc

SEQ ID NO: 82237 - DNA, 120 bp, Artificial Sequence
  ENSG00000082516_24 (sequence is synthesized)
tccagactgcagcagaaagaggggagctgacagacaaccttgtggctatggcaccagcagctggctaccatgtgtggctatgggctgtggaagcttttgccaaacagctgtgttttcagg

SEQ ID NO: 82238 - DNA, 120 bp, Artificial Sequence
  ENSG00000082516_25 (sequence is synthesized)
atcagtatgtcaaggctgcttctcacctactttccatccacaaagtgtatgaagcggtggagctgctcaagtcaaaccatttttacagggaagctattgcgattgccaaggcccggctgc

SEQ ID NO: 82239 - DNA, 120 bp, Artificial Sequence
  ENSG00000082516_26 (sequence is synthesized)
gcccggaggacccagtcctgaaggacttgtacctcagctggggaaccgtcctagaaagagatggccactatgctgtagctgccaaatgctatttaggggccacttgtgcttatgatgcag

SEQ ID NO: 82240 - DNA, 120 bp, Artificial Sequence
  ENSG00000082516_27 (sequence is synthesized)
ccaaagttttggccaaaaagggggatgcggcatcacttagaacggctgcagagttggctgccatcgtaggagaggatgagttgtctgcttccctggctctcagatgtgcccaagagctgc

SEQ ID NO: 82241 - DNA, 120 bp, Artificial Sequence
  ENSG00000082516_28 (sequence is synthesized)
ttctggccaacaactgggtgggagcccaggaagccctgcagctgcatgaaagtctacagggtcagagattggtgttttgccttctggagctactgtccaggcatctggaggaaaagcagc

SEQ ID NO: 82242 - DNA, 120 bp, Artificial Sequence
  ENSG00000082516_29 (sequence is synthesized)
tttcagagggcaaaagctcctcctcttaccacacttggaacacgggcaccgaagggcctttcgtggagagggtgactgcagtgtggaagagcatcttcagccttgacacccctgagcagt

SEQ ID NO: 82243 - DNA, 120 bp, Artificial Sequence
  ENSG00000082516_30 (sequence is synthesized)
atcaggaagcctttcagaagctgcagaacatcaagtacccatctgctacaaataacacacctgccaaacagctcctgcttcacatttgccatgacttgaccctggcagtgctgagccaac

SEQ ID NO: 82244 - DNA, 120 bp, Artificial Sequence
  ENSG00000082516_31 (sequence is synthesized)
agatggcctcctgggacgaggctgtgcaggcgctccttcgggcggtggtccggagctatgactcagggagcttcaccatcatgcaggaagtgtactcagcctttctccctgacggctgtg

SEQ ID NO: 82245 - DNA, 120 bp, Artificial Sequence
  ENSG00000082516_32 (sequence is synthesized)
accacctaagagacaagttgggggaccatcaatcccctgccacaccagctttcaaaagtttggaggccttttttctttatgggcgtctgtatgaattctggtggtctctctccagacctt

SEQ ID NO: 82246 - DNA, 120 bp, Artificial Sequence
  ENSG00000082516_33 (sequence is synthesized)
gcccaaattccagtgtctgggtaagggctggtcacagaacactctctgttgagccaagccagcagttagacactgccagcactgaagaaacggaccctgaaacttctcagccagagccaa

SEQ ID NO: 82247 - DNA, 120 bp, Artificial Sequence
  ENSG00000082516_34 (sequence is synthesized)
acaggccttcagaactagacttgagactcacagaagaaggtgagcgaatgctgagtacttttaaggagctcttttcagaaaagcatgccagtctccaaaactcacagagaactgttgctg

SEQ ID NO: 82248 - DNA, 120 bp, Artificial Sequence
  ENSG00000082516_35 (sequence is synthesized)
aagtccaagagaccttggcagaaatgatccgacaacaccaaaagagtcaactctgtaaatccacagcaaatggtcctgataagaatgaaccggaagtagaagcagagcagcccctctgca

SEQ ID NO: 82249 - DNA, 120 bp, Artificial Sequence
  ENSG00000082516_36 (sequence is synthesized)
gttctcagagccagtgtaaagaagaaaaaaatgagccactttctctgcctgagttaaccaaaaggcttaccgaggcaaatcagagaatggcgaaatttcctgagagcattaaggcctggc

SEQ ID NO: 82250 - DNA, 120 bp, Artificial Sequence
  ENSG00000082516_37 (sequence is synthesized)
ccttcccagatgtgctggagtgctgcctcgtcctgcttctcatcaggtcccactttcctggctgtctggcccaggaaatgcagcagcaggcccaagagctccttcagaaatacggcaaca

SEQ ID NO: 82251 - DNA, 120 bp, Artificial Sequence
  ENSG00000082516_38 (sequence is synthesized)
cgaaaacttacagaagacactgccagaccttctgtatgtgaattttcacacaccttgaagaaactgccaaattgaaaatgtttgacatctttcacctctgcagttatgcctcaccagaca

SEQ ID NO: 82252 - DNA, 120 bp, Artificial Sequence
  ENSG00000082516_39 (sequence is synthesized)
ttcactctggtccctagatgtttttgcagtaatccaaaagaatacaaacaaggattaagtttgaatcaaccctgcctacccatagacaacggtggatctgactttagactcaattgtggt

SEQ ID NO: 82253 - DNA, 120 bp, Artificial Sequence
  ENSG00000082516_40 (sequence is synthesized)
ctcctactggagggaagatcatgaaaagcccacagtagttattcagaactaacacctgcagagtgttggtcatctctacagccttaggcaggtttcacccaaagaggagaaacttctgtc

SEQ ID NO: 82254 - DNA, 120 bp, Artificial Sequence
  ENSG00000082516_41 (sequence is synthesized)
gtcacccaaagtgttacatgcttaaaacacaagctacctttgtaaatacttcatctgatcagaagtgtgtcatgcttgtttgagatggagttgctgcattttaggactattgataccttt

SEQ ID NO: 82255 - DNA, 120 bp, Artificial Sequence
  ENSG00000082516_42 (sequence is synthesized)
ttttaattgtttttataatatttaatttgaaagaggagacccttctctctctactctttcatagactgaagtttgaatatgaaataggccttaaccatcatgttgactctcctgtcagaa

SEQ ID NO: 82256 - DNA, 120 bp, Artificial Sequence
  ENSG00000082516_43 (sequence is synthesized)
ttttaggttggaaatttggttttattctttcatgtaattgcttatttgaacagatcacttactaaagctttagaagaagtgattcaaatgtgtgttttcccttcagttttataacaaatg

SEQ ID NO: 82257 - DNA, 120 bp, Artificial Sequence
  ENSG00000082516_44 (sequence is synthesized)
gattgatggcagtcaaatagctcaggaataaattactgtttcaatggttcttaaactttcttggatcataggatccttttgagaatcagattaaagccaaagatactctttggagaaaaa

SEQ ID NO: 82258 - DNA, 120 bp, Artificial Sequence
  ENSG00000082516_45 (sequence is synthesized)
gtgtacttgtttccaaatgcggttcacaggaacagtttggtggcatcctctgcgcctaccgtgggaggatgtttaactcagactctggcttctctctccagctcctgcttcacatttgcc

SEQ ID NO: 82259 - DNA, 120 bp, Artificial Sequence
  ENSG00000082516_46 (sequence is synthesized)
attatacctaaaacttcaaattttatagttcagacctatgaaagagatagctaagttttggaaactcttgcaaactaatttttttatattagtgcgtgtttaatgtaaattaaaaacaaa

SEQ ID NO: 82260 - DNA, 120 bp, Artificial Sequence
  ENSG00000082556_0 (sequence is synthesized)
agtagtgggagacgtgcgctgagaggcgggggctgcgctcggcggaacagcagccctcgggcggagagcggggccggggtccgagagcaggtgatgccaagagctgagcgggactcgtga

SEQ ID NO: 82261 - DNA, 120 bp, Artificial Sequence
  ENSG00000082556_1 (sequence is synthesized)
gcgcgcggttcagcacctaccagggcgtcccgtaaaaaacctcgccttcgcctgtctctgggaaccatagcgccgcaggtgccgcctgtcctcgccttcctgctgcaatcgccccaccat

SEQ ID NO: 82262 - DNA, 120 bp, Artificial Sequence
  ENSG00000082556_2 (sequence is synthesized)
ggactccccgatccagatcttccgcggggagccgggccctacctgcgccccgagcgcctgcctgccccccaacagcagcgcctggtttcccggctgggccgagcccgacagcaacggcag

SEQ ID NO: 82263 - DNA, 120 bp, Artificial Sequence
  ENSG00000082556_3 (sequence is synthesized)
cgccggctcggaggacgcgcagctggagcccgcgcacatctccccggccatcccggtcatcatcacggcggtctactccgtagtgttcgtcgtgggcttggtgggcaactcgctggtcat

SEQ ID NO: 82264 - DNA, 120 bp, Artificial Sequence
  ENSG00000082556_4 (sequence is synthesized)
gttcgtgatcatccgatacacaaagatgaagacagcaaccaacatttacatatttaacctggctttggcagatgctttagttactacaaccatgccctttcagagtacggtctacttgat

SEQ ID NO: 82265 - DNA, 120 bp, Artificial Sequence
  ENSG00000082556_5 (sequence is synthesized)
gaattcctggccttttggggatgtgctgtgcaagatagtaatttccattgattactacaacatgttcaccagcatcttcaccttgaccatgatgagcgtggaccgctacattgccgtgtg

SEQ ID NO: 82266 - DNA, 120 bp, Artificial Sequence
  ENSG00000082556_6 (sequence is synthesized)
ccaccccgtgaaggctttggacttccgcacacccttgaaggcaaagatcatcaatatctgcatctggctgctgtcgtcatctgttggcatctctgcaatagtccttggaggcaccaaagt

SEQ ID NO: 82267 - DNA, 120 bp, Artificial Sequence
  ENSG00000082556_7 (sequence is synthesized)
cagggaagacgtcgatgtcattgagtgctccttgcagttcccagatgatgactactcctggtgggacctcttcatgaagatctgcgtcttcatctttgccttcgtgatccctgtcctcat

SEQ ID NO: 82268 - DNA, 120 bp, Artificial Sequence
  ENSG00000082556_8 (sequence is synthesized)
catcatcgtctgctacaccctgatgatcctgcgtctcaagagcgtccggctcctttctggctcccgagagaaagatcgcaacctgcgtaggatcaccagactggtcctggtggtggtggc

SEQ ID NO: 82269 - DNA, 120 bp, Artificial Sequence
  ENSG00000082556_9 (sequence is synthesized)
agtcttcgtcgtctgctggactcccattcacatattcatcctggtggaggctctggggagcacctcccacagcacagctgctctctccagctattacttctgcatcgccttaggctatac

SEQ ID NO: 82270 - DNA, 120 bp, Artificial Sequence
  ENSG00000082556_10 (sequence is synthesized)
caacagtagcctgaatcccattctctacgcctttcttgatgaaaacttcaagcggtgtttccgggacttctgctttccactgaagatgaggatggagcggcagagcactagcagagtccg

SEQ ID NO: 82271 - DNA, 120 bp, Artificial Sequence
  ENSG00000082556_11 (sequence is synthesized)
aaatacagttcaggatcctgcttacctgagggacatcgatgggatgaataaaccagtatgactagtcgtggagatgtcttcgtacagttcttcgggaagagaggagttcaatgatctagg

SEQ ID NO: 82272 - DNA, 120 bp, Artificial Sequence
  ENSG00000082556_12 (sequence is synthesized)
tttaactcagatcactactgcagtctgacatgaaaagatagaatttaaaataaacttttagagatctcatggtctgaagtcatcagatgcagaccacgttcgtgatcagtggaaacatca

SEQ ID NO: 82273 - DNA, 120 bp, Artificial Sequence
  ENSG00000082556_13 (sequence is synthesized)
aggacaaaaggtccacgcaacacatgcacctcttctctagggcacagaagcgaggcagagcctcagttcctctgatgaacaagggaacaggtcttttccttctggtttgctaggtaaggt

SEQ ID NO: 82274 - DNA, 120 bp, Artificial Sequence
  ENSG00000082556_14 (sequence is synthesized)
tcagcacccatctgctgtggccttcctatgaaacgtagtttcaaaagctcggtttaagaaaaaaggaaaagaaaaaacattgctttcagagctcaatgggcatccaatccagatgtttca

SEQ ID NO: 82275 - DNA, 120 bp, Artificial Sequence
  ENSG00000082556_15 (sequence is synthesized)
caatgacagcaacaacctccaacggaatgggaactatttccagggttcatgcccagctcactgtatgctgtgtggacatgcatttcatgtggctgtgtggtaagaattacagcttacata

SEQ ID NO: 82276 - DNA, 120 bp, Artificial Sequence
  ENSG00000082556_16 (sequence is synthesized)
tggcttggacccacatctgaggaatctgatgttcacttataccagaacattatcttgctatttatgaaattatttaaacgttcaaaagattgtttttaacatggtttaatttcccaaaaa

SEQ ID NO: 82277 - DNA, 120 bp, Artificial Sequence
  ENSG00000082556_17 (sequence is synthesized)
ctacagttttttttcttagcatgctattcaggtaaacagtcttataataaagcatgtcccattgtcaagaaacataaagtggtgtgaataccactgaaaatatatatatagtatcttctg

SEQ ID NO: 82278 - DNA, 120 bp, Artificial Sequence
  ENSG00000082556_18 (sequence is synthesized)
taaataatagtacctgtgtgaataaggaataggcttgcctcccagccaggcaatttcctgagggcacactaatgatatcccctgagttgctaagttgatgctgagacattttgctgggaa

SEQ ID NO: 82279 - DNA, 120 bp, Artificial Sequence
  ENSG00000082556_19 (sequence is synthesized)
ttagtcatggcatgatctctttcagactccctgaataccatttagtcccgtaacagtgctcacaactcatgtgctaatgaatcacaaaggctttaactagctcccaggttgtagccttcg

SEQ ID NO: 82280 - DNA, 120 bp, Artificial Sequence
  ENSG00000082556_20 (sequence is synthesized)
acatatagcgattcgcagatctctctattcacggagaggaaggtgttttgcttctgtagatctcaaggtactattttgtggctctcagcaggaagtagaattgttcctaaatgtgtgctg

SEQ ID NO: 82281 - DNA, 120 bp, Artificial Sequence
  ENSG00000082556_21 (sequence is synthesized)
aatgaggacatgatgtccctcctggtgccaggacacatcctgcatggcattctgtgaagggcatacctgctgaggataatgccaggagcagcacatttagggtaattttgctaaaacttc

SEQ ID NO: 82282 - DNA, 120 bp, Artificial Sequence
  ENSG00000082556_22 (sequence is synthesized)
cagatgacatataaattccctctttttccccctgaaacttaccatttcagaggtaatggctttttctgtaatttgcctgagaagaaaaaagggataatttagaaataacactccaagcct

SEQ ID NO: 82283 - DNA, 120 bp, Artificial Sequence
  ENSG00000082556_23 (sequence is synthesized)
atatattactagggctgcatcctctggaatttaatagaaaaattgaatatatagccctatgtaactacagacatcattacaactgttaagttctgttcaccatgcaagttctcggtggtg

SEQ ID NO: 82284 - DNA, 120 bp, Artificial Sequence
  ENSG00000082556_24 (sequence is synthesized)
tatgtactctcaccttttggaaacaaaaccttgcattgaaggttttacacatggcttcagaatgttactctgaccatgtttgcctctactccagattatcatggcacctaacacagatga

SEQ ID NO: 82285 - DNA, 120 bp, Artificial Sequence
  ENSG00000082556_25 (sequence is synthesized)
catatggcagaatggaagtgatttctcctaatgaaaatgaagtgctcttttgagtatttcttgttttattgagattcctatctgcccttgtatttttataactgaatgtaaataggaatt

SEQ ID NO: 82286 - DNA, 120 bp, Artificial Sequence
  ENSG00000082556_26 (sequence is synthesized)
gcttaaatactggtttacactaatcccatagttaaaaatcttggctatggtacaggaaggatatctatatagaggatagttccagaaacaagccctggtgaaataggaaatataaaaact

SEQ ID NO: 82287 - DNA, 120 bp, Artificial Sequence
  ENSG00000082556_27 (sequence is synthesized)
tctttatggaacaggaaaacccaagagactttctcgtcagattcctttccagtgcaaagtataacagagataggattatgagatgaaatcacagtagtgtgtttcctttaattttttctg

SEQ ID NO: 82288 - DNA, 65 bp, Artificial Sequence
  ENSG00000082556_28 (sequence is synthesized)
caccgcaggctggtctcaaactcctgacctcagaatattcacctgcctcggcctcccaaagtgct

SEQ ID NO: 82289 - DNA, 120 bp, Artificial Sequence
  ENSG00000082556_29 (sequence is synthesized)
tcccaaagtgctgggattacagatgtgaatggccacgcctggcctgtttcctttaagttagcacttcacgtgctcttacagcgttaattgccattattggtttgcctgattttcctgcat

SEQ ID NO: 82290 - DNA, 120 bp, Artificial Sequence
  ENSG00000082556_30 (sequence is synthesized)
ttggtttgcctgattttcctgcatctcctcatatgtaagtctgcagcccaaggagagaatagtagctgtatgtgcccacaaggggtgtccaagcttcttgattcttgttaatatcgactc

SEQ ID NO: 82291 - DNA, 120 bp, Artificial Sequence
  ENSG00000082556_31 (sequence is synthesized)
cccaacattgaaaaaggagtgaagaagggaatatcattttagggtactgctttaaaggaatgataaagtaaacaacgtagcagggaaaataccacttgcacaaatgtatttctttgtcaa

SEQ ID NO: 82292 - DNA, 120 bp, Artificial Sequence
  ENSG00000082556_32 (sequence is synthesized)
agtgtgtacacgctttctgtttgtcctgatgtcctgctgtgaagcagggaccacattgccatttattcattgttccaggcaatgcatttgtccaaacccctctggctctctgatatctct

SEQ ID NO: 82293 - DNA, 120 bp, Artificial Sequence
  ENSG00000082556_33 (sequence is synthesized)
catttcttgatgttcctattctctgacctcaacaaggaggacactgtctgttgtgtctctttgagactagaactccatgtgtttaaccttcagatccattctctacatgaaccctattct

SEQ ID NO: 82294 - DNA, 120 bp, Artificial Sequence
  ENSG00000082556_34 (sequence is synthesized)
ttccaccctggtaagaaggtctggaagacaggtcctaacgaggggtcagagaaggcacagagaaatgaaccagccatgcaggggcagcactgaggaggaaaccccccactctaactggga

SEQ ID NO: 82295 - DNA, 120 bp, Artificial Sequence
  ENSG00000082556_35 (sequence is synthesized)
ggagagtggaaacactcttagtatctcagagtagttaccaatctaagagcatccttcgagtttaagtcaaaactctaggcttaataccaaaaataatacatcatttggaaaaatagcttg

SEQ ID NO: 82296 - DNA, 120 bp, Artificial Sequence
  ENSG00000082556_36 (sequence is synthesized)
gagaaaaaaaatcaataaagagtcacataaaatcttaagaaaatggttctattctgtgatatattactaagaaatacagttcttaaacgtgtataactattgtcagacaatttataggtg

SEQ ID NO: 82297 - DNA, 120 bp, Artificial Sequence
  ENSG00000082556_37 (sequence is synthesized)
tttcatctagtcctgggatgaaatacgatgactcatgcaaattcagggagcacactggctgactttaaattggaacattgtaaagtgaaagctgtgaaaggttgtgtgtcctatcaatga

SEQ ID NO: 82298 - DNA, 120 bp, Artificial Sequence
  ENSG00000082556_38 (sequence is synthesized)
gatttattttctaaccaagagctgttcggatgattcagtataaatacgaaaatcacatccaaaaacggtataacccagcttccttaaggcaattttcttctctgaaacaagaatatactc

SEQ ID NO: 82299 - DNA, 120 bp, Artificial Sequence
  ENSG00000082556_39 (sequence is synthesized)
atatgttctttactataatgtatatgatttttatcttgtactttaaaagatgataattatgcattgtatatacgattgtgtgccttgcaataaaatcaaaactgtacctgctgaaaatca

SEQ ID NO: 82300 - DNA, 120 bp, Artificial Sequence
  ENSG00000082556_40 (sequence is synthesized)
gagctccgtgctgggaggtgggaagggggcttgaccctggggactcaggcagtctggggacagttccaccaggggccggtgcctagaattggtgagggaggcacctcaggggctggggga

SEQ ID NO: 82301 - DNA, 120 bp, Artificial Sequence
  ENSG00000082556_41 (sequence is synthesized)
gaaggagcgagcgctcttcgcccctctctggcacccagcggcgcgcctgctggccggaaaggcagcgagaagtccgttctccctgtcctgcccccggcgacttgcggcccgggtgggagt

SEQ ID NO: 82302 - DNA, 120 bp, Artificial Sequence
  ENSG00000082556_42 (sequence is synthesized)
ccgcaggctccgggtccccagcgccgctggccagggcgcgggcaaagtttgcctctccgcgtccagccggttctttcgctcccgcagcgccgcaggtgccgcctgtcctcgccttcctgc

SEQ ID NO: 82303 - DNA, 120 bp, Artificial Sequence
  ENSG00000082556_43 (sequence is synthesized)
aatttcaatggaagacgacaaaaccatgtgatgaattgagagatcccaaagggactggtgtgaagccgggcagggaagccttggattaagaatggctggagtggccgggcgcggtggctc

SEQ ID NO: 82304 - DNA, 120 bp, Artificial Sequence
  ENSG00000082556_44 (sequence is synthesized)
acatctcagcagataactttgttcccctcaccatcacacaagcaccagtgtctgccaattttgaagccaaccctcgtttctctgtaaagagaagtacgctaggatggtcttgagttaaag

SEQ ID NO: 82305 - DNA, 120 bp, Artificial Sequence
  ENSG00000082641_0 (sequence is synthesized)
aagcggaggctccgagctctaggccggccggcggtggcggcggcgaggccgggactcgggcttagggcctgctgtggaggcagcggcggacgccgagctaagcagtttctctggaaaccc

SEQ ID NO: 82306 - DNA, 120 bp, Artificial Sequence
  ENSG00000082641_1 (sequence is synthesized)
ccctggtaagtgtggaggaggcgggacactctgacccaagacgaaaggcctgtagctccagccaaagaaaataaaccttaggagggagaaggaaaaaaaaaatccatcagctgttcctga

SEQ ID NO: 82307 - DNA, 120 bp, Artificial Sequence
  ENSG00000082641_2 (sequence is synthesized)
gaacagcctgcattggaatctacagagaggacaactaatgtgagtgaggaagtgactgtatgtggactgtggagaaagtaagtcacgtgggcccttgaggacctggactgggttaggaac

SEQ ID NO: 82308 - DNA, 120 bp, Artificial Sequence
  ENSG00000082641_3 (sequence is synthesized)
agttgtactttcagaggtgaggtgtcgagaagggaaagtgaatgtggtctggagtgtgtccttggccttggctccacagggtgtgctttcctctggggccgtcagggagctcatcccttg

SEQ ID NO: 82309 - DNA, 120 bp, Artificial Sequence
  ENSG00000082641_4 (sequence is synthesized)
tgttctgccagggtggggtacggggtttgacactgaggagggtaacctgctggctggagcggcagagcagtggccttgatttgtcttttggaagattttaaaaaccaaaaagcataaaca

SEQ ID NO: 82310 - DNA, 120 bp, Artificial Sequence
  ENSG00000082641_5 (sequence is synthesized)
ttctggtccttcagcaatgctttctctgaagaaatacttaacggaaggacttctccagttcaccattctgctgagtttgattggggtacgggtggacgtggatacttacctgacctcaca

SEQ ID NO: 82311 - DNA, 120 bp, Artificial Sequence
  ENSG00000082641_6 (sequence is synthesized)
gcttcccccactccgggagatcatcctggggcccagttctgcctatactcagacccagttccacaacctgaggaataccttggatggctatggtatccaccccaagagcatagacctgga

SEQ ID NO: 82312 - DNA, 120 bp, Artificial Sequence
  ENSG00000082641_7 (sequence is synthesized)
caattacttcactgcccggcggctcctcagtcaggtgagggccctggacaggttccaggtgccaaccactgaggtaaatgcctggctggttcaccgagacccagaggggtctgtctctgg

SEQ ID NO: 82313 - DNA, 120 bp, Artificial Sequence
  ENSG00000082641_8 (sequence is synthesized)
cagtcagcccaactcaggcctcgccctcgagagttccagtggcctccaagatgtgacaggcccagacaacggggtgcgagaaagcgaaacggagcagggattcggtgaagatttggagga

SEQ ID NO: 82314 - DNA, 120 bp, Artificial Sequence
  ENSG00000082641_9 (sequence is synthesized)
tttgggggctgtagcccccccagtcagtggagacttaaccaaagaggacatagatctgattgacatcctttggcgacaggatattgatctgggggctgggcgtgaggtttttgactatag

SEQ ID NO: 82315 - DNA, 120 bp, Artificial Sequence
  ENSG00000082641_10 (sequence is synthesized)
tcaccgccagaaggagcaggatgtggagaaggagctgcgagatggaggcgagcaggacacctgggcaggcgagggcgcggaagctctggcacggaacctgctagtggatggagagactgg

SEQ ID NO: 82316 - DNA, 120 bp, Artificial Sequence
  ENSG00000082641_11 (sequence is synthesized)
ggagagcttccctgcacaggtgcctagtggggaggaccagacggccctgtccctggaagagtgccttaggctgctggaagccacctgcccctttggggagaatgctgagtttccagcaga

SEQ ID NO: 82317 - DNA, 120 bp, Artificial Sequence
  ENSG00000082641_12 (sequence is synthesized)
catttccagcataacagaagcagtgcctagtgagagtgagccccctgctcttcaaaacaacctcttgtctcctcttctgaccgggacagagtcaccatttgatttggaacagcagtggca

SEQ ID NO: 82318 - DNA, 120 bp, Artificial Sequence
  ENSG00000082641_13 (sequence is synthesized)
agatctcatgtccatcatggaaatgcaggccatggaagtgaacacatcagcaagtgaaatcctgtacagtgcccctcctggagacccactgagcaccaactacagccttgcccccaacac

SEQ ID NO: 82319 - DNA, 120 bp, Artificial Sequence
  ENSG00000082641_14 (sequence is synthesized)
tcccatcaatcagaatgtcagcctgcatcaggcgtccctggggggctgcagccaggacttcttactcttcagccccgaggtggaaagcctgcctgtggccagtagctccacgctgctccc

SEQ ID NO: 82320 - DNA, 120 bp, Artificial Sequence
  ENSG00000082641_15 (sequence is synthesized)
gttggcccccagcaattctaccagcctcaactccaccttcggctccaccaacctgacagggctcttctttccaccccagctcaatggcacagccaatgacacagcaggcccagagctgcc

SEQ ID NO: 82321 - DNA, 120 bp, Artificial Sequence
  ENSG00000082641_16 (sequence is synthesized)
tgaccctttggggggtctgttagatgaagctatgttggatgagatcagccttatggacctggccattgaagaaggctttaaccctgtgcaggcctcccagctggaggaggaatttgactc

SEQ ID NO: 82322 - DNA, 120 bp, Artificial Sequence
  ENSG00000082641_17 (sequence is synthesized)
tgactcaggcctttccttagactcgagccatagcccttcttccctaagcagctctgaaggcagttcttcctcttcttcctcctcctcttcctcttcttcctctgcttcttcctctgcctc

SEQ ID NO: 82323 - DNA, 120 bp, Artificial Sequence
  ENSG00000082641_18 (sequence is synthesized)
ttcctccttttctgaggaaggtgcggttggctacagctctgactctgagaccctggatctggaagaggccgagggtgctgtgggctaccagcctgagtattccaagttctgccgcatgag

SEQ ID NO: 82324 - DNA, 120 bp, Artificial Sequence
  ENSG00000082641_19 (sequence is synthesized)
ctaccaggatccagctcagctctcatgcctgccctacctggagcacgtgggccacaaccacacatacaacatggcacccagtgccctggactcagccgacctgccaccacccagtgccct

SEQ ID NO: 82325 - DNA, 120 bp, Artificial Sequence
  ENSG00000082641_20 (sequence is synthesized)
caagcagatgagccgggatgagcaccgagcccgagccatgaagatccctttcaccaatgacaaaatcatcaacctgcctgtggaggagttcaatgaactgctgtccaaataccagttgag

SEQ ID NO: 82326 - DNA, 120 bp, Artificial Sequence
  ENSG00000082641_21 (sequence is synthesized)
tgaagcccagctgagcctcatccgagacatccggcgccggggcaagaacaagatggcggcgcagaactgccgcaagcgcaagctggacaccatcctgaatctggagcgtgatgtggagga

SEQ ID NO: 82327 - DNA, 120 bp, Artificial Sequence
  ENSG00000082641_22 (sequence is synthesized)
cctgcagcgtgacaaagcccggctgctgcgggagaaagtggagttcctgcgctccctgcgacagatgaagcagaaggtccagagcctgtaccaggaggtgtttgggcggctgcgagatga

SEQ ID NO: 82328 - DNA, 120 bp, Artificial Sequence
  ENSG00000082641_23 (sequence is synthesized)
gaacggacgaccctactcgcccagtcagtatgcgctccagtacgccggggacggcagtgtcctcctcatcccccgcacgatggccgaccagcaggcccggcggcaggagaggaagccaaa

SEQ ID NO: 82329 - DNA, 120 bp, Artificial Sequence
  ENSG00000082641_24 (sequence is synthesized)
ggaccggagaaagtgagcctggggaagaagggggtttgaagcccaccaagaccgaaactggagaagggctggacctggacctggacctggacctacagcggggacttaaatgccttctta

SEQ ID NO: 82330 - DNA, 120 bp, Artificial Sequence
  ENSG00000082641_25 (sequence is synthesized)
tccaatatatcttctcagatgggatgactgcgggtcagtgtacaggaagaggcaggcactggctggctcagctccactcgggtggagtggaagtggccagaccatttagacggacagggt

SEQ ID NO: 82331 - DNA, 120 bp, Artificial Sequence
  ENSG00000082641_26 (sequence is synthesized)
cctcaccctacccctttcctgtgaggcaggggtggtggtggagttgctggaggtagaggagctatgtggagcaaaggccgacagaggggaaggaatggacctgtgagaggaagggaaggt

SEQ ID NO: 82332 - DNA, 120 bp, Artificial Sequence
  ENSG00000082641_27 (sequence is synthesized)
ggcagaaagtctcatttcaggaaggagggatagaaggaaggaaggaaggaacccccccccccccgaaaaaaaaatcaaagcgggaagaaaatcagagggaaggttaaggttggctctggc

SEQ ID NO: 82333 - DNA, 120 bp, Artificial Sequence
  ENSG00000082641_28 (sequence is synthesized)
caggattccaggcagcaggttggagtgactggtgggcctagatcactggtgtgataaaccccaattttcaccccggggggggtggggtacacagacacagggtgggggtggggagggacg

SEQ ID NO: 82334 - DNA, 120 bp, Artificial Sequence
  ENSG00000082641_29 (sequence is synthesized)
gtgttaactctttctgctccttgcattttgacatccctgaaggggagctcttggatatcattggccatgtttcaatcgaatggagccactgggccccaacactggctttgagatttagag

SEQ ID NO: 82335 - DNA, 120 bp, Artificial Sequence
  ENSG00000082641_30 (sequence is synthesized)
tcaaagggtagagtgaacaggaaagggtcacgtggtcccatgttgcaacagccccaacatcacgcatgtcattcactgccttgccactccatctccctccgtgctccagccacccctgag

SEQ ID NO: 82336 - DNA, 120 bp, Artificial Sequence
  ENSG00000082641_31 (sequence is synthesized)
ctgaggctcccattgtctccatcagagcctgcatgtgtatgccgtcctcccctggtccggtgtttgtgttccccacccctcacagactgcctgagctcttctgtaagctggggtagggtg

SEQ ID NO: 82337 - DNA, 120 bp, Artificial Sequence
  ENSG00000082641_32 (sequence is synthesized)
atggcagtgctccgggaactgggcctgcagccttcctcttctgggactgctgtgaggcagaggaatgatggagaatctagtgtagcagcctccaggcaggattcagcacaacactgggga

SEQ ID NO: 82338 - DNA, 120 bp, Artificial Sequence
  ENSG00000082641_33 (sequence is synthesized)
gtcacccttccctcgggcctctgcctaccaacaactgggcttatcactgggaaaacacaaaaaattacacaacccagcaacaacaaaagaactagtcctcttagaatttcttgcgctttg

SEQ ID NO: 82339 - DNA, 120 bp, Artificial Sequence
  ENSG00000082641_34 (sequence is synthesized)
atttttttagggcttgtgccctgtttcacttatagggtctagaatgcttgtgttgagtaaaaaggagatgcccaatattcaaagctgctaaatgttctctttgccataaagactccgtgt

SEQ ID NO: 82340 - DNA, 120 bp, Artificial Sequence
  ENSG00000082641_35 (sequence is synthesized)
aactgtgtgaacacttgggatttttctcctctgtcccgaggtcgtcgtctgctttcttttttgggtttctttctagaagattgagaagtgcatatgacaggctgagagcacctccccaaa

SEQ ID NO: 82341 - DNA, 120 bp, Artificial Sequence
  ENSG00000082641_36 (sequence is synthesized)
cacacaagctctcagccacaggcagcttctccacagccccagcttcgcacaggctcctggagggctgcctgggggaggcagacatgggagtgccaaggtggccagatggttccaggacta

SEQ ID NO: 82342 - DNA, 120 bp, Artificial Sequence
  ENSG00000082641_37 (sequence is synthesized)
caatgtctttatttttaactgtttgccactgctgccctcacccctgcccggctctggagtaccgtctgccccagacaagtgggagtgaaatgggggtggggggaagcactgattcccagt

SEQ ID NO: 82343 - DNA, 120 bp, Artificial Sequence
  ENSG00000082641_38 (sequence is synthesized)
tagggggtgcctaactgagcagtagggatagaaggtgtgaacctgggagtgcttttataaattattttccttgtagattttatttttaatttatctctgtgacctgccagggagagggga

SEQ ID NO: 82344 - DNA, 120 bp, Artificial Sequence
  ENSG00000082641_39 (sequence is synthesized)
gagagagagagatgctgttgagcacatgacaaaataaaataaaatggatgattcattcttaagtgcactttttccccactttgaatttaaattgagaataaaggaaatggactcattgta

SEQ ID NO: 82345 - DNA, 120 bp, Artificial Sequence
  ENSG00000082641_40 (sequence is synthesized)
aggataggcccaggagggagcttgctttcctctgcagcttgagcacggagcatggggtgggagtcccatctcactgcagcctctgcggacatagatctgattgacatcctttggcgacag

SEQ ID NO: 82346 - DNA, 120 bp, Artificial Sequence
  ENSG00000082641_41 (sequence is synthesized)
gacctgggggaggggattggctctctgcagcctcagcagtgacctgcggggtgggagggggtggggattggctccctgctgcagcctaggacatagatctgattgacatcctttggcgac

SEQ ID NO: 82347 - DNA, 120 bp, Artificial Sequence
  ENSG00000082641_42 (sequence is synthesized)
aaggagacggaggcggcccagggatgggctggttccttgcggcagcttctccagctgccctgatgcagagattggctcccgtctgcagctaggacatagatctgattgacatcctttggc

SEQ ID NO: 82348 - DNA, 120 bp, Artificial Sequence
  ENSG00000082641_43 (sequence is synthesized)
acccttccagcctggtgtgctccctgaaagccaagagctccttgcagccccctgtccggcttcccggcaccggctgccctggggctcatctcgcagaccatgacccgcctggaccgcagc

SEQ ID NO: 82349 - DNA, 120 bp, Artificial Sequence
  ENSG00000082641_44 (sequence is synthesized)
tctcacagtggtgggggccatgccaaaggcagccggccccttaactctttgctggctggtcaccgggtggcccagcccgcctctgctcctgggtccagggcttctgttcaggatattgat

SEQ ID NO: 82350 - DNA, 120 bp, Artificial Sequence
  ENSG00000082641_45 (sequence is synthesized)
agcttgagcacggagcatggggtgggagtcccatctcactgcagcctctgcggtgagctcagggtgggggcagctgggcgcctgagtggaactggggttgtgaggtgggagggggctgct

SEQ ID NO: 82351 - DNA, 120 bp, Artificial Sequence
  ENSG00000082641_46 (sequence is synthesized)
aagtaattctgcatgacaattcgctcttgcttgccatggccagcttcctccaaaccaagttttaaggggtccaatccccaaagctagaggacatagatctgattgacatcctttggcgac

SEQ ID NO: 82352 - DNA, 120 bp, Artificial Sequence
  ENSG00000082684_0 (sequence is synthesized)
ctccctgctctctccgagcgccgggtcgggagctagttggagcgcgggggttggtgccagagcccagctccgccgagccgggcgggtcggcagcgcatccagcggctgctgggagcccga

SEQ ID NO: 82353 - DNA, 120 bp, Artificial Sequence
  ENSG00000082684_1 (sequence is synthesized)
gcgcagcgggcgcgggcccgggtggggactgcaccggagcgctgagagctggaggccgttcctgcgcggccgccccattcccagaccggccgccagcccatctggttagctcccgccgct

SEQ ID NO: 82354 - DNA, 120 bp, Artificial Sequence
  ENSG00000082684_2 (sequence is synthesized)
ccgcgccgcccgggagtcgggagccgcggggaaccgggcacctgcacccgcctctgggagtgagtggttccagctggtgcctggcctgtgtctcttggatgccctgtggcttcagtccgt

SEQ ID NO: 82355 - DNA, 120 bp, Artificial Sequence
  ENSG00000082684_3 (sequence is synthesized)
ctcctgttgcccaccacctcgtccctgggccgcctgataccccagcccaacagctaaggtgtggatggacagtagggggctggcttctctcactggtcaggggtcttctcccctgtctgc

SEQ ID NO: 82356 - DNA, 120 bp, Artificial Sequence
  ENSG00000082684_4 (sequence is synthesized)
ctcccggagctaggactgcagaggggcctatcatggtgcttgcaggccccctggctgtctcgctgttgctgcccagcctcacactgctggtgtcccacctctccagctcccaggatgtct

SEQ ID NO: 82357 - DNA, 120 bp, Artificial Sequence
  ENSG00000082684_5 (sequence is synthesized)
ccagtgagcccagcagtgagcagcagctgtgcgcccttagcaagcaccccaccgtggcctttgaagacctgcagccgtgggtctctaacttcacctaccctggagcccgggatttctccc

SEQ ID NO: 82358 - DNA, 120 bp, Artificial Sequence
  ENSG00000082684_6 (sequence is synthesized)
agctggctttggacccctccgggaaccagctcatcgtgggagccaggaactacctcttcagactcagccttgccaatgtctctcttcttcaggccacagagtgggcctccagtgaggaca

SEQ ID NO: 82359 - DNA, 120 bp, Artificial Sequence
  ENSG00000082684_7 (sequence is synthesized)
cgcgccgctcctgccaaagcaaagggaagactgaggaggagtgtcagaactacgtgcgagtcctgatcgtcgccggccggaaggtgttcatgtgtggaaccaatgccttttcccccatgt

SEQ ID NO: 82360 - DNA, 120 bp, Artificial Sequence
  ENSG00000082684_8 (sequence is synthesized)
gcaccagcagacaggtggggaacctcagccggactattgagaagatcaatggtgtggcccgctgcccctatgacccacgccacaactccacagctgtcatctcctcccagggggagctct

SEQ ID NO: 82361 - DNA, 120 bp, Artificial Sequence
  ENSG00000082684_9 (sequence is synthesized)
atgcagccacggtcatcgacttctcaggtcgggaccctgccatctaccgcagcctgggcagtgggccaccgcttcgcactgcccaatataactccaagtggcttaatgagccaaacttcg

SEQ ID NO: 82362 - DNA, 120 bp, Artificial Sequence
  ENSG00000082684_10 (sequence is synthesized)
tggcagcctatgatattgggctgtttgcatacttcttcctgcgggagaacgcagtggagcacgactgtggacgcaccgtgtactctcgcgtggcccgcgtgtgcaagaatgacgtggggg

SEQ ID NO: 82363 - DNA, 120 bp, Artificial Sequence
  ENSG00000082684_11 (sequence is synthesized)
gccgattcctgctggaggacacatggaccacattcatgaaggcccggctcaactgctcccgcccgggcgaggtccccttctactataacgagctgcagagtgccttccacttgccggagc

SEQ ID NO: 82364 - DNA, 120 bp, Artificial Sequence
  ENSG00000082684_12 (sequence is synthesized)
aggacctcatctatggagttttcacaaccaacgtaaacagcatcgcggcttctgctgtctgcgccttcaacctcagtgctatctcccaggctttcaatggcccatttcgctaccaggaga

SEQ ID NO: 82365 - DNA, 120 bp, Artificial Sequence
  ENSG00000082684_13 (sequence is synthesized)
accccagggctgcctggctccccatagccaaccccatccccaatttccagtgtggcaccctgcctgagaccggtcccaacgagaacctgacggagcgcagcctgcaggacgcgcagcgcc

SEQ ID NO: 82366 - DNA, 120 bp, Artificial Sequence
  ENSG00000082684_14 (sequence is synthesized)
tcttcctgatgagcgaggccgtgcagccggtgacacccgagccctgtgtcacccaggacagcgtgcgcttctcacacctcgtggtggacctggtgcaggctaaagacacgctctaccatg

SEQ ID NO: 82367 - DNA, 120 bp, Artificial Sequence
  ENSG00000082684_15 (sequence is synthesized)
tactctacattggcaccgagtcgggcaccatcctgaaggcgctgtccacggcgagccgcagcctccacggctgctacctggaggagctgcacgtgctgccccccgggcgccgcgagcccc

SEQ ID NO: 82368 - DNA, 120 bp, Artificial Sequence
  ENSG00000082684_16 (sequence is synthesized)
tgcgcagcctgcgcatcctgcacagcgcccgcgcgctcttcgtggggctgagagacggcgtcctgcgggtcccactggagaggtgcgccgcctaccgcagccagggggcatgcctggggg

SEQ ID NO: 82369 - DNA, 120 bp, Artificial Sequence
  ENSG00000082684_17 (sequence is synthesized)
cccgggacccgtactgtggctgggacgggaagcagcaacgttgcagcacactcgaggacagctccaacatgagcctctggacccagaacatcaccgcctgtcctgtgcggaatgtgacac

SEQ ID NO: 82370 - DNA, 120 bp, Artificial Sequence
  ENSG00000082684_18 (sequence is synthesized)
gggatgggggcttcggcccatggtcaccatggcaaccatgtgagcacttggatggggacaactcaggctcttgcctgtgtcgagctcgatcctgtgattcccctcgaccccgctgtgggg

SEQ ID NO: 82371 - DNA, 120 bp, Artificial Sequence
  ENSG00000082684_19 (sequence is synthesized)
gccttgactgcctggggccagccatccacatcgccaactgctccaggaatggggcgtggaccccgtggtcatcgtgggcgctgtgcagcacgtcctgtggcatcggcttccaggtccgcc

SEQ ID NO: 82372 - DNA, 120 bp, Artificial Sequence
  ENSG00000082684_20 (sequence is synthesized)
gagccgggaggaacggttctgtaatgagaacacgccttgcccggtgcccatcttctgggcttcctggggctcctggagcaagtgcagcagcaactgtggagggggcatgcagtcgcggcg

SEQ ID NO: 82373 - DNA, 120 bp, Artificial Sequence
  ENSG00000082684_21 (sequence is synthesized)
tcgggcctgcgagaacggcaactcctgcctgggctgcggcgtggagttcaagacgtgcaaccccgagggctgccccgaagtgcggcgcaacaccccctggacgccgtggctgcccgtgaa

SEQ ID NO: 82374 - DNA, 120 bp, Artificial Sequence
  ENSG00000082684_22 (sequence is synthesized)
cgtgacgcagggcggggcacggcaggagcagcggttccgcttcacctgccgcgcgccccttgcagacccgcacggcctgcagttcggcaggagaaggaccgagacgaggacctgtcccgc

SEQ ID NO: 82375 - DNA, 120 bp, Artificial Sequence
  ENSG00000082684_23 (sequence is synthesized)
ggacggctccggctcctgcgacaccgacgccctggtggaggtcctcctgcgcagcgggagcacctccccgcacacggtgagcgggggctgggccgcctggggcccgtggtcgtcctgctc

SEQ ID NO: 82376 - DNA, 120 bp, Artificial Sequence
  ENSG00000082684_24 (sequence is synthesized)
ccgggactgcgagctgggcttccgcgtccgcaagagaacgtgcactaacccggagccccgcaacgggggcctgccctgcgtgggcgatgctgccgagtaccaggactgcaacccccaggc

SEQ ID NO: 82377 - DNA, 120 bp, Artificial Sequence
  ENSG00000082684_25 (sequence is synthesized)
ttgcccagttcggggtgcttggtcctgctggacctcatggtctccatgctcagcttcctgtggtgggggtcactatcaacgcacccgttcctgcaccagccccgcaccctccccaggtga

SEQ ID NO: 82378 - DNA, 120 bp, Artificial Sequence
  ENSG00000082684_26 (sequence is synthesized)
ggacatctgtctcgggctgcacacggaggaggcactatgtgccacacaggcctgcccagaaggctggtcgccctggtctgagtggagtaagtgcactgacgacggagcccagagccgaag

SEQ ID NO: 82379 - DNA, 120 bp, Artificial Sequence
  ENSG00000082684_27 (sequence is synthesized)
ccggcactgtgaggagctcctcccagggtccagcgcctgtgctggaaacagcagccagagccgcccctgcccctacagcgagattcccgtcatcctgccagcctccagcatggaggaggc

SEQ ID NO: 82380 - DNA, 120 bp, Artificial Sequence
  ENSG00000082684_28 (sequence is synthesized)
caccgactgtgcagggttcaatctcatccacttggtggccacgggcatctcctgcttcttgggctctgggctcctgaccctagcagtgtacctgtcttgccagcactgccagcgtcagtc

SEQ ID NO: 82381 - DNA, 120 bp, Artificial Sequence
  ENSG00000082684_29 (sequence is synthesized)
ccaggagtccacactggtccatcctgccacccccaaccatttgcactacaagggcggaggcaccccgaagaatgaaaagtacacacccatggaattcaagaccctgaacaagaataactt

SEQ ID NO: 82382 - DNA, 120 bp, Artificial Sequence
  ENSG00000082684_30 (sequence is synthesized)
gatccctgatgacagagccaacttctacccattgcagcagaccaatgtgtacacgactacttactacccaagccccctgaacaaacacagcttccggcccgaggcctcacctggacaacg

SEQ ID NO: 82383 - DNA, 120 bp, Artificial Sequence
  ENSG00000082684_31 (sequence is synthesized)
gtgcttccccaacagctgataccgccgtcctggggacttgggcttcttgccttcataaggcacagagcagatggagatgggacagtggagccagtttggttttctccctctgcactaggc

SEQ ID NO: 82384 - DNA, 120 bp, Artificial Sequence
  ENSG00000082684_32 (sequence is synthesized)
caagaacttgctgccttgcctgtggggggtcccatccggcttcagagagctctggctggcattgaccatgggggaaagggctggtttcaggctgacatatggccgcaggtccagttcagc

SEQ ID NO: 82385 - DNA, 120 bp, Artificial Sequence
  ENSG00000082684_33 (sequence is synthesized)
ccaggtctctcatggttatcttccaacccactgtcacgctgacactatgctgccatgcctgggctgtggacctactgggcatttgaggaattggagaatggagatggcaagagggcaggc

SEQ ID NO: 82386 - DNA, 120 bp, Artificial Sequence
  ENSG00000082684_34 (sequence is synthesized)
ttttaagtttgggttggagacaacttcctgtggcccccacaagctgagtctggccttctccagctggccccaaaaaaggcctttgctacatcctgattatctctgaaagtaatcaatcaa

SEQ ID NO: 82387 - DNA, 120 bp, Artificial Sequence
  ENSG00000082684_35 (sequence is synthesized)
gtggctccagtagctctggattttctgccagggctgggccattgtggtgctgccccagtatgacatgggaccaaggccagcgcaggttatccacctctgcctggaagtctatactctacc

SEQ ID NO: 82388 - DNA, 120 bp, Artificial Sequence
  ENSG00000082684_36 (sequence is synthesized)
cagggcatccctctggtcagaggcagtgagtactgggaactggaggctgacctgtgcttagaagtcctttaatctgggctggtacaggcctcagccttgccctcaatgcacgaaaggtgg

SEQ ID NO: 82389 - DNA, 120 bp, Artificial Sequence
  ENSG00000082684_37 (sequence is synthesized)
cccaggagagaggatcaatgccataggaggcagaagtctggcctctgtgcctctatggagactatcttccagttgctgctcaacagagttgttggctgagacctgcttgggagtctctgc

SEQ ID NO: 82390 - DNA, 120 bp, Artificial Sequence
  ENSG00000082684_38 (sequence is synthesized)
tggcccttcatctgttcaggaacacacacacacacacactcacacacgcacacacaatcacaatttgctacagcaacaaaaaagacattgggctgtggcattattaattaaagatgatat

SEQ ID NO: 82391 - DNA, 120 bp, Artificial Sequence
  ENSG00000082684_39 (sequence is synthesized)
ccagtctccaaatgtctctgtgcatctgtgcgtgggctcctcttgcatagtctaggcaatctgagcaatgcaccagggtggcagatggtctctcaaggcgggggaaatgccccaagtagc

SEQ ID NO: 82392 - DNA, 120 bp, Artificial Sequence
  ENSG00000082684_40 (sequence is synthesized)
agtgcttttgtctggtgctgggagtgaggctcagcagtgtgagggacaattggagatgctcgggggcaggctgccgcgttgtgtcctgcttttctgcggccagaccaagccgtctggagc

SEQ ID NO: 82393 - DNA, 120 bp, Artificial Sequence
  ENSG00000082684_41 (sequence is synthesized)
tgctggtcaggttttcttgctgacctcacctgaccacagtggcctgggtggactctacagggaaatgttgttttctccctgggagcagtagcagcagtcctggctcccctggactgagaa

SEQ ID NO: 82394 - DNA, 120 bp, Artificial Sequence
  ENSG00000082684_42 (sequence is synthesized)
ctcctcatcagccccaggaagcccggaccccctttcagggatctggaaccggtgtgcctgtggccccaggtctgctcccaggcgtgggctgaagtcctgacttctgtcgctgggggcaag

SEQ ID NO: 82395 - DNA, 120 bp, Artificial Sequence
  ENSG00000082684_43 (sequence is synthesized)
gagtgggagagcccagctgctgcctgggctttggcagacagcaggctgatggtgctggcttccccgagactgcttctcctgcctgctgtctgatttccctgcatggtgcccgcagctgag

SEQ ID NO: 82396 - DNA, 120 bp, Artificial Sequence
  ENSG00000082684_44 (sequence is synthesized)
gtataaaccacatgctgcatctgtcagcagaggaagccattggctgcgtgagggtcagaaggagcttcatagatgagctggcatttgggagagggcattctacagggacgggcaagcaga

SEQ ID NO: 82397 - DNA, 120 bp, Artificial Sequence
  ENSG00000082684_45 (sequence is synthesized)
caattcggcctcgctccttgtgattgcgctaaaccttccgtcctcagctgagaacgctccaccacctccccggatcgctcatctcttggctgccctcccactgttcctgatgttatttta

SEQ ID NO: 82398 - DNA, 120 bp, Artificial Sequence
  ENSG00000082684_46 (sequence is synthesized)
agaaaccggacctacctcatgctgcggtcctcccagccctccggcaccccactccaaagtctggactctttccacatcctgctccagacagccaagctttgttggggtccccactgcttt

SEQ ID NO: 82399 - DNA, 120 bp, Artificial Sequence
  ENSG00000082684_47 (sequence is synthesized)
ccgccccattcccagaccggccgccagcccatctggttagctcccgccgctccgcgccgcccgggagtcgggagccgcggggaaccgggcacctgcacccgcctctgggagccagcttgg

SEQ ID NO: 82400 - DNA, 120 bp, Artificial Sequence
  ENSG00000082684_48 (sequence is synthesized)
ttgggtccgggttgcactgggccctgccagggctgtggtcggcgcatctgggctgcagcggcgatggggacccgggacccaggcctggagaaggagacggacgagtgaggctgagggacg

SEQ ID NO: 82401 - DNA, 120 bp, Artificial Sequence
  ENSG00000082684_49 (sequence is synthesized)
agacatccgtgttccctggctcaggggctcatcgtccttccttcctctgccaaggctgaggcgcagctggacaggggagcatccatcacactcctttcccgccagccagcagcggcagct

SEQ ID NO: 82402 - DNA, 120 bp, Artificial Sequence
  ENSG00000082684_50 (sequence is synthesized)
ctcctggcaggcaggggatcagctgtgcctctccttactccactgctcctcacccctggacccagggcccaccctccatctctccttgtctggtgctgcccacgtctgcctgcagaccac

SEQ ID NO: 82403 - DNA, 120 bp, Artificial Sequence
  ENSG00000082684_51 (sequence is synthesized)
tcctgccaaagcaaagggaagactgagtggtgtgagcgtgagatatccagcatcgcacctggagagctgtgctgtctgctcctttccttcctgcctcaggaggagtgtcagaactacgtg

SEQ ID NO: 82404 - DNA, 120 bp, Artificial Sequence
  ENSG00000082684_52 (sequence is synthesized)
gcctggtgggcttcatctataaaatggggactgccgtgcctcctgccgggggtcatctgaggattttgtgacttactgcttctggagcggtaagctcgtgttctgggttgctgggaaggg

SEQ ID NO: 82405 - DNA, 120 bp, Artificial Sequence
  ENSG00000082684_53 (sequence is synthesized)
caagcctaggccagagatgaataaagcaaataaatctgccttaggctgcatgaaggaggaacatgctggtgatgaaggtggaaaagcctgccttggatgaggggatatagccatgtaggg

SEQ ID NO: 82406 - DNA, 120 bp, Artificial Sequence
  ENSG00000082684_54 (sequence is synthesized)
gactatgtgattctgctcaatctaaccagcagtcttctggtaaccctgccatcacctcccatctagactgtgctggaaaaccaggctgggaatggcagccccttttgcttcctaggtgtg

SEQ ID NO: 82407 - DNA, 120 bp, Artificial Sequence
  ENSG00000082684_55 (sequence is synthesized)
aggacgagtaaccctcacagatcatgggaccctcctcccaccccctccctctgtgtaagaggctaacccaaacaggtgactttcctatagaccaagcttgtccagcccaaagcctttggg

SEQ ID NO: 82408 - DNA, 120 bp, Artificial Sequence
  ENSG00000082684_56 (sequence is synthesized)
cttgtccagcccaaagcctttgggctgcatgtggccctggacagctttgaatgaggcccaacacaaatgtgtaaactttctgaaaactttacgatactttttttctttttcttttttttt

SEQ ID NO: 82409 - DNA, 120 bp, Artificial Sequence
  ENSG00000082684_57 (sequence is synthesized)
aggtgtgagccaccacgcccagctggcaatatttttttttttctcatcagctatcgttagtgtttagtgtattttatgtgtggcccaagactactcttcttccaatgtggtccagggaag

SEQ ID NO: 82410 - DNA, 120 bp, Artificial Sequence
  ENSG00000082684_58 (sequence is synthesized)
ggtccagggaagccaaaagattggacaccctgatatagacagtgatgggtgggcaccgagaccaaggaaggcactggctgcacagtgtgctttgtaggaacaccagaagcctataaggca

SEQ ID NO: 82411 - DNA, 120 bp, Artificial Sequence
  ENSG00000082684_59 (sequence is synthesized)
tggagtggtgtttgctcactttgggccccagatagcaggcactggatgagggccaggctagctataggaaagacagtgtgagggggtggaccgaaacgagagtcaggagtaggtggagag

SEQ ID NO: 82412 - DNA, 120 bp, Artificial Sequence
  ENSG00000082684_60 (sequence is synthesized)
gcatcgaaactgacgccatcagtgtggattctaaatagtgtattgattgcatgccttctccatgcaggtgcctgtcctggtaggggtgcggcgtcacaaaagcagacatggttcagcctt

SEQ ID NO: 82413 - DNA, 120 bp, Artificial Sequence
  ENSG00000082684_61 (sequence is synthesized)
taaaagcttaaacagggtgatggatattaaacaacaaattttaatcatgagaaatgctacaaagggaaagggcagtgtgcagaaaagcctctaacagtatagaggagtggtgatcaggga

SEQ ID NO: 82414 - DNA, 120 bp, Artificial Sequence
  ENSG00000082684_62 (sequence is synthesized)
aagcttcctgtaggaagtgacatctataagatgaataggaataaactaagggagaggagcattccagcctgagggaatatgtgcagaggtttgaggtgggaagaaatgtttcaggagctg

SEQ ID NO: 82415 - DNA, 120 bp, Artificial Sequence
  ENSG00000082684_63 (sequence is synthesized)
agcagagatcagtgtggcaagacatttaagggtgaggagaagaaagacaggaaggagggtgaaggggtagggcagggagggtatgtcccaaaggacattgcagactgctttaatctttat

SEQ ID NO: 82416 - DNA, 120 bp, Artificial Sequence
  ENSG00000082684_64 (sequence is synthesized)
tgtaagagcaaggagaaattattgacaggtttgaagcagtccagcgaccagctcggaggtgcattttgaaacgctcaccactctggctgccatgtggagaatggattaggatactagaca

SEQ ID NO: 82417 - DNA, 120 bp, Artificial Sequence
  ENSG00000082684_65 (sequence is synthesized)
ggctgcaggcagaccaccaggaggacaatgcagcattcaggggactagaggggggctgaaaccaggcagaggtggagagaaatggacacatttgggagaagaactaaatgcgaagaatat

SEQ ID NO: 82418 - DNA, 120 bp, Artificial Sequence
  ENSG00000082701_0 (sequence is synthesized)
atcatctatatgttaaatatccgtgccgatctgtcttgaaggagaaatatatcgcttgttttgttttttatagtatacaaaaggagtgaaaagccaagaggacgaagtctttttcttttt

SEQ ID NO: 82419 - DNA, 120 bp, Artificial Sequence
  ENSG00000082701_1 (sequence is synthesized)
cttctgtgggagaacttaatgctgcatttatcgttaacctaacaccccaacataaagacaaaaggaagaaaaggaggaaggaaggaaaaggtgattcgcgaagagagtgatcatgtcagg

SEQ ID NO: 82420 - DNA, 120 bp, Artificial Sequence
  ENSG00000082701_2 (sequence is synthesized)
gcggcccagaaccacctcctttgcggagagctgcaagccggtgcagcagccttcagcttttggcagcatgaaagttagcagagacaaggacggcagcaaggtgacaacagtggtggcaac

SEQ ID NO: 82421 - DNA, 120 bp, Artificial Sequence
  ENSG00000082701_3 (sequence is synthesized)
tcctgggcagggtccagacaggccacaagaagtcagctatacagacactaaagtgattggaaatggatcatttggtgtggtatatcaagccaaactttgtgattcaggagaactggtcgc

SEQ ID NO: 82422 - DNA, 120 bp, Artificial Sequence
  ENSG00000082701_4 (sequence is synthesized)
catcaagaaagtattgcaggacaagagatttaagaatcgagagctccagatcatgagaaagctagatcactgtaacatagtccgattgcgttatttcttctactccagtggtgagaagaa

SEQ ID NO: 82423 - DNA, 120 bp, Artificial Sequence
  ENSG00000082701_5 (sequence is synthesized)
agatgaggtctatcttaatctggtgctggactatgttccggaaacagtatacagagttgccagacactatagtcgagccaaacagacgctccctgtgatttatgtcaagttgtatatgta

SEQ ID NO: 82424 - DNA, 120 bp, Artificial Sequence
  ENSG00000082701_6 (sequence is synthesized)
ttggatcctgatactgctgtattaaaactctgtgactttggaagtgcaaagcagctggtccgaggagaacccaatgtttcgtatatctgttctcggtactatagggcaccagagttgatc

SEQ ID NO: 82425 - DNA, 120 bp, Artificial Sequence
  ENSG00000082701_7 (sequence is synthesized)
tttggagccactgattatacctctagtatagatgtatggtctgctggctgtgtgttggctgagctgttactaggacaaccaatatttccaggggatagtggtgtggatcagttggtagaa

SEQ ID NO: 82426 - DNA, 120 bp, Artificial Sequence
  ENSG00000082701_8 (sequence is synthesized)
ataatcaaggtcctgggaactccaacaagggagcaaatcagagaaatgaacccaaactacacagaatttaaattccctcaaattaaggcacatccttggactaaggattcgtcaggaaca

SEQ ID NO: 82427 - DNA, 120 bp, Artificial Sequence
  ENSG00000082701_9 (sequence is synthesized)
ggacatttcacctcaggagtgcgggtcttccgaccccgaactccaccggaggcaattgcactgtgtagccgtctgctggagtatacaccaactgcccgactaacaccactggaagcttgt

SEQ ID NO: 82428 - DNA, 120 bp, Artificial Sequence
  ENSG00000082701_10 (sequence is synthesized)
gcacattcattttttgatgaattacgggacccaaatgtcaaactaccaaatgggcgagacacacctgcactcttcaacttcaccactcaagaactgtcaagtaatccacctctggctacc

SEQ ID NO: 82429 - DNA, 120 bp, Artificial Sequence
  ENSG00000082701_11 (sequence is synthesized)
atccttattcctcctcatgctcggattcaagcagctgcttcaacccccacaaatgccacagcagcgtcagatgctaatactggagaccgtggacagaccaataatgctgcttctgcatca

SEQ ID NO: 82430 - DNA, 120 bp, Artificial Sequence
  ENSG00000082701_12 (sequence is synthesized)
gcttccaactccacctgaacagtcccgagcagccagctgcacaggaaaaaccaccagttacttgagtgtcactcagcaacactggtcacgtttggaaagaatattaaaaagagaaaaaaa

SEQ ID NO: 82431 - DNA, 120 bp, Artificial Sequence
  ENSG00000082701_13 (sequence is synthesized)
cgggcttgtgccgccgccgccgccgccgccgcccgggccaagtgacaaaggaaggaaggaagcgaggaggagccggccccgcagccgctgacagggctctgggctggggcaaagcgcgga

SEQ ID NO: 82432 - DNA, 120 bp, Artificial Sequence
  ENSG00000082701_14 (sequence is synthesized)
cacttcctgagcgggcaccgagcagagccgaggggcgggagggcggccgagctgttgccgcggacgggggagggggccccgagggacggaagcggttgccgggttcccatgtccccggcg

SEQ ID NO: 82433 - DNA, 120 bp, Artificial Sequence
  ENSG00000082701_15 (sequence is synthesized)
aatggggaacagtcgaggagccgctgcctggggtctgaagggagctgcctccgccaccgccatggccgctggatccagccgccgcctgcagctgctcctggcgcaatgaggagaggagcc

SEQ ID NO: 82434 - DNA, 120 bp, Artificial Sequence
  ENSG00000082701_16 (sequence is synthesized)
gccgccaccgccaccgcccgcctctgactgactcgcgactccgccgccctctagttcgccgggcccctgccgtcagcccgccggatcccgcggcttgccggagctgcagcgtttcccgtc

SEQ ID NO: 82435 - DNA, 120 bp, Artificial Sequence
  ENSG00000082701_17 (sequence is synthesized)
gcatctccgagccaccccctccctccctctccctccctcctacccatccccctttctcttcaagcgtgagactcgtgatccttccgccgcttcccttcttcattgactcggaaaaaaaat

SEQ ID NO: 82436 - DNA, 120 bp, Artificial Sequence
  ENSG00000082701_18 (sequence is synthesized)
ccccgaggaaaatataatattcgaagtactcattttcaatcaagtatttgcccccgtttcacgtgatacatatttttttaggatttgccctctcttttctctcctcccaggaaagggagg

SEQ ID NO: 82437 - DNA, 120 bp, Artificial Sequence
  ENSG00000082701_19 (sequence is synthesized)
accttgtaaaatatctataaatacaaaccaatttcattgtattctcactttgagggagatccagggggtgggaggggttgtggggagggggaaagcggagcactagaacatacaatctct

SEQ ID NO: 82438 - DNA, 120 bp, Artificial Sequence
  ENSG00000082701_20 (sequence is synthesized)
ctcccacgacaatctttttttattaaaagtctgctgttgtatactttaaaaacaggactcctgcctcatgccccttccacaaaagaagaaaacctttttctgtgctgatgggtttttttg

SEQ ID NO: 82439 - DNA, 120 bp, Artificial Sequence
  ENSG00000082701_21 (sequence is synthesized)
aactttgttttcttttaaagtctagtgtgagactttggtatagtgcacagcttgaaattggttgggagcttagcaggtataactcaacggggacttaaatgtcacttgtaaaattaatcc

SEQ ID NO: 82440 - DNA, 120 bp, Artificial Sequence
  ENSG00000082701_22 (sequence is synthesized)
atatcttcgggtatttatagacttgcctttggcatgttggtggcaggtgtggcagacaaagaaatgtgtatcattcgtaacccagggaggtcaataaagtttggaactctacagggaaga

SEQ ID NO: 82441 - DNA, 120 bp, Artificial Sequence
  ENSG00000082701_23 (sequence is synthesized)
ttcttagtagatttgttaaggttttgttttgctctcagttagtgctagtgatgtagaggcttgtacaggaggctgccagaggggaagcagcaagcaagactcaggcacacatgctctaca

SEQ ID NO: 82442 - DNA, 120 bp, Artificial Sequence
  ENSG00000082701_24 (sequence is synthesized)
ggtggctctttgtttgcctgaccaaagttctttgcaaatcttagcacagtttcaaactagtgacctgggaggagatggaaggggtgttgagcaggctgagctagctgctgaggtcaaagg

SEQ ID NO: 82443 - DNA, 120 bp, Artificial Sequence
  ENSG00000082701_25 (sequence is synthesized)
ctgatgagcccagaggaaggggacaggtcagggatacatctcaccactgtgaataagtttgtccagatttttttctaaagttacttcccttggaaagatacacttgagaggacattgtag

SEQ ID NO: 82444 - DNA, 120 bp, Artificial Sequence
  ENSG00000082701_26 (sequence is synthesized)
ttaaataatgtgaactgtaacagtcatctactggtttatttttcatattttttaattgaaaattgagcttgcagaaatagccacattctacacatagttctaattttaaatccaaatcta

SEQ ID NO: 82445 - DNA, 120 bp, Artificial Sequence
  ENSG00000082701_27 (sequence is synthesized)
gaatctgtatttaatttgttttttaacctcatgctttttacatttatttattgatgcatgtcagatggtagaaatattaaaaactacacatcagaatgatacagtcacttatacctgctg

SEQ ID NO: 82446 - DNA, 120 bp, Artificial Sequence
  ENSG00000082701_28 (sequence is synthesized)
actttataggaaagctgatgatataaatgtgtgtatatatgttatatatacatatattcaatactgcctttttttttgtctacagtatcaaaattgactggttgaagcatgagaagaatg

SEQ ID NO: 82447 - DNA, 120 bp, Artificial Sequence
  ENSG00000082701_29 (sequence is synthesized)
tttcccccacacccagttaagagtttttgtgtctgttttctttgtgtatcagtgaacgatgttaagaatcagtctctctttttgaagaaaaagcaatattccttggaaagcaaggagaat

SEQ ID NO: 82448 - DNA, 120 bp, Artificial Sequence
  ENSG00000082701_30 (sequence is synthesized)
tgaaggactatgtttgccgtgaggaaatagattttcatgactagtttgttttatacttttaaggttggcatctatgtgggccttatatactctaaaatgaactttagtcaccttggtgct

SEQ ID NO: 82449 - DNA, 120 bp, Artificial Sequence
  ENSG00000082701_31 (sequence is synthesized)
aggcacaatcagttgtactttacatttaaagatcacttgagtgatggccgcctttccctcctacccgctccttccccacatgccttccaaggttagctggtaactgtagggctgcagagc

SEQ ID NO: 82450 - DNA, 120 bp, Artificial Sequence
  ENSG00000082701_32 (sequence is synthesized)
tgagcccatggttgtgtgtaacttgccctcaccctcctcattgccaccttaggtcactttatgggtctcgtcctccagagggttcggaagtggagtctgttggcagccctcctgcaggcc

SEQ ID NO: 82451 - DNA, 120 bp, Artificial Sequence
  ENSG00000082701_33 (sequence is synthesized)
ctagcaccctgtcctgctccttaactgtgtgtgtgactctccaagagagttgtcctgcctgctgaagtgaaccagtacccagaaagacaactgtgagccatcttggttttcactcgctgt

SEQ ID NO: 82452 - DNA, 120 bp, Artificial Sequence
  ENSG00000082701_34 (sequence is synthesized)
ttagctgaggtcttgggccacaaaaggggtttcacaaacctctggatatatcagagtttatgagaaaggaaacatgctcagtcaaaccaaatcaaacaaattgaattttatgttttataa

SEQ ID NO: 82453 - DNA, 120 bp, Artificial Sequence
  ENSG00000082701_35 (sequence is synthesized)
agtgcttctgaaagctaagatttgaaagaagtctgaaatcaaagtatttggcagcataactccttaaaggtagtggcgttgatagaccattttcagacagaatttataaagaatctgaaa

SEQ ID NO: 82454 - DNA, 120 bp, Artificial Sequence
  ENSG00000082701_36 (sequence is synthesized)
aggcaggtctgtgatagagaaatggacctgcattcagatccaactgcccagcaagcgtttggatgcagacactgctctggacgtggtatactccccagagtccataaaaatcagtgctta

SEQ ID NO: 82455 - DNA, 120 bp, Artificial Sequence
  ENSG00000082701_37 (sequence is synthesized)
aatcagtgcttattttaggaaacaggttgccccccacaactggggtaaaagaagagagaaaagtcacgcttttctctcatttcattgtgtgtgcatgtgtgcgtgtgtgtgtgtgtgtgt

SEQ ID NO: 82456 - DNA, 120 bp, Artificial Sequence
  ENSG00000082701_38 (sequence is synthesized)
gtgtgatttttctttctcaaggatcatggtgggatcacagaactcttttatacaagtgagatccaggtctctgaatatctttttgtatataataataataaaaagctcctcaccaaattc

SEQ ID NO: 82457 - DNA, 120 bp, Artificial Sequence
  ENSG00000082701_39 (sequence is synthesized)
aagcttgtacattatattttctttctgtgtttttaaatttaagttttattgttttgtatgtaaatatgtggacccaggaactgttattaatgagcaaaaagttactgttcagggcagtga

SEQ ID NO: 82458 - DNA, 120 bp, Artificial Sequence
  ENSG00000082701_40 (sequence is synthesized)
ttctgtttaataatcagacaaaatgtagacgagctttttaaagccatatagttttaactctgtacagtaggtaccggcctgtattattgtaacaataactctagcaatgtatagtgtatc

SEQ ID NO: 82459 - DNA, 120 bp, Artificial Sequence
  ENSG00000082701_41 (sequence is synthesized)
tatatagtttggagtgccttcgcttccatgtgtttttttttttaatttgttcttttttaaattttaattggtttcctttatccatgtctccctgtccaccccctttccctttgaaataat

SEQ ID NO: 82460 - DNA, 120 bp, Artificial Sequence
  ENSG00000082701_42 (sequence is synthesized)
aactcactcataacagtatctttgccccttccacagttaagtttcagtgataccatactcaggagtgggaagaggaaatcatattcgtaatttcatttcgttgaagccctgcctttgttt

SEQ ID NO: 82461 - DNA, 120 bp, Artificial Sequence
  ENSG00000082701_43 (sequence is synthesized)
tggttctgaatgtctttcctcctcggtagcagtgagaccggtttcatttcatacttagtccattcagggacttagtgtagcaccagggagccctagagctggaggatatcgaatagatta

SEQ ID NO: 82462 - DNA, 120 bp, Artificial Sequence
  ENSG00000082701_44 (sequence is synthesized)
aattttgctcgtctcttccacaagccctaaccatgggtcttaaaaacagcagattctgggagccttccatgctctctctctctcctcttttatctacttccctcccaaatgagagagtga

SEQ ID NO: 82463 - DNA, 120 bp, Artificial Sequence
  ENSG00000082701_45 (sequence is synthesized)
cagagaattgtttttttataaatcgaagtttcttaatagtatcaggttttgatacgtcagtggtctaaaatgctatagtgcaattactagcagttactgcacggagtgccaccgtgccaa

SEQ ID NO: 82464 - DNA, 120 bp, Artificial Sequence
  ENSG00000082701_46 (sequence is synthesized)
tagaggactgttgttttaacaagggaactcttagcccatttcctccctcccgccatctctacccttgctcaatgaaatatcattttaatttcttttaaaaaaaatcagtttaattcttac

SEQ ID NO: 82465 - DNA, 120 bp, Artificial Sequence
  ENSG00000082701_47 (sequence is synthesized)
tgtgtgcccaacacgaaggccttttttgaaagaaaaatagaatgttttgcctcaaagtagtccatataaaatgtcttgaatagaagaaaaaactaccaaaccaaaggttactatttttga

SEQ ID NO: 82466 - DNA, 120 bp, Artificial Sequence
  ENSG00000082701_48 (sequence is synthesized)
aacatcgtgtgttcattccagcaaggcagaagactgcaccttctttccagtgacatgctgtgtcattttttttaagtcctcttaatttttagacacatttttggtttatgttttaacaat

SEQ ID NO: 82467 - DNA, 120 bp, Artificial Sequence
  ENSG00000082701_49 (sequence is synthesized)
gtatgcctaaccagtcatcttgtctgcaccaatgcaaaggtttctgagaggagtattctctatccctgtggatatgaagacactggcatttcatctatttttccctttcctttttaaagg

SEQ ID NO: 82468 - DNA, 120 bp, Artificial Sequence
  ENSG00000082701_50 (sequence is synthesized)
atttaactttggaatcttccaaaggaagtttggccaatgccagatccccaggaatttggggggttttctttcttttcaactgaaattgtatctgattcctactgttcatgttagtgatca

SEQ ID NO: 82469 - DNA, 120 bp, Artificial Sequence
  ENSG00000082701_51 (sequence is synthesized)
tctaatcacagagccaaacacttttctcccctgtgtggaaaagtaggtatgctttacaataaaatctgtcttttctggtagaaacctgagccactgaaaataaaagagacaactagaagc

SEQ ID NO: 82470 - DNA, 120 bp, Artificial Sequence
  ENSG00000082701_52 (sequence is synthesized)
acagtagagtcccagactgagatctacctttgagaggctttgaaagtaatccctggggtttggattattttcacaagggttatgccgttttattcaagtttgttgctccgttttgcacct

SEQ ID NO: 82471 - DNA, 120 bp, Artificial Sequence
  ENSG00000082701_53 (sequence is synthesized)
ctgcaataaaagcaaaatgacaaccagtacataaggggttagcttgacaaagtagacttccttgtgttaatttttaagtttttttttccttaactatatctgtctacaggcagatacaga

SEQ ID NO: 82472 - DNA, 120 bp, Artificial Sequence
  ENSG00000082701_54 (sequence is synthesized)
tagttgtatgaaaatctgcttgcctgtaaaatttgcatttataaatgtgttgccgatggatcacttgggcctgtacacataccaattagcgtgaccacttccatcttaaaaacaaaccta

SEQ ID NO: 82473 - DNA, 120 bp, Artificial Sequence
  ENSG00000082701_55 (sequence is synthesized)
aaaaacaaaatttattatatatatatatatatatatataaaggactgtgggttgtatacaaactattgcaaacacttgtgcaaatctgtcttgatataaaggaaaagcaaaatctgtata

SEQ ID NO: 82474 - DNA, 120 bp, Artificial Sequence
  ENSG00000082701_56 (sequence is synthesized)
acattattactacttgaatgcctctgtgactgatttttttttcattttaaatataaacttttttgtgaaaagtatgctcaatgttttttttccctttccccattcccttgtaaatacatt

SEQ ID NO: 82475 - DNA, 120 bp, Artificial Sequence
  ENSG00000082701_57 (sequence is synthesized)
ttgttctatgtgacttggtttggaaatagttaactggtactgtaatttgcattaaataaaaagtaggttagcctggaaatgaaattaaaattcacaagtgtgtggtctttatttcagtac

SEQ ID NO: 82476 - DNA, 120 bp, Artificial Sequence
  ENSG00000082701_58 (sequence is synthesized)
ccaaccctcttccttcaccctactattttgccgctgcaatatgtagtcacatcaccatttccattcctctaattagggaaacattaatctttgttatacagaacaagatatcaataccac

SEQ ID NO: 82477 - DNA, 120 bp, Artificial Sequence
  ENSG00000082701_59 (sequence is synthesized)
ttcttgttctttccaatgattttattccattgtgtagccccaagaggtgcagcttccaccttggaaacctttggatttgatgtagaggaagctttgcagacactgcttagaaaagaaaga

SEQ ID NO: 82478 - DNA, 120 bp, Artificial Sequence
  ENSG00000082701_60 (sequence is synthesized)
aaacaactctgaaagggacagtttttaaatgtgtataagctgctgtctttgattactgtgttcatgatttggtgtggctgtattttcttttaactttcatcctattagtaatggtctttg

SEQ ID NO: 82479 - DNA, 120 bp, Artificial Sequence
  ENSG00000082701_61 (sequence is synthesized)
ggggtctctgtaaaatatatggacaccacgaacagtggggctgtacctcccaggtaaccaacacatgttgtgtttgagtctgctcatttccaatactggatgatgtatgtaaacatgtta

SEQ ID NO: 82480 - DNA, 120 bp, Artificial Sequence
  ENSG00000082701_62 (sequence is synthesized)
tgtctcttagtgcaaaaagaaacatcatttttttagggctggctcactctgtcaggcctaatctaaaggctagatataaggtcatgtgactgctgcttcaataaaaacaaatttatattc

SEQ ID NO: 82481 - DNA, 120 bp, Artificial Sequence
  ENSG00000082701_63 (sequence is synthesized)
caggcgtgagccactgcgcccggcataaactggtagtttaatgcagaatcttattttcactcttaccaataaaatagttttgcatacaaagttaagagtggactctaacatttgtgtctt

SEQ ID NO: 82482 - DNA, 120 bp, Artificial Sequence
  ENSG00000082701_64 (sequence is synthesized)
ctgtgttccactcccctacttgttagctatatggtcttgggcacattccttaatctatttgtgcttcctttctcctatttgcaaaacagagatgctaatactggagaccgtggacagacc

SEQ ID NO: 82483 - DNA, 120 bp, Artificial Sequence
  ENSG00000082781_0 (sequence is synthesized)
cgcgcgggggagtctcggcgctgggcgcgtctcggagcccaagtcgcggccgccgagcggagccagcccctcccctacccggagcagcccgctggggccgtcccgagcggcgacacacta

SEQ ID NO: 82484 - DNA, 120 bp, Artificial Sequence
  ENSG00000082781_1 (sequence is synthesized)
ggagcagcccgctggggccgtcccgagcggcgacacactaggagtcccggccggccagccagggcagccgcggtcccgggactcggccgtgagtgctgcgggacggatggtggcggcggg

SEQ ID NO: 82485 - DNA, 120 bp, Artificial Sequence
  ENSG00000082781_2 (sequence is synthesized)
ccaccatgccgcgggccccggcgccgctgtacgcctgcctcctggggctctgcgcgctcctgccccggctcgcaggtctcaacatatgcactagtggaagtgccacctcatgtgaagaat

SEQ ID NO: 82486 - DNA, 120 bp, Artificial Sequence
  ENSG00000082781_3 (sequence is synthesized)
gtctgctaatccacccaaaatgtgcctggtgctccaaagaggacttcggaagcccacggtccatcacctctcggtgtgatctgagggcaaaccttgtcaaaaatggctgtggaggtgaga

SEQ ID NO: 82487 - DNA, 120 bp, Artificial Sequence
  ENSG00000082781_4 (sequence is synthesized)
tagagagcccagccagcagcttccatgtcctgaggagcctgcccctcagcagcaagggttcgggctctgcaggctgggacgtcattcagatgacaccacaggagattgccgtgaacctcc

SEQ ID NO: 82488 - DNA, 120 bp, Artificial Sequence
  ENSG00000082781_5 (sequence is synthesized)
ggcccggtgacaagaccaccttccagctacaggttcgccaggtggaggactatcctgtggacctgtactacctgatggacctctccctgtccatgaaggatgacttggacaatatccgga

SEQ ID NO: 82489 - DNA, 120 bp, Artificial Sequence
  ENSG00000082781_6 (sequence is synthesized)
gcctgggcaccaaactcgcggaggagatgaggaagctcaccagcaacttccggttgggatttgggtcttttgttgataaggacatctctcctttctcctacacggcaccgaggtaccaga

SEQ ID NO: 82490 - DNA, 120 bp, Artificial Sequence
  ENSG00000082781_7 (sequence is synthesized)
ccaatccgtgcattggttacaagttgtttccaaattgcgtcccctcctttgggttccgccatctgctgcctctcacagacagagtggacagcttcaatgaggaagttcggaaacagaggg

SEQ ID NO: 82491 - DNA, 120 bp, Artificial Sequence
  ENSG00000082781_8 (sequence is synthesized)
tgtcccggaaccgagatgcccctgaggggggctttgatgcagtactccaggcagccgtctgcaaggagaagattggctggcgaaaggatgcactgcatttgctggtgttcacaacagatg

SEQ ID NO: 82492 - DNA, 120 bp, Artificial Sequence
  ENSG00000082781_9 (sequence is synthesized)
atgtgccccacatcgcattggatggaaaattgggaggcctggtgcagccacacgatggccagtgccacctgaacgaggccaacgagtacactgcatccaaccagatggactatccatccc

SEQ ID NO: 82493 - DNA, 120 bp, Artificial Sequence
  ENSG00000082781_10 (sequence is synthesized)
ttgccttgcttggagagaaattggcagagaacaacatcaacctcatctttgcagtgacaaaaaaccattatatgctgtacaagaattttacagccctgatacctggaacaacggtggaga

SEQ ID NO: 82494 - DNA, 120 bp, Artificial Sequence
  ENSG00000082781_11 (sequence is synthesized)
ttttagatggagactccaaaaatattattcaactgattattaatgcatacaatagtatccggtctaaagtggagttgtcagtctgggatcagcctgaggatcttaatctcttctttactg

SEQ ID NO: 82495 - DNA, 120 bp, Artificial Sequence
  ENSG00000082781_12 (sequence is synthesized)
ctacctgccaagatggggtatcctatcctggtcagaggaagtgtgagggtctgaagattggggacacggcatcttttgaagtatcattggaggcccgaagctgtcccagcagacacacgg

SEQ ID NO: 82496 - DNA, 120 bp, Artificial Sequence
  ENSG00000082781_13 (sequence is synthesized)
agcatgtgtttgccctgcggccggtgggattccgggacagcctggaggtgggggtcacctacaactgcacgtgcggctgcagcgtggggctggaacccaacagcgccaggtgcaacggga

SEQ ID NO: 82497 - DNA, 120 bp, Artificial Sequence
  ENSG00000082781_14 (sequence is synthesized)
gcgggacctatgtctgcggcctgtgtgagtgcagccccggctacctgggcaccaggtgcgagtgccaggatggggagaaccagagcgtgtaccagaacctgtgccgggaggcagagggca

SEQ ID NO: 82498 - DNA, 120 bp, Artificial Sequence
  ENSG00000082781_15 (sequence is synthesized)
agccactgtgcagcgggcgtggggactgcagctgcaaccagtgctcctgcttcgagagcgagtttggcaagatctatgggcctttctgtgagtgcgacaacttctcctgtgccaggaaca

SEQ ID NO: 82499 - DNA, 120 bp, Artificial Sequence
  ENSG00000082781_16 (sequence is synthesized)
agggagtcctctgctcaggccatggcgagtgtcactgcggggaatgcaagtgccatgcaggttacatcggggacaactgtaactgctcgacagacatcagcacatgccggggcagagatg

SEQ ID NO: 82500 - DNA, 120 bp, Artificial Sequence
  ENSG00000082781_17 (sequence is synthesized)
gccagatctgcagcgagcgtgggcactgtctctgtgggcagtgccaatgcacggagccgggggcctttggggagatgtgtgagaagtgccccacctgcccggatgcatgcagcaccaaga

SEQ ID NO: 82501 - DNA, 120 bp, Artificial Sequence
  ENSG00000082781_18 (sequence is synthesized)
gagattgcgtcgagtgcctgctgctccactctgggaaacctgacaaccagacctgccacagcctatgcagggatgaggtgatcacatgggtggacaccatcgtgaaagatgaccaggagg

SEQ ID NO: 82502 - DNA, 120 bp, Artificial Sequence
  ENSG00000082781_19 (sequence is synthesized)
ctgtgctatgtttctacaaaaccgccaaggactgcgtcatgatgttcacctatgtggagctccccagtgggaagtccaacctgaccgtcctcagggagccagagtgtggaaacaccccca

SEQ ID NO: 82503 - DNA, 120 bp, Artificial Sequence
  ENSG00000082781_20 (sequence is synthesized)
acgccatgaccatcctcctggctgtggtcggtagcatcctccttgttgggcttgcactcctggctatctggaagctgcttgtcaccatccacgaccggagggagtttgcaaagtttcaga

SEQ ID NO: 82504 - DNA, 120 bp, Artificial Sequence
  ENSG00000082781_21 (sequence is synthesized)
gcgagcgatccagggcccgctatgaaatggcttcaaatccattatacagaaagcctatctccacgcacactgtggacttcaccttcaacaagttcaacaaatcctacaatggcactgtgg

SEQ ID NO: 82505 - DNA, 120 bp, Artificial Sequence
  ENSG00000082781_22 (sequence is synthesized)
actgatgtttccttctccgaggggctggagcggggatctgatgaaaaggtcagactgaaacgccttgcacggctgctcggcttgatcacagctccctaggtaggcaccacagagaagacc

SEQ ID NO: 82506 - DNA, 120 bp, Artificial Sequence
  ENSG00000082781_23 (sequence is synthesized)
ttctagtgagcctgggccaggagcccacagtgcctgtacaggaaggtgcctggccatgtcacctggctgctaggccagagccatgccaggctgcgtccctccgagcttgggataaagcaa

SEQ ID NO: 82507 - DNA, 120 bp, Artificial Sequence
  ENSG00000082781_24 (sequence is synthesized)
ggggaccttggcgctctcagctttccctgccacatccagcttgttgtcccaatgaaatactgagatgctgggctgtctctcccttccaggaatgctgggcccccagcctggccagacaag

SEQ ID NO: 82508 - DNA, 120 bp, Artificial Sequence
  ENSG00000082781_25 (sequence is synthesized)
aagactgtcaggaagggtcggagtctgtaaaaccagcatacagtttggcttttttcacattgatcatttttatatgaaataaaaagatcctgcatttatggtgtagttctgagtcctgag

SEQ ID NO: 82509 - DNA, 120 bp, Artificial Sequence
  ENSG00000082781_26 (sequence is synthesized)
acttttctgcgtgatggctatgccttgcacacaggtgttggtgatggggctgttgagatgcctgttgaaggtacatcgtttgcaaatgtcagtttcctctcctgtccgtgtttgtttagt

SEQ ID NO: 82510 - DNA, 120 bp, Artificial Sequence
  ENSG00000082781_27 (sequence is synthesized)
acttttataatgaaaagaaacaagattgtttgggattggaagtaaagattaaaaccaaaagaatttgtgtttgtctgatactctctgtgtgtttctttctttctgagcggacttaaaatg

SEQ ID NO: 82511 - DNA, 120 bp, Artificial Sequence
  ENSG00000082781_28 (sequence is synthesized)
gtgcccccagtggggattgaagcggccgtgtacttcctcagggatgggacacaggctggtctgatactccagactgcagcttgtcaagtaagcatgaggtgctcggggcagtgagggctg

SEQ ID NO: 82512 - DNA, 120 bp, Artificial Sequence
  ENSG00000082781_29 (sequence is synthesized)
tgcaagggggaacactgagcagatacctttggccccttccagcttttactgacagagagttccaggctagacaccataaaaaccaccccttgttctgaggggctgaggctggaaatagat

SEQ ID NO: 82513 - DNA, 120 bp, Artificial Sequence
  ENSG00000082781_30 (sequence is synthesized)
tgtacagacaagcaagggttgagtggtggttcccacacgaagtcatctcttaatcatcattagcaatagcagttcccttccaaggcctcccctcactcccgaaacacttacgtcccatgc

SEQ ID NO: 82514 - DNA, 120 bp, Artificial Sequence
  ENSG00000082781_31 (sequence is synthesized)
aggcccaatgcaaaaaaacacatttgagcttttttcccgcagggccatgaagtccccttaagttcccatatctaagatggttgactgaccctctccccttatgtacagaagaggaaactg

SEQ ID NO: 82515 - DNA, 120 bp, Artificial Sequence
  ENSG00000082781_32 (sequence is synthesized)
attctcagagaggggaagtggcttgcccgagtgtttgttaggaggttactgaatgacaaactgttcctaagaccccatctcatgctggccagagggccagcctcctcattcctgcttgct

SEQ ID NO: 82516 - DNA, 120 bp, Artificial Sequence
  ENSG00000082781_33 (sequence is synthesized)
cttagaaaatctttcactgatcattttttgtcactggaataacttcaaggttattatgctttcattccaaatggatctgtcctcagctctggacccaattccccttacttcattttggca

SEQ ID NO: 82517 - DNA, 120 bp, Artificial Sequence
  ENSG00000082781_34 (sequence is synthesized)
aacactaagtcaaatagtgaaatgcctgtcactacatagaacctattacctggggcaaatacgaacagattgagtttccttcatcttgtgtaaatatgatgaaacagagacctggtaact

SEQ ID NO: 82518 - DNA, 120 bp, Artificial Sequence
  ENSG00000082781_35 (sequence is synthesized)
tggtgacactgttaaaccctttttgggataaagccaaatgtaaatgaaaacattaaacagataaattgtggtgttgagacttttctgaattgagaaaaataaatgtaattttggaagaaa

SEQ ID NO: 82519 - DNA, 78 bp, Artificial Sequence
  ENSG00000082781_36 (sequence is synthesized)
atatgagaaaacatccaggaaaagaggaacgcattgtgattgctttgctccagcggaaagagggcatttagagaaaga

SEQ ID NO: 82520 - DNA, 120 bp, Artificial Sequence
  ENSG00000082781_37 (sequence is synthesized)
atttagagaaagaatccaggagagtttcctccatgtctaagctctactgataatcttaaagaaaattttacataagcaatatccgatgtgaaaaaaataaaataaaacaagcatggccaa

SEQ ID NO: 82521 - DNA, 120 bp, Artificial Sequence
  ENSG00000082781_38 (sequence is synthesized)
gggcgtctacgtcccatctcaggccgccggcagtgaggctttgggaggatgaggcggtaccggcacgacccccgtacctgctctccctctcgcagtctagcaaccgcctttggcccaagt

SEQ ID NO: 82522 - DNA, 120 bp, Artificial Sequence
  ENSG00000082781_39 (sequence is synthesized)
aatctcggctcgcctaatacagcgtgccccgcccctttcccgtggcgacgggcggctaagcaacgggagcgggctctactcagtggtttcgagccccccacgccccaagtctcaacatat

SEQ ID NO: 82523 - DNA, 120 bp, Artificial Sequence
  ENSG00000082781_40 (sequence is synthesized)
cttatagccccatcccccagccaccagaggagcctgggacctctccccttgaacatcagctttacagcccggcagccagagcttagctccccaccctgtgacctcaggaatcctgttctc

SEQ ID NO: 82524 - DNA, 120 bp, Artificial Sequence
  ENSG00000082781_41 (sequence is synthesized)
ccagatgtctccgaagacagacaaagaatgtgtgcaacttggttttgatgatataaagtataataatgaccatttaattgaacgttgtagttaagcattttcacccactatctgagccac

SEQ ID NO: 82525 - DNA, 120 bp, Artificial Sequence
  ENSG00000082781_42 (sequence is synthesized)
cacctgctgttagcctgaggtgggaggagagaggctcaaggtgtcactttttggctgctcatccattttctagaggaggcccctgttaaagaacaagggttccctgggaggagccatcac

SEQ ID NO: 82526 - DNA, 120 bp, Artificial Sequence
  ENSG00000082781_43 (sequence is synthesized)
cctagagcctgtgccagagcctagtgtagactgattcgtgggtaagtgggcagcaggccacgggggacctggcagatgggctctatctgagagggagaagggggctggagcccgagattc

SEQ ID NO: 82527 - DNA, 120 bp, Artificial Sequence
  ENSG00000082781_44 (sequence is synthesized)
tccgggacagtggatctcagccctcgacatgcatcagaattgcccaggaagcccagtccccggaggtgtggttgggcccaggtactgggagtttctcttgaaagctccctggagagttga

SEQ ID NO: 82528 - DNA, 120 bp, Artificial Sequence
  ENSG00000082781_45 (sequence is synthesized)
acgtgcaggagggttgagatccccgccctgggtgatgaccagggcgtgatgtggggaactaggacaatgttggggcattgagctctgaccatgggagtgtgaggagctctgggaggccag

SEQ ID NO: 82529 - DNA, 120 bp, Artificial Sequence
  ENSG00000082781_46 (sequence is synthesized)
gaatactgttttatcacccagaaacctctggcttggagcagactcctcaccaggcattagatggaccagagtgcagatggatttgtctcctggtgtcagaatttgaaaggtctgcaacct

SEQ ID NO: 82530 - DNA, 120 bp, Artificial Sequence
  ENSG00000082781_47 (sequence is synthesized)
gacatgtagacaagacatgccactaaactcacacaggctcctccaagaacccttgggcttcctcccataacaagaagaaaggcagagcagaaacattccctgaggctgaacatctgcagc

SEQ ID NO: 82531 - DNA, 120 bp, Artificial Sequence
  ENSG00000082781_48 (sequence is synthesized)
agggatggaaatatgcctgaatgtcaacatgattcgggaaaccaatcacagagaccctctaaccttgttttcccttatgtgctgtggagactcctctgtccccaagctcagatctactgt

SEQ ID NO: 82532 - DNA, 120 bp, Artificial Sequence
  ENSG00000082781_49 (sequence is synthesized)
aaagggagtgagtctgacattacacataccagcacacagcctgtggttttggatcctggagtacctgtctggtacctggtacccggcacactgtgagttcctggacatcaagggctggtc

SEQ ID NO: 82533 - DNA, 120 bp, Artificial Sequence
  ENSG00000082805_0 (sequence is synthesized)
gatatggtgtaagatacttcttcaagattggacagctggggaccttcttctgattaaccttaaaccaacttgtagccatagagacacctcacaaggttcccatttttgttgttgttgttg

SEQ ID NO: 82534 - DNA, 120 bp, Artificial Sequence
  ENSG00000082805_1 (sequence is synthesized)
ttgattttctgctcacacctttcctgaccttgcaaccatgtatggaagtgcccgctctgttgggaaggtggagccgagcagccagagccctgggcgttcacccaggcttccacgttcccc

SEQ ID NO: 82535 - DNA, 120 bp, Artificial Sequence
  ENSG00000082805_2 (sequence is synthesized)
tcgcttgggtcaccgtcgaaccaacagtacgggagggagttcgggaagcagtgttggaggtggcagtgggaaaaccctttcaatggaaaatatacaatctttaaatgctgcctatgccac

SEQ ID NO: 82536 - DNA, 120 bp, Artificial Sequence
  ENSG00000082805_3 (sequence is synthesized)
ctctggccctatgtatctaagtgaccatgaaaatgtgggttcagaaacacctaaaagcaccatgacacttggccgttctgggggacgtctgccttacggtgttcggatgactgctatggg

SEQ ID NO: 82537 - DNA, 120 bp, Artificial Sequence
  ENSG00000082805_4 (sequence is synthesized)
tagtagccccaatatagctagcagtggggttgctagtgacaccatagcatttggagagcatcacctccctcctgtgagtatggcatccactgtacctcactcccttcgtcaggcgagaga

SEQ ID NO: 82538 - DNA, 120 bp, Artificial Sequence
  ENSG00000082805_5 (sequence is synthesized)
taacacaatcatggatctgcagacacagctgaaggaagtattaagagaaaatgatctcttgcggaaggatgtggaagtaaaggagagcaaattgagttcttcaatgaatagcatcaagac

SEQ ID NO: 82539 - DNA, 120 bp, Artificial Sequence
  ENSG00000082805_6 (sequence is synthesized)
cttctggagcccagagctgaagaaggaacgagccctgagaaaagatgaagcttccaaaatcaccatttggaaggaacagtacagagttgtacaggaggaaaaccagcacatgcagatgac

SEQ ID NO: 82540 - DNA, 120 bp, Artificial Sequence
  ENSG00000082805_7 (sequence is synthesized)
aatccaggctctccaggatgaattgcggatccagagggacctgaatcagctgtttcagcaggatagtagcagcaggactggcgaaccttgtgtagcagagctgacagaggagaactttca

SEQ ID NO: 82541 - DNA, 120 bp, Artificial Sequence
  ENSG00000082805_8 (sequence is synthesized)
gaggcttcatgctgagcatgagcggcaggccaaagagctgtttcttcttcgaaagacattggaggaaatggagctgcgtattgagactcaaaagcagaccctaaatgctcgggatgaatc

SEQ ID NO: 82542 - DNA, 120 bp, Artificial Sequence
  ENSG00000082805_9 (sequence is synthesized)
cattaagaagcttctggaaatgttgcagagcaaaggactttctgccaaggctaccgaggaagaccatgagagaacaagacgactggcagaggcagagatgcacgttcatcacctagaaag

SEQ ID NO: 82543 - DNA, 120 bp, Artificial Sequence
  ENSG00000082805_10 (sequence is synthesized)
ccttttggagcagaaggaaaaagagaacagtatgttgagagaggagatgcatcgaaggtttgagaatgctcctgattctgccaaaacaaaagctctgcaaactgttattgagatgaagga

SEQ ID NO: 82544 - DNA, 120 bp, Artificial Sequence
  ENSG00000082805_11 (sequence is synthesized)
ttcaaaaatttcctctatggagcgtgggcttcgagacctggaagaggaaattcagatgctgaaatcgaatggtgctttgagtactgaggaaagggaagaagaaatgaagcaaatggaagt

SEQ ID NO: 82545 - DNA, 120 bp, Artificial Sequence
  ENSG00000082805_12 (sequence is synthesized)
gtatcggagccattctaaatttatgaaaaataagattggccaggtgaaacaggagctgtccagaaaggacacagaactactcgccctgcagacaaagctagaaacactcacaaaccagtt

SEQ ID NO: 82546 - DNA, 120 bp, Artificial Sequence
  ENSG00000082805_13 (sequence is synthesized)
ctcagatagtaaacagcacattgaagtgttgaaggagtccttgactgctaaggagcagagggctgccatcctgcagactgaggtggatgctctccgattgcgtttggaagagaaggaaac

SEQ ID NO: 82547 - DNA, 120 bp, Artificial Sequence
  ENSG00000082805_14 (sequence is synthesized)
catgttgaataaaaagacaaaacaaattcaggatatggctgaagagaaggggacacaagctggagagatacatgacctcaaggacatgttggatgtgaaggagcggaaggttaatgttct

SEQ ID NO: 82548 - DNA, 120 bp, Artificial Sequence
  ENSG00000082805_15 (sequence is synthesized)
tcagaagaagattgaaaatcttcaagagcagcttagagacaaggaaaagcagatgagcagcttgaaagaacgggtcaaatccttgcaggctgacaccaccaacactgacactgccttgac

SEQ ID NO: 82549 - DNA, 120 bp, Artificial Sequence
  ENSG00000082805_16 (sequence is synthesized)
aactttggaggaggcccttgcagagaaagagcggacaattgaacgcttaaaggagcagagggacagagatgagcgagagaagcaagaggaaattgataactacaaaaaagatcttaaaga

SEQ ID NO: 82550 - DNA, 120 bp, Artificial Sequence
  ENSG00000082805_17 (sequence is synthesized)
cttgaaggaaaaagtcagcctgttgcaaggcgacctttcagagaaagaggcttcacttttggatctgaaagagcatgcttcttctctggcatcctcaggactgaaaaaggactcacggct

SEQ ID NO: 82551 - DNA, 120 bp, Artificial Sequence
  ENSG00000082805_18 (sequence is synthesized)
taagacactagagattgctttggagcagaagaaggaggagtgtctgaaaatggaatcacaattgaaaaaggcacatgaggcagcattggaagccagagccagtccagagatgagtgaccg

SEQ ID NO: 82552 - DNA, 120 bp, Artificial Sequence
  ENSG00000082805_19 (sequence is synthesized)
aatacagcacttggagagagagatcaccaggtacaaagatgaatctagcaaggcccaggcagaagttgatcgactcttagaaatcttgaaggaggtggaaaatgagaagaatgacaaaga

SEQ ID NO: 82553 - DNA, 120 bp, Artificial Sequence
  ENSG00000082805_20 (sequence is synthesized)
taagaagatagctgagttggaaaggcaagtgaaagaccagaataagaaggtagcaaatctgaagcacaaggaacaggtggaaaaaaagaagagtgcacaaatgttagaggaggcgcgacg

SEQ ID NO: 82554 - DNA, 120 bp, Artificial Sequence
  ENSG00000082805_21 (sequence is synthesized)
acgggaggacaatctcaacgacagctctcagcagctacaggacagtctccgtaagaaggatgacaggattgaagagctggaagaagcactaagagaaagtgtacagataactgcagagcg

SEQ ID NO: 82555 - DNA, 120 bp, Artificial Sequence
  ENSG00000082805_22 (sequence is synthesized)
ggaaatggtgctagcacaagaggaatcagccaggaccaatgctgaaaaacaggtggaggagttactgatggccatggagaaggtaaagcaggaactagaatccatgaaagcaaagctgtc

SEQ ID NO: 82556 - DNA, 120 bp, Artificial Sequence
  ENSG00000082805_23 (sequence is synthesized)
ctccacccagcagtctctggcagaaaaggaaactcacttgactaatcttcgggcagagagaaggaaacacttagaggaagttctggagatgaagcaagaagctcttctggctgccattag

SEQ ID NO: 82557 - DNA, 120 bp, Artificial Sequence
  ENSG00000082805_24 (sequence is synthesized)
tgaaaaagacgccaatatagctctcttggagctttcgtcctctaagaagaagacccaagaggaagtggctgccctgaagcgggagaaggatcgtctggtacagcagcttaagcagcagac

SEQ ID NO: 82558 - DNA, 120 bp, Artificial Sequence
  ENSG00000082805_25 (sequence is synthesized)
gcaaaatcgaatgaagctaatggccgacaactacgaggatgaccacttcaaatcctcccattccaatcaaacaaatcacaagccctccccagaccagatcatccagcccctcttagaact

SEQ ID NO: 82559 - DNA, 120 bp, Artificial Sequence
  ENSG00000082805_26 (sequence is synthesized)
tgaccaaaatagaagtaaattaaagttgtacattggacacctgacaaccctctgccatgaccgagaccccctgatcctccgtggactcactccaccagcttcctataacttggacgatga

SEQ ID NO: 82560 - DNA, 120 bp, Artificial Sequence
  ENSG00000082805_27 (sequence is synthesized)
ccaggcggcttgggagaatgagctgcagaagatgacccgggggcagcttcaggatgagttagagaaaggtgaacgggacaatgcagaactgcaggagtttgccaacgccattcttcagca

SEQ ID NO: 82561 - DNA, 120 bp, Artificial Sequence
  ENSG00000082805_28 (sequence is synthesized)
gatagcagaccattgtcccgacatcctagagcaagtggtcaacgccctggaagagtcctcttgaccctgctttatggggaagcctgaggtagtcaacccaggagccaagaaaagagaact

SEQ ID NO: 82562 - DNA, 120 bp, Artificial Sequence
  ENSG00000082805_29 (sequence is synthesized)
acgaggaacaggtgcccggaaccttcttggcaccaaacactacaaacttcatcccaacttgctcacttgaagaagtgtgattccagcaccgtttctacatctgccatcttactctgcctt

SEQ ID NO: 82563 - DNA, 120 bp, Artificial Sequence
  ENSG00000082805_30 (sequence is synthesized)
tctgctttggatgtggtctctacactaaccttcttgatgtccagggtagataaagggtcgaatctctctgaagaactgccacctggtcatcagcagtggagaactgtgggagctggtggc

SEQ ID NO: 82564 - DNA, 120 bp, Artificial Sequence
  ENSG00000082805_31 (sequence is synthesized)
tctgccctgacagagagccatggagcagaggagcctctcacctcctgtcctctgacatgagaatgaaaccaggaatggacttggagttcaacaggctgagaggatgcctccaatggacca

SEQ ID NO: 82565 - DNA, 120 bp, Artificial Sequence
  ENSG00000082805_32 (sequence is synthesized)
gagagctgagtgttctaatatcacaataggtgctttctcctaaaagggcaaaaaacaatctcaaaaagattagaaaaagagaaggggggaagggaagagaaaatcgactcttctttttac

SEQ ID NO: 82566 - DNA, 120 bp, Artificial Sequence
  ENSG00000082805_33 (sequence is synthesized)
tgtctcttctgcttactttccacatgagatgctttgtaccggggagctgtgagcaggcctcacgatggcttgggagcactcgttctcccaaggtctgagtcttcatccagccctgcctgt

SEQ ID NO: 82567 - DNA, 120 bp, Artificial Sequence
  ENSG00000082805_34 (sequence is synthesized)
ctgtcgcagccttcctcactctgttcctcggccagttaacaagaagatggtgtgaggtgttctccaccagtctctcctgtttgagactgttgacgttatcatactgaggtgttagatcaa

SEQ ID NO: 82568 - DNA, 120 bp, Artificial Sequence
  ENSG00000082805_35 (sequence is synthesized)
atatctctaattgaagaacatgtgaggttgaaagagcaccagccagggcaacatagcgtgaccctgtctctacaaaaaattaaaaagagaacatacaaagttgacatatgagaccctgtt

SEQ ID NO: 82569 - DNA, 120 bp, Artificial Sequence
  ENSG00000082805_36 (sequence is synthesized)
gtccccgcctgcagctttgccccagtaacagatgcccgttgctcttgggctggtttcccctgaacacctccaagaggctgcctgccttgccagcacccgtgtcctgagctcctgcagccc

SEQ ID NO: 82570 - DNA, 120 bp, Artificial Sequence
  ENSG00000082805_37 (sequence is synthesized)
ttcctcctacacacattccttcctcggttatttcattcagagaatatttatgaaatgcctactgtgtgcaagtcatccatccttgaaaaggccacttctcagtgagggagagatgtagtg

SEQ ID NO: 82571 - DNA, 120 bp, Artificial Sequence
  ENSG00000082805_38 (sequence is synthesized)
gattctgtgagacatacctgctggagttgaagcagtaaatagcatgtccttcccctccccgatcttaaggtgtgttttctagaaaagttccctaatggaattcatgagtttgggggtctc

SEQ ID NO: 82572 - DNA, 120 bp, Artificial Sequence
  ENSG00000082805_39 (sequence is synthesized)
agtcacccgcttgcctgtaggattccatttgatgattctggatttttgctgtttgttattgcccttagaggggctctgagtatctacttgtgggtggccatttcctgacatctgcatgta

SEQ ID NO: 82573 - DNA, 120 bp, Artificial Sequence
  ENSG00000082805_40 (sequence is synthesized)
cctcgtggaattcagccagcttcatgttgcaaatcagaaagctgaccccaagactgcaaatcaatgaaggtattggcattgttaaggacgtagcgtagacaacagcagtcataaataatt

SEQ ID NO: 82574 - DNA, 120 bp, Artificial Sequence
  ENSG00000082805_41 (sequence is synthesized)
aggcaggaacttaacccaaatctagttctttgaccacctctaccaccagaacccagcagacactcacatctcctgataagagttgctggactcgatgtttttgttttgcattttctcctc

SEQ ID NO: 82575 - DNA, 120 bp, Artificial Sequence
  ENSG00000082805_42 (sequence is synthesized)
tccttccccacttactcagagaatttaaagtctgtagagtcagcacagccccatcagtccaggaacttcccaccaccagcccttgactgtcccattaactgacatggtcagatttccagc

SEQ ID NO: 82576 - DNA, 120 bp, Artificial Sequence
  ENSG00000082805_43 (sequence is synthesized)
tccccctactccctgctgtgaaacaatccctctccctgtgagaggaaactgtggagcgtttcttatcgaaggttaaatggactctgctcataaacctcttactgagatgcttcctgatag

SEQ ID NO: 82577 - DNA, 120 bp, Artificial Sequence
  ENSG00000082805_44 (sequence is synthesized)
ccaggctggccagagaggggtgcaggggttagatagtaagtggtggtcgtttgtggtcagttacctcaattctgttcattgcagtgcccgtaaaccatgtagaaagctcccagcactgaa

SEQ ID NO: 82578 - DNA, 120 bp, Artificial Sequence
  ENSG00000082805_45 (sequence is synthesized)
aggcaggagtgttagcatctcgctttatccaccataacgtaaagaactgcggtgtgataacagccttcacggggccacggtggaaccaagacagcaggcgaggccatgcctaaacaagtg

SEQ ID NO: 82579 - DNA, 120 bp, Artificial Sequence
  ENSG00000082805_46 (sequence is synthesized)
gtctggcacgggcactggccagctgctctctccaagcaggtggcccagatcccacccacgtggactttctcatcaggtgcagcgcctgccactctcagccactgggtgtgtcactctcct

SEQ ID NO: 82580 - DNA, 120 bp, Artificial Sequence
  ENSG00000082805_47 (sequence is synthesized)
cttcatctcagcattctccatcacttcccctccagaaaaacggatggaaggaagccctctgtgacactgcttctgagaagaagcatttccgggaccgatatcatctgtctggtctctgtg

SEQ ID NO: 82581 - DNA, 120 bp, Artificial Sequence
  ENSG00000082805_48 (sequence is synthesized)
aacagcaaggaatcttcttgaccgttcttgggcactggaggctggctaggagttcagtaataaacgtggccttcgtgctgtagggcagagtggatgcagtttgtagctttcagagtgtct

SEQ ID NO: 82582 - DNA, 120 bp, Artificial Sequence
  ENSG00000082805_49 (sequence is synthesized)
cattgagtctagatcattgaaccaacacttaaccaaatgtcccactcccatcacactaggacttgtcattccatgcccctctcctagtggtcatggtttcatatgggcatacaactgcta

SEQ ID NO: 82583 - DNA, 120 bp, Artificial Sequence
  ENSG00000082805_50 (sequence is synthesized)
ctgaagttatatagccttgaaaactcagtgcaggttgcccttaattttccccaaacccctccatcggcaagtctagttgccctttagcacctaaagatctgcaccccaaaccaatgtcac

SEQ ID NO: 82584 - DNA, 120 bp, Artificial Sequence
  ENSG00000082805_51 (sequence is synthesized)
cataaagagggcacgaagaagagtgggtgtgatcccaacggggttttgtaactgaagaagcccagtgtgagcttctcatcttttcatatacctctaacccccggtactcattgaatcatt

SEQ ID NO: 82585 - DNA, 120 bp, Artificial Sequence
  ENSG00000082805_52 (sequence is synthesized)
gatgaggtatctcaattgagatttgcaaggactttgataccatttgaaatggaaaaattttgaacgggctttaacatgtttaagaaatatggatggggccggccacagtggctcacgcct

SEQ ID NO: 82586 - DNA, 76 bp, Artificial Sequence
  ENSG00000082805_53 (sequence is synthesized)
tggctcacgcctgtaatcccagaactcgccagcctggccaagatggcaaaaaccccgactctactaaaaatacaaa

SEQ ID NO: 82587 - DNA, 120 bp, Artificial Sequence
  ENSG00000082805_54 (sequence is synthesized)
atatatatatatatatatatatggatgggaatcaccaaattcatctcagctctaaccttttaacctttgtccttgcactttacaatctaaagatctacctgtggctctcagacttcctca

SEQ ID NO: 82588 - DNA, 120 bp, Artificial Sequence
  ENSG00000082805_55 (sequence is synthesized)
aaagatctacctgtggctctcagacttcctcacacttgggttttagaaataacttgtaaagcagactggacccaaggccgccttcagtgtcaagaagggcattgtgacttgcccctcaat

SEQ ID NO: 82589 - DNA, 120 bp, Artificial Sequence
  ENSG00000082805_56 (sequence is synthesized)
ttctgtccattgaagtctggttttccatgaggaacttgcgggctcacccacccccagagtgagagaagaggaaggcgaagtcatcacagacacggtcttagccacctgctgaactaatcc

SEQ ID NO: 82590 - DNA, 120 bp, Artificial Sequence
  ENSG00000082805_57 (sequence is synthesized)
ctccgctattgagggtcagggttgtgaggcaaccatcatgtgtcaccccaaaatataaatgtttctgagccgcccatccactggcatttggatttgctgccagagtcctgttcctcccag

SEQ ID NO: 82591 - DNA, 120 bp, Artificial Sequence
  ENSG00000082805_58 (sequence is synthesized)
aaccatcccgccctcctgttgaccatgttacttgagtgtaggcccggtgtcaagaccctcagagtctttgaggaaagagccaagcagagaagaccgctgcgtggagtgtgacaccacatg

SEQ ID NO: 82592 - DNA, 120 bp, Artificial Sequence
  ENSG00000082805_59 (sequence is synthesized)
gcatttctcaagcccagcggaccctgtgtcagcaaataccagtaatttaacatctgctcctggcctcctcttcacctgcctgggttcggaactgaggaggaaggatgagaagagactgca

SEQ ID NO: 82593 - DNA, 120 bp, Artificial Sequence
  ENSG00000082805_60 (sequence is synthesized)
atgcagcaggcaccctctgcagagtgaggccgcccgtccatcactgccagccctgggctgctcaggaggggacgtgaaccactcaaaggaatgtcttaaagaggatctggagtttccccc

SEQ ID NO: 82594 - DNA, 120 bp, Artificial Sequence
  ENSG00000082805_61 (sequence is synthesized)
atgcaaattagggaagaattaggcaagaaaagacatacattacagggaaatccttctgaacaaaatggctgtcttcacctactcttcttgcaagaaaagacatacattacagggaaatcc

SEQ ID NO: 82595 - DNA, 120 bp, Artificial Sequence
  ENSG00000082805_62 (sequence is synthesized)
ttctgaacaaaatggctatcttcacctactcttcagcaaaaaccgtctccagactttttagtgtcaaaaatgtaaccaactgtctcctgattttttccaatgtgtttggcaagtgctgtg

SEQ ID NO: 82596 - DNA, 120 bp, Artificial Sequence
  ENSG00000082805_63 (sequence is synthesized)
gccctgttgtaggtacttctcctgactcttgggggagaagtggttttagggattgatttgggggagcgggtttttgtcccatcccacctcctctcttctttctctgcttgtcgatattgt

SEQ ID NO: 82597 - DNA, 120 bp, Artificial Sequence
  ENSG00000082805_64 (sequence is synthesized)
ctgtgtgattcagagaattggggcagttacattgtgtctgttgttgagattattaaaagattaaaacgtagttgtagaaatgaaaaattaaacagctgtgttttaaaaatgcaaaccaat

SEQ ID NO: 82598 - DNA, 120 bp, Artificial Sequence
  ENSG00000082805_65 (sequence is synthesized)
atcttgttaataaaggaattcaagctatggggcagccacactcccctcctcccaggctggcataggtggccctgggctggcggcttaggaagcatggagcacacttagggtagtgcctgc

SEQ ID NO: 82599 - DNA, 120 bp, Artificial Sequence
  ENSG00000082805_66 (sequence is synthesized)
ctgggcaagagacacctgccgagcaaaaggaacgagaatctggggctcagagcctcgcagttgtgccaggattttcctatacatgttcaggacctctgggtagaggtttcacagtttgtg

SEQ ID NO: 82600 - DNA, 120 bp, Artificial Sequence
  ENSG00000082805_67 (sequence is synthesized)
accccataaccaccctcacccgacgtgggttctagctcagtgtgcctaatactgcatggtaacctgggcttgaccctgaagcccctgcctggcaggccacaggacctctcctgcccactt

SEQ ID NO: 82601 - DNA, 120 bp, Artificial Sequence
  ENSG00000082805_68 (sequence is synthesized)
ggtgctatctcttccagtgaccacccagcacgggtgagcactggccagcctggagcctgcaatccaggtggaacagactgtcctccatgtcagttccttctggcttcaggccctcaatta

SEQ ID NO: 82602 - DNA, 120 bp, Artificial Sequence
  ENSG00000082805_69 (sequence is synthesized)
tttccctttgagcttttttagaccctagatctcctaggcccaggctctctcttgaccccagagaagccactgtcaggaaaggaagtgaaccctactgaagccagagaattcaccccggcc

SEQ ID NO: 82603 - DNA, 120 bp, Artificial Sequence
  ENSG00000082805_70 (sequence is synthesized)
aaagcaggccctctgggtccagcccctcattccacaccacgccagtattgcatccatctactgcagctacacatcctgagggcagcaccacccactctggcctgctggcccatcgcagga

SEQ ID NO: 82604 - DNA, 120 bp, Artificial Sequence
  ENSG00000082805_71 (sequence is synthesized)
ctagcccaggcacctgccgggcattgcaggatatccagtggggcctgtgactgctccctgatgcgtcagaagagaagtgttgcactttagtggaggagctgaggagcacctgcccccttg

SEQ ID NO: 82605 - DNA, 120 bp, Artificial Sequence
  ENSG00000082805_72 (sequence is synthesized)
tagcttgagttccttttggtaacagtagcagcctccatggtggtgtctgggatgcacgtgcacccgctgccttcagctgtatgtgtgtgttcctgctggagttgtgttactgacaggata

SEQ ID NO: 82606 - DNA, 120 bp, Artificial Sequence
  ENSG00000082805_73 (sequence is synthesized)
atgacattacaaagaaattgtgttatattcaactttgccttgataattattgtaaacactttgttcattttttcttttttattcacaaactaaatccaccaggaaattataaagttattt

SEQ ID NO: 82607 - DNA, 120 bp, Artificial Sequence
  ENSG00000082805_74 (sequence is synthesized)
gtatcggagccattctaaatttatgaaaaataaggtagaacaactgaaggaggaactaagttcgaaagaggctcaatgggaggagctgaaaaagaaagcggctggtcttcaggctgagat

SEQ ID NO: 82608 - DNA, 120 bp, Artificial Sequence
  ENSG00000082805_75 (sequence is synthesized)
ggcggtagtggcggcggcggcggtgcctgggcggcagcagcagcagtagcggcagccctgaggacggtgagacggccgcggcggcggcgacagcgcggaagtcgcgcgggacccagagct

SEQ ID NO: 82609 - DNA, 120 bp, Artificial Sequence
  ENSG00000082805_76 (sequence is synthesized)
ggaagtcgcgcgggacccagagcttcccccctgtcgctagtgctgaggctttcgcctttcctacccagcttcttgctcacggcccgggctgggctgggcagggcaacgcgcccccgggga

SEQ ID NO: 82610 - DNA, 120 bp, Artificial Sequence
  ENSG00000082805_77 (sequence is synthesized)
tcttgaactcctggcctcaagcgatcttcctaccttggcctcccagagcgctgggattataggcatgagccattgcacttggcactttttttgtttgttttccagttgcatgatatggtg

SEQ ID NO: 82611 - DNA, 120 bp, Artificial Sequence
  ENSG00000082805_78 (sequence is synthesized)
ccctggtgagagccagcctccgtgttgtaatgacactcaagcagcccggtggagaggaacagaggcctcttgccactagctgcaccaccttgccagccatgacagtctccgtaagaagga

SEQ ID NO: 82612 - DNA, 120 bp, Artificial Sequence
  ENSG00000082805_79 (sequence is synthesized)
ttcaccatgttggccaggctggtcctagcatcatgtgatctgcctgcctcggcctctacaagtgctgggattacaggtgtgaaccagcacacctggccttatacttaatgttttgaatag

SEQ ID NO: 82613 - DNA, 120 bp, Artificial Sequence
  ENSG00000082805_80 (sequence is synthesized)
atagtttatgtttaatctttatcagatgccgttttgatattcaaaggtcagttttgctagttacgttaaaaagcacgtagtaaatttattttatttgtgaagattaacacttgacctgca

SEQ ID NO: 82614 - DNA, 120 bp, Artificial Sequence
  ENSG00000082805_81 (sequence is synthesized)
agattttgtagatcaggaatgtgggtgcagttggcacctatgattcagggtctctcacaaggctgcagtcatctcaaagcgctacttggggaggctgtttccaagctcactcatgcggca

SEQ ID NO: 82615 - DNA, 120 bp, Artificial Sequence
  ENSG00000082805_82 (sequence is synthesized)
tccttgttggctgcttgctggagagatatggtgtaagatacttcttcaagattggacagctggggaccttcttctgattaaccttaaaccaacttgtagccatagagacacctcacaagg

SEQ ID NO: 82616 - DNA, 120 bp, Artificial Sequence
  ENSG00000082805_83 (sequence is synthesized)
attctgttccttagaagtgagtcactaagaccatcccacactgagtggggtattagggcttaggcaccactttttgaaaggaggaatgctaaataattttcaggctttttttttttttgg

SEQ ID NO: 82617 - DNA, 120 bp, Artificial Sequence
  ENSG00000082805_84 (sequence is synthesized)
aggcatgagccactgcacccagcctcaggtttattttttcaattactatgggatgtcagagagggaaaaacaagccattaggtggttgcagtcagcagcaggtggatcgtgaagacctca

SEQ ID NO: 82618 - DNA, 120 bp, Artificial Sequence
  ENSG00000082805_85 (sequence is synthesized)
cagcagcaggtggatcgtgaagacctcagcatgccattgcaatctgtagagatcatccagcccctcttagaacttgaccaaaatagaagtaaattaaagttgtacattggacacctgaca

SEQ ID NO: 82619 - DNA, 120 bp, Artificial Sequence
  ENSG00000082805_86 (sequence is synthesized)
acatttgagaaaattatttcaagtacattaaagttctgtattctacagaagctgtgtttttctgcttttgcttttagataacttggattctcttaatggaatggggtggttaaggcgtag

SEQ ID NO: 82620 - DNA, 120 bp, Artificial Sequence
  ENSG00000082805_87 (sequence is synthesized)
agatgtggggatcctggggcgggaggtgggggagtggggactggggctctgggcacttggggagcggagggggggaggcttaggactagtgaagccgcggacgaggtagtggggagacgg

SEQ ID NO: 82621 - DNA, 120 bp, Artificial Sequence
  ENSG00000082805_88 (sequence is synthesized)
agaaattggggagccatgaggttggggtgcggtcagggtggatctttgggttagggtagtttgaagtttgagtatcctcacgacatggcagctggattcctgagagagagtgatttgaga

SEQ ID NO: 82622 - DNA, 120 bp, Artificial Sequence
  ENSG00000082805_89 (sequence is synthesized)
tgttttcataataaaaacataaaactttatttcttaaaaaaactcttgttgaaaaagaaataaaggaacgtggcaggagcagtcctctgagggggtccaaggaggaatcagtgttactgt

SEQ ID NO: 82623 - DNA, 120 bp, Artificial Sequence
  ENSG00000082805_90 (sequence is synthesized)
ggaaagtaataccaggccttgcttctgttgacttgaagattattgagctcccaattcattagttaggccagaggtgtcctgttcatgaaaattgccaggccggtgacatgcaacaggtgc

SEQ ID NO: 82624 - DNA, 120 bp, Artificial Sequence
  ENSG00000082805_91 (sequence is synthesized)
agacctgctgtgtgagccctgggaacacactgagatctgccagcgttttggcggtgcttcgcagtgctcacagctgctgtgtgtcaagcaggggctgctctaatgcttcagtgttctgtg

SEQ ID NO: 82625 - DNA, 120 bp, Artificial Sequence
  ENSG00000082805_92 (sequence is synthesized)
atggtgaggtctggccccactctcttcctcagcactccaggctttgaccagctaccaaatacctggccagactattgtcacgagagctgccaaatgaaatcctggggcaggagtcatcag

SEQ ID NO: 82626 - DNA, 120 bp, Artificial Sequence
  ENSG00000082805_93 (sequence is synthesized)
tcatttagtgtgcttccagaaggaatcaaaggagtagctgttcaagcaggggaaaggaatgagaaaagaaaaaacgtagagcaagtctgttacttaagaaaaacacagaaccaatgttac

SEQ ID NO: 82627 - DNA, 120 bp, Artificial Sequence
  ENSG00000082805_94 (sequence is synthesized)
aactaagaatttcagagtccttggctgtgagtcaggtgtttggtgttatatagggatttatcagtcactggttcagaagaatatcggataacctctgtgaaataaatgagaagagcataa

SEQ ID NO: 82628 - DNA, 120 bp, Artificial Sequence
  ENSG00000082805_95 (sequence is synthesized)
gccaggatgagacagaattcgtaatgagttccctcatcacatctcttggccaagaaaaacatgcactttctccagaggcagaatttttcttccattctaggaggtggaggaacacttgga

SEQ ID NO: 82629 - DNA, 120 bp, Artificial Sequence
  ENSG00000082805_96 (sequence is synthesized)
gtatatgtagtccaggctttcagatgagcagtttcactagcagttttttgtaatctactcataaataagtgaaaagagaaactgtgaggtaactggagtctttctgtatcaggaatagca

SEQ ID NO: 82630 - DNA, 120 bp, Artificial Sequence
  ENSG00000082805_97 (sequence is synthesized)
tctctgtaaaaacaagttagtcctgtgcttaattcctgcctcgatacagagctgtccgtctggtgtgaatatatgaagccagcgttctcttcctgtctcccagaagggcggctgcgtgtg

SEQ ID NO: 82631 - DNA, 120 bp, Artificial Sequence
  ENSG00000082805_98 (sequence is synthesized)
acagcgtaaatgtgtgacagtatgtgaaaatgtttctgtaatcctgaagatttcagtagtgattagaagagctttagtctttggtcaattttctttgacttggaaagcataaagaatatt

SEQ ID NO: 82632 - DNA, 120 bp, Artificial Sequence
  ENSG00000082805_99 (sequence is synthesized)
atttagaagacacaataaatgaaaactggacatttccctattggttgaataagtttagtggttttttttggctcagggttggggagatccaaggttatgtcatgcaaaaagatgaatatg

SEQ ID NO: 82633 - DNA, 120 bp, Artificial Sequence
  ENSG00000082805_100 (sequence is synthesized)
acctatcacacagttcgtgctgcatttagtttcatattttgtgactcagatctgtgaaagatacagataagaggtgtttgttttatttcttttttccttaaagtgttttacttcttttct

SEQ ID NO: 82634 - DNA, 120 bp, Artificial Sequence
  ENSG00000082805_101 (sequence is synthesized)
tcataagcgttacctgtgctgtttttgttatgtttagaattgggaaatatgagtaatgttatgattaattcttcagcagcgtgatcagtcactgtgctaaaatgtaaccatcttatttca

SEQ ID NO: 82635 - DNA, 120 bp, Artificial Sequence
  ENSG00000082805_102 (sequence is synthesized)
gtgggggctaccttggggaatccagttgccgtgtagttgatgcagtgggggctaccttggggaatcccgttgctgtgtaggttcatgcagtgggagctaccttggggaattccatgttta

SEQ ID NO: 82636 - DNA, 120 bp, Artificial Sequence
  ENSG00000082805_103 (sequence is synthesized)
gattcaagatttggggggtggggaggggtttccagatataatttttaaactgatttttaattgattttttactgttttatttttttaattcaccaattaaaaatgtatgtttctcatgta

SEQ ID NO: 82637 - DNA, 120 bp, Artificial Sequence
  ENSG00000082805_104 (sequence is synthesized)
gtcggaacgtggacactaatttccgcccacgctccccgcgtcctggcgggatcaccacagacacgacgtccattgctggggtcctcggcgatgcccgtgtgcgcagccccgcgagtctca

SEQ ID NO: 82638 - DNA, 120 bp, Artificial Sequence
  ENSG00000082898_0 (sequence is synthesized)
aggttccaaacgctccgcggcgccatgggctgaaaactcaaccgagatggaatctcccagtctgaaccggtttcaaccggttccgagtttgaggcactaggaggagggggagaagcggct

SEQ ID NO: 82639 - DNA, 120 bp, Artificial Sequence
  ENSG00000082898_1 (sequence is synthesized)
gcagcggccgcggcaggagcagcgggagctacagcatcagcaagagcaacagtagctacagccccggcggcggtgcctgttccagtctttgctgctgcagtccgtgcaaccacccagagg

SEQ ID NO: 82640 - DNA, 120 bp, Artificial Sequence
  ENSG00000082898_2 (sequence is synthesized)
gggaggggggaaccaccagtcgctgaggaacaagagaaggggggaaagtttaggcgagccttgggggggggggggccagcgccggagccgcgtgagagagggagccgtgttttggtaggg

SEQ ID NO: 82641 - DNA, 120 bp, Artificial Sequence
  ENSG00000082898_3 (sequence is synthesized)
gggagtcggactgcaactggcagcagagcgtctccccggccgtgtggactctacaccccctactcctgccgcttctgctgctgcctgtggctggagggtccccctggggctgaatctttg

SEQ ID NO: 82642 - DNA, 120 bp, Artificial Sequence
  ENSG00000082898_4 (sequence is synthesized)
tttgggacttgaccccgttccctcccccttccctcactccccagccgggcgggagcatttattccccagattaattccccttttgggggggggcgggtgtgtgtgtgtgtgtgtgtgtgt

SEQ ID NO: 82643 - DNA, 120 bp, Artificial Sequence
  ENSG00000082898_5 (sequence is synthesized)
gtgttgggggaagcgtccctgaaatagtaaatattattgagctctttttgcccttttcctgtccgtttttttaatttccttttttgaggtgggaaaactgaaacccaccttgattcgtcc

SEQ ID NO: 82644 - DNA, 120 bp, Artificial Sequence
  ENSG00000082898_6 (sequence is synthesized)
cctctcccccctccccaccttccctcgccctaatcccccaacgaggaaggaaggagcagttggttcaatctctggtaatctatgccagcaattatgacaatgttagcagaccatgcagct

SEQ ID NO: 82645 - DNA, 120 bp, Artificial Sequence
  ENSG00000082898_7 (sequence is synthesized)
cgtcagctgcttgatttcagccaaaaactggatatcaacttattagataatgtggtgaattgcttataccatggagaaggagcccagcaaagaatggctcaagaagtactgacacattta

SEQ ID NO: 82646 - DNA, 120 bp, Artificial Sequence
  ENSG00000082898_8 (sequence is synthesized)
aaggagcatcctgatgcttggacaagagtcgacacaattttggaattttctcagaatatgaatacgaaatactatggactacaaattttggaaaatgtgataaaaacaaggtggaagatt

SEQ ID NO: 82647 - DNA, 120 bp, Artificial Sequence
  ENSG00000082898_9 (sequence is synthesized)
cttccaaggaaccagtgcgaaggaataaaaaaatacgttgttggcctcattatcaagacgtcatctgacccaacttgtgtagagaaagaaaaggtgtatatcggaaaattaaatatgatc

SEQ ID NO: 82648 - DNA, 120 bp, Artificial Sequence
  ENSG00000082898_10 (sequence is synthesized)
cttgttcagatactgaaacaagaatggcccaaacattggccaacttttatcagtgatattgttggagcaagtaggaccagcgaaagtctctgtcaaaataatatggtgattcttaaactc

SEQ ID NO: 82649 - DNA, 120 bp, Artificial Sequence
  ENSG00000082898_11 (sequence is synthesized)
ttgagtgaagaagtatttgatttctctagtggacagataacccaagtcaaatctaagcatttaaaagacagcatgtgcaatgaattctcacagatatttcaactgtgtcagtttgtaatg

SEQ ID NO: 82650 - DNA, 120 bp, Artificial Sequence
  ENSG00000082898_12 (sequence is synthesized)
gaaaattctcaaaatgctccacttgtacatgcaaccttggaaacattgctcagatttctgaactggattcccctgggatatatttttgagaccaaattaatcagcacattgatttataag

SEQ ID NO: 82651 - DNA, 120 bp, Artificial Sequence
  ENSG00000082898_13 (sequence is synthesized)
ttcctgaatgttccaatgtttcgaaatgtctctctgaagtgcctcactgagattgctggtgtgagtgtaagccaatatgaagaacaatttgtaacactatttactctgacaatgatgcaa

SEQ ID NO: 82652 - DNA, 120 bp, Artificial Sequence
  ENSG00000082898_14 (sequence is synthesized)
ctaaagcagatgcttcctttaaataccaatattcgacttgcgtactcaaatggaaaagatgatgaacagaacttcattcaaaatctcagtttgtttctctgcacctttcttaaggaacat

SEQ ID NO: 82653 - DNA, 120 bp, Artificial Sequence
  ENSG00000082898_15 (sequence is synthesized)
gatcaacttatagaaaaaagattaaatctcagggaaactcttatggaggcccttcattatatgttgttggtatctgaagtagaagaaactgaaatctttaaaatttgtcttgaatactgg

SEQ ID NO: 82654 - DNA, 120 bp, Artificial Sequence
  ENSG00000082898_16 (sequence is synthesized)
aatcatttggctgctgaactctatagagagagtccattctctacatctgcctctccgttgctttctggaagtcaacattttgatgttcctcccaggagacagctatatttgcccatgtta

SEQ ID NO: 82655 - DNA, 120 bp, Artificial Sequence
  ENSG00000082898_17 (sequence is synthesized)
ttcaaggtccgtttattaatggttagtcgaatggctaaaccagaggaagtattggttgtagagaatgatcaaggagaagttgtgagagaattcatgaaggatacagattccataaatttg

SEQ ID NO: 82656 - DNA, 120 bp, Artificial Sequence
  ENSG00000082898_18 (sequence is synthesized)
tataagaatatgagggaaacattggtttatcttactcatctggattatgtagatacagaaagaataatgacagagaagcttcacaatcaagtgaatggtacagagtggtcatggaaaaat

SEQ ID NO: 82657 - DNA, 120 bp, Artificial Sequence
  ENSG00000082898_19 (sequence is synthesized)
ttgaatacattgtgttgggcaataggctccattagtggagcaatgcatgaagaggacgaaaaacgatttcttgttactgttataaaggatctattaggattatgtgaacagaaaagaggc

SEQ ID NO: 82658 - DNA, 120 bp, Artificial Sequence
  ENSG00000082898_20 (sequence is synthesized)
agctcactggaaatttctgaagactgtagttaacaagctgttcgaattcatgcatgagacccatgatggagtccaggatatggcttgtgatactttcattaaaatagcccaaaaatgccg

SEQ ID NO: 82659 - DNA, 120 bp, Artificial Sequence
  ENSG00000082898_21 (sequence is synthesized)
caggcatttcgttcaggttcaggttggagaagtgatgccatttattgatgaaattttgaacaacattaacactattatttgtgatcttcagcctcaacaggttcatacgttttatgaagc

SEQ ID NO: 82660 - DNA, 120 bp, Artificial Sequence
  ENSG00000082898_22 (sequence is synthesized)
tgtggggtacatgattggtgcacaaacagatcaaacagtacaagaacacttgatagaaaagtacatgttactccctaatcaagtgtgggatagtataatccagcaggcaaccaaaaatgt

SEQ ID NO: 82661 - DNA, 120 bp, Artificial Sequence
  ENSG00000082898_23 (sequence is synthesized)
ggatatactgaaagatcctgaaacagtcaagcagcttggtagcattttgaaaacaaatgtgagagcctgcaaagctgttggacacccctttgtaattcagcttggaagaatttatttaga

SEQ ID NO: 82662 - DNA, 120 bp, Artificial Sequence
  ENSG00000082898_24 (sequence is synthesized)
tatgcttaatgtatacaagtgcctcagtgaaaatatttctgcagctatccaagctaatggtgaaatggttacaaagcaaccattgattagaagtatgcgaactgtaaaaagggaaacttt

SEQ ID NO: 82663 - DNA, 120 bp, Artificial Sequence
  ENSG00000082898_25 (sequence is synthesized)
aaagttaatatctggttgggtgagccgatccaatgatccacagatggtcgctgaaaattttgttccccctctgttggatgcagttctcattgattatcagagaaatgtcccagctgctag

SEQ ID NO: 82664 - DNA, 120 bp, Artificial Sequence
  ENSG00000082898_26 (sequence is synthesized)
agaaccagaagtgcttagtactatggccataattgtcaacaagttagggggacatataacagctgaaatacctcaaatatttgatgctgtttttgaatgcacattgaatatgataaataa

SEQ ID NO: 82665 - DNA, 120 bp, Artificial Sequence
  ENSG00000082898_27 (sequence is synthesized)
ggactttgaagaatatcctgaacatagaacgaactttttcttactacttcaggctgtcaattctcattgtttcccagcattccttgctattccacctacacagtttaaacttgttttgga

SEQ ID NO: 82666 - DNA, 120 bp, Artificial Sequence
  ENSG00000082898_28 (sequence is synthesized)
ttccatcatttgggctttcaaacatactatgaggaatgtcgcagatacgggcttacagatactttttacactcttacaaaatgttgcacaagaagaagctgcagctcagagtttttatca

SEQ ID NO: 82667 - DNA, 120 bp, Artificial Sequence
  ENSG00000082898_29 (sequence is synthesized)
aacttatttttgtgatattctccagcatatcttttctgttgtgacagacacttcacatactgctggtttaacaatgcatgcatcaattcttgcatatatgtttaatttggttgaagaagg

SEQ ID NO: 82668 - DNA, 120 bp, Artificial Sequence
  ENSG00000082898_30 (sequence is synthesized)
aaaaataagtacatcattaaatcctggaaatccagttaacaaccaaatctttcttcaggaatatgtggctaatctccttaagtcggccttccctcacctacaagatgctcaagtaaagct

SEQ ID NO: 82669 - DNA, 120 bp, Artificial Sequence
  ENSG00000082898_31 (sequence is synthesized)
ctttgtgacagggcttttcagcttaaatcaagatattcctgctttcaaggaacatttaagagatttcctagttcaaataaaggaatttgcaggtgaagacacttctgatttgtttttgga

SEQ ID NO: 82670 - DNA, 120 bp, Artificial Sequence
  ENSG00000082898_32 (sequence is synthesized)
agagagagaaatagccctacggcaggctgatgaagagaaacataaacgtcaaatgtctgtccctggcatctttaatccacatgagattccagaagaaatgtgtgattaaaatccaaattc

SEQ ID NO: 82671 - DNA, 120 bp, Artificial Sequence
  ENSG00000082898_33 (sequence is synthesized)
atgctgttttttttctctgcaactcgttagcagaggaaaacagcatgtgggtatttgtcgaccaaaatgatgccaatttgtaaattaaaatgtcacctagtggccctttttcttatgtgt

SEQ ID NO: 82672 - DNA, 120 bp, Artificial Sequence
  ENSG00000082898_34 (sequence is synthesized)
ttttttgtataagaaattttctgtgaaatatccttccattgtttaagcttttgttttggtcatctttatttagtttgcatgaagttgaaaattaaggcatttttaaaaattttacttcat

SEQ ID NO: 82673 - DNA, 120 bp, Artificial Sequence
  ENSG00000082898_35 (sequence is synthesized)
gcccatttttgtggctgggctggggggaggaggcaaattcgatttgaacatatacttgtaattctaatgcaaaattatacaatttttcctgtaaacaataccaatttttaattagggagc

SEQ ID NO: 82674 - DNA, 120 bp, Artificial Sequence
  ENSG00000082898_36 (sequence is synthesized)
attttccttctagtctatttcagcctagaagaaaagataatgagtaaaacaaattgcgttgtttaaaggattatagtgctgcattgtctgaagttagcacctcttggactgaatcgtttg

SEQ ID NO: 82675 - DNA, 120 bp, Artificial Sequence
  ENSG00000082898_37 (sequence is synthesized)
tctagactacatgtattacaaagtctctttggcaagattgcagcaagatcatgtgcatatcatcccattgtaaagcgacttcaaaaatatgggaacacagttagttatttttacacagtt

SEQ ID NO: 82676 - DNA, 120 bp, Artificial Sequence
  ENSG00000082898_38 (sequence is synthesized)
ctttttgtttttgtgtgtgtgtgctgtcgcttgtcgacaacagctttttgttttcctcaatgaggagtgttgctcatttgtgagccttcattaactcgaagtgaaatggttaaaaatatt

SEQ ID NO: 82677 - DNA, 120 bp, Artificial Sequence
  ENSG00000082898_39 (sequence is synthesized)
tatcctgttagaataggctgcatctttttaacaactcattaaaaaacaaaacaactctggcttttgagatgacttatactaatttacattgtttaccaagctgtagtgctttaagaacac

SEQ ID NO: 82678 - DNA, 120 bp, Artificial Sequence
  ENSG00000082898_40 (sequence is synthesized)
tacttaaaaagcaaaataaacttggtttacatttatttttcctttattgactcatttattcctatattaatgatagtgggtatttgtgtttaagcatcaagtaacattttaaatgaagtt

SEQ ID NO: 82679 - DNA, 120 bp, Artificial Sequence
  ENSG00000082898_41 (sequence is synthesized)
agcttgggatgggggagggaggggctgccgactccctgttcctccagcaaggaaactcgaaagctctccggttttgcagagtggcatgtgaagtaggaaagatcagtttttcaggggcct

SEQ ID NO: 82680 - DNA, 120 bp, Artificial Sequence
  ENSG00000082898_42 (sequence is synthesized)
gcacatgggattccgtcttgtagttccttttcaggggtttgaatgtgataagttggttaaaccatttactgttggccttgtacagtggaggatgccctgattctccttcattccgatgtc

SEQ ID NO: 82681 - DNA, 120 bp, Artificial Sequence
  ENSG00000082898_43 (sequence is synthesized)
tgtgagtttgggttgggtgggaggaagtggtgtagtagaggaagcattcagtactggctcagcccggacctcctctgatcacgccgaggccatgctgcatagagaaaggggcggtgaact

SEQ ID NO: 82682 - DNA, 120 bp, Artificial Sequence
  ENSG00000082898_44 (sequence is synthesized)
ggagaagcggctgcagcggccgcggcaggagcagcgggagctacagcatcagcaagagcaacagtagctacagccccggcggcggtgcctgttccagtctttgctgctgcagaaggagca

SEQ ID NO: 82683 - DNA, 120 bp, Artificial Sequence
  ENSG00000082898_45 (sequence is synthesized)
ggctttccttcgctctcttttctactcatccctgctcttcgtcccacctcctcctcctccacccctctcctcttgcctttcgaccctccccacttcccctcccccactctgcgggcaaat

SEQ ID NO: 82684 - DNA, 120 bp, Artificial Sequence
  ENSG00000082898_46 (sequence is synthesized)
gtcccctctcccccctccccaccttccctcgccctaatcccccaacgaggaaggaaggagcagttggttcaatctctggatggagtctcattctcttgcccaggctagagtgtggtggtg

SEQ ID NO: 82685 - DNA, 78 bp, Artificial Sequence
  ENSG00000082898_47 (sequence is synthesized)
atctatgccagcaattatgacaatgttagcagaccatgcagctcgtcagctgcttgatttcagccaaaaactggatat

SEQ ID NO: 82686 - DNA, 120 bp, Artificial Sequence
  ENSG00000082898_48 (sequence is synthesized)
agtatatatacaatgttatacaaccattaatacctagatccaaaacattttcatcacccgaaggtgaccctttacccctaaaacagtcactttctcctttgttctctccccaacttctgg

SEQ ID NO: 82687 - DNA, 120 bp, Artificial Sequence
  ENSG00000082898_49 (sequence is synthesized)
caaccattattttggtttctgtctctgtagatatatctattctgattataccatataaagggaatcatgcatgtgaccttttgtgtctggtttcttttatttggtgttgtgttttcaatg

SEQ ID NO: 82688 - DNA, 120 bp, Artificial Sequence
  ENSG00000082898_50 (sequence is synthesized)
ttcttccatgttgtaacctgtatcaatacctcactttttatcatgtctgaagaatattctcattgtatgaatattcagtattttgtttgttctctcctctgtgatggtacatttgggttg

SEQ ID NO: 82689 - DNA, 120 bp, Artificial Sequence
  ENSG00000082898_51 (sequence is synthesized)
tgataccacttattggcacccaaggccttttaaataaatgtcgttccattaggagacatgataaaaatacatattgatcaactactatgtgagagatttttgaagtgctttagggcatgt

SEQ ID NO: 82690 - DNA, 120 bp, Artificial Sequence
  ENSG00000082898_52 (sequence is synthesized)
cagaagaagcagagttactccagagtttgctgtctatttgataagtattgaaatctgagttgtgatgaataaaacatgaatttttattttcccttaaggtgtaacaagtgaaaagcaatt

SEQ ID NO: 82691 - DNA, 120 bp, Artificial Sequence
  ENSG00000082898_53 (sequence is synthesized)
ggtggagagcttgggatgggggagggaggggctgccgactccctgttcctccagcaaggaaactcgaaagctctccggttttgcagagtggcatgtgaataatctatgccagcaattatg

SEQ ID NO: 82692 - DNA, 120 bp, Artificial Sequence
  ENSG00000082898_54 (sequence is synthesized)
tattctggggtggaaatacattttaggaaatgtacttgtagtttctaaatattttctaaatgtattgttactcatcaataaaattctgctcattatttgcatttgaaaccatgtttttct

SEQ ID NO: 82693 - DNA, 120 bp, Artificial Sequence
  ENSG00000082898_55 (sequence is synthesized)
acttgcttaaaaagttttgacatcaagatactgaactgtatcacgttttaggaccataaaatcctaatagtggatgcgtttaaataataggttagcatactttataaatgttagtagaat

SEQ ID NO: 82694 - DNA, 120 bp, Artificial Sequence
  ENSG00000082898_56 (sequence is synthesized)
aggaaagtcttcctggtgtataaactaaacactagaaaagttgaatggaccataataatttatgtaattatcaaatagctaagtaatttcagcttttgttacttgcttttactatctcag

SEQ ID NO: 82695 - DNA, 120 bp, Artificial Sequence
  ENSG00000082898_57 (sequence is synthesized)
aagtatgtctgtggatataacataattttaatgccatggagtttaaatatttaaacttgtatattagggaaatactttcttggttttcaagaacttacttcccaggagtttgaaaccaac

SEQ ID NO: 82696 - DNA, 120 bp, Artificial Sequence
  ENSG00000082898_58 (sequence is synthesized)
acaacctaaggagcagtctttcgccttgtagcgacttgtttttcacctagtgtgaagttattaagcaacggttatgattttctgggttttgtttaggaattggcattgggtgtcacttgt

SEQ ID NO: 82697 - DNA, 120 bp, Artificial Sequence
  ENSG00000082898_59 (sequence is synthesized)
agagtcacattatccattaagctggataatccctagtgtatgttatccagtgagtggattttaggattgaagagcccaatgggaatgagcgttcgtggttacacctctcgcactatggct

SEQ ID NO: 82698 - DNA, 120 bp, Artificial Sequence
  ENSG00000082898_60 (sequence is synthesized)
ttgagtgttcttcctgttgcatactgtggttttgaggtctgaatccaaatacttctaatctgtgtaaataaattagctataaaaagagaacccaacaacttctccatgagtgtggaaaac

SEQ ID NO: 82699 - DNA, 120 bp, Artificial Sequence
  ENSG00000082898_61 (sequence is synthesized)
tagaacatgaaaggagttgagtctagaaccttgattctcaagagtgtggtccttctctcagtatcaacattggttgtgatttcgttaggcaaattcattggccacctgccaatctactaa

SEQ ID NO: 82700 - DNA, 120 bp, Artificial Sequence
  ENSG00000082898_62 (sequence is synthesized)
gaggaaggtatctcatttttagtattagcatttgttatctcaaattattttatattgttaatttgtttcaaaatttagtcttaagcatataattaattcttgcaaatagtcctaagaatt

SEQ ID NO: 82701 - DNA, 120 bp, Artificial Sequence
  ENSG00000082898_63 (sequence is synthesized)
atgaatgaagttttgtaatgggactagtatgcaaggtggcttttttggttgtctgattttgtttttttctttttagtatatgtatacaggtctaagtagcataaattctgaatgttattc

SEQ ID NO: 82702 - DNA, 120 bp, Artificial Sequence
  ENSG00000082898_64 (sequence is synthesized)
agagattaaacataacattaaggaattattttgggcaagtaatcaatataatacaggccaggcacctctgacaccaagttgtgtggacagcttaaaaccctactccatggcattgggctt

SEQ ID NO: 82703 - DNA, 120 bp, Artificial Sequence
  ENSG00000082898_65 (sequence is synthesized)
ctaatgggacagcactcagtttttatttacaatggaaaatgttataattctggtccttttttaagtttgaacagaagggttgatcaaaatgtgttttgtctgttttaggcttgatgattc

SEQ ID NO: 82704 - DNA, 120 bp, Artificial Sequence
  ENSG00000082898_66 (sequence is synthesized)
acgcttctctttaaactgccttaaagtaataaatactatggcattctgtttaatacacgaaaggtttccacttgatatacattgtgttaaaacagaagatagccatattcacatctgttt

SEQ ID NO: 82705 - DNA, 120 bp, Artificial Sequence
  ENSG00000082898_67 (sequence is synthesized)
ctgaaaccagactttgttaattaacagttttaaaatattaattagttttgacatcttgtaaattttaggtcaaaaatacagtccagaacttcctcaaagtgctaaccttaagtaacataa

SEQ ID NO: 82706 - DNA, 120 bp, Artificial Sequence
  ENSG00000082898_68 (sequence is synthesized)
cagtgtttgcctgtttgcttgcctggtaaattttgctttttatactgacagacattactaatgtttaagttgatttatcaacagtatttttaaaaactcaaatttgtcttgtgaaaaatg

SEQ ID NO: 82707 - DNA, 120 bp, Artificial Sequence
  ENSG00000082898_69 (sequence is synthesized)
agatgattagaggaacagaaagaaagcaacaggaagaaaaggggtgtcttcctgtgcaactgacacagctaggctttgacggcaggcctccacaagtactatggactacaaattttggaa

SEQ ID NO: 82708 - DNA, 120 bp, Artificial Sequence
  ENSG00000082898_70 (sequence is synthesized)
acttaaataattataaagccatttttgtagaattacagtgaaaaaaaattttttcttttggagacagggtcttgctctgtggctcaggttggagtgcagtggcgtggtcatagctcacta

SEQ ID NO: 82709 - DNA, 120 bp, Artificial Sequence
  ENSG00000082898_71 (sequence is synthesized)
gttgcaggcacacaccaccatgcctagcaaattttaaattttttagttttacttcatttatatttacatagttttttctgttgtgctttaagccccagtatttttattgttttagagatt

SEQ ID NO: 82710 - DNA, 120 bp, Artificial Sequence
  ENSG00000082898_72 (sequence is synthesized)
gggtgtcattttgtgttgctcaagctgctctcaaattcctggccacaacagttctttttgcctcggccctccggaatagttggaattataggcatgaatccctacacatggctggcttgt

SEQ ID NO: 82711 - DNA, 120 bp, Artificial Sequence
  ENSG00000082898_73 (sequence is synthesized)
cgtgagccaccgcaccgggccggaatttttttaaaatgccaatactggtgacaggattagagtatattaactgattttacttagtctttccattcccacattaattagttctcaaaattt

SEQ ID NO: 82712 - DNA, 120 bp, Artificial Sequence
  ENSG00000082898_74 (sequence is synthesized)
caaaaagtaaccagtcatggtggcatgtgccggtagtcccaactactcgaaaggctgaagtgggggggggggtcacttgagcctgggagttcaagatggcagtgagctgagattgcgcca

SEQ ID NO: 82713 - DNA, 120 bp, Artificial Sequence
  ENSG00000082898_75 (sequence is synthesized)
ctgcactccaagaagaagaatttactacacagaatcttgattggtaaaaagtaaatatggaaaacagattttagcattcacatggtatgtagcatttattgaaacctcataggtcggggc

SEQ ID NO: 82714 - DNA, 120 bp, Artificial Sequence
  ENSG00000082898_76 (sequence is synthesized)
atccttttatgaacgtagttgtattaattggtttgaataaatgagaaagtaagtctgcatgtttcaattataaaagtgtagtatatgcttataagaaactgaaaaatgtgttaacaagag

SEQ ID NO: 82715 - DNA, 88 bp, Artificial Sequence
  ENSG00000082898_77 (sequence is synthesized)
gtatatgcttataagaaactgaaaaatgtgttaacaagagaaaataggctggccagaaggccaaggcgggcggatgacctgaggtcgg

SEQ ID NO: 82716 - DNA, 80 bp, Artificial Sequence
  ENSG00000082898_78 (sequence is synthesized)
cttgcagtgagccaagatcgcgccagaaaaaaaattagctgggcatggtgccgcatgcctgtagtcccagctactcggga

SEQ ID NO: 82717 - DNA, 120 bp, Artificial Sequence
  ENSG00000082898_79 (sequence is synthesized)
gccactgcactacagcctgggtgacagagtgagactgtttaaaaagaaaaaagagataaaagatacgttaagtggacacatttacacggtaacttaaatttttttgtaatctgtagtggt

SEQ ID NO: 82718 - DNA, 120 bp, Artificial Sequence
  ENSG00000082898_80 (sequence is synthesized)
tttttgtaatctgtagtggtgatttcaaattaaaaacaaaagtgatagtagtagtcttatggtaataatggtttagatgagttctctattaaaaaggttgtctttctccttcaatttgat

SEQ ID NO: 82719 - DNA, 120 bp, Artificial Sequence
  ENSG00000082898_81 (sequence is synthesized)
aactcatgtgcgtaacgggacagtttcattttccgtgagaggtggattgtattttacttgggtttacctttcaggaggcattctatcttctgtggtttattgaaaactccaaatatttat

SEQ ID NO: 82720 - DNA, 120 bp, Artificial Sequence
  ENSG00000082898_82 (sequence is synthesized)
ccagcatatcttttctgttgtgacagacacttcacatactgctggtaagaatttaatacgatttaaatgttaagtgccagctgggcacagggcctcacgcctataatcccagcactttgg

SEQ ID NO: 82721 - DNA, 120 bp, Artificial Sequence
  ENSG00000082898_83 (sequence is synthesized)
ggtcaggagttcgagaacagcctggccaccatggtgaaactgtctgtactaaaaataccataaaaaaataaaagatacaataaaaatactgggcatggtggcatgtgattgcaatcccac

SEQ ID NO: 82722 - DNA, 87 bp, Artificial Sequence
  ENSG00000082898_84 (sequence is synthesized)
ttgcaatcccacgaccgaggaggcagaggttgcagtgaactaagattgcgccacggcattccagcttgggtgacagagcgagactcc

SEQ ID NO: 82723 - DNA, 120 bp, Artificial Sequence
  ENSG00000082898_85 (sequence is synthesized)
acccaacttgtgtagaggtaagagtttattttggagcttattgggagagcataaaatcatttagatattgagtctgactacaacctaattctgtcaagacacatagtcacacatatgcac

SEQ ID NO: 82724 - DNA, 68 bp, Artificial Sequence
  ENSG00000082898_86 (sequence is synthesized)
atctatgccagcaattatgacaatgttagcagaccatgcagctcgtcagctgcttgatttcagccaaa

SEQ ID NO: 82725 - DNA, 120 bp, Artificial Sequence
  ENSG00000082996_0 (sequence is synthesized)
cccgcccgggggcagcccggcagccgaatcttgggctactctgtcccaacagccggagcagatcagaccgaccggccctgcccgctcggtcccgcgccctccagaccctacggtctccgt

SEQ ID NO: 82726 - DNA, 120 bp, Artificial Sequence
  ENSG00000082996_1 (sequence is synthesized)
ttctaggggcacatggttagcggcaggcgcccacagccaatccactttgccagcctgccccttcctctgccaagagcagcttcttcagccgcgctccagttccgcagacgcctgccccac

SEQ ID NO: 82727 - DNA, 120 bp, Artificial Sequence
  ENSG00000082996_2 (sequence is synthesized)
cctgctcttcccttccagggaagacggatcacgcggccaagaacgagactcgcaaactgggcatttctccgagccgggctagagcaagtagcgagactccgcgtgagagtgggaaagagc

SEQ ID NO: 82728 - DNA, 120 bp, Artificial Sequence
  ENSG00000082996_3 (sequence is synthesized)
cttaacaggcaaccatgttgcccagtgggttttctgtgcctttgggtgcggaccaatgaggcgcgtggggcgggacttccgcttcgcctaggtgttgtcgtccctgctagtactccgggc

SEQ ID NO: 82729 - DNA, 120 bp, Artificial Sequence
  ENSG00000082996_4 (sequence is synthesized)
tgtgggggtcggtgcggatattcagtcatgaaatcagggtagggacttctcccgcagcgacgcggctggcaagactgtttgtgttgcgggggccggacttcaagagagaaagagagagtg

SEQ ID NO: 82730 - DNA, 120 bp, Artificial Sequence
  ENSG00000082996_5 (sequence is synthesized)
ggcagacatcgaagccaaacagcagtatcccggaagcactcatgcaactttggtggcggccactcagttttctctgccagtgtctggtgattttacaacgagatgctgctctccataggg

SEQ ID NO: 82731 - DNA, 120 bp, Artificial Sequence
  ENSG00000082996_6 (sequence is synthesized)
atgctcatgctgtcagccacacaagtctacaccatcttgactgtccagctctttgcattcttaaacctactgcctgtagaagcagacattttagcatataactttgaaaatgcatctcag

SEQ ID NO: 82732 - DNA, 120 bp, Artificial Sequence
  ENSG00000082996_7 (sequence is synthesized)
acatttgatgacctccctgcaagatttggttatagacttccagctgaaggtttaaagggttttttgattaactcaaaaccagagaatgcctgtgaacccatagtgcctccaccagtaaaa

SEQ ID NO: 82733 - DNA, 120 bp, Artificial Sequence
  ENSG00000082996_8 (sequence is synthesized)
gacaattcatctggcactttcatcgtgttaattagaagacttgattgtaattttgatataaaggttttaaatgcacagagagcaggatacaaggcagccatagttcacaatgttgattct

SEQ ID NO: 82734 - DNA, 120 bp, Artificial Sequence
  ENSG00000082996_9 (sequence is synthesized)
gatgacctcattagcatgggatccaacgacattgaggtactaaagaaaattgacattccatctgtctttattggtgaatcatcagctaattctctgaaagatgaattcacatatgaaaaa

SEQ ID NO: 82735 - DNA, 120 bp, Artificial Sequence
  ENSG00000082996_10 (sequence is synthesized)
gggggccaccttatcttagttccagaatttagtcttcctttggaatactacctaattcccttccttatcatagtgggcatctgtctcatcttgatagtcattttcatgatcacaaaattt

SEQ ID NO: 82736 - DNA, 120 bp, Artificial Sequence
  ENSG00000082996_11 (sequence is synthesized)
tttgtttggatgagtatgaagatggagacaaactcagaatccttccctgttcccatgcttatcactgcaagtgtgtagacccttggctaactaaaaccaaaaaaacctgtccagtgtgca

SEQ ID NO: 82737 - DNA, 120 bp, Artificial Sequence
  ENSG00000082996_12 (sequence is synthesized)
agcaaaaagttgttccttctcaaggcgattcagactctgacacagacagtagtcaagaagaaaatgaagtgacagaacatacccctttactgagacctttagcttctgtcagtgcccagt

SEQ ID NO: 82738 - DNA, 120 bp, Artificial Sequence
  ENSG00000082996_13 (sequence is synthesized)
catttggggctttatcggaatcccgctcacatcagaacatgacagaatcttcagactatgaggaagacgacaatgaagatactgacagtagtgatgcagaaaatgaaattaatgaacatg

SEQ ID NO: 82739 - DNA, 120 bp, Artificial Sequence
  ENSG00000082996_14 (sequence is synthesized)
atgtcgtggtccagttgcagcctaatggtgaacgggattacaacatagcaaatactgtttgactttcagaagatgattggtttatttccctttaaaatgattaggtatatactgtaattt

SEQ ID NO: 82740 - DNA, 120 bp, Artificial Sequence
  ENSG00000082996_15 (sequence is synthesized)
gattttttgctcccttcaaagatttctgtagaaataacttattttttagtattctacagtttaatcaaattactgaaacaggacttttgatctggtatttatctgccaagaatatacttc

SEQ ID NO: 82741 - DNA, 120 bp, Artificial Sequence
  ENSG00000082996_16 (sequence is synthesized)
attcactaataatagactggtgctgtaactcaagcatcaattcagctcttcttttggaatgaaagtatagccaaaacataaaaaaaaaaaaatcctcagtatagcttgcaattaagacct

SEQ ID NO: 82742 - DNA, 120 bp, Artificial Sequence
  ENSG00000082996_17 (sequence is synthesized)
agatcacagtatttaagtgttttgcgttttatacatgaggtcagtgctacagccacctagcatgaactaacccagcttccacctccataaagttacctagagttgttgagttggaatatg

SEQ ID NO: 82743 - DNA, 120 bp, Artificial Sequence
  ENSG00000082996_18 (sequence is synthesized)
ttctggcatttacctgacctgccaatcattagggagaggcaacaaggtaattcagcctttcctcctatcagcacaaagaaactcaaagctgttttttccctttctgttccaaagcagtct

SEQ ID NO: 82744 - DNA, 120 bp, Artificial Sequence
  ENSG00000082996_19 (sequence is synthesized)
tatcctgacaggagcggtctatactagtgcagatttcaacacttttttttaacgttttaattactatagtgttatgtagagatttgattgagcagctaatgtttctgaactttacttact

SEQ ID NO: 82745 - DNA, 120 bp, Artificial Sequence
  ENSG00000082996_20 (sequence is synthesized)
aattttcagtgtccttaagggttctgtagtgttatcaaagcaaaaagaaaatgctgcataaaaataccaaacttcagcaactgttaatactcagatcatatacctcttaataaatagcat

SEQ ID NO: 82746 - DNA, 120 bp, Artificial Sequence
  ENSG00000082996_21 (sequence is synthesized)
cttatgctaattagccctgctaaactatgtacagaggaaactgttcaagtattggatttgaaagtaagtgacttatgtttaacagaactaatgatgtattgaaacactgtattatgaaaa

SEQ ID NO: 82747 - DNA, 120 bp, Artificial Sequence
  ENSG00000082996_22 (sequence is synthesized)
gctaaattatacatcattgtaactatgtagaaagtgtagactaatgtataatcaaaatgctaaggatttttatatggccttgtatgaggggagtttgaatgttaataaacatgttttcca

SEQ ID NO: 82748 - DNA, 120 bp, Artificial Sequence
  ENSG00000082996_23 (sequence is synthesized)
caaaactgtcgtttcatcatcagtttcagcaccgtgggcagctgctcgggtcctctcttgttgccccaaacctgcccggctattactgttcgtcagtgatgcagcagaaacagtgaaaac

SEQ ID NO: 82749 - DNA, 120 bp, Artificial Sequence
  ENSG00000082996_24 (sequence is synthesized)
tgatgcattcctttcaacaatgatgtgtttgttctccaaggagaacatctgcagtttttgatacaatataaataagtaaggtggctgtgcctccaaagagttcttctggagaaacagatc

SEQ ID NO: 82750 - DNA, 120 bp, Artificial Sequence
  ENSG00000082996_25 (sequence is synthesized)
atcattcaaagataaatacatcaaaaggcagtaactgaggactaacttgaaaagtttgaaaggtgaaaaaatagttctctacatattttctgttttcaggagatgagtatgatgtatgtg

SEQ ID NO: 82751 - DNA, 120 bp, Artificial Sequence
  ENSG00000082996_26 (sequence is synthesized)
tttgggacttaacccctgctagggccagatactacggtcagtcagcagctctgcctgtatgcttgacttgacttgacttgcacttattaaataactttgtcccagagagaaagagagagt

SEQ ID NO: 82752 - DNA, 120 bp, Artificial Sequence
  ENSG00000082996_27 (sequence is synthesized)
agctagaagaaacagacttcgtaaagatcaacttaagaaacttcctgtacataaattcaagaaagcttatcactgcaagtgtgtagacccttggctaactaaaaccaaaaaaacctgtcc

SEQ ID NO: 82753 - DNA, 120 bp, Artificial Sequence
  ENSG00000083067_0 (sequence is synthesized)
atgtatgtgcgagtatcttttgatacaaaacctgatctcctcttacacctgatgaccaaggaatggcagttggagcttcccaagcttctcatctctgtccatgggggcctgcagaacttt

SEQ ID NO: 82754 - DNA, 120 bp, Artificial Sequence
  ENSG00000083067_1 (sequence is synthesized)
gaactccagccaaaactcaagcaagtctttgggaaagggctcatcaaagcagcaatgacaactggagcgtggatattcactggaggggttaacacaggtgttattcgtcatgttggcgat

SEQ ID NO: 82755 - DNA, 120 bp, Artificial Sequence
  ENSG00000083067_2 (sequence is synthesized)
gccttgaaggatcatgcctctaagtctcgaggaaagatatgcaccataggtattgccccctggggaattgtggaaaaccaggaggacctcattggaagagatgttgtccggccataccag

SEQ ID NO: 82756 - DNA, 120 bp, Artificial Sequence
  ENSG00000083067_3 (sequence is synthesized)
accatgtccaatcccatgagcaagctcactgttctcaacagcatgcattcccacttcattctggctgacaacgggaccactggaaaatatggagcagaggtgaaacttcgaagacaactg

SEQ ID NO: 82757 - DNA, 120 bp, Artificial Sequence
  ENSG00000083067_4 (sequence is synthesized)
gaaaagcatatttcactccagaagataaacacaagatgcctgccgtttttctctcttgactcccgcttgttttattcattttggggtagttgccagttagactcagttggaatcggtcaa

SEQ ID NO: 82758 - DNA, 120 bp, Artificial Sequence
  ENSG00000083067_5 (sequence is synthesized)
ggtgttcctgtggtggcactcatagtggaaggaggacccaatgtgatctcgattgttttggagtaccttcgagacacccctcccgtgccagtggttgtctgtgatgggagtggacgggca

SEQ ID NO: 82759 - DNA, 120 bp, Artificial Sequence
  ENSG00000083067_6 (sequence is synthesized)
tcggacatcctggcctttgggcataaatactcagaagaaggcggactgataaatgaatctttgagggaccagctgttggtgactatacagaagactttcacatacactcgaacccaagct

SEQ ID NO: 82760 - DNA, 120 bp, Artificial Sequence
  ENSG00000083067_7 (sequence is synthesized)
cagcatctgttcatcatcctcatggagtgcatgaagaagaaggaattgattacggtatttcggatgggatcagaaggacaccaggacattgatttggctatcctgacagctttactcaaa

SEQ ID NO: 82761 - DNA, 120 bp, Artificial Sequence
  ENSG00000083067_8 (sequence is synthesized)
ggagccaatgcctcggccccagaccaactgagcttagctttagcctggaacagagtcgacatcgctcgcagccagatctttatttacgggcaacagtggccggtgggatctctggagcaa

SEQ ID NO: 82762 - DNA, 120 bp, Artificial Sequence
  ENSG00000083067_9 (sequence is synthesized)
gccatgttggatgccttagttctggacagagtggattttgtgaaattactcatagagaatggagtaagcatgcaccgttttctcaccatctccagactagaggaattgtacaatacgaga

SEQ ID NO: 82763 - DNA, 120 bp, Artificial Sequence
  ENSG00000083067_10 (sequence is synthesized)
catgggccctcaaatacattgtaccacttggtcagggatgtcaaaaaggggaacctgcccccagactacagaatcagcctgattgacatcggcctggtgatcgagtacctgatgggcggg

SEQ ID NO: 82764 - DNA, 120 bp, Artificial Sequence
  ENSG00000083067_11 (sequence is synthesized)
gcttatcgctgcaactacacgcgcaagcgcttccggaccctctaccacaacctcttcggccccaagaggcccaaagccttgaaactgctgggaatggaggatgatattcccttgaggcga

SEQ ID NO: 82765 - DNA, 120 bp, Artificial Sequence
  ENSG00000083067_12 (sequence is synthesized)
ggaagaaagacaaccaagaaacgtgaagaagaggtggacattgacttggatgatcctgagatcaaccacttccccttccctttccatgagctcatggtgtgggctgttctcatgaagcgg

SEQ ID NO: 82766 - DNA, 120 bp, Artificial Sequence
  ENSG00000083067_13 (sequence is synthesized)
cagaagatggccctgttcttctggcagcacggtgaggaggccatggccaaggccctggtggcctgcaagctctgcaaagccatggctcatgaggcctctgagaacgacatggttgacgac

SEQ ID NO: 82767 - DNA, 120 bp, Artificial Sequence
  ENSG00000083067_14 (sequence is synthesized)
atttcccaggagctgaatcacaattccagagactttggccagctggctgtggagctcctggaccagtcctacaagcaggacgaacagctggccatgaaactgctgacgtatgagctgaag

SEQ ID NO: 82768 - DNA, 120 bp, Artificial Sequence
  ENSG00000083067_15 (sequence is synthesized)
aactggagcaacgccacgtgcctgcagcttgccgtggctgccaaacaccgcgacttcatcgcgcacacgtgcagccagatgctgctcaccgacatgtggatgggccggctccgcatgcgc

SEQ ID NO: 82769 - DNA, 120 bp, Artificial Sequence
  ENSG00000083067_16 (sequence is synthesized)
aagaactcaggcctcaaggtaattctgggaattctacttcctccttcaattctcagcttggagttcaagaacaaagacgacatgccctatatgtctcaggcccaggaaatccacctccaa

SEQ ID NO: 82770 - DNA, 120 bp, Artificial Sequence
  ENSG00000083067_17 (sequence is synthesized)
gagaaggaggcagaagaaccagagaagcccacaaaggaaaaagaggaagaggacatggagctcacagcaatgttgggacgaaacaacggggagtcctccaggaagaaggatgaagaggaa

SEQ ID NO: 82771 - DNA, 120 bp, Artificial Sequence
  ENSG00000083067_18 (sequence is synthesized)
gttcagagcaagcaccggttaatccccctcggcagaaaaatctatgaattctacaatgcacccatcgtgaagttctggttctacacactggcgtatatcggatacctgatgctcttcaac

SEQ ID NO: 82772 - DNA, 120 bp, Artificial Sequence
  ENSG00000083067_19 (sequence is synthesized)
tatattttcaccctgggaatagaaaagatgagagagattctgatgtcagagccagggaagttgctacagaaagtgaaggtatggctgcaggagtactggaatgtcacggacctcatcgcc

SEQ ID NO: 82773 - DNA, 120 bp, Artificial Sequence
  ENSG00000083067_20 (sequence is synthesized)
atccttctgttttctgtcggaatgatccttcgtctccaagaccagcccttcaggagtgacgggagggtcatctactgcgtgaacatcatttactggtatatccgtctcctagacatcttc

SEQ ID NO: 82774 - DNA, 120 bp, Artificial Sequence
  ENSG00000083067_21 (sequence is synthesized)
ggcgtgaacaagtatttgggcccgtatgtaatgatgattggaaaaatgatgatagacatgatgtactttgtcatcattatgctggtggttctgatgagctttggggtcgccaggcaagcc

SEQ ID NO: 82775 - DNA, 120 bp, Artificial Sequence
  ENSG00000083067_22 (sequence is synthesized)
atcctttttcccaatgaggagccatcatggaaactggccaagaacatcttctacatgccctattggatgatttatggggaagtgtttgcggaccagatagaccctccctgtggacagaat

SEQ ID NO: 82776 - DNA, 120 bp, Artificial Sequence
  ENSG00000083067_23 (sequence is synthesized)
gagacccgagaggatggtaaaataatccagctgcctccctgcaagacaggagcttggatcgtgccggccatcatggcctgctacctcttagtggcaaacatcttgctggtcaacctcctc

SEQ ID NO: 82777 - DNA, 120 bp, Artificial Sequence
  ENSG00000083067_24 (sequence is synthesized)
attgctgtctttaacaatacattttttgaagtaaaatcgatatccaaccaagtctggaagtttcagaggtatcagctcatcatgactttccatgaaaggccagttctgcccccaccactg

SEQ ID NO: 82778 - DNA, 120 bp, Artificial Sequence
  ENSG00000083067_25 (sequence is synthesized)
atcatcttcagccacatgaccatgatattccagcacctgtgctgccgatggaggaaacacgagagcgacccggatgaaagggactacggcctgaaactcttcataaccgatgatgagctc

SEQ ID NO: 82779 - DNA, 120 bp, Artificial Sequence
  ENSG00000083067_26 (sequence is synthesized)
aagaaagtacatgactttgaagagcaatgcatagaagaatacttcagagaaaaggatgatcggttcaactcatctaatgatgagaggatacgggtgacttcagaaagggtggagaacatg

SEQ ID NO: 82780 - DNA, 120 bp, Artificial Sequence
  ENSG00000083067_27 (sequence is synthesized)
tctatgcggctggaggaagtcaacgagagagagcactccatgaaggcttcactccagaccgtggacatccggctggcgcagctggaagaccttatcgggcgcatggccacggccctggag

SEQ ID NO: 82781 - DNA, 120 bp, Artificial Sequence
  ENSG00000083067_28 (sequence is synthesized)
cgcctgacaggtctggagcgggccgagtccaacaaaatccgctcgaggacctcgtcagactgcacggacgccgcctacattgtccgtcagagcagcttcaacagccaggaagggaacacc

SEQ ID NO: 82782 - DNA, 120 bp, Artificial Sequence
  ENSG00000083067_29 (sequence is synthesized)
ttcaagctccaagagagtatagaccctgcaggtgaggagaccatgtccccaacttctccaaccttaatgccccgtatgcgaagccattctttctattcggtcaatatgaaagacaaaggt

SEQ ID NO: 82783 - DNA, 120 bp, Artificial Sequence
  ENSG00000083067_30 (sequence is synthesized)
ggtatagaaaagttggaaagtatttttaaagaaaggtccctgagcctacaccgggctactagttcccactctgtagcaaaagaacccaaagctcctgcagcccctgccaacaccttggcc

SEQ ID NO: 82784 - DNA, 120 bp, Artificial Sequence
  ENSG00000083067_31 (sequence is synthesized)
attgttcctgattccagaagaccatcatcgtgtatagacatctatgtctctgctatggatgagctccactgtgatatagaccctctggacaattccgtgaacatccttgggctgggcgag

SEQ ID NO: 82785 - DNA, 120 bp, Artificial Sequence
  ENSG00000083067_32 (sequence is synthesized)
ccaagcttttcaactccagtaccttccacagccccttcaagtagtgcctatgcaacacttgcacccacagacagacctccaagccggagcattgattttgaggacatcacctccatggac

SEQ ID NO: 82786 - DNA, 120 bp, Artificial Sequence
  ENSG00000083067_33 (sequence is synthesized)
actagatctttttcttcagactacacccacctcccagaatgccaaaacccctgggactcagagcctccgatgtaccacaccattgagcgttccaaaagtagccgctacctagccaccaca

SEQ ID NO: 82787 - DNA, 120 bp, Artificial Sequence
  ENSG00000083067_34 (sequence is synthesized)
ccctttcttctagaagaggctcccattgtgaaatctcatagctttatgttttccccctcaaggagctattatgccaactttggggtgcctgtaaaaacagcagaatacacaagtattaca

SEQ ID NO: 82788 - DNA, 120 bp, Artificial Sequence
  ENSG00000083067_35 (sequence is synthesized)
gactgtattgacacaaggtgtgtcaatgcccctcaagcaattgcggacagagctgccttccctggaggtcttggagacaaagtggaggacttaacttgctgccatccagagcgagaagca

SEQ ID NO: 82789 - DNA, 120 bp, Artificial Sequence
  ENSG00000083067_36 (sequence is synthesized)
gaactgagtcaccccagctctgacagtgaggagaatgaggccaaaggccgcagagccaccattgcaatatcctcccaggagggtgataactcagagagaaccctgtccaacaacatcact

SEQ ID NO: 82790 - DNA, 120 bp, Artificial Sequence
  ENSG00000083067_37 (sequence is synthesized)
gttcccaagatagagcgcgccaacagctactcggcagaggagccaagtgcgccatatgcacacaccaggaagagcttctccatcagtgacaaactcgacaggcagcggaacacagcaagc

SEQ ID NO: 82791 - DNA, 120 bp, Artificial Sequence
  ENSG00000083067_38 (sequence is synthesized)
ctgcgaaatcccttccagagaagcaagtcctccaagccggagggccgaggggacagcctgtccatgaggagactgtccagaacatcggctttccaaagctttgaaagcaagcacaactaa

SEQ ID NO: 82792 - DNA, 120 bp, Artificial Sequence
  ENSG00000083067_39 (sequence is synthesized)
atggggaagaagtggagggatgcggcggaaatggagcggggctgctccgaccgcgaggacaacgcggagagccgcagacgcagccggagcgccagccggggcaggtttgccgagtcgtgg

SEQ ID NO: 82793 - DNA, 120 bp, Artificial Sequence
  ENSG00000083067_40 (sequence is synthesized)
aaaaggttaagttccaagcaggggtccaccaaacgctcgggactcccgtcgcagcagacgccggctcagaaatcctggatagaaagagcattttataaaagagaatgtgtccacatcata

SEQ ID NO: 82794 - DNA, 120 bp, Artificial Sequence
  ENSG00000083067_41 (sequence is synthesized)
cccagcaccaaagacccccataggtgttgctgtgggcgtctgataggccagcatgttggcctcacccccagtatctccgtgcttcagaatgagaaaaatgaaagtcgcctctcccgaaat

SEQ ID NO: 82795 - DNA, 120 bp, Artificial Sequence
  ENSG00000083067_42 (sequence is synthesized)
agctgcagcaaaatgaaagcaacaggagctgctccggggactgcttttgccagtacccagaatcagtgctcaggctcagaaatcctggatagaaagagcattttataaaagagaatgtgt

SEQ ID NO: 82796 - DNA, 120 bp, Artificial Sequence
  ENSG00000083067_43 (sequence is synthesized)
agtttttcccctttccttgaatcatacctgctttattcttagctgagcaaaacaagcaatgctttgggaggtgttaactcaaaggtgacttctgggccacagatcaagaaagcatttgat

SEQ ID NO: 82797 - DNA, 120 bp, Artificial Sequence
  ENSG00000083067_44 (sequence is synthesized)
ctgacccagtgccagacacaggggatttaaggcatgttcacacttgctgggcagggagggggaagagagggagaaggaagggttagagatgaatgtgtatccgcagtcacagcagaaagc

SEQ ID NO: 82798 - DNA, 120 bp, Artificial Sequence
  ENSG00000083067_45 (sequence is synthesized)
catgagagcaggggaaacaaggggcttcgagcacgctccatgccaggaggcatctgttgatttctgaccattatcaagagttgtaggatgcagggctaaattgcaaaataaaataaaata

SEQ ID NO: 82799 - DNA, 120 bp, Artificial Sequence
  ENSG00000083067_46 (sequence is synthesized)
gccagcgtacacaatgagatattctaaacttccattctgttttcttttcacattggctccatcactggtgactgatgaagagcatcctctttattcagtataagccggcagcaagcagtt

SEQ ID NO: 82800 - DNA, 120 bp, Artificial Sequence
  ENSG00000083067_47 (sequence is synthesized)
ctacctaacgtcccacatccttctcatgccaacacttctgtaattgatcattataaagaaaaaacaaggtaacagtcatagttcacctgtctcttatctattcacttctggtgccacaac

SEQ ID NO: 82801 - DNA, 120 bp, Artificial Sequence
  ENSG00000083067_48 (sequence is synthesized)
tgtttatccttttttgaagaaaataagggaacagaaatgcctttttgtattgcaatcgaaatgaaagaagagttgatgttaaaaaaacaaaagtcaagtgatttattatatacagtgggc

SEQ ID NO: 82802 - DNA, 120 bp, Artificial Sequence
  ENSG00000083067_49 (sequence is synthesized)
gttcaagtctagtcgagcaagctcaggagaatgtaattaaataattttatattttttaatttattttgtatctcacctgtcatggatgaattcattcactgaatatgtaatattgaactt

SEQ ID NO: 82803 - DNA, 120 bp, Artificial Sequence
  ENSG00000083067_50 (sequence is synthesized)
tccgaccacaggctgttttgtgcaggctgtccctcttcttcaaaatcgtgcatcccctccccgaagcagcaggcagtgtgcctccattcagccacatttggtatgcatgagcacggctgc

SEQ ID NO: 82804 - DNA, 120 bp, Artificial Sequence
  ENSG00000083067_51 (sequence is synthesized)
agagagaggggaggtggctgttttaagaaggttcaggggctcaggcaaggctacttgactagtcttccaagttccaggaagcctctgccctaatggaatttgcaggtgtggagatgacca

SEQ ID NO: 82805 - DNA, 120 bp, Artificial Sequence
  ENSG00000083067_52 (sequence is synthesized)
tgggatgccagagccgtgggggaccgtttattttctaggcattgctcaggttttcagtttcttgttttcctggtggaatttggaaggggtcatgaatcaggctgatgctcctcgacccct

SEQ ID NO: 82806 - DNA, 120 bp, Artificial Sequence
  ENSG00000083067_53 (sequence is synthesized)
tttgcatggctccaccacgtcctcctgaacacctccaagacgtaactgccaatttttcacaccactcatcacatgaccattttgtatatgaatatatggttatatgtggatattttcata

SEQ ID NO: 82807 - DNA, 120 bp, Artificial Sequence
  ENSG00000083067_54 (sequence is synthesized)
cctagagttttgccatctaatctgagctcagcataaatttaattggagtttttcaagggctggtatcttttctatggaaatgttccaaagtactttttaaggaagtttcaaaactataaa

SEQ ID NO: 82808 - DNA, 120 bp, Artificial Sequence
  ENSG00000083067_55 (sequence is synthesized)
taaccttagatttgactgggagtttggtatcaacccaaagccatcagttgcaagcataccatgaatatttttcttatagacagagctataaaaaaagatacagtagaccaaaatagaaag

SEQ ID NO: 82809 - DNA, 120 bp, Artificial Sequence
  ENSG00000083067_56 (sequence is synthesized)
caaataaaccatataaagagttctatagtatatgccacttatacacatgtatatgcatttatgcagagacacatatttatatataaaataaatggacataaagagctttcttaagaggct

SEQ ID NO: 82810 - DNA, 120 bp, Artificial Sequence
  ENSG00000083067_57 (sequence is synthesized)
tggacttttctatcaccttgaagtataatcaagattttttttaatatacaagaagttccattgaaagagttcattatactattagaccaaatgttgaaattatgaattttttaaattcct

SEQ ID NO: 82811 - DNA, 120 bp, Artificial Sequence
  ENSG00000083067_58 (sequence is synthesized)
atgacttttcctcatatcaaactagagttgtcaaaatgactcactgctcgccttctgcccttttttgtctgaaatcactcactatcaggacatctcatttagtctcgcttttcctaaaca

SEQ ID NO: 82812 - DNA, 120 bp, Artificial Sequence
  ENSG00000083067_59 (sequence is synthesized)
aagtttttacaccacgtacaatctgaatagacacgcaactttaaaccagctagtgttacagactctaaagtagaggcataatcttctagatcagaatctggattggaagtgggataaaga

SEQ ID NO: 82813 - DNA, 120 bp, Artificial Sequence
  ENSG00000083067_60 (sequence is synthesized)
aatcttgaccccaaatctttggattcctatttggctcattaacgtttaaaaaagaataaagcctttaaggaaaacaatctattgttcctggcctgagatactacctggttcttttgttta

SEQ ID NO: 82814 - DNA, 120 bp, Artificial Sequence
  ENSG00000083067_61 (sequence is synthesized)
attataattgaaaacaccaagttttactttattttgtgaaatcaagtaaatacatggcctttaaatataagataaaaaacaaaataaaaactcttctgaataagcatttcaggtataaaa

SEQ ID NO: 82815 - DNA, 120 bp, Artificial Sequence
  ENSG00000083067_62 (sequence is synthesized)
attgtgatgaggtcacatatgtaaagaattaaacaattcctttttcactccttggcatttaggtgaattgctaacaaacacccagactcccttatttacagctgttctagaaacacttaa

SEQ ID NO: 82816 - DNA, 120 bp, Artificial Sequence
  ENSG00000083067_63 (sequence is synthesized)
cattttattgggccccacgctggctatttccctctcagcaaacatgcactgggtctgagaataaatcagtcgttcttaaacttccttgagtcatgaatccctacgaggctctacgataac

SEQ ID NO: 82817 - DNA, 120 bp, Artificial Sequence
  ENSG00000083067_64 (sequence is synthesized)
tctaggctctctctccagaaagaaaaaaaaaatgtacataatgcaaagttgcaatataacttgaaagggttcatgagcccctggttctatattgattatgagggaaaggaaccatgtttg

SEQ ID NO: 82818 - DNA, 120 bp, Artificial Sequence
  ENSG00000083067_65 (sequence is synthesized)
ctcgtagttaatgcagttgtaataggcactttacatttgagaccatctctctgtgattctcaggaaggccaaatctcagcaccagagtttgaacaaagattttgttatttttgttcttta

SEQ ID NO: 82819 - DNA, 120 bp, Artificial Sequence
  ENSG00000083067_66 (sequence is synthesized)
aattagatgttgccaatttaatgcacttacatcctaacatgttgatgattttaagtatcaagcacaatcacaatgctgaagtctccctgaagggtctatagaggaatccaagaaggaggt

SEQ ID NO: 82820 - DNA, 120 bp, Artificial Sequence
  ENSG00000083067_67 (sequence is synthesized)
gaaaacattattcattgacatcaaacacctccaaggcctcattctgggccagattggaagtgagggaaagaaattttcagctcaagtgtttccattcatcgtgatttcagagagaaaagg

SEQ ID NO: 82821 - DNA, 120 bp, Artificial Sequence
  ENSG00000083067_68 (sequence is synthesized)
ataggaactgggaaacgaaatactcaacagtcctgatcttgcaattacctgattcttttgttgtgcatgaaaattaagttctaacgtctgtgaaacgtgtgaaatatataagccaaactt

SEQ ID NO: 82822 - DNA, 120 bp, Artificial Sequence
  ENSG00000083067_69 (sequence is synthesized)
aaatgactgtagacacaaactgtgtaacttccatgagccatttccttcctgtgcacatgtatgtgtgttatttttcagtccatttccttccatttctgggttctctgtgcagcaatgtgg

SEQ ID NO: 82823 - DNA, 120 bp, Artificial Sequence
  ENSG00000083067_70 (sequence is synthesized)
cattgattctgtggccttgtgcagtcagcttatgctcagcccattgattccaccacatccctgatcgaggggacgttaattacctgtctttgtgaattaagcagtttatgagcagcaagt

SEQ ID NO: 82824 - DNA, 120 bp, Artificial Sequence
  ENSG00000083067_71 (sequence is synthesized)
tactgaggaccgtaaataaagtcatagagagctcaaggaagtaatagcttcggtttaatcatctgcttcaaaggtgccaatttttacatactactatatgtaatgatttgttctaaattg

SEQ ID NO: 82825 - DNA, 120 bp, Artificial Sequence
  ENSG00000083067_72 (sequence is synthesized)
cttgttccttttgaaaaaaatttaaggatgttttatgaaaatgaccatggaggtctcctgcttaaccaatatactttatatttatagttagagggcccctccttgatagatttgaatgag

SEQ ID NO: 82826 - DNA, 120 bp, Artificial Sequence
  ENSG00000083067_73 (sequence is synthesized)
gagctggaaagcttgggtacaattttcatgactagtttgtattatctctgcaagccaaaaggtgtattagcagtcagaatacagcactttacagaactggattttttaaatgtataagtt

SEQ ID NO: 82827 - DNA, 120 bp, Artificial Sequence
  ENSG00000083067_74 (sequence is synthesized)
tccaggtctaggatattatttagcactttgaaagttccccttttaaaatatatatataagaataatcaaacgagaaaaatgtactcataaaaacacaaaatgtgtttcttctgaatgttt

SEQ ID NO: 82828 - DNA, 120 bp, Artificial Sequence
  ENSG00000083067_75 (sequence is synthesized)
caaatgtattctaaaatatggtttctatagataatattatggtagataactggatagtacttttttactttctgagtctgtacagtctaatcttcctgaatgtttgggctgtttaatttc

SEQ ID NO: 82829 - DNA, 120 bp, Artificial Sequence
  ENSG00000083067_76 (sequence is synthesized)
tttaaagatgataaatattacccggtcatccatcatgctctatctataggctataccattcatatgttgggcaatgctgtattataaaacacatgtaaacatgtatgtaacccatgttta

SEQ ID NO: 82830 - DNA, 120 bp, Artificial Sequence
  ENSG00000083067_77 (sequence is synthesized)
acccagcgtagttgtagcatgtggttgtattaatgaacgttacaggagagctttataatcatttataaatctgtaacattcaataaagaaacacatgttgcaatgattaattatgttccc

SEQ ID NO: 82831 - DNA, 120 bp, Artificial Sequence
  ENSG00000083067_78 (sequence is synthesized)
aattccatgttatttagcatctttgtgaaccgggcatttttgttcctgatctgcttgatgcttttcatgttcctttggaccactgtaaaatatgtgtgtaagctgatgtatatcctctaa

SEQ ID NO: 82832 - DNA, 120 bp, Artificial Sequence
  ENSG00000083067_79 (sequence is synthesized)
tgagtcctgcgagctgtggtaggcaagttgtgattttgtgaaagatgaactggcatgttatgcaaaagactatatgacaaatgaacttaaaatgatattttaaactccagttgaattagc

SEQ ID NO: 82833 - DNA, 120 bp, Artificial Sequence
  ENSG00000083067_80 (sequence is synthesized)
tgtttacatctgccaaccccatgcagaagcagtgtacagtattttataaatatgttcatttagtaacactatgttgtttctagataaagtgatactagtgtgtaggtggttatatatttg

SEQ ID NO: 82834 - DNA, 120 bp, Artificial Sequence
  ENSG00000083067_81 (sequence is synthesized)
gcctagatattgcattataactcactatccttgaacaataacaatgtgactgaaatgaagtaatctctctccaaacctggtcttaattttgtgtcaacaaaatgcatgcactgctttatg

SEQ ID NO: 82835 - DNA, 120 bp, Artificial Sequence
  ENSG00000083067_82 (sequence is synthesized)
catttcttttgacttttctaaggcacttaacattttactattgcctgctgtgacgcttaagccagttaagaattcactcaaacagttgggcttcttactatggggattatgttcagtttt

SEQ ID NO: 82836 - DNA, 120 bp, Artificial Sequence
  ENSG00000083067_83 (sequence is synthesized)
gaaaaattaaaaacaaaaaaaaagtaaccaagggatttttaaatcttttttttaagcactgaacaaataatatgaaataaagtattaactgcaggttgtatagccatgggacccagaggt

SEQ ID NO: 82837 - DNA, 120 bp, Artificial Sequence
  ENSG00000083067_84 (sequence is synthesized)
ggcaagccaacacctcttgggtctgccaaggtctaggtgttgtgcatctgtgatatatgcaagacacatttctgattcttcagagctactgggtgcaaattgctaagccggagatgagag

SEQ ID NO: 82838 - DNA, 120 bp, Artificial Sequence
  ENSG00000083067_85 (sequence is synthesized)
cgaaaagtccatttgtgatagtgcagaagtgcgcagatcgctgtgaatgtgtgatccaatgatatgacaagagacctccctccttgtcttgtggcttcttcaccttgggggtgggaggcg

SEQ ID NO: 82839 - DNA, 120 bp, Artificial Sequence
  ENSG00000083067_86 (sequence is synthesized)
tgtgtttgggtgtctgatgaagcactgggtggttctaaagagtttactcttttagaaaatcatcattactagaagccattcaacatctgttaaagagaggagccaatttgcacagttttg

SEQ ID NO: 82840 - DNA, 120 bp, Artificial Sequence
  ENSG00000083067_87 (sequence is synthesized)
aaaatgactgctcctaaaatgagtagacaaaactttcctctcagcctgcattgacctaagctttctcttctttttacaagttggatattctgtctctcagattggagtcaaccaaaagaa

SEQ ID NO: 82841 - DNA, 120 bp, Artificial Sequence
  ENSG00000083067_88 (sequence is synthesized)
aggctggttccaattaaggaaaagcaatttttttcttttaattcctctcagaaggtagttgtgttaccttttctctgatgatttccttgcactcatcactgctaatgaaagcaacgtgac

SEQ ID NO: 82842 - DNA, 120 bp, Artificial Sequence
  ENSG00000083067_89 (sequence is synthesized)
tgtttctacaggtcatctaagagaggattttggtgaccaggtaatccagatggcaataagaatgaggtgaattttcccttccttaccttacctagtctaccagcctccttaaacctgcag

SEQ ID NO: 82843 - DNA, 120 bp, Artificial Sequence
  ENSG00000083067_90 (sequence is synthesized)
gcccttgtgcgtttgcacaatgtttgtgtgctggaaactgaaaagacatgtgtatggctagaagtccataggctttgtaaagagtgtcagtgccaatcaggacccatgccttcctctgga

SEQ ID NO: 82844 - DNA, 120 bp, Artificial Sequence
  ENSG00000083067_91 (sequence is synthesized)
ggagacaggtggctgaggcctatggggcaaagggggaaattcagccttgtgcctggatgtgcggctttctttctcccctcttcttgcttctcttctcttagtctaagactagctgctttt

SEQ ID NO: 82845 - DNA, 120 bp, Artificial Sequence
  ENSG00000083067_92 (sequence is synthesized)
tcaccagaccaacagacccttgcccacattacctttataccttgttgaccctcgcacagtaagctgaaacagcggccgcttggaaaaaggcaaacatttagactttgtcccaggcctgat

SEQ ID NO: 82846 - DNA, 120 bp, Artificial Sequence
  ENSG00000083067_93 (sequence is synthesized)
cttcccaccaacttagcctcctcctgcctctaccccggctggtgttcacattgacctcgtccaatttttgcctctctaaatctcaagagtcctacacatcttcaccgcagcttcccacac

SEQ ID NO: 82847 - DNA, 120 bp, Artificial Sequence
  ENSG00000083067_94 (sequence is synthesized)
atcattaaaaccagccatctgcacatagactgagaggctgcaaattcaaacacatggaggggccggatccagaaaacacaaatgtgtgaactggactggtgaaagtcaacagaagtaggg

SEQ ID NO: 82848 - DNA, 120 bp, Artificial Sequence
  ENSG00000083067_95 (sequence is synthesized)
tttgtaagtaaggcatgacagaatacacatcccaccacaaacaccttcaaattcagctttccaaacactgtcctagccaaacaaacatgtctgccagcagcattcagtcccaaaggcaat

SEQ ID NO: 82849 - DNA, 120 bp, Artificial Sequence
  ENSG00000083067_96 (sequence is synthesized)
agtttgggacctctgatttagagccaacaggatcagattcttgatagtgacttggtgagtgtacacacaaaatacactgagaaccgagaggggggaaaagaaactcgccttattcagagt

SEQ ID NO: 82850 - DNA, 120 bp, Artificial Sequence
  ENSG00000083067_97 (sequence is synthesized)
tactcttgttctgaatgatatatgcatgtatatttgttagccacataattctaaacttgaacacagagtctttgtgagagagattcagaagaagagtaccatagcatggtatgaagactt

SEQ ID NO: 82851 - DNA, 120 bp, Artificial Sequence
  ENSG00000083067_98 (sequence is synthesized)
acctgcttcctgtcactactgcgtctgacctgagtttatattgctgctaccgctgtgtaaaaacagtacgtgcagtatactgtactcatagccatttcataatataggacctagactctc

SEQ ID NO: 82852 - DNA, 120 bp, Artificial Sequence
  ENSG00000083067_99 (sequence is synthesized)
atttgtaaacgttctaaccctagtttataatgggggaaattattcagatatcatttttaaatgaattcctacaaatacaatggttttaaaattgggtttgctgaatatatatacatcttt

SEQ ID NO: 82853 - DNA, 120 bp, Artificial Sequence
  ENSG00000083067_100 (sequence is synthesized)
tccttctttgtgtatggatggaccacggtatgcatatctatcgacactataaatatatataaatccttagaagaattgttcttttttaaaggtctattattggattcacaatgcactttg

SEQ ID NO: 82854 - DNA, 120 bp, Artificial Sequence
  ENSG00000083067_101 (sequence is synthesized)
agtttgattgtttagatatacaattcagagcagaagttggcagataccacgggaaaaactttctgaaatttctgtaacaaatgttttgcaataaaaaaaaaaactcagtagtttaaaaca

SEQ ID NO: 82855 - DNA, 120 bp, Artificial Sequence
  ENSG00000083067_102 (sequence is synthesized)
gcggctcaaaatatataaccaatctaaaaagagaaagaaaaaaggaagaggaaagcaaaggtatttagaagtgaaatggtgctagttgatggcgaatgacggtcctctcagctgagaggc

SEQ ID NO: 82856 - DNA, 120 bp, Artificial Sequence
  ENSG00000083067_103 (sequence is synthesized)
agggttccaggggccagcattggaagctcagcatctgcagtgtcctaccccagcttccttcgactttacagttggaatgaacagcctttaaagagtcctaacctcccacttgtcttgatt

SEQ ID NO: 82857 - DNA, 120 bp, Artificial Sequence
  ENSG00000083067_104 (sequence is synthesized)
gatttttacttttttaaagtccttgaattcttcctcaagtgaaatctcaggtagaggtgcaatatgtaatacagacaaggtgcgggtttactctgtcaaagctgggataggaggcctaga

SEQ ID NO: 82858 - DNA, 120 bp, Artificial Sequence
  ENSG00000083067_105 (sequence is synthesized)
ccatgattctcaaattttattctgcatcagaatcacccagagggcttgtgaaaataaatggctatacaggaggaacgagttgaggagatgtatcgtacatcatggggactatagtcaata

SEQ ID NO: 82859 - DNA, 120 bp, Artificial Sequence
  ENSG00000083067_106 (sequence is synthesized)
acaatatattgtatacttgaaaattgctgagaatagatttcaagttttctcaccataataaaatgaaagtatgtgagttaatgcatatgttaattagcttgatctagccattccacagtg

SEQ ID NO: 82860 - DNA, 120 bp, Artificial Sequence
  ENSG00000083067_107 (sequence is synthesized)
cacatatcaaaacataccataaataccataaatacatacaatttttgtcaattagatatgcattttttaaaataagaggaaaaaactacaaaaaaaaaaatctcacaattgctggctcca

SEQ ID NO: 82861 - DNA, 120 bp, Artificial Sequence
  ENSG00000083067_108 (sequence is synthesized)
cccccagattttctaattcaataaatctggttgaggtcaggtaatttgcatttcaaaggaatacttaggcgatgctatgcttttggtccagagacgatactttcagaactattttcctag

SEQ ID NO: 82862 - DNA, 120 bp, Artificial Sequence
  ENSG00000083067_109 (sequence is synthesized)
ggcctcctttctgcctggctctcacctacaaaggcagctctgaggcagctgtggagctcctcctcaaaattccgggggcttctttgtgaaactccattgaagacccctgacctacaggtc

SEQ ID NO: 82863 - DNA, 120 bp, Artificial Sequence
  ENSG00000083067_110 (sequence is synthesized)
aagatcacattcctttgcttggactcaagatccactgtatcctggccccagcttttctctagagccagctctcactcaacaaaccttccattcaccctacaacccaatggagctgtcctc

SEQ ID NO: 82864 - DNA, 120 bp, Artificial Sequence
  ENSG00000083067_111 (sequence is synthesized)
cccactgttctccaagcacttcctgctgtcacaaggcttctctgccttaccatgagatgcacaaatgcatttctttacccatttaatttctagtaaatttttctctgaagtttcacaaac

SEQ ID NO: 82865 - DNA, 120 bp, Artificial Sequence
  ENSG00000083067_112 (sequence is synthesized)
tagcctctctcacaaaaagatgtagtaagggctttaaaacccacaaatttatctgagtgaggtgcaaataataaaatgtactggtgtttcattcctttcctttagaggaaatagattctg

SEQ ID NO: 82866 - DNA, 120 bp, Artificial Sequence
  ENSG00000083067_113 (sequence is synthesized)
aatcaacctggctgacattaggatctacagctgctagggatacagtggattaatgccttacctagtggtattattaataataaataatgtttgggatgtttttaatggattttctccaga

SEQ ID NO: 82867 - DNA, 120 bp, Artificial Sequence
  ENSG00000083067_114 (sequence is synthesized)
ttcctcatgcaattctcagatgttggtcacggaccacaggatttatgaaaactatatagagcagtgaacacatgctataaaagcttcttcagtcagagaaacactaaaaatgcattaaag

SEQ ID NO: 82868 - DNA, 120 bp, Artificial Sequence
  ENSG00000083067_115 (sequence is synthesized)
taggatttcaagattaactcaagtctgcactactgttgtctagaaaagtctccattcagtttcaataacatctttttgcactatcctaattgttggacaactctcttagagtcgatgtac

SEQ ID NO: 82869 - DNA, 120 bp, Artificial Sequence
  ENSG00000083067_116 (sequence is synthesized)
atatttattatgttttcttgggatattccatgcaaagcaagtgtccattcatgagcataaacctctaaaagtcttgagtaagcagtaaataatccattcctctaaatccatagaaccatg

SEQ ID NO: 82870 - DNA, 120 bp, Artificial Sequence
  ENSG00000083067_117 (sequence is synthesized)
attcagtgtcttggagacaaacttaaaatttggagttgtttaagcctatcatctccttggtttttgccatttgatagtaaatttgagattttattatctctaatgcattgatgacaaata

SEQ ID NO: 82871 - DNA, 120 bp, Artificial Sequence
  ENSG00000083067_118 (sequence is synthesized)
cagttgacccttgaatgacatgaggttagagttgccaaccccccatgtggtcaaaaatccatgtataacttttgacttcccaaaaacgtaactactaatagttcatcattggccaaaagc

SEQ ID NO: 82872 - DNA, 120 bp, Artificial Sequence
  ENSG00000083067_119 (sequence is synthesized)
caaaaacgtaactactaatagttcatcattggccaaaagccttactagtaacatatcaacatacattttgtatgttacatgtataatatatttttacaataaagtaagctagagaaaaga

SEQ ID NO: 82873 - DNA, 120 bp, Artificial Sequence
  ENSG00000083067_120 (sequence is synthesized)
tattcattaagtggaagagatcatcataaaggtcttcatcattgtcgttttcatattgaataggctgaagaggaggaggaagaagaggaggggttggtcttgctatctcaggggtggcag

SEQ ID NO: 82874 - DNA, 120 bp, Artificial Sequence
  ENSG00000083067_121 (sequence is synthesized)
aggaagaaaaaaaattagagtgtaagtgaacccgcacagttcaaacccctgttgttcaagggtaaactgtagtttaaatctgagtgtcaactccaataaattggtagaggcttcctggaa

SEQ ID NO: 82875 - DNA, 120 bp, Artificial Sequence
  ENSG00000083067_122 (sequence is synthesized)
taactttccaggccccatggaagaaccctaaagcctgtttggaaacgagggtatgagtggattatgttttcagtagctcaaccaagacctcaaatcaaaacaagctatgaacaaattgtc

SEQ ID NO: 82876 - DNA, 120 bp, Artificial Sequence
  ENSG00000083067_123 (sequence is synthesized)
taaaaaatgtctgtcatgggagggctgtggtgaagaacagagaaacatattctaaatgtcctgtgaagtgggaaattctatgaaagctacacggataataaaaagggtgaggaaaagaga

SEQ ID NO: 82877 - DNA, 120 bp, Artificial Sequence
  ENSG00000083067_124 (sequence is synthesized)
gaagatgatgccatgtagaaataacattaaatgttgctctagcaacttccatcttaaaggcttagagaaggaatcctctgagcagctcattgaatttcatgggagactccgctgccattg

SEQ ID NO: 82878 - DNA, 120 bp, Artificial Sequence
  ENSG00000083067_125 (sequence is synthesized)
agcatctgttcatcatcctcatggagtgcatgaagaagaaggaattggtaggtaattccgcatgggtggccagctgtctccacattttcagtcattttcttgaatcacacaacattttct

SEQ ID NO: 82879 - DNA, 120 bp, Artificial Sequence
  ENSG00000083067_126 (sequence is synthesized)
caaatcatgcaacattctctctttctggccgagcttacagctctcctcaggctccattggctccagtagcttcctctcctaagtaactaagacactgcttttactgccttcgagttaata

SEQ ID NO: 82880 - DNA, 120 bp, Artificial Sequence
  ENSG00000083067_127 (sequence is synthesized)
aggtgtgtgcagcagagttttagcatcatttccttttggagctcatccaaacgctctgactgcctcaacaaaatgagttgaagtgataaaattggtcccctcctggagaacgcttcagct

SEQ ID NO: 82881 - DNA, 120 bp, Artificial Sequence
  ENSG00000083067_128 (sequence is synthesized)
tgatcttcttaggtttcggatttcattttgcttggaagtcatgaaccactgaggtgctttctgtcaaatagctttaatgacaaagggtccaggctgttacactaatctgtacaggtagaa

SEQ ID NO: 82882 - DNA, 120 bp, Artificial Sequence
  ENSG00000083067_129 (sequence is synthesized)
aacggagaaacataagaaatcctggaggaatctaaaatcagagcaaaatgtgtttctaaaatcagagcaaaatgtcttacaaatgtggtatgatcagagaccctgctagggtgaacaaaa

SEQ ID NO: 82883 - DNA, 120 bp, Artificial Sequence
  ENSG00000083067_130 (sequence is synthesized)
tcatgtgattttgttctctgcttactcaaacatttaacaagaacttgctatctgccaagcagggagcaagatctttatgcatataaactcatatgacctttgcaactgtcctgatgagag

SEQ ID NO: 82884 - DNA, 120 bp, Artificial Sequence
  ENSG00000083067_131 (sequence is synthesized)
aggtacaattattaccctcatcttacagatgaggaaacccggctcatttgattagtaaatgaggagctaagactcaaaaccagtgatgtttaacctctgtatggagtatttttattcaga

SEQ ID NO: 82885 - DNA, 120 bp, Artificial Sequence
  ENSG00000083067_132 (sequence is synthesized)
aagtgtctcactgaagccaatgcagtggatcacccactctgggtagatgcccccaggcctcagccagagagactattctcaaaggtcagttaaacccaactgctgagagagatagcaaaa

SEQ ID NO: 82886 - DNA, 120 bp, Artificial Sequence
  ENSG00000083067_133 (sequence is synthesized)
gtaggaggtatgctgaaagtgaataactttaagtacaccatgcagcaatgtaataaaaacttgagcaagttttaaacatgaaccattatttctaccgggccagagcttagaatgagagga

SEQ ID NO: 82887 - DNA, 120 bp, Artificial Sequence
  ENSG00000083067_134 (sequence is synthesized)
agccatccagaggagaacaattggaggcgtaagaagtaattacacaattagtgactccagcttatgtatcatgtgtgaaaaattcaactccatctggggtatgtgtatgcagataagctt

SEQ ID NO: 82888 - DNA, 120 bp, Artificial Sequence
  ENSG00000083067_135 (sequence is synthesized)
tctcttcagacttttccttcatcatctgcatggtactccaaggagaaaagtttctatttattaagctctttttggtggctaaacagaaaagcaaaagaatcagattttgatcttagcacc

SEQ ID NO: 82889 - DNA, 120 bp, Artificial Sequence
  ENSG00000083067_136 (sequence is synthesized)
gatctggctgtgcaaaggcatttcaaagaaattgaacattcactctctaagctaaagcatcatgtgaaaatgtttctatttattaagctttttttggtggctaaacagaaatgtttctat

SEQ ID NO: 82890 - DNA, 120 bp, Artificial Sequence
  ENSG00000083067_137 (sequence is synthesized)
ttattaagagacaatgtttctatttattaagctttttttggtggctaaacagaaaagcaaaagaatcagattttgaacttagcaacgatctagctgtgcaaaggcatttcaaagaaattg

SEQ ID NO: 82891 - DNA, 120 bp, Artificial Sequence
  ENSG00000083067_138 (sequence is synthesized)
aacattcactctctaagctaaagcatcatgtgaaactatcttcatgaaattttaattgtctgaattttaagtatgtactcattgtctctagatacatatggatttagatatagatagatg

SEQ ID NO: 82892 - DNA, 120 bp, Artificial Sequence
  ENSG00000083067_139 (sequence is synthesized)
tatatgtgaaccacatagtacatagttacgctaatattatctcttaagcgcataggaatctctatttgctgtatttattgtgtaaacatttgttttaactgtgaaaggtagcatcatcaa

SEQ ID NO: 82893 - DNA, 120 bp, Artificial Sequence
  ENSG00000083067_140 (sequence is synthesized)
aacagcaatgctccccagatcactaagtggcttgcatttaaatgcaatttaggtatgaaagcaatctaccgtcccgcctcacaaaataaaattctatttgtttttataaagtaacaggtg

SEQ ID NO: 82894 - DNA, 120 bp, Artificial Sequence
  ENSG00000083067_141 (sequence is synthesized)
aggatgcatggcaagctcaaactttgtggtaattagatgtcccatcagggaaactttgatctaattgattgaaattccaaagtctacagttccaaagaacaaaagattccctttggctag

SEQ ID NO: 82895 - DNA, 120 bp, Artificial Sequence
  ENSG00000083067_142 (sequence is synthesized)
atgtactgtgattcaacttttccaaatgacttttcccttctctagatttttctctgcacctgtcccaaatgggtcttcattgccatcgccaccttcctccaaaaacagggatgttagatt

SEQ ID NO: 82896 - DNA, 120 bp, Artificial Sequence
  ENSG00000083067_143 (sequence is synthesized)
tatcagaccacagcttctccttcctacactctcttttctggtcccaccttttagggactgctactgtttaagtgtcatgtttcatggtttcatatttttcacagtgaaacctgaaataat

SEQ ID NO: 82897 - DNA, 120 bp, Artificial Sequence
  ENSG00000083067_144 (sequence is synthesized)
aaattttgtcctaggtctgaaataaaaattatattacgaaatttccttcccaaactgtctttggaaagaagaaacacaagtgttattatcccaaggtgaacatcttctggaaacaaaaag

SEQ ID NO: 82898 - DNA, 120 bp, Artificial Sequence
  ENSG00000083067_145 (sequence is synthesized)
agtagaaaagactagaaaatatacagagaccagcagagatcaaatgtaacaaagcactgtgatcaatgggtggtaggttttactgtaaatactaaaattgagttccattacagtacttga

SEQ ID NO: 82899 - DNA, 120 bp, Artificial Sequence
  ENSG00000083067_146 (sequence is synthesized)
tagaatgggcaaatgttatgtaatcagtgttatctatttaggtttttataagctgcagcatgactttctgtacaccatcaagttaagaacgagagcttaaataggactgagctagaagct

SEQ ID NO: 82900 - DNA, 120 bp, Artificial Sequence
  ENSG00000083067_147 (sequence is synthesized)
gaagaggataagagcaaggaaacaaggaataaattcagggtcaagttcagtacttggtaataagacaaaatcggtccagagaggcaaagcatgtcattgtggcaggccctggtggcagct

SEQ ID NO: 82901 - DNA, 120 bp, Artificial Sequence
  ENSG00000083067_148 (sequence is synthesized)
gggctggttagccagtagtgtgggtagcaggcctagggatgtgttcgtgtaagttacacacccagcaaaggggatgggagctggagttaaaaccccagccagagcctaggttttagtcaa

SEQ ID NO: 82902 - DNA, 120 bp, Artificial Sequence
  ENSG00000083067_149 (sequence is synthesized)
actttggcaccttccagaatgcctagaggaagggggttcctttttctaattgatcatcccagagggagtacccttttgcaatgtacgtgcctgaaggggtgactttcttcagaaatggga

SEQ ID NO: 82903 - DNA, 120 bp, Artificial Sequence
  ENSG00000083067_150 (sequence is synthesized)
gagctgctgcatatatggatggcactgcaggggaagtccagggaggctcatggacagtggcctggcctccctgaggagcagaggccaacagcacgcagctgaagagcagggcacggtgga

SEQ ID NO: 82904 - DNA, 120 bp, Artificial Sequence
  ENSG00000083067_151 (sequence is synthesized)
tggtcagcatgtcaggaatgctggaggagtcaccacccgatactagtccttgggtagatcatcagggacacatcacattccatttatggaaacaccaaacctttgctagattatcaaggc

SEQ ID NO: 82905 - DNA, 120 bp, Artificial Sequence
  ENSG00000083067_152 (sequence is synthesized)
aggtagtggcacatgggcacttgacaagcaggggcccgtcaggagtctagagtacaaaggaggggagaggcacggatccaggtaccacgggacttacttttgggactgtatttgtggctt

SEQ ID NO: 82906 - DNA, 120 bp, Artificial Sequence
  ENSG00000083067_153 (sequence is synthesized)
catagagacccacaggctcctcttccagtgaatatattaataattaaatggtaagaggagagttataaaagcccaagagaaattctgaagtcacaggaagtaaaaaggcccaaggtaagg

SEQ ID NO: 82907 - DNA, 120 bp, Artificial Sequence
  ENSG00000083067_154 (sequence is synthesized)
aatttgtgcatgagctgtagtgaatgtcaagagttagctcctatagcagttctacccctgaacttaatagtggtagggtgaccaacttgtctcagtttgcctgggactttgttaggttta

SEQ ID NO: 82908 - DNA, 120 bp, Artificial Sequence
  ENSG00000083067_155 (sequence is synthesized)
gccgtgaaagtcccaaatccctgggccccctcagtctgggcaaactgagataatgggtcgccctacaagagagtgactcataagtcattaggtcaacttccctcattactgtactcagcc

SEQ ID NO: 82909 - DNA, 120 bp, Artificial Sequence
  ENSG00000083067_156 (sequence is synthesized)
cccaaagtcggatggagcagcaagctccttagagggtagggagtgacccaggctctttgaagtaggtaaagcaggacctttgaggtctccattcaattaacagcaaaaaatgctcactga

SEQ ID NO: 82910 - DNA, 120 bp, Artificial Sequence
  ENSG00000083067_157 (sequence is synthesized)
gaacacaaaggcctctagaacagcactgacaaagacacaaagacaggcaaaaagcggacctggtcttaacatgaaaaacggcagaagaatacaaacctttaatgcaatcctcagtcagca

SEQ ID NO: 82911 - DNA, 120 bp, Artificial Sequence
  ENSG00000083067_158 (sequence is synthesized)
aaacctttaatgcaatcctcagtcagcaatttagaacagcaaatctactttctaacatggacactttgtggttcttccttttaaaaataaaattttatggccgggcacagtggctcacac

SEQ ID NO: 82912 - DNA, 120 bp, Artificial Sequence
  ENSG00000083093_0 (sequence is synthesized)
gcccgcgtgggtcagctgatcgcgcactgagggtgcgatcccgggctccccattccttcctggggcgcctccccggcccagggccaactgggtcccggtgtcggcaggcctggggtcggc

SEQ ID NO: 82913 - DNA, 120 bp, Artificial Sequence
  ENSG00000083093_1 (sequence is synthesized)
gacggctgctcttttcgttctgtcgcctgcccgatggacgagcctcccgggaagcccctcagctgtgaggagaaggaaaagttaaaggagaaattagcattcttgaaaagggaatacagc

SEQ ID NO: 82914 - DNA, 120 bp, Artificial Sequence
  ENSG00000083093_2 (sequence is synthesized)
aagacactagcccgccttcagcgtgcccaaagagctgaaaagattaagcattctattaagaaaacagtagaagaacaagattgtttgtctcagcaggatctctcaccgcagctaaaacac

SEQ ID NO: 82915 - DNA, 120 bp, Artificial Sequence
  ENSG00000083093_3 (sequence is synthesized)
tcagaacctaaaaataaaatatgtgtttatgacaagttacacatcaaaacccatcttgatgaagaaactggagaaaagacatctatcacacttgatgttgggcctgagtcctttaaccct

SEQ ID NO: 82916 - DNA, 120 bp, Artificial Sequence
  ENSG00000083093_4 (sequence is synthesized)
ggagatggcccaggaggattacctatacaaagaacagatgacacccaagaacattttccccacagggtcagtgaccctagtggtgagcaaaagcagaagctgccaagcagaagaaagaag

SEQ ID NO: 82917 - DNA, 120 bp, Artificial Sequence
  ENSG00000083093_5 (sequence is synthesized)
cagcagaagaggacatttatttcacaggagagagactgtgtctttggcactgattcactcagattgtctgggaaaagactaaaggaacaggaagaaatcagtagcaaaaatcctgctaga

SEQ ID NO: 82918 - DNA, 120 bp, Artificial Sequence
  ENSG00000083093_6 (sequence is synthesized)
tcaccagtaactgaaataagaactcaccttttaagtcttaaatctgaacttccagattctccagaaccagttacagaaattaatgaagacagtgtattaattccaccaactgcccaacca

SEQ ID NO: 82919 - DNA, 120 bp, Artificial Sequence
  ENSG00000083093_7 (sequence is synthesized)
gaaaaaggtgttgatacattcctaagaagacctaatttcaccagggcgactacagttcctttacagactctatcagatagcggtagtagtcagcaccttgaacacattcctcctaaaggt

SEQ ID NO: 82920 - DNA, 120 bp, Artificial Sequence
  ENSG00000083093_8 (sequence is synthesized)
agcagtgaacttactactcacgacctaaaaaacattagatttacttcacctgtaagtttggaggcacaaggcaaaaaaatgactgtctctacagataacctccttgtaaataaagctata

SEQ ID NO: 82921 - DNA, 120 bp, Artificial Sequence
  ENSG00000083093_9 (sequence is synthesized)
agtaaaagtggccaactgcccacaagttctaatttagaggcaaatatttcatgttctctaaatgaactcacctacaataacttaccagcaaatgaaaaccaaaacttaaaagaacaaaat

SEQ ID NO: 82922 - DNA, 120 bp, Artificial Sequence
  ENSG00000083093_10 (sequence is synthesized)
caaacagagaaatctttaaaatctcccagtgacactcttgatggcaggaatgaaaatcttcaggaaagtgagattctaagtcaacctaagagtcttagcctggaagcaacctctcctctt

SEQ ID NO: 82923 - DNA, 120 bp, Artificial Sequence
  ENSG00000083093_11 (sequence is synthesized)
tctgcagaaaaacattcttgcacagtgcctgaaggccttctgtttcctgcagaatattatgttagaacaacacgaagcatgtccaattgccagaggaaagtagccgtggaggctgtcatt

SEQ ID NO: 82924 - DNA, 120 bp, Artificial Sequence
  ENSG00000083093_12 (sequence is synthesized)
cagagtcatttggatgtcaagaaaaaagggtttaaaaataaaaataaggatgcaagtaaaaatttaaacctttccaatgaggaaactgaccaaagtgaaattaggatgtctggcacatgc

SEQ ID NO: 82925 - DNA, 120 bp, Artificial Sequence
  ENSG00000083093_13 (sequence is synthesized)
acaggacaaccaagttcaagaacctctcagaaacttctctcattaactaaagtcagctctcccgctgggcccactgaagataatgacttgtctaggaaggcagttgcccaagcacctggt

SEQ ID NO: 82926 - DNA, 120 bp, Artificial Sequence
  ENSG00000083093_14 (sequence is synthesized)
agaagatacacaggaaaaagaaaatcagcctgcaccccagcatcagatcattgtgaaccacttttgccaacttctagcctgtcgattgttaacaggtccaaggaagaagtcacctcacac

SEQ ID NO: 82927 - DNA, 120 bp, Artificial Sequence
  ENSG00000083093_15 (sequence is synthesized)
aaatatcagcacgaaaaattatttattcaagtgaaagggaagaaaagtcgtcatcaaaaagaggattccctttcttggagtaatagtgcttatttatccttggatgatgatgctttcacg

SEQ ID NO: 82928 - DNA, 120 bp, Artificial Sequence
  ENSG00000083093_16 (sequence is synthesized)
tgtcttttctcagtatcacagactttcagttacctgatgaagactttggacctcttaagcttgaaaaagtgaagtcctgctcagaaaaaccagtggagccctttgagtcaaaaatgtttg

SEQ ID NO: 82929 - DNA, 120 bp, Artificial Sequence
  ENSG00000083093_17 (sequence is synthesized)
gagagagacatcttaaagagggaagctgtatttttccagaggaactgagtcctaaacgcatggatacagaaatggaggacttagaagaggaccttattgttctaccaggaaaatcacatc

SEQ ID NO: 82930 - DNA, 120 bp, Artificial Sequence
  ENSG00000083093_18 (sequence is synthesized)
ccaaaaggccaaactcgcaaagccagcatacaaagacgggcctttcttcatccatattactttatactcctttaaatacggttgcgcctgatgataatgacaggcctaccacagacatgt

SEQ ID NO: 82931 - DNA, 120 bp, Artificial Sequence
  ENSG00000083093_19 (sequence is synthesized)
gttcacctgctttccccatcttaggtactactccagcctttggccctcaaggctcctatgaaaaagcatctacagaagttgctggacgaacttgctgcacaccccaacttgctcatttga

SEQ ID NO: 82932 - DNA, 120 bp, Artificial Sequence
  ENSG00000083093_20 (sequence is synthesized)
aagactcagtctgtcttgccagtgatactaaacaattcgacagttcaggcagcccagcaaaaccacataccaccctgcaagtgtcaggcaggcaaggacaacctacctgtgactgtgact

SEQ ID NO: 82933 - DNA, 120 bp, Artificial Sequence
  ENSG00000083093_21 (sequence is synthesized)
ctgtcccgccaggaacacctccacccattgagtcattcacttttaaagaaaatcagctctgtagaaacacatgccaggagctgcataaacattccgtcgaacagactgaaacagcagagc

SEQ ID NO: 82934 - DNA, 120 bp, Artificial Sequence
  ENSG00000083093_22 (sequence is synthesized)
ttcctgcttctgatagcataaacccaggcaacctacaattggtttcagagttaaagaatccttcaggttcctgttccgtagatgtgagtgccatgttttgggaaagagccggttgtaaag

SEQ ID NO: 82935 - DNA, 120 bp, Artificial Sequence
  ENSG00000083093_23 (sequence is synthesized)
agccatgtatcataactgcttgcgaagatgtagtttctctttggaaagctctggatgcttggcagtgggaaaaactttatacctggcacttcgcagaggttccagtattacagatagttc

SEQ ID NO: 82936 - DNA, 120 bp, Artificial Sequence
  ENSG00000083093_24 (sequence is synthesized)
cagtgcctgatgtgtataatctcgtgtgtgtagctttgggaaatttggaaatcagagagatcagggcattgttttgttcctctgatgatgaaagtgaaaagcaagtactactgaagtctg

SEQ ID NO: 82937 - DNA, 120 bp, Artificial Sequence
  ENSG00000083093_25 (sequence is synthesized)
gaaatataaaagctgtgcttggcctgacaaagaggaggctagttagtagcagtgggaccctttctgatcaacaagtagaagtcatgacgtttgcagaagatggaggaggcaaagaaaacc

SEQ ID NO: 82938 - DNA, 120 bp, Artificial Sequence
  ENSG00000083093_26 (sequence is synthesized)
aatttttgatgccccctgaggagactatactaacttttgctgaggtccaagggatgcaagaagctctgcttggtactactattatgaacaacattgttatttggaatttaaaaactggtc

SEQ ID NO: 82939 - DNA, 120 bp, Artificial Sequence
  ENSG00000083093_27 (sequence is synthesized)
aactcctgaaaaagatgcacattgatgattcttaccaagcttcagtctgtcacaaagcctattctgaaatggggcttctctttattgtcctgagtcatccctgtgccaaagagagtgagt

SEQ ID NO: 82940 - DNA, 120 bp, Artificial Sequence
  ENSG00000083093_28 (sequence is synthesized)
cgttgcgaagccctgtgtttcagctcattgtgattaaccctaagacgactctcagcgtgggtgtgatgctgtactgtcttcctccagggcaggctggcaggttcctggaaggtgacgtga

SEQ ID NO: 82941 - DNA, 120 bp, Artificial Sequence
  ENSG00000083093_29 (sequence is synthesized)
aagatcactgtgcagcagcaatcttgacttctggaacaattgccatttgggacttacttctcggtcagtgtactgccctcctcccacctgtctctgaccaacattggtcttttgtgaaat

SEQ ID NO: 82942 - DNA, 120 bp, Artificial Sequence
  ENSG00000083093_30 (sequence is synthesized)
ggtcgggtacagactctcatttgctggctggacaaaaagatggaaatatatttgtataccactattcataagttagggtaaagtgaaaacacaattttctggatatattgggcctcttag

SEQ ID NO: 82943 - DNA, 120 bp, Artificial Sequence
  ENSG00000083093_31 (sequence is synthesized)
tattttttggagttttaaatataaaggagaatatctgaatgacacttaaaatgattgcttgtttatgtccagacagacttattttttattctaatgatggtagcaccactgatcttggat

SEQ ID NO: 82944 - DNA, 120 bp, Artificial Sequence
  ENSG00000083093_32 (sequence is synthesized)
gtacatttatgtatactttgagaaaaagggttttaggttgatttttgtaatttcccacatttgtacatgtgcttttaaaggtgtacataaagcttcaaatggcaataaatatttattttt

SEQ ID NO: 82945 - DNA, 120 bp, Artificial Sequence
  ENSG00000083093_33 (sequence is synthesized)
ttgagtgactgaggatggcagttcctgctaccttcaaggatctggatgatggggagaaacagagaacatagtgtgagaatactgtgttaaaggagaaattagcattcttgaaaagggaat

SEQ ID NO: 82946 - DNA, 120 bp, Artificial Sequence
  ENSG00000083093_34 (sequence is synthesized)
ctactattatgaacaacattgttatttggaatttaaaaactggtcaactcctgaaaaagatgcacattgatgattcttaccaagcttcagtctgtcacaaagcctattctgaaatggttc

SEQ ID NO: 82947 - DNA, 120 bp, Artificial Sequence
  ENSG00000083093_35 (sequence is synthesized)
acccttgctcctcccccctcccacaccctcaatctttacttctccccccggacggcctcaagtaaatcttttaagtctggtacttccaggtcctttcgtgtgttaatgtgggtggtggag

SEQ ID NO: 82948 - DNA, 120 bp, Artificial Sequence
  ENSG00000083093_36 (sequence is synthesized)
gaggggcgtatccctaaccaccaaaaaggaatcctatgtatattttttggagaagggaatgttcataaatggtatgatctgaatggttctgcaggttccgtttagctttcctgtcaggac

SEQ ID NO: 82949 - DNA, 120 bp, Artificial Sequence
  ENSG00000083093_37 (sequence is synthesized)
atgtttatctaccttgctttcttttttaagttctagacagtatgttgtagtttggaagtgccctcgttttgtttcttttttcttccttttctgtttttcttcttttttgagacagagtct

SEQ ID NO: 82950 - DNA, 120 bp, Artificial Sequence
  ENSG00000083093_38 (sequence is synthesized)
gagtagctgggattacacgaacccgccactgcacctggccttggaagtgcccttgcttctttagactgtactttactgatagacttttaggatgtttccagcttgtgctgatgttattct

SEQ ID NO: 82951 - DNA, 120 bp, Artificial Sequence
  ENSG00000083097_0 (sequence is synthesized)
cgagcacggtgcactctgggagctgtcactaggcccttcggctcccggtctcggtgtagctgccgtggttgccaggagagctgcgccggcgagaagcggccgagccagcagcaggaagga

SEQ ID NO: 82952 - DNA, 120 bp, Artificial Sequence
  ENSG00000083097_1 (sequence is synthesized)
acacacaagtagttatctttcaggctgtctttgaatacttccatgaccctgaacactagctgaggagagtttcaaccactgctaacagtaatgactttacatgagtttggaactggtctc

SEQ ID NO: 82953 - DNA, 120 bp, Artificial Sequence
  ENSG00000083097_2 (sequence is synthesized)
tagtgggaagttgtgggaggatgaacacagaagagctggagttattgagtgactccaaatacagaaactatgtagcagcaattgacaaagcactaaagaattttgaatactccagtgaat

SEQ ID NO: 82954 - DNA, 120 bp, Artificial Sequence
  ENSG00000083097_3 (sequence is synthesized)
gggcagatttgatatcagcacttggaaaacttaataaggttttacaaaataatgcaaagtaccaagtagtacccaaaaagctgaccataggcaaacgcctagctcaatgtctacatccag

SEQ ID NO: 82955 - DNA, 120 bp, Artificial Sequence
  ENSG00000083097_4 (sequence is synthesized)
cattaccaggtggagttcatcggaaggcgcttgaaacatatgaaattatcttcaaaataattggacctaagcgacttgccaaagatctttttttatatagttctggattatttcctcttc

SEQ ID NO: 82956 - DNA, 120 bp, Artificial Sequence
  ENSG00000083097_5 (sequence is synthesized)
ttgcaaatgctgccatgtctgtgaaaccaacattgctcagtttgtatgagatatattatctgcctttgggtaaaacactgaaacctggtctacagggattgcttactggtattcttcctg

SEQ ID NO: 82957 - DNA, 120 bp, Artificial Sequence
  ENSG00000083097_6 (sequence is synthesized)
gcttagaagaaggatcagagtactatgagagaacaaatatgttgttggaaaaggttgctgctgctgtggaccagtcagcattctacagtgccctgtggggtagtcttctcaccagtcctg

SEQ ID NO: 82958 - DNA, 120 bp, Artificial Sequence
  ENSG00000083097_7 (sequence is synthesized)
ctgtgcgtttacctggaatcacgtatgttcttgcccatttaaacaggaagctttctatggaagatcaactttatataattggcagtgatattgagctaatggtagaagcagtaagtactt

SEQ ID NO: 82959 - DNA, 120 bp, Artificial Sequence
  ENSG00000083097_8 (sequence is synthesized)
cagtgcaggactcaagtgtacttgtacagagaagcacactggacctcatactcttctgttttccattccacatgagtcaggccactcgaccggatatgatcaggatcttgtcagcagccc

SEQ ID NO: 82960 - DNA, 120 bp, Artificial Sequence
  ENSG00000083097_9 (sequence is synthesized)
ttcatgtagtgctaaggagggatatgtctctgaatcgaagactttatgcatggcttcttggttttgataacaacggtgctatcataggacccagaagcacaagacacagtaatcctgaag

SEQ ID NO: 82961 - DNA, 120 bp, Artificial Sequence
  ENSG00000083097_10 (sequence is synthesized)
aacatgccacttactatttcactaccttttcaaaagaattattagtccaggcaatggtgggaatcttacaagtgaatggatttggagaagagaacactctaatgcaggatctaaagcctt

SEQ ID NO: 82962 - DNA, 120 bp, Artificial Sequence
  ENSG00000083097_11 (sequence is synthesized)
ttcgcattttaatcagtttactggacaaacctgagctaggacctgtaattctagaagatgtcctgattgaagtgtttagaacattatattctcaatgcaaagcagagttggatcttcaaa

SEQ ID NO: 82963 - DNA, 120 bp, Artificial Sequence
  ENSG00000083097_12 (sequence is synthesized)
ctgaaccacccttcagcaaggatcatgctcagttaagcagtaaattaagagaaaataagaaaacagcagagctgattaaaactgctaaccttctctttaattccttcgaaccttattata

SEQ ID NO: 82964 - DNA, 120 bp, Artificial Sequence
  ENSG00000083097_13 (sequence is synthesized)
tgtgggattatgttgcacgctggtttgaagaatgttgtaggaggacactgcatgtgagacttcagattggacctggagatagtaatgactcatctgaattacagctgaccaatttctgct

SEQ ID NO: 82965 - DNA, 120 bp, Artificial Sequence
  ENSG00000083097_14 (sequence is synthesized)
tactggtggattttttgttggacatagtttctttgcctactagaagtatgagggtgctgtgtcaggagacttacattgaaatccagacagaacacttgccccagttgctgctcagaatga

SEQ ID NO: 82966 - DNA, 120 bp, Artificial Sequence
  ENSG00000083097_15 (sequence is synthesized)
tttctgccttgacaagccatctccagacattgcacttatctgaactcacagattctctcagactctgctcaaagatccttagcaaggttcagcctccactgttatctgctagcactggag

SEQ ID NO: 82967 - DNA, 120 bp, Artificial Sequence
  ENSG00000083097_16 (sequence is synthesized)
gtgttttgcagtttccaagtgggcagaacaattcagtcaaagagtgggaagacaaaaaggtatcatcagtttctcatgaaaatcctactgaagtgtttgaagatggagaaaatccaccaa

SEQ ID NO: 82968 - DNA, 120 bp, Artificial Sequence
  ENSG00000083097_17 (sequence is synthesized)
gtagtcgatcatcagagagtggattcactgagtttatacaatatcaagcagaccgaactgatgatattgacagagaactgagtgagggccagggggcagctgccatcccaattggtagca

SEQ ID NO: 82969 - DNA, 120 bp, Artificial Sequence
  ENSG00000083097_18 (sequence is synthesized)
catcctctgagacagaaacagcatccactgtgggatctgaagaaaccatcatccagaccccttccgtagtcactcaggggacagcaacccgaagtaggaagacagcccaaaagactgcaa

SEQ ID NO: 82970 - DNA, 120 bp, Artificial Sequence
  ENSG00000083097_19 (sequence is synthesized)
tgcagtgctgcttggagtatgtccaacagtttcttaccagacttatcaacctctacatcattcagaataactctttttctcagtctttggctacagaacatcaaggggatcttggtcgag

SEQ ID NO: 82971 - DNA, 120 bp, Artificial Sequence
  ENSG00000083097_20 (sequence is synthesized)
aacaaggagagacttcaaaatgggacagaaattcacaaggagatgtaaaagagaaaaacataagtaaacaaaaaacttctaaagaatacctgtctgccttccttgctgcctgtcagctct

SEQ ID NO: 82972 - DNA, 120 bp, Artificial Sequence
  ENSG00000083097_21 (sequence is synthesized)
tcctagagtgctcaagtttcccagtttacattgctgaggggaaccatacatcagagttacgttctgaaaaattggagactgactgtgagcatgtgcagcctccacagtggctccagactc

SEQ ID NO: 82973 - DNA, 120 bp, Artificial Sequence
  ENSG00000083097_22 (sequence is synthesized)
tgatgaatgcttgcagccaagcaagtgatttcagtgttcagagtgttgctatttcactagttatggacctggtgggactgacacagtctgtggccatggtcactggggaaaacatcaaca

SEQ ID NO: 82974 - DNA, 120 bp, Artificial Sequence
  ENSG00000083097_23 (sequence is synthesized)
gtgtagagcctgcacaacccttaagtccaaaccagggaagagtagctgtggttattagacctcccctcactcagggcaatctgaggtacatagctgagaagactgaatttttcaagcatg

SEQ ID NO: 82975 - DNA, 120 bp, Artificial Sequence
  ENSG00000083097_24 (sequence is synthesized)
tagctttaacattgtgggaccagttgggagatgggacacctcagcatcaccagaagagtgtggaactattttatcaattacataacttagttccttcttctagcatctgtgaggatgtta

SEQ ID NO: 82976 - DNA, 120 bp, Artificial Sequence
  ENSG00000083097_25 (sequence is synthesized)
taagtcagcagttaacccataaagataagaaaataaggatggaagcacatgccaagtttgcagttctttggcatctaacgagagatctccatataaataaatcttcatcttttgtacgtt

SEQ ID NO: 82977 - DNA, 120 bp, Artificial Sequence
  ENSG00000083097_26 (sequence is synthesized)
cttttgacaggtcactgttcatcatgttagatagccttaacagtctcgatggttctactagctctgtgggacaagcctggctgaaccaagtcctacaaagacatgatattgcacgagttt

SEQ ID NO: 82978 - DNA, 120 bp, Artificial Sequence
  ENSG00000083097_27 (sequence is synthesized)
tggaaccattgctattgctcctgcttcatccaaaaactcagagggtttcagtacagcgtgtacaagcagaacgttattggaataagtctccctgttatccaggagaggagagtgacaagc

SEQ ID NO: 82979 - DNA, 120 bp, Artificial Sequence
  ENSG00000083097_28 (sequence is synthesized)
atttcatgcaaaattttgcctgcagcaatgtgagccaagtacaactcatcacatcaaaaggaaatggtgaaaagccacttaccatggatgaaatagagaactttagtctcactgtgaatc

SEQ ID NO: 82980 - DNA, 120 bp, Artificial Sequence
  ENSG00000083097_29 (sequence is synthesized)
cattaagtgacagactttccctcctaagtaccagcagtgagacaattccaatggttgtgtctgattttgatcttccagaccaacagatagaaatacttcagagttctgactcgggatgtt

SEQ ID NO: 82981 - DNA, 120 bp, Artificial Sequence
  ENSG00000083097_30 (sequence is synthesized)
cacagtcctctgctggggacaacttgagttacgaagttgatcctgaaaccgtgaatgcccaagaggattctcaaatgcccaaggaaagctccccagatgatgatgttcaacaggtagtat

SEQ ID NO: 82982 - DNA, 120 bp, Artificial Sequence
  ENSG00000083097_31 (sequence is synthesized)
ttgacctgatatgtaaagttgtaagtggcctcgaagtggaatctgcatcagttacatctcaattagaaattgaagctatgcccccaaagtgcagtgatatagatccagatgaagagacga

SEQ ID NO: 82983 - DNA, 120 bp, Artificial Sequence
  ENSG00000083097_32 (sequence is synthesized)
ttaaaattgaagatgactccattcaacagagtcagaatgctttgctgagtaatgaaagttctcagtttctgtctgtgtctgcagagggaggccatgagtgtgtggcaaatggaatctcca

SEQ ID NO: 82984 - DNA, 120 bp, Artificial Sequence
  ENSG00000083097_33 (sequence is synthesized)
ggaatagctcctcaccttgtatttcaggaaccacacacactcttcatgactcttctgttgcttccatagaaaccaaatctagacaaaggagtcacagtagtattcaattcagcttcaaag

SEQ ID NO: 82985 - DNA, 120 bp, Artificial Sequence
  ENSG00000083097_34 (sequence is synthesized)
ggtaaacaaccaggagcaaaacctaaagtaaaacttgccagaaaaaaggatgatgacaagaaaaaatcttcaaatgaaaaactcaaacaaaccagtgtattcttcagtgatggtctggat

SEQ ID NO: 82986 - DNA, 120 bp, Artificial Sequence
  ENSG00000083097_35 (sequence is synthesized)
ttagagaactggtatagctgtggagagggagacatttctgaaattgagagtgacatgggttctccaggatctcgaaaatctcccaatttcaacattcatcctctctatcaacatgtgctc

SEQ ID NO: 82987 - DNA, 120 bp, Artificial Sequence
  ENSG00000083097_36 (sequence is synthesized)
ctgtatctccagttgtatgattcatccaggactttgtatgctttctctgccatcaaagccatcttgaaaactaaccctatagcttttgtaaatgccatttcaactactagtgtaaataat

SEQ ID NO: 82988 - DNA, 120 bp, Artificial Sequence
  ENSG00000083097_37 (sequence is synthesized)
gcatatactcctcagttgtctctccttcagaatctattggccagacaccggatttctgttatgggcaaagatttttatagtcacattccagtggactcaaatcataacttccggagttct

SEQ ID NO: 82989 - DNA, 120 bp, Artificial Sequence
  ENSG00000083097_38 (sequence is synthesized)
atgtacatagaaattcttatttctctctgcttatattacatgcgtagccattacccaactcatgtcaaggttactgcacaagatttaataggcaatcgaaacatgcaaatgatgagcata

SEQ ID NO: 82990 - DNA, 120 bp, Artificial Sequence
  ENSG00000083097_39 (sequence is synthesized)
gaaattctgacactactcttcactgagctggcaaaagtaatagaaagctcagcgaagggtttccctagttttatttctgatatgttatctaagtgcaaagttcagaaagtgattcttcat

SEQ ID NO: 82991 - DNA, 120 bp, Artificial Sequence
  ENSG00000083097_40 (sequence is synthesized)
tgtttgctgtcatctatctttagtgctcagaaatggcatagtgaaaaaatggcaggtaagaacctggttgctgtggaagaaggtttctcagaggacagccttattaatttctcagaggat

SEQ ID NO: 82992 - DNA, 120 bp, Artificial Sequence
  ENSG00000083097_41 (sequence is synthesized)
gaatttgacaatggcagcacgttgcagtcacaacttcttaaggtgcttcagaggctgattgttctagaacacagagtaatgactattcctgaagagaatgaaacaggttttgattttgtt

SEQ ID NO: 82993 - DNA, 120 bp, Artificial Sequence
  ENSG00000083097_42 (sequence is synthesized)
gtatctgacttagaacacatcagtccccatcaacccatgacttctcttcagtatttgcatgctcagccaatcacatgtcaaggcatgttcctctgtgcagtgatacgagctttgcatcag

SEQ ID NO: 82994 - DNA, 120 bp, Artificial Sequence
  ENSG00000083097_43 (sequence is synthesized)
cactgtgcatgtaagatgcacccacaatggattggtttaatcacatctactctgccttacatgggaaaagttctgcagagagtggttgtttctgtgacactacaactgtgcagaaattta

SEQ ID NO: 82995 - DNA, 120 bp, Artificial Sequence
  ENSG00000083097_44 (sequence is synthesized)
gataatctaattcagcagtacaaatacgaaacaggattatctgatagtaggcctctgtggatggcatcaattattccaccagatatgattcttactcttttggaagggattacagccatt

SEQ ID NO: 82996 - DNA, 120 bp, Artificial Sequence
  ENSG00000083097_45 (sequence is synthesized)
atccattactgtttgttggatccaactacacagtatcaccaacttttggtcagtgtagaccagaaacacttgtttgaagcacgcagtggaatcctctcaatccttcatatgatcatgtcc

SEQ ID NO: 82997 - DNA, 120 bp, Artificial Sequence
  ENSG00000083097_46 (sequence is synthesized)
tctgtgacactgctttggagcatactgcatcaagctgattcttcagaaaagatgactattgccgcatccgcatctcttaccactattaatcttggagctacaaagaacttgagacaacag

SEQ ID NO: 82998 - DNA, 120 bp, Artificial Sequence
  ENSG00000083097_47 (sequence is synthesized)
attcttgaattgttgggccccatttcaatgaatcatggtgttcactttatggctgccattgcatttgtgtggaatgaaagaagacagaataaaacaaccaccaggaccaaggtcattcct

SEQ ID NO: 82999 - DNA, 120 bp, Artificial Sequence
  ENSG00000083097_48 (sequence is synthesized)
gcagccagtgaagaacagcttttattagtggaattggttcgttcaatcagtgtcatgagagcagaaactgttatccagactgtaaaagaagttttaaagcagccaccagccatagccaag

SEQ ID NO: 83000 - DNA, 120 bp, Artificial Sequence
  ENSG00000083097_49 (sequence is synthesized)
gacaagaaacatctttctttggaagtctgcatgcttcagtttttctatgcttatattcaaagaattccagtgcccaatttagtggatagctgggcgtcactgttgatacttctgaaagac

SEQ ID NO: 83001 - DNA, 120 bp, Artificial Sequence
  ENSG00000083097_50 (sequence is synthesized)
tctatacaactgagtcttccagctccagggcagtttcttatacttggggttctgaatgagtttattatgaaaaaccctagtttggaaaataaaaaagaccaaagagaccttcaggatgta

SEQ ID NO: 83002 - DNA, 120 bp, Artificial Sequence
  ENSG00000083097_51 (sequence is synthesized)
actcacaaaatagtggatgcaattggtgcaattgctggttcttctctggaacagacaacatggctgcgacgaaatcttgaagttaagccttctcccaaaataatggtagatggaaccaat

SEQ ID NO: 83003 - DNA, 120 bp, Artificial Sequence
  ENSG00000083097_52 (sequence is synthesized)
ttggaatctgatgttgaagatatgttatcacctgcaatggaaaccgcaaacataactccttctgtatatagtgtccatgcattgacattactctctgaggttttggctcatcttttggat

SEQ ID NO: 83004 - DNA, 120 bp, Artificial Sequence
  ENSG00000083097_53 (sequence is synthesized)
atggttttctatagtgatgaaaaggagcgggttattcctttacttgtaaatattatgcattatgttgtgccctacctcagaaatcacagtgcacataatgcccctagttatcgagcttgt

SEQ ID NO: 83005 - DNA, 120 bp, Artificial Sequence
  ENSG00000083097_54 (sequence is synthesized)
gtccagctgctcagcagtcttagtgggtatcagtacacacggagagcttggaaaaaagaagcttttgacctctttatggatcccagtttctttcagatggatgcctcttgtgttaatcat

SEQ ID NO: 83006 - DNA, 120 bp, Artificial Sequence
  ENSG00000083097_55 (sequence is synthesized)
tggagagcaattatggacaatctgatgacacatgataaaacaacatttagagatttgatgactcgtgtagcagtggctcaaagcagttcacttaatctctttgcaaaccgtgatgtggag

SEQ ID NO: 83007 - DNA, 120 bp, Artificial Sequence
  ENSG00000083097_56 (sequence is synthesized)
ctagaacagagagctatgcttcttaaaagattagcatttgctatttttagcagtgaaattgaccagtaccagaaatatcttccagatatacaagagagattggttgagagtctccgtttg

SEQ ID NO: 83008 - DNA, 120 bp, Artificial Sequence
  ENSG00000083097_57 (sequence is synthesized)
ccacaggtgccaactctccattctcaagtgttcctgtttttcagagtgttacttttaagaatgtctccccaacatcttacctcactctggcctaccatgattacagaacttgtacaagta

SEQ ID NO: 83009 - DNA, 120 bp, Artificial Sequence
  ENSG00000083097_58 (sequence is synthesized)
tttttactgatggagcaggaactcactgctgatgaagatatttcacggacttcagggccctctgtggctggtctggagacaacgtacacaggaggtaatggcttctctacttcatataac

SEQ ID NO: 83010 - DNA, 120 bp, Artificial Sequence
  ENSG00000083097_59 (sequence is synthesized)
agccagcggtggttaaacctctatctctctgcttgcaaatttttggatttggctctcgcattgccctctgaaaaccttcctcagtttcagatgtaccgatgggcctttattccagaagcc

SEQ ID NO: 83011 - DNA, 120 bp, Artificial Sequence
  ENSG00000083097_60 (sequence is synthesized)
tcagatgattcaggtttggaagtcagaaggcagggtatacatcaacgagaatttaaaccttacgtggtacgactagcaaaacttcttcggaaaagagcaaagaaaaatccagaggaagac

SEQ ID NO: 83012 - DNA, 120 bp, Artificial Sequence
  ENSG00000083097_61 (sequence is synthesized)
aactcagggagaacattgggttgggagccagggcacttgctgctcaccatctgcaccgtgcgcagtatggagcagctcctgccgttcttcaatgtgctcagtcaagtcttcaacagcaaa

SEQ ID NO: 83013 - DNA, 120 bp, Artificial Sequence
  ENSG00000083097_62 (sequence is synthesized)
gtcacaagccgatgtggaggacactcagggagtcctatcctctactcaaatgccttccctaataaggacatgaaactggagaaccacaaaccatgttccagcaaagccaggcaaaaaata

SEQ ID NO: 83014 - DNA, 120 bp, Artificial Sequence
  ENSG00000083097_63 (sequence is synthesized)
gaagagatggtagaaaaagattttctggaagggatgataaaaacttgagcaccattgctggttccatttagcttacatgtaaatgtaattatttaaaacacacacactgctctgcgttgt

SEQ ID NO: 83015 - DNA, 120 bp, Artificial Sequence
  ENSG00000083097_64 (sequence is synthesized)
atagtttttccttttttgtatgtaacagaacacatttcagattgtatttaatttaaatatttgtatataagagcaaatgtctgaatgtggcctgaatcaagtttaaatattgttggctca

SEQ ID NO: 83016 - DNA, 120 bp, Artificial Sequence
  ENSG00000083097_65 (sequence is synthesized)
tactgattatggtgcctaagagagctatatatatacacatgtaaagtccattgtttttattgtcctgagttgtcttaaacctgcaaaatatacactacccattttttttttccattggtt

SEQ ID NO: 83017 - DNA, 120 bp, Artificial Sequence
  ENSG00000083097_66 (sequence is synthesized)
tcagacttggttcaattaagattggttggggatttttctcttttccttattaaccatgttctggtatcagaatggtgttccttctccatcagaggctgggaaacgtattataattagttt

SEQ ID NO: 83018 - DNA, 120 bp, Artificial Sequence
  ENSG00000083097_67 (sequence is synthesized)
ttctcccacataccttcaccaagagcagtgaagaataactgaaggctggaccatgcatccttaaaagtattgcatgagcatctccacctcagtatggaagagggatggacaaccccctat

SEQ ID NO: 83019 - DNA, 120 bp, Artificial Sequence
  ENSG00000083097_68 (sequence is synthesized)
caaattcttctaaataagaactatcccagcttacttgtgagtctgcttctgcatatactcggacgacatcttctgtaccagagggccggacaaaagctcgagaaagcttgtacttcttca

SEQ ID NO: 83020 - DNA, 120 bp, Artificial Sequence
  ENSG00000083097_69 (sequence is synthesized)
ccaggtcattgattgcctcctgtaatcctgggggtgtaactgcttgtctttcagcatcggtagtgctaataactctcctgtctgcaacctaagtgcaagcatttcatatttgttactcta

SEQ ID NO: 83021 - DNA, 120 bp, Artificial Sequence
  ENSG00000083097_70 (sequence is synthesized)
ttacacttcctttcagaagcttaacctgttaaacatacattctacgaaaagtgccagactaaatataaaattacattaaaacttctttctccaaggtcagggtaattaatttcaacattt

SEQ ID NO: 83022 - DNA, 120 bp, Artificial Sequence
  ENSG00000083097_71 (sequence is synthesized)
gtgcaacttttctctttttcttcagtctataaagaattacctttggcaaaaaatatttccacaaatgcttagagttaccactaagataatggccagtaaatacgatatgactaagtccca

SEQ ID NO: 83023 - DNA, 120 bp, Artificial Sequence
  ENSG00000083097_72 (sequence is synthesized)
tatcacacacaaaaacaggataagtggtagcccattatataagaagaccgataagaatttcttaaatatgccaaaaataatctgaacaatcagccatttctgtgaactgtggctttagta

SEQ ID NO: 83024 - DNA, 120 bp, Artificial Sequence
  ENSG00000083097_73 (sequence is synthesized)
cctccaattgtctttcacaaattctgttggtgaatgtgtaaactggcataaacatgtacagaaatcaattagcaatttatctgaattctctccctcaggaagtactctgtgaactaaaca

SEQ ID NO: 83025 - DNA, 120 bp, Artificial Sequence
  ENSG00000083097_74 (sequence is synthesized)
agtactctgtgaactaaacataatgcagagtaagtactttcacttgaaatgacagggcatctgagttttgcttcaaaataatgttggggccaggtgcagtagctcacacctgtaatccta

SEQ ID NO: 83026 - DNA, 120 bp, Artificial Sequence
  ENSG00000083097_75 (sequence is synthesized)
agaccagcctaggcaacatagtgagatctcgtctctaaataaaatatacaaaagagtattgggagggggtatgaagaatgtatagggcaataattgaaatctgttgaagctgggtacaca

SEQ ID NO: 83027 - DNA, 120 bp, Artificial Sequence
  ENSG00000083097_76 (sequence is synthesized)
gggcaataattgaaatctgttgaagctgggtacacaaaagttcattatgttgtttctctacatttatatctatttttaatttttttatatctatttttaattttccataataaaatctct

SEQ ID NO: 83028 - DNA, 120 bp, Artificial Sequence
  ENSG00000083097_77 (sequence is synthesized)
taattttagatttttctaattttaagtagtctaggttttctaacaaactgaaaatcagtaccttgggatgatgtcagtttcacctcatatgttactcttcattttttatgttttcatagg

SEQ ID NO: 83029 - DNA, 120 bp, Artificial Sequence
  ENSG00000083097_78 (sequence is synthesized)
ttttggctcatcttttggatatggttttctatagtgatgaaaaggagcgggttattcctttacttgtaaatattatgcattatgttgtgccctacctcagaaatcacaggtactatcatt

SEQ ID NO: 83030 - DNA, 120 bp, Artificial Sequence
  ENSG00000083097_79 (sequence is synthesized)
atttaaatagtttttaaaattaattcatagcctgttagaaacaagttctgttcccttattgccatttctagaattatcataaaatggcatttttaccttgaattataattgtttaaaaaa

SEQ ID NO: 83031 - DNA, 120 bp, Artificial Sequence
  ENSG00000083097_80 (sequence is synthesized)
ctttctatttcatatcttcatgtcactgtcttaggtaaatgtgaacatttatgtataacttgataggatgattaaagttaggacacgtaggttaaggtggtttttcttccttgtagtgca

SEQ ID NO: 83032 - DNA, 120 bp, Artificial Sequence
  ENSG00000083097_81 (sequence is synthesized)
agcttggcaagtgtaggagatagcaatttacaaattttataaagagaatttattattttgaaaaccgtaagctgtattaaaatgcatggcatttttactcatccaccaggtttttacttt

SEQ ID NO: 83033 - DNA, 120 bp, Artificial Sequence
  ENSG00000083099_0 (sequence is synthesized)
gcgctgaggctccggcggacctctggtggacatggctgcttcccgcttacccccagcgacgctaacgttaaagcagttcgtaagaaggcaacaagttcttctcctctacagaaggatttt

SEQ ID NO: 83034 - DNA, 120 bp, Artificial Sequence
  ENSG00000083099_1 (sequence is synthesized)
gcaaacaattcggcaagttccaaatgattctgatcgcaaatacctgaaagattgggcaagagaagaattcagaagaaacaaaagtgccaccgaagaggatacaatccggatgatgattac

SEQ ID NO: 83035 - DNA, 120 bp, Artificial Sequence
  ENSG00000083099_2 (sequence is synthesized)
tcaaggcaatatgcagctcaaggagttagaaaaaacacttgctttagcaaaatcttaactatagcattattctgaaggattttcaaagtctccatgtgttttgttgcatttaggattaac

SEQ ID NO: 83036 - DNA, 120 bp, Artificial Sequence
  ENSG00000083099_3 (sequence is synthesized)
aatggacaacacaaagcccagtcttactatttatatgtacagtatttggtgatagagagcaaaggaaaaacacatcagaacagttgccttaacactgaaaaacataccctgcattttgaa

SEQ ID NO: 83037 - DNA, 120 bp, Artificial Sequence
  ENSG00000083099_4 (sequence is synthesized)
aatgtttatggatgtctcagcagttcttaaaagaagaaaaaaaccactaacaaatggccagtagatgctggacacaatcattagggaagtgtaaatcaaaactactatgaggtcgggtgt

SEQ ID NO: 83038 - DNA, 79 bp, Artificial Sequence
  ENSG00000083099_5 (sequence is synthesized)
ttagggaagtgtaaatcaaaactactatgaggtcgggtgtagtggctcatgcttgtaatcccagtactttaggaggctg

SEQ ID NO: 83039 - DNA, 120 bp, Artificial Sequence
  ENSG00000083099_6 (sequence is synthesized)
ttcagcctgggtgacagagtgagacagtctctaaaaaaaaaaaaaaaaaacaaccctgagattcacattcactagaatggctgtaattaaaaagagaaataataataagtcttggtgaag

SEQ ID NO: 83040 - DNA, 120 bp, Artificial Sequence
  ENSG00000083099_7 (sequence is synthesized)
atgtacagaaattacagaaccctcatacattgctggtgggaatgtaaaatggtgtagccacttcagaaaacagacggtcagttcctcaaaagatgaaacagctgctgtatgagttagcac

SEQ ID NO: 83041 - DNA, 120 bp, Artificial Sequence
  ENSG00000083099_8 (sequence is synthesized)
ttctaccccatgcccatagccattatttggcactaaaaagaaacgaaggacttatatatactaaacatggataaaccttgaaaacgttaagtgaaagaagccggtcacaaaagatcacat

SEQ ID NO: 83042 - DNA, 120 bp, Artificial Sequence
  ENSG00000083099_9 (sequence is synthesized)
gatgattccattcatacgaaatgtccagaataggcagaaagattagtggttgcctaggctggctgtagatggaatggagtaactgctaatgggtgtagggttccttttcagggtgatgaa

SEQ ID NO: 83043 - DNA, 120 bp, Artificial Sequence
  ENSG00000083099_10 (sequence is synthesized)
aatatcctacagttagcttgtggtgtaggctgcacaactcttgaatatattcaaatccactgaactgtacattttaaatgtaaggtatgaattgtatctcaataaagctgttattaaaaa

SEQ ID NO: 83044 - DNA, 120 bp, Artificial Sequence
  ENSG00000083099_11 (sequence is synthesized)
actcttgaggtgtaggactgaaagtatactgacaccaggagataccctggaactttctcgaaaaatcctgcattatccctgagggttgttcaggtacgttcttcagatgtgtcatagttt

SEQ ID NO: 83045 - DNA, 120 bp, Artificial Sequence
  ENSG00000083099_12 (sequence is synthesized)
gatagagaactcatcaaaaagatcaccactgggaatctagatctttgttgaaaagggaagagaaagagaagcttaatgagcacattgaagcacttaccagaaagaagagggaagacttct

SEQ ID NO: 83046 - DNA, 120 bp, Artificial Sequence
  ENSG00000083099_13 (sequence is synthesized)
ggatgaaacctctgtgagtaccttaacattcacatggaagtagtaaaaataagattctgggtgcagttctccaatgacaggaaaaaaaacaaagagaatttgaagaatacgtcagagaca

SEQ ID NO: 83047 - DNA, 120 bp, Artificial Sequence
  ENSG00000083099_14 (sequence is synthesized)
aatacattacaaccaaaattgacttcaaggcacttttgaaggagatcaaatttataacaaaataatttagtgaaagtgaaagcttgtggaagatgttggaatcatccatcctgaaaattg

SEQ ID NO: 83048 - DNA, 120 bp, Artificial Sequence
  ENSG00000083099_15 (sequence is synthesized)
aagtcttctgtttatcaacagaacagctaagaagctaatctaagaatgaccagcacctgaaagatgtagacaacattttgcagaatgataaatggtatccagtactggactgtgtctgag

SEQ ID NO: 83049 - DNA, 120 bp, Artificial Sequence
  ENSG00000083099_16 (sequence is synthesized)
aggcatcaactgaatgtggatgttaatgacctggactgtcagggtccacctctacctcccagagcctcagagcccacaagacaaaataattctgaatactgttccatgggggtaatctac

SEQ ID NO: 83050 - DNA, 120 bp, Artificial Sequence
  ENSG00000083099_17 (sequence is synthesized)
taattcaaaatgcctgcctgtgccaattttcaggtttttatgtagataagtattagttaacctgttgcaaaatgatctgacaaacagaagcatttgtgacgtttctgaacagagaacact

SEQ ID NO: 83051 - DNA, 120 bp, Artificial Sequence
  ENSG00000083099_18 (sequence is synthesized)
ttggaaatattttttgtgtgacatgattgatagatacatgctatctctagtaaatctaaaatcttgaaactcaaaatcatccttttatgggtgtagaagtcagtgatttaatgatgctct

SEQ ID NO: 83052 - DNA, 120 bp, Artificial Sequence
  ENSG00000083099_19 (sequence is synthesized)
tcctaacagtggtgtgcatggaaaggttttcattaaagagcgtatgtggtttgcatttgcaagattcaactagcacagactccaagaaaacctaagtttttttgttttttaaagcaggta

SEQ ID NO: 83053 - DNA, 82 bp, Artificial Sequence
  ENSG00000083099_20 (sequence is synthesized)
agtaatccatcaggatttcgagactagctaggccactagctagcctaacctggtggcacgtgcctgtaattccagctactca

SEQ ID NO: 83054 - DNA, 120 bp, Artificial Sequence
  ENSG00000083099_21 (sequence is synthesized)
gagccgagaacacactactgcactacagcctgggcgaaagagtgagactcttgtctcaaaaaaaataaaaaagtgccatcaagttagaagttttaaattcatggtacaagcattgccata

SEQ ID NO: 83055 - DNA, 120 bp, Artificial Sequence
  ENSG00000083099_22 (sequence is synthesized)
gatgtgcctgcaagaaacacacagatgacttttttttgagacagggtctctgttgcacaagctggagtgtggtggcgcgaacatggctcactgcaaccttgagctcctgggctcaagaga

SEQ ID NO: 83056 - DNA, 90 bp, Artificial Sequence
  ENSG00000083099_23 (sequence is synthesized)
agattttcattaccggctaattttttttacttttcagagagaggagggggaatctcactttgttgccaggctagtctcaaactcctgggc

SEQ ID NO: 83057 - DNA, 120 bp, Artificial Sequence
  ENSG00000083099_24 (sequence is synthesized)
gggctcaagcaatccacctgcctcggtggccagagtgctaggattacaggtgtgagttgtttttttttttaaagagacagtcttacctcattctgtcacccagaatggaatgactttcta

SEQ ID NO: 83058 - DNA, 120 bp, Artificial Sequence
  ENSG00000083099_25 (sequence is synthesized)
actttctaaaattgcagaaagcagaacatattccttgctgtttataatattatagtcgtatcaaagggaaagagtatttctccttaaataaaattacaaataagaaatgtatgttttact

SEQ ID NO: 83059 - DNA, 120 bp, Artificial Sequence
  ENSG00000083099_26 (sequence is synthesized)
cttactcataaaaggtattgtagaatacaaaaggtttttcaaactggttttgtctttgattggcttttataatccacacttcaaagaagaaatgcatttaacttttaataacttagtcaa

SEQ ID NO: 83060 - DNA, 120 bp, Artificial Sequence
  ENSG00000083099_27 (sequence is synthesized)
aaagtataatgttgccttgccttgcataacctttaactattgcaaatgatgttttgtccttcccctttgtccagtattttccaaatggtcaacagtttaaacatttaagcttgcactgag

SEQ ID NO: 83061 - DNA, 120 bp, Artificial Sequence
  ENSG00000083099_28 (sequence is synthesized)
aaaccttgccacatttcagcagttttgttttgcttttggtggagagcacctgatcgcgactttacagccaatgtatttactctaaattacacttttatagatacaaggtaaagtgtagct

SEQ ID NO: 83062 - DNA, 120 bp, Artificial Sequence
  ENSG00000083099_29 (sequence is synthesized)
gggtgaaggcactcaggagccataaaatgtggtcaaccacaataaattaaaatgtaagctaaacaaagtattcacacttgcatttttttaataaggaatttaagatccatagtatcttta

SEQ ID NO: 83063 - DNA, 120 bp, Artificial Sequence
  ENSG00000083099_30 (sequence is synthesized)
atgcttggaagagacacaaattcaaggtgataaaaatattaattagaagacacataacatgcctcaagtatatcaacacttgactccacaaacaaggcataaccatgaaaacaacactcc

SEQ ID NO: 83064 - DNA, 120 bp, Artificial Sequence
  ENSG00000083099_31 (sequence is synthesized)
ctttattttgggctcccaaaatcaaaagttagaactaatttatttaatcacagatatttagtatactcaataatgcactaacaatttctttaaaaaaacactaatactgtacagtatttc

SEQ ID NO: 83065 - DNA, 120 bp, Artificial Sequence
  ENSG00000083099_32 (sequence is synthesized)
tgtgttttagtttttcccacagctgttgaaaatttcagccttgatttgaaacatgacctgcatgacaggctataagttgtcaatagttctttttctttggaaaagtacagttgtggcatt

SEQ ID NO: 83066 - DNA, 120 bp, Artificial Sequence
  ENSG00000083099_33 (sequence is synthesized)
tactcactttagcagatagctaaaagggaaaaataaggaaaaatatacactggacctgcagttaagtttttgacaatgccaaggatcaaaaacagatgaaacaacatttgctgaagatga

SEQ ID NO: 83067 - DNA, 120 bp, Artificial Sequence
  ENSG00000083099_34 (sequence is synthesized)
aaaggtattgcattggtcttaatagatgttgccatctctgggtgaggatgctgactgagcctgttctgtgtcttcatcacctctatttgtttcttcttctacgacagacctccaagagac

SEQ ID NO: 83068 - DNA, 120 bp, Artificial Sequence
  ENSG00000083099_35 (sequence is synthesized)
aagatccatgtagtaagccacactaggtccttttgacccttctcattcttctgtagtctcttccctgtgacttttgacaaaaatactcagttcacaatattagctgcctgcttctgatgg

SEQ ID NO: 83069 - DNA, 120 bp, Artificial Sequence
  ENSG00000083099_36 (sequence is synthesized)
gtaggaggtaatcaaaatactcccaccaaagcactctatggtctagacttgatacttaaaatttagttttcagcattcctcaacaaggataccttgaggtaataggagatattttggtaa

SEQ ID NO: 83070 - DNA, 120 bp, Artificial Sequence
  ENSG00000083099_37 (sequence is synthesized)
gtgaaaataattcctgcttggaacacagcctactgaactcaggatttaatttcttgagtattaggcagttctcaataaattgatgtatactgaggaatgattctaaagaggttagtgata

SEQ ID NO: 83071 - DNA, 120 bp, Artificial Sequence
  ENSG00000083099_38 (sequence is synthesized)
tcctgtttgagaatagatttagaaaactgaaggtactctccagctctacaattctgtattaggaacaatagggaaatgagaaagtgcctctatattgcaatctaatgagtctctggggga

SEQ ID NO: 83072 - DNA, 120 bp, Artificial Sequence
  ENSG00000083099_39 (sequence is synthesized)
agactgtctacctgcgtagtagttgagaacaagacaagctcccaaacacatgaaaatcaacttgaaataacatcaaattcagcctgggcaatatcatgagaccttatatctacaaaaaat

SEQ ID NO: 83073 - DNA, 120 bp, Artificial Sequence
  ENSG00000083099_40 (sequence is synthesized)
tagccaggactggtggcacacgcctgtagtcccaagctacttgcgaggttgaggcaggaggatcacgagcctgagaggccaaggctgcagtgaggtgtgatcatgccactgcactccagt

SEQ ID NO: 83074 - DNA, 120 bp, Artificial Sequence
  ENSG00000083099_41 (sequence is synthesized)
gtgacagagcaagaccctgtctcaacaaaataaaaaacatcaaattcattccatattcaggtaacagtgacatatatctactgaattatttttcttttaggaatgtctatatctatggat

SEQ ID NO: 83075 - DNA, 120 bp, Artificial Sequence
  ENSG00000083099_42 (sequence is synthesized)
ggattgtcactataaaaaaaagaaaaaaccctaaaactgagcttgacaaagggaataaaagcatactttgtttttcttggtgtccccatgttaataaatcatttcttctctttggctcaa

SEQ ID NO: 83076 - DNA, 120 bp, Artificial Sequence
  ENSG00000083099_43 (sequence is synthesized)
aaaagtctattgcactgagctgtggcaaacagcaaatgagattaccaaagatttgaacaactgttaatttagaaaaagtgctgtcgttgtaataacaacttctaggagaccggcagccct

SEQ ID NO: 83077 - DNA, 120 bp, Artificial Sequence
  ENSG00000083099_44 (sequence is synthesized)
ggtttggtgcgatcgcgtgagacagcgtcaggcgcttgatttccctgagtcccggtgcctcagctgcccagtgcccacgttcgtaagaaggcaacaagttcttctcctctacagaaggat

SEQ ID NO: 83078 - DNA, 120 bp, Artificial Sequence
  ENSG00000083099_45 (sequence is synthesized)
agcttgttgattagaggttcacatcgacaaccatttattggtgcctaagagagaaacaaaaaaggaatcaatcccttgttcattccttcatcaggcttcgcccacgactgaagcgcaaga

SEQ ID NO: 83079 - DNA, 120 bp, Artificial Sequence
  ENSG00000083099_46 (sequence is synthesized)
aaggaggcaaacggcattgttacaaccactggtgtgcgcagcatctgtgtgagagaattctccttggacctggggctctgacctaatggaatttacagcttagagggtgagagcaggtgt

SEQ ID NO: 83080 - DNA, 120 bp, Artificial Sequence
  ENSG00000083099_47 (sequence is synthesized)
tcacatcaagcaagcacctctggaccacctaccatcctcctaggtcttgtcctgggcaccacggggactcggagacaggcagctgggattcccagagaaaattctgcaaaacccatgctg

SEQ ID NO: 83081 - DNA, 120 bp, Artificial Sequence
  ENSG00000083099_48 (sequence is synthesized)
aagtgaagaggaaccgaggccagaggccaaatgcaccttagcagagagctcctggagagaaggctagaaagataagaaactgaggctcaaagaagttaagcaacttgcacaattagcaaa

SEQ ID NO: 83082 - DNA, 120 bp, Artificial Sequence
  ENSG00000083099_49 (sequence is synthesized)
caaagcagagttaaaatctgtgagcaggtgccctaactacagagtctgcactctctcccatttgtgattgcctgggccctggaaagtgctatgggtagatcacacaagctctgagttaag

SEQ ID NO: 83083 - DNA, 83 bp, Artificial Sequence
  ENSG00000083099_50 (sequence is synthesized)
ttgtcctgggcaccacggggactcggagacagtccacagaagtgagggaatattgaccttgaggcctccaaaagtagtatcct

SEQ ID NO: 83084 - DNA, 89 bp, Artificial Sequence
  ENSG00000083099_51 (sequence is synthesized)
ttgcaccactgtactccaacctgagtgacatcagtatcctcttagtactgctgtggcccatttaaaatccacgtccaactacgggccta

SEQ ID NO: 83085 - DNA, 120 bp, Artificial Sequence
  ENSG00000083099_52 (sequence is synthesized)
gctgtggcccatttaaaatccacgtccaactacgggcctaaggcaaggggattttctcttttcaggcaaagcaaatactaatgctatttctgtaaccacagatcaagagaacagtatgcg

SEQ ID NO: 83086 - DNA, 120 bp, Artificial Sequence
  ENSG00000083099_53 (sequence is synthesized)
taacatcttatgcctaaagttccttgtttgtgttgagaaaaagcctcagcatatacaattatgcataaaataaactttcatagcatgccatccaacttatttgttattcgatgtaagcat

SEQ ID NO: 83087 - DNA, 120 bp, Artificial Sequence
  ENSG00000083099_54 (sequence is synthesized)
acggggactcggagacaggtaggatattatccctgacctcaagaagcttaaagtctatgatgataataactacagacactgatgctgggccgggactgccaactacatgcacagagactg

SEQ ID NO: 83088 - DNA, 120 bp, Artificial Sequence
  ENSG00000083099_55 (sequence is synthesized)
tgctccagggagtgccattcacataaactaggatatgaatggcgtctcctggagttgtgcaacgcagcagccccgtgtgaggcacagtctcactctccatcttggtacactggacttgag

SEQ ID NO: 83089 - DNA, 120 bp, Artificial Sequence
  ENSG00000083099_56 (sequence is synthesized)
ctagcccagcagatgttcccttggccaaactgtgtccaagtcacatcaatttgattcaaaatattattaaagtgtatctatgagccatagtaccaaccacgggacagttatctcttcccc

SEQ ID NO: 83090 - DNA, 120 bp, Artificial Sequence
  ENSG00000083099_57 (sequence is synthesized)
cactgtggcccggtgcaaggcggtctggtccccctgcaaagtgacacaaaggcaggaacagcagtcagctcccctgcaccccctgcttgcactactcacttgacacttggacacaaggac

SEQ ID NO: 83091 - DNA, 120 bp, Artificial Sequence
  ENSG00000083099_58 (sequence is synthesized)
ccctcccgtccccacacagagcagagcggttattcgcagaagggcttggttaccacaggcaaggcgggctttgtggtcttgttagtagacaacgcacgctggcagagaaattttgttcat

SEQ ID NO: 83092 - DNA, 120 bp, Artificial Sequence
  ENSG00000083099_59 (sequence is synthesized)
aaactaagagggggaccttaagccgacagcaagaatagccctcggccacagagccaacctcaaaatgagggtcaggctctctcctgccatccaggggctatgactatcacaggtgtgaag

SEQ ID NO: 83093 - DNA, 120 bp, Artificial Sequence
  ENSG00000083099_60 (sequence is synthesized)
agtgggtgtgagggcaggtgtgtgctatgcaattaaagcagcaatgcctggaatctctactgcctgccgagtttccagcttgcagggggaccactgtccagctctgccagttagcagcac

SEQ ID NO: 83094 - DNA, 120 bp, Artificial Sequence
  ENSG00000083099_61 (sequence is synthesized)
gtcatttgttcattgacctgtactagtcaacggcaatgcaggggtttgccctatttcatctgaggactccagggactgcagctatcactgcatatttctaagaagcctcttcagagagtt

SEQ ID NO: 83095 - DNA, 120 bp, Artificial Sequence
  ENSG00000083099_62 (sequence is synthesized)
catgacaacatcctcactgatttatgctgcactctgagccctcttctctatgatcggattcctgggattgccggccgttgttctcctttaggcgccaaagggaacttgactcttcctaat

SEQ ID NO: 83096 - DNA, 120 bp, Artificial Sequence
  ENSG00000083099_63 (sequence is synthesized)
tgcagttgagtgaaggatgaaacactcccagaggtaagcaggtcaagactgtaacaggagagttctgaagtctctaagagcaccctttatctctgacaggtcctcaggaagctaagttga

SEQ ID NO: 83097 - DNA, 120 bp, Artificial Sequence
  ENSG00000083099_64 (sequence is synthesized)
ggtaaatcaagctgagcctgtggtccagccttgaaagggaggatgggtgggcagtgtggaaatgttctggtggaaagcaatgagcacgagacaaggggtcaggaggcctgggctgtgcat

SEQ ID NO: 83098 - DNA, 120 bp, Artificial Sequence
  ENSG00000083099_65 (sequence is synthesized)
ggcttgctagaagcctgtcaccctgctggacctcaggtgtgtcaccctggatgatcccagggtccctccattgccttcttggattctatgatgtggctggtcagagttttgtgaagtttc

SEQ ID NO: 83099 - DNA, 120 bp, Artificial Sequence
  ENSG00000083099_66 (sequence is synthesized)
ctggcagagcaccagaggggcaaagaaaacattctggggcgtccctggtgcttggcccaaaagaggacagaggccatcataagataaaacagattttttaaaagaaggatgcactgctac

SEQ ID NO: 83100 - DNA, 120 bp, Artificial Sequence
  ENSG00000083099_67 (sequence is synthesized)
ctataaacaaccttaacgaaatactgattctacttactaaactccccagatctgtaacaaacaatgcacattaaaaacatgtaatctgaaacaaagttctaaagatagatggtggtgatg

SEQ ID NO: 83101 - DNA, 120 bp, Artificial Sequence
  ENSG00000083099_68 (sequence is synthesized)
gttgcacaacaatgtgagtgtacttaatgccactgaaccgtatacgtaaatatgttcagacagtaaatttaatgctatgtatattttattacaataaaaaatcctagttaaaactcaaaa

SEQ ID NO: 83102 - DNA, 120 bp, Artificial Sequence
  ENSG00000083123_0 (sequence is synthesized)
gagaatcccggtggtgagcggggatggcggttgtagcggcggctgccggctggctactcaggctcagggcggcaggggctgaggggcactggcgtcggcttcctggcgcggggctggcgc

SEQ ID NO: 83103 - DNA, 120 bp, Artificial Sequence
  ENSG00000083123_1 (sequence is synthesized)
ggggctttttgcaccccgccgcgactgtcgaggatgcggcccagaggcggcaggtggctcattttactttccagccagatccggagccccgggagtacgggcaaactcagaaaatgaatc

SEQ ID NO: 83104 - DNA, 120 bp, Artificial Sequence
  ENSG00000083123_2 (sequence is synthesized)
ttttccagtctgtaacaagtgccttggataactcattggccaaagatcctactgcagtaatatttggtgaagatgttgcctttggtggagtctttagatgcactgttggcttgcgagaca

SEQ ID NO: 83105 - DNA, 120 bp, Artificial Sequence
  ENSG00000083123_3 (sequence is synthesized)
aatatggaaaagatagagtttttaataccccattgtgtgaacaaggaattgttggatttggaatcggaattgcggtcactggagctactgccattgcggaaattcagtttgcagattata

SEQ ID NO: 83106 - DNA, 120 bp, Artificial Sequence
  ENSG00000083123_4 (sequence is synthesized)
ttttccctgcatttgatcagattgttaatgaagctgccaagtatcgctatcgctctggggatctttttaactgtggaagcctcactatccggtccccttggggctgtgttggtcatgggg

SEQ ID NO: 83107 - DNA, 120 bp, Artificial Sequence
  ENSG00000083123_5 (sequence is synthesized)
ctctctatcattctcagagtcctgaagcattttttgcccattgcccaggaatcaaggtggttatacccagaagccctttccaggccaaaggacttcttttgtcatgcatagaggataaaa

SEQ ID NO: 83108 - DNA, 120 bp, Artificial Sequence
  ENSG00000083123_6 (sequence is synthesized)
atccttgtatattttttgaacctaaaatactttacagggcagcagcggaagaagtccctatagaaccatacaacatcccactgtcccaggccgaagtcatacaggaagggagtgatgtta

SEQ ID NO: 83109 - DNA, 120 bp, Artificial Sequence
  ENSG00000083123_7 (sequence is synthesized)
ctctagttgcctggggcactcaggttcatgtgatccgagaggtagcttccatggcaaaagaaaagcttggagtgtcttgtgaagtcattgatctgaggactataataccttgggatgtgg

SEQ ID NO: 83110 - DNA, 120 bp, Artificial Sequence
  ENSG00000083123_8 (sequence is synthesized)
acacaatttgtaagtctgtgatcaaaacagggcgactgctaatcagtcacgaggctcccttgacaggcggctttgcatcggaaatcagctctacagttcaggaggaatgtttcttgaacc

SEQ ID NO: 83111 - DNA, 120 bp, Artificial Sequence
  ENSG00000083123_9 (sequence is synthesized)
tagaggctcctatatcaagagtatgtggttatgacacaccatttcctcacatttttgaaccattctacatcccagacaaatggaagtgttatgatgcccttcgaaaaatgatcaactatt

SEQ ID NO: 83112 - DNA, 120 bp, Artificial Sequence
  ENSG00000083123_10 (sequence is synthesized)
gaccatataggtaggtatgcatcttgagaaagctactatgtgcccctgacattaacgtactgttaaccaagacacagcaatcatcagtgttttgatggtaacaaactttgatggtaaagt

SEQ ID NO: 83113 - DNA, 120 bp, Artificial Sequence
  ENSG00000083123_11 (sequence is synthesized)
tggtaaaaggcaactttcagaagaaaataatgtgctttagaaaaaaaattcaaatttatagtagtatatttacatttttgttgttgttgttgttctgagatggagtctcactctgtcgcc

SEQ ID NO: 83114 - DNA, 69 bp, Artificial Sequence
  ENSG00000083123_12 (sequence is synthesized)
ttggaggtggggtgtcactatgttggctcagctgatttcaaattcctgacctcaagtgatccacctgcc

SEQ ID NO: 83115 - DNA, 69 bp, Artificial Sequence
  ENSG00000083123_13 (sequence is synthesized)
acaggcatgagccactgcacctggctatatttacatttaatagaaacatatctagcatatgtatatgtg

SEQ ID NO: 83116 - DNA, 120 bp, Artificial Sequence
  ENSG00000083123_14 (sequence is synthesized)
acaggcatgagccaccgcgcctggcctgtatatgtgatttctaaaaaatagatgcatgcatatgttaacattgaatagtcaatcactagatgaagatgctctctaccatggtttagattg

SEQ ID NO: 83117 - DNA, 120 bp, Artificial Sequence
  ENSG00000083123_15 (sequence is synthesized)
aagatgctctctaccatggtttagattgcaagtgtactttataccattgtttcaacttcaacctttatttttgtatatattttttcagctacttaaactgttcatgaataggcgtacttt

SEQ ID NO: 83118 - DNA, 120 bp, Artificial Sequence
  ENSG00000083123_16 (sequence is synthesized)
ctgtatttaaaaatggcccctcaagcaccgttaatttacattccagttatttacatgataattcatgacattctgaaacttgcctgtatattatctgaaaaatggatttcttgagcaaaa

SEQ ID NO: 83119 - DNA, 120 bp, Artificial Sequence
  ENSG00000083123_17 (sequence is synthesized)
gatctgtttattgtatgtaaggaaaaattttacctgaaaacaaacaaacaaaccctaaaactcagcaccactaccatttccagaagcttttttaacaagtgaatattttttacataatgg

SEQ ID NO: 83120 - DNA, 120 bp, Artificial Sequence
  ENSG00000083123_18 (sequence is synthesized)
ataataaatggtatttattcatcatgattttctaagtaatgcttatcagccccttcagtggtgttattctaacaaaatgaatacattacaaattattaagttagcttttcagagttttaa

SEQ ID NO: 83121 - DNA, 120 bp, Artificial Sequence
  ENSG00000083123_19 (sequence is synthesized)
tatagaagttactagcactgacacactgattttgaaatgtttcaaaatgagtagatatgattagatcctttaccttttaatatctagtttttccaaaaatgatagtaatatcttttgaag

SEQ ID NO: 83122 - DNA, 120 bp, Artificial Sequence
  ENSG00000083123_20 (sequence is synthesized)
aactatgctttttcaaaagcaaaatcaactctgtataatagcacattctctactttttaaagatcagaaatgctagaattcttgacttttgtgtatgggtagtaaatctagctcactgaa

SEQ ID NO: 83123 - DNA, 120 bp, Artificial Sequence
  ENSG00000083123_21 (sequence is synthesized)
aatcagagtgaaacgcctttacatttgtgcggatagagaagttaactctccctcatatgtcactgtgctaccataatccctacattttctgtctgttctagtctaagaatattgttatag

SEQ ID NO: 83124 - DNA, 120 bp, Artificial Sequence
  ENSG00000083123_22 (sequence is synthesized)
atggaagttaggaccattagcccacagatgcatgtattctctcagacataccggtgtagatgctatatttctgatgtcttcttaatgtctgtgaaagcaactggcatctacaataaatca

SEQ ID NO: 83125 - DNA, 120 bp, Artificial Sequence
  ENSG00000083123_23 (sequence is synthesized)
cacttagagctggttagaggactccttcacttttgttgtccatgtggttcccttccgtggaccagccgtaataaagagccaaggtagtgatggtggccacgtgcctcgttgctattttta

SEQ ID NO: 83126 - DNA, 120 bp, Artificial Sequence
  ENSG00000083123_24 (sequence is synthesized)
aagtaatattcagatgtggttttaaatttagattatgtattccttttgaaacataagaaaaacatttaaacctatgctgaaaatacgataaaagaaaaacaactccaatatgctaaaagt

SEQ ID NO: 83127 - DNA, 120 bp, Artificial Sequence
  ENSG00000083123_25 (sequence is synthesized)
taaatatggtatttaagaaaatagtcatgtatgcaattgagaaagtctataatttattttacagaaaagctggaagattatgactagatatggaaatattttttctgaatttttttttat

SEQ ID NO: 83128 - DNA, 120 bp, Artificial Sequence
  ENSG00000083123_26 (sequence is synthesized)
atttcctccgacttacctctttttgaaaagagagtttttattaagtgaaccatcacgatattggctgaaaagttctacattctattattgtattgtaacacacatgtattgatgattttc

SEQ ID NO: 83129 - DNA, 120 bp, Artificial Sequence
  ENSG00000083123_27 (sequence is synthesized)
attaagagtttcagattaactttgaaaaatattccacatggtaatcttataaattctgtttaattacatctgtaaatattatgtgtgtgatagtattcaataaagtaaaatcaaattgtc

SEQ ID NO: 83130 - DNA, 120 bp, Artificial Sequence
  ENSG00000083123_28 (sequence is synthesized)
attgtctacacgcatttagtcacttggttatattccttcttcctgttttatacttttacaaaaaattgtttaatatgggtaaattttgccccattaacaagcttctccagggcaaactca

SEQ ID NO: 83131 - DNA, 120 bp, Artificial Sequence
  ENSG00000083123_29 (sequence is synthesized)
ctgtttgtgtatggtatttgcagcaaccaacatcaacagctggtttgttctctcatttttcaagtctgtgatcaaaacagggcgactgctaatcagtcacgaggctcccttgacaggcgg

SEQ ID NO: 83132 - DNA, 120 bp, Artificial Sequence
  ENSG00000083168_0 (sequence is synthesized)
actgtctccaagatggcggccgtgtcagtttggggcatctccgcggtccggcccggggccccgggatctcggctgtccttcctcccggcataagatgcacatttttctgctctggagccg

SEQ ID NO: 83133 - DNA, 120 bp, Artificial Sequence
  ENSG00000083168_1 (sequence is synthesized)
ggaatgaaatattcttgagttcttacaactttatgacgagacccatgtgtggtgctattgagaaattcattgggaagttggaagacatttcaatcaacaggttgttttggtttctatagt

SEQ ID NO: 83134 - DNA, 120 bp, Artificial Sequence
  ENSG00000083168_2 (sequence is synthesized)
acaattggggtggcattctgttttgtgaaaggaggaaggacttaggccagaaaactcatatgctatggttaactggttcccagcctccgagaatcttgttttccatggtgtaaaacttac

SEQ ID NO: 83135 - DNA, 120 bp, Artificial Sequence
  ENSG00000083168_3 (sequence is synthesized)
tcagcatcaggataagggataacgactctatggatatacagaatccttcaccatggtaaaactcgcaaacccgctttatactgagtggattttggaggccatcaaaaaagtgaaaaagca

SEQ ID NO: 83136 - DNA, 120 bp, Artificial Sequence
  ENSG00000083168_4 (sequence is synthesized)
gaaacagcgtccttcagaagaaaggatatgcaatgctgtgtcttcatcccatggcttggatcgtaaaactgttttagaacaattggagttgagtgttaaagatggaacaattttaaaagt

SEQ ID NO: 83137 - DNA, 120 bp, Artificial Sequence
  ENSG00000083168_5 (sequence is synthesized)
ctcaaataaaggactcaattcctataaagatcctgataatcctgggcgaatagcacttcctaagcctcggaaccatggaaaattggataataaacaaaatgtggattggaataaactgat

SEQ ID NO: 83138 - DNA, 120 bp, Artificial Sequence
  ENSG00000083168_6 (sequence is synthesized)
aaagcgggcagttgagggcttggcagagtctggtggctcaactttgaaaagcattgaacgttttttgaaaggtcagaaggatgtgtctgcattattcggaggcagtgctgcctctggctt

SEQ ID NO: 83139 - DNA, 120 bp, Artificial Sequence
  ENSG00000083168_7 (sequence is synthesized)
tcaccagcagttacgattggctatcaaacgtgccattggccacggcagactccttaaagatggacctctttatcggctcaacactaaagcaaccaacgtggatgggaaagagagttgtga

SEQ ID NO: 83140 - DNA, 120 bp, Artificial Sequence
  ENSG00000083168_8 (sequence is synthesized)
gtctctttcctgtttacctccagtgtcccttcttccacatgaaaaggataagccggttgctgaaccaatccccatctgtagtttctgtcttggtacaaaagaacaaaaccgagaaaagaa

SEQ ID NO: 83141 - DNA, 120 bp, Artificial Sequence
  ENSG00000083168_9 (sequence is synthesized)
gccagaggaactcatctcctgtgccgactgtggcaacagtggccatccatcctgtttaaagttttcccctgaactaacggttcgagtgaaggccttacggtggcagtgcatcgagtgtaa

SEQ ID NO: 83142 - DNA, 120 bp, Artificial Sequence
  ENSG00000083168_10 (sequence is synthesized)
aacatgcagctcctgtcgagatcaaggcaaaaatgcggataacatgctcttttgtgattcatgtgaccgaggttttcacatggagtgttgtgatccgccactcacccgtatgccaaaagg

SEQ ID NO: 83143 - DNA, 120 bp, Artificial Sequence
  ENSG00000083168_11 (sequence is synthesized)
catgtggatatgtcaaatatgtcgacctaggaaaaaaggacgaaaacttctacaaaagaaggcagcacagataaaacggcgctatactaatccaataggacgtccaaaaaacaggttaaa

SEQ ID NO: 83144 - DNA, 120 bp, Artificial Sequence
  ENSG00000083168_12 (sequence is synthesized)
gaaacaaaacacggtatcaaaaggtcccttcagcaaagttcgaactggccctggaaggggtaggaaacgaaaaatcactctttccagccaatcagcatcatcatcatcagaagaaggata

SEQ ID NO: 83145 - DNA, 120 bp, Artificial Sequence
  ENSG00000083168_13 (sequence is synthesized)
tttagagcggatagatggcttggacttctgcagagatagcaatgtctccttgaagttcaacaagaaaaccaaagggctcattgatggccttaccaaattttttaccccttcccctgatgg

SEQ ID NO: 83146 - DNA, 120 bp, Artificial Sequence
  ENSG00000083168_14 (sequence is synthesized)
gcggaaagctcggggggaagtggtggactactctgagcaatatcgaatcagaaagaggggcaacaggaaatcaagcacttcagattggcccacagacaatcaggatggctgggatggcaa

SEQ ID NO: 83147 - DNA, 120 bp, Artificial Sequence
  ENSG00000083168_15 (sequence is synthesized)
acaagaaaatgaggagcgactttttgggagccaggaaatcatgactgagaaagatatggaattatttcgtgatatccaagaacaagcactgcagaaagttggagtgactggtccccctga

SEQ ID NO: 83148 - DNA, 120 bp, Artificial Sequence
  ENSG00000083168_16 (sequence is synthesized)
tccacaagtccgctgtccctctgtcattgagtttgggaagtatgaaattcacacctggtactcctccccatatcctcaagaatactcaaggctgcccaaattgtatctttgtgaattttg

SEQ ID NO: 83149 - DNA, 120 bp, Artificial Sequence
  ENSG00000083168_17 (sequence is synthesized)
tctaaaatatatgaaaagtagaactattctgcagcagcacatgaagaaatgtggttggttccatcctcctgccaatgagatttacagaaagaataatatttctgtctttgaggttgatgg

SEQ ID NO: 83150 - DNA, 120 bp, Artificial Sequence
  ENSG00000083168_18 (sequence is synthesized)
gaatgtgagtaccatttattgtcaaaacctgtgtcttttggcaaagttgtttcttgaccacaaaaccctctattacgatgtggagccatttcttttttatgtactaacacagaatgatgt

SEQ ID NO: 83151 - DNA, 120 bp, Artificial Sequence
  ENSG00000083168_19 (sequence is synthesized)
caagggctgccaccttgttggctacttttctaaggaaaagcactgccaacagaagtacaatgtttcctgtataatgattcttcctcaataccagcgtaagggctatggcaggtttctcat

SEQ ID NO: 83152 - DNA, 120 bp, Artificial Sequence
  ENSG00000083168_20 (sequence is synthesized)
cgatttcagttatttgttatcaaagcgtgaaggccaagcagggtctccagagaaaccgttatctgatctgggtcgtctttcctacatggcatattggaaaagtgtaatattggagtgcct

SEQ ID NO: 83153 - DNA, 120 bp, Artificial Sequence
  ENSG00000083168_21 (sequence is synthesized)
ttatcaccaaaatgacaagcagatcagcattaagaagttaagcaagttgactggaatctgccctcaagacatcacttccacactccaccacctacgaatgctggacttccgtagtgacca

SEQ ID NO: 83154 - DNA, 120 bp, Artificial Sequence
  ENSG00000083168_22 (sequence is synthesized)
atttgtgattatccgccgggaaaaacttatccaggatcacatggcaaagcttcagctgaatttgcgacctgtagatgtagatccagaatgtttgcgctggactccagtcatagtgtccaa

SEQ ID NO: 83155 - DNA, 120 bp, Artificial Sequence
  ENSG00000083168_23 (sequence is synthesized)
ctctgtggtctcagaggaggaagaagaggaggctgaggaaggagaaaacgaagagccacagtgccaggaaagagaattagagatcagtgtgggaaagtctgtgtctcatgagaacaaaga

SEQ ID NO: 83156 - DNA, 120 bp, Artificial Sequence
  ENSG00000083168_24 (sequence is synthesized)
acaagattcttattcagtagaaagtgaaaagaaaccagaagttatggctccagtcagttctacacgtttgagcaaacaagtccttcctcatgatagtcttcctgcaaatagccagccatc

SEQ ID NO: 83157 - DNA, 120 bp, Artificial Sequence
  ENSG00000083168_25 (sequence is synthesized)
tcggaggggccgctgggggaggaagaacagaaaaacccaggaacgttttggtgataaagattctaaactgctcttggaagagacgtcttcagctcctcaggaacaatatggagaatgtgg

SEQ ID NO: 83158 - DNA, 120 bp, Artificial Sequence
  ENSG00000083168_26 (sequence is synthesized)
ggagaaatcagaagccacccaggaacaatacactgaaagtgaagaacagctggtggcttctgaggagcagccaagccaggacgggaaacctgaccttcccaagagaagactcagtgaggg

SEQ ID NO: 83159 - DNA, 120 bp, Artificial Sequence
  ENSG00000083168_27 (sequence is synthesized)
ggttgagccctggcgaggacagctcaagaaaagccctgaggctctgaagtgcagattaacagaaggaagtgagaggctgccccgtcgctacagtgagggtgacagggctgtcctcagggg

SEQ ID NO: 83160 - DNA, 120 bp, Artificial Sequence
  ENSG00000083168_28 (sequence is synthesized)
cttcagtgagagcagcgaggaggaggaggagccggaaagccctcggtcaagctcgccaccaattctcacaaagcccacgctgaagcgaaagaaaccatttctccaccgaaggaggagagt

SEQ ID NO: 83161 - DNA, 120 bp, Artificial Sequence
  ENSG00000083168_29 (sequence is synthesized)
ccgaaagcgcaaacaccacaatagcagtgtagtcacagaaactatttctgagaccactgaagtgttagatgaaccttttgaagattctgactccgagaggccaatgccaagattagaacc

SEQ ID NO: 83162 - DNA, 120 bp, Artificial Sequence
  ENSG00000083168_30 (sequence is synthesized)
cacgtttgagatcgatgaagaagaggaggaagaggatgaaaatgaacttttccctagagaatacttccgtcgtttgtcttcgcaggatgtactcaggtgtcagtcctcttctaagaggaa

SEQ ID NO: 83163 - DNA, 120 bp, Artificial Sequence
  ENSG00000083168_31 (sequence is synthesized)
gtctaaagatgaagaagaagatgaagagtcagatgatgctgatgacactcctatcttaaagccagtatctcttttgcgaaaacgtgatgtgaagaattctcctcttgagccagatacatc

SEQ ID NO: 83164 - DNA, 120 bp, Artificial Sequence
  ENSG00000083168_32 (sequence is synthesized)
cacacctttgaaaaagaaaaagggatggcccaaaggcaagagccgcaaaccaatccactggaagaaaagacctggtcgaaaaccaggatttaagttgagtcgggaaatcatgccagtttc

SEQ ID NO: 83165 - DNA, 120 bp, Artificial Sequence
  ENSG00000083168_33 (sequence is synthesized)
tactcaagcatgcgtcattgagcccatcgtttccattcctaaagctggacgtaaacccaagatccaggagagtgaagaaactgttgagccaaaagaagacatgcccctacccgaggagag

SEQ ID NO: 83166 - DNA, 120 bp, Artificial Sequence
  ENSG00000083168_34 (sequence is synthesized)
gaaggaggaggaggagatgcaagcagaggcagaagaggctgaagagggtgaggaagaggatgcagccagcagtgaagtcccagcagcctctccagcagacagcagcaatagtcctgagac

SEQ ID NO: 83167 - DNA, 120 bp, Artificial Sequence
  ENSG00000083168_35 (sequence is synthesized)
cgaaaccaaggagcctgaggtggaggaggaagaagagaagccccgtgtctcagaggagcagaggcagtcagaggaggagcagcaggaattagaggagccagagccagaggaggaggaaga

SEQ ID NO: 83168 - DNA, 120 bp, Artificial Sequence
  ENSG00000083168_36 (sequence is synthesized)
tgcagctgcagagactgcccagaatgacgaccacgacgctgatgatgaggatgatggccacctggagtccacaaagaaaaaggagctagaggaacagcccacgagggaagatgtcaagga

SEQ ID NO: 83169 - DNA, 120 bp, Artificial Sequence
  ENSG00000083168_37 (sequence is synthesized)
ggagcctggtgttcaagagtcttttttagatgctaatatgcagaagagtagggaaaagataaaggataaagaggaaaccgagctggattccgaagaggagcagccttcccatgacacgtc

SEQ ID NO: 83170 - DNA, 120 bp, Artificial Sequence
  ENSG00000083168_38 (sequence is synthesized)
cgaccacgaagaagactcccacactaaggaagagttaatcgaattaaaagaggaggaagagattcctcatagtgagctggatctggaaactgtacaggcagtgcagtctttgactcaaga

SEQ ID NO: 83171 - DNA, 120 bp, Artificial Sequence
  ENSG00000083168_39 (sequence is synthesized)
agaaagcagtgagcatgagggcgcctaccaggactgtgaggaaactcttgcggcgtgtcagaccctgcagagttacacccaggctgacgaggaccctcagatgtccatggttgaagactg

SEQ ID NO: 83172 - DNA, 120 bp, Artificial Sequence
  ENSG00000083168_40 (sequence is synthesized)
tcatgcgtcagaacataatagccctatctcctccgttcagtctcaccccagccagtcagtccgttcggtcagcagtcccaacgtgcctgcccttgagagtggctacacccagatcagccc

SEQ ID NO: 83173 - DNA, 120 bp, Artificial Sequence
  ENSG00000083168_41 (sequence is synthesized)
agaacaaggatccctgtccgcaccctctatgcagaacatggagaccagccccatgatggatgtgccttccgtatcagaccactctcagcaggtggtggacagcggcttcagtgacctggg

SEQ ID NO: 83174 - DNA, 120 bp, Artificial Sequence
  ENSG00000083168_42 (sequence is synthesized)
cagcattgagagcaccactgaaaactatgagaacccaagcagttacgactccacgatgggcggcagcatctgtgggaacagctcttcccagagcagctgctcctacggtgggctgtcgtc

SEQ ID NO: 83175 - DNA, 120 bp, Artificial Sequence
  ENSG00000083168_43 (sequence is synthesized)
ctccagcagcctcacccagagcagctgtgtggtcactcagcagatggccagcatgggcagcagctgcagcatgatgcagcagagcagcgtccagcctgctgccaactgcagcatcaagtc

SEQ ID NO: 83176 - DNA, 120 bp, Artificial Sequence
  ENSG00000083168_44 (sequence is synthesized)
acctcagagctgcgtggtggagaggcctcccagtaaccagcagcagcagccgccaccaccgcctccacagcagccacagccgccgccgccacaaccacaaccagcaccacagcctccacc

SEQ ID NO: 83177 - DNA, 120 bp, Artificial Sequence
  ENSG00000083168_45 (sequence is synthesized)
accccagcagcagccgcaacagcagccgcagcctcagccccagcagcctccacccccaccccctccccagcagcagcccccgctgtcacagtgtagtatgaataacagtttcaccccagc

SEQ ID NO: 83178 - DNA, 120 bp, Artificial Sequence
  ENSG00000083168_46 (sequence is synthesized)
tcctatgatcatggagataccagaatctggaagcactgggaacataagtatctatgagaggattccaggggattttggtgccggcagctactctcaaccatcagccaccttcagcctagc

SEQ ID NO: 83179 - DNA, 120 bp, Artificial Sequence
  ENSG00000083168_47 (sequence is synthesized)
caagctgcagcagctgaccaacaccattatggaccctcatgccatgccttatagccattctcctgctgtgacttcctatgcaaccagtgtttctctgtccaatacaggactggctcagct

SEQ ID NO: 83180 - DNA, 120 bp, Artificial Sequence
  ENSG00000083168_48 (sequence is synthesized)
ggctccatctcatcccttagctgggactcctcaagcacaagccaccatgacgccacccccaaacttggcatccactaccatgaacctcacatctcctctgcttcagtgcaacatgtctgc

SEQ ID NO: 83181 - DNA, 120 bp, Artificial Sequence
  ENSG00000083168_49 (sequence is synthesized)
caccaacattggcattcctcacacgcagagattgcaagggcaaatgccagtgaaggggcacatttccatccgctccaagtctgcgccactgccctctgcggctgctcaccagcagcagct

SEQ ID NO: 83182 - DNA, 120 bp, Artificial Sequence
  ENSG00000083168_50 (sequence is synthesized)
gtatggccgtagcccatcggcagttgccatgcaggctggccctcgcgcactggctgttcagcgtggcatgaacatgggggttaatctgatgcctactcccgcctataatgtcaattccat

SEQ ID NO: 83183 - DNA, 120 bp, Artificial Sequence
  ENSG00000083168_51 (sequence is synthesized)
gaatatgaacaccttgaatgccatgaacagctatcgaatgacacagcccatgatgaacagcagttaccatagtaaccctgcctacatgaaccagacagcacagtatcctatgcagatgca

SEQ ID NO: 83184 - DNA, 120 bp, Artificial Sequence
  ENSG00000083168_52 (sequence is synthesized)
gatgggaatgatggggagccaggcctatacccagcagcctatgcagcctaaccctcatgggaacatgatgtacacaggcccctcccatcacagctacatgaacgctgctggcgtgcccaa

SEQ ID NO: 83185 - DNA, 120 bp, Artificial Sequence
  ENSG00000083168_53 (sequence is synthesized)
gcagtcactcaacggaccttacatgagaagatgagcaagatgaacttgcaatcaaaaacttaaatatatataaataaaggaaccttttatactgacaaaccagagaaaaatggacctttt

SEQ ID NO: 83186 - DNA, 120 bp, Artificial Sequence
  ENSG00000083168_54 (sequence is synthesized)
tccagttaaaatattgctgtagatttagaggaatttttctttggtttattttattttttagaaaacctgatcttctctttttttgggttcattttgttctgggttttggttttcttcaca

SEQ ID NO: 83187 - DNA, 120 bp, Artificial Sequence
  ENSG00000083168_55 (sequence is synthesized)
atcttgaacattttacagtagaactcatctaaaaatggatttggggatggggaaacatgcacaaaatcttttcataattaaaaagagccttactttctttacataccacatggacagaat

SEQ ID NO: 83188 - DNA, 120 bp, Artificial Sequence
  ENSG00000083168_56 (sequence is synthesized)
ttgtgtaaaagtgaattatctttattttaaaatgtatgtttcccctcactgtttgcagctcccaatgttgtcatttttaaatgttatatacatctcaagggttaaccagaccctttcctc

SEQ ID NO: 83189 - DNA, 120 bp, Artificial Sequence
  ENSG00000083168_57 (sequence is synthesized)
caaacccaacctttcatttcctacttcattccagcaggaggcacttaggggagactcggatggggacatggagaacaacccaagctccttaaacttattattattgttaatattattatt

SEQ ID NO: 83190 - DNA, 120 bp, Artificial Sequence
  ENSG00000083168_58 (sequence is synthesized)
attattattaataaagtgaggcaggaaaatgcttctccttttaaaatcccctccactcctcacacacacacacctcttgaaacccttccccaagaatgtttctttatagacggacttcat

SEQ ID NO: 83191 - DNA, 120 bp, Artificial Sequence
  ENSG00000083168_59 (sequence is synthesized)
tgaaatctttgttgttcttgaatcaagtgtaatataatttttttcttcttttttaaaatattcccactcagcactcagagacacaaaaatactgtaagtctcaattaacagcagaatctc

SEQ ID NO: 83192 - DNA, 120 bp, Artificial Sequence
  ENSG00000083168_60 (sequence is synthesized)
agagaaaagctgtttgcaatccaaatccagcctttggaggaatagagatggtcaattaacaatcaaaaagaggagattaacctcttgtttttttaccacctggtgaatcagccataacgc

SEQ ID NO: 83193 - DNA, 120 bp, Artificial Sequence
  ENSG00000083168_61 (sequence is synthesized)
acacacacgccacccagcctcttgtttctagtatgtactttgaaatgctaactgagggtcttgatgcttgagcctttgactgataaaactcaaatagcagtccccagtgatttgcctctt

SEQ ID NO: 83194 - DNA, 120 bp, Artificial Sequence
  ENSG00000083168_62 (sequence is synthesized)
aggttctttcttaaattgttggtggatgactgtacattttagtgatttgaaaaataactgacaaaccattgaaacagtttattttatgttggaagagatggcgcagatgtgtgtcagaag

SEQ ID NO: 83195 - DNA, 120 bp, Artificial Sequence
  ENSG00000083168_63 (sequence is synthesized)
ggagatcacggtgtgagtttcgtagctatttaagtgatacatacctctagtttttgtatgtcttttgagatcctgagttcatcccctgtgaatcagagtgcacaagcacctctcctgtga

SEQ ID NO: 83196 - DNA, 120 bp, Artificial Sequence
  ENSG00000083168_64 (sequence is synthesized)
gtggctaatgagaagagggacagaccgaccaccagcacagtagggcagatctggacagcagaatgttataacgcaagttcatgtgttgctcccaactccattctcttttctctcgtgcaa

SEQ ID NO: 83197 - DNA, 77 bp, Artificial Sequence
  ENSG00000083168_65 (sequence is synthesized)
atgtgttgctcccaactccattctcttttctctcgtgcaaccagtttgcccattctcttcctattacttgctccagg

SEQ ID NO: 83198 - DNA, 120 bp, Artificial Sequence
  ENSG00000083168_66 (sequence is synthesized)
tatatatatatattccatcattagaagatggaaactattataccacttggtatgtgcagtcaaatatccaaaagggggaagtactgcttagagaaatatctgtaagcattaaattctctc

SEQ ID NO: 83199 - DNA, 120 bp, Artificial Sequence
  ENSG00000083168_67 (sequence is synthesized)
ctttatttgtacattttatatagataaatttttaaagtactaattaggcattaacttttttcaaatgcacaggtttgttggtttttttaatacactttaattgactttctcaagcgtgct

SEQ ID NO: 83200 - DNA, 120 bp, Artificial Sequence
  ENSG00000083168_68 (sequence is synthesized)
aggtagaaacgcagaattccacatcttcccgctctcagctctgagcatgtgcaaggctgtgtaggacccagtttctctgtatatactattccagttcccagtcatctatgtagaaagtgc

SEQ ID NO: 83201 - DNA, 120 bp, Artificial Sequence
  ENSG00000083168_69 (sequence is synthesized)
actgtgctgccatcgccctacatcttcagctgtgtcattgcttcctggttggggtggggacggggtgggtcgggagggaggtatattgggaggagggtgggtcaaggcagaaggagaagc

SEQ ID NO: 83202 - DNA, 120 bp, Artificial Sequence
  ENSG00000083168_70 (sequence is synthesized)
tgttgaaatgagggccgtgaaatcagtttctgttggtttgcggttgtgtttggttttgtttgtttctttataaaaaattcaatcgggcagctcccttttccacaagcctctttgtgactg

SEQ ID NO: 83203 - DNA, 120 bp, Artificial Sequence
  ENSG00000083168_71 (sequence is synthesized)
tagaactattgtagaaaaaaaaagttcttttctatattataaaagaaattatccaacacagtaatattggtacctgtcattttttcacttctgtttaaaaaaaatgtatttttagcaaga

SEQ ID NO: 83204 - DNA, 120 bp, Artificial Sequence
  ENSG00000083168_72 (sequence is synthesized)
taacttgggtaatcttctaaaaaagaaatttaaaaactcactgttagtgactttgatgccttttaaaataagagctttttcatttcattccatctttaaaattttttatctttgttgtag

SEQ ID NO: 83205 - DNA, 120 bp, Artificial Sequence
  ENSG00000083168_73 (sequence is synthesized)
aatattaaaaactattttaagaaagataaattctctttaaagagatctctagcgtgtgtgaatagagctccagatgcctctaaaagccgcatgtacaaaggaagccacgtctatcctgtc

SEQ ID NO: 83206 - DNA, 120 bp, Artificial Sequence
  ENSG00000083168_74 (sequence is synthesized)
tgtttatatttgcttttcctgttttgtaacctctttgtactttgttcatggtgacttgtaagctaaggggaaggggtgcctagatgcctttgtatctctccatgtcacgcgctcctgggc

SEQ ID NO: 83207 - DNA, 120 bp, Artificial Sequence
  ENSG00000083168_75 (sequence is synthesized)
cagccggcctcccttcctctccttgtatgtaatacctttttttcccctttctagcaagtactttcaaaagaactctgtacattttaacataaaaaataaattatgttgagccattttgga

SEQ ID NO: 83208 - DNA, 120 bp, Artificial Sequence
  ENSG00000083168_76 (sequence is synthesized)
ctcactgtctccaagatggcggccgtgtcagtttggggcatctccgcggtccggcccggggccccgggatctcggctgtccttcctcccggattctttctactaatccagatacttgttg

SEQ ID NO: 83209 - DNA, 120 bp, Artificial Sequence
  ENSG00000083168_77 (sequence is synthesized)
aagtgctgactagtttcttggggaaagatgtcaaggaagagttgaaattcctagactggtgagcagagattgcggagtacagaatagccatcacccactctggcataagatgcacatttt

SEQ ID NO: 83210 - DNA, 120 bp, Artificial Sequence
  ENSG00000083168_78 (sequence is synthesized)
tttgatgacagaagatatatttttgatttcatgagtatttataataatgtattatgatcatctttcacagaaaagtaaattcacattagaatgtcaagagttttatttcagtggtagaga

SEQ ID NO: 83211 - DNA, 120 bp, Artificial Sequence
  ENSG00000083168_79 (sequence is synthesized)
tttcaagaagactggacctggtttacttaagtatttttaagccttggacaattaggaggagaccatcaaatttcttataatgtgttacttgtgagaaaaatatttgttaccagggtgcca

SEQ ID NO: 83212 - DNA, 120 bp, Artificial Sequence
  ENSG00000083168_80 (sequence is synthesized)
agaagcagctcagttttaagctggatagtagttgagaaatctgaattgaatccaaatctgacagtttttaaaaatgaaatggaggttgggtgtggtgtttcatgcctgtaatctcagcgc

SEQ ID NO: 83213 - DNA, 120 bp, Artificial Sequence
  ENSG00000083168_81 (sequence is synthesized)
tttaggaggcccaggcgggaggattgcttgagattaggagttcaggacaaccagggaaatatagtgagaccccatctctacaaaaaaaacccaacaacaaaatgaaatggagatacattt

SEQ ID NO: 83214 - DNA, 120 bp, Artificial Sequence
  ENSG00000083168_82 (sequence is synthesized)
tccttaaatagaatattaagtaactattgtaaacttgtgtatgttttctgatggggcaccaaaacatcctgtggacacacagatctctttagccgttaaagggttgctggtgaactgtag

SEQ ID NO: 83215 - DNA, 120 bp, Artificial Sequence
  ENSG00000083168_83 (sequence is synthesized)
tgcatgtgtcattgtcagtatttttcttcatgtgatgcatacttttatagctcttttttttaagcagtgcttcatcctttcaacaccggtatcctcctttaataaacataaaaaatccca

SEQ ID NO: 83216 - DNA, 120 bp, Artificial Sequence
  ENSG00000083168_84 (sequence is synthesized)
ttggatattcaggttagacaatcaagcaacttgttcatggctgagaaacagcagattaattacattgtgggttaagcagtaacagcagtttgcctaatctcagaatagttgtggtttgtg

SEQ ID NO: 83217 - DNA, 120 bp, Artificial Sequence
  ENSG00000083168_85 (sequence is synthesized)
tgtatatgtagttctgctgtttataatattcctttcaaacccatgataactgctttggttttgcagataagcacatggctttgactatcaatattaaataagcttggtttattttttgtc

SEQ ID NO: 83218 - DNA, 120 bp, Artificial Sequence
  ENSG00000083168_86 (sequence is synthesized)
ttactgtatgaagaagaatttgggatttgaccaaaaacaaacaaaaaacaagcttctcatgagtgataaaacacctatatttattaattcaagaagtatttcatgcctgtaatcctagca

SEQ ID NO: 83219 - DNA, 120 bp, Artificial Sequence
  ENSG00000083168_87 (sequence is synthesized)
ctttgccaaggtgggtggattgcttgagtctgggagtttgagaccagctggggcaaaatggcaaaaccccatctcaaaaaaaaaatagaaaaattagccaggtatgttggtgcacacctg

SEQ ID NO: 83220 - DNA, 80 bp, Artificial Sequence
  ENSG00000083168_88 (sequence is synthesized)
aaaaatagaaaaattagccaggtatgttggtgcacacctgtagtcaggggaaatggaggttgcagtgacctgagatcatg

SEQ ID NO: 83221 - DNA, 120 bp, Artificial Sequence
  ENSG00000083168_89 (sequence is synthesized)
ttccaaaaaaaaaaaaattgcaattctttgtgacacatggcaagatcgtaaatatatagacagagtctatgtgccacatgctggagatgccagtgaatgactgaattctttccctgaact

SEQ ID NO: 83222 - DNA, 120 bp, Artificial Sequence
  ENSG00000083168_90 (sequence is synthesized)
ataggagagatttgtgaataagtaatgtcattaatatgaaaagttcaattatagaatacttgatgttttgggagaatagggaagccagcttctacttctgcctggggaggtcagaggagg

SEQ ID NO: 83223 - DNA, 120 bp, Artificial Sequence
  ENSG00000083168_91 (sequence is synthesized)
attcattgaggggccttaaaggatatgtaggagttgtacatatcccttaaagggatatgtagggagttggttcttatataatcagaaggaacagaagtgaaggtggaatagacttgaaga

SEQ ID NO: 83224 - DNA, 120 bp, Artificial Sequence
  ENSG00000083168_92 (sequence is synthesized)
taggggaaaacatgcttaattgtgggaattaaaatggctcaggataaagaatatagggtgtggagaatggcaggaggtgaggttggaaaagtgcaggggctagatcataaaggctcttcc

SEQ ID NO: 83225 - DNA, 120 bp, Artificial Sequence
  ENSG00000083168_93 (sequence is synthesized)
agattatgttcatttattttttgtcttttccttctttgccaccaacaaatgtaccatgtaagccaagttctcttttatcttgaaaagaagaatttctaggctgggcacggtggctcaccc

SEQ ID NO: 83226 - DNA, 120 bp, Artificial Sequence
  ENSG00000083168_94 (sequence is synthesized)
gagcatcctgaattcaaaatctgcagtgttcttacgagcatttcgtttgagtatcattagtgctcaaaacgtttcagattttggagcatttcaggtttcagattttcagattagggatac

SEQ ID NO: 83227 - DNA, 120 bp, Artificial Sequence
  ENSG00000083168_95 (sequence is synthesized)
tcaacttgtataacatttaatactatctgcagttttcaggtattcactgtaggttttggaaaggtgtattcccagtgggtggataagggggactattgaataaacaagtaattaaagcca

SEQ ID NO: 83228 - DNA, 120 bp, Artificial Sequence
  ENSG00000083168_96 (sequence is synthesized)
agtttgcagaatattcttaataatatagattttaataaagctgtaggttacttactaattatatgttatgtattaaaaaggaaccttacaagtatcttttttaatacttaccctttcccc

SEQ ID NO: 83229 - DNA, 120 bp, Artificial Sequence
  ENSG00000083168_97 (sequence is synthesized)
ggggatggaactcagattacttcctttaatgttaatatattgttttgaaataggactcatgattagacatgttatatatgccattaaattgcaaagttagggaaaatattttacttttgg

SEQ ID NO: 83230 - DNA, 120 bp, Artificial Sequence
  ENSG00000083168_98 (sequence is synthesized)
tgattgggggtgtgtgtgtatggtatacaaacagtccgtgcaataacagtattgtttgtatttacttttcctaatgtaatacgtttccaaattaacattcttagactgcttttatgtttt

SEQ ID NO: 83231 - DNA, 120 bp, Artificial Sequence
  ENSG00000083168_99 (sequence is synthesized)
ctttaatgacagtaaaaatacctttctctgccatctccattttcgttgcttttccttagaagttaggcctttgtttttcagttcttgagagttgtgcactatagaggacagagtccacag

SEQ ID NO: 83232 - DNA, 120 bp, Artificial Sequence
  ENSG00000083168_100 (sequence is synthesized)
ttccacacttatattggcagtcctgcttgcctagagttagaatgataggtaattgtgaggagttttggttgaagtgaaagattgtcatctaattcactgacagaactacaattttaatag

SEQ ID NO: 83233 - DNA, 120 bp, Artificial Sequence
  ENSG00000083168_101 (sequence is synthesized)
gattatgtgaaaatgaaggcattcttttgtacttctcagttcagatacagcagttgccatctagtggtccaaataaagcatgcaaggcttgttttccccaggacgttgaacgaaactgtt

SEQ ID NO: 83234 - DNA, 120 bp, Artificial Sequence
  ENSG00000083168_102 (sequence is synthesized)
aacagtcctgatttttaacacttcgaatattttaacaaggtgattgatattaactgtagacataataatactaacttagtcttcaatatatataaattatgtattctttctgcagatttg

SEQ ID NO: 83235 - DNA, 120 bp, Artificial Sequence
  ENSG00000083168_103 (sequence is synthesized)
ttttgaagtagttttgcaatttgtttctctctttttttttttggaaggaatttacctttggagttattcttggttgtagaagaggggattgttattttggtgaatccagtttttcagagt

SEQ ID NO: 83236 - DNA, 120 bp, Artificial Sequence
  ENSG00000083168_104 (sequence is synthesized)
cagattattgatgaaagggcattaactaatataaatgatatacttggtgataatgagatatcattttcctttctaggatattttatttgattgactatatatatggtctatatatagtct

SEQ ID NO: 83237 - DNA, 120 bp, Artificial Sequence
  ENSG00000083168_105 (sequence is synthesized)
gaattgtttttctgatacccctaatttttggacctaagctactgaatctttcatcttctagtattgggagctctttcacaatacaagaagtaaccactctagaaacagtcattaaataaa

SEQ ID NO: 83238 - DNA, 120 bp, Artificial Sequence
  ENSG00000083168_106 (sequence is synthesized)
atgcccatgttaaattttcatataaatggcacaaagtaaatatagattgaaaggaagaacagacagttcacccttcactaaagtggtcagaaaaaggtcacaaagaaaggaggcatttga

SEQ ID NO: 83239 - DNA, 120 bp, Artificial Sequence
  ENSG00000083168_107 (sequence is synthesized)
gccaaataaatggagaataggaaagagagtgcagaagagcagcagaacttctggagcgggacgtgtgagacagcaggcagtgaaaacagcccgcggccacggtagagagcgaagcatttg

SEQ ID NO: 83240 - DNA, 120 bp, Artificial Sequence
  ENSG00000083168_108 (sequence is synthesized)
tcctgcttcacactcctggccgtctcatgtggtggcacatttctgcattccatcgtcccaggcaggctatctttgcagcacctatcatcttacatgcttcaccaggggtctcatctccac

SEQ ID NO: 83241 - DNA, 120 bp, Artificial Sequence
  ENSG00000083168_109 (sequence is synthesized)
acataaactttctttcatatttctcaaatgcctccttcctcttgcccatgtctcaagatcctgtctcctccaccctgtttacaaatttttatttctgagaaattttattaaacaatctca

SEQ ID NO: 83242 - DNA, 120 bp, Artificial Sequence
  ENSG00000083168_110 (sequence is synthesized)
tttaacatttaaaagaacaatagtattcactttgcttattgagggtggtactgcagaaagattcagaacataggctctggagtcagactgccaggctttctatcccagcatcttctcttg

SEQ ID NO: 83243 - DNA, 120 bp, Artificial Sequence
  ENSG00000083168_111 (sequence is synthesized)
ctcttgcgtgacctggggcagattacttaaatttttttctaccccacatgcctcatttgtaaagtggagttgtagtggtaatacttcatatgattgttggggagattaaataaataatgc

SEQ ID NO: 83244 - DNA, 120 bp, Artificial Sequence
  ENSG00000083168_112 (sequence is synthesized)
atatacagaatttaaagcagtgctgaaacaggaaatatccatgttaaataactgatcattttctttttaaagctcagtttccttttcttctctcaatacttaaaaggtcagaataggtaa

SEQ ID NO: 83245 - DNA, 120 bp, Artificial Sequence
  ENSG00000083168_113 (sequence is synthesized)
cccttcagtaaaaaggctgaaaaatgaacacaacccactaagcaagaaaaggaacgtttggcaatctctaaaaagttgtatcaagtatatccatcttgatttttaaatgtgttttccctt

SEQ ID NO: 83246 - DNA, 120 bp, Artificial Sequence
  ENSG00000083168_114 (sequence is synthesized)
caactcagaacctctattaatttgcctctgcagaaaatatcttactattaggcaactgttcttttttgcccaatcctttctaagcctttatcagaatctttagttaatgggagagttgga

SEQ ID NO: 83247 - DNA, 120 bp, Artificial Sequence
  ENSG00000083168_115 (sequence is synthesized)
cttagcatcaggaagatgtaataacccttcactagaatgtgcattctctagacttagtctgttttgctcattgctgtatgctgagtgcttaagcccggcgctcagtaagtagtgttaaat

SEQ ID NO: 83248 - DNA, 120 bp, Artificial Sequence
  ENSG00000083168_116 (sequence is synthesized)
gagtgaatgctaagaagacaattctccagaaagagcagattcatgtaaattggaacttgtgtcacatctgttcaggagtctttcctgaattgtatctctaatgtgtcttacccaactagt

SEQ ID NO: 83249 - DNA, 120 bp, Artificial Sequence
  ENSG00000083168_117 (sequence is synthesized)
agtaaatttctcacaaatggtaacaataactcaaaataaattttatagtatagatacaaatccaactatttacttttaaagcagcctagttgtcatttcttctctagagacactgaaact

SEQ ID NO: 83250 - DNA, 120 bp, Artificial Sequence
  ENSG00000083168_118 (sequence is synthesized)
aggtctcatatatatgagccaggtcagaaacaagtctttttcaccctagcctaaagttttgccagtgtctcatgctgcctgcatctgcagtgtgtttatctcgcatgggctcagaatgag

SEQ ID NO: 83251 - DNA, 120 bp, Artificial Sequence
  ENSG00000083168_119 (sequence is synthesized)
catttttactttgttgggcaaatttgaagaaatctacttgtccagtcttggtacataaacctttagcttttatgcattaactggttgaactttttaattcttttaaaaattcagtcagtt

SEQ ID NO: 83252 - DNA, 80 bp, Artificial Sequence
  ENSG00000083168_120 (sequence is synthesized)
ctggttgaactttttaattcttttaaaaattcagtcagtttcaagtctagaagataaacttacattttctccattctcat

SEQ ID NO: 83253 - DNA, 120 bp, Artificial Sequence
  ENSG00000083168_121 (sequence is synthesized)
tgcctggccaacaaatacttttaatatagtgataagatgaatgtgttctttgctctatcatgaatgattctacagagtttaacttgctatgttttgaaataacataactaggaaactaaa

SEQ ID NO: 83254 - DNA, 120 bp, Artificial Sequence
  ENSG00000083168_122 (sequence is synthesized)
aatttattttgtaaatttagcactttatattctgtcttagatcattgtacactaaaatagtacccctgattaagttcccatggacttagatttttgctgatgcagccatttcctttgttg

SEQ ID NO: 83255 - DNA, 120 bp, Artificial Sequence
  ENSG00000083168_123 (sequence is synthesized)
actttcaagttactactactaactgtgcctttttagccgtgcccccactgcatcatgttcttgtcttggtattcttattctttaaaaattaataggcaatgtgagtgtacttaatgccac

SEQ ID NO: 83256 - DNA, 120 bp, Artificial Sequence
  ENSG00000083168_124 (sequence is synthesized)
caatgtgagtgtacttaatgccactgaacttaacacttataaatggttaaaattttaagttttatgttacgtatagtttaccatagtttttttaaaatgctaataatataaaatttattt

SEQ ID NO: 83257 - DNA, 120 bp, Artificial Sequence
  ENSG00000083168_125 (sequence is synthesized)
attttttcttgtttgtctaagtctaaatgtcagtttttgtctaggactaaataaatgctttgcagctattcccatacaaacacaacattaattgaacaactgttcacatacgatggctca

SEQ ID NO: 83258 - DNA, 120 bp, Artificial Sequence
  ENSG00000083168_126 (sequence is synthesized)
gtcatggcctagagtaattggctcatcatactacctgaagtgatgatttgtggaaagtaagaaaatccgagagataaagtaaatcacaagcagaaaaaaaaagaggaaataagctaattt

SEQ ID NO: 83259 - DNA, 120 bp, Artificial Sequence
  ENSG00000083168_127 (sequence is synthesized)
gtaacttttagtagagacaacttgataaaagtactgcttactacttatttgcctctttataaagttcatctccattttacagatgatgaaactgaaatgtagagtaacttcccacagaca

SEQ ID NO: 83260 - DNA, 120 bp, Artificial Sequence
  ENSG00000083168_128 (sequence is synthesized)
tgcagctgatgatggtagtcttgaattggttctgactagtgtctgataacataatgttgaccaggattctttcatagttctgccaattcactgtgtgacttagaatatgtcactaattag

SEQ ID NO: 83261 - DNA, 120 bp, Artificial Sequence
  ENSG00000083168_129 (sequence is synthesized)
ttttatcctctaggttcttaactttaaaatgaagacaatcaggagtttataaaagtaatgattaataaagtcatttctattgtatatgctagtcttggaagaaggaactagaaaatgtaa

SEQ ID NO: 83262 - DNA, 120 bp, Artificial Sequence
  ENSG00000083168_130 (sequence is synthesized)
gaccttgtaacctgtctttgttttttttccttcctgtatagacactcctatcttaaagccagtatctcttttgcgaaaacgtgatgtgaagaattctcctcttgagccagatacatccac

SEQ ID NO: 83263 - DNA, 120 bp, Artificial Sequence
  ENSG00000083168_131 (sequence is synthesized)
atttcgtgatatccaagaacaagcactgcagacgtgcgcagttgtggtgatgtgcaaacagctgtactggaactggatatccactttcacatcgggcatccgcctagaagagcagcgggc

SEQ ID NO: 83264 - DNA, 120 bp, Artificial Sequence
  ENSG00000083168_132 (sequence is synthesized)
tttcatctgcagagtgggtatattgttttctactttgaaggatggattgtggggaccaaaggaggtaacgacataaggctcaggtcagagtctagcacaataggtgctccacgaacatga

SEQ ID NO: 83265 - DNA, 120 bp, Artificial Sequence
  ENSG00000083168_133 (sequence is synthesized)
ttttctctagtccttaaattcatgctctctctgttgtggagcatgtgaattcattctttcatacctctttcatcatgtaacttttaatccctaatgaatggaattacttactgtagtgtt

SEQ ID NO: 83266 - DNA, 120 bp, Artificial Sequence
  ENSG00000083168_134 (sequence is synthesized)
tctgtgggaaaatgttcaaatgccagaaagccatctcttctccccacattcccagcctcacactgataataaaggggtacctccctctctcctcaaaacattgcacccccttggggaatg

SEQ ID NO: 83267 - DNA, 120 bp, Artificial Sequence
  ENSG00000083168_135 (sequence is synthesized)
gagagggaagggcaagtgagagcgctccagtggacagatgggggaaggcagcagctctgtgtttacagaaattgttaaattatttacacaattttggtgtccctaccagatccagagttg

SEQ ID NO: 83268 - DNA, 120 bp, Artificial Sequence
  ENSG00000083168_136 (sequence is synthesized)
gggatactgcaagaatggccttttttatgttacaaactggaattagatgagtcatttaattgaagcttaagtttttgtagaagagtaatactcttttcatataaactggtggtaataaaa

SEQ ID NO: 83269 - DNA, 120 bp, Artificial Sequence
  ENSG00000083168_137 (sequence is synthesized)
gctttattatctagcagtaggcataaagttttcttttggtttagcccaattattagtgtatttaatccacccccttgctaccccctgttagttatcttagattaaaaggtcaattctagc

SEQ ID NO: 83270 - DNA, 120 bp, Artificial Sequence
  ENSG00000083168_138 (sequence is synthesized)
ctggaacatacgtcttcttttaaataatttggcatatttaaattaggaggacatgaagtggcagaatttgagttaaacatttaaatatattttgtgcccttgattatattagacacctgc

SEQ ID NO: 83271 - DNA, 120 bp, Artificial Sequence
  ENSG00000083168_139 (sequence is synthesized)
tgctttggaaagtcacatgtttagcgaaaacgtactttggttgaaatgttaaaataaaaagacctagcaaaggtaaccttgtagttcagatatgacagtttgattttggctaggactgga

SEQ ID NO: 83272 - DNA, 120 bp, Artificial Sequence
  ENSG00000083168_140 (sequence is synthesized)
atgagtggtttctgtgtagccatttcttcctccctgtgtagagagccttgctgatttctaaatcttcgtaaaaggaaacacccttgctgtggaggcttgctcaggggagctgggagtgga

SEQ ID NO: 83273 - DNA, 120 bp, Artificial Sequence
  ENSG00000083168_141 (sequence is synthesized)
ggcgggctcacacatgagcgcatgtgcaggaacgtttcacggtgcaaaggttaaaggcgggtgtgggcagaggggaacctaccacaggtcccattctggacagacgtgcgcagttgtggt

SEQ ID NO: 83274 - DNA, 120 bp, Artificial Sequence
  ENSG00000083168_142 (sequence is synthesized)
atcttacaccttctcgttttagcttacagttctgaaagagtataagttagaaattcctagtgcattgctttataaaccttaagcctctgtatattgtagctcaagatcttcccagtgaac

SEQ ID NO: 83275 - DNA, 120 bp, Artificial Sequence
  ENSG00000083168_143 (sequence is synthesized)
atttgagatgtgtgtgtgtgtttgacttctttgattcatgggaattcacttagaaatcataagcttatttaagggcttcacctcctgggatgcaaacaaacttttttttagcttactggt

SEQ ID NO: 83276 - DNA, 120 bp, Artificial Sequence
  ENSG00000083168_144 (sequence is synthesized)
ttgatgttcaaatcatgacttttaggggcttaaagccctaaaatatctttaaaagatatttttaaagtatgtacagattagaagtgtttatattagaaaaggaggccaaaatattacata

SEQ ID NO: 83277 - DNA, 120 bp, Artificial Sequence
  ENSG00000083168_145 (sequence is synthesized)
attaattggaaagtgaacatagtgctgccctatattttggggtactcagagtacagtagctcatcttgggtgctattgttttctctctactctccccacttctcacacatccctccagtg

SEQ ID NO: 83278 - DNA, 120 bp, Artificial Sequence
  ENSG00000083168_146 (sequence is synthesized)
gtttaacgtggtctctcttgctttaaaaatattttctaaactatattccatcataatgatagccaattagttattaaataatgtacaatgatgataatgaattctgttaagccgtttacc

SEQ ID NO: 83279 - DNA, 120 bp, Artificial Sequence
  ENSG00000083168_147 (sequence is synthesized)
gactgaagcgaggctgctccctggaagagccactcagccagcttccagccaaagcagcacaatcgttcctttccttacagggtcttaaaaagcaagacaggatcttttgttttgttttgt

SEQ ID NO: 83280 - DNA, 120 bp, Artificial Sequence
  ENSG00000083168_148 (sequence is synthesized)
tttgttttaagaataatatcttcagagcagttttacatttacagaattaatgcaaagaaagtacagagagttctcgcataccccagccagtttcctctattattaatcccttgcgttggt

SEQ ID NO: 83281 - DNA, 120 bp, Artificial Sequence
  ENSG00000083168_149 (sequence is synthesized)
gtggtacatctatcacagttactgaaccagtgtagatacatcagtaactagagttcatactttattcagatttccatagttttccctaacgtcctttttctgttccaggatcccacccag

SEQ ID NO: 83282 - DNA, 120 bp, Artificial Sequence
  ENSG00000083168_150 (sequence is synthesized)
catatcgcattacatttagtagtcatgtgtctttaggttcctcttggctgtggtagtttctcagaatttccttagtttcgatggccttcatagttttgagaatgactggtcaggtatttt

SEQ ID NO: 83283 - DNA, 120 bp, Artificial Sequence
  ENSG00000083168_151 (sequence is synthesized)
gtagatgatccctcatgatattagaatggggtaatatattcttgagaggaagaccatagaggtaaagtgccattctcatcacataattaaagggtacctgttggcatatatctatcagta

SEQ ID NO: 83284 - DNA, 80 bp, Artificial Sequence
  ENSG00000083168_152 (sequence is synthesized)
ggaggctgtagtgcacaatgattgtacctgtaaatagccactgtagtccaacctgcgtgacatagcaagactccgtctgt

SEQ ID NO: 83285 - DNA, 120 bp, Artificial Sequence
  ENSG00000083168_153 (sequence is synthesized)
ctgtagtccaacctgcgtgacatagcaagactccgtctgtaaaaataaaaagaagcaagtatcaaatataagggtattatcaatttgatttttccctattgaagttaactttgatgacct

SEQ ID NO: 83286 - DNA, 120 bp, Artificial Sequence
  ENSG00000083168_154 (sequence is synthesized)
ggcttaagatattgtttgtcaggtttctacttttcttttccctttactggaaggaagtcactgtgcatagccacacttaagatttctaccccctcagagtggaggctcagcataaattat

SEQ ID NO: 83287 - DNA, 120 bp, Artificial Sequence
  ENSG00000083168_155 (sequence is synthesized)
ttgaatttctgcttgggagatttgtcctttctccctcatctgtttatttatccaagcatttatttatatcattattggcccagatatttacgtgatacttcactttataatccaatacta

SEQ ID NO: 83288 - DNA, 120 bp, Artificial Sequence
  ENSG00000083168_156 (sequence is synthesized)
aatccaatactactgctttttaaaatttgttgctcagattgttccagttttgaccattagaagctccttcttttagtttccctcttgggctgctgctgcttttttttttttttttttttt

SEQ ID NO: 83289 - DNA, 85 bp, Artificial Sequence
  ENSG00000083168_157 (sequence is synthesized)
atgcaagcaacgctcccacctcagcctcttgaataacttggactacaggcatgttccatcacgcctggctaattttttgtacttt

SEQ ID NO: 83290 - DNA, 120 bp, Artificial Sequence
  ENSG00000083168_158 (sequence is synthesized)
acgctcccacctcagcctcttgaataacttggactacaggcatgttccatcacgcctggctaattttttgtacttttgatagagacagggtttcgctatgttgctcaggctggtcttgaa

SEQ ID NO: 83291 - DNA, 120 bp, Artificial Sequence
  ENSG00000083168_159 (sequence is synthesized)
aggtgtgagccaccgcgcctggcctcctgtgtttaacatatatactgttgttgtcattgtggggtctttttgtttgtttttaagcatttcctttctggcactacaagatgcttcaagttc

SEQ ID NO: 83292 - DNA, 120 bp, Artificial Sequence
  ENSG00000083168_160 (sequence is synthesized)
aagatgcttcaagttcatcttgtatatttcatgcccttgtcctagaatcagccttttctccaaggaccagggccatttttaatctaatttgaaaattacattctcgattgggactattaa

SEQ ID NO: 83293 - DNA, 120 bp, Artificial Sequence
  ENSG00000083168_161 (sequence is synthesized)
gtttgaagtagagaaaaattgaacattgactaactgctgttcattgcatgatcatgaagaatagatctttgtcatcctagcacttgtattgccaatttatgaagtaaaacaaatcatgtt

SEQ ID NO: 83294 - DNA, 85 bp, Artificial Sequence
  ENSG00000083168_162 (sequence is synthesized)
atagccatcacccactctggttagtggtagcttaaaggtcattcttagaacatgtcatcgtgtttcctcattgtatcctaattac

SEQ ID NO: 83295 - DNA, 120 bp, Artificial Sequence
  ENSG00000083168_163 (sequence is synthesized)
aatagataagtttggaaattcttaagggtgcctagtaaacacttgctgtttgattgctttatgatgaggatgcttattttcattcgaaataggtcttggtagaaaactgaccttattttc

SEQ ID NO: 83296 - DNA, 120 bp, Artificial Sequence
  ENSG00000083168_164 (sequence is synthesized)
gtttatagagctgatgatataggatgctacaaattcacatttctgggaagttatattcaagttttttgtttggggacttctgtggagtgatcacctctggttttttattggtgagttgta

SEQ ID NO: 83297 - DNA, 120 bp, Artificial Sequence
  ENSG00000083168_165 (sequence is synthesized)
gctatgagagcttcatagatttgttctggtactttgaaatatttgaagcctaagattaaaaatgtagaatgttaatctgactaaaagaacttatttacattacaatgaaaaagtgacata

SEQ ID NO: 83298 - DNA, 120 bp, Artificial Sequence
  ENSG00000083168_166 (sequence is synthesized)
tgagtttaaaacttttttttaaatttttttttattattttgcttgaggagtactccagcgtgagactttaaaactttaactaaaggttcttagaacaccttactactggaagttgatgag

SEQ ID NO: 83299 - DNA, 120 bp, Artificial Sequence
  ENSG00000083168_167 (sequence is synthesized)
cagccaaatcatggagacttgaatttgaaacaagcagatgactctgagaacatttttctgttttccattttgttgcagattactcgttagacagaaatgagacagattctcatgacccat

SEQ ID NO: 83300 - DNA, 120 bp, Artificial Sequence
  ENSG00000083168_168 (sequence is synthesized)
catatgatgaagtcctaaatgctatttatgacagctgtagttgcatgggacaggaatacagtatcctaaactagaaaagttctggagggtctggaacagtagttcatgcctgtaatccca

SEQ ID NO: 83301 - DNA, 120 bp, Artificial Sequence
  ENSG00000083168_169 (sequence is synthesized)
gcgctttgggaggctgggacaggaggatgtcttgagcctaggagtttgagcccagcctgagcaatatagcgagaccccacgtccaccaaaaatagaaaaattagccaggtatgggcgcgc

SEQ ID NO: 83302 - DNA, 120 bp, Artificial Sequence
  ENSG00000083168_170 (sequence is synthesized)
ctgtagtcctagctacttgggaggctgtgtcggggaggattgcttgagtacaggtgtctgaggctccagtgagctatgctgtcaccactgcactccagcctggacaactgagaccctgtt

SEQ ID NO: 83303 - DNA, 120 bp, Artificial Sequence
  ENSG00000083168_171 (sequence is synthesized)
ctaaaaacaaaaagaaaggtaaagttctggagagttgggagttttgatgcccagatgtgtactttactctgttgtgttttaggatgttattgtatatagttgaaattatgacttcttaaa

SEQ ID NO: 83304 - DNA, 120 bp, Artificial Sequence
  ENSG00000083168_172 (sequence is synthesized)
cagtaaattttggtgcttaaatagatatttggagattaggagaattttgttagtacctgttttttacattgacctagtatcttagctgtaaatttacttaaggtgctctgaattatagtt

SEQ ID NO: 83305 - DNA, 120 bp, Artificial Sequence
  ENSG00000083168_173 (sequence is synthesized)
ccttggagagcagtgatgctttaagttgctgcacaccttggtagacataagtaaaatgatcttcattttgcttaagatgatggaggatactcctagggtggaaagatggtaaagttaaca

SEQ ID NO: 83306 - DNA, 120 bp, Artificial Sequence
  ENSG00000083168_174 (sequence is synthesized)
ttgaatgtattttgaaaattggagatttgatctcaatttgttgtattattagcagcccactgaatacctgtagatttttctttaacaattgaaaattaacggtatttttctttgatgaaa

SEQ ID NO: 83307 - DNA, 120 bp, Artificial Sequence
  ENSG00000083168_175 (sequence is synthesized)
tttttagagatctatttcagggttcaattttccctgtgaacattgaaataaaacataatcttactgttattacccttgaaatgattctcatacagtcatgaattgatagagaatctcatt

SEQ ID NO: 83308 - DNA, 120 bp, Artificial Sequence
  ENSG00000083168_176 (sequence is synthesized)
cataaaatggctctatgtaatttgagcatttattaaaagtatatattaaaaattcagggtagacaagtaattaaaatgctttattctatatttaagtgctgtaagaactcttacctgtag

SEQ ID NO: 83309 - DNA, 120 bp, Artificial Sequence
  ENSG00000083168_177 (sequence is synthesized)
aaactttatcacatgtggctgaatttaaatacagttatcggatttctacaattattaaatgatctaacaggttaactgcctggaaacaggaaataatttatagttagatcagttcagtgc

SEQ ID NO: 83310 - DNA, 120 bp, Artificial Sequence
  ENSG00000083168_178 (sequence is synthesized)
tagatcagttcagtgccatacctgtgaattggatgttataagttcctgttaggccacctgtttgcttttatttatttatttttgagacagaatctcgttctgtcacccaggctggagtgc

SEQ ID NO: 83311 - DNA, 120 bp, Artificial Sequence
  ENSG00000083168_179 (sequence is synthesized)
tgtaattacacttgcttgaattatcaatagataattttaaaaaatattagctatataaaaatgtcatttgagcatatttttaaaaggtagtaaatatagtacagtgcaagacaaatccaa

SEQ ID NO: 83312 - DNA, 120 bp, Artificial Sequence
  ENSG00000083168_180 (sequence is synthesized)
gtcctagaaccctgagattttacttttggaagggaccctgagaaccgtctaatccaagtccttattttgcagctgagctaaggacctttgttgagaccatttcatagcacctttgcatta

SEQ ID NO: 83313 - DNA, 78 bp, Artificial Sequence
  ENSG00000083168_181 (sequence is synthesized)
aggacctttgttgagaccatttcatagcacctttgcattaagaaaagtttaattcagtagagatgtgctgttttgctt

SEQ ID NO: 83314 - DNA, 120 bp, Artificial Sequence
  ENSG00000083168_182 (sequence is synthesized)
gaaatctgaaagaatctttgctggttctcactcggggacacaacaagatgcagcacctcctaggtgtcatctagctgtttggaaagaatagaaggaacatttggaaacttaccaggtgct

SEQ ID NO: 83315 - DNA, 120 bp, Artificial Sequence
  ENSG00000083168_183 (sequence is synthesized)
agaaggtgcttagtaacattcaacaacctatattctcctaggattatggactgctggcaatactcacggggaaggttttaaatggcttctcttcccatggtaataacatggaacttctga

SEQ ID NO: 83316 - DNA, 120 bp, Artificial Sequence
  ENSG00000083168_184 (sequence is synthesized)
aataaacagtcattagctctctgagttctgtctcagcttcaatcttctcttccttatttgaactttaggcatagaaataagagtaagaaggcattttggttaaaggatattttctccttt

SEQ ID NO: 83317 - DNA, 120 bp, Artificial Sequence
  ENSG00000083168_185 (sequence is synthesized)
tttaatcttccattcccttagagggagaaagtttatttctagtcagagaacataaaagatatacttttatttaagcaagcctgtggtaaaatccaagtgtataaaacagttaggggaagt

SEQ ID NO: 83318 - DNA, 120 bp, Artificial Sequence
  ENSG00000083168_186 (sequence is synthesized)
actagctttttataagcatttataagaattctttaggctacttcattagttagatgtgacttaaaatatattcactcatttataaaattataaaagtgactattttgtgtaaagttagat

SEQ ID NO: 83319 - DNA, 120 bp, Artificial Sequence
  ENSG00000083168_187 (sequence is synthesized)
acaactaataggactgctctgaggagcaccagagcaggagagaaagaaaactctgacataattaatgagtcttctcacttctagagtggcacactgattcatcatttgtagctttacgga

SEQ ID NO: 83320 - DNA, 120 bp, Artificial Sequence
  ENSG00000083168_188 (sequence is synthesized)
ttgtttgggactcagattccggtgctgatccttaggcattggcgtactgtgtttgagttgcagatggtgttggatggcattgttttgttatatatttttactctcctgggatggttgctt

SEQ ID NO: 83321 - DNA, 120 bp, Artificial Sequence
  ENSG00000083168_189 (sequence is synthesized)
tgtgggtaatggcagtgacttgacattatcctatcttctcccagctgggtagttgtttgttgatgtacgttgctattcccaaaggaccagggctgtgggttttggccattagtctttgtt

SEQ ID NO: 83322 - DNA, 120 bp, Artificial Sequence
  ENSG00000083168_190 (sequence is synthesized)
tcttaattcacgttattattcacttttaccagcctgttttcaaacttgacttgtgttttctccaccaggaaaagcactgccaacagaagtacaatgtttcctgtataatgattcttcctc

SEQ ID NO: 83323 - DNA, 120 bp, Artificial Sequence
  ENSG00000083168_191 (sequence is synthesized)
tcttcctcaataccagcgtaagggctatggcaggtttctcatcgatttcagtaaggattatattaatttctcattggtcttttccagtggaccttctctgtgtgtgtgtgtgtgtgtgtg

SEQ ID NO: 83324 - DNA, 120 bp, Artificial Sequence
  ENSG00000083223_0 (sequence is synthesized)
aggaagaggctggggaccgcggcgaaggtggtgagtgctcttgggcgccttctcccaacgtccctgccagactcgcctccgggctgattctccagttggtttcctggactccagagtagc

SEQ ID NO: 83325 - DNA, 120 bp, Artificial Sequence
  ENSG00000083223_1 (sequence is synthesized)
tgtccggcctggccccggaggtgcaaagtaagaaaattgaagtcaaagaccatgggagatacagcaaaaccttatttcgtgaagcgcactaaagaccgggggactatggatgatgatgac

SEQ ID NO: 83326 - DNA, 120 bp, Artificial Sequence
  ENSG00000083223_2 (sequence is synthesized)
ttcagaaggggtcacccccaacaagattatttaataatagatgaccatgctaaaggccatggcagtaaaatggaaaagggccttcaaaaaaagaagataacaccagggaactatgggaat

SEQ ID NO: 83327 - DNA, 120 bp, Artificial Sequence
  ENSG00000083223_3 (sequence is synthesized)
acccccagaaaaggaccatgtgctgtttccagcaatccatatgcatttaaaaacccaatctacagtcaacccgcttggatgaatgacagccacaaagatcagagtaagagatggctgtct

SEQ ID NO: 83328 - DNA, 120 bp, Artificial Sequence
  ENSG00000083223_4 (sequence is synthesized)
gatgaacatactggtaattcagacaactggagagaattcaaacctggacctagaattcctgttataaaccgacaaagaaaagactcctttcaagaaaatgaagatggttataggtggcaa

SEQ ID NO: 83329 - DNA, 120 bp, Artificial Sequence
  ENSG00000083223_5 (sequence is synthesized)
gacacaagaggctgcagaactgtaagacgactgtttcataaagacctaacaagcctagaaaccacgtcagaaatggaagcaggaagtcctgaaaacaagaagcagaggtccagacctagg

SEQ ID NO: 83330 - DNA, 120 bp, Artificial Sequence
  ENSG00000083223_6 (sequence is synthesized)
aagccacggaagactagaaatgaggaaaatgagcaggatggagacttggaaggccctgtgatcgatgagtctgtactttcaacgaaggagctgctaggcttacagcaggctgaggagaga

SEQ ID NO: 83331 - DNA, 120 bp, Artificial Sequence
  ENSG00000083223_7 (sequence is synthesized)
ctgaagagagactgcattgacaggctaaaaaggcgaccacgaaactaccctacagcaaagtacacctgcagactctgtgatgttttaattgaatccattgcatttgcccataagcatatc

SEQ ID NO: 83332 - DNA, 120 bp, Artificial Sequence
  ENSG00000083223_8 (sequence is synthesized)
aaggaaaagaggcacaagaaaaacattaaggagaagcaagaggaagagttgctcactacgttacccccaccaacaccctcccagataaatgcagttggcattgccattgacaaagtggta

SEQ ID NO: 83333 - DNA, 120 bp, Artificial Sequence
  ENSG00000083223_9 (sequence is synthesized)
caggaatttggcttacacaatgagaacttggaacagaggctggaaattaaacgtatcatggaaaatgtgttccaacacaagttaccagattgttccctaagattatatgggtcatcctgt

SEQ ID NO: 83334 - DNA, 120 bp, Artificial Sequence
  ENSG00000083223_10 (sequence is synthesized)
agcagattgggtttcaaaaattcggatgtaaacattgacatccagtttccagccattatgtctcagccagatgtcctcttacttgttcaagaatgtttaaagaacagtgactcctttatt

SEQ ID NO: 83335 - DNA, 120 bp, Artificial Sequence
  ENSG00000083223_11 (sequence is synthesized)
gatgttgatgcagacttccatgctagggtgccagtggtggtgtgcagagaaaagcaaagtggtcttctgtgtaaagtgagcgcaggaaatgaaaatgcttgtctgacaacaaagcattta

SEQ ID NO: 83336 - DNA, 120 bp, Artificial Sequence
  ENSG00000083223_12 (sequence is synthesized)
actgcccttggaaaactagaaccaaagctggttcctttggtgattgcatttaggtactgggcaaagctttgcagtatagatcgccctgaagaaggaggtctgccaccttatgtgtttgcc

SEQ ID NO: 83337 - DNA, 120 bp, Artificial Sequence
  ENSG00000083223_13 (sequence is synthesized)
ctgatggccattttctttcttcagcagaggaaagaaccccttttgcctgtatatctaggatcatggattgaaggattctcattaagcaaactagggaatttcaaccttcaagacattgaa

SEQ ID NO: 83338 - DNA, 120 bp, Artificial Sequence
  ENSG00000083223_14 (sequence is synthesized)
aaagatgttgtgatctgggaacatactgacagtgctgcaggggacacaggcataacaaaagaagaggcaccaagagaaacgccgattaaaaggggacaggtgtcattaatattggatgtg

SEQ ID NO: 83339 - DNA, 120 bp, Artificial Sequence
  ENSG00000083223_15 (sequence is synthesized)
aaacaccagccttcagtaccagttgggcagctctgggtggaattgctgcggttctatgctttagaatttaatttggctgatttagtgataagtattcgtgtcaaagaattggtatctcgg

SEQ ID NO: 83340 - DNA, 120 bp, Artificial Sequence
  ENSG00000083223_16 (sequence is synthesized)
gaattgaaggattggcccaaaaagcgcattgccattgaagatccctactctgttaaaagaaatgtggcaagaaccctaaatagtcaacctgtgtttgaatatatacttcattgtttaagg

SEQ ID NO: 83341 - DNA, 120 bp, Artificial Sequence
  ENSG00000083223_17 (sequence is synthesized)
acaacatacaagtattttgctcttccacacaaaattacaaaatccagccttctaaagcctctgaatgcaattacatgtatttcagaacattctaaagaagtaataaatcatcatccagat

SEQ ID NO: 83342 - DNA, 120 bp, Artificial Sequence
  ENSG00000083223_18 (sequence is synthesized)
gtacaaacaaaagatgataagctcaaaaactcagttttggcccaaggtcctggtgctaccagttcagctgcaaatacctgtaaggtacagccacttactcttaaagagactgctgaaagt

SEQ ID NO: 83343 - DNA, 120 bp, Artificial Sequence
  ENSG00000083223_19 (sequence is synthesized)
tttggaagcccaccaaaagaagaaatgggaaatgaacacatcagtgtccaccctgaaaactcagactgtatccaagcagatgttaactctgatgattacaagggtgataaagtataccat

SEQ ID NO: 83344 - DNA, 120 bp, Artificial Sequence
  ENSG00000083223_20 (sequence is synthesized)
ccagaaacaggaaggaaaaacgagaaagagaaagttggaaggaagggcaagcatctgttgactgttgatcagaaacgtggagagcatgttgtctgtggcagcacacgtaataatgagtca

SEQ ID NO: 83345 - DNA, 120 bp, Artificial Sequence
  ENSG00000083223_21 (sequence is synthesized)
gagagcactttggatttagaaggcttccaaaatcccacagctaaagagtgtgagggacttgccactttagataacaaggctgatcttgatggagaaagtacagaaggtactgaggaacta

SEQ ID NO: 83346 - DNA, 120 bp, Artificial Sequence
  ENSG00000083223_22 (sequence is synthesized)
gaagactctctaaaccactttacccactcagtacagggccagacatcagaaatgattccctctgatgaagaggaggaggacgacgaagaagaggaggaggaagaagaacctaggctcacc

SEQ ID NO: 83347 - DNA, 120 bp, Artificial Sequence
  ENSG00000083223_23 (sequence is synthesized)
cctatctgaagaggatgatgagttaggcgaagctgctaagtatgaagacgtgaaagaatgtggaaaacatgtagaaagagctctcctagtggaacttaataaaataagtctcaaggaaga

SEQ ID NO: 83348 - DNA, 120 bp, Artificial Sequence
  ENSG00000083223_24 (sequence is synthesized)
aaatgtatgtgaagaaaaaaattcacctgtggatcagtctgattttttttatgaattcagtaaacttatcttcaccaaaggcaagtctcctacggtagtgtgcagcttatgcaaacgaga

SEQ ID NO: 83349 - DNA, 120 bp, Artificial Sequence
  ENSG00000083223_25 (sequence is synthesized)
gggtcatctaaagaaggactgtcctgaagacttcaaaagaatccagctagaacctctgccaccattaacacccaagtttttaaatatcttagatcaagtctgtatccagtgttataagga

SEQ ID NO: 83350 - DNA, 120 bp, Artificial Sequence
  ENSG00000083223_26 (sequence is synthesized)
tttttctccaacaattatagaagatcaggctcgtgaacatattcggcaaaacctagaaagtttcataagacaggactttccaggaactaaattgagcctgtttggctcctccaaaaatgg

SEQ ID NO: 83351 - DNA, 120 bp, Artificial Sequence
  ENSG00000083223_27 (sequence is synthesized)
atttgggttcaaacagagtgaccttgacgtctgtatgacaattaatggacttgaaactgctgagggattggactgtgtcagaactattgaagaattagcaagagtcctcagaaaacattc

SEQ ID NO: 83352 - DNA, 120 bp, Artificial Sequence
  ENSG00000083223_28 (sequence is synthesized)
aggtctgagaaacatcttacctattacaacagcaaaggtgccaattgtgaagttcttccatttgagaagtggtctggaagtagatatcagtttgtataacacattggcccttcataacac

SEQ ID NO: 83353 - DNA, 120 bp, Artificial Sequence
  ENSG00000083223_29 (sequence is synthesized)
aaggcttttatctgcttattccgccattgatcccagagtgaagtatttgtgctataccatgaaagtatttacaaagatgtgtgatattggtgatgcatctagaggcagcttatcatcgta

SEQ ID NO: 83354 - DNA, 120 bp, Artificial Sequence
  ENSG00000083223_30 (sequence is synthesized)
tgcatatactcttatggtgctatattttctccagcagaggaatccaccagtcattcctgtccttcaagagatatacaaaggtgaaaagaaacctgaaatatttgttgatggctggaatat

SEQ ID NO: 83355 - DNA, 120 bp, Artificial Sequence
  ENSG00000083223_31 (sequence is synthesized)
ttatttttttgatcaaatagatgaactgcctacctattggtcagaatgtggaaaaaatacagaatctgttgggcagttatggttgggccttcttcgtttctacacagaggaatttgattt

SEQ ID NO: 83356 - DNA, 120 bp, Artificial Sequence
  ENSG00000083223_32 (sequence is synthesized)
taaagaacatgttattagcatcaggagaaaaagtctgcttacaacttttaagaaacagtggacctcaaaatacattgttattgaagatccctttgatttgaatcataatcttggagctgg

SEQ ID NO: 83357 - DNA, 120 bp, Artificial Sequence
  ENSG00000083223_33 (sequence is synthesized)
attatcaaggaaaatgacaaattttataatgaaggcttttatcaatggtagaagagtatttggtattcctgtcaagggatttccaaaggactacccctcaaaaatggaatacttttttga

SEQ ID NO: 83358 - DNA, 120 bp, Artificial Sequence
  ENSG00000083223_34 (sequence is synthesized)
tccagatgtgttaactgaaggagagctggccccaaatgatagatgttgtcgaatttgtggaaaaatcggacacttcatgaaggactgtcctatgaggagaaaagtaagacggcggcgaga

SEQ ID NO: 83359 - DNA, 120 bp, Artificial Sequence
  ENSG00000083223_35 (sequence is synthesized)
tcaggaagatgccctgaaccaaagataccctgagaacaaggaaaaaagaagcaaagaggacaaagaaattcacaacaagtacacagaaagggaggtgtcaacaaaagaagataagcccat

SEQ ID NO: 83360 - DNA, 120 bp, Artificial Sequence
  ENSG00000083223_36 (sequence is synthesized)
acagtgcacacctcagaaagccaagccaatgcgggcagctgctgacctggggagggagaagatcctcaggccaccagtagaaaaatggaagagacaggatgacaaagacttaagagaaaa

SEQ ID NO: 83361 - DNA, 120 bp, Artificial Sequence
  ENSG00000083223_37 (sequence is synthesized)
acgttgttttatttgtggaagagaagggcacattaaaaaggaatgcccacagtttaaaggctcttcaggtagcctttccagtaaatatatgactcagggaaaagcctcagcgaagaggac

SEQ ID NO: 83362 - DNA, 120 bp, Artificial Sequence
  ENSG00000083223_38 (sequence is synthesized)
ccagcaggaatcatgagggaaggaaaatgcagcactctaaatggccactcaggcgttcctattcactcggaaaattaggttcatttcacaggacacagcagtgtagatcaggcttcaact

SEQ ID NO: 83363 - DNA, 120 bp, Artificial Sequence
  ENSG00000083223_39 (sequence is synthesized)
taacatttaagggaaatgtcagatttttttttaatttaatgaaattgttaatgaggaaaaatttttaatatagtcttatctaccacacatccccatagatttaaggattttaatagaaag

SEQ ID NO: 83364 - DNA, 120 bp, Artificial Sequence
  ENSG00000083223_40 (sequence is synthesized)
acatgatgtatgtatttaagccacgttaaaagaaaaaatataactatggaccggtattcagtgaatacagtttcatggtttttaattctttcaaagcacattaaaaatggtgtgctgata

SEQ ID NO: 83365 - DNA, 120 bp, Artificial Sequence
  ENSG00000083223_41 (sequence is synthesized)
aaccccaagtaaattaaccctttttccgtataaatccattttttgttttgaagaggggaaattatatttattgttgtttactgaatcctggtgtgaaagcatatcagatatgtatgaact

SEQ ID NO: 83366 - DNA, 120 bp, Artificial Sequence
  ENSG00000083223_42 (sequence is synthesized)
gctactgctgtacttccgatttacggacatcattttattgctatttgtagacgtgataacatgaacatgagtacctatttatgtgggccttcagtggatgggcagtgccactcaggtctc

SEQ ID NO: 83367 - DNA, 120 bp, Artificial Sequence
  ENSG00000083223_43 (sequence is synthesized)
tggggtttccctctctaattttaagtaaattgacatataactactatgcttataaaaatgaagtaaggaaaacaagtagtcctgtttgccactaaaaacattttcaaaggaaaaataaaa

SEQ ID NO: 83368 - DNA, 120 bp, Artificial Sequence
  ENSG00000083223_44 (sequence is synthesized)
tgaaagtactttttactttttatgatactcagaaattaggatgaagaacttttaaaattgctgaagatcaaagaggttatctctgccagtcacaagtgtggctggtgtcattctgggtct

SEQ ID NO: 83369 - DNA, 120 bp, Artificial Sequence
  ENSG00000083223_45 (sequence is synthesized)
gactggagccctcctggactgtttctttaatttcaaaagccctgcagacatagtacctggtcagaactatgcctcggtttatttatcattttgaaataaaatcagaatttcaacctgtaa

SEQ ID NO: 83370 - DNA, 120 bp, Artificial Sequence
  ENSG00000083223_46 (sequence is synthesized)
aaatggaattctcttatttttgcttgatttttttttcaagctttatgttgcataagagggttttttgcattttgcataaattctgtgtgcagtcatggggatctcacatttttaaaccct

SEQ ID NO: 83371 - DNA, 120 bp, Artificial Sequence
  ENSG00000083223_47 (sequence is synthesized)
cccctgcagtttctgtggctcagctcttctggccaattgcctaacctgctggagttctaggggaggagaaaagattgagagaagtggtgtctcctcctggtgcctccctctcgcccctga

SEQ ID NO: 83372 - DNA, 120 bp, Artificial Sequence
  ENSG00000083223_48 (sequence is synthesized)
agataatgatagcgaccattttttgaacactgtgtgccaggcactgtgctaagcactttacagacactatctcactcagtcctcccaacaaccctatgaggtgtcattaatattggatgt

SEQ ID NO: 83373 - DNA, 120 bp, Artificial Sequence
  ENSG00000083223_49 (sequence is synthesized)
cacaagttaccaggtattttctagatttgtttttctatttaactacctaaaagtacctcattcatttctcctaccaatagtaattttcatcaaataaaaatttatttaccatgtcatgaa

SEQ ID NO: 83374 - DNA, 120 bp, Artificial Sequence
  ENSG00000083223_50 (sequence is synthesized)
attttgcataatttcaaaatctagacacctaaccagaactgacatggatttatttattctactcatgtgaatattcatacctttcactgctgaaatactaatgtgtttgatttcagtatg

SEQ ID NO: 83375 - DNA, 120 bp, Artificial Sequence
  ENSG00000083223_51 (sequence is synthesized)
ttgccctataacctgcttagggatattattacctttctagactgcaaaatctcttaatttttgaaatatgtatggtcctgagacgaacaagagactgaccctgtaaatttaccatttggt

SEQ ID NO: 83376 - DNA, 120 bp, Artificial Sequence
  ENSG00000083223_52 (sequence is synthesized)
acattctttctttgggtacagttttctaaattgatacttgaatttacatatcacctccagacagacagactgtgggaagcatttggttcactgtaacttactttctgtttctaatctatt

SEQ ID NO: 83377 - DNA, 120 bp, Artificial Sequence
  ENSG00000083223_53 (sequence is synthesized)
tctccccataacctgtaaaacaaaaaaatatataaacattgaaattgctacctgtaccacaagatgcagaacctagtagtcatctcttgaataatattttgacattattttaaagatgaa

SEQ ID NO: 83378 - DNA, 80 bp, Artificial Sequence
  ENSG00000083290_0 (sequence is synthesized)
cgcggcggtgcgggttctagggcggcggccgtcgccgtcgcagcagcgccccgagcggggagggccgaggaggcccgacg

SEQ ID NO: 83379 - DNA, 120 bp, Artificial Sequence
  ENSG00000083290_1 (sequence is synthesized)
gagcggggagggccgaggaggcccgacgagctggggatggagagtaccgggcccctcactgcctcagagcgcgtgtgcggctctgggcgcgcacagtgacggtgacggcacccctggccc

SEQ ID NO: 83380 - DNA, 120 bp, Artificial Sequence
  ENSG00000083290_2 (sequence is synthesized)
cttcgccagacagccagcggccggcggcaggccgggccatgagcggcaggggccgggccgggcctcgctgaccctggctccgcgcggcagcttccccagtttccgctccggtctctcggc

SEQ ID NO: 83381 - DNA, 120 bp, Artificial Sequence
  ENSG00000083290_3 (sequence is synthesized)
cagtttccgctccggtctctcggcatgagagtccgcccgggcccggggctgcggctgccccagacccgccgcacgctggcgcgctccgggcccgcggagccgcggtgctgatacctgcgc

SEQ ID NO: 83382 - DNA, 120 bp, Artificial Sequence
  ENSG00000083290_4 (sequence is synthesized)
gccgcccgcccgtccgctgtgtgccccgggggcgcggccatggaggtggtgggtgacttcgagtacagcaagagggatctcgtgggacacggggccttcgccgtggtcttccgggggcgg

SEQ ID NO: 83383 - DNA, 120 bp, Artificial Sequence
  ENSG00000083290_5 (sequence is synthesized)
caccgccagaaaactgattgggaggtagctattaaaagtattaataaaaagaacttgtcaaaatcacaaatactgcttggaaaggaaattaaaatcttaaaggaacttcagcatgaaaat

SEQ ID NO: 83384 - DNA, 120 bp, Artificial Sequence
  ENSG00000083290_6 (sequence is synthesized)
attgtagcactctatgatgttcaggaattacccaactctgtctttttggtgatggagtattgcaatggtggagacctcgcagattatttgcaagcgaaagggactctcagtgaagacacg

SEQ ID NO: 83385 - DNA, 120 bp, Artificial Sequence
  ENSG00000083290_7 (sequence is synthesized)
atcagagtgtttctgcatcagattgctgctgccatgcgaatcctgcacagcaaaggaatcatccacagagatctcaaaccacagaacatcttgctgtcctatgccaatcgcagaaaatca

SEQ ID NO: 83386 - DNA, 120 bp, Artificial Sequence
  ENSG00000083290_8 (sequence is synthesized)
agtgtcagtggtattcgcatcaaaatagcggattttggttttgctcgttacctacatagtaacatgatggctgcaacactgtgtggatccccgatgtacatggctcctgaggttattatg

SEQ ID NO: 83387 - DNA, 120 bp, Artificial Sequence
  ENSG00000083290_9 (sequence is synthesized)
tctcaacattatgatgctaaggctgacttgtggagcataggaacagtgatataccaatgcctagttggaaaaccaccttttcaggccaatagtcctcaagacttaaggatgttttatgaa

SEQ ID NO: 83388 - DNA, 120 bp, Artificial Sequence
  ENSG00000083290_10 (sequence is synthesized)
aaaaacaggagcttaatgcctagtattcccagagaaacatcaccttatttggctaatctccttttgggtttgcttcagagaaaccaaaaagatagaatggactttgaagcattttttagc

SEQ ID NO: 83389 - DNA, 120 bp, Artificial Sequence
  ENSG00000083290_11 (sequence is synthesized)
catccttttcttgagcaaggtccagtaaaaaaatcttgcccagttccagtgcccatgtattctggttctgtctctggaagctcctgtggcagctctccatcttgtcgttttgcttctcca

SEQ ID NO: 83390 - DNA, 120 bp, Artificial Sequence
  ENSG00000083290_12 (sequence is synthesized)
ccatcccttccagatatgcagcatattcaggaagaaaacttatcttccccaccattgggtcctcccaactatctacaagtttccaaagattctgccagtactagtagcaagaactcttct

SEQ ID NO: 83391 - DNA, 120 bp, Artificial Sequence
  ENSG00000083290_13 (sequence is synthesized)
tgtgacacggatgactttgttttggtgccacacaacatctcgtcagaccactcatgtgatatgccagtggggactgctggcagacgtgcttcaaatgaattcttggtgtgtggagggcag

SEQ ID NO: 83392 - DNA, 120 bp, Artificial Sequence
  ENSG00000083290_14 (sequence is synthesized)
tgtcagcctactgtgtcacctcacagcgaaacagcaccaattccagttcctactcaaataaggaattatcagcgcatagagcagaatcttacatctactgccagctcaggcacaaatgta

SEQ ID NO: 83393 - DNA, 120 bp, Artificial Sequence
  ENSG00000083290_15 (sequence is synthesized)
catggttctccaagatctgcagtggtacgaaggtccaacaccagccccatgggcttcctccggccgggatcatgctccccagtaccagcagacacagcacagacagttggacgaaggctc

SEQ ID NO: 83394 - DNA, 120 bp, Artificial Sequence
  ENSG00000083290_16 (sequence is synthesized)
gtgctgctgtgggcatcctcagggccatgactccaggagtagaaactcctcaggttctccagtgccacaagctcagtccccacagtctctcttatcgggtgctagactgcagagcgcccc

SEQ ID NO: 83395 - DNA, 120 bp, Artificial Sequence
  ENSG00000083290_17 (sequence is synthesized)
caccctcactgacatctatcagaacaagcagaagctcagaaaacagcactctgaccccgtgtgcccatcccatactggggctgggtacagctactcgcctcagcccagtcggcctggcag

SEQ ID NO: 83396 - DNA, 120 bp, Artificial Sequence
  ENSG00000083290_18 (sequence is synthesized)
ccttggaacttctcccaccaagcacttggggtcctctccacggagttctgactggttctttaaaactcctttgccaacaatcattggctctcctactaagaccacagctcctttcaaaat

SEQ ID NO: 83397 - DNA, 120 bp, Artificial Sequence
  ENSG00000083290_19 (sequence is synthesized)
ccctaaaactcaagcatcttccaacctgttagccttggttactcgtcatgggcctgctgaagaacagtcgaaagatgggaatgagccacgggaatgtgcccattgcctcttagtgcaagg

SEQ ID NO: 83398 - DNA, 120 bp, Artificial Sequence
  ENSG00000083290_20 (sequence is synthesized)
aagtgagaggcagcgggccgagcagcagagcaaggcagtgtttggcagatctgtcagtaccgggaagttatcagatcaacaaggaaagactcctatatgtcgacatcagggcagcacaga

SEQ ID NO: 83399 - DNA, 120 bp, Artificial Sequence
  ENSG00000083290_21 (sequence is synthesized)
cagtttaaatacagaacgaccaatggatatagctccggcaggagcctgtggtggtgttctggcacctcctgcaggtacagcagcaagttccaaggctgtcctcttcactgtagggtctcc

SEQ ID NO: 83400 - DNA, 120 bp, Artificial Sequence
  ENSG00000083290_22 (sequence is synthesized)
tccacacagtgcggcagcccccacttgtacccacatgttccttcgaacaagaacaacctcagtggggcccagcaactccgggggctctctttgtgccatgagtggccgcgtgtgcgtggg

SEQ ID NO: 83401 - DNA, 120 bp, Artificial Sequence
  ENSG00000083290_23 (sequence is synthesized)
gtccccgcctggcccaggcttcggctcttcccctccaggagcagaggcagctcccagcctgagatacgtgccttacggtgcttcaccccccagcctagaggggctcatcacctttgaagc

SEQ ID NO: 83402 - DNA, 120 bp, Artificial Sequence
  ENSG00000083290_24 (sequence is synthesized)
ccctgaactgccggaggagacgctgatggagcgggaacacacagacaccttacgccatctgaatgtgatgctgatgttcactgagtgtgtgctggacctgacagccatgaggggaggaaa

SEQ ID NO: 83403 - DNA, 120 bp, Artificial Sequence
  ENSG00000083290_25 (sequence is synthesized)
ccctgagctgtgcacatctgctgtgtccttgtaccagatccaggagagtgtggtggtggaccagatcagtcagctgagcaaagactgggggcgggtggagcagctggtgttgtacatgaa

SEQ ID NO: 83404 - DNA, 120 bp, Artificial Sequence
  ENSG00000083290_26 (sequence is synthesized)
agcagcacagctgcttgcggcttctctgcatcttgccaaagcccagatcaagtccgggaaactgagcccatccacagctgtgaaacaagttgtcaagaatctgaacgaacgatataaatt

SEQ ID NO: 83405 - DNA, 120 bp, Artificial Sequence
  ENSG00000083290_27 (sequence is synthesized)
ctgcatcaccatgtgcaagaaacttacagaaaagctgaatcgattcttctctgacaaacagaggtttattgatgaaatcaacagtgtgactgcagagaaactcatctataattgtgctgt

SEQ ID NO: 83406 - DNA, 120 bp, Artificial Sequence
  ENSG00000083290_28 (sequence is synthesized)
agaaatggttcagtctgcagccctggatgagatgtttcagcagaccgaagatattgtttatcgctatcataaggcagcccttcttttggaaggcctaagtaggattctacaggaccctgc

SEQ ID NO: 83407 - DNA, 120 bp, Artificial Sequence
  ENSG00000083290_29 (sequence is synthesized)
agatattgaaaatgtgcataaatataaatgtagtattgagagaagactgtcggcgctctgccatagcaccgcaaccgtgtgagcagcaggctcatcccgtggaccggtggtgggaacgtg

SEQ ID NO: 83408 - DNA, 120 bp, Artificial Sequence
  ENSG00000083290_30 (sequence is synthesized)
aggaagaggggaaggaaggaagagcttttccatttggtgctccaatgtctcctgctggacccatctgcctagtggaaggcagcaaaatttcaagaaacaggtgaggttgagcagcttggt

SEQ ID NO: 83409 - DNA, 120 bp, Artificial Sequence
  ENSG00000083290_31 (sequence is synthesized)
gcaaccccatggggcctggagttggagctcaacagcaatggatttcagagaccaccctgaaactcccagtaaaaaagacttgggagacatgttaataaactcaagcatttgatcgaccca

SEQ ID NO: 83410 - DNA, 120 bp, Artificial Sequence
  ENSG00000083290_32 (sequence is synthesized)
actgtagcttcttaactggtgactaccaaagaacaagcagtgatttgaaaaaggaaaaacaatccaaaaactacatatttgtaggaaatctgccttattggagaaaatcaccctttccct

SEQ ID NO: 83411 - DNA, 120 bp, Artificial Sequence
  ENSG00000083290_33 (sequence is synthesized)
ttttctttgtagaagcaggagcaagagtgtttggctcccagtttggacttggtgaataaatgtaccttagaactaggataatcggtacagttattcttaaagataattaaaaatgaaaca

SEQ ID NO: 83412 - DNA, 120 bp, Artificial Sequence
  ENSG00000083290_34 (sequence is synthesized)
aagtgagtgctcgtcactgggttcatcagagcagtgtgtgaaattccatgtgtttgctgaggtgtaaaggtaaatgtattcacccctcatccaggcagtttgatatttggagtaagtttg

SEQ ID NO: 83413 - DNA, 120 bp, Artificial Sequence
  ENSG00000083290_35 (sequence is synthesized)
tttaaatctgagcatgcatctttaaacagctcaggaagaaatagcttaagaagaagtgaaacatggatcttggaagaaattttgaaatcttcaatttgatcctaatatggatacatgtta

SEQ ID NO: 83414 - DNA, 120 bp, Artificial Sequence
  ENSG00000083290_36 (sequence is synthesized)
atcttccaaaatctttcatattgcactaatttattaaaacaactgtgtattggattttgtaatttaactaaggcacaatggacttgtttaaaatattttacttgattgtatacatagacc

SEQ ID NO: 83415 - DNA, 120 bp, Artificial Sequence
  ENSG00000083290_37 (sequence is synthesized)
ctttccagaattcacatgtaatctccagtgaacttttaagtggttaaaacttgtattcatgtgaacctttgcacattttttttttttacttctttatctacacctacagattttctcagt

SEQ ID NO: 83416 - DNA, 120 bp, Artificial Sequence
  ENSG00000083290_38 (sequence is synthesized)
aatgtttttgttagcttttggttccattttttattgtgcatgcagaatgtacattgatgcctgtgaccttaggtttattaaaggctaggtttatttgggcagtattagaaacaaaatcat

SEQ ID NO: 83417 - DNA, 120 bp, Artificial Sequence
  ENSG00000083290_39 (sequence is synthesized)
tagggccaaaacaaagttggtgacctaaaggcttgttagtgatgtggagttcctacatgcagtgagtggaaaatgaagttcgttttctcttaggaaaatgggcagctgtcttctgcctaa

SEQ ID NO: 83418 - DNA, 120 bp, Artificial Sequence
  ENSG00000083290_40 (sequence is synthesized)
tgtgtatttttcatgttaattctgacagttcaccaaatagctagtcatggagaatgcaggcagttaacttaatatccctccaggaatggttcctacgttgtgtattacttggtttctttt

SEQ ID NO: 83419 - DNA, 120 bp, Artificial Sequence
  ENSG00000083290_41 (sequence is synthesized)
acttacctgcttgaatacttgaataaaccattcaccaattttaatccttttattttaatccttttacataaaataatctgaactctttgacaaattgcacagagctctttggcattaatc

SEQ ID NO: 83420 - DNA, 120 bp, Artificial Sequence
  ENSG00000083290_42 (sequence is synthesized)
taattttaatgtactgataaaaacaaacatggttttcctttactttgacaaagtaatgtaatttttaccttatttatctgtatgaaattccagtagttaatttgaacatttatttatatg

SEQ ID NO: 83421 - DNA, 120 bp, Artificial Sequence
  ENSG00000083290_43 (sequence is synthesized)
acgtttgtatttttaggtctttaatacagtgtttctacctctcatttgtaactgcatgcattattcttgaaactaggtaaaactcactgaattgttgtgtaatagcctttttattattgc

SEQ ID NO: 83422 - DNA, 120 bp, Artificial Sequence
  ENSG00000083290_44 (sequence is synthesized)
ctgtacaaatgtatattaaggtaaaataaaactgacaaagtgtttctagggtgtagctgggtacatattaagtggcttgttgagccaggtacttccttagtgagtttagagacttggcca

SEQ ID NO: 83423 - DNA, 120 bp, Artificial Sequence
  ENSG00000083290_45 (sequence is synthesized)
tgaatatcctttgtcctgccccaggatttagatcttggctactgtcatgcaggcttccaggaacatagactgttttacctccacaaccctatttgttattagtgatactttattttatat

SEQ ID NO: 83424 - DNA, 120 bp, Artificial Sequence
  ENSG00000083290_46 (sequence is synthesized)
aatattttttattcacagtgaaatttcattcatgttctttcagttatcacctgtgttatctcagttgtaggtttattctatcctctcctcttcctctcccatttcttttttaagacagga

SEQ ID NO: 83425 - DNA, 120 bp, Artificial Sequence
  ENSG00000083290_47 (sequence is synthesized)
tgaaacaggttcagagaggggaagtgattggcctaaagtcaggaactaggcaagtggtcaagccatgctttgtgactttcaagttaattcttcttgttcttgtatattaaaggtcttggg

SEQ ID NO: 83426 - DNA, 120 bp, Artificial Sequence
  ENSG00000083290_48 (sequence is synthesized)
gtagatggtgtgtgtgaaacagtgaagtctcaacagcagaaaagaacaaaatgtaaattcatgaataatggttctggttatacttccattatcaaggctaattaagagattttgccttga

SEQ ID NO: 83427 - DNA, 120 bp, Artificial Sequence
  ENSG00000083290_49 (sequence is synthesized)
gtatagcaataataaacaaatgctttatgtttccctgagtatttttaaatttcatatcgtgtttcatagagtggaaatgtaccagttcatacattcatgggttgacacctgtattcaagc

SEQ ID NO: 83428 - DNA, 120 bp, Artificial Sequence
  ENSG00000083290_50 (sequence is synthesized)
cataacctggaaaattgctgaccagctattcctgctctaagggtttgctttaactataccctccactggactatatatagagagagagcctatgctgtatatagttggtttcccacagtc

SEQ ID NO: 83429 - DNA, 120 bp, Artificial Sequence
  ENSG00000083290_51 (sequence is synthesized)
cctgtcccctccttccattgagagaagtaactagagcaacagttgttctccctcgctggagtggtgaataggagccgggaggaggggactgttagggtcgggctgcctcagtctccacag

SEQ ID NO: 83430 - DNA, 120 bp, Artificial Sequence
  ENSG00000083290_52 (sequence is synthesized)
taattaagaggaaattgagttggatacagcggacatgaggcctggaatgggtaccccaaacccatgcatcttaagtgtctgggtccccacgcccccttctgcctgccaggagtactctgt

SEQ ID NO: 83431 - DNA, 120 bp, Artificial Sequence
  ENSG00000083290_53 (sequence is synthesized)
gcagccatcctgtaactgcttcagtccagagaaggatagcatccatccctccctccagctcgcctctctgctgaggctttctcctctccactcagcatttgcaacagcttctctcctggc

SEQ ID NO: 83432 - DNA, 120 bp, Artificial Sequence
  ENSG00000083290_54 (sequence is synthesized)
acttgtctgggaatatcaagttaaaaattacaacacccaattttgataactttagttgagagaaacaacctctagtgaagactgataagtaacttattgcccgtagtcccatgttccttt

SEQ ID NO: 83433 - DNA, 120 bp, Artificial Sequence
  ENSG00000083290_55 (sequence is synthesized)
gtctccaccaagaggaattaccagcccagcagttctgccctcactagagtcccgtccaggagcttgagaggagaggatttttagggctggattgcctcagtctgcacagtaataagttga

SEQ ID NO: 83434 - DNA, 120 bp, Artificial Sequence
  ENSG00000083290_56 (sequence is synthesized)
gttagacacagtggacatgaggacctggactcagatatctgaagaatccttattatttttttgttggcttgttttgagacagagtcaccctgttgcccaggctggagtgcattggcgcaa

SEQ ID NO: 83435 - DNA, 86 bp, Artificial Sequence
  ENSG00000083290_57 (sequence is synthesized)
tgcctcccaggttcaagtgattcttcttcctcagcctcccaggtagctaggattacagacatgcgccaccacgctcagctattttt

SEQ ID NO: 83436 - DNA, 62 bp, Artificial Sequence
  ENSG00000083290_58 (sequence is synthesized)
cttgaacacctccttaatgtttttgttttttggtttttttttttgagacagtcttgctctgt

SEQ ID NO: 83437 - DNA, 120 bp, Artificial Sequence
  ENSG00000083290_59 (sequence is synthesized)
acaggcgtgagccaccgcgcccgggctatccttaatgttgatattagtggttagcacatgttttggaggaggacttcacactttttaaactatgctccctcgtattttctataagcagtc

SEQ ID NO: 83438 - DNA, 120 bp, Artificial Sequence
  ENSG00000083290_60 (sequence is synthesized)
ccctcgtattttctataagcagtcttaaattctttctggaataaagcaagattgatcagtatttctcaaggaggattatttggcaggcagtagctactgctcagagaacttggtattgtt

SEQ ID NO: 83439 - DNA, 120 bp, Artificial Sequence
  ENSG00000083290_61 (sequence is synthesized)
acatgcatcctggaagtatctgtgcctatttctagacggcctcagaccacttttttctgagtcctggacccttgaatctgcagccaagcaagctcttgggtccctcccaagtctcatgtt

SEQ ID NO: 83440 - DNA, 120 bp, Artificial Sequence
  ENSG00000083290_62 (sequence is synthesized)
tagtaaagccctgtgagaataattttattggtggaggagtcaagatgatacttccctcacctgcatcagaggaaaccacatcagaaacaatccacctagaaaaacactgcatacgggaaa

SEQ ID NO: 83441 - DNA, 120 bp, Artificial Sequence
  ENSG00000083290_63 (sequence is synthesized)
gctgacaacttgccctgagaaatcacagctttggtgcaagaggtgaagccgaactggtaaaagatcaaagtgaattcagagatcaaactgtactagggaaaggagcagaggctgagatct

SEQ ID NO: 83442 - DNA, 120 bp, Artificial Sequence
  ENSG00000083290_64 (sequence is synthesized)
tgctgccagcgtgacctctcacagagtggcccagcagaggctgtgcagagatggccagagccaggacccagccctgtggagcccctgggcacatgtggtcccgagtgaagccgtgcctgt

SEQ ID NO: 83443 - DNA, 120 bp, Artificial Sequence
  ENSG00000083290_65 (sequence is synthesized)
tgctctgaacaggtgggatcaatctgtaggtttttccacttttcacagagtgtggctctctttaggtctgcactccctctctgcgcagggcggacctccctgggctctgcagcatgatct

SEQ ID NO: 83444 - DNA, 120 bp, Artificial Sequence
  ENSG00000083290_66 (sequence is synthesized)
cctgtcccaagacagtcgtgctcttggacagttagcttctgtcattaggaagtgcccacatgagctcttgtttattggaaaccgtgttctatgcctcctttggggtttctgcaactcaat

SEQ ID NO: 83445 - DNA, 120 bp, Artificial Sequence
  ENSG00000083290_67 (sequence is synthesized)
ttggcaggtagcttagtggtccacttggtctcaaattccagctccaccatgtgcagttgtgtgttctttggcaagttcctcccctcctccgaatctgtcagtgggggaagagtgcatgtc

SEQ ID NO: 83446 - DNA, 120 bp, Artificial Sequence
  ENSG00000083290_68 (sequence is synthesized)
tcacagagttgaggtgagaaataagttaatgaatatgaaattctttgcccagcccctggcacgtggaagggctcagcaatcctgtatccgttgtagtggtcatcactctgtggctcttca

SEQ ID NO: 83447 - DNA, 120 bp, Artificial Sequence
  ENSG00000083290_69 (sequence is synthesized)
ctgcttttgttttgttttgggagggggtggagaacaatttgttctgtgtttgtgtggggcaaggcctgtcttcagggctctctccaaccacgtacgctctggctggagcttctgaaagga

SEQ ID NO: 83448 - DNA, 120 bp, Artificial Sequence
  ENSG00000083290_70 (sequence is synthesized)
cacagttcttgcatagaagttgctttctccagcttgcccaccaggcagtctggcttcagacatctatgttgcccttttaagtcaatttggctgtttaagtggaatgtttgtgtcagtctg

SEQ ID NO: 83449 - DNA, 120 bp, Artificial Sequence
  ENSG00000083290_71 (sequence is synthesized)
ataattgttaattcatttgatcctcataccaacccttacttgcctccttttacagatggaaaaatcaaacttggacagtaatttccacaaggaaaagccccacagctggaaagcggtggg

SEQ ID NO: 83450 - DNA, 120 bp, Artificial Sequence
  ENSG00000083290_72 (sequence is synthesized)
agcaggaggccacactgggtacaggagtacccatctccccacaggagccccacactgtctcacccttaggaagcccaaatgctcactccttgagtttctaatgcattctttctgatgtac

SEQ ID NO: 83451 - DNA, 120 bp, Artificial Sequence
  ENSG00000083290_73 (sequence is synthesized)
ttatttgcaaggttatatagaacatattctaagaattatatggacagacatgcatcacgaataatttaaataggtacatggatactaaatcctcagtgtagcgaaagggactctcagtga

SEQ ID NO: 83452 - DNA, 120 bp, Artificial Sequence
  ENSG00000083290_74 (sequence is synthesized)
tgttttctcaattctcctatagacaaatattcattgtctttaaataaaaatggacttcccctttgccctgctactcttttttcccttaccctgatttattttcctttataatgcttattg

SEQ ID NO: 83453 - DNA, 85 bp, Artificial Sequence
  ENSG00000083290_75 (sequence is synthesized)
ttcccttaccctgatttattttcctttataatgcttattgctacctgacattattatgttttttttttgagaatgggatcttgct

SEQ ID NO: 83454 - DNA, 120 bp, Artificial Sequence
  ENSG00000083290_76 (sequence is synthesized)
ccacacctggccttccatgacatcttgttcaacaactcatgcaagacctgagagagtgttatgcaggaggatggggtgatatgccagtggggactgctggcagacgtgcttcaaatgaat

SEQ ID NO: 83455 - DNA, 89 bp, Artificial Sequence
  ENSG00000083290_77 (sequence is synthesized)
gcatgaaaatattgtagcactctatgatgttcagtcttgctcttgtcgcccagggtggagtgcaatggcacaatctcagctcattgcac

SEQ ID NO: 83456 - DNA, 120 bp, Artificial Sequence
  ENSG00000083290_78 (sequence is synthesized)
tttgcttgcccagttccagtgcccatgtattctggttctgtctctggaagctcctgtggcagctctccatcttgtcgttttgcttctccaccagtgatatgccagtggggactgctggca

SEQ ID NO: 83457 - DNA, 120 bp, Artificial Sequence
  ENSG00000083290_79 (sequence is synthesized)
attaatatcctcaaatagtacatagggggtcagtgagtttcttttaacgaaactttcctttgtcacctcagcaggtttgtttagtaaataagagtaggagtgggtgtgaaagccctaact

SEQ ID NO: 83458 - DNA, 120 bp, Artificial Sequence
  ENSG00000083307_0 (sequence is synthesized)
gagaaagttacctgtggccgcccaagtccgccactttctgctctgtgtctgcccattgccacgatccaggaggactccgcgccgcccggccgcctccgagctcgggccccatgtgagggg

SEQ ID NO: 83459 - DNA, 120 bp, Artificial Sequence
  ENSG00000083307_1 (sequence is synthesized)
cccccccttatcccacctttccggctaggtgagggcgcgagcgggcgagcgagcgagagtggtgaggggggacggaaaagcagaattacctgtagctcttgttctgccatctcgggcgct

SEQ ID NO: 83460 - DNA, 120 bp, Artificial Sequence
  ENSG00000083307_2 (sequence is synthesized)
ctcacacaccttcacctgcacagacttgaaagtccagtttcaccagaggctgaggctccaggaaaagcggagcaagttcattggatcaaacatgtcacaagagtcggacaataataaaag

SEQ ID NO: 83461 - DNA, 120 bp, Artificial Sequence
  ENSG00000083307_3 (sequence is synthesized)
actagtggccttagtgcccatgcccagtgaccctccattcaatacccgaagagcctacaccagtgaggatgaagcctggaagtcatacttggagaatcccctgacagcagccaccaaggc

SEQ ID NO: 83462 - DNA, 120 bp, Artificial Sequence
  ENSG00000083307_4 (sequence is synthesized)
catgatgagcattaatggtgatgaggacagtgctgctgccctcggcctgctctatgactactacaaggttcctcgagacaagaggctgctgtctgtaagcaaagcaagtgacagccaaga

SEQ ID NO: 83463 - DNA, 120 bp, Artificial Sequence
  ENSG00000083307_5 (sequence is synthesized)
agaccaggagaaaagaaactgccttggcaccagtgaagcccagagtaatttgagtggaggagaaaaccgagtgcaagtcctaaagactgttccagtgaacctttccctaaatcaagatca

SEQ ID NO: 83464 - DNA, 120 bp, Artificial Sequence
  ENSG00000083307_6 (sequence is synthesized)
cctggagaattccaagcgggaacagtacagcatcagcttccccgagagctctgccatcatcccggtgtcgggaatcacggtggtgaaagctgaagatttcacaccagttttcatggcccc

SEQ ID NO: 83465 - DNA, 120 bp, Artificial Sequence
  ENSG00000083307_7 (sequence is synthesized)
acctgtgcactatccccggggagatggggaagagcaacgagtggttatctttgaacagactcagtatgacgtgccctcgctggccacccacagcgcctatctcaaagacgaccagcgcag

SEQ ID NO: 83466 - DNA, 120 bp, Artificial Sequence
  ENSG00000083307_8 (sequence is synthesized)
cactccggacagcacatacagcgagagcttcaaggacgcagccacagagaaatttcggagtgcttcagttggggctgaggagtacatgtatgatcagacatcaagtggcacatttcagta

SEQ ID NO: 83467 - DNA, 120 bp, Artificial Sequence
  ENSG00000083307_9 (sequence is synthesized)
caccctggaagccaccaaatctctccgtcagaagcagggggagggccccatgacctacctcaacaaaggacagttctatgccataacactcagcgagaccggagacaacaaatgcttccg

SEQ ID NO: 83468 - DNA, 120 bp, Artificial Sequence
  ENSG00000083307_10 (sequence is synthesized)
acaccccatcagcaaagtcaggagtgtggtgatggtggtcttcagtgaagacaaaaacagagatgaacagctcaaatactggaaatactggcactctcggcagcatacggcgaagcagag

SEQ ID NO: 83469 - DNA, 120 bp, Artificial Sequence
  ENSG00000083307_11 (sequence is synthesized)
ggtccttgacattgccgattacaaggagagctttaatacgattggaaacattgaagagattgcatataatgctgtttcctttacctgggacgtgaatgaagaggcgaagattttcatcac

SEQ ID NO: 83470 - DNA, 120 bp, Artificial Sequence
  ENSG00000083307_12 (sequence is synthesized)
cgtgaattgcttgagcacagatttctcctcccaaaaaggggtgaaaggacttcctttgatgattcagattgacacatacagttataacaatcgtagcaataaacccattcatagagctta

SEQ ID NO: 83471 - DNA, 120 bp, Artificial Sequence
  ENSG00000083307_13 (sequence is synthesized)
ttgccagatcaaggtcttctgtgacaaaggagcagaaagaaaaatccgagatgaagagcggaagcagaacaggaagaaagggaaaggccaggcctcccaaactcaatgcaacagctcctc

SEQ ID NO: 83472 - DNA, 120 bp, Artificial Sequence
  ENSG00000083307_14 (sequence is synthesized)
tgatgggaagttggctgccatacctttacagaagaagagtgacatcacctacttcaaaaccatgcctgatctccactcacagccagttctcttcatacctgatgttcactttgcaaacct

SEQ ID NO: 83473 - DNA, 120 bp, Artificial Sequence
  ENSG00000083307_15 (sequence is synthesized)
gcagaggaccggacaggtgtattacaacacggatgatgaacgagaaggtggcagtgtccttgttaaacggatgttccggcccatggaagaggagtttggtccagtgccttcaaagcagat

SEQ ID NO: 83474 - DNA, 120 bp, Artificial Sequence
  ENSG00000083307_16 (sequence is synthesized)
gaaagaagaagggacaaagcgagtgctcttgtacgtgaggaaggagactgacgatgtgttcgatgcattgatgttgaagtctcccacagtgaagggcctgatggaagcgatatctgagaa

SEQ ID NO: 83475 - DNA, 120 bp, Artificial Sequence
  ENSG00000083307_17 (sequence is synthesized)
atatgggctgcccgtggagaagatagcaaagctttacaagaaaagcaaaaaaggcatcttggtgaacatggatgacaacatcatcgagcactactcgaacgaggacaccttcatcctcaa

SEQ ID NO: 83476 - DNA, 120 bp, Artificial Sequence
  ENSG00000083307_18 (sequence is synthesized)
catggagagcatggtggagggcttcaaggtcacgctcatggaaatctagccctgggtttggcatccgctttggctggagctctcagtgcgttcctccctgagagagacagaagccccagc

SEQ ID NO: 83477 - DNA, 120 bp, Artificial Sequence
  ENSG00000083307_19 (sequence is synthesized)
cccagaacctggagacccatctcccccatctcacaactgctgttacaagaccgtgctggggagtggggcaagggacaggccccactgtcggtgtgcttggcccatccactggcacctacc

SEQ ID NO: 83478 - DNA, 120 bp, Artificial Sequence
  ENSG00000083307_20 (sequence is synthesized)
acggagctgaagcctgagcccctcaggaaggtgccttaggcctgttggattcctatttattgcccaccttttcctggagcccaggtccaggcccgccaggactctgcaggtcactgctag

SEQ ID NO: 83479 - DNA, 120 bp, Artificial Sequence
  ENSG00000083307_21 (sequence is synthesized)
cccttctctctcacccctccatatctatctcccgagtggctggacaaaatgagctacgtctgggtgcagtagttataggtggggcaagaggtggatgcccactttctggtcagacacctt

SEQ ID NO: 83480 - DNA, 120 bp, Artificial Sequence
  ENSG00000083307_22 (sequence is synthesized)
taggttgctctggggaaggctgtcttgctaaatacctccagggttcccagcaagtggccaccaggccttgtacaggaagacattcagtcaccgtgtaattagtaacacagaaagtctgcc

SEQ ID NO: 83481 - DNA, 120 bp, Artificial Sequence
  ENSG00000083307_23 (sequence is synthesized)
tgtctgcattgtacatagtgtttataatattgtaataatatattttacctgtggtatgtgggcatgtttactgccactggcctagaggagacacagacctggagaccgttttaatggggg

SEQ ID NO: 83482 - DNA, 120 bp, Artificial Sequence
  ENSG00000083307_24 (sequence is synthesized)
tttttgcctctgtgcctgttcaagagacttgcagggctaggtagagggcctttgggatgttaaggtgactgcagctgatgccaagatggactctgcaatgggcatacctgggggctcgtt

SEQ ID NO: 83483 - DNA, 120 bp, Artificial Sequence
  ENSG00000083307_25 (sequence is synthesized)
ccctgtccccagaggaagccccctctccttctccatgggcatgactctccttcgaggccaccacgtttatctcacaatgatgtgttttgcttgactttccctttgcgctgtctcgtggga

SEQ ID NO: 83484 - DNA, 120 bp, Artificial Sequence
  ENSG00000083307_26 (sequence is synthesized)
aaggtcattctgtctgagaccccagctccttctccagctttggctgcgggcatggcctgagctttctggagagcctctgcagggggtttgccatcagggccctgtggctgggtctgctgc

SEQ ID NO: 83485 - DNA, 120 bp, Artificial Sequence
  ENSG00000083307_27 (sequence is synthesized)
agagctccttggctatcaggagaatcctggacactgtactgtgcctcccagtttacaaacacgcccttcatctcaagtggccctttaaaaggcctgctgccatgtgagagctgtgaacag

SEQ ID NO: 83486 - DNA, 120 bp, Artificial Sequence
  ENSG00000083307_28 (sequence is synthesized)
ctcagctctgagtcggcaggctggggcttcctcctgggccaccagatggaaagggggtattgtttgcctcactcctggatgctgcgttttaaggaagtgagtgagaaagaatgtgccaag

SEQ ID NO: 83487 - DNA, 120 bp, Artificial Sequence
  ENSG00000083307_29 (sequence is synthesized)
atacctggctcctgtgaaaccagcctcaggagggaaactgggagagagaagctgtggtctcctgctacatgccctgggagctggaagagaaaaacactcccctaaacaatcgcaaaatga

SEQ ID NO: 83488 - DNA, 120 bp, Artificial Sequence
  ENSG00000083307_30 (sequence is synthesized)
tgaaccatcatgggccactgttctctttgaggggacaggtttaggggtttgcgttcgcccttgtgggctgaagcactagctttttggtagctagacacatcctgcacccaaaggttctct

SEQ ID NO: 83489 - DNA, 120 bp, Artificial Sequence
  ENSG00000083307_31 (sequence is synthesized)
acaaaggcccagatttgtttgtaaagcactttgactcttacctggaggcccgctctctaagggcttcctgcgctcccacctcatctgtccctgagatgcagagcaggatggagggtctgc

SEQ ID NO: 83490 - DNA, 120 bp, Artificial Sequence
  ENSG00000083307_32 (sequence is synthesized)
ttctagctcagctgtttctccttgaggttgcggaggaattgaattgaatgggacagagggcaggtgctgtggccaagaagatctccgagcagcagtgacggggcaccttgctgtgtgtcc

SEQ ID NO: 83491 - DNA, 120 bp, Artificial Sequence
  ENSG00000083307_33 (sequence is synthesized)
tctgggcatgttaacccttctgtggggccaaaggtttgcatcgtggatccagctgtgctccagtctgtcccctcctcctccactctgactgccacgccccggaccagcagcttggggacc

SEQ ID NO: 83492 - DNA, 120 bp, Artificial Sequence
  ENSG00000083307_34 (sequence is synthesized)
ctccagggtactaatggggctctgttctgagatggacaaattcagtgttggaaatacatgttgtactatgcacttcccatgctcctagggttaggaatagtttcaaacatgattggcaga

SEQ ID NO: 83493 - DNA, 120 bp, Artificial Sequence
  ENSG00000083307_35 (sequence is synthesized)
cataacaacggcaaatactcggactggggcataggactccagagtaggaaaaagacaaaagatttggcagcctgacacaggcaacctacccctctctctccagcctctttatgaaactgt

SEQ ID NO: 83494 - DNA, 120 bp, Artificial Sequence
  ENSG00000083307_36 (sequence is synthesized)
ttgtttgccagtcctgccctaaggcagaagatgaattgaagatgctgtgcatgtttcctaagtccttgagcaatcatggtggtgacaattgccacaagggatatgaggccagtgccacca

SEQ ID NO: 83495 - DNA, 120 bp, Artificial Sequence
  ENSG00000083307_37 (sequence is synthesized)
gagggtggtgccaagtgccacatcccttccgatccattcccctctgcatcctcggagcaccccagtttgcctttgatgtgtccgctgtgtatgttagctgaactttgatgagcaaaattt

SEQ ID NO: 83496 - DNA, 120 bp, Artificial Sequence
  ENSG00000083307_38 (sequence is synthesized)
cctgagcgaaacactccaaagagataggaaaacttgccgcctcttcttttttgtcccttaatcaaactcaaataagcttaaaaaaaatccatggaagatcatggacatgtgaaatgagca

SEQ ID NO: 83497 - DNA, 120 bp, Artificial Sequence
  ENSG00000083307_39 (sequence is synthesized)
tttttttcttttttttttttaacaaagtctgaactgaacagaacaagactttttcctcatacatctccaaattgtttaaacttactttatgagtgtttgtttagaagttcggaccaacag

SEQ ID NO: 83498 - DNA, 120 bp, Artificial Sequence
  ENSG00000083307_40 (sequence is synthesized)
aaaaatgcagtcagatgtcatcttggaattggtttctaaaagagtaaggcatgtccctgcccagaaacttaggaagcatgaaataaatcaaatgtttattttccttcttatttaaaatca

SEQ ID NO: 83499 - DNA, 120 bp, Artificial Sequence
  ENSG00000083307_41 (sequence is synthesized)
tgcaaatgcaacagaaatagagggtttgtgccaaatgctatgaacggccctttcttaaagacaagcaagggagattgatatatgtacaatttgctctcatgttttaaaaaaaaaaaggta

SEQ ID NO: 83500 - DNA, 120 bp, Artificial Sequence
  ENSG00000083307_42 (sequence is synthesized)
aatgtaacttaatagttttgtaaatgggagagggggaatctataaactataaatacagttattttattttttgtacatttttaaggagaaaaaataaatattcataacataagagtaaaa

SEQ ID NO: 83501 - DNA, 120 bp, Artificial Sequence
  ENSG00000083307_43 (sequence is synthesized)
tattaaacagattagtcttttgcctttttaagagacagtttatgccttaggaaagtctgtacatcacgtaatattttttccatttcttgtctctgacctacagtaagcctattgttttgt

SEQ ID NO: 83502 - DNA, 120 bp, Artificial Sequence
  ENSG00000083307_44 (sequence is synthesized)
gctccaggacaaccctttgctggtgggaagaaggaacagattgtttgtcccaggccagggaactaatagcatttccaaagtcaatatagaattcagcctcttcctgttctccttgctccc

SEQ ID NO: 83503 - DNA, 120 bp, Artificial Sequence
  ENSG00000083307_45 (sequence is synthesized)
tgcttccccatctacaaagctcaactttatcacccatccagaggaagtactcattttgggataatattttttgtgttccttgttcacatgcataaatattatttgcatattattcttacc

SEQ ID NO: 83504 - DNA, 120 bp, Artificial Sequence
  ENSG00000083307_46 (sequence is synthesized)
attattcttaccatattacaaatacttccttgttgctatgtttactttaggattattatttttgctgaatgaagtatattacattgagtggctttattagtccattttcacactgctgat

SEQ ID NO: 83505 - DNA, 66 bp, Artificial Sequence
  ENSG00000083307_47 (sequence is synthesized)
caaaaggcactccttacacggcagtggaaacagaaaatgaagaagatgcaaaagtggaaacccctg

SEQ ID NO: 83506 - DNA, 65 bp, Artificial Sequence
  ENSG00000083307_48 (sequence is synthesized)
gctatcacgagaacagtatgggggaaactgctcccacaattcaaattatctgccacagtgtccct

SEQ ID NO: 83507 - DNA, 120 bp, Artificial Sequence
  ENSG00000083312_0 (sequence is synthesized)
gccgggctgccaggagcagttccgccgggtttcactgtccgtgacttccttcggggcacctcaggcagcaaaccaagatggagtatgagtggaaacctgacgagcaagggcttcagcaaa

SEQ ID NO: 83508 - DNA, 120 bp, Artificial Sequence
  ENSG00000083312_1 (sequence is synthesized)
tcctgcagctgttgaaggagtcccagtccccagacaccaccatccagagaaccgtgcaacaaaaactggaacaacttaatcagtatccagactttaacaactacttgatttttgttctta

SEQ ID NO: 83509 - DNA, 120 bp, Artificial Sequence
  ENSG00000083312_2 (sequence is synthesized)
caaaattaaaatctgaagatgaacccacaagatcattgagtggtcttatcttgaagaataatgtgaaagcacactttcagaacttcccaaatggtgtaacagactttattaaaagtgaat

SEQ ID NO: 83510 - DNA, 120 bp, Artificial Sequence
  ENSG00000083312_3 (sequence is synthesized)
gtttaaataatattggtgactcctctcctctgattagagccactgttggtattttgatcacaactatagcctccaagggagaattgcagaattggcctgacctcttaccaaaactctgta

SEQ ID NO: 83511 - DNA, 120 bp, Artificial Sequence
  ENSG00000083312_4 (sequence is synthesized)
gcctgttggattctgaagattataatacctgtgagggagcatttggtgcccttcagaagatttgtgaagattctgctgagattttagacagtgatgttttagatcgtcctctcaacatca

SEQ ID NO: 83512 - DNA, 120 bp, Artificial Sequence
  ENSG00000083312_5 (sequence is synthesized)
tgattcccaaatttttacagttcttcaagcatagtagtccaaaaataaggtctcacgctgttgcatgtgtcaatcagtttatcatcagtaggactcaagctctaatgttgcacattgatt

SEQ ID NO: 83513 - DNA, 120 bp, Artificial Sequence
  ENSG00000083312_6 (sequence is synthesized)
cttttattgagaatctctttgcattagctggtgatgaagaaccagaggtacggaaaaatgtgtgccgagcacttgtgatgttgctcgaagttcgaatggatcgcctgcttcctcacatgc

SEQ ID NO: 83514 - DNA, 120 bp, Artificial Sequence
  ENSG00000083312_7 (sequence is synthesized)
ataatatagttgagtacatgctacagaggactcaagatcaagatgaaaatgtggctttagaagcctgtgaattttggctaactttagctgaacagccaatatgcaaagatgtactcgtaa

SEQ ID NO: 83515 - DNA, 120 bp, Artificial Sequence
  ENSG00000083312_8 (sequence is synthesized)
ggcatcttcctaagttgattcctgtgttagtgaatggcatgaagtactcagacatagatattatcctacttaagggtgatgttgaagaagacgaaacgattcctgatagtgaacaggata

SEQ ID NO: 83516 - DNA, 120 bp, Artificial Sequence
  ENSG00000083312_9 (sequence is synthesized)
tacggccacgttttcaccgatcgaggacggtggctcagcagcatgatgaagatggaattgaagaggaagatgatgatgatgatgaaattgatgatgatgatacaatttctgactggaatc

SEQ ID NO: 83517 - DNA, 120 bp, Artificial Sequence
  ENSG00000083312_10 (sequence is synthesized)
taagaaaatgttctgctgctgccctggatgttcttgcaaatgtgtatcgtgatgaactgctgccacatattttgccccttttgaaagaattactttttcatcatgaatgggttgttaaag

SEQ ID NO: 83518 - DNA, 120 bp, Artificial Sequence
  ENSG00000083312_11 (sequence is synthesized)
aatcaggcattttggttttaggagcaattgctgaaggttgcatgcagggcatgattccatacttgcctgagcttattcctcaccttattcagtgcctctctgataaaaaggctcttgtgc

SEQ ID NO: 83519 - DNA, 120 bp, Artificial Sequence
  ENSG00000083312_12 (sequence is synthesized)
ctatgcacactgggtggtcagccagccgccagacacgtacctgaagccattaatgacagaattgctaaagcgcatcctggacagcaacaagagagtacaagaagctgcctgcagtgcctt

SEQ ID NO: 83520 - DNA, 120 bp, Artificial Sequence
  ENSG00000083312_13 (sequence is synthesized)
tgctaccctagaagaggaggcttgtacagaacttgttccttaccttgcttatatacttgataccctggtctttgcatttagtaaataccagcataagaacctgctcattctttacgatgc

SEQ ID NO: 83521 - DNA, 120 bp, Artificial Sequence
  ENSG00000083312_14 (sequence is synthesized)
cataggaacattagcagattcagtaggacatcatttaaacaaaccagaatatattcagatgctaatgcctccactgatccagaaatggaacatgttaaaggatgaagataaagatctctt

SEQ ID NO: 83522 - DNA, 120 bp, Artificial Sequence
  ENSG00000083312_15 (sequence is synthesized)
ccctttacttgagtgcctatcttcagttgccacagcactgcagtctggattccttccgtactgtgaacctgtgtatcagcgttgtgtaaacctagtacagaagactcttgcacaagccat

SEQ ID NO: 83523 - DNA, 120 bp, Artificial Sequence
  ENSG00000083312_16 (sequence is synthesized)
gctaaacaatgctcaaccagatcaatatgaagctccagataaagattttatgatagtggctcttgatttactgagtggcctggctgaaggacttggaggcaacattgaacagctggtagc

SEQ ID NO: 83524 - DNA, 120 bp, Artificial Sequence
  ENSG00000083312_17 (sequence is synthesized)
ccgaagtaacatcctgacactaatgtatcagtgcatgcaggataaaatgccagaagttcgacagagttcttttgccctgttaggtgacctcacaaaagcttgctttcagcatgttaagcc

SEQ ID NO: 83525 - DNA, 120 bp, Artificial Sequence
  ENSG00000083312_18 (sequence is synthesized)
ttgtatagctgatttcatgccaatattgggaaccaacctaaatccagaattcatttcagtctgcaacaatgccacatgggcaattggagaaatctccattcaaatgggtatagagatgca

SEQ ID NO: 83526 - DNA, 120 bp, Artificial Sequence
  ENSG00000083312_19 (sequence is synthesized)
gccttatattcctatggtgttgcaccagcttgtagaaatcattaacagacccaacacaccaaagacgttgttagagaatacagcaataacaattggtcgtcttggttacgtttgtcctca

SEQ ID NO: 83527 - DNA, 120 bp, Artificial Sequence
  ENSG00000083312_20 (sequence is synthesized)
agaggtggcccccatgctacagcagtttataagaccctggtgcacctctctgagaaacataagagacaatgaggaaaaggattcagcattccgtggaatttgtaccatgatcagtgtgaa

SEQ ID NO: 83528 - DNA, 120 bp, Artificial Sequence
  ENSG00000083312_21 (sequence is synthesized)
tcccagtggcgtaatccaagattttatatttttttgtgatgccgttgcatcatggattaacccaaaagatgatctcagagacatgttctgtaagatccttcatggatttaaaaatcaagt

SEQ ID NO: 83529 - DNA, 120 bp, Artificial Sequence
  ENSG00000083312_22 (sequence is synthesized)
tggcgatgaaaattggaggcgtttctctgaccagtttcctcttcccttaaaagagcgtcttgcagctttttatggtgtttaatctaatacacttaagctgcagtcccaaaattaggggtc

SEQ ID NO: 83530 - DNA, 120 bp, Artificial Sequence
  ENSG00000083312_23 (sequence is synthesized)
cttcagtcttggagactataagggagcctctgcacccagggaaaatgttaccctttacaggggggaagggtaaaccagtagggaatacagtacaatcccaaccctactgggaggggcggg

SEQ ID NO: 83531 - DNA, 120 bp, Artificial Sequence
  ENSG00000083312_24 (sequence is synthesized)
agggaggtgttgccgtcactgtattaagtcgatgttgggaaacgttttaacatctggagcctttgtgggtggaaatatgtctccagttacaactccgcagtggatgtgaagaagcaaaaa

SEQ ID NO: 83532 - DNA, 120 bp, Artificial Sequence
  ENSG00000083312_25 (sequence is synthesized)
aaaagaaagaaactttgggttgtagcagcataatgggaattgaagttagggggtaagggaggagccacagtataaaggaatgtctaggcaagtagtcagcaaactatgtcccatggagcc

SEQ ID NO: 83533 - DNA, 120 bp, Artificial Sequence
  ENSG00000083312_26 (sequence is synthesized)
aatcggaccggcgctcggtgaagcccagattctctttgttccgcagccatttcaggccccggacaggaggcagtgccgcttcggccgaaggcccgagcgcccgaggcgtctgggatggtg

SEQ ID NO: 83534 - DNA, 120 bp, Artificial Sequence
  ENSG00000083312_27 (sequence is synthesized)
tgggaccgggacacagcaagaagtctgtgagctagaaagcagccctcaccagatactgaatatgccttgctcttggacttcccatcctacagaatgcaaaccaagatggagtatgagtgg

SEQ ID NO: 83535 - DNA, 120 bp, Artificial Sequence
  ENSG00000083312_28 (sequence is synthesized)
gggaacggaggctgggagcgccgagctgcctgacgcgcctacgggagagacgccgggctcgcccgctctctcggcgcctgcccggccgtttgaagccgagaggcagcggcggcgcggttc

SEQ ID NO: 83536 - DNA, 120 bp, Artificial Sequence
  ENSG00000083312_29 (sequence is synthesized)
taaccccaacagctgcccgcccaggcgccctgcgggacccggcaaaccaagatggagtatgagtggaaacctgacgagcaagggcttcagcaaatcctgcagctgttgaaggagtcccag

SEQ ID NO: 83537 - DNA, 120 bp, Artificial Sequence
  ENSG00000083312_30 (sequence is synthesized)
atctatactgtggtgcttattccattaaatactgtccattagtattgtcattgaatctgcttgttacttaaatgctaaactcaattctgtaattcaataggtgcacctctctgagaaaca

SEQ ID NO: 83538 - DNA, 120 bp, Artificial Sequence
  ENSG00000083312_31 (sequence is synthesized)
tttggaaattttcaggatgaagaaaattttgttagggctgtcatttcaaactactaaatagaataaaaagctatttgttttctatagaggttgaataaaacatagcctcatatcattcta

SEQ ID NO: 83539 - DNA, 120 bp, Artificial Sequence
  ENSG00000083312_32 (sequence is synthesized)
acagtctgggcaaccacaccggcgggccgttttgctcacagccccaccgcgccgggcagcgtctgcagctgctgcgtgcgagacccagaggctccggtcagcgcgccggccgcagggagt

SEQ ID NO: 83540 - DNA, 120 bp, Artificial Sequence
  ENSG00000083312_33 (sequence is synthesized)
gcgagcacttgtgagccccgcgccgggccggtgaagtctggtgctgccgagcccgcttagaaagcacggccgcgcgctgtcggacgcaggcccacaggcccagccgacccaggcagcaat

SEQ ID NO: 83541 - DNA, 120 bp, Artificial Sequence
  ENSG00000083312_34 (sequence is synthesized)
taaatgatgcctagggacaagaaagaggaacaattctatagcgcacaataaaggaaacctaagaatgggagttacaaatagtaaagaagctttttttttttttttaatttaaagtttttt

SEQ ID NO: 83542 - DNA, 120 bp, Artificial Sequence
  ENSG00000083312_35 (sequence is synthesized)
tatgtaagttttcccacatgatggggccttgttttgcatgttgatgaagaactacacaaagaaaactaatatagttaaaagtcagcttgccttcccgtagtagaagcaggttcttggaag

SEQ ID NO: 83543 - DNA, 120 bp, Artificial Sequence
  ENSG00000083312_36 (sequence is synthesized)
ttacaatttaaggtaccccaaaaaagttggaaataaaacaaaacaaacataaacaatgaagcaccctgtgaaatgccaaatgagtcactccttttaccttttttggggtgggcagggagg

SEQ ID NO: 83544 - DNA, 120 bp, Artificial Sequence
  ENSG00000083312_37 (sequence is synthesized)
gaggaataaatggggttgggcatatcaaactaaagatgacatcttaattttgcattgaacattaatgtagcggatataatttgatgattatacttcattagatttaatttctaggccaag

SEQ ID NO: 83545 - DNA, 120 bp, Artificial Sequence
  ENSG00000083312_38 (sequence is synthesized)
atgttactttttaaagtgcagtttaaggttcaggcatgcattctggctcatagtggttgaaagtaatttaaattagtgggaaagtagcatgcttgcatcacatagagtgagattggtatt

SEQ ID NO: 83546 - DNA, 120 bp, Artificial Sequence
  ENSG00000083312_39 (sequence is synthesized)
catttacctatgttgcgccagtttgtgttgcagtttaccaattcaatatagccctgcatttaaagttcctttttaagatttgtggattttatttttattaagaacatagatatataaagt

SEQ ID NO: 83547 - DNA, 120 bp, Artificial Sequence
  ENSG00000083312_40 (sequence is synthesized)
actgtagtttacaggtaggccttgaaatatcttttttaggatctgttaggaataagattgatattgtattgtgtgtaacctgcacaatgtggaaagctgatatacctgtgcaaaatcttt

SEQ ID NO: 83548 - DNA, 120 bp, Artificial Sequence
  ENSG00000083312_41 (sequence is synthesized)
gcctctgtgctgtcagtgtgatgtgctttctgcatggttatatactactagtgattttatcaaaacttctaaaatttaaattacgtggtaaaagatctgtaaaaggctgcataaatgtta

SEQ ID NO: 83549 - DNA, 120 bp, Artificial Sequence
  ENSG00000083312_42 (sequence is synthesized)
gttggcacataaagacaattgtagaagttgaaaaatgattgctatatttcaatgtttattcccactcaacatactgccttctaagcttccctttttttgttcaaagcatgatcttaaaga

SEQ ID NO: 83550 - DNA, 120 bp, Artificial Sequence
  ENSG00000083312_43 (sequence is synthesized)
tatgtttaagttaatggatgtaatgcagggttcctacactgtattttggcgcatgttggtggccctctgtgccctagatatatgcacacagggtgcaagttaaaagctacagagtgaaag

SEQ ID NO: 83551 - DNA, 120 bp, Artificial Sequence
  ENSG00000083312_44 (sequence is synthesized)
ttggtttggatcctcttcatttcatttgtttagcttttctgttatttttctctacttacatgtattcctgtgaataaatccttgttaagttaaccctttacttttccttccatgtgtatt

SEQ ID NO: 83552 - DNA, 120 bp, Artificial Sequence
  ENSG00000083312_45 (sequence is synthesized)
ttcttatatactgtgaatgtgaaaacctaactggtacacttgatcttgtgttcatatgaaagtgcaagtctttattaatttggattgcctgaacagtgtatcccatgatgatgaaggaaa

SEQ ID NO: 83553 - DNA, 120 bp, Artificial Sequence
  ENSG00000083312_46 (sequence is synthesized)
atggagagatttttctttttaactctgctggtcagagatgaagccacgcctttccatttttcaatgctgcatatttaatctgcaacaaaaatgttaagccataacagcctttttatattt

SEQ ID NO: 83554 - DNA, 120 bp, Artificial Sequence
  ENSG00000083312_47 (sequence is synthesized)
tagtttgtcacctttgcattgcagaataaatactgaataaccatttttataagcagttgctcctctttgcatggttctattctctaaaagtgttgaatgatacagccattgcactgaagt

SEQ ID NO: 83555 - DNA, 120 bp, Artificial Sequence
  ENSG00000083312_48 (sequence is synthesized)
ttgagctgtgtgcgtgtgaatttatactgtttcaaaaatttcaaatgcatggtagcatgtagaaaggtttttgttactatgtgtgtgtgtgtgttttgttttgttttgttctgtttttta

SEQ ID NO: 83556 - DNA, 120 bp, Artificial Sequence
  ENSG00000083312_49 (sequence is synthesized)
acgttctttcacctttcctctactttggctttgcaaatttcagtctgtagagcctgaaattaaattattttatagtgcctgatatttttaatattataagttggattcaaagggtataca

SEQ ID NO: 83557 - DNA, 120 bp, Artificial Sequence
  ENSG00000083312_50 (sequence is synthesized)
gcattttgttttctagtaccattgcttcactgggagctcaaaatttgcctccctgttagtctttaataactgagtagagtagcttttttattcttagattatagtgatattctgtagtgc

SEQ ID NO: 83558 - DNA, 120 bp, Artificial Sequence
  ENSG00000083312_51 (sequence is synthesized)
tgagagatagtttaatattctggaatagagagtattttaaattgaaatgaccaaattcgatttaaaacaaacacataacaatcttcagtaaagttatttgaacctgtggttgacaattct

SEQ ID NO: 83559 - DNA, 120 bp, Artificial Sequence
  ENSG00000083312_52 (sequence is synthesized)
gtattgactaaaggcaatattgtcacctgtctcattaaaaattagtttccagttaggcagatgaataacactattaaaaatgcacccagttttgtagtcacttgactttttttttttatt

SEQ ID NO: 83560 - DNA, 120 bp, Artificial Sequence
  ENSG00000083312_53 (sequence is synthesized)
taaatgaaatttaatttgaaaatagaaaataaaattaggtaaatatgactggcaacctgaatttgagttgggattctttgtgtatttttcccccttgaggttattgtttcttcctaattt

SEQ ID NO: 83561 - DNA, 120 bp, Artificial Sequence
  ENSG00000083312_54 (sequence is synthesized)
atatttcagatacatagtgtagaacaggaatttgcagaagccatttaagttatcttttgaggtaagctctgatttagcatttattctgataaaatctaatacatcatgggatatatataa

SEQ ID NO: 83562 - DNA, 120 bp, Artificial Sequence
  ENSG00000083312_55 (sequence is synthesized)
agcaacttaattcttgtggtgtagtcttaatagttttgaatgttgactgaatgtctataaaattgtgagtttgtctttgttacattccagtgtttctgcctcttggcatgcttaaagcac

SEQ ID NO: 83563 - DNA, 120 bp, Artificial Sequence
  ENSG00000083312_56 (sequence is synthesized)
ggcttacttcatctgctccttacacactaaaatgctgttagtgtgctcaactacagaaatagccgctgctaagtgatgtagattttctacttgaatatttttatgttgtaggaacctcag

SEQ ID NO: 83564 - DNA, 120 bp, Artificial Sequence
  ENSG00000083312_57 (sequence is synthesized)
gaggtcagtgtttactgttttatatatgccttctttttcctgtttgagcttctctctttgaaggattctaacagaacaaagctgctgatcaacctaagttggaaacagaaagtgtaatta

SEQ ID NO: 83565 - DNA, 120 bp, Artificial Sequence
  ENSG00000083312_58 (sequence is synthesized)
atataacttaaatgcatgtttggcagttccatgttacagtccattagcgagtgaacttagtgccacaggtattcatttattcaggaaagaattttgctttttgtattgtctaatctcttc

SEQ ID NO: 83566 - DNA, 120 bp, Artificial Sequence
  ENSG00000083312_59 (sequence is synthesized)
aatgacttcatactgtgtaaaaaaaaatcactttttaatattttttggttggttatttcccaaataatcaacatgtaaataatcttttaagagccagttctgatgctttacattattgct

SEQ ID NO: 83567 - DNA, 120 bp, Artificial Sequence
  ENSG00000083312_60 (sequence is synthesized)
acttgattttgttatgcaagttagatttcagaagaatagattttaaaacacttaaccaagccattacatcttaaaaacaaaacaagtagcatacattttgtaattaacattgataaacac

SEQ ID NO: 83568 - DNA, 120 bp, Artificial Sequence
  ENSG00000083312_61 (sequence is synthesized)
tgtgatttttttggttaagactttttcattgatctgaattgcttaaattgcatatattgtaaaataggatcagatgtatattttaaactaatttcaatggattttcctcttgaaatgctt

SEQ ID NO: 83569 - DNA, 120 bp, Artificial Sequence
  ENSG00000083312_62 (sequence is synthesized)
tgtctactcagttataaaatattcagatacaagttttatctcaggtgaatactcttgtattgtttttgctttggtgacatgcttataaagggtcatcctagttacattctttgtttttta

SEQ ID NO: 83570 - DNA, 120 bp, Artificial Sequence
  ENSG00000083312_63 (sequence is synthesized)
agtgtatttcattgagaatctttccatttagtctgatttttttcctaatattctagcaggctggggtggtataaagccctcctgacaagccttttgcctacaggtttacctgaaaatgag

SEQ ID NO: 83571 - DNA, 120 bp, Artificial Sequence
  ENSG00000083312_64 (sequence is synthesized)
ctacatatggtcgtcattttcttcaaactctcaaaataggaaagtggaaatttttctcccctatataaaattattctgcctagcagaaatgccagaaataaattaattgcatcttagtct

SEQ ID NO: 83572 - DNA, 120 bp, Artificial Sequence
  ENSG00000083312_65 (sequence is synthesized)
aaatttaagtcctttgccatgaggaaaaagtggttttttgcttcatatggtaaatctatattattcatattgaatgtattaacagataatggtgcaaaagcattcttcccaggggaagag

SEQ ID NO: 83573 - DNA, 120 bp, Artificial Sequence
  ENSG00000083312_66 (sequence is synthesized)
tgtatcatgcataactgcaatttaagtccttcctttgataatacttcaaaacatacacagctttgcttactgaattatttttgcaaataatacaaggaggggaaactaacttgctactag

SEQ ID NO: 83574 - DNA, 120 bp, Artificial Sequence
  ENSG00000083312_67 (sequence is synthesized)
tgttgttaatgaagtataggccttggaacatttaagaaaactggtcttcagatagttaagggcttgggataatttaagtgaaaagtgagatcagtaatgagctgtgttgttaacaatatt

SEQ ID NO: 83575 - DNA, 120 bp, Artificial Sequence
  ENSG00000083312_68 (sequence is synthesized)
atctggtaataataccatgcaatatagcgttgtataccaacttagtgcattttatactgtattaaatatggagatacttctaatgcctctctaaaattaaattttacataaaagttagtt

SEQ ID NO: 83576 - DNA, 120 bp, Artificial Sequence
  ENSG00000083312_69 (sequence is synthesized)
ttattcacctttaggctttccaagtgaattgtgactaattttttcaatcttacatagatctttcacccattagcattacttacgtagataattctttatgcctagttattatacatatta

SEQ ID NO: 83577 - DNA, 120 bp, Artificial Sequence
  ENSG00000083312_70 (sequence is synthesized)
atttttaaggtatacatttaaattacacaattgttcattgtggtttgtatcccagaatgtgttgtgttttttaaaagatgcataatagctgaatgtatgcatgactttgaaagaagttaa

SEQ ID NO: 83578 - DNA, 120 bp, Artificial Sequence
  ENSG00000083312_71 (sequence is synthesized)
aatggtgattttttttcacctcttgtacattttaaaaccaggccaaatctatttgccaagcagtgtatcactaataagaaaagcagtttttccttttattgcagtttttgtttatctgcc

SEQ ID NO: 83579 - DNA, 120 bp, Artificial Sequence
  ENSG00000083312_72 (sequence is synthesized)
atagaatttccttatactgtggcttggtattattcaagattagctatttcgctggtattacatctttttaaaagcctattataacatggttagcctataaggcagtgttggtccccttct

SEQ ID NO: 83580 - DNA, 120 bp, Artificial Sequence
  ENSG00000083312_73 (sequence is synthesized)
aatattggcctcataaaggggttccactgtactttccgcatattactgtgttgttgttttcctttgtggatatataagcaaattgagcttgggtgatttttatggagacaataattagac

SEQ ID NO: 83581 - DNA, 120 bp, Artificial Sequence
  ENSG00000083312_74 (sequence is synthesized)
aatactgtataattagttttacttaatagattatcatcttgtgagaagagatgtttaaacgtggtaaatcacttcatattacaaaacagttttacacttaatatgttaacattgggtgca

SEQ ID NO: 83582 - DNA, 120 bp, Artificial Sequence
  ENSG00000083312_75 (sequence is synthesized)
ataatttagtagcattagctttagttacaaatataactggatctttctgctgacaacttaggttgtatgagttatgcttaaaagctttaaatctgatgtttcctgtacctgccacactat

SEQ ID NO: 83583 - DNA, 120 bp, Artificial Sequence
  ENSG00000083312_76 (sequence is synthesized)
gttagaatgtgtccttcaaacatatcctcctgcaacttctcaaactgtactaaattgatatttcttgaagtctaactctgtgctaacagatctccattttaaatagaatacggttttaat

SEQ ID NO: 83584 - DNA, 120 bp, Artificial Sequence
  ENSG00000083312_77 (sequence is synthesized)
ttttgataagctgctgaattttaaagagagttttttggggccaccaaatattttggatcatgcagagaatatatattgtactgtagtaattttgtatttacatttgtatgatgtgacata

SEQ ID NO: 83585 - DNA, 120 bp, Artificial Sequence
  ENSG00000083312_78 (sequence is synthesized)
atagatgtgaatgttaatcactgcttgactatgttaataaagttgtttaactatagatgttgcactctgatttttaatgaaaggaaatgagttttctttttccctcttaccccattttgg

SEQ ID NO: 83586 - DNA, 120 bp, Artificial Sequence
  ENSG00000083312_79 (sequence is synthesized)
atctagataagccttatgttttttgggatttttttccttgtttttagtttgaggttttgttttgttttttccttagcttacacattagtacacttttgttgttgaacatcatttatttct

SEQ ID NO: 83587 - DNA, 120 bp, Artificial Sequence
  ENSG00000083312_80 (sequence is synthesized)
taaaacaagtgttttcttatttgtatagtatagtaaaaacctgtttttccacattttaacttaactccttgatgtgttttaaacagttgattataggttctgctgtttgaggatagggga

SEQ ID NO: 83588 - DNA, 120 bp, Artificial Sequence
  ENSG00000083312_81 (sequence is synthesized)
catactattctgtaaaaggaattaaaggcgaaattgtgaatataaaaagttgatgtaaggagagattgcatgagtgtgtatgaatgtatgtcctattaaggcttcctctttatccttcaa

SEQ ID NO: 83589 - DNA, 120 bp, Artificial Sequence
  ENSG00000083312_82 (sequence is synthesized)
acagttaagatttgtaatttggggaattaacatttataagagtaattttttcttcaggttgtaaggcattaatatagttgcatgttactaattaaatgtattaacacatttcagggagta

SEQ ID NO: 83590 - DNA, 77 bp, Artificial Sequence
  ENSG00000083312_83 (sequence is synthesized)
catgttactaattaaatgtattaacacatttcagggagtatgtgtgcataactgtcatggttttttttgttttttgt

SEQ ID NO: 83591 - DNA, 89 bp, Artificial Sequence
  ENSG00000083312_84 (sequence is synthesized)
aacgacttaaggcatgtgccgtcacacccggctaacttttatattttcagtaaagatgggggttcaccatgttggccaggctagtctcg

SEQ ID NO: 83592 - DNA, 120 bp, Artificial Sequence
  ENSG00000083312_85 (sequence is synthesized)
aactcctggcctcaggtgatccacctgtctcggcctctcaaagtgttgggattacagctgtgagccaccatgcctggccttgtcatacagccttttgagatttagaacaggaaagagcct

SEQ ID NO: 83593 - DNA, 120 bp, Artificial Sequence
  ENSG00000083312_86 (sequence is synthesized)
aagagcctaaaattaaatcagtacaattccaaaacttttaagagaggtgaggcttgggtttctttttctttgttacctggccaagaaaatatttgagaagagagagttctcttgtgttaa

SEQ ID NO: 83594 - DNA, 120 bp, Artificial Sequence
  ENSG00000083312_87 (sequence is synthesized)
caagaaaataaaattgaaacttggacatcatgttctaaaacacagcctcaagagtttaatattccagaattttaggacttaggttgtggggaaaagataattaaagtcatcctaattctt

SEQ ID NO: 83595 - DNA, 120 bp, Artificial Sequence
  ENSG00000083312_88 (sequence is synthesized)
gttcaagattaggaaccaaaagtcttttctaagtcgtcaatattttagtgatactaaagccctatccattttatgcaaatgatctttttcttctcagttcaggtgatgaaaccatcgtaa

SEQ ID NO: 83596 - DNA, 120 bp, Artificial Sequence
  ENSG00000083312_89 (sequence is synthesized)
tgataaatgagtaaggctggcttaacaattcttggactggcgggcattcttgtaatgagttcataatcagtatgactccacaatttcacgtgattctttaagaatgattggaaaagtggc

SEQ ID NO: 83597 - DNA, 120 bp, Artificial Sequence
  ENSG00000083312_90 (sequence is synthesized)
agcaggaactacagagctaacttgaatttcctttgtgttctatacagttgaatatggaattaccaaagctctgtcattttaaaaattctttatttctgagttgttaatttgatgtaaaag

SEQ ID NO: 83598 - DNA, 120 bp, Artificial Sequence
  ENSG00000083312_91 (sequence is synthesized)
tgtaagaacccccgaaacatctccattattcagatagacacaaataatgtacacatcacaattagtatatattttttttaattgagaggactctggctctgtctcccagtcttcagtggc

SEQ ID NO: 83599 - DNA, 72 bp, Artificial Sequence
  ENSG00000083312_92 (sequence is synthesized)
attgagaggactctggctctgtctcccagtcttcagtggcacgatatctgctccctgcaacttccgcctcct

SEQ ID NO: 83600 - DNA, 85 bp, Artificial Sequence
  ENSG00000083312_93 (sequence is synthesized)
acacctcgagtggtacgcccacctttgcctcccaaattgctgggattacagttgtgagccaccgcccctggcgacaatttgtaaa

SEQ ID NO: 83601 - DNA, 120 bp, Artificial Sequence
  ENSG00000083312_94 (sequence is synthesized)
ttacagttgtgagccaccgcccctggcgacaatttgtaaatttaacgcaatttctaaaccattggcaagaacaatacagagaagagttgttatactgagaccctttaggtttttgtacca

SEQ ID NO: 83602 - DNA, 120 bp, Artificial Sequence
  ENSG00000083312_95 (sequence is synthesized)
gtcaattcttacatgcatgttatggcagtctcactctgatgatttaaatcttaagtattcttttcaagctttgtgttacttcttgaagaacttgaaacaattttaagaaagacaagtgaa

SEQ ID NO: 83603 - DNA, 120 bp, Artificial Sequence
  ENSG00000083312_96 (sequence is synthesized)
cagttaaatgaattgtaatacaactacctagtgataactgctgttaatatcctgtgcacatatataaatatatggtgaatttgtgtttttagttatatccagaattgtttgttaatatac

SEQ ID NO: 83604 - DNA, 120 bp, Artificial Sequence
  ENSG00000083312_97 (sequence is synthesized)
atggacatacctacatattattctataagcaatttatgcaactgtcttactgttgttggacattcagaagttttttctaatttttcactcttagaaataaagttttagtgagagtcgcaa

SEQ ID NO: 83605 - DNA, 120 bp, Artificial Sequence
  ENSG00000083444_0 (sequence is synthesized)
gtcgcgaagtttccagccctgcgagcgccgccgggtcggccgatcgtcccccatacctcggccatgcggcccctgctgctactggccctgctgggctggctgctgctggccgaagcgaag

SEQ ID NO: 83606 - DNA, 120 bp, Artificial Sequence
  ENSG00000083444_1 (sequence is synthesized)
ggcgacgccaagccggaggacaaccttttagtcctcacggtggccactaaggagaccgagggattccgtcgcttcaagcgctcagctcagttcttcaactacaagatccaggcgcttggc

SEQ ID NO: 83607 - DNA, 120 bp, Artificial Sequence
  ENSG00000083444_2 (sequence is synthesized)
ctaggggaggactggaatgtggagaaggggacgtcggcaggtggagggcagaaggtccggctgctgaagaaagctctggagaagcacgcagacaaggaggatctggtcattctcttcgca

SEQ ID NO: 83608 - DNA, 120 bp, Artificial Sequence
  ENSG00000083444_3 (sequence is synthesized)
gacagctatgacgtgctgtttgcatcggggccccgggagctcctgaagaagttccggcaggccaggagccaggtggtcttctctgctgaggagctcatctacccagaccgcaggctggag

SEQ ID NO: 83609 - DNA, 120 bp, Artificial Sequence
  ENSG00000083444_4 (sequence is synthesized)
accaagtatccggtggtgtccgatggcaagaggttcctgggctctggaggcttcatcggttatgcccccaacctcagcaaactggtggccgagtgggagggccaggacagcgacagcgat

SEQ ID NO: 83610 - DNA, 120 bp, Artificial Sequence
  ENSG00000083444_5 (sequence is synthesized)
cagctgttttacaccaagatcttcttggacccggagaagagggagcagatcaatatcaccctggaccaccgctgccgtatcttccagaacctggatggagccttggatgaggtcgtgctc

SEQ ID NO: 83611 - DNA, 120 bp, Artificial Sequence
  ENSG00000083444_6 (sequence is synthesized)
aagtttgaaatgggccatgtgagagcgaggaacctggcctatgacaccctcccggtcctgatccatggcaacgggccaaccaagctgcagttgaactacctgggcaactacatcccgcgc

SEQ ID NO: 83612 - DNA, 120 bp, Artificial Sequence
  ENSG00000083444_7 (sequence is synthesized)
ttctggaccttcgaaacaggctgcaccgtgtgtgacgaaggcttgcgcagcctcaagggcattggggatgaagctctgcccacggtcctggtcggcgtgttcatcgaacagcccacgccg

SEQ ID NO: 83613 - DNA, 120 bp, Artificial Sequence
  ENSG00000083444_8 (sequence is synthesized)
tttgtgtccctgttcttccagcggctcctgcggctccactacccccagaaacacatgcgacttttcatccacaaccacgagcagcaccacaaggctcaggtggaagagttcctggcacag

SEQ ID NO: 83614 - DNA, 120 bp, Artificial Sequence
  ENSG00000083444_9 (sequence is synthesized)
catggcagcgagtaccagtctgtgaagctggtgggccctgaggtgcggatggcgaatgcagatgccaggaacatgggcgcagacctgtgccggcaggaccgcagctgcacctactacttc

SEQ ID NO: 83615 - DNA, 120 bp, Artificial Sequence
  ENSG00000083444_10 (sequence is synthesized)
agcgtggatgctgacgtggccctgaccgagcccaacagcctgcggctgctgatccaacagaacaagaacgtcattgccccgctgatgacccggcatgggaggctgtggtcgaacttctgg

SEQ ID NO: 83616 - DNA, 120 bp, Artificial Sequence
  ENSG00000083444_11 (sequence is synthesized)
ggggctctcagtgcagatggctactatgcccgttccgaggactacgtggacattgtgcaggggcggcgtgttggtgtctggaatgtgccctatatttcaaacatctacttgatcaagggc

SEQ ID NO: 83617 - DNA, 120 bp, Artificial Sequence
  ENSG00000083444_12 (sequence is synthesized)
gtgttcatgttcctgaccaaccggcacacccttggccatctgctctccctagacagctaccgcaccacccacctgcacaacgacctctgggaggtgttcagcaaccccgaggactggaag

SEQ ID NO: 83618 - DNA, 120 bp, Artificial Sequence
  ENSG00000083444_13 (sequence is synthesized)
gagaagtacatccaccagaactacaccaaagccctggcagggaagctggtggagacgccctgcccggatgtctattggttccccatcttcacggaggtggcctgtgatgagctggtggag

SEQ ID NO: 83619 - DNA, 120 bp, Artificial Sequence
  ENSG00000083444_14 (sequence is synthesized)
gagatggagcactttggccagtggtctctgggcaacaacaaggacaaccgcatccagggtggctacgagaacgtgccgactattgacatccacatgaaccagatcggctttgagcgggag

SEQ ID NO: 83620 - DNA, 120 bp, Artificial Sequence
  ENSG00000083444_15 (sequence is synthesized)
tggcacaaattcctgctggagtacattgcgcccatgacggagaagctctaccccggctactacaccagggcccagtttgacctggcctttgtcgtccgctacaagcctgatgagcagccc

SEQ ID NO: 83621 - DNA, 120 bp, Artificial Sequence
  ENSG00000083444_16 (sequence is synthesized)
tcactgatgccacaccatgatgcctccaccttcaccatcaacatcgccctgaaccgagtcggggtggattacgagggcgggggctgtcggttcctgcgctacaactgttccatccgagcc

SEQ ID NO: 83622 - DNA, 120 bp, Artificial Sequence
  ENSG00000083444_17 (sequence is synthesized)
ccaaggaagggctggaccctcatgcaccctggacgactcacgcattaccatgaggggctccccaccaccaggggcacccgctacatcgcagtctccttcgtcgatccctaattggccagg

SEQ ID NO: 83623 - DNA, 120 bp, Artificial Sequence
  ENSG00000083444_18 (sequence is synthesized)
cctgaccctcttggacctttcttctttgccgacaaccactgcccagcagcctctgggacctcggggtcccagggaacccagtccagcctcctggctgttgacttcccattgctcttggag

SEQ ID NO: 83624 - DNA, 120 bp, Artificial Sequence
  ENSG00000083444_19 (sequence is synthesized)
ccaccaatcaaagagattcaaagagattcctgcaggccagaggcggaacacacctttatggctggggctctccgtggtgttctggacccagcccctggagacaccattcacttttactgc

SEQ ID NO: 83625 - DNA, 120 bp, Artificial Sequence
  ENSG00000083444_20 (sequence is synthesized)
tttgtagtgactcgtgctctccaacctgtcttcctgaaaaaccaaggcccccttcccccacctcttccatggggtgagacttgagcagaacaggggcttccccaagttgcccagaaagac

SEQ ID NO: 83626 - DNA, 120 bp, Artificial Sequence
  ENSG00000083444_21 (sequence is synthesized)
tgtctgggtgagaagccatggccagagcttctcccaggcacaggtgttgcaccagggacttctgcttcaagttttggggtaaagacacctggatcagactccaagggctgccctgagtct

SEQ ID NO: 83627 - DNA, 120 bp, Artificial Sequence
  ENSG00000083444_22 (sequence is synthesized)
gggacttctgcctccatggctggtcatgagagcaaaccgtagtcccctggagacagcgactccagagaacctcttgggagacagaagaggcatctgtgcacagctcgatcttctacttgc

SEQ ID NO: 83628 - DNA, 120 bp, Artificial Sequence
  ENSG00000083444_23 (sequence is synthesized)
ctgtggggaggggagtgacaggtccacacaccacactgggtcaccctgtcctggatgcctctgaagagagggacagaccgtcagaaactggagagtttctattaaaggtcatttaaacca

SEQ ID NO: 83629 - DNA, 120 bp, Artificial Sequence
  ENSG00000083444_24 (sequence is synthesized)
tcttttcctgctgtggtgctgcagttgaactacctgggcaactacatcccgcgcttctggaccttcgaaacaggctgcaccgtgtgtgacgaaggcttgcgcagcctcaagggcattggg

SEQ ID NO: 83630 - DNA, 120 bp, Artificial Sequence
  ENSG00000083444_25 (sequence is synthesized)
tccagcctgggtgacaagagcgaaactctttctcaaaaaaaagaatatttggagtagctatgtgcgtgtagtggagtgcttggcaggtgctggttactcttaacggccgtcattgttgta

SEQ ID NO: 83631 - DNA, 120 bp, Artificial Sequence
  ENSG00000083444_26 (sequence is synthesized)
gctggttactcttaacggccgtcattgttgtaggtgagccggctgcattcttagattccttccagttcagagtccctggttttctgtgagtagagccactagactgtagaccccaggagc

SEQ ID NO: 83632 - DNA, 120 bp, Artificial Sequence
  ENSG00000083444_27 (sequence is synthesized)
gccctgatgtgacgtggcagagtcggtgtggggaatgagggctgaacttggggacagattccccacactgggtgagatgtagccccagcctcccccagggcctgtccctgctgcagtctg

SEQ ID NO: 83633 - DNA, 70 bp, Artificial Sequence
  ENSG00000083444_28 (sequence is synthesized)
gctggtctcaaattcctgacctcaagtaatccgcccacctccctcagctcttttgaatctttcttccttg

SEQ ID NO: 83634 - DNA, 120 bp, Artificial Sequence
  ENSG00000083444_29 (sequence is synthesized)
tggccgacctcagctcttttgaatctttcttccttgtcattaaccctgcctcagtggctcctataccagcccaccaaaaaagcacccctgcccaccttagctggccagcgtgcccactcc

SEQ ID NO: 83635 - DNA, 120 bp, Artificial Sequence
  ENSG00000083444_30 (sequence is synthesized)
ctccctagccacaagcctgtgccccacgcctgggccctgcttcgtccgaagcagccttcttccaatagtgaggaaaaccctgaactcctgttactgacagttgtcattcatcccttgaat

SEQ ID NO: 83636 - DNA, 120 bp, Artificial Sequence
  ENSG00000083444_31 (sequence is synthesized)
gcttactgtggttccccggaaacaattacctggctggcctcggttaattctcacaattctttccagtgctatcactcatgtgtctgtccactgctaccttggctttctccaaggtacttt

SEQ ID NO: 83637 - DNA, 120 bp, Artificial Sequence
  ENSG00000083444_32 (sequence is synthesized)
ctccaagactcagttccttccttggtctctggtttctccagatacctgcccatggcgtgcctgggtcctgcctcagggaatccagcctggatagttgccagaaagggttgtgaggattgg

SEQ ID NO: 83638 - DNA, 90 bp, Artificial Sequence
  ENSG00000083444_33 (sequence is synthesized)
tccagcctggatagttgccagaaagggttgtgaggattggatgcccccctttgtctttgtcttttcattcattccttcgttcctttcttc

SEQ ID NO: 83639 - DNA, 71 bp, Artificial Sequence
  ENSG00000083444_34 (sequence is synthesized)
tctctctttctttctctctctctttctctttctctgtctctttttctttcttttctttcgctctccgcctc

SEQ ID NO: 83640 - DNA, 61 bp, Artificial Sequence
  ENSG00000083444_35 (sequence is synthesized)
tcagcctcccaagtagctgcgattacagacgcccaccaccatgtctggctaattttttgta

SEQ ID NO: 83641 - DNA, 120 bp, Artificial Sequence
  ENSG00000083444_36 (sequence is synthesized)
ccaaagtgctggaattacaggcgtgagtaccatgtccggcctccttccctttcatttcttctcttccctttcatttcttctcttcccttttcctcccttcctccctccctcccttccttt

SEQ ID NO: 83642 - DNA, 120 bp, Artificial Sequence
  ENSG00000083444_37 (sequence is synthesized)
acatttttgttgagaaccttttctgtgccaggtagttgcaggcactcgagcatagagccccatgtagacctggcccctgtaagctgacctgcagcaggccagaccaggccccatgtgtgc

SEQ ID NO: 83643 - DNA, 120 bp, Artificial Sequence
  ENSG00000083444_38 (sequence is synthesized)
accctcctctcctggcctttgtgtcctccttaactaacacgggctctcttgtccccctgccttggtacaggcccagtttgacctggcctttgtcgtccgctacaagcctgatgagcagcc

SEQ ID NO: 83644 - DNA, 120 bp, Artificial Sequence
  ENSG00000083444_39 (sequence is synthesized)
ggcagggaagctggtggagacggtaagggccatggacaccctcttggaccagccttgcctgctgcagggggcagggcacagaagggaaactgcttgccctggggagtgggggacagcagg

SEQ ID NO: 83645 - DNA, 120 bp, Artificial Sequence
  ENSG00000083444_40 (sequence is synthesized)
ccgtgtctctgaacgcatccgtgcccaccctcaccccttgggttttgggaaggactaatgaaatcatgaaaactgacttccttggggcttgacctggggctgctctaagtgcgctacaga

SEQ ID NO: 83646 - DNA, 80 bp, Artificial Sequence
  ENSG00000083454_0 (sequence is synthesized)
gggcgcagacgggccgaggcgggcgccgggcgcgcagggaccgagggaccgagtgctccccatgagcgcacgtgggccgg

SEQ ID NO: 83647 - DNA, 120 bp, Artificial Sequence
  ENSG00000083454_1 (sequence is synthesized)
gcggtccgcaagcccggctgagagcgcgccatggggcaggcgggctgcaaggggctctgcctgtcgctgttcgactacaagaccgagaagtatgtcatcgccaagaacaagaaggtgggc

SEQ ID NO: 83648 - DNA, 120 bp, Artificial Sequence
  ENSG00000083454_2 (sequence is synthesized)
ctgctgtaccggctgctgcaggcctccatcctggcgtacctggtcgtatgggtgttcctgataaagaagggttaccaagacgtcgacacctccctgcagagtgctgtcatcaccaaagtc

SEQ ID NO: 83649 - DNA, 120 bp, Artificial Sequence
  ENSG00000083454_3 (sequence is synthesized)
aagggcgtggccttcaccaacacctcggatcttgggcagcggatctgggatgtcgccgactacgtcattccagcccagggagagaacgtcttttttgtggtcaccaacctgattgtgacc

SEQ ID NO: 83650 - DNA, 120 bp, Artificial Sequence
  ENSG00000083454_4 (sequence is synthesized)
cccaaccagcggcagaacgtctgtgctgagaatgaaggcattcctgatggcgcgtgctccaaggacagcgactgccacgctggggaagcggttacagctggaaacggagtgaagaccggc

SEQ ID NO: 83651 - DNA, 120 bp, Artificial Sequence
  ENSG00000083454_5 (sequence is synthesized)
cgctgcctgcggagagagaacttggccaggggcacctgtgagatctttgcctggtgcccgttggagacaagctccaggccggaggagccattcctgaaggaggccgaagacttcaccatt

SEQ ID NO: 83652 - DNA, 120 bp, Artificial Sequence
  ENSG00000083454_6 (sequence is synthesized)
ttcataaagaaccacatccgtttccccaaattcaacttctccaaaagcaatgtgatggacgtcaaggacagatctttcctgaaatcatgccactttggccccaagaaccactactgcccc

SEQ ID NO: 83653 - DNA, 120 bp, Artificial Sequence
  ENSG00000083454_7 (sequence is synthesized)
atcttccgactgggctccgtgatccgctgggccgggagcgacttccaggatatagccctggagggtggcgtgataggaattaatattgaatggaactgtgatcttgataaagctgcctct

SEQ ID NO: 83654 - DNA, 120 bp, Artificial Sequence
  ENSG00000083454_8 (sequence is synthesized)
ttttagccgtctggacaataaactttcaaagtctgtctcctccgggtacaacttcagatttgccagatattaccgagacgcagccggggtggagttccgcaccctgatgaaagcctacgg

SEQ ID NO: 83655 - DNA, 120 bp, Artificial Sequence
  ENSG00000083454_9 (sequence is synthesized)
gatccgctttgacgtgatggtgaacggcaagggtgctttcttctgcgacctggtactcatctacctcatcaaaaagagagagttttaccgtgacaagaagtacgaggaagtgaggggcct

SEQ ID NO: 83656 - DNA, 120 bp, Artificial Sequence
  ENSG00000083454_10 (sequence is synthesized)
agaagacagttcccaggaggccgaggacgaggcatcggggctggggctatctgagcagctcacatctgggccagggctgctggggatgccggagcagcaggagctgcaggagccacccga

SEQ ID NO: 83657 - DNA, 120 bp, Artificial Sequence
  ENSG00000083454_11 (sequence is synthesized)
ggcgaagcgtggaagcagcagtcagaaggggaacggatctgtgtgcccacagctcctggagccccacaggagcacgtgaattgcctctgcttacgttcaggccctgtcctaaacccagcc

SEQ ID NO: 83658 - DNA, 120 bp, Artificial Sequence
  ENSG00000083454_12 (sequence is synthesized)
gtctagcacccagtgatcccatgcctttgggaatcccaggatgctgcccaacgggaaatttgtacattgggtgctatcaatgccacatcacagggaccagccatcacagagcaaagtgac

SEQ ID NO: 83659 - DNA, 120 bp, Artificial Sequence
  ENSG00000083454_13 (sequence is synthesized)
ctccacgtctgatgctggggtcatcaggacggacccatcatggctgtctttttgccccaccccctgccgtcagttcttcctttctccgtggctggcttcccgcactagggaacgggttgt

SEQ ID NO: 83660 - DNA, 120 bp, Artificial Sequence
  ENSG00000083454_14 (sequence is synthesized)
aaatggggaacatgacttccttccggagtccttgagcacctcagctaaggaccgcagtgccctgtagagttcctagattacctcactgggaatagcattgtgcgtgtccggaaaagggct

SEQ ID NO: 83661 - DNA, 120 bp, Artificial Sequence
  ENSG00000083454_15 (sequence is synthesized)
ccatttggttccagcccactcccctctgcaagtgccgcagcttccctcagagcatactctccagtggatccaagtactctctctcctaaagacaccaccttcctgccagctgtttgccct

SEQ ID NO: 83662 - DNA, 120 bp, Artificial Sequence
  ENSG00000083454_16 (sequence is synthesized)
taggccagtacacagaattaaagtgggggagatggcagacgctttctgggacctgcccaagatatgtattctctgacactcttatttggtcataaaacaataaatggtgtcaatttcaaa

SEQ ID NO: 83663 - DNA, 120 bp, Artificial Sequence
  ENSG00000083454_17 (sequence is synthesized)
tcagaggaggttctgagaggactgaggtgggcaaaccactgaggatcttcagtgggggcagagaaagggctcactgagatggggggcaacgctatggcctcagcttctccttggcgtcgt

SEQ ID NO: 83664 - DNA, 120 bp, Artificial Sequence
  ENSG00000083454_18 (sequence is synthesized)
gtgcatgtgttcctgaagccgaaacggaatttaacaggtctgggtcccagatccatttccatgactggccatgggctatctatgatctgtcaaaaggggacttggattcaagctctcaga

SEQ ID NO: 83665 - DNA, 120 bp, Artificial Sequence
  ENSG00000083454_19 (sequence is synthesized)
cttgtcgcctctgctgcttgcaggactgggtttcagtcagcagtgggagctgtggcccctgcccaggagctggtgggacaggtggagccctgagcctgctccacctcaactaggagttgc

SEQ ID NO: 83666 - DNA, 120 bp, Artificial Sequence
  ENSG00000083454_20 (sequence is synthesized)
tgtgactgctaccccaccccaaggcctggggaagctccccgaagccagcagagtggctgatgcccacgtaccggcccccttcccacagatgggtgttcctgataaagaagggttaccaag

SEQ ID NO: 83667 - DNA, 120 bp, Artificial Sequence
  ENSG00000083454_21 (sequence is synthesized)
acaagctccaggccggagtgagtggctgcagcctcaggaccctgaggggtttcccagccccgtgcggtgggtcccagcctgagggtggagtcctgcccactctgggagcctcacgctgag

SEQ ID NO: 83668 - DNA, 120 bp, Artificial Sequence
  ENSG00000083454_22 (sequence is synthesized)
ggaggagtcaggctgtcccagcgaggcccgacggcctccccagcatgagcaaattaactgtcctgggcagaggctccaggggacccaaggaacaggcctcacactggcccaggcctgggg

SEQ ID NO: 83669 - DNA, 120 bp, Artificial Sequence
  ENSG00000083454_23 (sequence is synthesized)
gaggggcacaggggtggggcctcctggacaggctgttctgggttggttttcagggagccattcctgaaggaggccgaagacttcaccattttcataaagaaccacatccgtttccccaaa

SEQ ID NO: 83670 - DNA, 120 bp, Artificial Sequence
  ENSG00000083454_24 (sequence is synthesized)
cacctggcacccatcatctttctttgactagcaccatagcgtccttgttggttagaacccttccaacctatctcacactgactaccacagggatctttctaaatgccaaaattcgggctg

SEQ ID NO: 83671 - DNA, 120 bp, Artificial Sequence
  ENSG00000083454_25 (sequence is synthesized)
tggtgcctccgcctcacctaaaggatgaggaccaatgcctcggaaacattctaagaagcctaacaggccagtccccatccccttctccagaagcgcatctccctcttcccgcacaggccc

SEQ ID NO: 83672 - DNA, 120 bp, Artificial Sequence
  ENSG00000083454_26 (sequence is synthesized)
tgcggcatttcccagatgtgacaggcttgttcctccctccgtaatgtccttccacctctttgtcttgtataaactcctctttagtccttaaggactgaatagggaccctccccaggctga

SEQ ID NO: 83673 - DNA, 120 bp, Artificial Sequence
  ENSG00000083454_27 (sequence is synthesized)
gtgaagtcctatgtgggtcgtcatcgacacgcctgtctcctgcaccagagggagagtccccaggaggtctctcttgtccagatcctctccgtacttcggtgcagacactggcacgtgctg

SEQ ID NO: 83674 - DNA, 120 bp, Artificial Sequence
  ENSG00000083454_28 (sequence is synthesized)
ggtgcccagcaaatgtgttgaaggaacgattggatggggtccgggtggtgcggggtcggggagtgcctggcctgtgggatcgggggagctccagtccagcttgagctccaccatggacca

SEQ ID NO: 83675 - DNA, 120 bp, Artificial Sequence
  ENSG00000083454_29 (sequence is synthesized)
gctctgtggtgtcggacaagggtgccccttgctgagcccagtttcctcatctgttaaatggggacagtgatgccacctttaggggctgttgcaggatggaaggggcaaagtgccctaaat

SEQ ID NO: 83676 - DNA, 120 bp, Artificial Sequence
  ENSG00000083454_30 (sequence is synthesized)
aaggggaacggatctgtgtgcccacagctcctggagccccacaggtaatgaacttctcctgacgctggcgcttaagacccagtctcccctgtcaaaaatggacatgaagtacgtttcgat

SEQ ID NO: 83677 - DNA, 120 bp, Artificial Sequence
  ENSG00000083454_31 (sequence is synthesized)
gttgggcttgggagctgactagctctcttctcctaccccgttgtatgtgagttgtctccccgtaaacccaaggagcacgtgaattgcctctgcttacgttcaggccctgtcctaaaccca

SEQ ID NO: 83678 - DNA, 120 bp, Artificial Sequence
  ENSG00000083457_0 (sequence is synthesized)
gcactcgcctcggctcccacacagccgcctctgctccagcaaggatgtggctcttccacactctgctctgcatagccagcctggccctgctggccgctttcaatgtggatgtggcccggc

SEQ ID NO: 83679 - DNA, 120 bp, Artificial Sequence
  ENSG00000083457_1 (sequence is synthesized)
cctggctcacgcccaagggaggtgcccctttcgtgctcagctcccttctgcaccaagaccccagcaccaaccagacctggctcctggtcaccagccccagaaccaagaggacaccagggc

SEQ ID NO: 83680 - DNA, 120 bp, Artificial Sequence
  ENSG00000083457_2 (sequence is synthesized)
ccctccatcgatgttcccttgtccaggatgaaatcctttgccatcctgtagagcatgtccccatccccaaggggaggcaccggggagtgaccgttgtccggagccaccacggtgttttga

SEQ ID NO: 83681 - DNA, 120 bp, Artificial Sequence
  ENSG00000083457_3 (sequence is synthesized)
tatgcattcaagtgctggtccggcggcctcacagcctcagctcagaactcacaggcacctgtagcctcctgggccctgacctccgtccccaggctcaggccaacttcttcgaccttgaaa

SEQ ID NO: 83682 - DNA, 120 bp, Artificial Sequence
  ENSG00000083457_4 (sequence is synthesized)
atctcctggatccagatgcacgtgtggacactggagactgctacagcaacaaagaaggcggtggagaagacgatgtgaacacagccaggcagcgccgggctctggagaaggaggaggagg

SEQ ID NO: 83683 - DNA, 120 bp, Artificial Sequence
  ENSG00000083457_5 (sequence is synthesized)
aagacaaggaggaggaggaagacgaggaggaggaggaagctggcaccgagattgccatcatcctggatggctcaggaagcattgatcccccagactttcagagagccaaagacttcatct

SEQ ID NO: 83684 - DNA, 120 bp, Artificial Sequence
  ENSG00000083457_6 (sequence is synthesized)
ccaacatgatgaggaacttctatgaaaagtgttttgagtgcaactttgccttggtgcagtatggaggagtgatccagactgagtttgaccttcgggacagccaggatgtgatggcctccc

SEQ ID NO: 83685 - DNA, 120 bp, Artificial Sequence
  ENSG00000083457_7 (sequence is synthesized)
tcgccagagtccagaacatcactcaagtggggagtgtcaccaagactgcctcagccatgcaacacgtcttagacagcatcttcacctcaagccacggctccaggagaaaggcatccaagg

SEQ ID NO: 83686 - DNA, 120 bp, Artificial Sequence
  ENSG00000083457_8 (sequence is synthesized)
tcatggtggtgctcaccgatggtggcatattcgaggaccccctcaaccttacgacagtcatcaactcccccaaaatgcagggtgttgagcgctttgccattggggtgggagaagaattta

SEQ ID NO: 83687 - DNA, 120 bp, Artificial Sequence
  ENSG00000083457_9 (sequence is synthesized)
agagtgctaggactgcgagggaactgaacctgatcgcctcagacccggatgagacccatgctttcaaggtgaccaactacatggcgctggatgggctgctgagcaaactgcggtacaaca

SEQ ID NO: 83688 - DNA, 120 bp, Artificial Sequence
  ENSG00000083457_10 (sequence is synthesized)
tcatcagcatggaaggcacggttggagacgcccttcactaccagctggcacagattggcttcagtgctcagatcctggatgagcggcaggtgctgctcggcgccgtcggggcctttgact

SEQ ID NO: 83689 - DNA, 120 bp, Artificial Sequence
  ENSG00000083457_11 (sequence is synthesized)
ggtccggaggggcgttgctctacgacacacgcagccgccggggccgcttcctgaaccagacagcggcggcggcggcagacgcggaggctgcgcagtacagctacctgggttacgctgtgg

SEQ ID NO: 83690 - DNA, 120 bp, Artificial Sequence
  ENSG00000083457_12 (sequence is synthesized)
ccgtgctgcacaagacctgcagcctctcctacatcgcgggggctccacggtacaaacatcatggggccgtgtttgagctccagaaggagggcagagaggccagcttcctgccagtgctgg

SEQ ID NO: 83691 - DNA, 120 bp, Artificial Sequence
  ENSG00000083457_13 (sequence is synthesized)
agggagagcagatggggtcctattttggctctgagctgtgccctgtggacattgacatggatggaagcacggacttcttgctggtggctgctccattttaccacgttcatggagaagaag

SEQ ID NO: 83692 - DNA, 120 bp, Artificial Sequence
  ENSG00000083457_14 (sequence is synthesized)
gcagagtctacgtgtaccgtctcagcgagcaggatggttctttctccttggcacgcatactgagtgggcaccccgggttcaccaatgcccgctttggctttgccatggcggctatggggg

SEQ ID NO: 83693 - DNA, 120 bp, Artificial Sequence
  ENSG00000083457_15 (sequence is synthesized)
agtgtgtatatctacaatggacactgggacggcctctccgccagcccctcgcagcggatcagagcctccacggtggccccaggactccagtacttcggcatgtccatggctggtggcttt

SEQ ID NO: 83694 - DNA, 120 bp, Artificial Sequence
  ENSG00000083457_16 (sequence is synthesized)
gatattagtggcgacggccttgccgacatcaccgtgggcactctgggccaggcggttgtgttccgctcccggcctgtggttcgcctgaaggtctccatggccttcacccccagcgcactg

SEQ ID NO: 83695 - DNA, 120 bp, Artificial Sequence
  ENSG00000083457_17 (sequence is synthesized)
cccatcggcttcaacggcgtcgtgaatgtccgtttatgttttgaaatcagctctgtaaccacagcctctgagtcaggcctccgcgaggcacttctcaacttcacgctggatgtggatgtg

SEQ ID NO: 83696 - DNA, 120 bp, Artificial Sequence
  ENSG00000083457_18 (sequence is synthesized)
gggaagcagaggagacggctgcagtgttcagacgtaagaagctgtctgggctgcctgagggagtggagcagcggatcccagctttgtgaggacctcctgctcatgcccacagagggagag

SEQ ID NO: 83697 - DNA, 120 bp, Artificial Sequence
  ENSG00000083457_19 (sequence is synthesized)
ctctgtgaggaggactgcttctccaatgccagtgtcaaagtcagctaccagctccagacccctgagggacagacggaccatccccagcccatcctggaccgctacactgagccctttgcc

SEQ ID NO: 83698 - DNA, 120 bp, Artificial Sequence
  ENSG00000083457_20 (sequence is synthesized)
atcttccagctgccctatgagaaggcctgcaagaataagctgttttgtgtcgcagaattacagttggccaccaccgtctctcagcaggagttggtggtgggtctcacaaaggagctgacc

SEQ ID NO: 83699 - DNA, 120 bp, Artificial Sequence
  ENSG00000083457_21 (sequence is synthesized)
ctgaacattaacctaactaactccggggaagattcctacatgacaagcatggccttgaattaccccagaaacctgcagttgaagaggatgcaaaagcctccctctccaaacattcagtgt

SEQ ID NO: 83700 - DNA, 120 bp, Artificial Sequence
  ENSG00000083457_22 (sequence is synthesized)
gatgaccctcagccggttgcttctgtcctgatcatgaactgcaggattggtcaccccgtcctcaagaggtcatctgctcatgtttcagtcgtttggcagctagaggagaatgcctttcca

SEQ ID NO: 83701 - DNA, 120 bp, Artificial Sequence
  ENSG00000083457_23 (sequence is synthesized)
aacaggacagcagacatcactgtgactgtcaccaattccaatgaaagacggtctttggccaacgagacccacacccttcaattcaggcatggcttcgttgcagttctgtccaaaccatcc

SEQ ID NO: 83702 - DNA, 120 bp, Artificial Sequence
  ENSG00000083457_24 (sequence is synthesized)
ataatgtacgtgaacacaggccaggggctttctcaccacaaagaattcctcttccatgtacatggggagaacctctttggagcagaataccagttgcaaatttgcgtcccaaccaaatta

SEQ ID NO: 83703 - DNA, 120 bp, Artificial Sequence
  ENSG00000083457_25 (sequence is synthesized)
cgaggtctccaggttgtagcagtgaagaagctgacgaggactcaggcctccacggtgtgcacctggagtcaggagcgcgcttgtgcgtacagttcggttcagcatgtggaagaatggcat

SEQ ID NO: 83704 - DNA, 120 bp, Artificial Sequence
  ENSG00000083457_26 (sequence is synthesized)
tcagtgagctgtgtcatcgcttcagataaagaaaatgtcaccgtggctgcagagatctcctgggatcactctgaggagttactaaaagatgtaactgaactgcagatccttggtgaaata

SEQ ID NO: 83705 - DNA, 120 bp, Artificial Sequence
  ENSG00000083457_27 (sequence is synthesized)
tctttcaacaaatctctatatgagggactgaatgcagagaaccacagaactaagatcactgtcgtcttcctgaaagatgagaagtaccattctttgcctatcatcattaaaggcagcgtt

SEQ ID NO: 83706 - DNA, 120 bp, Artificial Sequence
  ENSG00000083457_28 (sequence is synthesized)
ggtggacttctggtgttgatcgtgattctggtcatcctgttcaagtgtggcttttttaaaagaaaatatcaacaactgaacttggagagcatcaggaaggcccagctgaaatcagagaat

SEQ ID NO: 83707 - DNA, 120 bp, Artificial Sequence
  ENSG00000083457_29 (sequence is synthesized)
ctgctcgaagaagagaattaggacctgctatccactgggagaggctatcagccagtcctgggacttggagacccagcatcctttgcattactttttccttcaggatgatctagagcagca

SEQ ID NO: 83708 - DNA, 120 bp, Artificial Sequence
  ENSG00000083457_30 (sequence is synthesized)
tggagctgttggtagaatattagtttttaaccatacattgtcccaaaagtgtctgtgcattgtgcaaaaagtaaacttaggaaacatttggtattaaataaatttacacttttctttgca

SEQ ID NO: 83709 - DNA, 120 bp, Artificial Sequence
  ENSG00000083457_31 (sequence is synthesized)
tccaaatgctgtattttcacatggcaggatacaaaacaggaagcaagaagtcagtagcaaaaggatgttggatttttcttcatgtgccttcccttttcagggatgaaacagtttccaaaa

SEQ ID NO: 83710 - DNA, 120 bp, Artificial Sequence
  ENSG00000083457_32 (sequence is synthesized)
gctcccaggagacatcctcttacatcttattagtgagatctgaatctcatgtcagtcactggcaaaggagaatagctgtgtcatgatcacctgagaccaacgatgattcctgaataaaat

SEQ ID NO: 83711 - DNA, 120 bp, Artificial Sequence
  ENSG00000083457_33 (sequence is synthesized)
ccaaaaggagagaggggcccctgggcaggccagcatccgtgtttgctgcaaacagtagtacccggtgccttgcttctcccttaacctctacttgggcatctttggggcacttttgggaat

SEQ ID NO: 83712 - DNA, 120 bp, Artificial Sequence
  ENSG00000083457_34 (sequence is synthesized)
ctgtgggtttagaagaagataaagggaggtggctttgagaaatagggacatttcttctactcacatctggcctgtttcccgagtcaccttgggacttcctttcacttcccaaacccaggg

SEQ ID NO: 83713 - DNA, 120 bp, Artificial Sequence
  ENSG00000083457_35 (sequence is synthesized)
tcttgagtccccctccttctcctgtagaatattccagccctctttctgttcttcctccctctttgttgctatggtacctccctattctcaaagcctaggacttcactcctatttagttca

SEQ ID NO: 83714 - DNA, 120 bp, Artificial Sequence
  ENSG00000083457_36 (sequence is synthesized)
gctacctatgagctaaataggactggaaggtcaactttaggtcaaccagcatttataacttaattggaagaggccttaaaggtaagtttgtccagcccttcaccccgtacagaaacctct

SEQ ID NO: 83715 - DNA, 120 bp, Artificial Sequence
  ENSG00000083457_37 (sequence is synthesized)
ccaaagcacccctgaccttggtgcttaaacatacacgtgaagggttgctctgggcaggcagagaagtcttgttggctctctggccccacctaagtcctgggaacttcctctggccacaac

SEQ ID NO: 83716 - DNA, 120 bp, Artificial Sequence
  ENSG00000083457_38 (sequence is synthesized)
ttggaagggccatacctgggtctcaggaaggacatctcctgaactttctagctgagccctgccagaagagagattagactcccgaaattgggagagcctttggaaaacaaaacctgcgga

SEQ ID NO: 83717 - DNA, 120 bp, Artificial Sequence
  ENSG00000083457_39 (sequence is synthesized)
ccttaggtaatacacactttttagtctggtgaggggaagaccagtacttttgtcatattttatgtggggaaagtgtattaccaaagcctttagggatctgtgcaagatcaaaaagagccg

SEQ ID NO: 83718 - DNA, 120 bp, Artificial Sequence
  ENSG00000083457_40 (sequence is synthesized)
tcagaacggagttggaaaggacttggagatcatttaaaggaagtcatcattttaaagagcataggcacggggctcagggacatagagcagtgtagcggcgtgacagcctcacagtcctgt

SEQ ID NO: 83719 - DNA, 120 bp, Artificial Sequence
  ENSG00000083457_41 (sequence is synthesized)
gttgagaccggattccgtgggaccctctttcaagctgtcagagcatctttaacagaaggtcataatctcctgacagacctagcccttctagataaggggccagaatagtttcttacgaag

SEQ ID NO: 83720 - DNA, 120 bp, Artificial Sequence
  ENSG00000083457_42 (sequence is synthesized)
tatttgggtgattggatagttttagatgatctaaaatgctgcatcagggaatatctagctttttgctttactgtcatcagctttgatcaatacacgggttgttgccaagtcctcgtattt

SEQ ID NO: 83721 - DNA, 120 bp, Artificial Sequence
  ENSG00000083457_43 (sequence is synthesized)
tgctccttaaaataacatgtaggattttttccttgtttgcttcacctgatttattgggcgatctctttgtcttgtctagatcactgtcgtcttcctgaaagatgagaagtaccattcttt

SEQ ID NO: 83722 - DNA, 120 bp, Artificial Sequence
  ENSG00000083457_44 (sequence is synthesized)
gcatgcgcacctcgccagggccggggccgggacgggacggaaaactggcggcttggtttgttcagcgcgtcgcggtcatggctctcgtttcaggcctccacggtgtgcacctggagtcag

SEQ ID NO: 83723 - DNA, 120 bp, Artificial Sequence
  ENSG00000083457_45 (sequence is synthesized)
aaactccatctcaaaaaaaaaaaaaaaggaagttgaagaataactgcagatgtcttgtttgggtaactttatgtagtgttgtgtacgttagggccattaactaagcccaggaataccttt

SEQ ID NO: 83724 - DNA, 120 bp, Artificial Sequence
  ENSG00000083457_46 (sequence is synthesized)
atacctttaaagggaaaggtggtgaaggctgttcaaacacagtgagttcatgtctaaaatatgttttgtttccctcattcctttccccatcttctagttactaaaagatgtaactgaact

SEQ ID NO: 83725 - DNA, 120 bp, Artificial Sequence
  ENSG00000083457_47 (sequence is synthesized)
cagaggagtgacacactcatgcagcttagcaggatccttcttgctgcttagctgagaagagaagcggcacttgctccctttgtaaccactcaggcaggagttggtggtgggtctcacaaa

SEQ ID NO: 83726 - DNA, 120 bp, Artificial Sequence
  ENSG00000083457_48 (sequence is synthesized)
ggccaaagagaactgacctgaggctggcgcgggtttggtggaccatcctggtgtccttggctcctcctgtcgcttcctcctgggagcaggggagagatgctcggtccagggagacttctg

SEQ ID NO: 83727 - DNA, 120 bp, Artificial Sequence
  ENSG00000083457_49 (sequence is synthesized)
ggaggtggaggccgctcgggacggctgaggctgcaaccagacaggcggaggtgccgatcgagatgacactgtcccttggcgttggggacccggggcagggcgaggccagagagctgaaca

SEQ ID NO: 83728 - DNA, 120 bp, Artificial Sequence
  ENSG00000083457_50 (sequence is synthesized)
gggaggcactgatgcccagctcgtcgccgtccctgggctggccgcacacgctgaggtccgggctgaggcggccggagtcgcggctggggaagggcggaagtcggagcgggccgcagggtg

SEQ ID NO: 83729 - DNA, 85 bp, Artificial Sequence
  ENSG00000083457_51 (sequence is synthesized)
aaaaaaaaaaaaaaaaaaaaaagggatgagtgtagtggctcatgcctgtcatcccaacactttcccaggctgaggtctgagccat

SEQ ID NO: 83730 - DNA, 120 bp, Artificial Sequence
  ENSG00000083520_0 (sequence is synthesized)
gtattctagattgacgccttttgctggaagagcgctgctggggttaggattctgcgcggcgaggcaagatgctcaagtccaagacgttcttaaaaaagacccgggcgggcggcgtgatga

SEQ ID NO: 83731 - DNA, 120 bp, Artificial Sequence
  ENSG00000083520_1 (sequence is synthesized)
agatcgtgcgcgagcactacctgcgagacgacatcggctgcggtgcgcccgggtgcgcagcgtgtggaggggcgcacgaggggccggccctggagccgcagccccaggacccggcgagca

SEQ ID NO: 83732 - DNA, 120 bp, Artificial Sequence
  ENSG00000083520_2 (sequence is synthesized)
gcgtctgcccgcaaccgcactacttgctgcccgacactaatgtgttactgcaccagattgatgttcttgaggaccctgccatcaggaatgtaattgtgctacaaacagttcttcaagaag

SEQ ID NO: 83733 - DNA, 120 bp, Artificial Sequence
  ENSG00000083520_3 (sequence is synthesized)
tgagaaatcgcagtgcccccgtatataaacgcatccgagatgtgactaataaccaagagaagcatttctatactttcactaatgagcaccatagagaaacctatgtagaacaagaacagg

SEQ ID NO: 83734 - DNA, 120 bp, Artificial Sequence
  ENSG00000083520_4 (sequence is synthesized)
gagaaaatgctaatgacaggaatgatagagcgattcgagtagcagcaaaatggtacaatgaacatttgaaaaaaatgtcagcagacaaccagctgcaagttatcttcataacaaatgaca

SEQ ID NO: 83735 - DNA, 120 bp, Artificial Sequence
  ENSG00000083520_5 (sequence is synthesized)
ggagaaacaaagagaaagccatagaagaaggaataccagctttcacttgtgaagaatatgtaaagagcctaactgctaaccccgaactcatagatcgtcttgcttgtttgtctgaagaag

SEQ ID NO: 83736 - DNA, 120 bp, Artificial Sequence
  ENSG00000083520_6 (sequence is synthesized)
ggaatgaaatagaaagtggaaaaataatattttcagagcatcttcccttaagtaagctacagcaaggcataaaatctggtacataccttcaaggaacatttagagctagcagggaaaatt

SEQ ID NO: 83737 - DNA, 120 bp, Artificial Sequence
  ENSG00000083520_7 (sequence is synthesized)
acttggaagctacagtatggattcatggcgacaatgaagaaaataaagagataatcttacagggacttaaacatttaaacagagctgttcacgaagatattgtggctgtggagcttctcc

SEQ ID NO: 83738 - DNA, 120 bp, Artificial Sequence
  ENSG00000083520_8 (sequence is synthesized)
ccaagagtcagtgggtagcaccatcttctgtggttttacatgatgaaggtcaaaatgaagaagatgtggagaaagaagaagagacagaacgaatgcttaagactgctgtaagcgagaaaa

SEQ ID NO: 83739 - DNA, 120 bp, Artificial Sequence
  ENSG00000083520_9 (sequence is synthesized)
tgttgaagcctacaggtagagttgtaggaataataaaaaggaattggagaccatattgtggcatgctttccaagtctgacattaaggagtcaagaagacatctctttacacctgctgata

SEQ ID NO: 83740 - DNA, 120 bp, Artificial Sequence
  ENSG00000083520_10 (sequence is synthesized)
agagaatccctcgaattcgcatagaaaccagacaggcttccacattagaaggacggagaattattgttgctattgatggttggcccagaaattccagatatccaaatggacactttgtga

SEQ ID NO: 83741 - DNA, 120 bp, Artificial Sequence
  ENSG00000083520_11 (sequence is synthesized)
gaaatttaggtgatgttggagagaaagagactgaaacagaagttttgttacttgaacacgatgttccccatcagcctttttcacaggctgttcttagttttctgccaaagatgccctgga

SEQ ID NO: 83742 - DNA, 120 bp, Artificial Sequence
  ENSG00000083520_12 (sequence is synthesized)
gcattactgaaaaggacatgaaaaaccgagaagacctgaggcatctgtgtatttgtagtgtagacccaccaggatgtactgatatagacgatgctctacattgtcgagaactcgaaaatg

SEQ ID NO: 83743 - DNA, 120 bp, Artificial Sequence
  ENSG00000083520_13 (sequence is synthesized)
gaaatttggaggttggtgttcatattgctgatgtgagccattttattaggccaggaaatgccttggatcaagaatcagccagaagaggaacaactgtgtatctttgtgaaaagaggattg

SEQ ID NO: 83744 - DNA, 120 bp, Artificial Sequence
  ENSG00000083520_14 (sequence is synthesized)
acatggttccagagttgcttagctctaacttgtgttccttaaaatgtgacgtggacaggctggcattttcatgtatttgggaaatgaatcacaatgctgaaatcttaaaaacgaagttta

SEQ ID NO: 83745 - DNA, 120 bp, Artificial Sequence
  ENSG00000083520_15 (sequence is synthesized)
ccaaaagtgttattaattcaaaggcatctctgacgtatgctgaagctcagttgagaattgattcagcaaacatgaatgatgatattaccactagtctccgtggactgaataaactagcca

SEQ ID NO: 83746 - DNA, 120 bp, Artificial Sequence
  ENSG00000083520_16 (sequence is synthesized)
aaattctgaagaaaagaaggattgaaaaaggggctttgactctatcctctcctgaagttcgattccacatggacagtgaaactcacgatcctatagatctgcagaccaaggaacttaggg

SEQ ID NO: 83747 - DNA, 120 bp, Artificial Sequence
  ENSG00000083520_17 (sequence is synthesized)
aaacaaattccatggttgaagaatttatgttacttgccaatatttctgttgcaaaaaaaattcatgaggaattttctgaacatgctctgcttcgaaaacatcctgctccacctccatcaa

SEQ ID NO: 83748 - DNA, 120 bp, Artificial Sequence
  ENSG00000083520_18 (sequence is synthesized)
attatgaaattcttgttaaggcagccaggtcaaggaatttggaaattaagactgatacagccaagtctttggctgagtctttggatcaggccgaatctcctacttttccatatctaaaca

SEQ ID NO: 83749 - DNA, 120 bp, Artificial Sequence
  ENSG00000083520_19 (sequence is synthesized)
ctctgttgagaatattagccactcgctgtatgatgcaagctgtgtacttctgttctggaatggataatgattttcatcactatggcttagcgtctccaatatacacacattttacttcac

SEQ ID NO: 83750 - DNA, 120 bp, Artificial Sequence
  ENSG00000083520_20 (sequence is synthesized)
ccattagaagatacgcagatgtcattgttcatcggcttttggctgtggctattggggctgactgtacttatccagagttgacagacaaacacaagcttgcagatatatgtaaaaatctaa

SEQ ID NO: 83751 - DNA, 120 bp, Artificial Sequence
  ENSG00000083520_21 (sequence is synthesized)
atttccggcacaaaatggctcaatatgcccaacgtgcatcagtggcttttcatacccagttattcttcaaaagcaaaggaatagtaagtgaagaagcctatattttatttgtaagaaaga

SEQ ID NO: 83752 - DNA, 120 bp, Artificial Sequence
  ENSG00000083520_22 (sequence is synthesized)
atgccattgtggtattaattccaaagtatggtttagaagggacagtcttttttgaagaaaaggacaaaccaaacccacagcttatttatgatgatgagataccctcacttaaaatagaag

SEQ ID NO: 83753 - DNA, 120 bp, Artificial Sequence
  ENSG00000083520_23 (sequence is synthesized)
atacagtgttccatgtatttgataaagttaaagtgaaaatcatgttagactcatctaatcttcaacatcagaagatccgaatgtccctggtagaaccacagataccaggaataagcattc

SEQ ID NO: 83754 - DNA, 120 bp, Artificial Sequence
  ENSG00000083520_24 (sequence is synthesized)
ctactgatacttcaaacatggaccttaatggaccaaagaaaaagaagatgaagcttggaaaatagctatattcaacaaaaatcttcaaagactggtttcttttttaaaagaaaaaacttg

SEQ ID NO: 83755 - DNA, 120 bp, Artificial Sequence
  ENSG00000083520_25 (sequence is synthesized)
aaagaacacttctaagcctaagtgtgtgatacagtttgttacttttaagtacattttaataatttcagacatctgcatttttattgaacagttgactgtatctgacccatcatactacta

SEQ ID NO: 83756 - DNA, 120 bp, Artificial Sequence
  ENSG00000083520_26 (sequence is synthesized)
tacttctgggttgaacagaattatttatgcagaataattcaattgaatatccatcacttaaatacagtgacaggacagcaacttcagggatctgtaaagatcatttaaatggagtgctca

SEQ ID NO: 83757 - DNA, 120 bp, Artificial Sequence
  ENSG00000083520_27 (sequence is synthesized)
tctcattgaggagcagattaattttgcgtaagtactttgattatttaatatttgtaagaaaaaactttcattttcctacagaggaaaatagaacaattttagaagcaaggaacaatctct

SEQ ID NO: 83758 - DNA, 120 bp, Artificial Sequence
  ENSG00000083520_28 (sequence is synthesized)
tttctaagtcttggaagctgtcagtgttgaggatgtaatctcctttgccatctttaattcacctaacttacactaggtgttctcttactgtctttaaaagcttcctgtattttattagtg

SEQ ID NO: 83759 - DNA, 120 bp, Artificial Sequence
  ENSG00000083520_29 (sequence is synthesized)
gtccttgaaaaactgtgaatgtttgggaattggtagaaaggcaaaaagtaggatattttgacctgactggaaagatggttgtgtttttattgccaggtaataagtgtgatcattgttgaa

SEQ ID NO: 83760 - DNA, 120 bp, Artificial Sequence
  ENSG00000083520_30 (sequence is synthesized)
cttcagctccagtgtctctccagaataagacattggcattcaaatgtctatatcttgttacttacaaaataaaaaacagattaattagtggcttttaaattgtagttatatcagtgtata

SEQ ID NO: 83761 - DNA, 120 bp, Artificial Sequence
  ENSG00000083520_31 (sequence is synthesized)
tacacgaggggaactgtataaagacatactaaagggaacagattaaaataagtattattaataaaatttggtgtgccagactgactacttcccttgctaatcacagagattagtaatgat

SEQ ID NO: 83762 - DNA, 120 bp, Artificial Sequence
  ENSG00000083520_32 (sequence is synthesized)
taaattaatatcttcaggaatattttgggatagggttgccttaaaacattttacttggcttattcaatttctaaagcacttacgttgtgccaggttccactcaagtaaattatctctgcc

SEQ ID NO: 83763 - DNA, 120 bp, Artificial Sequence
  ENSG00000083520_33 (sequence is synthesized)
ttcaaggagcttgcagtatagtgagaaaagcctgccaagtaaatcagcaggtatactaaataggtagtcatttaggcactcaataaatgttgactaatttttccagtttcctattactga

SEQ ID NO: 83764 - DNA, 120 bp, Artificial Sequence
  ENSG00000083520_34 (sequence is synthesized)
ggaaaacctccatacactgaggcagaaacttgtgtcagttggaggaaaatagacttgagtagtctttggtccaggtaaaatgggtcagtgacactgaaacagtagagtaggagtcaaaaa

SEQ ID NO: 83765 - DNA, 120 bp, Artificial Sequence
  ENSG00000083520_35 (sequence is synthesized)
accttttctgtgaagtgctagaacattttagactttgttggctatggtctgtattgcaactatagtacacaactctgccgttgatagtgtgtaaggagccatatacaatatgtaaacaaa

SEQ ID NO: 83766 - DNA, 120 bp, Artificial Sequence
  ENSG00000083520_36 (sequence is synthesized)
tcaacatgactgtgtttcaacaaggcctgatttgttaagtttcatatatagtcatatgtcacttaatgacagggatatgttctgagacatgtcacttggcaatttcatcattgtgtgaaa

SEQ ID NO: 83767 - DNA, 120 bp, Artificial Sequence
  ENSG00000083520_37 (sequence is synthesized)
atcatgatgtagttacacaaacctagatggtataccctatggtatcctatatgggatagcctattgctcctaacctacaaacctgtatggcatattactgtactgattactgtaggcggt

SEQ ID NO: 83768 - DNA, 120 bp, Artificial Sequence
  ENSG00000083520_38 (sequence is synthesized)
aaacatagaaaaggtacagtaaaaatatatatatagatatatataagatataaaatggtacacctatttaggacatttaccatgaacaagttggcaggactggaagctggctctgggtga

SEQ ID NO: 83769 - DNA, 120 bp, Artificial Sequence
  ENSG00000083520_39 (sequence is synthesized)
catgaacaagttggcaggactggaagctggctctgggtgagtcagtaagtggttagtgaatgtgaaggccatgatattactgtgcactactgtagacttttataaacactatatacttag

SEQ ID NO: 83770 - DNA, 120 bp, Artificial Sequence
  ENSG00000083520_40 (sequence is synthesized)
gctacataaagtaatttcactatgatgttaccatggctgtgtccccaggcaataggaatttttcagctccattgtaatcttacgggatcatcatcgtatatttggccattgttgaccaaa

SEQ ID NO: 83771 - DNA, 120 bp, Artificial Sequence
  ENSG00000083520_41 (sequence is synthesized)
agttatgcagcacatcattataattttgatgtgtcacaaaacattactcatttgatttcccccacccccgccaaccatttaaaaaagtttgccggctaggtgcggtggctcatgcctgta

SEQ ID NO: 83772 - DNA, 69 bp, Artificial Sequence
  ENSG00000083520_42 (sequence is synthesized)
gcctggatgatgccaggtgtggtggcaagtgcctttaatcccacctcaggaggctgaggcaggagaatc

SEQ ID NO: 83773 - DNA, 88 bp, Artificial Sequence
  ENSG00000083520_43 (sequence is synthesized)
gagaagaaaaactgcctacaggccatagttaacctgcaatagagaagaaagggaagtagggcagtgcatgactggccttaggtttttt

SEQ ID NO: 83774 - DNA, 120 bp, Artificial Sequence
  ENSG00000083520_44 (sequence is synthesized)
aagggaagtagggcagtgcatgactggccttaggttttttctttccaagtttattttcttgtgcttcagctactagaaaggtttaattcagggataagtcccaattgagtagttcaagat

SEQ ID NO: 83775 - DNA, 120 bp, Artificial Sequence
  ENSG00000083520_45 (sequence is synthesized)
gatcagagactttgctattttcccctaagttctattccataatctaaaatgttctgtttctagtgccagttcttatgctaagcaggttacgtggaatatatcacttaactcaaaaagccc

SEQ ID NO: 83776 - DNA, 120 bp, Artificial Sequence
  ENSG00000083520_46 (sequence is synthesized)
tgttaagccaggactgttatctccatttaacagatgagaaaatggaggtttatggtctgttctcacactgctacgaagaaataccccaaactgggtaattattataaaggaaagaggttt

SEQ ID NO: 83777 - DNA, 120 bp, Artificial Sequence
  ENSG00000083520_47 (sequence is synthesized)
aatggactcagttccgcattgctggtgaggcctcaggacacttacacaatcatggcagaaaaaggagaagcaggcacctttttcacagggcggcaggatgaaaatgactgccagcagtgg

SEQ ID NO: 83778 - DNA, 120 bp, Artificial Sequence
  ENSG00000083520_48 (sequence is synthesized)
aaatgccagacgcttataaaaccttcagatctcatgagaccggctcactatcacaggaacagcatggaggaaaccgcccccatgatccagttacctccacctggtcccacccttgacacg

SEQ ID NO: 83779 - DNA, 120 bp, Artificial Sequence
  ENSG00000083520_49 (sequence is synthesized)
tggggattgctacaattcaaggttagatttgggtgaggacacagagccataccatatcagcccagatcaagtagtgacagagtagggatttgaatacaggttatagtcactattgtgtta

SEQ ID NO: 83780 - DNA, 120 bp, Artificial Sequence
  ENSG00000083520_50 (sequence is synthesized)
tttcttgacttttgtactattaaaaaactgtagccagtgaggcttctacccttagtacccagaactccttttaggtatagcaattgtttttaggtaaatttatattgagtttaacacctg

SEQ ID NO: 83781 - DNA, 120 bp, Artificial Sequence
  ENSG00000083520_51 (sequence is synthesized)
tgtgattaaagacaactttccaatgtagtatctgtagccatgtcccctaatggctattagtgttcatggttagtgtgttgaagatgagccaggtacataacgcggcacattttctgcagg

SEQ ID NO: 83782 - DNA, 120 bp, Artificial Sequence
  ENSG00000083520_52 (sequence is synthesized)
tcagcagtaaggtttcaaggtacagttatggaggaaagaagaaaatgacacattgataacacaggtctttattcccttttgaatgagacagtttttaaaagttgatttataaatacaaaa

SEQ ID NO: 83783 - DNA, 120 bp, Artificial Sequence
  ENSG00000083520_53 (sequence is synthesized)
atacattctccaaagatagtatttccaaactgttatatacccatctactcccaacatggatataagttttttaaaaaaatagttgtatataacatacatatctgccccagtgttacttca

SEQ ID NO: 83784 - DNA, 120 bp, Artificial Sequence
  ENSG00000083520_54 (sequence is synthesized)
caggcctatgccctacgggaactccactctcccagccccactttttctcttggttctcccacattcttattctcccacatccctacccacgtttgagctggaaaggatgtccctacccta

SEQ ID NO: 83785 - DNA, 120 bp, Artificial Sequence
  ENSG00000083520_55 (sequence is synthesized)
ggcatgaggtatattttattctgggcaccacacatttgccccatagataacaatacacgtgatgatgtcactagtactacctttctagtatttacatacttaaaagtagtaactagaaca

SEQ ID NO: 83786 - DNA, 120 bp, Artificial Sequence
  ENSG00000083520_56 (sequence is synthesized)
gttatcactggaactaagaattttccccacagaggtgaacagaccaagaactaaaatttcaggaaacctgtttaatttcttttgtatctttgaaaagttagttttatatctaagatttct

SEQ ID NO: 83787 - DNA, 120 bp, Artificial Sequence
  ENSG00000083520_57 (sequence is synthesized)
tcacataggttataattcatctgtatgttcaagcttttatgtaaaaatatatagtgccttcagttttaacatagtttcacatgttctcagaactgctaaattcagtgctaccagtaaggc

SEQ ID NO: 83788 - DNA, 120 bp, Artificial Sequence
  ENSG00000083520_58 (sequence is synthesized)
ttaataagtagttcattgaccctgtaagataggagcactcagctctgtcacaatttgttgttaaacacatcactcaatgtaagtataaaaatatttattgataaaaaataaacttataat

SEQ ID NO: 83789 - DNA, 120 bp, Artificial Sequence
  ENSG00000083520_59 (sequence is synthesized)
tcagcaacttgaagttccaggagcatttctgttgttcctatgtcagtaagcccttgatttttcacattaaggagggaaagctaagcatgttacttgaagtaattttttcccagtcaccat

SEQ ID NO: 83790 - DNA, 120 bp, Artificial Sequence
  ENSG00000083520_60 (sequence is synthesized)
catgttgatcctgtgcacaacgatatatgcgaggaactcttaagcttagtctttgattctgacagaggcattctatggactgctgcattgaaaagggcttgctgttttcatccaacacct

SEQ ID NO: 83791 - DNA, 120 bp, Artificial Sequence
  ENSG00000083520_61 (sequence is synthesized)
ctgtgttgtgtggtcttgctgtgaaaaagaagacaataccttgttttcagtttaagtaggaccactggaggatgcaattatcgggactgtttttaaaacctaaaagcacgtttctttagc

SEQ ID NO: 83792 - DNA, 120 bp, Artificial Sequence
  ENSG00000083520_62 (sequence is synthesized)
tgaactctgaagggacagtaaagatacagtattttataaatcaatattctgcatcaaaaagcatcccaacactttgagaggccaaggtgggaggatcgcacgagcccaggagtttgggac

SEQ ID NO: 83793 - DNA, 120 bp, Artificial Sequence
  ENSG00000083520_63 (sequence is synthesized)
catagtgagaccctgtctctaccaaaaattttaaaaagctgggtgtggtggcacatgcctgtagccctagctactcaggaggctgaggtggtaagactgcttgagtctgggaggtgaagg

SEQ ID NO: 83794 - DNA, 120 bp, Artificial Sequence
  ENSG00000083520_64 (sequence is synthesized)
gggaggtgaaggctacagtgagctgtggtcgtgccactacactctagcctgggtgacagaatgagaccttgtctcaaaaaaaataaaataataaaatttaaaaaaatccttcatttatct

SEQ ID NO: 83795 - DNA, 120 bp, Artificial Sequence
  ENSG00000083520_65 (sequence is synthesized)
ctacttatgtttagatagacaactgcatcctgaaataggatggattttgttcaggttaatattagaagagacctgctctgatactacatacaacagaaaggcagtttgctcctactacat

SEQ ID NO: 83796 - DNA, 120 bp, Artificial Sequence
  ENSG00000083520_66 (sequence is synthesized)
acaacagaaaggaaaactaaggtggcctccctattaaacatttgttgcacatttgctgatatttatagtattttataagaaactggcatataacagcagggcaaggtggttcacacctgt

SEQ ID NO: 83797 - DNA, 120 bp, Artificial Sequence
  ENSG00000083520_67 (sequence is synthesized)
agttctagctactcaggagggtgaggcaggaggattgcttgagcccagcagttaaaggctgtagtgatctgattctacgactgcactccagcccgggtgacagagtaagaccctgtctca

SEQ ID NO: 83798 - DNA, 120 bp, Artificial Sequence
  ENSG00000083520_68 (sequence is synthesized)
aaaaaaaaaagaaaaaaaagaaacggcatacaaggctgggcatgttggctcatgcctgtaatcgcgcagcactttgcgaggctgaggcagaaagactgcttgacaccaggagtttgagac

SEQ ID NO: 83799 - DNA, 120 bp, Artificial Sequence
  ENSG00000083520_69 (sequence is synthesized)
agaccagcctgggcaacacagcaggccctgtctctacaaaaaaataaaatgcaaaaaaaattggcacataaaattaaagactgtcctgactagtgcctgaaattatgatgagtttcttca

SEQ ID NO: 83800 - DNA, 120 bp, Artificial Sequence
  ENSG00000083520_70 (sequence is synthesized)
agtatgaatatataaccaccacctggaaggttcagtaaatgccctcatcaaatacacgctacctttgcacactttgtagtatgtaagatacttgtgtattcagagtaaccaaaatattta

SEQ ID NO: 83801 - DNA, 120 bp, Artificial Sequence
  ENSG00000083520_71 (sequence is synthesized)
cagagtaaccaaaatatttaaaggttattggatgttaagaaaacaggcttaccttttagtgttttaaatttcatatagtttctcaatagtactattgtctaataatcaaaattattttat

SEQ ID NO: 83802 - DNA, 120 bp, Artificial Sequence
  ENSG00000083520_72 (sequence is synthesized)
taagctttcactatattttctccgtaccttcatattaaatgcttgagatttactctcaacttcacatgtttgtgcatcactttctttgcagtaactttctgccccaactgtatccataat

SEQ ID NO: 83803 - DNA, 120 bp, Artificial Sequence
  ENSG00000083520_73 (sequence is synthesized)
attgcttccacaattctgcgtattatagccactatccatctgacaggagaaaaaagaaaaaaatatattgtgaggaacttaaaagtcaaatatttaaataagtaaaccactataaactct

SEQ ID NO: 83804 - DNA, 120 bp, Artificial Sequence
  ENSG00000083520_74 (sequence is synthesized)
cattcactacatctgaatgatcctaacatgtaatattgatcatgttgaacaaaattcaaaagtaatgcacaaatataaaaggtagtcctgcatagtactgattattgtagtcattttaca

SEQ ID NO: 83805 - DNA, 120 bp, Artificial Sequence
  ENSG00000083520_75 (sequence is synthesized)
attccttccaatgaaatatatcttgtaacttccttaagaatcagtgaacagcctactgacacaatgctttcctgttattttgtgatcgtacctagtagacaaaaatgagtattacaacta

SEQ ID NO: 83806 - DNA, 120 bp, Artificial Sequence
  ENSG00000083520_76 (sequence is synthesized)
acttcaccttccaacgcattttccaggcttgtctctaaatggcttgaggcatgctgcctttaaaaaagtggattatattatatttacacctagttgttcacaataatgccacatatataa

SEQ ID NO: 83807 - DNA, 120 bp, Artificial Sequence
  ENSG00000083520_77 (sequence is synthesized)
tggctctagatgttagttcagcttttcatgttaataaaaattgtagcatcctaagatacactgtttcagtgcaaaagagcaaaaaagaaagattctagcgaacttccagcttggaaacat

SEQ ID NO: 83808 - DNA, 120 bp, Artificial Sequence
  ENSG00000083520_78 (sequence is synthesized)
ttattgagtgtctaaaaaggccaggcactatctctatatatttaatatttttttctcctttcaacaaccctaatactttactagagaaggaaattaaggcttaaaaagcttaactttcac

SEQ ID NO: 83809 - DNA, 120 bp, Artificial Sequence
  ENSG00000083520_79 (sequence is synthesized)
aatgtcatccagtgatgaggtgatgaagatgtgagacctaagtccaggttctgttcactgcacaacgctccatttacctgtataatgctgagcaccaaagaaagcaatccacaagggaat

SEQ ID NO: 83810 - DNA, 120 bp, Artificial Sequence
  ENSG00000083520_80 (sequence is synthesized)
cattttgcatttaagccctccctgcaagttaggatcagagggaaggaaaaagctgactgtcattttgtttccctcacaaaggtacagactagcctagaaacggcactctttatcacttaa

SEQ ID NO: 83811 - DNA, 120 bp, Artificial Sequence
  ENSG00000083520_81 (sequence is synthesized)
taatcctgaaaaaatgttcccagatttcaaggctggatacatatctgcttactactagaggtcatgttccaattagaacaaaagccttgtgatgtgtaacatttttggggaaaagccttg

SEQ ID NO: 83812 - DNA, 120 bp, Artificial Sequence
  ENSG00000083520_82 (sequence is synthesized)
ttctgctatcattcaatagctacttgatcaaaaatataaatgtcagattgctcccagagattctgccaatagctcttccttctaatattcatcactgccaaatagctggcttataatgca

SEQ ID NO: 83813 - DNA, 120 bp, Artificial Sequence
  ENSG00000083520_83 (sequence is synthesized)
atactaatatgtaactggatatatatggagggaagagttactcattagtacagcaggaagtaaggcatgcggggagtttgtcccacactatgggaagagcaggattgatgagagccaagt

SEQ ID NO: 83814 - DNA, 120 bp, Artificial Sequence
  ENSG00000083520_84 (sequence is synthesized)
tgagatggtggctgacttcactgtctctcatctagacttctgctaatgtcaatgcctaatatgtaccaaccaggcaacagataccttgttatcccccacaggcatcaaggcaggcatcaa

SEQ ID NO: 83815 - DNA, 120 bp, Artificial Sequence
  ENSG00000083520_85 (sequence is synthesized)
tctcactttatagctaagaaggatgaggggacaaaaattaaaaagtcatgttctattcactgctatgtaaatcttgccttaagatcccacagcctggaaataaaagaactctaattcaaa

SEQ ID NO: 83816 - DNA, 120 bp, Artificial Sequence
  ENSG00000083520_86 (sequence is synthesized)
gaggtggcgtccagaaggaagccccgcctaggccacgggcggaaatggctcctcgccttgctttgccgcccctccccactctcgcccaatccccgcggccgtcagagagccaaccaatgt

SEQ ID NO: 83817 - DNA, 120 bp, Artificial Sequence
  ENSG00000083520_87 (sequence is synthesized)
tgttactgcaccagattgtaagtgcctggaggccggggacctgggcttctgtggcctccagcctgcgactcccaggcagcttattgatgttcttgaggaccctgccatcaggaatgtaat

SEQ ID NO: 83818 - DNA, 120 bp, Artificial Sequence
  ENSG00000083535_0 (sequence is synthesized)
agagttgacttccggcggcttgtgggagtgctggttctgtcctccttgcgggtgcggagatggttgtcttggttacgggtcctaacggtcccctgccttgaaatcccttgttgagggcct

SEQ ID NO: 83819 - DNA, 120 bp, Artificial Sequence
  ENSG00000083535_1 (sequence is synthesized)
gcaaccttgtgcttccgaccggagacgcctttggtccctcggtgtctgcactggctgctggtcaaggcttcagtgtggagtaattgacactttcgagaatattaaaatcaaattagagaa

SEQ ID NO: 83820 - DNA, 120 bp, Artificial Sequence
  ENSG00000083535_2 (sequence is synthesized)
gaaaactgatccataataataaaaatgtctcgaaaaatttcaaaggagtcaaaaaaagtgaacatctctagttctctggaatctgaagatattagtttagaaacaacagttcctacggat

SEQ ID NO: 83821 - DNA, 120 bp, Artificial Sequence
  ENSG00000083535_3 (sequence is synthesized)
gatatttcctcatcagaagagcgagagggcaaagtcagaatcaccaggcagctaattgaacgaaaagaactacttcataatattcagttactaaaaattgagctatcccagaaaactatg

SEQ ID NO: 83822 - DNA, 120 bp, Artificial Sequence
  ENSG00000083535_4 (sequence is synthesized)
atgatcgacaatttgaaagtggattatcttacaaagattgaagaattggaggagaaacttaatgatgcacttcaccagaagcagctactaacattgagattagacaaccaattggctttt

SEQ ID NO: 83823 - DNA, 120 bp, Artificial Sequence
  ENSG00000083535_5 (sequence is synthesized)
caacagaaagatgccagcaaatatcaagaattaatgaaacaagaaatggaaaccattttgttgagacagaaacaactagaagagacaaatcttcagctaagagaaaaagctggagatgtt

SEQ ID NO: 83824 - DNA, 120 bp, Artificial Sequence
  ENSG00000083535_6 (sequence is synthesized)
cgtcgaaacctgcgtgactttgagttgacagaagagcaatatattaaattaaaagcttttcctgaagatcagctttctattcctgaatatgtatctgttcgcttctatgagctagtgaat

SEQ ID NO: 83825 - DNA, 120 bp, Artificial Sequence
  ENSG00000083535_7 (sequence is synthesized)
ccattaagaaaggaaatctgtgaactacaagtgaaaaagaatatcctagcagaagaattaagtacaaacaaaaaccaactgaagcagctgacagagacatatgaggaagatcgaaaaaac

SEQ ID NO: 83826 - DNA, 120 bp, Artificial Sequence
  ENSG00000083535_8 (sequence is synthesized)
tactctgaagttcaaattagatgtcaacgtttggccttagaattagcagacacaaaacagttaattcagcaaggtgactaccgtcaagagaactatgataaagtcaagagtgaacgtgat

SEQ ID NO: 83827 - DNA, 120 bp, Artificial Sequence
  ENSG00000083535_9 (sequence is synthesized)
gcacttgaacaggaagtaattgagcttaggagaaaacatgaaatacttgaagcctctcacatgattcaaacaaaagaacgaagtgaattatcaaaagaggtagtcaccttagagcaaact

SEQ ID NO: 83828 - DNA, 120 bp, Artificial Sequence
  ENSG00000083535_10 (sequence is synthesized)
gttactttactgcaaaaggataaagaatatcttaatcgccaaaacatggagcttagtgttcgctgtgctcatgaagaggatcgccttgaaagacttcaagctcaactggaagaaagcaaa

SEQ ID NO: 83829 - DNA, 120 bp, Artificial Sequence
  ENSG00000083535_11 (sequence is synthesized)
aaggctagagaagagatgtatgaaaaatatgtagcatccagagaccattataaaacagaatatgaaaataaactacatgatgaactagaacaaatcagattgaaaaccaaccaagaaatt

SEQ ID NO: 83830 - DNA, 120 bp, Artificial Sequence
  ENSG00000083535_12 (sequence is synthesized)
tgaaaaggaacgagcagtgatggctgaaaaggatgctttagaaaaacacgatcagctcttagacaggtacagagaactacaacttagtacagaaagcaaagtaacagaatttctccatca

SEQ ID NO: 83831 - DNA, 120 bp, Artificial Sequence
  ENSG00000083535_13 (sequence is synthesized)
aagtaaattaaaatcttttgaaagtgagcgtgttcaacttctgcaagaggaaacagcaagaaatctcacacagtgtcaattggaatgtgaaaaatatcagaaaaaattggaggttttaac

SEQ ID NO: 83832 - DNA, 120 bp, Artificial Sequence
  ENSG00000083535_14 (sequence is synthesized)
caaagaattttatagtctccaagcctcttctgaaaaacgcattactgaacttcaagcacagaactcagagcatcaagcaaggctagacatttatgagaaactggaaaaagagcttgatga

SEQ ID NO: 83833 - DNA, 120 bp, Artificial Sequence
  ENSG00000083535_15 (sequence is synthesized)
aataataatgcaaactgcagaaattgaaaatgaagatgaggctgaaagggttcttttttcctacggctatggtgctaatgttcccacaacagccaaaagacgactaaagcaaagtgttca

SEQ ID NO: 83834 - DNA, 120 bp, Artificial Sequence
  ENSG00000083535_16 (sequence is synthesized)
cttggcaagaagagtgcttcaattagaaaaacaaaactcgctgattttaaaagatctggaacatcgaaaggaccaagtaacacagctttcacaagagcttgacagagccaattcgctatt

SEQ ID NO: 83835 - DNA, 120 bp, Artificial Sequence
  ENSG00000083535_17 (sequence is synthesized)
aaaccagactcaacagccttacaggtatctcattgaatcagtgcgtcagagagattctaagattgattcactgacggaatctattgcacaacttgagaaagatgtcagcaacttaaataa

SEQ ID NO: 83836 - DNA, 120 bp, Artificial Sequence
  ENSG00000083535_18 (sequence is synthesized)
agaaaagtcagctttactacagacgaagaatcaaatggcattagatttagaacaacttctaaatcatcgtgaggaattggcagcaatgaaacagattctcgttaagatgcatagtaaaca

SEQ ID NO: 83837 - DNA, 120 bp, Artificial Sequence
  ENSG00000083535_19 (sequence is synthesized)
ttctgagaacagcttacttctcactaaaacagaaccaaaacatgtgacagaaaatcagaaatcaaagactttgaatgtgcctaaagagcatgaagacaatatatttacacctaaaccaac

SEQ ID NO: 83838 - DNA, 120 bp, Artificial Sequence
  ENSG00000083535_20 (sequence is synthesized)
actctttactaaaaaagaagcacctgagtggtctaagaaacaaaagatgaagacctagtgttttggatgggaagcacctgtagaccattatatactcctgaagttctttttctgatggaa

SEQ ID NO: 83839 - DNA, 120 bp, Artificial Sequence
  ENSG00000083535_21 (sequence is synthesized)
aacaaaattcagcttaatcgtgtactcagcattttttaaataacaatgtttatttgaactaatattaaattaacaaattcagtgtaatcaaaatgtgtaaagaacaatcaatatacttta

SEQ ID NO: 83840 - DNA, 120 bp, Artificial Sequence
  ENSG00000083535_22 (sequence is synthesized)
tttttctattttataaaataaatatatatgctatgctttaaattttggagctttcataaatgttcaatgcattttaagtgtgtggcttataaatattttggtatttttctatactacgta

SEQ ID NO: 83841 - DNA, 120 bp, Artificial Sequence
  ENSG00000083535_23 (sequence is synthesized)
cgtaaattctgagtttaaatgtcatacacaaatactaagacactttgcatttttaaaaattaagaatcatttgtgaagtccactacgaggtacttcaaaagcccagtaatggtggtcaga

SEQ ID NO: 83842 - DNA, 120 bp, Artificial Sequence
  ENSG00000083535_24 (sequence is synthesized)
taccatgtagatggatacagattgttgactcttttgaagttgtttttttcttatattttatattaccattaaccaataaaatctggcagaaagtctgctattccattggtaaagtgaaaa

SEQ ID NO: 83843 - DNA, 120 bp, Artificial Sequence
  ENSG00000083535_25 (sequence is synthesized)
gaggaaaagcaacactttctgcaaggggaggacataagaaaagtgtagggagaaaagcaaggcccaggaaaatgtttgagagaagacatttcttcaaaataataatgtaagatgttaaaa

SEQ ID NO: 83844 - DNA, 120 bp, Artificial Sequence
  ENSG00000083535_26 (sequence is synthesized)
gaagtgttggagatggttaaataaataccaaggtacagagaactacaacttagtacagaaagcaaagtaacagaatttctccatcaaagtaaattaaaatcttttgaaagtgagcgtgtt

SEQ ID NO: 83845 - DNA, 120 bp, Artificial Sequence
  ENSG00000083535_27 (sequence is synthesized)
acagttctgtatacccacattccttcatccctactcgaagcaaatggcatttcaaatcctagagtggaattatcctgggctttaaatacacatcaggctggtttctctccttatgcaact

SEQ ID NO: 83846 - DNA, 120 bp, Artificial Sequence
  ENSG00000083535_28 (sequence is synthesized)
agctcagccagtaattcagatatggtgaaacagagccataaacatgaatttctaagtaataattaacagtgaatttaacaattatgggtgtaatataccattcaagatagatgtgcttac

SEQ ID NO: 83847 - DNA, 120 bp, Artificial Sequence
  ENSG00000083535_29 (sequence is synthesized)
gaacaacttctaaatcatcgtgaggtatttttcctattttgtcataattgtaatcattttaggcttttttaaaaactgctatcaggttaaaattattggatcccagttgtgcatgttcat

SEQ ID NO: 83848 - DNA, 120 bp, Artificial Sequence
  ENSG00000083535_30 (sequence is synthesized)
taatgacttctcttatttatgtctcactgtaattttgtccttttttattcaacttttgatatacttcttagagttaattcttattcctagaataaccccttcttgttgtgttgatatctg

SEQ ID NO: 83849 - DNA, 120 bp, Artificial Sequence
  ENSG00000083535_31 (sequence is synthesized)
tcactgaatttccccatattatttaataataatctgttttatcttattctgcaactagacagttaatttccttagtgtgcctctcgtcttctttatcaatgtatgcccagtgcctgtagt

SEQ ID NO: 83850 - DNA, 120 bp, Artificial Sequence
  ENSG00000083535_32 (sequence is synthesized)
gtagataatttgtgttgagctttaaagttcataaaattattttcttttcttcatttgttccctaccaaaattcttttagagtaaatataattcctattttatagatggagaaatgagttt

SEQ ID NO: 83851 - DNA, 120 bp, Artificial Sequence
  ENSG00000083535_33 (sequence is synthesized)
taagtggcttgcccatggcagttagtaactaagagataagttctgttttgttttgtttttttcctttaaggtttattgagttataatctacaaagaataaaattaaccttttttagcaga

SEQ ID NO: 83852 - DNA, 120 bp, Artificial Sequence
  ENSG00000083544_0 (sequence is synthesized)
ggggtctcaagtaggaggcctccccatcacccccaccccagccccccaccacccccggcctaagcagctaccatggcccaggtggccggcgcggcgttgtcccaggcgggttggtatctt

SEQ ID NO: 83853 - DNA, 120 bp, Artificial Sequence
  ENSG00000083544_1 (sequence is synthesized)
tcagatgaaggcattgaagcttgcacaagctctccagacaaagtcaatgtaaatgacatcatcctgattgctctcaatacagatctgagaacaattggcaagaaattcctccccagtgac

SEQ ID NO: 83854 - DNA, 120 bp, Artificial Sequence
  ENSG00000083544_2 (sequence is synthesized)
atcaatagtggaaaggtagaaaagctcgaaggtccatgtgttttgcaaattcaaaaaattcgcaatgttgctgcaccaaaggataatgaagaatctcaggctgcaccaaggatgctgcga

SEQ ID NO: 83855 - DNA, 120 bp, Artificial Sequence
  ENSG00000083544_3 (sequence is synthesized)
ttacagatgactgatggtcatataagttgcacagcagtagaatttagttatatgtcaaaaataagcctgaacacaccacctggaactaaagttaagctctcaggcattgttgacataaaa

SEQ ID NO: 83856 - DNA, 120 bp, Artificial Sequence
  ENSG00000083544_4 (sequence is synthesized)
aatggattcctgctcttgaatgactctaacaccacagttcttggtggtgaagtggaacaccttattgagaaatgggagttacagagaagcttatcaaaacacaatagaagcaatattgga

SEQ ID NO: 83857 - DNA, 120 bp, Artificial Sequence
  ENSG00000083544_5 (sequence is synthesized)
actgaaggtggaccaccgccttttgtgccttttggacagaagtgtgtatctcatgtccaagtggatagcagagaacttgatcgaagaaaaacattgcaagttacaatgcctgtcaaacct

SEQ ID NO: 83858 - DNA, 120 bp, Artificial Sequence
  ENSG00000083544_6 (sequence is synthesized)
acaaatgataatgatgaatttgaaaagcaaaggacggctgctattgctgaagttgcaaagagcaaggaaaccaagacatttggaggaggtggtggtggtgctagaagtaatctcaatatg

SEQ ID NO: 83859 - DNA, 120 bp, Artificial Sequence
  ENSG00000083544_7 (sequence is synthesized)
aatgctgctggtaaccgaaatagggaagttttacagaaagaaaagtcaaccaaatcagagggaaaacatgaaggtgtctatagagaactggttgatgagaaagctctgaagcacataacg

SEQ ID NO: 83860 - DNA, 120 bp, Artificial Sequence
  ENSG00000083544_8 (sequence is synthesized)
gaaatgggcttcagtaaggaagcatcgaggcaagctcttatggataatggcaacaacttagaagcagcactgaacgtacttcttacaagcaataaacagaaacctgttatgggtcctcct

SEQ ID NO: 83861 - DNA, 120 bp, Artificial Sequence
  ENSG00000083544_9 (sequence is synthesized)
ctgagaggtagaggaaaaggcagggggcgaataagatctgaagatgaagaggacctgggaaatgcaaggccatcagcaccaagcacattatttgatttcttggaatctaaaatgggaact

SEQ ID NO: 83862 - DNA, 120 bp, Artificial Sequence
  ENSG00000083544_10 (sequence is synthesized)
atcaaatactgagcaaaatggagtaaaagataataatcatctgagacatcctcctcgaaatgataccaggcagccaagaaatgaaaaaccgcctcgttttcaaagagactcccaaaattc

SEQ ID NO: 83863 - DNA, 120 bp, Artificial Sequence
  ENSG00000083544_11 (sequence is synthesized)
aaagtcagttttagaaggcagtggattacctagaaatagaggttctgaaagaccaagtacttcttcagtatctgaagtatgggctgaagacagaatcaaatgtgatagaccgtattctag

SEQ ID NO: 83864 - DNA, 120 bp, Artificial Sequence
  ENSG00000083544_12 (sequence is synthesized)
atatgacagaactaaagatacttcatatcctttaggttctcagcatagtgatggtgcttttaaaaaaagagataactctatgcaaagcagatcaggaaaaggtccctcctttgcagaggc

SEQ ID NO: 83865 - DNA, 120 bp, Artificial Sequence
  ENSG00000083544_13 (sequence is synthesized)
aaaagaaaatccacttcctcaaggatctgtagattataataatcaaaaacgtggaaaaagagaaagccaaacatctattcctgattatttttatgacaggaaatcacaaacaataaataa

SEQ ID NO: 83866 - DNA, 120 bp, Artificial Sequence
  ENSG00000083544_14 (sequence is synthesized)
tgaagctttcagtggtataaaaattgaaaaacattttaatgtaaatactgattatcagaatccagttcgaagtaatagtttcattggtgttccaaatggagaagtagaaatgccactgaa

SEQ ID NO: 83867 - DNA, 120 bp, Artificial Sequence
  ENSG00000083544_15 (sequence is synthesized)
aggaagacgaataggacctattaagccagcaggacctgtcacagctgtaccctgtgatgataaaatattttacaatagtgggcccaaacgaagatctgggccaattaagccagaaaaaat

SEQ ID NO: 83868 - DNA, 120 bp, Artificial Sequence
  ENSG00000083544_16 (sequence is synthesized)
actagaatcatctattcctatggagtatgcaaaaatgtggaaacctggagatgaatgttttgcactttattgggaagacaacaagttttaccgggcagaagttgaagccctccattcttc

SEQ ID NO: 83869 - DNA, 120 bp, Artificial Sequence
  ENSG00000083544_17 (sequence is synthesized)
gggtatgacagcagttgttaaattcattgactacggaaactatgaagaggtgctactgagcaatatcaagcccattcaaacagaggcatgggaggaagaaggcacctacgatcaaactct

SEQ ID NO: 83870 - DNA, 120 bp, Artificial Sequence
  ENSG00000083544_18 (sequence is synthesized)
ggagttccgtaggggaggtgatggccagccaagacgatccactcggccaacccaacagttttaccaaccaccccgggctcggaactaataggaaaagactctttgtgaagaaacgagcca

SEQ ID NO: 83871 - DNA, 120 bp, Artificial Sequence
  ENSG00000083544_19 (sequence is synthesized)
gtgactgaaacaccctggtggaaacctgttgacagaccttccactttctcttcagaataagtagctgtggtggatattattatttgaagaaagaaaaaacagattttagggtggaaaaaa

SEQ ID NO: 83872 - DNA, 120 bp, Artificial Sequence
  ENSG00000083544_20 (sequence is synthesized)
cagtcaactcacacaaagaatggaaaaaaatactgagttaaattaagcaaataccttttacaagtgaaaggaagaatttttcttctgccgtcaataaaaccattgtgctattattgtttt

SEQ ID NO: 83873 - DNA, 120 bp, Artificial Sequence
  ENSG00000083544_21 (sequence is synthesized)
acccaccctgcgccccagccctctacagcgcgggcgaagggcatcggcggggaagcggctgtggttgccagatctggcagtacagagccaaggtggcagggccgcgctaggacacggatg

SEQ ID NO: 83874 - DNA, 120 bp, Artificial Sequence
  ENSG00000083544_22 (sequence is synthesized)
gtcccagggggagggcaacaggaaaaacaagcactgacacaactgccccatttccccatgtcccctaaaagcaggttttcttgggctgaccagggcattttcactgtggtgtccgactgg

SEQ ID NO: 83875 - DNA, 120 bp, Artificial Sequence
  ENSG00000083544_23 (sequence is synthesized)
ggcaactcgatctgcccgcggggactcaaaaaagcttgagctgcattttttctttgcgtccgggcggaccaaaaggcgaggtgaagggaacgagtgtttataagaaagtaaacttttgtg

SEQ ID NO: 83876 - DNA, 120 bp, Artificial Sequence
  ENSG00000083544_24 (sequence is synthesized)
cagaatgggctggggacacctctgagttttgctgcccgcaacgtgacctttttagcgcggtcctggacgcgttccctcgcagccaacccgtcagtctcctcaggccttatcctgccctct

SEQ ID NO: 83877 - DNA, 120 bp, Artificial Sequence
  ENSG00000083544_25 (sequence is synthesized)
ctgaggtggccgcctgtgggcgctgcaaacgccacacttttgctctacgaagaacctcctcgcgactttccaaggtatctttcagatgaaggcattgaagcttgcacaagctctccagac

SEQ ID NO: 83878 - DNA, 120 bp, Artificial Sequence
  ENSG00000083544_26 (sequence is synthesized)
gggacgaacgcggccggagcccgcgggcccataggaagttgagggcagagcagagcacagcccgcgctgcggccggagccgcctcttcttaccccttatttcaaagtacagtgtggacca

SEQ ID NO: 83879 - DNA, 120 bp, Artificial Sequence
  ENSG00000083544_27 (sequence is synthesized)
gtgtgaatctgccttccgcggcacacacacaacttctggagctaagaatgaccgcaatgtcaactcgtgggggtgctcggtagaacttttcttgaaaggatggtgttctgattttaagag

SEQ ID NO: 83880 - DNA, 120 bp, Artificial Sequence
  ENSG00000083544_28 (sequence is synthesized)
gcctttcgtgtcaagattttcaggatttgaaaacaatacaaaattatgcgaaattaggcagtttctggaattgcggccattacggttgtaatcatcccgtttaattcagtaacgcttttc

SEQ ID NO: 83881 - DNA, 120 bp, Artificial Sequence
  ENSG00000083544_29 (sequence is synthesized)
ccaggcttgcacaggcacattctgggatgaagggtaggaacggggatgaaaaagatttgcaacggctctctgcaattactgctttaggagaaagagtgaggcattaaaagaccaaacaaa

SEQ ID NO: 83882 - DNA, 120 bp, Artificial Sequence
  ENSG00000083544_30 (sequence is synthesized)
accagggggaatagtgataaaccgtacgtacagaggaacagatgagtgcactgtggaatgggagggagagttactttcctaaagtggacttggaaagatggtaaggaaaaggctttctag

SEQ ID NO: 83883 - DNA, 120 bp, Artificial Sequence
  ENSG00000083544_31 (sequence is synthesized)
cacagagctgctggagatgacacagggaagcgcttattgttttgcagaacctacacaagatctatatggttcgtgaaagatgtggatttgattttgtgaataaagtttttgatcagtaga

SEQ ID NO: 83884 - DNA, 120 bp, Artificial Sequence
  ENSG00000083544_32 (sequence is synthesized)
gggatataatcacaactgtgctttgaagaagcccctcctgattttaaaggcacttgtgttattatacaccccattttacagaggttcattctcctttaggatgatatccctgatcactac

SEQ ID NO: 83885 - DNA, 120 bp, Artificial Sequence
  ENSG00000083544_33 (sequence is synthesized)
cccattcaaacagaggcatgggtacgtgatacatattctgtacaaaggcataaactattttgaagaaaatatatagctctaaagaattagatagccatacaaaatatgcaagtggaatca

SEQ ID NO: 83886 - DNA, 120 bp, Artificial Sequence
  ENSG00000083544_34 (sequence is synthesized)
tattttgaatttacttataactggctacccctaaagtaagattttaattcaatgcttacactgaatgaactacaataaaaatgaatgcattgaattacttttcttgtataatgttttgtt

SEQ ID NO: 83887 - DNA, 120 bp, Artificial Sequence
  ENSG00000083544_35 (sequence is synthesized)
gtattatgctttggaaataggtgcccttatttacatttgccaaaaatttgtatgcgtgaaatgggtttttatgcatattttgtttttttcccagtttgttactttgaattttactaaatt

SEQ ID NO: 83888 - DNA, 120 bp, Artificial Sequence
  ENSG00000083544_36 (sequence is synthesized)
atgtccagcagctgtcaaattcaaatctctgttggatgtgcaatgtcatttattattttagttacaggtaaaattaaaaaaaacactttaagttatatacaattttacactgcatttact

SEQ ID NO: 83889 - DNA, 120 bp, Artificial Sequence
  ENSG00000083544_37 (sequence is synthesized)
gcatatatattgacgtatatatgtacagattaactataaattatctgtttgctaattattggagtagttttgttaccaaatgttatgtcaaagctgtgtgataactttgatgatgtaact

SEQ ID NO: 83890 - DNA, 120 bp, Artificial Sequence
  ENSG00000083544_38 (sequence is synthesized)
tagaacttactgactcatggagtccattttataaagaacttatgtgattttatatagattgattcttacatttaggcaaaaacaggaatacaagacatattagaattagctctgtgaagt

SEQ ID NO: 83891 - DNA, 120 bp, Artificial Sequence
  ENSG00000083544_39 (sequence is synthesized)
ttttcgtacttctttcatttctttaatttgtgagtagctgttaataaatttattgttataagccaatatcaacaaatatgttggtattttcctaaaatagcaaaatattctagaaaatta

SEQ ID NO: 83892 - DNA, 120 bp, Artificial Sequence
  ENSG00000083544_40 (sequence is synthesized)
tatcatccagagtaacttcatcattgaagggtacattgttttctcatgaactgcttttagttttggtcttctaaaatttttctgtcatatcttcagtggtaccccttctccaccttccaa

SEQ ID NO: 83893 - DNA, 120 bp, Artificial Sequence
  ENSG00000083544_41 (sequence is synthesized)
aaagagaaataaaacggcaacagaaaaacaaaaaacctaatagtagtaataatgttttgggccatggatctttattttttgcctttttgttctagagaaattattttctaaataatttat

SEQ ID NO: 83894 - DNA, 120 bp, Artificial Sequence
  ENSG00000083544_42 (sequence is synthesized)
tattccaacttttacaacataagattgctaatggctcatatgtttaattaagagatcgtttccctaactcttatcctctaaactttaattgctctttgcctaaaaactccaaatcatcaa

SEQ ID NO: 83895 - DNA, 120 bp, Artificial Sequence
  ENSG00000083544_43 (sequence is synthesized)
cattttaatctagttttgatgatgaaagtaattatttattgaatctgtatttctacaagttgagtcctggtttgctatttattatgttcccagttgtttttagccatagcagtcaaagat

SEQ ID NO: 83896 - DNA, 120 bp, Artificial Sequence
  ENSG00000083544_44 (sequence is synthesized)
tgaaaatacaattcttatgttatttacttcttactttttagaagacttagtaagagattaattttattcttctctccctaaagaaaaatttacttttcttacgtggcttcttctctcctt

SEQ ID NO: 83897 - DNA, 120 bp, Artificial Sequence
  ENSG00000083544_45 (sequence is synthesized)
ccttttgctgttccagggtggccatagctgatgagcacatttcttattccttactgtagctcttctattcagaggtgtttggtcctgaagtgatcattttctttctacagtcagtgactt

SEQ ID NO: 83898 - DNA, 120 bp, Artificial Sequence
  ENSG00000083544_46 (sequence is synthesized)
ttcctatttctcccttaagagtcctcattgctttatccttgattttaggtctgtataaacttagctggacaataaatttatcaggtgtacagctcatttagtgattctgttctgaactac

SEQ ID NO: 83899 - DNA, 120 bp, Artificial Sequence
  ENSG00000083544_47 (sequence is synthesized)
agcaatactttcatattcttcctacttatttgtgaatatttatcctttattatgtcatttattaacctattttctttctctgcagtcaacttagaaatcttttataaaatatttgaaata

SEQ ID NO: 83900 - DNA, 120 bp, Artificial Sequence
  ENSG00000083544_48 (sequence is synthesized)
ttttacagaaagaagcaggatagaatcactaaatcttttggagattctggtatttcttttctcctacttttataatcaagtggttgttgacgttttatgaatttgcgtaggttactataa

SEQ ID NO: 83901 - DNA, 120 bp, Artificial Sequence
  ENSG00000083544_49 (sequence is synthesized)
cagacatctctggatcatgcacattatgatcagcctttcttctttatctgcataaataattaacttagttgagagaaatatctcctcgaaatatagaggccaccagcttaacatatctca

SEQ ID NO: 83902 - DNA, 120 bp, Artificial Sequence
  ENSG00000083544_50 (sequence is synthesized)
acctatttctattttaaaaaatatttgtgtgcatatagatgtaaaaaaaccctgaagaaatatagtctgtgttgctgtcagtacatgcaatgtagagttcatatagaattctcttagccc

SEQ ID NO: 83903 - DNA, 120 bp, Artificial Sequence
  ENSG00000083544_51 (sequence is synthesized)
ctgagagtattgaaagtgttaatgttggggtctttgagtactttttaaaaattttggtaagaggaaactgtaacaagttttaagtcaaaaatgtacaaaattatcaaaaaacaaaacatt

SEQ ID NO: 83904 - DNA, 120 bp, Artificial Sequence
  ENSG00000083544_52 (sequence is synthesized)
cactgtaccaataagaaggtaactgtaactgataagtcatactagaaaaattaaagggctgcaaagctgcagggaaatggttagagaggccttagcacaattacactatggattgtggaa

SEQ ID NO: 83905 - DNA, 120 bp, Artificial Sequence
  ENSG00000083544_53 (sequence is synthesized)
tttttaattttttaacttgtgcactatatatgtgcactacaattttttttattgtgaaatggtattgtatctttcattaagatttatgtttgtattgccacaagattttggaaaactctt

SEQ ID NO: 83906 - DNA, 120 bp, Artificial Sequence
  ENSG00000083544_54 (sequence is synthesized)
gttttcctaaatgtagcagtgatcatttagtgaagatttttttaaactagtttgcagaaaaacagtcaaaaaagcctgcatataagccaaaagcctttgtagaaaattagttgcttgtgt

SEQ ID NO: 83907 - DNA, 120 bp, Artificial Sequence
  ENSG00000083544_55 (sequence is synthesized)
tgtcttttaaaagtataagcataaatcattaaatagaaagcatgatatatgaagtgactcgatgactaagttaataccttgttgtatggaaaattaaaataaaaatcaagttaatacttt

SEQ ID NO: 83908 - DNA, 120 bp, Artificial Sequence
  ENSG00000083544_56 (sequence is synthesized)
cagagaatactcaaggcacaaccccacatatcatacagattcttccttgcctcttgtaaaaaatcagcaagagaatgttgtattagaatgacatttttacataagtatgggatgtaattt

SEQ ID NO: 83909 - DNA, 120 bp, Artificial Sequence
  ENSG00000083544_57 (sequence is synthesized)
ttgtgtatttgttacagaatgttgaaggtgctattcaattggaataacttaagaattttgaaaagtaggaatggacccttaattgtgtgttacagtttttcagatgaaattatagagctt

SEQ ID NO: 83910 - DNA, 80 bp, Artificial Sequence
  ENSG00000083544_58 (sequence is synthesized)
tgtgtgttacagtttttcagatgaaattatagagcttttctgcatttctgcttcacctgtataaaaatagttaagaatat

SEQ ID NO: 83911 - DNA, 68 bp, Artificial Sequence
  ENSG00000083544_59 (sequence is synthesized)
tgaccaatgtggtgaaaccctgtctctacaaaatacaagaattagccaggcatgatggcggctggtag

SEQ ID NO: 83912 - DNA, 69 bp, Artificial Sequence
  ENSG00000083544_60 (sequence is synthesized)
gggagaatagcttgaacctggtgacagtgggactgtgtctcaaaaatatatatatataaaataaaaata

SEQ ID NO: 83913 - DNA, 120 bp, Artificial Sequence
  ENSG00000083635_0 (sequence is synthesized)
acagtcgcgtgctagactccggacccgccagtggtatggctgagccgactagtgatttcgagactcctatcgggtggcatgcgtctcccgagctgactcccacgttagggcccctgagcg

SEQ ID NO: 83914 - DNA, 120 bp, Artificial Sequence
  ENSG00000083635_1 (sequence is synthesized)
acactgccccgccgcgggacagctggatgttctgggcaatgctgccgccaccgccaccaccacttacgtcctcgcttcccgcagccgggtcaaagccttcctctgagtcgcagcccccca

SEQ ID NO: 83915 - DNA, 120 bp, Artificial Sequence
  ENSG00000083635_2 (sequence is synthesized)
tggaggcccagtctctccccggggctccgccccccttcgacgcccagattcttcccggggcgcaaccccccttcgacgcccagtctccccttgattctcagcctcaacccagcggccagc

SEQ ID NO: 83916 - DNA, 120 bp, Artificial Sequence
  ENSG00000083635_3 (sequence is synthesized)
cttggaatttccatgcttccacatcgtggtattggagacagtcttctgataggtttcctcggcatcagaagtccttcaaccctgcagttaaaaattcttattatccacgaaagtatgatg

SEQ ID NO: 83917 - DNA, 120 bp, Artificial Sequence
  ENSG00000083635_4 (sequence is synthesized)
caaaattcacagacttcagcttacctcccagtagaaaacagaaaaaaaagaaaagaaaggaaccagtttttcactttttttgtgatacctgtgatcgtggttttaaaaatcaagaaaagt

SEQ ID NO: 83918 - DNA, 120 bp, Artificial Sequence
  ENSG00000083635_5 (sequence is synthesized)
atgacaaacacatgtctgaacatacaaaatgccctgaattagattgctcttttactgcacacgagaagattgtccagttccattggagaaatatgcatgctcctggcatgaagaagatca

SEQ ID NO: 83919 - DNA, 120 bp, Artificial Sequence
  ENSG00000083635_6 (sequence is synthesized)
agttagacactccagaggaaattgcacggtggagggaagaaagaaggaaaaactatccaactctggccaatattgaaaggaagaagaagttaaaacttgaaaaggagaagagaggagcag

SEQ ID NO: 83920 - DNA, 120 bp, Artificial Sequence
  ENSG00000083635_7 (sequence is synthesized)
tattgacaacaacacaatatggcaagatgaaggggatgtccagacattcacaaatggcaaagatcagaagtcctggcaagaatcacaaatggaaaaacgacaattctagacagagagcag

SEQ ID NO: 83921 - DNA, 120 bp, Artificial Sequence
  ENSG00000083635_8 (sequence is synthesized)
tcactggatcaggcagtcacttgtgtgatttgaagctagaaggtccaccggaggcaaatgcagatcctcttggtgttttgataaacagtgattctgagtctgataaggaggagaaaccac

SEQ ID NO: 83922 - DNA, 120 bp, Artificial Sequence
  ENSG00000083635_9 (sequence is synthesized)
aacattctgtgatacccaaggaagtgacaccagccctatgctcactaatgagtagctatggcagtctttcagggtcagagagtgagccagaagaaactcccatcaagactgaagcagacg

SEQ ID NO: 83923 - DNA, 120 bp, Artificial Sequence
  ENSG00000083635_10 (sequence is synthesized)
ttttggcagaaaaccaggttcttgatagcagtgctcctaagagtccaagtcaagatgttaaagcaactgttagaaatttttcagaagccaagagtgagaaccgaaagaaaagctttgaaa

SEQ ID NO: 83924 - DNA, 120 bp, Artificial Sequence
  ENSG00000083635_11 (sequence is synthesized)
aaacaaaccctaagaggaaaaaagattatcacaactatcaaacgttattcgaaccaagaacacaccatccatatctcttggaaatgcttctagctccggacattcgacatgaaagaaatg

SEQ ID NO: 83925 - DNA, 120 bp, Artificial Sequence
  ENSG00000083635_12 (sequence is synthesized)
tgattttgcagtgtgttcggtacatcatcaaaaaagacttttttggactggatactaattctgcgaaaagtaaagatgtataggcatctggtgtttcagcatacataactgaagcatgtg

SEQ ID NO: 83926 - DNA, 120 bp, Artificial Sequence
  ENSG00000083635_13 (sequence is synthesized)
aaacagtatcatcctcgttagtagaggaaaaccaaaacccttttttccgtcaaaattggatttgtaattaaattgtaagcctcgtaggatgtatgttggaattttaagtctttcctttgg

SEQ ID NO: 83927 - DNA, 120 bp, Artificial Sequence
  ENSG00000083635_14 (sequence is synthesized)
ttctatgcaaataaaaaaataactgattttttaagactgtgtctgtattgttgggattgaatctagtatttgctgggagaattttttctttgtatttattttaatgtattgttctcatgt

SEQ ID NO: 83928 - DNA, 120 bp, Artificial Sequence
  ENSG00000083635_15 (sequence is synthesized)
aagaatgactgatgttgtgttagttaagaattgaagataggtttagcagtaaagaagaaagcttttaaaaggattgattcagctaagcaaagttgggcagagaaatacagccattttgtt

SEQ ID NO: 83929 - DNA, 120 bp, Artificial Sequence
  ENSG00000083635_16 (sequence is synthesized)
tttaatgcagaaaaggaagatgttctgtagcaagggggaatattttaaaaataaaccagatcaaattaatacaatcagaaggtttcgaaatgtaaatattccttatttaagacatgttta

SEQ ID NO: 83930 - DNA, 120 bp, Artificial Sequence
  ENSG00000083635_17 (sequence is synthesized)
aattcacctactagcacgacttacatagctcaaatattgaatgtttaaaatattaatacagatggggcctctttatgtttagataaaattgaagtacttaattgaagctttttaaaaatt

SEQ ID NO: 83931 - DNA, 120 bp, Artificial Sequence
  ENSG00000083635_18 (sequence is synthesized)
gtaaagtaaatgaaagctattgagatctttttgtctcctataataccagggaatttgagcttgtgttctagtcattgtactagctgtagctattggtctgtccttttgacatacagctaa

SEQ ID NO: 83932 - DNA, 120 bp, Artificial Sequence
  ENSG00000083635_19 (sequence is synthesized)
aagggactaaatttgtaaaaaattagtttgttatagttgaagattaacttttcctaacattgtgattattgaagttcatgaatcttgctgtcaaggaagaaaggtaagaaagctgatagc

SEQ ID NO: 83933 - DNA, 120 bp, Artificial Sequence
  ENSG00000083635_20 (sequence is synthesized)
tcctccatgttggtaaaatcctctccagaatcttggaacacctggcatgtgaccctagtgacgtcacagacctgagatgaagattcatgtttagccagtgttttccagccttgtacccac

SEQ ID NO: 83934 - DNA, 120 bp, Artificial Sequence
  ENSG00000083635_21 (sequence is synthesized)
catacagatctgtttattctgtttcaccctactcctccagtgagccccatattttgggaaattatctgccttatacattaactaattcaattcatgtaacactgttgagtgcttactctt

SEQ ID NO: 83935 - DNA, 120 bp, Artificial Sequence
  ENSG00000083635_22 (sequence is synthesized)
tgtacctctattgtgcctatattaaaggtatacaaataaataaggccatgtctgacttcaaggaactcagtttaattttgatatattcaaagatgtgattcccaaccaactcaggatgaa

SEQ ID NO: 83936 - DNA, 120 bp, Artificial Sequence
  ENSG00000083635_23 (sequence is synthesized)
gtaactagtgttacaactgagttgatattctaaaatataacacagtttgtacttttattactagttagcatacacattttataggcttatgggttaataaatgaattcatggactcctgg

SEQ ID NO: 83937 - DNA, 120 bp, Artificial Sequence
  ENSG00000083635_24 (sequence is synthesized)
actactttcattgatgaccatatctccagggatgttgttgatccccacactgccttaaggtatattatagaaacagttttattttccatttttcttgtttcctgataataaatgtattta

SEQ ID NO: 83938 - DNA, 120 bp, Artificial Sequence
  ENSG00000083635_25 (sequence is synthesized)
ggactgaaaatactcctgagtactcccttggctgtatgtctgacagtctttagctatggtgactattgtttatttttaatgggtatttcagattccaagtgtatttaaaatttctaagga

SEQ ID NO: 83939 - DNA, 120 bp, Artificial Sequence
  ENSG00000083635_26 (sequence is synthesized)
gatataatatagcctgtatggtttctactttatggaattatatggtcaatatttgtaaatattctatgagttttgggtgggtagaggggtgctttgcctgttttgggtacaggttttttt

SEQ ID NO: 83940 - DNA, 120 bp, Artificial Sequence
  ENSG00000083635_27 (sequence is synthesized)
ggatttagcttgttaattgttcaaactttctgccttctacattcctatcttattgttcgtttaatcagtttctgaaatgtaagcattacatgactattggtgagttgtgccttttataac

SEQ ID NO: 83941 - DNA, 120 bp, Artificial Sequence
  ENSG00000083635_28 (sequence is synthesized)
tgaaatactttactttttctcatatcctctataattgacttctattttccttaatcaaaccagctctgggaaatttaatacatttatattaattgagattattaaaacatttggactatt

SEQ ID NO: 83942 - DNA, 120 bp, Artificial Sequence
  ENSG00000083642_0 (sequence is synthesized)
gccattttgaagcggagaggaggaggaacggcagggctggctgcggaaggggagggggggggagaaggcgattggatgcggcggcggcggcggatcccggagagccccggagtgagcgga

SEQ ID NO: 83943 - DNA, 120 bp, Artificial Sequence
  ENSG00000083642_1 (sequence is synthesized)
gtagcgagtcggcaacccggaggggtagaaatatttctgtcatggctcattcaaagactaggaccaatgatggaaaaattacatatccgcctggggtcaaggaaatatcagataaaatat

SEQ ID NO: 83944 - DNA, 120 bp, Artificial Sequence
  ENSG00000083642_2 (sequence is synthesized)
ctaaagaggagatggtgagacgattaaagatggttgtgaaaacttttatggatatggaccaggactctgaagaagaaaaggagctttatttaaacctagctttacatcttgcttcagatt

SEQ ID NO: 83945 - DNA, 120 bp, Artificial Sequence
  ENSG00000083642_3 (sequence is synthesized)
tttttctcaagcatcctgataaagatgttcgcttactggtagcctgctgccttgctgatattttcaggatttatgctcctgaagctccttacacatcccctgataaactaaaggatatat

SEQ ID NO: 83946 - DNA, 120 bp, Artificial Sequence
  ENSG00000083642_4 (sequence is synthesized)
ttatgtttataacaagacagttgaaggggctagaggatacaaagagcccacaattcaataggtatttttatttacttgagaacattgcttgggtcaagtcatataacatatgctttgagt

SEQ ID NO: 83947 - DNA, 120 bp, Artificial Sequence
  ENSG00000083642_5 (sequence is synthesized)
tagaagatagcaatgaaattttcacccagctatacagaaccttattttcagttataaacaatggccacaatcagaaagtccatatgcacatggtagaccttatgagctctattatttgtg

SEQ ID NO: 83948 - DNA, 120 bp, Artificial Sequence
  ENSG00000083642_6 (sequence is synthesized)
aaggtgatacagtgtctcaggagcttttggatacggttttagtaaatctggtacctgctcataagaatttaaacaagcaagcatatgatttggcaaaggctttactgaagaggacagctc

SEQ ID NO: 83949 - DNA, 120 bp, Artificial Sequence
  ENSG00000083642_7 (sequence is synthesized)
aagctattgagccatatattaccaatttttttaatcaggttctgatgcttgggaaaacatctatcagcgatttgtcagagcatgtctttgacttaattttggagctctacaatattgata

SEQ ID NO: 83950 - DNA, 120 bp, Artificial Sequence
  ENSG00000083642_8 (sequence is synthesized)
gtcatttgctgctctctgttttaccccagcttgaatttaaattaaagagcaatgataatgaggagcgcctacaagttgttaaactactggcaaaaatgtttggggcaaaggattcagaat

SEQ ID NO: 83951 - DNA, 120 bp, Artificial Sequence
  ENSG00000083642_9 (sequence is synthesized)
tggcttctcaaaacaagccactttggcagtgctacttgggcaggtttaatgatatccatgtaccaatccgcctggaatgtgtgaaatttgctagccattgtctcatgaaccatcctgatt

SEQ ID NO: 83952 - DNA, 120 bp, Artificial Sequence
  ENSG00000083642_10 (sequence is synthesized)
tagcaaaagacttaacagagtatcttaaagtgaggtcacatgaccctgaggaagctattagacatgatgttattgtgtcaatagttacagctgctaaaaaggatattcttctggtcaatg

SEQ ID NO: 83953 - DNA, 120 bp, Artificial Sequence
  ENSG00000083642_11 (sequence is synthesized)
atcacttacttaattttgtgagagagagaacattagacaaacgatggagagtacgcaaagaagccatgatgggacttgcccaaatttataagaaatatgctttacagtcagcagctggaa

SEQ ID NO: 83954 - DNA, 120 bp, Artificial Sequence
  ENSG00000083642_12 (sequence is synthesized)
aagatgctgcaaaacagatagcatggatcaaagacaaattgctacatatatattatcaaaatagtattgatgatcgactacttgttgaacggatctttgctcaatacatggttcctcaca

SEQ ID NO: 83955 - DNA, 120 bp, Artificial Sequence
  ENSG00000083642_13 (sequence is synthesized)
atttagaaactacagaacggatgaaatgcttatattacttgtatgccacactggatttaaatgctgtgaaagcattgaatgaaatgtggaaatgtcaaaatctgctccgacatcaagtaa

SEQ ID NO: 83956 - DNA, 120 bp, Artificial Sequence
  ENSG00000083642_14 (sequence is synthesized)
aggatttgcttgacttgattaagcaacccaaaacagatgccagtgtcaaggccatattttcaaaagtgatggttattacaagaaatttacctgatcctggtaaggctcaggatttcatga

SEQ ID NO: 83957 - DNA, 120 bp, Artificial Sequence
  ENSG00000083642_15 (sequence is synthesized)
agaaattcacacaggtgttagaagatgatgagaaaataagaaagcagttagaagtacttgttagtccaacatgctcctgcaagcaggctgaaggttgtgtgcgtgaaataactaagaagt

SEQ ID NO: 83958 - DNA, 120 bp, Artificial Sequence
  ENSG00000083642_16 (sequence is synthesized)
tgggcaaccccaaacagcctacaaatcctttcctggaaatgatcaagtttctcttggagaggatagcacctgtgcacatagataccgaatctatcagtgctcttattaaacaagtgaaca

SEQ ID NO: 83959 - DNA, 120 bp, Artificial Sequence
  ENSG00000083642_17 (sequence is synthesized)
aatcaatagatggaacagcagatgatgaagatgagggtgttccaactgatcaagccatcagagcaggtcttgaactgcttaaggtactctcatttacacatcccatctcatttcattctg

SEQ ID NO: 83960 - DNA, 120 bp, Artificial Sequence
  ENSG00000083642_18 (sequence is synthesized)
ctgaaacatttgaatcattactggcttgtctgaaaatggatgatgaaaaagtagcagaagctgcactacaaattttcaaaaacacaggaagcaaaattgaagaggattttccacacatca

SEQ ID NO: 83961 - DNA, 120 bp, Artificial Sequence
  ENSG00000083642_19 (sequence is synthesized)
gatcagccttgcttcctgttttacatcacaaatctaaaaaaggacccccccgtcaagccaaatatgccattcattgtatccatgcgatattttctagtaaagagacccagtttgcacaga

SEQ ID NO: 83962 - DNA, 120 bp, Artificial Sequence
  ENSG00000083642_20 (sequence is synthesized)
tatttgagcctctgcataagagcctagatccaagcaacctggaacatctcataacaccattggttactattggtcatattgctctccttgcacctgatcaatttgctgctcctttgaaat

SEQ ID NO: 83963 - DNA, 120 bp, Artificial Sequence
  ENSG00000083642_21 (sequence is synthesized)
ctttggtagctactttcattgtgaaagatcttctcatgaatgatcggcttccagggaaaaagacaactaaactttgggttccagatgaagaagtatctcctgagacaatggtcaaaattc

SEQ ID NO: 83964 - DNA, 120 bp, Artificial Sequence
  ENSG00000083642_22 (sequence is synthesized)
aggctattaaaatgatggttcgatggctacttggaatgaaaaataatcacagtaaatcaggaacttctaccttaagattgctaacaacaatattgcatagtgatggagacttgacagaac

SEQ ID NO: 83965 - DNA, 120 bp, Artificial Sequence
  ENSG00000083642_23 (sequence is synthesized)
aggggaaaattagtaaaccagatatgtcacgtctgagacttgctgctgggagtgctattgtgaagctggcacaagaaccctgttaccatgaaatcatcacattagaacaatatcagctat

SEQ ID NO: 83966 - DNA, 120 bp, Artificial Sequence
  ENSG00000083642_24 (sequence is synthesized)
gtgcattagctatcaacgatgaatgctatcaagtaagacaagtgtttgcccagaaacttcacaaaggcctttcccgtttacggcttccacttgagtatatggcaatctgtgccctttgtg

SEQ ID NO: 83967 - DNA, 120 bp, Artificial Sequence
  ENSG00000083642_25 (sequence is synthesized)
caaaagatcctgtaaaggagagaagagctcatgctaggcaatgtttggtgaaaaatataaatgtaaggcgggagtatctgaagcagcatgcagctgttagtgaaaaattattgtctcttc

SEQ ID NO: 83968 - DNA, 120 bp, Artificial Sequence
  ENSG00000083642_26 (sequence is synthesized)
taccagagtatgttgttccatatacaattcaccttttggcacatgacccagattatgtcaaagtacaggatattgaacaacttaaagatgttaaagaatgtctttggtttgttctggaaa

SEQ ID NO: 83969 - DNA, 120 bp, Artificial Sequence
  ENSG00000083642_27 (sequence is synthesized)
tattaatggctaaaaatgaaaataacagtcacgcttttatcagaaagatggtagaaaatattaaacaaacaaaagatgcccaaggaccagatgatgcaaaaatgaatgaaaaactgtaca

SEQ ID NO: 83970 - DNA, 120 bp, Artificial Sequence
  ENSG00000083642_28 (sequence is synthesized)
ctgtgtgtgatgttgccatgaatatcatcatgtcaaagagtactacatacagtttggaatctcctaaagacccggtactaccagctcgtttcttcactcaacctgacaagaatttcagta

SEQ ID NO: 83971 - DNA, 120 bp, Artificial Sequence
  ENSG00000083642_29 (sequence is synthesized)
acaccaaaaattatctgcctcctgaaatgaaatcatttttcactcctggaaaacctaaaacaaccaatgttctaggagctgttaacaagccactttcatcagcaggcaagcaatctcaga

SEQ ID NO: 83972 - DNA, 120 bp, Artificial Sequence
  ENSG00000083642_30 (sequence is synthesized)
ccaaatcatcacgaatggaaactgtaagcaatgcaagcagcagctcaaatccaagctctcctggaagaataaaggggaggcttgatagttctgaaatggatcacagtgaaaatgaagatt

SEQ ID NO: 83973 - DNA, 120 bp, Artificial Sequence
  ENSG00000083642_31 (sequence is synthesized)
agtgacaagagagacgactctgatcttgtaaggtctgaattggagaagcctagaggcaggaaaaaaacgcccgtcacagaacaggaggagaaattaggtatggatgacttgactaagttg

SEQ ID NO: 83974 - DNA, 120 bp, Artificial Sequence
  ENSG00000083642_32 (sequence is synthesized)
gtacaggaacagaaacctaaaggcagtcagcgaagtcggaaaagaggccatacggcttcagaatctgatgaacagcagtggcctgaggaaaagaggctcaaagaagatatattagaaaat

SEQ ID NO: 83975 - DNA, 120 bp, Artificial Sequence
  ENSG00000083642_33 (sequence is synthesized)
gaagatgaacagaatagtccgccaaaaaagggtaaaagaggccgaccaccaaaacctcttggtggaggtacaccaaaagaagagccaacaatgaaaacttctaaaaaaggaagcaaaaaa

SEQ ID NO: 83976 - DNA, 120 bp, Artificial Sequence
  ENSG00000083642_34 (sequence is synthesized)
aaatctggacctccagcaccagaggaggaggaagaagaagaaagacaaagtggaaatacggaacagaagtccaaaagcaaacagcaccgagtgtcaaggagagcacagcagagagcagaa

SEQ ID NO: 83977 - DNA, 120 bp, Artificial Sequence
  ENSG00000083642_35 (sequence is synthesized)
tctcctgaatctagtgcaattgaatccacacagtccacaccacagaaaggacgaggaagaccatcaaaaacgccatcaccatcacaaccaaaaaaaaatgtccgtgtaggacgctccaaa

SEQ ID NO: 83978 - DNA, 120 bp, Artificial Sequence
  ENSG00000083642_36 (sequence is synthesized)
caagcagctactaaggaaaatgattcaagtgaagaagtagatgtgtttcagggtagctctcctgtcgatgatattccacaggaagaaacagaggaggaggaagtttctacagtaaatgta

SEQ ID NO: 83979 - DNA, 120 bp, Artificial Sequence
  ENSG00000083642_37 (sequence is synthesized)
cggcggcgaagtgctaaaagggaacggcgatgaacaaatgtaattaataactttctctgtgaaagctttggaaaaatctttttttttttttttggtcaagcttgaggctgaataaagcct

SEQ ID NO: 83980 - DNA, 120 bp, Artificial Sequence
  ENSG00000083642_38 (sequence is synthesized)
ttgatgcacaaaatgggactgctgaagagtggacagttggaccttactttggtgaccccatacatttgtggtcacatgctttagccatacacatggtaacattgactatggagtcttgtg

SEQ ID NO: 83981 - DNA, 120 bp, Artificial Sequence
  ENSG00000083642_39 (sequence is synthesized)
aaagtgtaatgtgcgatggctatgtagacataaagaagaaacttgtaaatatcttttttcttttttttaatgtttctgatttctgaagtgcttgtatagcttttatctgcggctttaaac

SEQ ID NO: 83982 - DNA, 120 bp, Artificial Sequence
  ENSG00000083642_40 (sequence is synthesized)
tgacagtacccgactgtttattggatctattgatttgaaaagaatttgttaggatagatcttaagcagtaatctgtcagtgtttgtatttgtattctctgcaattttactgtgaaaaaaa

SEQ ID NO: 83983 - DNA, 120 bp, Artificial Sequence
  ENSG00000083642_41 (sequence is synthesized)
atttgttttcaacaattggtgtcattttcttgatgtcactatttgttggagagttaaatggtctcttccctttgtgtatcttacctagtgtttactcctgggcacccttaatcttcagag

SEQ ID NO: 83984 - DNA, 120 bp, Artificial Sequence
  ENSG00000083642_42 (sequence is synthesized)
gtgctaaattgtctgccattacaccagaaggatgcctctgataggaggacaaccatgcaaattgtgaaatagtcctgaagttcttggattactttacacctcagtattgatttgtcccag

SEQ ID NO: 83985 - DNA, 120 bp, Artificial Sequence
  ENSG00000083642_43 (sequence is synthesized)
aattttctggcctttcatggcaatgaaaattttaagaagaaagatttaaagtattttaattttaaagagtgtgttataaaataatgtactgaattctttatcccattttatcatcctttc

SEQ ID NO: 83986 - DNA, 120 bp, Artificial Sequence
  ENSG00000083642_44 (sequence is synthesized)
agtttttattaatctactgtatcaataaaattctgtaatttgaatgagtttttaatagtctagaatgttattgtgtatagatatttcctcttgaacgttatgttcagaaaatgcaaatta

SEQ ID NO: 83987 - DNA, 120 bp, Artificial Sequence
  ENSG00000083642_45 (sequence is synthesized)
cactataatataaaacctgatatatacacattagaaatattccagttctccgtaacagtgtaaagttaatcagaaagaaaaaattttattgatgcagtgtgtctttataaagctgttctt

SEQ ID NO: 83988 - DNA, 120 bp, Artificial Sequence
  ENSG00000083642_46 (sequence is synthesized)
gaaagccaagtgttttgtattttatagtgagttgcatgtttttgaaaaaaagtgctgaaaatgggatgtgctgttttctgtaaattcatatttagccatagtatatgatagattgcccca

SEQ ID NO: 83989 - DNA, 120 bp, Artificial Sequence
  ENSG00000083642_47 (sequence is synthesized)
taacatagtttttcatcaagagtttattattgtactttattttggagccaaaaaattgattctggggggtgggggcagcgtagaagtggtatatccaagtatatcagctactgtagttgt

SEQ ID NO: 83990 - DNA, 120 bp, Artificial Sequence
  ENSG00000083642_48 (sequence is synthesized)
cacagtcttgtgaactttgaatgaaattccactttgtccagattgggagaagtggaaatttatttggatttagagcaggtctttttttttcttcattgtaatctgcaaaatgtagaaata

SEQ ID NO: 83991 - DNA, 120 bp, Artificial Sequence
  ENSG00000083642_49 (sequence is synthesized)
aattacttaaggcagtatcctttatacagttgtataaactgtattttgaaccaaaacatataggttactacttaatgcttacctaatttcattttagtattttaggtgctgttatgtttt

SEQ ID NO: 83992 - DNA, 120 bp, Artificial Sequence
  ENSG00000083642_50 (sequence is synthesized)
ttcatggttaacaccagaggggaaaaaatcatattctaacttattaaatttatcacattgaatagtggaacattttcatatgatacaccattatgtttaagatatatttccaagattggt

SEQ ID NO: 83993 - DNA, 120 bp, Artificial Sequence
  ENSG00000083642_51 (sequence is synthesized)
tataatagatggggcatataataaagaagctactattttggaaaatgacattttactatttgccaatgtatattgcaattgatgtgattatttttcttttaaagatttgtttgtgtttat

SEQ ID NO: 83994 - DNA, 120 bp, Artificial Sequence
  ENSG00000083642_52 (sequence is synthesized)
gaaacagccatttattttttaaaaagtgttttgaattgtgtcttaatctctccatattcaactattcttcatttacaacaatagtgacaccagtaattatgagaggctgtcatatatcaa

SEQ ID NO: 83995 - DNA, 120 bp, Artificial Sequence
  ENSG00000083642_53 (sequence is synthesized)
agcagctcaggtgggatcaacatacattggttttgaaatgtttccttagctcggttctcccaaacacataatttctgtttcagcagtacaaaggcatgttttaaaatctataacataaag

SEQ ID NO: 83996 - DNA, 120 bp, Artificial Sequence
  ENSG00000083642_54 (sequence is synthesized)
aataaggaatagctttgtatttttgtcattgattaaattgcaccagaaatgtttatggaaatattaagaacattttataaaacatacgaaaaagtgattgtgaaggatttttatttgcat

SEQ ID NO: 83997 - DNA, 120 bp, Artificial Sequence
  ENSG00000083642_55 (sequence is synthesized)
gattatagttaagcaaatttcatttcacatttttgtaatgctgtacagcagttcacaaaaaaatgttcattgtagattttgttatgttcaatgccaatgagtctgtaattttacgacctg

SEQ ID NO: 83998 - DNA, 89 bp, Artificial Sequence
  ENSG00000083642_56 (sequence is synthesized)
agaaaaataggtgcaataatgatcaaagttttgatgtcttgagtctccatcttaggggattatcttacgtttaagcttaacatttcatg

SEQ ID NO: 83999 - DNA, 120 bp, Artificial Sequence
  ENSG00000083642_57 (sequence is synthesized)
tcttaggggattatcttacgtttaagcttaacatttcatgtagtaagatttggagagccacatactttacagtaaaattaagtgtgtataaaacattaattgctaacaattgttagcaaa

SEQ ID NO: 84000 - DNA, 120 bp, Artificial Sequence
  ENSG00000083642_58 (sequence is synthesized)
ctatttcagtgataatgttcattttgaaaatatgtactgtataacattaagaaaatatttaactccctgtaacaagttccattatgaaaatcttattcctcagtgaggttatcttgctgc

SEQ ID NO: 84001 - DNA, 120 bp, Artificial Sequence
  ENSG00000083642_59 (sequence is synthesized)
actctgtagcaaatttgtttaatctacattataataaaatttcttgctgcagtgcaacaggaggctttttcagtgatcttcactgtatatgtaaattacaaatgtggctgtaaaacttat

SEQ ID NO: 84002 - DNA, 120 bp, Artificial Sequence
  ENSG00000083642_60 (sequence is synthesized)
tccaggtattaaaggttaaattgctttctatatcttcttataacttgtaagtctgatttttaagatttccttttgtccacttgtaagaatgtcaggaatttaagaatttgtttaaattag

SEQ ID NO: 84003 - DNA, 120 bp, Artificial Sequence
  ENSG00000083642_61 (sequence is synthesized)
gcatatctctgccatcacatagtattatgtcaccataatgaacaattgctatttaaatagataaccaattttcagacacatttttggatttctgtgaagttgaataaacataaaagctaa

SEQ ID NO: 84004 - DNA, 120 bp, Artificial Sequence
  ENSG00000083642_62 (sequence is synthesized)
ctgtatttaaattccatatatttagccccattacactaggtaagataaaatttttataaacttaccttagtgattgatatctcaataaactatcttgtacatttttacaggtgcaggcaa

SEQ ID NO: 84005 - DNA, 120 bp, Artificial Sequence
  ENSG00000083642_63 (sequence is synthesized)
atcttcataaatgaataccaaatagtatattatttcctatacagactttatgatatctaaagaaatcataaggtatttttaaataatcaccacacattgaccaggttgccttgtcattcc

SEQ ID NO: 84006 - DNA, 120 bp, Artificial Sequence
  ENSG00000083642_64 (sequence is synthesized)
tgactcttggttttattcatttgtatttttattcttttggaatatttttgatgtaatatatgagacagggaccttactttgtttttattccaaatgtctatccagtaatttcaatacagt

SEQ ID NO: 84007 - DNA, 120 bp, Artificial Sequence
  ENSG00000083642_65 (sequence is synthesized)
gtattgactagtctaccttttccctgattacttgaaatattacctttttcatatgctaaatccttaattcagtctttttttctgggcttgttcaattcttacagtttgtttattccagcg

SEQ ID NO: 84008 - DNA, 120 bp, Artificial Sequence
  ENSG00000083642_66 (sequence is synthesized)
ctgttcttttcatcctttgcaatatattggattttatggaaaagaaactacaaacacctgtattttaaaatgtaatctatgtagtgtaaacattgtttaaagggttatgtcgtagtactt

SEQ ID NO: 84009 - DNA, 120 bp, Artificial Sequence
  ENSG00000083642_67 (sequence is synthesized)
ggctattttttcagaaagtaccactttaaacatgagactaagccattacaagcaattgaaaaatagagctgattgacatgaaatcttttaggatttgagttttctattcatattgttggt

SEQ ID NO: 84010 - DNA, 120 bp, Artificial Sequence
  ENSG00000083642_68 (sequence is synthesized)
gtctcaagaaacgttgatgtacctattcttttttatttgttttccttaaggcattagaaacattcatattatgaaaatactacctttttattctcacttggtgtactgatgtgcattacg

SEQ ID NO: 84011 - DNA, 120 bp, Artificial Sequence
  ENSG00000083642_69 (sequence is synthesized)
gtggagagcagtaggctgcagattttgtgctgcatagcctgagcagcaccgtgttatagtttgacataagagtaagcacaaatatatttttattaccgcatgtcattcagaaagtacttt

SEQ ID NO: 84012 - DNA, 120 bp, Artificial Sequence
  ENSG00000083642_70 (sequence is synthesized)
ggaaaagacattgctagtctaattgaatcatactaagggttaggaaattgaagtcttagagatttgctttaggttttaggaaatgtagacccttagtattccagcaaatgtagtttacaa

SEQ ID NO: 84013 - DNA, 120 bp, Artificial Sequence
  ENSG00000083642_71 (sequence is synthesized)
atattaagggttaaatgttgagaaatttgagagatctaaggggctgtatgtaattttcatttgtaccactgtttaatgagacttttaacttcatttcttccatggaaataattatatttt

SEQ ID NO: 84014 - DNA, 120 bp, Artificial Sequence
  ENSG00000083642_72 (sequence is synthesized)
ctgtttatgttttatacagaaatagtgaggacaaggttgtagaggggagaaatacacatttttttttcctacctgctgtatttcaggcactggaatttgtattatgtataactgcttttg

SEQ ID NO: 84015 - DNA, 120 bp, Artificial Sequence
  ENSG00000083642_73 (sequence is synthesized)
tgctacagtggaaaagtaggttgcagagagatctgattgcccacaaagcttaaaatatttactgtccggccttttacagaaaaagcttggcaaccctggtttaagtgacatttttcctgt

SEQ ID NO: 84016 - DNA, 120 bp, Artificial Sequence
  ENSG00000083642_74 (sequence is synthesized)
tttacatatgatgaaataaatcacacaaatgttaagttccacagaatcacacaaggaataagagggagccaggattcgcactcaatcctgcttggttccaaagcttgttctttttccact

SEQ ID NO: 84017 - DNA, 120 bp, Artificial Sequence
  ENSG00000083642_75 (sequence is synthesized)
acacgtagtaaaatacattactctcatatttacttttattacttgtaaacttttctctggaattgaaatacatcctaaaattgttggtttgtcatagcctaattggtggctctttttctc

SEQ ID NO: 84018 - DNA, 120 bp, Artificial Sequence
  ENSG00000083642_76 (sequence is synthesized)
atggcaaaattaattgatggcctcttaaattggatgaaatatggtatttatatcatatttgaaactacctattggaaatcatagtaaatctagacttctctactcagcccaactgtcatt

SEQ ID NO: 84019 - DNA, 120 bp, Artificial Sequence
  ENSG00000083642_77 (sequence is synthesized)
caagagtaaaaatgaaatgtcacttttaagcaaaaatgaagaatttgccagtcctacttgaaaaaattactaaagaataaccttattttggtaagaaaggaaattaaatctataaagaag

SEQ ID NO: 84020 - DNA, 120 bp, Artificial Sequence
  ENSG00000083642_78 (sequence is synthesized)
taataagattcaagaatttgaaacacttctataaatataaataataaaggactgtaaaaacagtaataatacagttttatttgcaaggggtgggagtgtggattaaaaagtaggtagcat

SEQ ID NO: 84021 - DNA, 120 bp, Artificial Sequence
  ENSG00000083642_79 (sequence is synthesized)
gtaggccaatatttagccagtaccatacaccactgcagtactatgtgagatttcctgagtgtccctggaatcctccttcctatggtcctaccatgcctgggcagggctggaatgtctcca

SEQ ID NO: 84022 - DNA, 120 bp, Artificial Sequence
  ENSG00000083642_80 (sequence is synthesized)
ggaccttcttgcactgcccatgattctgactggttgatgcctgatgcctttgtgaaaaattttgactgcaggtgggtcctatcagataacagcatgtaaggtaataggtaagtaatgagt

SEQ ID NO: 84023 - DNA, 120 bp, Artificial Sequence
  ENSG00000083642_81 (sequence is synthesized)
atgaaggtgttccaaggttcttttgtcatgttagtgagggcagacatcttgactaactatgttataagtgggcatttaacagtcacctctgaaagcagttaaaatgtatagcttccaaac

SEQ ID NO: 84024 - DNA, 120 bp, Artificial Sequence
  ENSG00000083642_82 (sequence is synthesized)
acagaggaacaaaaaataattaatgaaaactttaataccagaaacaaaatagaaaacaagaaaaataacaataaatacacaaagtatagttgttataaaactaaacatgtcagatatcac

SEQ ID NO: 84025 - DNA, 120 bp, Artificial Sequence
  ENSG00000083642_83 (sequence is synthesized)
ttatcacttaaatgataagtatatttgattgaattcaaaagtgaaacagtgccattcacaagagatatattgaaaaataatgccattgaaaagttaaaagtaaattccaatctggaccag

SEQ ID NO: 84026 - DNA, 120 bp, Artificial Sequence
  ENSG00000083642_84 (sequence is synthesized)
tactcaaaaggaaaggctttgattctacaaaaatggttggtgaatgaatggatatttatttgttttaagataaaatatttagggtacatatatatcattttttagatgattttcatttta

SEQ ID NO: 84027 - DNA, 120 bp, Artificial Sequence
  ENSG00000083642_85 (sequence is synthesized)
accagctttttataattagctgaccaactattatacttaccagtattttagtactttatatttatctgtggttgttttctccaaaatccattacctttttaattatgtaataataaagaa

SEQ ID NO: 84028 - DNA, 120 bp, Artificial Sequence
  ENSG00000083642_86 (sequence is synthesized)
atcacgtatatatgttatgaagcatagtaataaagtaaaaatacctatgaatctattacccaacttgtaaacttttctcccattcatcttctcccagaggtaacctctacccttgtttct

SEQ ID NO: 84029 - DNA, 120 bp, Artificial Sequence
  ENSG00000083642_87 (sequence is synthesized)
tgtttcctttaaaaattttttttaacatatacatgtatatgtatgtgtatatatgtgtatccctcagtaatatatttttgcttgtttttgaactttatgaaagaaacaattgtgtataca

SEQ ID NO: 84030 - DNA, 120 bp, Artificial Sequence
  ENSG00000083642_88 (sequence is synthesized)
taacttaaaaaagcaaagcaaagcagcaaatggcatagaaaagatctaagggagtagagtatataaggtacagtggggattatttggctatgattaaagggacagcaattaggtgaagct

SEQ ID NO: 84031 - DNA, 120 bp, Artificial Sequence
  ENSG00000083642_89 (sequence is synthesized)
tagattttctaggatctcctatacttgggtataaagaacaagtctacaatactcatattccttattgtctatacaaagttgtctcctttcttctatatagtttctaaagacaaccacttt

SEQ ID NO: 84032 - DNA, 120 bp, Artificial Sequence
  ENSG00000083642_90 (sequence is synthesized)
aagggagttttaggtctttatactgagtaattaggctgtgtactactttcttgtaagttattttcaaagtaggtcaaagggcttcactttaagcttcttcctctgcttctgacatgtagt

SEQ ID NO: 84033 - DNA, 120 bp, Artificial Sequence
  ENSG00000083642_91 (sequence is synthesized)
aatgaatcaagattgctggtgaacttctatggatgaggctagggcctcttcatatgtgtttgaataatattttcaccttttcctttagggtggtggtgatctctgtaattgttaaaatgg

SEQ ID NO: 84034 - DNA, 120 bp, Artificial Sequence
  ENSG00000083642_92 (sequence is synthesized)
ataaagaagcatagtgttcaaggagaatgttaagctggtctattagttagtttagatggtctttatttttgagcatttccgatcgaggttgtatctacctagatatttatgttgcttgat

SEQ ID NO: 84035 - DNA, 120 bp, Artificial Sequence
  ENSG00000083642_93 (sequence is synthesized)
tattgctacatggtgtatagaatttttataaagagaaaaagatgctaatactatcataaatttcacataaagtcttaatattgtacatgtatgtgtttatacttaaagtatcagaatgtc

SEQ ID NO: 84036 - DNA, 120 bp, Artificial Sequence
  ENSG00000083642_94 (sequence is synthesized)
agatatcagatgtttattcaaaggaaaatcatctttgagcagattaaatttactaataggtggatattttatctagttgggaactggtgtgtattttattaagaatagtcaagctatgaa

SEQ ID NO: 84037 - DNA, 120 bp, Artificial Sequence
  ENSG00000083642_95 (sequence is synthesized)
tcccttctatatatgacatgtttcattttctatgtatttaccttctcttgacctattgcatttttagagaaactaatacatttattaccttatatttgtttatactaagtgagcattcct

SEQ ID NO: 84038 - DNA, 120 bp, Artificial Sequence
  ENSG00000083642_96 (sequence is synthesized)
gttgtttgttgagaaactaatcttgaactcagagcctacacttaaaactgatcagcattagtgtcttttagagatgttattttctcagatttctttcctaatttggaggactcatgagtt

SEQ ID NO: 84039 - DNA, 120 bp, Artificial Sequence
  ENSG00000083642_97 (sequence is synthesized)
attaatgagttttataacagcatttgagttgtagacagtagtgaggaattcccattttctggaccttgaacaaactttgtggttattgttggtggaatgattgcctcagtactcatattt

SEQ ID NO: 84040 - DNA, 120 bp, Artificial Sequence
  ENSG00000083642_98 (sequence is synthesized)
aatgtttgtaatatgctttcattattttgtagacatttatgtctagcagtaatccagttatacttttttctcatttattttcctaatttatagttccatttttagcatcctccttcttag

SEQ ID NO: 84041 - DNA, 120 bp, Artificial Sequence
  ENSG00000083642_99 (sequence is synthesized)
aaaaatatgaaaaaattatgtaggatgatatgtacaaatacccatgtaagttttatacattataacaatttgttaacgtgtaaggtgatactgtttataaaattttttttcctgtaacat

SEQ ID NO: 84042 - DNA, 120 bp, Artificial Sequence
  ENSG00000083642_100 (sequence is synthesized)
tttattcaaaatatgcttaatctcttatcttttgttaagagagctacagaaataaatagttacatgcatgcagttcttttttaccctttgtggtttttcctaaacatataggcaatcaaa

SEQ ID NO: 84043 - DNA, 120 bp, Artificial Sequence
  ENSG00000083642_101 (sequence is synthesized)
atcttttgctaaacttaatgtttttttttttttttagaacttatttttgaaaaactttctggtcttgaggttaagaagtagattaatacagtgtgtattttttttatatcatgtcatcat

SEQ ID NO: 84044 - DNA, 120 bp, Artificial Sequence
  ENSG00000083642_102 (sequence is synthesized)
tagctctgtttctttcattataattttgggggcaattccttttcacttttgaaaatccatattgaagaccatggccattatttaaaacataatacctagtataaacatgagtttataata

SEQ ID NO: 84045 - DNA, 120 bp, Artificial Sequence
  ENSG00000083642_103 (sequence is synthesized)
aatatataatcctcatttatttaatggaaggtgtgatataaattgttatatttgtgttataaattgtgttatacattgttatgaagaaaatacaggccaggcgcagtggctcaggcctgt

SEQ ID NO: 84046 - DNA, 90 bp, Artificial Sequence
  ENSG00000083642_104 (sequence is synthesized)
atgattacttgagttcatgagtttgaggacagcttgggcaacatagcaaggcgttgtctctactttaaaaaaaaaaaaaaaaaaaaaaag

SEQ ID NO: 84047 - DNA, 120 bp, Artificial Sequence
  ENSG00000083720_0 (sequence is synthesized)
gcagtcgcgcaccgacgctcaaacgcgcgctccaacccgcagcctcctcctgcctcaccgcccgaagatggcggctctcaaactcctctcctccgggcttcggctctgcgcctctgcccg

SEQ ID NO: 84048 - DNA, 120 bp, Artificial Sequence
  ENSG00000083720_1 (sequence is synthesized)
cggatctggggcaacctggtacaagggatgtgtttgttccttttccaccagtgctcatcgccataccaagttttatacagatccagtagaagctgtaaaagacatccctgatggtgccac

SEQ ID NO: 84049 - DNA, 120 bp, Artificial Sequence
  ENSG00000083720_2 (sequence is synthesized)
ggttttggttggtggttttgggctatgtggaattccagagaatcttatagatgctttactgaaaactggagtaaaaggactaactgcagtcagcaacaatgcaggggttgacaattttgg

SEQ ID NO: 84050 - DNA, 120 bp, Artificial Sequence
  ENSG00000083720_3 (sequence is synthesized)
tttggggcttttgcttcggtccaagcagataaaacgcatggtctcttcatatgtgggagaaaatgcagaatttgaacgacagtacttatctggtgaattagaagtggagctgacaccaca

SEQ ID NO: 84051 - DNA, 120 bp, Artificial Sequence
  ENSG00000083720_4 (sequence is synthesized)
gggcacacttgcagagaggatccgtgcaggcggggctggagttcctgcattttacaccccaacagggtatgggaccctggtacaagaaggaggatcgcccatcaaatacaacaaagatgg

SEQ ID NO: 84052 - DNA, 120 bp, Artificial Sequence
  ENSG00000083720_5 (sequence is synthesized)
cagtgttgccattgccagtaagccaagagaggtgagggagttcaatggtcagcactttattttggaggaagcaattacaggggattttgctttggtgaaagcctggaaggcggaccgagc

SEQ ID NO: 84053 - DNA, 120 bp, Artificial Sequence
  ENSG00000083720_6 (sequence is synthesized)
aggaaacgtgattttcaggaaaagtgcaaggaatttcaacttgccaatgtgcaaagctgcagaaaccacagtggtagaggttgaagaaattgtggatattggagcatttgctccagaaga

SEQ ID NO: 84054 - DNA, 120 bp, Artificial Sequence
  ENSG00000083720_7 (sequence is synthesized)
catccatattcctcagatttatgtacatcgccttataaagggagaaaaatatgagaaaagaattgagcgtttatcaatccggaaagagggagatggggaagccaaatctgctaaacctgg

SEQ ID NO: 84055 - DNA, 120 bp, Artificial Sequence
  ENSG00000083720_8 (sequence is synthesized)
agatgacgtaagggaacgaatcatcaagagggccgctcttgagtttgaggatggcatgtatgctaatttgggcataggaatccctctcctggccagcaattttatcagcccaaatataac

SEQ ID NO: 84056 - DNA, 120 bp, Artificial Sequence
  ENSG00000083720_9 (sequence is synthesized)
tgttcatcttcaaagtgaaaatggagttctgggtttgggtccatatccacgacaacatgaagctgatgcagatctcatcaatgcaggcaaggaaacagttactattcttccaggagcctc

SEQ ID NO: 84057 - DNA, 120 bp, Artificial Sequence
  ENSG00000083720_10 (sequence is synthesized)
ttttttctccagcgatgaatcatttgcaatgattagaggtggacacgtcgatctgacaatgctaggagcgatgcaggtttccaaatatggtgacctggctaactggatgatacctgggaa

SEQ ID NO: 84058 - DNA, 120 bp, Artificial Sequence
  ENSG00000083720_11 (sequence is synthesized)
gatggtgaaaggaatgggaggtgctatggatttagtgtccagtgcgaaaaccaaagtggtggtcaccatggagcattctgcaaagggaaatgcacataaaatcatggagaaatgtacatt

SEQ ID NO: 84059 - DNA, 120 bp, Artificial Sequence
  ENSG00000083720_12 (sequence is synthesized)
accattgactggaaagcaatgtgtcaaccgcattattactgaaaaggctgtgtttgatgtggacaagaagaaagggttgactctgattgagctctgggaaggcctgacagtggatgacgt

SEQ ID NO: 84060 - DNA, 120 bp, Artificial Sequence
  ENSG00000083720_13 (sequence is synthesized)
gcagatcgcaaattgaaatatggatatttgtaccaggctgcgtgtttttcattttaaacacacaagatttaattgaaaggacatcaataatcataattgtgtatttaacaggtggttttt

SEQ ID NO: 84061 - DNA, 120 bp, Artificial Sequence
  ENSG00000083720_14 (sequence is synthesized)
tattagttttcttgtgtttcagactttatgcagccatataaactgttctctaggcatgctgtgacattttaataaaaagcaaaaggagcatttataattatctcatttgttaaggctgag

SEQ ID NO: 84062 - DNA, 120 bp, Artificial Sequence
  ENSG00000083720_15 (sequence is synthesized)
aaggttgtttttataataggtaattatattgaatgcattttcactgaatatggtatgtatgctaaattatatgaacctttccccaagaagggccctagaaattgatgtggctttcctctt

SEQ ID NO: 84063 - DNA, 120 bp, Artificial Sequence
  ENSG00000083720_16 (sequence is synthesized)
aaatattaattattagtcctgaaagaaagataacatatgtgatttttgtggttaggagagttgctgtcatgattgttttttcttcagcctcctctgacttttcttttggggcttcagatt

SEQ ID NO: 84064 - DNA, 120 bp, Artificial Sequence
  ENSG00000083720_17 (sequence is synthesized)
ttatgattacatcttgtccccctagaacatcccccttcctcccatactgcttttaaacagatgcccaagaaggcaagcaggaatgcctcttgtgggggagggcagggagaaataactagt

SEQ ID NO: 84065 - DNA, 120 bp, Artificial Sequence
  ENSG00000083720_18 (sequence is synthesized)
tcaaaccaactatctatctatgctttgcaaagactaaggcgtattataggaagagggctagaaacctaactgattcttctcagttttctcattttaaaacagcccagtattcctttgtat

SEQ ID NO: 84066 - DNA, 120 bp, Artificial Sequence
  ENSG00000083720_19 (sequence is synthesized)
cctcaagggtccttgagaatacttctgttattgagaccctgtgggctacttgtactgtacctcctctcaagccaagaagggctgtgggataatttaccatgaatccttagtagcaatgac

SEQ ID NO: 84067 - DNA, 120 bp, Artificial Sequence
  ENSG00000083720_20 (sequence is synthesized)
agcagagttaaaaaataaaaggtgttttactttcaggctcttgttttggttcagaggagattttaaatattgaatgacacttctacagaacaacggtttttcttctgccaaggctacttc

SEQ ID NO: 84068 - DNA, 120 bp, Artificial Sequence
  ENSG00000083720_21 (sequence is synthesized)
ctttaacgaagtgcctttaattcagccttatccaactagggaaaataatgttggacaagtctaggatttgaagagtcagtgaacttttagtgtcagggaataaacatggtgggtagatta

SEQ ID NO: 84069 - DNA, 120 bp, Artificial Sequence
  ENSG00000083720_22 (sequence is synthesized)
ggtttgaaaaaaacttccttagaggtatttattctcaatacctgacaggggcccatgggaatgacttcagaagcatcccggataatagatgggtaaaaagtctaggcaccctgaagaaca

SEQ ID NO: 84070 - DNA, 120 bp, Artificial Sequence
  ENSG00000083720_23 (sequence is synthesized)
ggtgagacagctggcctctggacagaggtaggcatagtacagtacgatatatcattcctctggtcctaaatatacaaacttattcatgtttttaggtgatgatggtcattgaaactcact

SEQ ID NO: 84071 - DNA, 120 bp, Artificial Sequence
  ENSG00000083720_24 (sequence is synthesized)
tcttttcaggtgtagctacaattgtgtaatgtacaatattagagaaaggacaggctttttatgagtaacacacaccatatataaaacagcctttctggctgaccacatggttaaatgcat

SEQ ID NO: 84072 - DNA, 120 bp, Artificial Sequence
  ENSG00000083720_25 (sequence is synthesized)
accttcccagtactggggggaaaaaatgacccttcttagaatgtgcaagttccatgagagtaatatattgatatgattttgaaaagaattgttgatagttacatcttcaaacttatcatt

SEQ ID NO: 84073 - DNA, 120 bp, Artificial Sequence
  ENSG00000083720_26 (sequence is synthesized)
ccagtatgcatctttaagataatgtgattctaagtagatgactttatattcttgattgaagagtgctatacatgttaagaaatgcattaaggaatacaataaatattctaaagtgatgta

SEQ ID NO: 84074 - DNA, 120 bp, Artificial Sequence
  ENSG00000083720_27 (sequence is synthesized)
atttcccagccagaaaactatcaggagtttgttcggctgcagggtgtgaaattattcacatcgaatgttgggcattgaatatccagcccactgttaggaaaagaacccccaaaatggaat

SEQ ID NO: 84075 - DNA, 71 bp, Artificial Sequence
  ENSG00000083720_28 (sequence is synthesized)
aagcctaccaaaatgctgggattataggcctgagccaccacacccgacctcgtcgaacttgcgaggttatt

SEQ ID NO: 84076 - DNA, 120 bp, Artificial Sequence
  ENSG00000083720_29 (sequence is synthesized)
caccacacccgacctcgtcgaacttgcgaggttatttctgttttgtgccatataataattattttgatggaaattgtcattgtcctttttcttcccactctgacaggctgtgtttgatgt

SEQ ID NO: 84077 - DNA, 120 bp, Artificial Sequence
  ENSG00000083720_30 (sequence is synthesized)
agtatggaatgagctgagtcatcgtctgagtgtgttagcaaggctctgaaacacagccacatttcccagccagaaaactatcaggagtttgttcggctgcaggtggacacgtcgatctga

SEQ ID NO: 84078 - DNA, 120 bp, Artificial Sequence
  ENSG00000083720_31 (sequence is synthesized)
actttctagctagtgtttgtgttcaagtagtcacattctgcctcactgaaggaaacagtcttcctgtgtacacctgttcatagtttgttattgaaacaatgtatactgtaactttttttt

SEQ ID NO: 84079 - DNA, 120 bp, Artificial Sequence
  ENSG00000083720_32 (sequence is synthesized)
caaaaagaatttttagtgattatttctctgtcagcatggagctgatctattaggaaatcagttgtgtggtgggggaagcaagtatattttggtgtggacacgtcgatctgacaatgctag

SEQ ID NO: 84080 - DNA, 120 bp, Artificial Sequence
  ENSG00000083720_33 (sequence is synthesized)
ctgcagaaaccacagtggtagaggggaagatggtgaaaggaatgggaggtgctatggatttagtgtccagtgcgaaaaccaaagtggtggtcaccatggagcattctgcaaagggaaatg

SEQ ID NO: 84081 - DNA, 120 bp, Artificial Sequence
  ENSG00000083750_0 (sequence is synthesized)
cagctgaggcgttctccgcttagtgcctacggcatgggtcagctctttctgccacctccgccttcgcggtcctcacctctttgcgggtgaagttacctttgggtttccagaccttggggg

SEQ ID NO: 84082 - DNA, 120 bp, Artificial Sequence
  ENSG00000083750_1 (sequence is synthesized)
cctgaggcccaaactcgggacgaacccctaacccacctctcttttcctgtcattctccaactcttactttgtaccacggaatcacttggccttaaagctagccagctcggccgtgccttg

SEQ ID NO: 84083 - DNA, 120 bp, Artificial Sequence
  ENSG00000083750_2 (sequence is synthesized)
aggccaggttcgagagataaaggtaaccgtggggaaagcggccccccagtggacaaaggcggaggcaagaatagagcaggcctgagggccataggcgatgagaataggcagttgaggggt

SEQ ID NO: 84084 - DNA, 120 bp, Artificial Sequence
  ENSG00000083750_3 (sequence is synthesized)
gaaaaagaaaacaaacaaacaacaacaacaaaccctgaagagtactgaagatttagaagggactggaaaggacttgttgcgcaatggaagaatctgactctgagaaaacgacggagaaag

SEQ ID NO: 84085 - DNA, 120 bp, Artificial Sequence
  ENSG00000083750_4 (sequence is synthesized)
aaaatctggggccgagaatggatccaccactaggggaaccggaaggatcgcttgggtgggtgctaccaaatacagccatgaagaaaaaggtgctgttgatgggtaaaagtgggtctggta

SEQ ID NO: 84086 - DNA, 120 bp, Artificial Sequence
  ENSG00000083750_5 (sequence is synthesized)
agaccagcatgaggtctattatctttgcaaattatattgccagagacacacgtcgccttggcgcaacaatactagaccgtatacatagtcttcaaattaatagcagtttgagcacctact

SEQ ID NO: 84087 - DNA, 120 bp, Artificial Sequence
  ENSG00000083750_6 (sequence is synthesized)
tgttggaaatacaaagacatttgatgtagaacattctcatgttcgatttctgggaaacctggtattgaacctgtgggattgtggtgggcaagacaccttcatggaaaattatttcactag

SEQ ID NO: 84088 - DNA, 120 bp, Artificial Sequence
  ENSG00000083750_7 (sequence is synthesized)
ccaacgggacaacatcttccgaaatgtggaggttctgatttatgtctttgatgtggagagccgcgaactggaaaaggacatgcactattaccaatcatgcctggaggccattctgcagaa

SEQ ID NO: 84089 - DNA, 120 bp, Artificial Sequence
  ENSG00000083750_8 (sequence is synthesized)
ttctccagatgccaaaatattttgcttggtacacaaaatggatctggtacaggaggatcaacgggacctgatttttaaagagcgagaagaagatttgaggcgtttgtctcgcccattgga

SEQ ID NO: 84090 - DNA, 120 bp, Artificial Sequence
  ENSG00000083750_9 (sequence is synthesized)
atgttcttgtttccgaacatctatctgggatgaaaccctctataaggcttggtccagcatagtttatcagctgattcccaatgttcagcagctggaaatgaacctaaggaattttgctga

SEQ ID NO: 84091 - DNA, 120 bp, Artificial Sequence
  ENSG00000083750_10 (sequence is synthesized)
aattatcgaagctgatgaagtacttctttttgagagagctacttttctggtaatttctcactatcagtgtaaagagcagcgtgatgcccatagatttgagaaaataagcaacattattaa

SEQ ID NO: 84092 - DNA, 120 bp, Artificial Sequence
  ENSG00000083750_11 (sequence is synthesized)
gcagttcaagctgagctgcagcaagctggctgcctctttccagagtatggaagtcaggaactctaacttcgctgctttcattgacatctttacatccaacacttatgtgatggttgtgat

SEQ ID NO: 84093 - DNA, 120 bp, Artificial Sequence
  ENSG00000083750_12 (sequence is synthesized)
gtctgatccgtccattccttctgcagctactctgatcaacatccgcaatgccaggaaacactttgaaaagctggaaagagtggatggaccaaagcagtgtcttctcatgcgctaaacatt

SEQ ID NO: 84094 - DNA, 120 bp, Artificial Sequence
  ENSG00000083750_13 (sequence is synthesized)
ggggtaaggcagatgcccacgtgatcctggcctgcagttgggtggctgcggtgagatacctgggttcctgaagggcgggtggttaggtcgtaactactgcccccgccggctgactctccg

SEQ ID NO: 84095 - DNA, 120 bp, Artificial Sequence
  ENSG00000083750_14 (sequence is synthesized)
ctgaaatgttgtgatgcttattgcttctgtatttcttctctactccctagtcttaatgtttaaccttgaatgctattaacttaaatagccattgaggagttagaagatgaattgttcatg

SEQ ID NO: 84096 - DNA, 120 bp, Artificial Sequence
  ENSG00000083750_15 (sequence is synthesized)
aagtcggtgttacataaaagtaggtgatatgtaagttttctgataacaaggttctaatagtgtttaaatgtactggtaacctggttccaatagttgtgtttgcccaagcctttctcggca

SEQ ID NO: 84097 - DNA, 120 bp, Artificial Sequence
  ENSG00000083750_16 (sequence is synthesized)
tcatcttgtattccttatcagatagtaagtaacctgtaagtttggagtattactgttttctcagcatgcattaaaaatattccttaacttcaattgtaaataaacttttggtgttaggga

SEQ ID NO: 84098 - DNA, 120 bp, Artificial Sequence
  ENSG00000083750_17 (sequence is synthesized)
aagaaacagaagaagtgctgcaccaaatgctcgacatgctttgcaaacttattttgtagaggtataggtaaatttgtaccattttttcaggaataaaaagtcagcagaagttttgaaagt

SEQ ID NO: 84099 - DNA, 120 bp, Artificial Sequence
  ENSG00000083750_18 (sequence is synthesized)
acctaaaagattttaaactatttcatagccatctagatttgttgtactaaaaagaaaaataatctgcaacaaattgtttgaagaatatcaaacttaacattaagagacttgggttttgat

SEQ ID NO: 84100 - DNA, 120 bp, Artificial Sequence
  ENSG00000083750_19 (sequence is synthesized)
cttatattgggttgacatagctaccaagtcacactgaattagccagtttggtcatgattaatttgatactggtctttgtaatagcagaggtttcacttactggccatcatccattttgac

SEQ ID NO: 84101 - DNA, 120 bp, Artificial Sequence
  ENSG00000083750_20 (sequence is synthesized)
ctgttgtggtctcaatgctgattggagttgtatctagtattcaggtacttctacatgatataagctagtctgcctaagtttggatggcaataaaatgaaaatatttagggaagagattgg

SEQ ID NO: 84102 - DNA, 120 bp, Artificial Sequence
  ENSG00000083782_0 (sequence is synthesized)
gccatttcatcaggtcagagccaaaggaaagcttgaaaaatgaagacattagcaggacttgttctgggacttgtcatctttgatgctgctgtgactgccccaactctagagtccatcaac

SEQ ID NO: 84103 - DNA, 120 bp, Artificial Sequence
  ENSG00000083782_1 (sequence is synthesized)
tatgactcagaaacctatgatgccaccttagaagacctggataatttgtacaactatgaaaacatacctgttgataaagttgagattgaaatagccacagtgatgccttcagggaacaga

SEQ ID NO: 84104 - DNA, 120 bp, Artificial Sequence
  ENSG00000083782_2 (sequence is synthesized)
gagctcctcactccacccccacagcctgagaaggcccaggaagaggaagaggaggaggaatctactcccaggctgattgatggctcttctccccaggagcctgaattcacaggggttctg

SEQ ID NO: 84105 - DNA, 120 bp, Artificial Sequence
  ENSG00000083782_3 (sequence is synthesized)
gggccacacacaaatgaagactttccaacctgtcttttgtgtacttgtataagtaccaccgtgtactgtgatgaccatgaacttgatgctattcctccgctgccaaagaacaccgcttat

SEQ ID NO: 84106 - DNA, 120 bp, Artificial Sequence
  ENSG00000083782_4 (sequence is synthesized)
ttctattcccgctttaacagaattaaaaagatcaacaaaaatgactttgcaagcctaagtgatttaaaaaggattgatctgacatcaaatttaatatctgagattgatgaagatgcattc

SEQ ID NO: 84107 - DNA, 120 bp, Artificial Sequence
  ENSG00000083782_5 (sequence is synthesized)
cgaaaactgcctcaacttcgagagcttgtcctgcgtgacaacaaaataaggcagctcccagaattgccaaccactttgacatttattgatattagcaacaatagacttggaaggaaaggg

SEQ ID NO: 84108 - DNA, 120 bp, Artificial Sequence
  ENSG00000083782_6 (sequence is synthesized)
ctgtacctcactgataacaacttggaccacatccctctgccactcccagaaaatctacgagcccttcacctccagaataacaacattctggaaatgcacgaagatacgttctgcaatgtt

SEQ ID NO: 84109 - DNA, 120 bp, Artificial Sequence
  ENSG00000083782_7 (sequence is synthesized)
aaaaatttgacttatattcgtaaggcactagaggacattcgattggatggaaaccctattaatctcagcaaaactcctcaagcatacatgtgtctacctcgtctgcctgttgggagcctt

SEQ ID NO: 84110 - DNA, 120 bp, Artificial Sequence
  ENSG00000083782_8 (sequence is synthesized)
gtctaatttcagataatggttagcattacgatggctactataaataaaccattcttactgctctcttccaaaacaaaactcagcatgatactttgagattgtgttctgagagatgatatg

SEQ ID NO: 84111 - DNA, 120 bp, Artificial Sequence
  ENSG00000083782_9 (sequence is synthesized)
actacataaaatacaattaaaaatgttataatgaaaatgtagtaatttaagaaaacaccagatgagttaggaataaacctataacatttacaaaaagagcaaaactaagtgatagaaaat

SEQ ID NO: 84112 - DNA, 120 bp, Artificial Sequence
  ENSG00000083782_10 (sequence is synthesized)
atttcacacatgttcttatagatcatgtatcacttgcaagttttaggagttcatatcctatatcatttcaaattaagtacataataaagtaaaattttgaaatgaacactttaggtattt

SEQ ID NO: 84113 - DNA, 120 bp, Artificial Sequence
  ENSG00000083782_11 (sequence is synthesized)
ttgccaagatttagatgtttttaattaaacttttctcttcctttttttttcactaaagcatgtttattcccctaatccattaaagagcatgaaaaaaagaataaatgtatttgaaaatta

SEQ ID NO: 84114 - DNA, 120 bp, Artificial Sequence
  ENSG00000083782_12 (sequence is synthesized)
caccgctttacacacttcctttaaatttttacattgttaaatgttagcactgagaatgaaacttgaatgccaaagcctggttcatgaatcaatagttttttgttatttaaaaatttgaga

SEQ ID NO: 84115 - DNA, 120 bp, Artificial Sequence
  ENSG00000083782_13 (sequence is synthesized)
gtttgctttaacaattataagaaaaacaacaaataagcaatggtcatttcaaaaccatataggtgatgttttcaaatgagcaatttaaactaaatatgcataataaataattatattgta

SEQ ID NO: 84116 - DNA, 120 bp, Artificial Sequence
  ENSG00000083799_0 (sequence is synthesized)
cggaggtaaatactagggcggtgggtgtggggagccggggccggcccgggacgcgggctggggagccggggcgaggggcgacgccccgccgcccgagtttccccctttctagggtgagga

SEQ ID NO: 84117 - DNA, 120 bp, Artificial Sequence
  ENSG00000083799_1 (sequence is synthesized)
tggttctacacagccacccggagttccttagttgaaaggtgcgccctgctgtgacagcatggacaccacgttgctgaaaacatgctttgggactgccactgaatttatcttttgcggttt

SEQ ID NO: 84118 - DNA, 120 bp, Artificial Sequence
  ENSG00000083799_2 (sequence is synthesized)
tatgacaaagttattagtagtttcccttttttgaattagtattttgaagttaatatcacaatgagttcaggcttatggagccaagaaaaagtcacttcaccctactgggaagagcggatt

SEQ ID NO: 84119 - DNA, 120 bp, Artificial Sequence
  ENSG00000083799_3 (sequence is synthesized)
ttttacttgcttcttcaagaatgcagcgttacagacaaacaaacacaaaagctccttaaagtaccgaagggaagtataggacagtatattcaagatcgttctgtggggcattcaaggatt

SEQ ID NO: 84120 - DNA, 120 bp, Artificial Sequence
  ENSG00000083799_4 (sequence is synthesized)
ccttctgcaaaaggcaagaaaaatcagattggattaaaaattctagagcaacctcatgcagttctctttgttgatgaaaaggatgttgtagagataaatgaaaagttcacagagttactt

SEQ ID NO: 84121 - DNA, 120 bp, Artificial Sequence
  ENSG00000083799_5 (sequence is synthesized)
ttggcaattaccaattgtgaggagaggttcagcctgtttaaaaacagaaacagactaagtaaaggcctccaaatagacgtgggctgtcctgtgaaagtacagctgagatctggggaagaa

SEQ ID NO: 84122 - DNA, 120 bp, Artificial Sequence
  ENSG00000083799_6 (sequence is synthesized)
aaatttcctggagttgtacgcttcagaggacccctgttagcagagaggacagtctccggaatattctttggagttgaattgctggaagaaggtcgtggtcaaggtttcactgacggggtg

SEQ ID NO: 84123 - DNA, 120 bp, Artificial Sequence
  ENSG00000083799_7 (sequence is synthesized)
taccaagggaaacagctttttcagtgtgatgaagattgtggcgtgtttgttgcattggacaagctagaactcatagaagatgatgacactgcattggaaagtgattacgcaggtcctggg

SEQ ID NO: 84124 - DNA, 120 bp, Artificial Sequence
  ENSG00000083799_8 (sequence is synthesized)
gacacaatgcaggtcgaacttcctcctttggaaataaactccagagtttctttgaaggttggagaaacaatagaatctggaacagttatattctgtgatgttttgccaggaaaagaaagc

SEQ ID NO: 84125 - DNA, 120 bp, Artificial Sequence
  ENSG00000083799_9 (sequence is synthesized)
ttaggatattttgttggtgtggacatggataaccctattggcaactgggatggaagatttgatggagtgcagctttgtagttttgcgtgtgttgaaagtacaattctattgcacatcaat

SEQ ID NO: 84126 - DNA, 120 bp, Artificial Sequence
  ENSG00000083799_10 (sequence is synthesized)
gatatcatcccagagagtgtgacgcaggaaaggaggcctcccaaacttgcctttatgtcaagaggtgttggggacaaaggttcatccagtcataataaaccaaaggctacaggatctacc

SEQ ID NO: 84127 - DNA, 120 bp, Artificial Sequence
  ENSG00000083799_11 (sequence is synthesized)
tcagaccctggaaatagaaacagatctgaattattttataccttaaatgggtcttctgttgactcacaaccacaatccaaatcaaaaaatacatggtacattgatgaagttgcagaagac

SEQ ID NO: 84128 - DNA, 120 bp, Artificial Sequence
  ENSG00000083799_12 (sequence is synthesized)
cctgcaaaatctcttacagagatatctacagactttgaccgttcttcaccaccactccagcctcctcctgtgaactcactgaccaccgagaacagattccactctttaccattcagtctc

SEQ ID NO: 84129 - DNA, 120 bp, Artificial Sequence
  ENSG00000083799_13 (sequence is synthesized)
accaagatgcccaataccaatggaagtattggccacagtccactttctctgtcagcccagtctgtaatggaagagctaaacactgcacccgtccaagagagtccacccttggccatgcct

SEQ ID NO: 84130 - DNA, 120 bp, Artificial Sequence
  ENSG00000083799_14 (sequence is synthesized)
tcctttctatggggtaatccgttggatcggtcagccaccaggactgaatgaagtgctcgctggactggaactggaagatgagtgtgcaggctgtacggatggaaccttcagaggcactcg

SEQ ID NO: 84131 - DNA, 120 bp, Artificial Sequence
  ENSG00000083799_15 (sequence is synthesized)
gtatttcacctgtgccctgaagaaggcgctgtttgtgaaactgaagagctgcaggcctgactctaggtttgcatcattgcagccggtttccaatcagattgagcgctgtaactctttagc

SEQ ID NO: 84132 - DNA, 120 bp, Artificial Sequence
  ENSG00000083799_16 (sequence is synthesized)
atttggaggctacttaagtgaagtagtagaagaaaatactccaccaaaaatggaaaaagaaggcttggagataatgattgggaagaagaaaggcatccagggtcattacaattcttgtta

SEQ ID NO: 84133 - DNA, 120 bp, Artificial Sequence
  ENSG00000083799_17 (sequence is synthesized)
cttagactcaaccttattctgcttatttgcttttagttctgttctggacactgtgttacttagacccaaagaaaagaacgatgtagaatattatagtgaaacccaagagctactgaggac

SEQ ID NO: 84134 - DNA, 120 bp, Artificial Sequence
  ENSG00000083799_18 (sequence is synthesized)
agaaattgttaatcctctgagaatatatggatatgtgtgtgccacaaaaattatgaaactgaggaaaatacttgaaaaggtggaggctgcatcaggatttacctctgaagaaaaagatcc

SEQ ID NO: 84135 - DNA, 120 bp, Artificial Sequence
  ENSG00000083799_19 (sequence is synthesized)
tgaggaattcttgaatattctgtttcatcatattttaagggtagaacctttgctaaaaataagatcagcaggtcaaaaggtacaagattgttacttctatcaaatttttatggaaaaaaa

SEQ ID NO: 84136 - DNA, 120 bp, Artificial Sequence
  ENSG00000083799_20 (sequence is synthesized)
tgagaaagttggcgttcccacaattcagcagttgttagaatggtcttttatcaacagtaacctgaaatttgcagaggcaccatcatgtctgattattcagatgcctcgatttggaaaaga

SEQ ID NO: 84137 - DNA, 120 bp, Artificial Sequence
  ENSG00000083799_21 (sequence is synthesized)
ctttaaactatttaaaaaaatttttccttctctggaattaaatataacagatttacttgaagacactcccagacagtgccggatatgtggagggcttgcaatgtatgagtgtagagaatg

SEQ ID NO: 84138 - DNA, 120 bp, Artificial Sequence
  ENSG00000083799_22 (sequence is synthesized)
ctacgacgatccggacatctcagctggaaaaatcaagcagttttgtaaaacctgcaacactcaagtccaccttcatccgaagaggctgaatcataaatataacccagtgtcacttcccaa

SEQ ID NO: 84139 - DNA, 120 bp, Artificial Sequence
  ENSG00000083799_23 (sequence is synthesized)
agacttacccgactgggactggagacacggctgcatcccttgccagaatatggagttatttgctgttctctgcatagaaacaagccactatgttgcttttgtgaagtatgggaaggacga

SEQ ID NO: 84140 - DNA, 120 bp, Artificial Sequence
  ENSG00000083799_24 (sequence is synthesized)
ttctgcctggctcttctttgacagcatggccgatcgggatggtggtcagaatggcttcaacattcctcaagtcaccccatgcccagaagtaggagagtacttgaagatgtctctggaaga

SEQ ID NO: 84141 - DNA, 120 bp, Artificial Sequence
  ENSG00000083799_25 (sequence is synthesized)
cctgcattccttggactccaggagaatccaaggctgtgcacgaagactgctttgtgatgcatatatgtgcatgtaccagagtccaacaatgagtttgtacaaataactggggtcatcggg

SEQ ID NO: 84142 - DNA, 120 bp, Artificial Sequence
  ENSG00000083799_26 (sequence is synthesized)
aaaggcaaagaaactgaaggcagagtcctaacgttgcatcttattcgagctggcagttctgttcacgtccattgccggcaatggatgtctttgtggtgatgatccttcagaaaaggatgc

SEQ ID NO: 84143 - DNA, 120 bp, Artificial Sequence
  ENSG00000083799_27 (sequence is synthesized)
ctctgtttaaaaacaaattgcttttgtgtccctgaagtatttaataagaagcattttgcactctagaaagtatgtttgtgttggttttttaagaagtctaaatgaagttattaatacctg

SEQ ID NO: 84144 - DNA, 120 bp, Artificial Sequence
  ENSG00000083799_28 (sequence is synthesized)
aagctttaagttaagtgcattgatcatatgatatttttggaagcatacaattttaattgtggaagtttaaagcctcttttagtccattgagaatgtaaataaatgtgtcttctttatgga

SEQ ID NO: 84145 - DNA, 120 bp, Artificial Sequence
  ENSG00000083799_29 (sequence is synthesized)
ggcccaggtagcaggtttggctgcgcgggggccgcgcgtcggaggcattttgatttcctttctttttacagcatggacaccacgttgctgaaaacatgctttgggactgccactgaattt

SEQ ID NO: 84146 - DNA, 120 bp, Artificial Sequence
  ENSG00000083799_30 (sequence is synthesized)
tgctgtgacagaatgtggtaattgtaatctttaacattttcatgtaaaacatatttcctgatcatctttccattgtcttcatggaaaattgataaatatttgtgccttccaactctcgtc

SEQ ID NO: 84147 - DNA, 120 bp, Artificial Sequence
  ENSG00000083799_31 (sequence is synthesized)
taatttggttttattaagagtctactctcaatccagttattagagatgtactgagtttgatttgttaatcctttctatatactgctgatcttgcatgtctacaatctgctcagtttttct

SEQ ID NO: 84148 - DNA, 120 bp, Artificial Sequence
  ENSG00000083799_32 (sequence is synthesized)
gtgtttctgcaatagtggtcagaaaaatacttaaattcccttaatggtgttgttttctatttgttctggttttgagataaatgagtgattctgtccccaaatgtccatttttgaagtgat

SEQ ID NO: 84149 - DNA, 120 bp, Artificial Sequence
  ENSG00000083799_33 (sequence is synthesized)
tttcctggaggattagggtatttagcagttgaagctcttcattcatagtagttactgtcagctaacaggttttttaaggcttttaactattaatattttatggaatggggcaaagtaaat

SEQ ID NO: 84150 - DNA, 120 bp, Artificial Sequence
  ENSG00000083799_34 (sequence is synthesized)
tgatgaaagaattggagtgataatagtcctttacaaacatacagtccataagaaaatgaatttggcatatagaattattacaatttcctgggagagatggatatttaaacctctattatt

SEQ ID NO: 84151 - DNA, 120 bp, Artificial Sequence
  ENSG00000083799_35 (sequence is synthesized)
ttagacaagactgtctagaacttaagtttgatctgtcagccagtactcccattaaattcagtgtagtttcacttgatagaatcagatatgttatcgaaatgttagcagcagcttcatcct

SEQ ID NO: 84152 - DNA, 120 bp, Artificial Sequence
  ENSG00000083799_36 (sequence is synthesized)
ccttctgattaaagtaagtagaaatgggatgttttgtttaataacagccatagtgtgtgtttagaccacagcggatgttgtagaccaggaccatagatgatacatgtcagtgctgtggaa

SEQ ID NO: 84153 - DNA, 120 bp, Artificial Sequence
  ENSG00000083799_37 (sequence is synthesized)
tgtgcattctctgagtgttgttttgtggtatcattgtctttcctgaatgactttctaactgtgcagaaaggcagaaaagtcatcatatgtatatgtcatatgactttataaaatatttaa

SEQ ID NO: 84154 - DNA, 120 bp, Artificial Sequence
  ENSG00000083799_38 (sequence is synthesized)
tgtgacaaaaagtggaaagaatctttacaaaccctgcaattacttttttaaaggcacttttactctttggttttatcattccattttgctaatatttactagctttataaattacagtaa

SEQ ID NO: 84155 - DNA, 120 bp, Artificial Sequence
  ENSG00000083799_39 (sequence is synthesized)
ggtacaaaaactcatcttgtaatattttcatttttgaagtgaaaaagtacatatattttgcacaaggttttatactgctaagtgcttggttggggtggtgagatgatgattagatcaggg

SEQ ID NO: 84156 - DNA, 120 bp, Artificial Sequence
  ENSG00000083799_40 (sequence is synthesized)
gtgaggctgagagactctgggtttagggctagccctgcctccatctcccttgggtaaaatgaagggtgtggggtaaaagatgcataaggccttttctagctctgacagcctagaagtcca

SEQ ID NO: 84157 - DNA, 120 bp, Artificial Sequence
  ENSG00000083799_41 (sequence is synthesized)
atcaccctgtaataaatatgtgttgaatgaagaaatgggtgaatgagcttgtcaatgtgattttaaaaaattgactacctggaggaatgattaggaatctaaatgaagccagccctcggt

SEQ ID NO: 84158 - DNA, 120 bp, Artificial Sequence
  ENSG00000083799_42 (sequence is synthesized)
atctgcaggtttctcatccatggattcaaccaactgcaaatggaaaatacgattttttttaaaaaaaggatggttacatccgtattgaacatgtacagacttttttcttgtcattattct

SEQ ID NO: 84159 - DNA, 120 bp, Artificial Sequence
  ENSG00000083799_43 (sequence is synthesized)
ctgaacaatacaagaactctttatgtagcatttacatttattaggtattataagtaatctagagattatttaattaaaatatacaggaggatgtgtgtcagttatatgcaaattctgtac

SEQ ID NO: 84160 - DNA, 120 bp, Artificial Sequence
  ENSG00000083799_44 (sequence is synthesized)
cattttgtatcagggaattgagcatcttcagatgttggtatctgcagggatcctggaaccaaacccctgcagatactaagggctgacgatctaggtaagactggatttaacagttggaaa

SEQ ID NO: 84161 - DNA, 120 bp, Artificial Sequence
  ENSG00000083799_45 (sequence is synthesized)
acccaggctgtcatggtagagaacttgaagaagacctgtttggatggacacctggtttcaaaagtcaggtgtggagactgttaaatgggagggcctcatccataaatgatttctggcaac

SEQ ID NO: 84162 - DNA, 120 bp, Artificial Sequence
  ENSG00000083799_46 (sequence is synthesized)
gtcttcttcaggtggagcttgacgtctttttaatgttacttggggagggagtgctcattaagggatgccagggccagctctggtggttcctggggaggctgcgtccttccctgcttctgc

SEQ ID NO: 84163 - DNA, 120 bp, Artificial Sequence
  ENSG00000083799_47 (sequence is synthesized)
atgtcatgaggcagcaggaaggtttcccctgcacctgtctgtcctggctccctctgggtagccccctactgttctgtgcttcagcacagcctggtttgtcaagaggcacatagttggggc

SEQ ID NO: 84164 - DNA, 120 bp, Artificial Sequence
  ENSG00000083799_48 (sequence is synthesized)
tgggctgcatggcacaggggcttatgtgcctgctggttatttaattttcagccttaagttttctttaatattttcctgttggctatttaaaggttttggttatcttttattccttatcta

SEQ ID NO: 84165 - DNA, 120 bp, Artificial Sequence
  ENSG00000083799_49 (sequence is synthesized)
caatcaagatgacaatgtaattgaattatcttatttataacacggttcgtgattcatgattcatgattacaagtagaaaatatgtcatgttcctcacctccaaataaatatgtgtgtgtc

SEQ ID NO: 84166 - DNA, 120 bp, Artificial Sequence
  ENSG00000083799_50 (sequence is synthesized)
tgtgtgtgtgtatatatgtatgtggcggagagggagagagtggggaaggagagcagtgttatcatacatagagaggctaaatgtgtcccatccctcactgtcagctttataaaggagttt

SEQ ID NO: 84167 - DNA, 120 bp, Artificial Sequence
  ENSG00000083799_51 (sequence is synthesized)
gactccatccacagaagaatgttttataagactaggaaaacacgttgaaaactaggataaacagcaacaaaaatcaactaaatatgttgttactgttgctaaggattttctccttagaat

SEQ ID NO: 84168 - DNA, 120 bp, Artificial Sequence
  ENSG00000083799_52 (sequence is synthesized)
aatttaggatttttaaaaatttctgtttgccaaatgctgtagataaatggccagattcttcctatccctaggattcctttattattttttttcacagattttgagaacaagggggagaga

SEQ ID NO: 84169 - DNA, 120 bp, Artificial Sequence
  ENSG00000083799_53 (sequence is synthesized)
tagtatggaagattaagattccattaatcttatagaactgtgttgtcacccaaattcctgcttgtttgaacatggcatcttcatagattcaggattcactaccctctatagctggatctt

SEQ ID NO: 84170 - DNA, 120 bp, Artificial Sequence
  ENSG00000083799_54 (sequence is synthesized)
gaaaattatctggccagataattttgcatctgcttggatgattgtagactgagatgtgagtggaggataaagtattagacttttgctgagtaactgccaaccaagaagtatttatcggac

SEQ ID NO: 84171 - DNA, 120 bp, Artificial Sequence
  ENSG00000083799_55 (sequence is synthesized)
acttactaggtgcctaggattgtatcagagggaatatgaaatgtgtccctgccctacctagttttaacgacagaatatctattaaaggctacttagctgaagggtaagggtgacaggtct

SEQ ID NO: 84172 - DNA, 120 bp, Artificial Sequence
  ENSG00000083799_56 (sequence is synthesized)
aggggaagctttgggaggtggtgtgctgtgacagaaaaagtggcagagtagggacgagagacctgcattctagccctgtttctgtcacttgctctgtacacttagacaacagcttgacct

SEQ ID NO: 84173 - DNA, 120 bp, Artificial Sequence
  ENSG00000083799_57 (sequence is synthesized)
cttgagctttagtttcctcctctgcataatgagagggttagactactgaattgtatgggaaaaaaatacaaattcctgggtcctaggccatgcctgctgaatccgactgttcaggaagag

SEQ ID NO: 84174 - DNA, 120 bp, Artificial Sequence
  ENSG00000083799_58 (sequence is synthesized)
gcctaggaaatctgtgagggaatccccaggggaatctcgtgaccagccaggtgtgaaatctgctaactggaagatctcaaagcttccttcactttttgtgattttgtggtcatgtaacgt

SEQ ID NO: 84175 - DNA, 120 bp, Artificial Sequence
  ENSG00000083799_59 (sequence is synthesized)
tactgtattattctacgtaaatgtgggtacttggatgtttatcatactgtttctctgtgtttacatactaatttgtgtaagaaatgcattttagtctgtgtacctcaacctgctgtttgt

SEQ ID NO: 84176 - DNA, 120 bp, Artificial Sequence
  ENSG00000083799_60 (sequence is synthesized)
ttcctagaggtgttagtagtctttaaatacaagtaagacttaagaggatatttgatgttatttacctggatattttcttccccttttatttatttagaggaaattgagattctaggagcc

SEQ ID NO: 84177 - DNA, 120 bp, Artificial Sequence
  ENSG00000083799_61 (sequence is synthesized)
aaaaaaatgaaaacaaaattctaaggcaaagttaaagaaaaaaattacattatttcttaccatttgctactttataatgaaaatttaaaaattatatgggaagatttttctctgggataa

SEQ ID NO: 84178 - DNA, 120 bp, Artificial Sequence
  ENSG00000083799_62 (sequence is synthesized)
caaatccttgtcataaagtaagaggtctttttaaagtaggtaggctataaggcctgtaatttaaaataatactcctttctctagggtttggtgcaattctccattaatgaagataacatt

SEQ ID NO: 84179 - DNA, 120 bp, Artificial Sequence
  ENSG00000083799_63 (sequence is synthesized)
tgaattccccaaagcaggtgaggagtcggggaggagaaagcgatgttaaaatgaaaactcactgcaaaagaggaggcagaggaagaaggaatgtaaaccccttaaagcagatgtgtgtgg

SEQ ID NO: 84180 - DNA, 120 bp, Artificial Sequence
  ENSG00000083799_64 (sequence is synthesized)
ggccttatgaagaccaggattctgcgggtgtcaggggattgcccctcttgacagagactagggttttagactgaggcttcctgcagggtgttcgcattgcccttctccgttccccttcag

SEQ ID NO: 84181 - DNA, 120 bp, Artificial Sequence
  ENSG00000083799_65 (sequence is synthesized)
acctttctggggagaagaggtgggaggaggggagaaagactgttcatcttattctgaatcctggagcagctgaaggttttctcttgagtcaggatgcagtggtaatgcattaaccagcaa

SEQ ID NO: 84182 - DNA, 120 bp, Artificial Sequence
  ENSG00000083799_66 (sequence is synthesized)
gtgtggccaaggataatgaaaaagtgggaaaggaaggtcctcctcctccctgattgtagcatccagcagtctctgtagccaggttactcaagaaccacatttgatttcctggccctttgc

SEQ ID NO: 84183 - DNA, 120 bp, Artificial Sequence
  ENSG00000083799_67 (sequence is synthesized)
cttggcagtgatggcatttttatttcactgtgttttaaagtcttcatttatttttataacatgggttagggagaagggccacaaatggagggattgtcctttcaagcaccacagcttcag

SEQ ID NO: 84184 - DNA, 120 bp, Artificial Sequence
  ENSG00000083799_68 (sequence is synthesized)
ataaaattagtactttcaaatattgtccactttaacttaaaaaattctagagggattatattggagactcaactgcccttggttttagtttataaaatggcctagtactgtggaatttta

SEQ ID NO: 84185 - DNA, 120 bp, Artificial Sequence
  ENSG00000083799_69 (sequence is synthesized)
attttagaaagtcttagcatcagatcataaacattcattaaaagaactcacatcccatctgaaacttcccaggggagttgggattcttagtagattggtagaaaggggctcattttctac

SEQ ID NO: 84186 - DNA, 120 bp, Artificial Sequence
  ENSG00000083799_70 (sequence is synthesized)
tgcatttcccatttttggtatcttgttcagcatgttttatttttatttcttgtctgcagaacatcctatatttatgagaacattctttaagaagaccaccacatagaataccccttccta

SEQ ID NO: 84187 - DNA, 120 bp, Artificial Sequence
  ENSG00000083799_71 (sequence is synthesized)
tcagctcgctctgatttagccttaattttgttaaattttttagagatgaatgaagtgctgctgtggaaagaaatgtacatatactatttctgtatcattaaaattacatttttatggttc

SEQ ID NO: 84188 - DNA, 120 bp, Artificial Sequence
  ENSG00000083799_72 (sequence is synthesized)
ggccgcgcgtcggagtttccccctttctagggtgaggatggttctacacagccacccggagttccttagttgaaaggtgcgccctgctgtgacaggcattttgatttcctttctttttac

SEQ ID NO: 84189 - DNA, 120 bp, Artificial Sequence
  ENSG00000083799_73 (sequence is synthesized)
tgttttctggtatagtaattaatttataccttgtcttcatgtaataagagatgggtgaaaattagttcttatggtaaaatattacgtttttaaacctttggtccttgtacttttttgctt

SEQ ID NO: 84190 - DNA, 120 bp, Artificial Sequence
  ENSG00000083799_74 (sequence is synthesized)
atttaatttcttaaatgtggccaaggtgtagaacatagcatattccatgaaatgatttaacctattttgctagagtaaactataatttagcaattgcagtatgtttaggaaagctaatac

SEQ ID NO: 84191 - DNA, 120 bp, Artificial Sequence
  ENSG00000083799_75 (sequence is synthesized)
ataatacttaggattcttatcttttgaaatagtttattccaacacttctgctacaagtaatcatgcttattagttaaattggtgtagtctagcttcttaaatctgaaagaaaaggagaaa

SEQ ID NO: 84192 - DNA, 120 bp, Artificial Sequence
  ENSG00000083799_76 (sequence is synthesized)
gggaaattctttatagaatagctagtgtttaatactttggactagcaacagatgagatgtattttagtaccatattttttggttaaaggaatatatttggcctctttccacctgccttaa

SEQ ID NO: 84193 - DNA, 120 bp, Artificial Sequence
  ENSG00000083799_77 (sequence is synthesized)
aaaggtgattctttttccatttcctactttaggaattataaatatgtctttttatggccacaggaagcaatttgtaatggtacaagcacaagtgacaggagatatctagtaaagactttg

SEQ ID NO: 84194 - DNA, 120 bp, Artificial Sequence
  ENSG00000083799_78 (sequence is synthesized)
aataagtggtagtagtgatatgtgataatgtcacattataaaatttaaactatgaagaattaggaccatagatcataaaacaaatttgttcattcaggaatatagagagaaagtgattta

SEQ ID NO: 84195 - DNA, 120 bp, Artificial Sequence
  ENSG00000083799_79 (sequence is synthesized)
aagtccatattaagataaatttgaatccttttatatactgttcttatttatcaattaaagtaaaaaatagtttgatatcaaatttgaaccaaaaaagcagaatactcaaatacaatgagg

SEQ ID NO: 84196 - DNA, 120 bp, Artificial Sequence
  ENSG00000083799_80 (sequence is synthesized)
gaggattccaaattatctgctatatcacatgactaggaaagtaaattataagagaataaatttcctcacttatatcttttgctttctttaaattctgtaatgatttctctaatgatctta

SEQ ID NO: 84197 - DNA, 120 bp, Artificial Sequence
  ENSG00000083799_81 (sequence is synthesized)
ctctttaagataattgtgaatcttgattttcacatcaactattttgtcttatgcaaatttttaaacatacgatttttttcccccaagtaattgatactggaacaagacaggtcaaacccg

SEQ ID NO: 84198 - DNA, 120 bp, Artificial Sequence
  ENSG00000083799_82 (sequence is synthesized)
aaactctaaggcatgttaacacctccttcctagaagagaggaagaataaacattctttggatcctattgttcagccagttaagaatcatagttaatcacactttcttaccctgtccacgg

SEQ ID NO: 84199 - DNA, 120 bp, Artificial Sequence
  ENSG00000083799_83 (sequence is synthesized)
taagaaactggtcagatgccctgttgtgatcaggattccctgtgtctgtagcattcatatctgtatatagctgactggttttatttggtgctgaaatctctgcttttcttcagagaccct

SEQ ID NO: 84200 - DNA, 120 bp, Artificial Sequence
  ENSG00000083799_84 (sequence is synthesized)
gtctttttaaccttactcattttgtattcccagtggctgacaggttacgttactatgtaagtggtagattctcagtctgtattggttgcaggaaactaatgagtgaatgaatagtataaa

SEQ ID NO: 84201 - DNA, 120 bp, Artificial Sequence
  ENSG00000083799_85 (sequence is synthesized)
aagtggatataaaattagctagttctgacttgtccttagtaaacttatggtagccgccaagttctcctctgaagccatttttagaattacaaatttaaagtgatattaaactgattgaat

SEQ ID NO: 84202 - DNA, 120 bp, Artificial Sequence
  ENSG00000083799_86 (sequence is synthesized)
gtgtcttgcattcagacaaagaagagagaaaatgtcatcattatgccaattggtttgattgcagattttagattttcagtttcttataaattccctttcccatttcccttggtggctgtt

SEQ ID NO: 84203 - DNA, 120 bp, Artificial Sequence
  ENSG00000083799_87 (sequence is synthesized)
tcacacttcagtattaaaaggatattctctctcaaaattgtatattctgctttataaagtaaatgctttaatttcccaagcaaatattatttaaaaaatcagtcacagcaaacctaaaaa

SEQ ID NO: 84204 - DNA, 120 bp, Artificial Sequence
  ENSG00000083799_88 (sequence is synthesized)
ttttttatcttagtgtatgacagttacttgtagagcatataatagtgtctaggataattctggttctagatctttaattttgcaaacttcaagaagaagcttatcattgttttcttcaaa

SEQ ID NO: 84205 - DNA, 120 bp, Artificial Sequence
  ENSG00000083799_89 (sequence is synthesized)
aacttcaagaagaagcttatcattgttttcttcaaaaataattgtctaacctattgatttatgacatactggagttgtataagaaatgtgttggccaggtgtggtggcgcacacctgtaa

SEQ ID NO: 84206 - DNA, 75 bp, Artificial Sequence
  ENSG00000083799_90 (sequence is synthesized)
ggtgcacgcctgtaattccagctactttggtggctgaggcatgagaatctcttgagactccagcctgagtgatag

SEQ ID NO: 84207 - DNA, 120 bp, Artificial Sequence
  ENSG00000083799_91 (sequence is synthesized)
tttgacagcatggccgatcgggatggtactgaaaacgcctttcttctgcatgtggcacagggttctggtttgtagtgggacagtttgtagtgggatcgcctgttctgagtgatattttct

SEQ ID NO: 84208 - DNA, 120 bp, Artificial Sequence
  ENSG00000083799_92 (sequence is synthesized)
aatcctttcaggattattctggtgacaacagtcttatatcttggattgcattaacaaccttgctagctgaactaaggaataatatgctgtgtttttttttttccttttttgagatggagt

SEQ ID NO: 84209 - DNA, 67 bp, Artificial Sequence
  ENSG00000083799_93 (sequence is synthesized)
ctcctgagtagctgggactacactgccatgttgcccaagctggtctcaaattcctggcctcaagtga

SEQ ID NO: 84210 - DNA, 120 bp, Artificial Sequence
  ENSG00000083799_94 (sequence is synthesized)
aggtagcaggtttggctgcgcgggggccgcgcgtcggagtttccccctttctagggtgaggatggttctacacagccacccggagttccttagttgaaaggcattttgatttcctttctt

SEQ ID NO: 84211 - DNA, 120 bp, Artificial Sequence
  ENSG00000083799_95 (sequence is synthesized)
acattccctgtggcagcctcttgaacagaggcccaggccctagatcaagagttctccaccttttctcagttctctgatgcttgagggatacatcccagccccatctgtagatgtgccccc

SEQ ID NO: 84212 - DNA, 120 bp, Artificial Sequence
  ENSG00000083799_96 (sequence is synthesized)
tctttgtaatattgctgaactaaaatattgtacacagtttgaaccgtactgctgttaagattattaaaatgtttaagaaatgtattagtaatttgttcttttcctttaactgctgatcta

SEQ ID NO: 84213 - DNA, 120 bp, Artificial Sequence
  ENSG00000083799_97 (sequence is synthesized)
tttagggtggaagatttctgtctggttccttcctgacctctttaaagcactcccttttaaaaaattttatcttcccttggtcctgggacatcattttcacctagtttattctcttctttg

SEQ ID NO: 84214 - DNA, 120 bp, Artificial Sequence
  ENSG00000083799_98 (sequence is synthesized)
gtgtagttggggggttttcttttaaattagaaatttctttttatgtgatatatggttagctcctctttttgtaaattcttcctctcttctaaaagtgattgatgatgtggaataatgaac

SEQ ID NO: 84215 - DNA, 120 bp, Artificial Sequence
  ENSG00000083799_99 (sequence is synthesized)
tcctttaagaagctggctggttctagtatattaaatgcttaaataaaaagtcctttcctttccacctagcaatgatattctcagttgtttctctcttgtggtgcagagttgcattgggtt

SEQ ID NO: 84216 - DNA, 120 bp, Artificial Sequence
  ENSG00000083799_100 (sequence is synthesized)
ttctacattttcccactgagtcttccctgttgtaaaagggagttagaaagctgctaactaggattaagtttatagtcagggaacagtgttataatctcttcctagctaatgggcttactc

SEQ ID NO: 84217 - DNA, 120 bp, Artificial Sequence
  ENSG00000083799_101 (sequence is synthesized)
aaagattcaccacctgactttgaatttgtcagcagcatactgtaaacagctgtaatgttcagaggcttgcaggaaaaaacagagcatacttcagattgtactccatttaccttaacccct

SEQ ID NO: 84218 - DNA, 120 bp, Artificial Sequence
  ENSG00000083799_102 (sequence is synthesized)
ccaaaggaaataacagctatttcattatgtgcaatgtgttacaccctttcaaatgtaataaactcacaacaaaattgaaacataatacttgattataacttattaaatgtcttttatgtt

SEQ ID NO: 84219 - DNA, 120 bp, Artificial Sequence
  ENSG00000083799_103 (sequence is synthesized)
tttcctttgtcaggaaaacttgaaaactgtgcttttaattgaaataatattggatgaatgaaactgaattcagtattaaaatttgactgttagaaatgaaaaataaaatgatttaaaaat

SEQ ID NO: 84220 - DNA, 120 bp, Artificial Sequence
  ENSG00000083807_0 (sequence is synthesized)
actccacagctgctgctcctagggaggagctggtaccatgggtgtcaggcaacagttggccttgctgctgctgctgctgctcctgctctggggcctggggcagccagtgtggccagtcgc

SEQ ID NO: 84221 - DNA, 120 bp, Artificial Sequence
  ENSG00000083807_1 (sequence is synthesized)
tgtggccttgaccctgcgctggctcctgggggatcccacatgttgcgtgctacttgggctggccatgttagcacggccctggctcggcccctgggtgccccatgggctgagcctggcagc

SEQ ID NO: 84222 - DNA, 120 bp, Artificial Sequence
  ENSG00000083807_2 (sequence is synthesized)
tgcggccctggcactaaccctcctgccagcacggctgcccccaggactacgctggctgccggctgatgtgatcttcttggccaagatcctccacctgggcctgaagatcaggggatgctt

SEQ ID NO: 84223 - DNA, 120 bp, Artificial Sequence
  ENSG00000083807_3 (sequence is synthesized)
gagccggcagccgcctgacacctttgtagatgccttcgagcggcgagcacgagcgcagcctggcagggcactcttggtgtggacggggcctggggccggctcagtcacctttggtgagct

SEQ ID NO: 84224 - DNA, 120 bp, Artificial Sequence
  ENSG00000083807_4 (sequence is synthesized)
ggatgcccgggcctgccaggcggcatgggccctgaaggctgagctgggtgaccctgcgagcctgtgtgccggggagcctactgccctccttgtgctggcttcccaggccgttccagccct

SEQ ID NO: 84225 - DNA, 120 bp, Artificial Sequence
  ENSG00000083807_5 (sequence is synthesized)
gtgtatgtggctggggctggccaagctgggctgcccaacagcctggatcaacccgcatggccgggggatgcccctggcgcactctgtgctgagctctggggcccgggtgctggtggtgga

SEQ ID NO: 84226 - DNA, 120 bp, Artificial Sequence
  ENSG00000083807_6 (sequence is synthesized)
cccagacctccgggagagcctggaggagatccttcccaagctgcaggctgagaacatccgctgcttctacctcagccatacctcccctacaccaggggtgggggctctgggggctgccct

SEQ ID NO: 84227 - DNA, 120 bp, Artificial Sequence
  ENSG00000083807_7 (sequence is synthesized)
ggatgcagcgccctcccacccagtgcctgctgacctgcgtgctgggatcacatggagaagccctgccctcttcatctatacctcggggaccactggcctcccgaagccagccatcctcac

SEQ ID NO: 84228 - DNA, 120 bp, Artificial Sequence
  ENSG00000083807_8 (sequence is synthesized)
gcatgagcgggtactgcagatgagcaagatgctgtccttatctggggccacagctgatgatgtggtttacacggtcctgcctctgtaccacgtgatgggacttgtcgttgggatcctcgg

SEQ ID NO: 84229 - DNA, 120 bp, Artificial Sequence
  ENSG00000083807_9 (sequence is synthesized)
cggagccacctgtgttctggcccccaagttctctacttcctgcttctgggatgactgtcggcagcatggcgtgacagtgatcctgtatgtgggcgagctcctgcggtacttgtgtaacat

SEQ ID NO: 84230 - DNA, 120 bp, Artificial Sequence
  ENSG00000083807_10 (sequence is synthesized)
tccccagcaaccagaggaccggacacatacagtccgcctggcaatgggcaatggactacgggctgatgtgtgggagaccttccagcagcgcttcggtcctattcggatctgggaagtcta

SEQ ID NO: 84231 - DNA, 120 bp, Artificial Sequence
  ENSG00000083807_11 (sequence is synthesized)
cggctccacagaaggcaacatgggcttagtcaactatgtggggcgctgcggggccctgggcaagatgagctgcctcctccgaatgctgtccccctttgagctggtgcagttcgacatgga

SEQ ID NO: 84232 - DNA, 120 bp, Artificial Sequence
  ENSG00000083807_12 (sequence is synthesized)
ggcggcggagcctgtgagggacaatcagggcttctgcatccctgtagggctaggggagccggggctgctgctgaccaaggtggtaagccagcaacccttcgtgggctaccgcggcccccg

SEQ ID NO: 84233 - DNA, 120 bp, Artificial Sequence
  ENSG00000083807_13 (sequence is synthesized)
agagctgtcggaacggaagctggtgcgcaacgtgcggcaatcgggcgacgtttactacaacaccggggacgtactggccatggaccgcgaaggcttcctctacttccgcgaccgcctcgg

SEQ ID NO: 84234 - DNA, 120 bp, Artificial Sequence
  ENSG00000083807_14 (sequence is synthesized)
ggacaccttccgatggaagggcgagaacgtgtccacgcacgaggtggagggcgtgttgtcgcaggtggacttcttgcaacaggttaacgtgtatggcgtgtgcgtgccaggttgtgaggg

SEQ ID NO: 84235 - DNA, 120 bp, Artificial Sequence
  ENSG00000083807_15 (sequence is synthesized)
taaggtgggcatggctgctgtgcagctagcccccggccagactttcgacggggagaagttgtaccagcacgttcgcgcttggctccctgcctacgctaccccccatttcatccgcatcca

SEQ ID NO: 84236 - DNA, 120 bp, Artificial Sequence
  ENSG00000083807_16 (sequence is synthesized)
ggacgccatggaggtcaccagcacgttcaaactgatgaagacccggttggtgcgtgagggcttcaatgtggggatcgtggttgaccctctgtttgtactggacaaccgggcccagtcctt

SEQ ID NO: 84237 - DNA, 120 bp, Artificial Sequence
  ENSG00000083807_17 (sequence is synthesized)
ccggcccctgacggcagaaatgtaccaggctgtgtgtgagggaacctggaggctctgatcacctggccaacccactggggtagggatcaaagccagccacccccaccccaacacactcgg

SEQ ID NO: 84238 - DNA, 120 bp, Artificial Sequence
  ENSG00000083807_18 (sequence is synthesized)
tgtccctttcatcctgggcctgtgtgaatcccagcctggccataccctcaacctcagtgggctggaaatgacagtgggccctgtagcagtggcagaataaactcagatgtgttcacagaa

SEQ ID NO: 84239 - DNA, 120 bp, Artificial Sequence
  ENSG00000083807_19 (sequence is synthesized)
ctcccaatgaggtccaccttgctgtcctgttgcttttctgtttggcctgattggagtgttcccaagggcagggatttctgtgctctgagtgtctggtacccagcagggatgggaggggag

SEQ ID NO: 84240 - DNA, 120 bp, Artificial Sequence
  ENSG00000083807_20 (sequence is synthesized)
gcaagggagttagatgccagccctggagggtggatggggcaagcaggacagcaggaaggaggctagtggtgcccaaggggcagagacctgggaacccagaggccagtgatggaaagggtt

SEQ ID NO: 84241 - DNA, 120 bp, Artificial Sequence
  ENSG00000083807_21 (sequence is synthesized)
agcgccaggcagagaggggctggacccacacacaagaccaggcagagcaaacaaacgtagaggagaagggctgggggcaaagtcctggggagaggaccagccactgtcagcagtgccagg

SEQ ID NO: 84242 - DNA, 120 bp, Artificial Sequence
  ENSG00000083807_22 (sequence is synthesized)
gacaggggttctgctgggactggcagaggcccttggtccccacctgcctactttcacaggcaattataatcaagacttatgagcagaaagtagttctcaggtcatcagagtttaattttc

SEQ ID NO: 84243 - DNA, 120 bp, Artificial Sequence
  ENSG00000083807_23 (sequence is synthesized)
ccacaatttgaccaaaaatactaatgatgggattctttaccaaacaacatggatgcttttctctactagctgctcctctgcctgcatctgtgggtctcagatcccgcctcgcaacctcaa

SEQ ID NO: 84244 - DNA, 120 bp, Artificial Sequence
  ENSG00000083807_24 (sequence is synthesized)
tcggggaccactggtgagggtgcccattagccctagcaccagcctctgaactctcaggctgacctgaccccacacttgacttgtgactcagtgttgacctctgaaaccactttaccctct

SEQ ID NO: 84245 - DNA, 120 bp, Artificial Sequence
  ENSG00000083807_25 (sequence is synthesized)
gttgacctctgaaaccactttaccctctgattttgacatttgttttttgtttggctgttttttttttcgaggcagagtctcgctctgtcgcctaggctggactgcagtggtgcaatctcg

SEQ ID NO: 84246 - DNA, 61 bp, Artificial Sequence
  ENSG00000083807_26 (sequence is synthesized)
cccaagttagccaggctggtctctaacccctgacctcaggggacctgcccaactcagcctc

SEQ ID NO: 84247 - DNA, 80 bp, Artificial Sequence
  ENSG00000083807_27 (sequence is synthesized)
acttgattttgatatttggcctgaactctgacccccaatgtaatttgagaggtcaatgccagaattcttcctgtgtccag

SEQ ID NO: 84248 - DNA, 120 bp, Artificial Sequence
  ENSG00000083807_28 (sequence is synthesized)
taatttgagaggtcaatgccagaattcttcctgtgtccagtaaacagccactgaaacctttgatcttgacatattactttcagtccaaattcagcctgtgaacccaaccacaaatcccta

SEQ ID NO: 84249 - DNA, 120 bp, Artificial Sequence
  ENSG00000083807_29 (sequence is synthesized)
tacttgactgttctctgagagcctcaaaccccaatgtaggcctggctgttggagatctatccctctggtcaggcccctctctgtgctgtcatgtcaccaccctgcccttgccatgccttc

SEQ ID NO: 84250 - DNA, 120 bp, Artificial Sequence
  ENSG00000083807_30 (sequence is synthesized)
gtcaaggcaaaaagacaccataggttacccagcaccctgtgttctcacttttgagaagggacacccaccaatgactaccagggccgcatggacagaagcttggacacccacacagtccct

SEQ ID NO: 84251 - DNA, 120 bp, Artificial Sequence
  ENSG00000083807_31 (sequence is synthesized)
gatggccatgctttggtcaggaggtgacaagacctgatacgagtgatggtcacaggcatccaaggaaggtgtggtgctcaggagatgatggggatgctggcccagatttgtgacatggcc

SEQ ID NO: 84252 - DNA, 120 bp, Artificial Sequence
  ENSG00000083807_32 (sequence is synthesized)
ccaagggcagctggagtaggagtgctctcaagcactccacagggctgtctctctggactcttgattcagagtctagatggggacctctccatagcttgttctttttgttttctctctttt

SEQ ID NO: 84253 - DNA, 63 bp, Artificial Sequence
  ENSG00000083807_33 (sequence is synthesized)
tttgtatttttactagagactatttgcgggcatttgcctcccaaagcgctgggattacaggtg

SEQ ID NO: 84254 - DNA, 120 bp, Artificial Sequence
  ENSG00000083807_34 (sequence is synthesized)
gctgggattacaggtgtgacccaccacgcccggcctttttgtgttttccagctattatcatggccatgtgtggttgctcatgcctataatccctgcactttgggtgccaaggcaggagga

SEQ ID NO: 84255 - DNA, 120 bp, Artificial Sequence
  ENSG00000083807_35 (sequence is synthesized)
tcacttgagtccaggagttcaacaccagcgtgggcaacatagtaagaggccatctgttaaaaaaaaattttaaaaagccacgcatggtggtatcgggggaacctgcccctaatatttcaa

SEQ ID NO: 84256 - DNA, 74 bp, Artificial Sequence
  ENSG00000083807_36 (sequence is synthesized)
caggtgtgagccactgtgcccggcctcgatgtaggttctttctattttccgtaagtgcacagctgggcctccgg

SEQ ID NO: 84257 - DNA, 77 bp, Artificial Sequence
  ENSG00000083807_37 (sequence is synthesized)
tcaaagccagcaagttttattaaggatttcagaagggaagggggtgtaagaaccgagaataggtacaaagatcacat

SEQ ID NO: 84258 - DNA, 86 bp, Artificial Sequence
  ENSG00000083807_38 (sequence is synthesized)
agctcaaagccagcaagttttattaaggatttcagaagggaagggggtgtaagaaccgagaaaacggaactactgatcagggtcca

SEQ ID NO: 84259 - DNA, 71 bp, Artificial Sequence
  ENSG00000083807_39 (sequence is synthesized)
cctgagggtactgcaggagaccagggtgcatctcagtccttatctcaactgcataattcctttcccagggt

SEQ ID NO: 84260 - DNA, 120 bp, Artificial Sequence
  ENSG00000083807_40 (sequence is synthesized)
ccccaggaatgaattcctttcccagggtcttaatgttaatattccttgctaggaaaataatttagcaatatctctcctacttgcacgtccacttataggctctctgcaagaagaaaaata

SEQ ID NO: 84261 - DNA, 120 bp, Artificial Sequence
  ENSG00000083807_41 (sequence is synthesized)
cgcaggcagtcagaccttagggttgtcttcccttgttccctaaaatcactctcattctgttctttttcaatgtgcgctgatttcacattgttcaaacacacattttacaatcaatttgta

SEQ ID NO: 84262 - DNA, 65 bp, Artificial Sequence
  ENSG00000083807_42 (sequence is synthesized)
cagttaacacaattatcacaaaagtaagacaggcgtaagaaattataagagtattatttgggaag

SEQ ID NO: 84263 - DNA, 120 bp, Artificial Sequence
  ENSG00000083807_43 (sequence is synthesized)
gtatggcgtgtgcgtgccaggtgcggagggttctcattttaaacttccaacagctttgtgggtggaggggtcgttattctgattttacaggtggggaagtgctagggcccagagaggttt

SEQ ID NO: 84264 - DNA, 72 bp, Artificial Sequence
  ENSG00000083807_44 (sequence is synthesized)
tctccctgggactacagggagcaggagaaacggaagccaactgtgctttcctgggtcttctgctgctctcca

SEQ ID NO: 84265 - DNA, 120 bp, Artificial Sequence
  ENSG00000083807_45 (sequence is synthesized)
gaagccaactgtgctttcctgggtcttctgctgctctccacactgagacctcaggcccagcctctgcacagacgagtgggaaggcacagtttttgaacacccacctgagagtcttctgct

SEQ ID NO: 84266 - DNA, 120 bp, Artificial Sequence
  ENSG00000083807_46 (sequence is synthesized)
ggtgccccagaggctgtatccaggccccgagaacaccgaggccccgagggactgtgctgtctggctgctcatggaacctccggccggtggcccttgcggtggatgaccagctgcgacttc

SEQ ID NO: 84267 - DNA, 120 bp, Artificial Sequence
  ENSG00000083807_47 (sequence is synthesized)
cagtcgaaggcgcggccacagtcactgcagaagtgacgccgctggcctgtgtggctcttgcggtggatgaccagctgcgacttccagctgaagctgcacccgcactcctcacacgggtaa

SEQ ID NO: 84268 - DNA, 120 bp, Artificial Sequence
  ENSG00000083807_48 (sequence is synthesized)
ggctagccccggggactgcacacctggcccactcgtgtgtgtccggtggtggatgacgaacactgacttccagtcgaagccgcggccacactgctcgcacgtgtagggcttcctgggggt

SEQ ID NO: 84269 - DNA, 120 bp, Artificial Sequence
  ENSG00000083807_49 (sequence is synthesized)
ggcagccggctccagtctcgtctctgcaggtgtgggctgagtgggcactggcggtgtccctgggcgcacagtgggggcaggagtggcagccccagacaagccctcccaggctgccggccc

SEQ ID NO: 84270 - DNA, 120 bp, Artificial Sequence
  ENSG00000083807_50 (sequence is synthesized)
tgggccctggggcggctgggcctctgggcagccaggtggaccctcactctcatttcctgggggcaggggcaaaccaggtgagtcccggcactcagcaacccctccctcaggcttgtggcc

SEQ ID NO: 84271 - DNA, 120 bp, Artificial Sequence
  ENSG00000083807_51 (sequence is synthesized)
gtggcacaagctcccgtccccccatgagtgggtggctcaggtcccaccgatacaggaggggtgattcaggctggatggtgtggggcactcacccgagcgcaggcttctgcagacgcctgt

SEQ ID NO: 84272 - DNA, 120 bp, Artificial Sequence
  ENSG00000083807_52 (sequence is synthesized)
ccccgtgagcagcatccccagctctgactgggcctgtgcctctggctggtggggcggtaaccctgcccgggtggggggcacagttaggcatggggtttgcatgaaggaggggtggggtcg

SEQ ID NO: 84273 - DNA, 120 bp, Artificial Sequence
  ENSG00000083807_53 (sequence is synthesized)
gttctggtaggtgacagggtgttcctctggaaggtgggagagctgggtagggctggtagcacagaggccctgcccagctaggcctgctgcagggtgggtgcaggccccagggagaggggc

SEQ ID NO: 84274 - DNA, 120 bp, Artificial Sequence
  ENSG00000083807_54 (sequence is synthesized)
ggggtggggctggctggtcctcacccagggagaccactgtgccgtacttctccagcatcgcatcccagtacagttccttctgtgaccggtccagcagcccccactcctcctgcggatgtg

SEQ ID NO: 84275 - DNA, 120 bp, Artificial Sequence
  ENSG00000083807_55 (sequence is synthesized)
gcccatcactgtaggcgtctttccaccccttccctgccctgtctggttcacattcttacctattacccggaagagtcagcaggttacctacgcctcatctgcccctcctgctgagaatga

SEQ ID NO: 84276 - DNA, 120 bp, Artificial Sequence
  ENSG00000083812_0 (sequence is synthesized)
acttcgccgcccgcgtcaggccacaccggtggtctgggctggggaccgcgggtcgggtccggtttccagggggttcctggtgctcgaggctggcggcgaggaaggaccagatggcctttg

SEQ ID NO: 84277 - DNA, 120 bp, Artificial Sequence
  ENSG00000083812_1 (sequence is synthesized)
aggatgtggctgtgtacttctcccaggaggagtgggggctcctggacacagcccagagggccctgtaccgccgcgtgatgctagacaacttcgcacttgtggcctcgctgggactctcca

SEQ ID NO: 84278 - DNA, 120 bp, Artificial Sequence
  ENSG00000083812_2 (sequence is synthesized)
cctctcgacctcgtgtggtcatccaactggagcgtggcgaggagccctgggttcccagtggaacggacacaaccctgtccaggaccacctacaggaggcgcaaccctggttcctggagtt

SEQ ID NO: 84279 - DNA, 120 bp, Artificial Sequence
  ENSG00000083812_3 (sequence is synthesized)
tgacagaggatagagatgtttctggagaatggccacgagctttcccagataccccacctgggatgactactagcgtcttccctgttgccggtgcctgccacagtgtaaaaagcctgcaga

SEQ ID NO: 84280 - DNA, 120 bp, Artificial Sequence
  ENSG00000083812_4 (sequence is synthesized)
gacaacggggtgcctccccatctcgggagagaaaacccacgggggtgtcggtgatctactgggagaggctcctgctaggctcaggcagtgggcaagccagcgtcagcctgcgactgacct

SEQ ID NO: 84281 - DNA, 120 bp, Artificial Sequence
  ENSG00000083812_5 (sequence is synthesized)
ccccgcttaggcctcccgagggcgtccggcttagagaaaagacactcacagagcatgcgttgctggggaggcagcccaggacgcctgagcggcagaaaccatgtgcacaggaggtccctg

SEQ ID NO: 84282 - DNA, 120 bp, Artificial Sequence
  ENSG00000083812_6 (sequence is synthesized)
ggagaacctttgggagcgcccaggacctggaggctgccggcggtcggggacatcaccgaatgggtgcagtttggcaggagcctcatagactcctcggtggccaggagccctcgacctggg

SEQ ID NO: 84283 - DNA, 120 bp, Artificial Sequence
  ENSG00000083812_7 (sequence is synthesized)
acgagctgggcgaggctcttcacgctggggagaagtccttcgaatgcagggcgtgcagcaaagtgttcgtgaagagctccgacctcctcaagcacctacgcacccacaccggggagcggc

SEQ ID NO: 84284 - DNA, 120 bp, Artificial Sequence
  ENSG00000083812_8 (sequence is synthesized)
cctacgagtgcgcccagtgcggcaaggccttcagccagacgtcgcacttgacgcagcaccagcgcatccacagcggcgagacgccctacgcgtgccccgtgtgcggcaaggccttccggc

SEQ ID NO: 84285 - DNA, 120 bp, Artificial Sequence
  ENSG00000083812_9 (sequence is synthesized)
atagctcctcgctggtgcggcaccagcgcatccacacggccgagaagtccttccgctgctccgagtgcggcaaggccttcagccacggctccaacctcagccagcaccgcaagatccacg

SEQ ID NO: 84286 - DNA, 120 bp, Artificial Sequence
  ENSG00000083812_10 (sequence is synthesized)
cgggtgggcgtccttatgcttgcgcacagtgtggccgccgcttctgccgcaactcgcacctgatccagcacgagcgtacgcacacaggcgagaagcccttcgtgtgcgcgctctgcggtg

SEQ ID NO: 84287 - DNA, 120 bp, Artificial Sequence
  ENSG00000083812_11 (sequence is synthesized)
ctgccttcagccagggctcctcgctctttaagcaccagcgcgtgcacacaggcgagaagcccttcgcctgcccacagtgcggccgcgcctttagccacagctccaacctcacccagcacc

SEQ ID NO: 84288 - DNA, 120 bp, Artificial Sequence
  ENSG00000083812_12 (sequence is synthesized)
agctcctgcacacgggcgagcggcccttccgctgcgtggactgtggcaaggccttcgccaagggcgccgtgctgctcagccaccggcgcattcacacgggcgagaagcccttcgtgtgta

SEQ ID NO: 84289 - DNA, 120 bp, Artificial Sequence
  ENSG00000083812_13 (sequence is synthesized)
cgcagtgtggccgcgccttccgtgagcgcccggccctcttccaccaccagaggatccataccggcgagaagaccgtccggcgatccagggccagcctgcacccccaggccaggtctgttg

SEQ ID NO: 84290 - DNA, 120 bp, Artificial Sequence
  ENSG00000083812_14 (sequence is synthesized)
ccggggcatcatcagaaggtgcgccagcgaaggaaaccgagcccactcccgcctcgggcccagccgccgtctcgcagccagcggaggtctgaggtcacaggttgcagccctggccttctg

SEQ ID NO: 84291 - DNA, 120 bp, Artificial Sequence
  ENSG00000083812_15 (sequence is synthesized)
tgaatcccttccacagctaaagggcatatgtcctctgcagatccacagcagagaaaaagtcccgtgcttgctagtcagggacaagggaggccctttggctgtgatttcatttgcacgtgg

SEQ ID NO: 84292 - DNA, 120 bp, Artificial Sequence
  ENSG00000083812_16 (sequence is synthesized)
ggacaggatttgccagttcacccacagatcacacctccatccccaaagaggtagcactgcagcaacatcagggggaggacgtggtggctgaactctagtggggccgagactattcagagc

SEQ ID NO: 84293 - DNA, 120 bp, Artificial Sequence
  ENSG00000083812_17 (sequence is synthesized)
cagtaggaggccgacagtcacagcactgcactgtggtgcggcttcatgtgatatgacagtggatgctaaggtgagagggatgcaggcatgggttgggggtggcccagagaaacttatgac

SEQ ID NO: 84294 - DNA, 120 bp, Artificial Sequence
  ENSG00000083812_18 (sequence is synthesized)
agctgtacacaaactggccgctggagagatgcccgctgagggtattctcccctcaacccactgcctctgttcatccaagacttcctaggggccagcctagcagacaagagaccacaaggg

SEQ ID NO: 84295 - DNA, 120 bp, Artificial Sequence
  ENSG00000083812_19 (sequence is synthesized)
actggggatcagggtctgggctctgtcagccgccacctctgggaaagagaaaaggtttgggtccactgaacatcatgtttgtagacgctgacaggtggggtcctaatgagagccaacaca

SEQ ID NO: 84296 - DNA, 120 bp, Artificial Sequence
  ENSG00000083812_20 (sequence is synthesized)
tgctcactgccagctcctgtcctgagtactgggaagtttctcctgaagccctgtgagatggctctgtggctggtatcccgacttggaagatgaggaaactgaggcacacggcctggcctg

SEQ ID NO: 84297 - DNA, 120 bp, Artificial Sequence
  ENSG00000083812_21 (sequence is synthesized)
gccgactcaggagagggatgcccatgggggaacatgtgactctcagcattggaaggacagagctaggatgatggctttccggtggcactcgttcaggtttttgcccaagtctcagcttgg

SEQ ID NO: 84298 - DNA, 120 bp, Artificial Sequence
  ENSG00000083812_22 (sequence is synthesized)
ccaaggcctgtcactgactggtttaccaaagtcgatgtgaggaggaggctttatacctgaggggatgatgttaacttcagacaagatggagctgctcacttttgccgggtttggtggcca

SEQ ID NO: 84299 - DNA, 120 bp, Artificial Sequence
  ENSG00000083812_23 (sequence is synthesized)
cttcacccccaaccctgtctcacccccattatccctcctcaattggaggctggacagagctgaataggaaagacttgctattgcctaaggctatgtgtgacaccctcctgaggacctccc

SEQ ID NO: 84300 - DNA, 120 bp, Artificial Sequence
  ENSG00000083812_24 (sequence is synthesized)
caccccagtgtaatggcccttcatggcagggacagaaaggtggactgggggccatttgcttcctgtggccttcagcagaccaggccctgtccctacctggagcctcacctccaaggaaat

SEQ ID NO: 84301 - DNA, 120 bp, Artificial Sequence
  ENSG00000083812_25 (sequence is synthesized)
tcatgttctccttaatggaaaaaaaaaaaaaaagactaccatctgcaactcagagtaggtgttgcagtttcctgtacagcagtttggacctccagagcacagcctcttgtccctactcca

SEQ ID NO: 84302 - DNA, 120 bp, Artificial Sequence
  ENSG00000083812_26 (sequence is synthesized)
gagcatggttcagtcttaatagcagttcaagagcttctctgataaaggtttctttttaaacatttgtgtgaacggtagcaacctgacacctatttcaccctcatacaatgcagatggtat

SEQ ID NO: 84303 - DNA, 120 bp, Artificial Sequence
  ENSG00000083812_27 (sequence is synthesized)
tgaacataccctgacatgccatcagcgtttgtcatcatcacagaagttcctggacttggcttcaacctgggtaccctcaagaggccacagagtagagatacagcctgtctgcagcccagg

SEQ ID NO: 84304 - DNA, 120 bp, Artificial Sequence
  ENSG00000083812_28 (sequence is synthesized)
gagggagtgggatacctgtatccttttcagggtcagaggtgggttggggtagccaggagctggatgaactgggatagagtggggctgtctggagcagcagccctgctagatgagtcctgg

SEQ ID NO: 84305 - DNA, 120 bp, Artificial Sequence
  ENSG00000083812_29 (sequence is synthesized)
tggatcctggcaatgggaggatggtaggtggagaaaccaaggcagggctgtgttccttctgctgctgagatagagggtgtggccatgtgtgatgaccctgcaaggttgactccaaccagt

SEQ ID NO: 84306 - DNA, 120 bp, Artificial Sequence
  ENSG00000083812_30 (sequence is synthesized)
gggcactccatcccatggcttccaaaatcctgcagctatcctgccctatacacaaagagcccagatccaggccccacacacttgatattggggccagactcttccacctgtgaaacctca

SEQ ID NO: 84307 - DNA, 120 bp, Artificial Sequence
  ENSG00000083812_31 (sequence is synthesized)
caggttcctgcagggagtggagacacacagaacctagctcccctggagcctgcaagacttgggccaccagaatcccagtaggtccctgaaccattgtcccccagtaagtctgcagagctg

SEQ ID NO: 84308 - DNA, 120 bp, Artificial Sequence
  ENSG00000083812_32 (sequence is synthesized)
tgaaatgcagacaataacccttccctgcctgaaagagcacttttctggggagcccatgggagtcaggagcaaaagcatctgtcaaacaagtagatacccagagagtcacgtgaaatcatt

SEQ ID NO: 84309 - DNA, 120 bp, Artificial Sequence
  ENSG00000083812_33 (sequence is synthesized)
tctatgcctctgacagacgcttcttgagcgaagtttctgccctgagcccgcctgaccccttaggctgggctcagtaccctaccttgtcttcccaccagccgcctccctccatcaagttcc

SEQ ID NO: 84310 - DNA, 120 bp, Artificial Sequence
  ENSG00000083812_34 (sequence is synthesized)
tttccacgtctgcttgtgcccctgttgtccctcagtttgtccaccctcctccaatcttcccctccccaaacccatgactgatcagtggcccccaacctaggctcccacctccatgcaggt

SEQ ID NO: 84311 - DNA, 120 bp, Artificial Sequence
  ENSG00000083812_35 (sequence is synthesized)
cttggcccctcggctgacctccctccaacctccccctctgctcttaattttgaataggtagtgactgtaaaagtatccctgggcttctatgtcaaaaggtcagactgaacacatgcatct

SEQ ID NO: 84312 - DNA, 120 bp, Artificial Sequence
  ENSG00000083812_36 (sequence is synthesized)
cactgggctcagaaatccactgaaaccacagaggggagtatttaaaacacataacccacaagtatgaggatggtgacagaggagtcaggagcaatggcattcctaagctagaagtgggtg

SEQ ID NO: 84313 - DNA, 120 bp, Artificial Sequence
  ENSG00000083812_37 (sequence is synthesized)
agagctgtcactaagttagggaaggcaaaatactacgtggcgacttggcgaagaggagagagttcccaccaggctgactccagaaccgcagaaggctgagaaccagcagcccagagacgg

SEQ ID NO: 84314 - DNA, 120 bp, Artificial Sequence
  ENSG00000083812_38 (sequence is synthesized)
gagacctatatcaaagctgcctggggaacaactactgaagaagcccttaacgccccagtgctctccccacatggtggagggtgaaagtttttgtttttttttccttctgggactctgcat

SEQ ID NO: 84315 - DNA, 120 bp, Artificial Sequence
  ENSG00000083812_39 (sequence is synthesized)
agtcccagagaaaaggcctaagcacctcatccccaaaaacaacctgaggaggccgttggaaagctccgagttgacaagtctcatccacgcacatgctcggtgcttccaatcggtgatcaa

SEQ ID NO: 84316 - DNA, 120 bp, Artificial Sequence
  ENSG00000083812_40 (sequence is synthesized)
gaccactgctcttcatccagagcaggcagcagggattcccaggtatccaaagaaaccaaaacaggcggtgtaatttaggactgactaagtaatggctcggccacttttaagtgtggaagc

SEQ ID NO: 84317 - DNA, 120 bp, Artificial Sequence
  ENSG00000083812_41 (sequence is synthesized)
aaaactgaccccacagatttagaaaactgtaacactgcttattgggagaaactagtgtcaccctggctagttctgctccccaaattcaaaggtaaataaacggttgagcatgtccgatca

SEQ ID NO: 84318 - DNA, 120 bp, Artificial Sequence
  ENSG00000083812_42 (sequence is synthesized)
cgaggaaggtactggctgagggcccgcgtcgggcccgccctgcgcacgcgtcgtgatcaagggcgccggccgccggccgcgcccccaagcctctgtttctcagagtgcgtcgtgggcgtc

SEQ ID NO: 84319 - DNA, 120 bp, Artificial Sequence
  ENSG00000083812_43 (sequence is synthesized)
caggggactgtcgggccgcggcgggagccatgcgctctcccaccgtgcggcagcccaggaggctgcgcgctgggcgttccacgtccatgatggccggggagactgaggcgcggggcggcc

SEQ ID NO: 84320 - DNA, 120 bp, Artificial Sequence
  ENSG00000083812_44 (sequence is synthesized)
ccgggacgctgctggcggggaaaggctgggtggtccacgcctttcttccctcccagctgcgggttccgctggcggcggtggcgctgacaagcccgcgtcggggaagcaggggagtccctg

SEQ ID NO: 84321 - DNA, 120 bp, Artificial Sequence
  ENSG00000083812_45 (sequence is synthesized)
ctcacacagaccgcgccctcacggagggaggccgcttcctagacctcgcctagtcgtctttcctctccctgccctgggggggttgcgggggtcagtgcaaactcctgcgtccagggcact

SEQ ID NO: 84322 - DNA, 120 bp, Artificial Sequence
  ENSG00000083814_0 (sequence is synthesized)
gtagcggacattttgtttctgtcaggctgtccctggccggggttctgtaacgcttgtgtgggccgcaggtggaggtgttgggaaagcgcggaggagatgttgtccccagtgtcccgagac

SEQ ID NO: 84323 - DNA, 120 bp, Artificial Sequence
  ENSG00000083814_1 (sequence is synthesized)
gcgtctgatgctctgcagggacggaagtgcctgcgtccccgatcgagacgcctgccgctcccggcagctgtccgcgcccacggtcctatggcggagctaacggactccgcgcggggctgt

SEQ ID NO: 84324 - DNA, 120 bp, Artificial Sequence
  ENSG00000083814_2 (sequence is synthesized)
gtggtctttgaggatgtgtttgtatacttctctcgggaagaatgggagcttcttgatgatgctcagagacttttgtaccatgatgtgatgctggagaactttgcacttttagcctcactg

SEQ ID NO: 84325 - DNA, 120 bp, Artificial Sequence
  ENSG00000083814_3 (sequence is synthesized)
ggaattgcattttccagatcacgtgcagtcatgaaactagagcgaggagaagagccctgggtgtatgaccaggtggatatgacttcagccacagaaagagaggcccagaggggacttaga

SEQ ID NO: 84326 - DNA, 120 bp, Artificial Sequence
  ENSG00000083814_4 (sequence is synthesized)
cctggttgttggcatggagtggaggatgaagaggtatcttctgagcagagcatttttgtagcaggagtgtcagaggtcaggactctcatggcagagctggagtctcacccatgtgacata

SEQ ID NO: 84327 - DNA, 120 bp, Artificial Sequence
  ENSG00000083814_5 (sequence is synthesized)
tgtggcccaatattgaaagataccttacacctggctaaataccatgggggaaaagccaggcagaaaccatacttgtgtggggcatgtggaaagcaattctggttcagtacagactttgac

SEQ ID NO: 84328 - DNA, 120 bp, Artificial Sequence
  ENSG00000083814_6 (sequence is synthesized)
cagcaccagaaccagcccaatggagggaaacttttcccaaggaaggagggcagagactctgtgaaaagctgcagagtccatgtgccagagaagaccctcacatgtgggaaaggtaggaga

SEQ ID NO: 84329 - DNA, 120 bp, Artificial Sequence
  ENSG00000083814_7 (sequence is synthesized)
gacttttcagccacatctggccttcttcagcatcaggcctctctcagcagcatgaagccccacaagagcactaagcttgtgagtggctttctcatgggacagaggtatcacaggtgtggt

SEQ ID NO: 84330 - DNA, 120 bp, Artificial Sequence
  ENSG00000083814_8 (sequence is synthesized)
gaatgtgggaaagccttcacccgcaaagacacacttgctcggcatcagagaatccacactggagaaaggccttatgagtgtaacgaatgtgggaaattcttcagccaaagctatgacctc

SEQ ID NO: 84331 - DNA, 120 bp, Artificial Sequence
  ENSG00000083814_9 (sequence is synthesized)
tttaaacaccagacagttcacactggagaaaggccatacgagtgcagcgaatgtgggaaattctttagacaaatctccggcctgattgagcacaggcgagttcacacgggtgaaagactc

SEQ ID NO: 84332 - DNA, 120 bp, Artificial Sequence
  ENSG00000083814_10 (sequence is synthesized)
gcagtaagtctaatctcattcgacaccaggaagttcacacaggagccaggccttatgtatgcagcgaatgtgggaaagagttcagtcggaaacacacacttgttctgcaccaacgaactc

SEQ ID NO: 84333 - DNA, 120 bp, Artificial Sequence
  ENSG00000083814_11 (sequence is synthesized)
acactggagaaaggccttatgagtgcagtgaatgtgggaaggcctttagccaaagctcccaccttaatgtacactggagaattcacagcagtgattatgagtgtagcagatgtggtaaag

SEQ ID NO: 84334 - DNA, 120 bp, Artificial Sequence
  ENSG00000083814_12 (sequence is synthesized)
ctttcagctgcatctccaaactcattcagcaccagaaagttcactctggagaaaagccttatgagtgcagcaagtgcgggaaagccttcactcaaagacccaacctcatcaggcactgga

SEQ ID NO: 84335 - DNA, 120 bp, Artificial Sequence
  ENSG00000083814_13 (sequence is synthesized)
aagtccacactggggaaaggccttatgtgtgtagtgagtgcgggagagaattcatccggaaacagacacttgttctgcaccagagggttcatgctggagaaaagctttaagagtgtagca

SEQ ID NO: 84336 - DNA, 120 bp, Artificial Sequence
  ENSG00000083814_14 (sequence is synthesized)
aatgtgggggaaagtcttaggccaatgcccctgacttactatatggtggggaactagcagtagttaatgagtgcagcagatgcaggaaagccttcccctggaggctgaaccttacccgcc

SEQ ID NO: 84337 - DNA, 120 bp, Artificial Sequence
  ENSG00000083814_15 (sequence is synthesized)
attgggaatttcacaccggacacaggccttagcagtctaagcaatgtgctgtctctgttcagcccaacagctcaccctagagtggaactctgggagcagccattgggagggaaccatcag

SEQ ID NO: 84338 - DNA, 120 bp, Artificial Sequence
  ENSG00000083814_16 (sequence is synthesized)
taagaagtgaaacttcatagatatggacattcccactggggagattccctgtgagtgtcaagtatgtgagatgctttcagcagctgtgttgcactttttaaatggctattggcctttgct

SEQ ID NO: 84339 - DNA, 120 bp, Artificial Sequence
  ENSG00000083814_17 (sequence is synthesized)
ggggcaggagccatctgctcctaccatctggcagaatcatactgcgtttaccatttaccccagcatgcttgtgacgggcagacctctcttctctccccagtccctaaaaggtgttgtgag

SEQ ID NO: 84340 - DNA, 120 bp, Artificial Sequence
  ENSG00000083814_18 (sequence is synthesized)
tggtctcacagcccactaggggtcttaatttcctctcttttgatgtaaatggcatggaaataatcagctttgttcaagaggacacagaaggattctgcaaatagcctgcagagacttacc

SEQ ID NO: 84341 - DNA, 120 bp, Artificial Sequence
  ENSG00000083814_19 (sequence is synthesized)
tgtgttgattgatttcatatgatgctcgttatggatatatccaatatccaagtcacccagctctggaactgcctgcttcacattgctcatgataataaaggcctgttctttaagccacca

SEQ ID NO: 84342 - DNA, 120 bp, Artificial Sequence
  ENSG00000083814_20 (sequence is synthesized)
cggggaagggcacgatgtcaaagctgggttcaaaactggcaacattaactgttcacatcagtgtttgtttccagggccagtggccacacagcgtttctatctgtcctttcctgttcttga

SEQ ID NO: 84343 - DNA, 120 bp, Artificial Sequence
  ENSG00000083814_21 (sequence is synthesized)
tctagtttgttagccccttgccaccctcacctctggccttcaccttacacccatgtttcaccacttctctgtctacattttttggcagtattgacctgcaattaatgttcacaagatgtg

SEQ ID NO: 84344 - DNA, 120 bp, Artificial Sequence
  ENSG00000083814_22 (sequence is synthesized)
catatattcttaaatagtctttgaacaccagctgctcacttgtagttggattttcctgggactggatacatttttcatagcactcacgagtcactaacagtcaaggccctactggaagcc

SEQ ID NO: 84345 - DNA, 120 bp, Artificial Sequence
  ENSG00000083814_23 (sequence is synthesized)
atttgtttggttccattcttatatcctggcccttcattggcactcccccatggtatgacctccagaggctcactacctcaaagccattccttcctcactctgaccatgcctctcattctg

SEQ ID NO: 84346 - DNA, 120 bp, Artificial Sequence
  ENSG00000083814_24 (sequence is synthesized)
aaaacagtttcatgaacttattcctgcatgtgtcaaatgcacatatacaatgaggttgccccttcccacccgtaaatatgcatttaatcagcatttgtgtgttcttcaggttgttggcat

SEQ ID NO: 84347 - DNA, 120 bp, Artificial Sequence
  ENSG00000083814_25 (sequence is synthesized)
cgggccctcagtcaccctttctccgactccgaatcgtaaagtgcctgcagcccctgtgtcccaggacagcgacgcactcttggggcggggtcctatctcggtgtgggtgggtgtgggaga

SEQ ID NO: 84348 - DNA, 120 bp, Artificial Sequence
  ENSG00000083814_26 (sequence is synthesized)
gttacgggcggaggggacggcgcaggtaaaggctcgggggtgctgctgacccccaaacatttgggagacagggttctcatcaacacagagcagagtttgaggaactgtgactggaatggc

SEQ ID NO: 84349 - DNA, 120 bp, Artificial Sequence
  ENSG00000083814_27 (sequence is synthesized)
aggctgagaagttgtcgcttcattctgagggcgttgagattaactgagggttttgaatagaaggacgtgatcttagctgggattttaagtgtctcgaaatttgctcaggggagaacatta

SEQ ID NO: 84350 - DNA, 120 bp, Artificial Sequence
  ENSG00000083817_0 (sequence is synthesized)
gggacttccggcaccgctccgagatggtaattttggtggttctctacctcggcccacgccgcctgagttagaaacgctgcctccggcacagagcgggggtcgccccgctgcgcatcagcc

SEQ ID NO: 84351 - DNA, 120 bp, Artificial Sequence
  ENSG00000083817_1 (sequence is synthesized)
ggtgggtcgctggcgctggtggcagccgtgcctgggttcccgccccgggtcgcccgccgctcccggccccgctccgctcacaatccgatggcggcggccgtgcttagggattcgacttcg

SEQ ID NO: 84352 - DNA, 120 bp, Artificial Sequence
  ENSG00000083817_2 (sequence is synthesized)
gttcccgtgactgcagaagctaaacttatgggctttacacagggctgtgtgacctttgaggacgtggccatttacttctcccaggaagaatgggggctccttgatgaggctcagaggctc

SEQ ID NO: 84353 - DNA, 120 bp, Artificial Sequence
  ENSG00000083817_3 (sequence is synthesized)
ctgtaccgcgatgtgatgctggagaactttgcacttataactgcgctggtttgttggcatgggatggaggatgaagagacacctgagcaaagtgtttctgtagaaggagtacctcaggtc

SEQ ID NO: 84354 - DNA, 120 bp, Artificial Sequence
  ENSG00000083817_4 (sequence is synthesized)
aggactccagaggccagtccatccacccagaagattcaatcctgtgacatgtgtgtcccattcctgaccgacattttgcacctgaccgatttgcctgggcaggaactatacttgactggg

SEQ ID NO: 84355 - DNA, 120 bp, Artificial Sequence
  ENSG00000083817_5 (sequence is synthesized)
gcatgtgcggtctttcaccaggaccagaagcatcatagtgcagagaaacccttggaaagtgacatggacaaggcctcatttgtgcagtgctgcctgttccatgagtcaggaatgcctttc

SEQ ID NO: 84356 - DNA, 120 bp, Artificial Sequence
  ENSG00000083817_6 (sequence is synthesized)
accagcagtgaggttgggaaggacttcctagccccattgggcattcttcagccgcaagctattgctaactatgagaagccaaacaaaatcagcaaatgtgaggaggcctttcatgttgga

SEQ ID NO: 84357 - DNA, 120 bp, Artificial Sequence
  ENSG00000083817_7 (sequence is synthesized)
ataagtcattacaagtggagtcaatgcaggagagagtccagccacaaacacactttttttcaccctagagtctgcactggaaaaaggctttatgaatctagcaaatgtgggaaagcctgc

SEQ ID NO: 84358 - DNA, 120 bp, Artificial Sequence
  ENSG00000083817_8 (sequence is synthesized)
tgctgtgagtgctcccttgttcagctgcaaagagtccaccctggagaaaggccttatgagtgcagtgaatgtgggaaatcttttagccaaacctctcatctgaatgatcatcggagaatc

SEQ ID NO: 84359 - DNA, 120 bp, Artificial Sequence
  ENSG00000083817_9 (sequence is synthesized)
cacactggagaaaggccttatgtgtgtggtcagtgtgggaaatcatttagccaaagagccaccctcattaaacatcacagagttcacactggagaaaggccttacgagtgtggtgaatgt

SEQ ID NO: 84360 - DNA, 120 bp, Artificial Sequence
  ENSG00000083817_10 (sequence is synthesized)
accttattgaacattgcagaattcacactggagaaaggccttatgagtgtgatgaatgtggaaaagcctttgggtccaaatccactcttgttcgacaccagagaactcacacaggagaaa

SEQ ID NO: 84361 - DNA, 120 bp, Artificial Sequence
  ENSG00000083817_11 (sequence is synthesized)
agccatatgagtgtggtgaatgtgggaaattattcagacaaagcttcagccttgttgtacaccagagaattcacactacagcaaggccttatgagtgtggccagtgtgggaaatcattta

SEQ ID NO: 84362 - DNA, 120 bp, Artificial Sequence
  ENSG00000083817_12 (sequence is synthesized)
gcctaaagtgtggcctcattcagcaccagttaattcacagtggagctaggccctttgagtgtgatgagtgcggaaaatcctttagccaaagaaccaccctcaataaacaccacaaagttc

SEQ ID NO: 84363 - DNA, 120 bp, Artificial Sequence
  ENSG00000083817_13 (sequence is synthesized)
acactgcagaaaggccttatgtatgtggggaatgtgggaaagcttttatgttcaaatctaaacttgttaggcaccagagaactcacactggagaaaggccttttgagtgcagtgaatgtg

SEQ ID NO: 84364 - DNA, 120 bp, Artificial Sequence
  ENSG00000083817_14 (sequence is synthesized)
ggaaattttttagacaaagctataccctcgttgaacaccagaaaattcacactggattaaggccttacgactgtggacagtgcgggaaatcctttatccaaaagtctagcctcattcaac

SEQ ID NO: 84365 - DNA, 120 bp, Artificial Sequence
  ENSG00000083817_15 (sequence is synthesized)
accaagtggttcacacaggagaaaggccatatgagtgtggcaaatgtgggaagtcctttacacaacactctggcctcattctccaccgaaaatctcacactgtggagaggcctcgtgaca

SEQ ID NO: 84366 - DNA, 120 bp, Artificial Sequence
  ENSG00000083817_16 (sequence is synthesized)
gcagcaaatgtggaaaaccctacagcccaagatctaacattgtttaactcttgaaactccaaacctgagaaaagccttagacctgcagggaatgtgccatgtctttcttcagtgttatgg

SEQ ID NO: 84367 - DNA, 120 bp, Artificial Sequence
  ENSG00000083817_17 (sequence is synthesized)
ctatagagagcctttgtgaaggagccgtctgcctaaagttaaacctcatacttctagacctcccgatgggtcagactcccattagttccaggcatatgtgtcttgcaggagctcctttgc

SEQ ID NO: 84368 - DNA, 120 bp, Artificial Sequence
  ENSG00000083817_18 (sequence is synthesized)
atgttctaaactgctggaggcctttgccagagttaaatcattagtcacccttgcatactaaggcgaggcagatacacctgtgttctcccaacccttggaggaaattccttgagcagtctg

SEQ ID NO: 84369 - DNA, 120 bp, Artificial Sequence
  ENSG00000083817_19 (sequence is synthesized)
agcctttaaggggaattccttcccttttctgactgattacagcatacatctgaccagttttggccagaagggcccagcctgggttctgctggaagctgatgtggaaggcttcccttcatg

SEQ ID NO: 84370 - DNA, 120 bp, Artificial Sequence
  ENSG00000083817_20 (sequence is synthesized)
gaaattcttgttttcacacaacacttggtagtttttccagcctccaagtcaccacctagtaactggctgcctcacattgctctggtttgtgtggtaataaaggccttatttttaaatcta

SEQ ID NO: 84371 - DNA, 120 bp, Artificial Sequence
  ENSG00000083828_0 (sequence is synthesized)
gcctgtcaggtccatccggcgatgctgggtctggacgagctcgggaggagtggttgtggccattgcacacaggcggatctgaggttcggcgacgccgctggtcgcgacccgggacaggac

SEQ ID NO: 84372 - DNA, 120 bp, Artificial Sequence
  ENSG00000083828_1 (sequence is synthesized)
aacgacaggaacaccgccgagcccgcgttccccccccgcccagagtcatggcggcagcagccgctctgagggcgcctgctcagagcagtgtgacctttgaagatgtggctgtaaactttt

SEQ ID NO: 84373 - DNA, 120 bp, Artificial Sequence
  ENSG00000083828_2 (sequence is synthesized)
ccctggaggaatggagtcttcttaatgaggctcagagatgcctgtaccgtgacgtgatgctggagaccttgacacttatatcctccctgggttgttggcatggaggggaagatgaggcag

SEQ ID NO: 84374 - DNA, 120 bp, Artificial Sequence
  ENSG00000083828_3 (sequence is synthesized)
caccttctaagcagagcacgtgtatacatatatacaaagaccagggaggtcatagtggagaaaggccttatgagtgtggggaatataggaaattatttaagaacaagtcctgcctcactg

SEQ ID NO: 84375 - DNA, 120 bp, Artificial Sequence
  ENSG00000083828_4 (sequence is synthesized)
aacccagaagagatcacaaacacaggaatgttcgcactggagaaaggccttatgagtgcagcaaatatgggaaattatttcaccaaaagcctacactccatattcatgagagatttcata

SEQ ID NO: 84376 - DNA, 120 bp, Artificial Sequence
  ENSG00000083828_5 (sequence is synthesized)
ctgggcaaaagacctatgagtgcagtgagtgtggaaaatcatttcaccaaagctcttcactcttgcagcgtcagacacttcacactagagaaaggccttatgagtgtattgaatgtggga

SEQ ID NO: 84377 - DNA, 120 bp, Artificial Sequence
  ENSG00000083828_6 (sequence is synthesized)
aagcctttgctgaaaagtccagtctcattaaccacaggaaagttcactctggagcaaagcgttatgaatgcaatgaatgtgggaagtcctttgcttatacatctagtctcattaaacaca

SEQ ID NO: 84378 - DNA, 120 bp, Artificial Sequence
  ENSG00000083828_7 (sequence is synthesized)
ggaggattcacactggagagaggccttatgagtgcagtgaatgtgggagatcctttgctgaaaactccagtcttattaaacacttgagagttcacacaggagaaaggccttatgaatgcg

SEQ ID NO: 84379 - DNA, 120 bp, Artificial Sequence
  ENSG00000083828_8 (sequence is synthesized)
ttgagtgtggaaaatcatttcgccgaagctcttcactcttgcagcatcagagagttcacactagagaaaggccttatgaatgtagtgaatgtgggaaatcctttagcttaaggtccaacc

SEQ ID NO: 84380 - DNA, 120 bp, Artificial Sequence
  ENSG00000083828_9 (sequence is synthesized)
atgagtgcgggcagtgtgggaaatcctttagccgaaaatctagccttattatacatctgagagttcacactggagaaaggccttatgagtgcagtgactgtgggaaatcctttgctgaaa

SEQ ID NO: 84381 - DNA, 120 bp, Artificial Sequence
  ENSG00000083828_10 (sequence is synthesized)
actccagccttattaaacacttgagagttcacactggagaaaggccatatgaatgcattgattgtggaaaatcatttcgccacagttcttcgttccgtcgccatcagagagttcatactg

SEQ ID NO: 84382 - DNA, 120 bp, Artificial Sequence
  ENSG00000083828_11 (sequence is synthesized)
gaatgaggccttataagtgaagcaaattttggaaattctcttgcccaggctttttgctccttcaaggccagagagttcacaccagatcaaggtgttatgagtgtgacaaatggggaatat

SEQ ID NO: 84383 - DNA, 120 bp, Artificial Sequence
  ENSG00000083828_12 (sequence is synthesized)
tctttagctagaatgctagcttctttacataaaagagtgctcccactgaagaagtgccttttgagtgcaatgaatgtgagaaagccttcagccctctctcattggttaccacaatattta

SEQ ID NO: 84384 - DNA, 120 bp, Artificial Sequence
  ENSG00000083828_13 (sequence is synthesized)
catgaggaaaataccacagatgtggaggtaatattattttttcttcaatataacactggaggaaaccccttatgaggatgccatctgcctaaattgaatgtcatacatcaaatagctgca

SEQ ID NO: 84385 - DNA, 120 bp, Artificial Sequence
  ENSG00000083828_14 (sequence is synthesized)
tacattccaggtatgtgggaactgcatagtatttttcgacctgcccaggtctcttgctagacttctgtgacttacagttctcttctaaaaagcatttcacctttaccacttggcaggtgc

SEQ ID NO: 84386 - DNA, 120 bp, Artificial Sequence
  ENSG00000083828_15 (sequence is synthesized)
ccacagtacatcattcgcctaactcatcatgatccagaagtaactttgattttgtttcattcaacagagggattttttagtatcctcagcactcattctattctcatttctttctctcca

SEQ ID NO: 84387 - DNA, 120 bp, Artificial Sequence
  ENSG00000083828_16 (sequence is synthesized)
atgagttaggccatgaacctgactcatttttggcacagaggactcttctgataacttgaaaaaatggactacctttttcagggatcttttggatctcacagagttcttaagatggaattt

SEQ ID NO: 84388 - DNA, 120 bp, Artificial Sequence
  ENSG00000083828_17 (sequence is synthesized)
tccagcctgccagtcatgaatctcagacagcctgccacctattgccctgatttgtgttataataaaggccttgttgcttaagacaccttcagtctttgcaggagggcatggaagctccaa

SEQ ID NO: 84389 - DNA, 120 bp, Artificial Sequence
  ENSG00000083828_18 (sequence is synthesized)
acctttgaagacgtggctgtaaacttttccctggaggaatggagtcttcttaatgaggctcagggatgcctgtaccatgatgtgatgctggagaccttgacacttatatcctccctggta

SEQ ID NO: 84390 - DNA, 120 bp, Artificial Sequence
  ENSG00000083828_19 (sequence is synthesized)
gcattcttaagatagaattttccagcctgccagtcacaaatcagacagcctgcctgccgcctatttcccttgtttgtattataataaagactctgctgcttaagacaccttcaatcttga

SEQ ID NO: 84391 - DNA, 120 bp, Artificial Sequence
  ENSG00000083828_20 (sequence is synthesized)
gagctgtatttacagtgtggaattgtttgaacactggatttgcagatgggcatggtggctcatgcctgtgataccagcactttgggaggccgaggcagaagggtcagttgaggtcaggag

SEQ ID NO: 84392 - DNA, 73 bp, Artificial Sequence
  ENSG00000083828_21 (sequence is synthesized)
actaaaaatacaaaattagccaggcatcgtggcatttaacctgggaggtggaggctgcagtgagctcaggtaa

SEQ ID NO: 84393 - DNA, 120 bp, Artificial Sequence
  ENSG00000083828_22 (sequence is synthesized)
ctttaacctgggaggtggaggctgcagtgagctcaggtaatgccaccccataccaggatgagcaacaagagcgaaactatctcaaaaataccataattttggggttcataggtcaacctg

SEQ ID NO: 84394 - DNA, 120 bp, Artificial Sequence
  ENSG00000083828_23 (sequence is synthesized)
aaagggtggcagttttcatcacaatctctggtgcttctgagagcaacatgaaattgttctctacttcacaagggatggtgcattatgtttcagtgctgttgagggtaccttcacaggttg

SEQ ID NO: 84395 - DNA, 120 bp, Artificial Sequence
  ENSG00000083828_24 (sequence is synthesized)
tgaggttatagtggaaatgataagtttttcggaattactgcattttaaaagggcttctactatgatccagacatggctgtgaaggatgaatacaaacagaaattctcaggaccttcttaa

SEQ ID NO: 84396 - DNA, 120 bp, Artificial Sequence
  ENSG00000083828_25 (sequence is synthesized)
atttgtggtagtccttctagtctaattgacctaaaggtcattcctgcataggcaggaggaagaagaaagggagcagggatgtccattagaccactacgtggcccatcatgtgaccagccg

SEQ ID NO: 84397 - DNA, 120 bp, Artificial Sequence
  ENSG00000083828_26 (sequence is synthesized)
tcattctttctgaatcatctggaaatggtctttattgttcgtcatgtttttgttaccatgaaggctagttgcctcactcaggttgaggagatgatacagcaatagttaataaacctcttg

SEQ ID NO: 84398 - DNA, 120 bp, Artificial Sequence
  ENSG00000083828_27 (sequence is synthesized)
agatgatacagcaatagttaataaacctcttggaaaaatcaagtccagatttttaaaattacatttttaaagctgtaataagaaataaatcacttttttttttctttgagatggagtctc

SEQ ID NO: 84399 - DNA, 60 bp, Artificial Sequence
  ENSG00000083828_28 (sequence is synthesized)
tagccaccatgcctggccaaaataaatgactttcaaaaaaactgcacatatttattttta

SEQ ID NO: 84400 - DNA, 120 bp, Artificial Sequence
  ENSG00000083828_29 (sequence is synthesized)
ctgggattacaggcattagccaccatgcctggccaaaataaatgactttcaaaaaaactgcacatatttatttttatttatatttatttatttatttgagacagagtctggctctgtcgc

SEQ ID NO: 84401 - DNA, 64 bp, Artificial Sequence
  ENSG00000083828_30 (sequence is synthesized)
tggccaaaactgcacatatttaaactgtaaagtgtgataagttttgacattaataagcctgtaa

SEQ ID NO: 84402 - DNA, 120 bp, Artificial Sequence
  ENSG00000083828_31 (sequence is synthesized)
ctgtaaagtgtgataagttttgacattaataagcctgtaatatgatccatcaccttcatatttacctggagtctggtaacgtctttacctctgccttccagatgaccattgataactttg

SEQ ID NO: 84403 - DNA, 120 bp, Artificial Sequence
  ENSG00000083828_32 (sequence is synthesized)
ctttataatagattattttacattttctacatttttatacgtgatttgatgtcgtgaagtgtttaatctttatccctggatggtatcgtgcggtatatttattttgagatttgtcagtga

SEQ ID NO: 84404 - DNA, 120 bp, Artificial Sequence
  ENSG00000083828_33 (sequence is synthesized)
tgatacttgagtagttcactcctttttatattgctgagatgacatgctatgaaatatcactgtatattcattcatctgtttatacatcattaatctatttctcatttttggcttccataa

SEQ ID NO: 84405 - DNA, 120 bp, Artificial Sequence
  ENSG00000083828_34 (sequence is synthesized)
aatgtagggccgagacttccggggtcctcttgtagcggccacgttgatctgcgatacgcgtgtttgcccagtgagtggccccggactgctacgtgggactgcggtgaatgaacccagaag

SEQ ID NO: 84406 - DNA, 120 bp, Artificial Sequence
  ENSG00000083828_35 (sequence is synthesized)
gtggagaggaaccgttctcggtgcacagaggcggctctgcagcccggtgagggcgcctgctgctcccgggcagtgctttccccaagtagtccgatggctgcggctgcgccgaggcgccct

SEQ ID NO: 84407 - DNA, 120 bp, Artificial Sequence
  ENSG00000083828_36 (sequence is synthesized)
ctctccccaccgcatcccacgggtgtctgaaacagggatccctcccgagagcgcctcagtgtcccgacgccgggtccgggttgcagagccgtaaacaggtgccgctccctcgctgcttta

SEQ ID NO: 84408 - DNA, 120 bp, Artificial Sequence
  ENSG00000083828_37 (sequence is synthesized)
tgcaacaggagcacactgaacaaagaagacagggtcatttataacctgaggcgttcaccctcctgccggtttccattgcctggaacaggacctcatattctgtatgtgtcctgattggct

SEQ ID NO: 84409 - DNA, 85 bp, Artificial Sequence
  ENSG00000083828_38 (sequence is synthesized)
tggaacaggacctcatattctgtatgtgtcctgattggctagcaacttagaaccttttaagaggcaaaggtagaggagaacaaag

SEQ ID NO: 84410 - DNA, 120 bp, Artificial Sequence
  ENSG00000083838_0 (sequence is synthesized)
ctttcctaccctcaacgccgttccggggggccgggcctggcaagtcctcttggaacgcctccctcttgccttccccttttggggacagatcccgaagttcgagcatccctcggataggcc

SEQ ID NO: 84411 - DNA, 120 bp, Artificial Sequence
  ENSG00000083838_1 (sequence is synthesized)
gggtgtcaggcctggtctctcaggcccgtccaggcccatcttgacgattccaagaccacccccttgagcaagaatgccatcccctctgggtcccccatgcctgcccgtcatggacccaga

SEQ ID NO: 84412 - DNA, 120 bp, Artificial Sequence
  ENSG00000083838_2 (sequence is synthesized)
gaccacccttgaggagcctgagactgcccgcctccgcttccgagggttctgctaccaggaggtggcaggtccccgagaagccctggcccggctgcgtgagctgtgttgccagtggctgca

SEQ ID NO: 84413 - DNA, 120 bp, Artificial Sequence
  ENSG00000083838_3 (sequence is synthesized)
gcctgaggcacactccaaggagcagatgctggagatgctggtgctggagcagttcctgggcacactgcctcccgagatccaggcctgggtgcgcggtcagcggccaggcagtcctgagga

SEQ ID NO: 84414 - DNA, 120 bp, Artificial Sequence
  ENSG00000083838_4 (sequence is synthesized)
ggccgctgccctagtcgaaggactgcagcatgaccctgggcaactgttgggctggatcacagcccatgtcctgaagcaggaggtgctccctgcagcccagaagacagaggaaccacttgg

SEQ ID NO: 84415 - DNA, 120 bp, Artificial Sequence
  ENSG00000083838_5 (sequence is synthesized)
gagcccccacccctcagggacagtggagtcccctggggaaggtccccaggacaccagaatagaggggtctgtccagctcagctgcagtgtgaaggaggagcccaatgtcgatggacagga

SEQ ID NO: 84416 - DNA, 120 bp, Artificial Sequence
  ENSG00000083838_6 (sequence is synthesized)
agtggcaccctccagccctccacttgcagcacagtcccctgaggggaaccatggacaccaagaaccagcctccacatccttccacccacccaggattcaggaggagtgggggctgctgga

SEQ ID NO: 84417 - DNA, 120 bp, Artificial Sequence
  ENSG00000083838_7 (sequence is synthesized)
ccggtcacagaaggaactgtactgggatgcgatgctggagaagtacggcacagtggtctccctggggttaccgccccaccagccagaggcacaggcccagtcagagctggggatgctgct

SEQ ID NO: 84418 - DNA, 120 bp, Artificial Sequence
  ENSG00000083838_8 (sequence is synthesized)
ggcgtctgcagaagcctgcgctcgggaaatgagagtgagggtccacctggctgcccagaggcccagccgccccagggcccagggccggcagcctgggagggcttgtctggggctgccact

SEQ ID NO: 84419 - DNA, 120 bp, Artificial Sequence
  ENSG00000083838_9 (sequence is synthesized)
cctgcccccactgtgcgcccagggacaccgccagtgcccactcagcccacacctgcagagacgagactggagccggctgccacccccaggaagccctacacgtgcgagcagtgtggccgc

SEQ ID NO: 84420 - DNA, 120 bp, Artificial Sequence
  ENSG00000083838_10 (sequence is synthesized)
ggcttcgactggaagtcagtgttcgtcatccaccaccggacacacacgagtgggccaggtgtgcagtccccggggctagccaccggggaaagcacagagaagccaccacaaggggaggtg

SEQ ID NO: 84421 - DNA, 120 bp, Artificial Sequence
  ENSG00000083838_11 (sequence is synthesized)
gcctttccgcaccacccccgacgctcactcacaggcccccggagttacccgtgtgaggagtgcgggtgcagcttcagctggaagtcgcagctggtcatccaccgcaagagccacacaggc

SEQ ID NO: 84422 - DNA, 120 bp, Artificial Sequence
  ENSG00000083838_12 (sequence is synthesized)
cagcggcgtcacttctgcagtgactgtggccgcgccttcgactggaagtcgcagctggtcatccaccgcaagggccaccggccggaggttccatgagcagccagacagcacagtccctcg

SEQ ID NO: 84423 - DNA, 120 bp, Artificial Sequence
  ENSG00000083838_13 (sequence is synthesized)
gggcctcggtgttctcggggcctggatacagcctctggggcaccagcagaagactctggaggcagcaggggatgccagagtgaacaaggggtcccaagccagttccctgcccctggtctg

SEQ ID NO: 84424 - DNA, 120 bp, Artificial Sequence
  ENSG00000083838_14 (sequence is synthesized)
gtctcccccaaaagacctgggtgcaaggaaaaggagctgctctctctcttcttgcccctgcctcctagagggaggtctgggttcccttctatggctgaccagtgcctgtggggtgactgc

SEQ ID NO: 84425 - DNA, 120 bp, Artificial Sequence
  ENSG00000083838_15 (sequence is synthesized)
caagcaccaggctccctccctccctgtgacatggcctgggctgacaacactccctctcctgggacctccttgcctcaggtgggtgttcaaaaactgtgccttcccactcgtctgtgcaga

SEQ ID NO: 84426 - DNA, 120 bp, Artificial Sequence
  ENSG00000083838_16 (sequence is synthesized)
ggctgggcctgaggtctcagtgtggagagcagcagaagacccaggaaagcacagttggcttccgtttctcctgctccctgtgtgtgttagaattttaacataaattccactttcataata

SEQ ID NO: 84427 - DNA, 120 bp, Artificial Sequence
  ENSG00000083838_17 (sequence is synthesized)
tccaaaatcctgcagctatcctgccctatacacaaagagcccagatccaggccccacacacttgatattggggccagactcttccacctgtgaaacctcacaggttcctgcagggagtgg

SEQ ID NO: 84428 - DNA, 120 bp, Artificial Sequence
  ENSG00000083838_18 (sequence is synthesized)
agacacacagaacctagctcccctggagcctgcaagacttgggccaccagaatcccagtaggtccctgaaccattgtcccccagtaagtctgcagagctgtgaaatgcagacaataaccc

SEQ ID NO: 84429 - DNA, 120 bp, Artificial Sequence
  ENSG00000083838_19 (sequence is synthesized)
ttccctgcctgaaagagcacttttctggggagcccatgggagtcaggagcaaaagcatctgtcaaacaagtagatacccagagagtcacgtgaaatcatttctatgcctctgacagacgc

SEQ ID NO: 84430 - DNA, 120 bp, Artificial Sequence
  ENSG00000083838_20 (sequence is synthesized)
ttcttgagcgaagtttctgccctgagcccgcctgaccccttaggctgggctcagtaccctaccttgtcttcccaccagccgcctccctccatcaagttcctttccacgtctgcttgtgcc

SEQ ID NO: 84431 - DNA, 120 bp, Artificial Sequence
  ENSG00000083838_21 (sequence is synthesized)
cctgttgtccctcagtttgtccaccctcctccaatcttcccctccccaaacccatgactgatcagtggcccccaacctaggctcccacctccatgcaggtcttggcccctcggctgacct

SEQ ID NO: 84432 - DNA, 120 bp, Artificial Sequence
  ENSG00000083838_22 (sequence is synthesized)
ccctccaacctccccctctgctcttaattttgaataggtagtgactgtaaaagtatccctgggcttctatgtcaaaaggtcagactgaacacatgcatctcactgggctcagaaatccac

SEQ ID NO: 84433 - DNA, 120 bp, Artificial Sequence
  ENSG00000083838_23 (sequence is synthesized)
tgaaaccacagaggggagtatttaaaacacataacccacaagtatgaggatggtgacagaggagtcaggagcaatggcattcctaagctagaagtgggtgagagctgtcactaagttagg

SEQ ID NO: 84434 - DNA, 120 bp, Artificial Sequence
  ENSG00000083838_24 (sequence is synthesized)
gaaggcaaaatactacgtggcgacttggcgaagaggagagagttcccaccaggctgactccagaaccgcagaaggctgagaaccagcagcccagagacgggagacctatatcaaagctgc

SEQ ID NO: 84435 - DNA, 120 bp, Artificial Sequence
  ENSG00000083838_25 (sequence is synthesized)
ctggggaacaactactgaagaagcccttaacgccccagtgctctccccacatggtggagggtgaaagtttttgtttttttttccttctgggactctgcatagtcccagagaaaaggccta

SEQ ID NO: 84436 - DNA, 120 bp, Artificial Sequence
  ENSG00000083838_26 (sequence is synthesized)
agcacctcatccccaaaaacaacctgaggaggccgttggaaagctccgagttgacaagtctcatccacgcacatgctcggtgcttccaatcggtgatcaagaccactgctcttcatccag

SEQ ID NO: 84437 - DNA, 120 bp, Artificial Sequence
  ENSG00000083838_27 (sequence is synthesized)
agcaggcagcagggattcccaggtatccaaagaaaccaaaacaggcggtgtaatttaggactgactaagtaatggctcggccacttttaagtgtggaagcaaaactgaccccacagattt

SEQ ID NO: 84438 - DNA, 120 bp, Artificial Sequence
  ENSG00000083838_28 (sequence is synthesized)
agaaaactgtaacactgcttattgggagaaactagtgtcaccctggctagttctgctccccaaattcaaaggtaaataaacggttgagcatgtccgatcagcctggagggaaacctccac

SEQ ID NO: 84439 - DNA, 120 bp, Artificial Sequence
  ENSG00000083838_29 (sequence is synthesized)
ccccgactttgtaggactgacatctgaagacgtcagagactgcggtcacaaccgtcggtacctccttagggcgcttaacagaggtcaaagatggccctcgcaccctcctggcgggagaaa

SEQ ID NO: 84440 - DNA, 120 bp, Artificial Sequence
  ENSG00000083838_30 (sequence is synthesized)
gcccaggctcagggtggtcttctacaccaccgcctctcccgggtccacttggaagcgagtcccagcgaactactcgacctaggaaaccactgggccgccacttccagcctcttcggaagt

SEQ ID NO: 84441 - DNA, 120 bp, Artificial Sequence
  ENSG00000083838_31 (sequence is synthesized)
cgaggcaacgctcctgaacgttgccacgggaacagctggaggcgggcggatatgccctagcgttatctaggggctggcccggggaatggcgtgggggcggcggggccaagcaagcgccac

SEQ ID NO: 84442 - DNA, 120 bp, Artificial Sequence
  ENSG00000083838_32 (sequence is synthesized)
ctctgattgggcaaaaccccctcccctcacctgccaatagaaaccggcccactgtacagacgcgcaagtttataacccgggaagagctgctctcagagcggagggagaccatataaccct

SEQ ID NO: 84443 - DNA, 120 bp, Artificial Sequence
  ENSG00000083838_33 (sequence is synthesized)
tcgcgcctgtcttgctgatgctcatgggaaatgtagttcaaagggcatgggcggtgccttcggtgcaggcgagagattggtcagcgcggcgtcgccggggcaacacccggctgaggcgcc

SEQ ID NO: 84444 - DNA, 120 bp, Artificial Sequence
  ENSG00000083838_34 (sequence is synthesized)
cctggggcctgcacccaccctgcagcaggcctagctgggcagggcctctgtgctaccagccctacccagctctcccaccttccagaggaacaccctgtcacctaccagaaccgaccccac

SEQ ID NO: 84445 - DNA, 120 bp, Artificial Sequence
  ENSG00000083838_35 (sequence is synthesized)
gctagggtgggagtcccaggagaggtgtgtcaaggctgggactcctgaagtgaatgtggatgtccctgtctgggatggggacctgggaggcaggagccaagggctggctacgtgccatgt

SEQ ID NO: 84446 - DNA, 120 bp, Artificial Sequence
  ENSG00000083838_36 (sequence is synthesized)
cacacagcagaggagctcctcatctgccatggctcatgtgggcagcccctgacaccacccttccatctgccccacttttcagcaccctccagccctccacttgcagcacagtcccctgag

SEQ ID NO: 84447 - DNA, 120 bp, Artificial Sequence
  ENSG00000083844_0 (sequence is synthesized)
attttcttctgcacttctgtctggagaggtctgtagccactgagggccccggtcggggccgctttgcaggtccctagtcaggaccgagcaggggagtaggataggaatccccgccgcacc

SEQ ID NO: 84448 - DNA, 120 bp, Artificial Sequence
  ENSG00000083844_1 (sequence is synthesized)
tttgtacgagcctgaccccttccgtgggtttgttcctgggtcgccgtcaagctgcggtctctcctcccccgcccttcagccccgcggtctccaggggcggcgccctgggtctggaacgcg

SEQ ID NO: 84449 - DNA, 120 bp, Artificial Sequence
  ENSG00000083844_2 (sequence is synthesized)
gttgccaccgaggaggcggcggccctgcgtctggaacgccgttgccaccgaggaggcggcggccccgagcgcgcctggaagccccgggcaaccggccagggtcgggcacaggtggggtcc

SEQ ID NO: 84450 - DNA, 120 bp, Artificial Sequence
  ENSG00000083844_3 (sequence is synthesized)
gtcaggccgcccggggctcctctgtcccagctctgcggcccagggggtgacgtgatggcggcagcggtgctgacggaccgggcccaggtgtctgtgacctttgatgatgtggctgtgact

SEQ ID NO: 84451 - DNA, 120 bp, Artificial Sequence
  ENSG00000083844_4 (sequence is synthesized)
ttcaccaaggaggagtgggggcagctggacctagctcagcggaccctgtaccaggaggtgatgctggaaaactgtgggctcctggtgtctctggggtgtcctgttcccaaagctgagctg

SEQ ID NO: 84452 - DNA, 120 bp, Artificial Sequence
  ENSG00000083844_5 (sequence is synthesized)
atctgccacctagagcatgggcaggagccatggaccaggaaggaagacctctcccaagacacctgtccaggcgacaaaggaaaacctaagaccacagaacctaccacttgtgagccagcc

SEQ ID NO: 84453 - DNA, 120 bp, Artificial Sequence
  ENSG00000083844_6 (sequence is synthesized)
ttgtcagagggaatctcacttcagggacaagtgacacaaggaaactcagtggactcacagttggggcaagccgaggatcaggatgggctatcagaaatgcaggaaggacacttcagacca

SEQ ID NO: 84454 - DNA, 120 bp, Artificial Sequence
  ENSG00000083844_7 (sequence is synthesized)
ggaatagatccccaggagaagtctcctgggaagatgagccctgaatgtgatggtttagggacagctgatggtgtgtgttcaaggattggacaggagcaagtctctccaggagatagagtc

SEQ ID NO: 84455 - DNA, 120 bp, Artificial Sequence
  ENSG00000083844_8 (sequence is synthesized)
cgtagccataactcatgtgagtcaggtaaagatcccatgattcaggaagaggaaaataactttaaatgcagtgaatgtggaaaagtatttaacaagaaacacctccttgctggacatgag

SEQ ID NO: 84456 - DNA, 120 bp, Artificial Sequence
  ENSG00000083844_9 (sequence is synthesized)
aaaattcactctggagttaagccctatgaatgcacagaatgtgggaaaacctttattaagagcacacatctcctgcaacatcacatgatccacactggggagaggccctatgagtgcatg

SEQ ID NO: 84457 - DNA, 120 bp, Artificial Sequence
  ENSG00000083844_10 (sequence is synthesized)
gagtgtggaaaggccttcaaccgcaagtcataccttacccagcaccagcggattcacagtggagagaagccttacaagtgcaatgaatgcggaaaggccttcacccaccgctccaatttt

SEQ ID NO: 84458 - DNA, 120 bp, Artificial Sequence
  ENSG00000083844_11 (sequence is synthesized)
gtcttgcataacaggagacacactggagaaaaatcctttgtgtgcacagaatgtggccaagtctttcgacataggccaggctttctccggcactatgttgtccacagtggtgagaatccc

SEQ ID NO: 84459 - DNA, 120 bp, Artificial Sequence
  ENSG00000083844_12 (sequence is synthesized)
tatgagtgcttggagtgtggcaaggtcttcaaacacaggtcatatctcatgtggcaccagcagactcataccggggagaagccctatgagtgcagtgaatgtgggaaggtcttcttggag

SEQ ID NO: 84460 - DNA, 120 bp, Artificial Sequence
  ENSG00000083844_13 (sequence is synthesized)
agtgcagccctgattcaccactatgtcatccacactggagagaagccctttgagtgcctcgagtgtgggaaggctttcaaccaccgatcctacctcaagaggcaccagcggattcacact

SEQ ID NO: 84461 - DNA, 120 bp, Artificial Sequence
  ENSG00000083844_14 (sequence is synthesized)
ggggagaagcccttcgtgtgcagtgaatgtggaaaggccttcacccactgctctacttttatcttgcataaaagggcccacactggagaaaagcctttcgagtgcaaagagtgtgggaaa

SEQ ID NO: 84462 - DNA, 120 bp, Artificial Sequence
  ENSG00000083844_15 (sequence is synthesized)
gcctttagcaatcggaaggacctcattcgccacttcagcatccacactggagagaagccctatgagtgcgtggagtgtggaaaggccttcacccgcatgtcgggcctcacgaggcacaag

SEQ ID NO: 84463 - DNA, 120 bp, Artificial Sequence
  ENSG00000083844_16 (sequence is synthesized)
cggattcatagtggagagaagccctatgaatgtgttgagtgtgggaaatcgttttgctggagcacaaacctcattcgacatgccattatccacactggagagaagccctataaatgtagt

SEQ ID NO: 84464 - DNA, 120 bp, Artificial Sequence
  ENSG00000083844_17 (sequence is synthesized)
gaatgtggaaaggccttcagtcgcagctcgtccctcactcagcatcaaaggatgcatactgggaaaaatcccatcagtgtaacagatgtgggaagaccttttacaagtggacaaacctca

SEQ ID NO: 84465 - DNA, 120 bp, Artificial Sequence
  ENSG00000083844_18 (sequence is synthesized)
gttacccttcgagaacttcttttagggaaggactttttgaatgtaaccactgaggcaaatattttgccagaggaaacatcttcctctgcatctgatcaaccataccaaagagaaacccca

SEQ ID NO: 84466 - DNA, 120 bp, Artificial Sequence
  ENSG00000083844_19 (sequence is synthesized)
caagtgtcttcactgtgagaaaaccttctgttgctgaatattacttgtcatctgaagagtcatattagaaattcgttcagtctagagccttattctccatctgataatttatcctggaga

SEQ ID NO: 84467 - DNA, 120 bp, Artificial Sequence
  ENSG00000083844_20 (sequence is synthesized)
gagacccagtggttattgtgcacataggagaaccttcagctgcatctttctccttagtttacagtgcaattttatctcaggaattatttttaaaaggaggaggggacatagaaaaaatga

SEQ ID NO: 84468 - DNA, 120 bp, Artificial Sequence
  ENSG00000083844_21 (sequence is synthesized)
aatgcaagcacacatcttttcaggcttctctgccaagcctatggcgctttgtcatggatttcttagtgtatttgggggaagggaaatgtttcaaggtaaagaaccttgaccctttatgtg

SEQ ID NO: 84469 - DNA, 120 bp, Artificial Sequence
  ENSG00000083844_22 (sequence is synthesized)
cttgtatgtacatttattgctatccagtgtcagaacagttagtttaggaaaagtatgcaaactttaatcgcacatcttctgtattccacaatagtacttactcttgagaagcataacttt

SEQ ID NO: 84470 - DNA, 120 bp, Artificial Sequence
  ENSG00000083844_23 (sequence is synthesized)
atgacaacttagggggcttgagccatgaaatactcacgtttaagtcagtaaggatacacatgttaacattcaggcttttgtcttgatgcccgtcttttggtttacgtcatcattgtagcc

SEQ ID NO: 84471 - DNA, 120 bp, Artificial Sequence
  ENSG00000083844_24 (sequence is synthesized)
atatggtaaatttttatttgttaaatttttaaaaattacttagctcaaaatgtcagtggtaaatttttaaattgagtaaagtgattcttctttgctcttatttaaaatcgacagcatttc

SEQ ID NO: 84472 - DNA, 120 bp, Artificial Sequence
  ENSG00000083844_25 (sequence is synthesized)
tagttcctttgacattccatataatttttaggattagtttgtacttatttacaaaacagtcttgttcagatttttacagaaattgagttaagtctgtggattaatctgttaagaattggt

SEQ ID NO: 84473 - DNA, 120 bp, Artificial Sequence
  ENSG00000083844_26 (sequence is synthesized)
atctttactatgttgggtcttgtagttcatgagtgcaggagtaggcctcttaatttataatagttaagcattccttaaagtatttcattaatgttaaaaattttcagcgtatagatccct

SEQ ID NO: 84474 - DNA, 120 bp, Artificial Sequence
  ENSG00000083844_27 (sequence is synthesized)
atgcatttttgttagaatttgcatcctagggtgcttttttgtttgtgtgtgtgtgtaatttgagtgattgtaaatggcattgatgtttgaactttgaattgcacacaatttttggtagta

SEQ ID NO: 84475 - DNA, 120 bp, Artificial Sequence
  ENSG00000083844_28 (sequence is synthesized)
tacagaaatataatatttttggacattgttttgctaccctgcaaccttattgagttcacttattatttttagctatttctttcgacagaatccttggaattttctatatagaaatgtcat

SEQ ID NO: 84476 - DNA, 120 bp, Artificial Sequence
  ENSG00000083844_29 (sequence is synthesized)
ctgcaaatacagaccattttttatctttcatcttacctgtaatataccttttatttcctttttgtttgtcttattgcattgcacaagctgggacttccattatagcgttgaataggaata

SEQ ID NO: 84477 - DNA, 120 bp, Artificial Sequence
  ENSG00000083844_30 (sequence is synthesized)
tatagcgttgaataggaatagtgagaaaggccatccttacctggttcctgatagtaggggggacaatgttcagttttttgtttttttgttttttgtttgagacagggtctcgctctgtca

SEQ ID NO: 84478 - DNA, 120 bp, Artificial Sequence
  ENSG00000083844_31 (sequence is synthesized)
cacgatcttgtctcaccatagccttaagttcctgggctcaagtgatccccccacctcagccctcaccaccccccagtagctggtactacaagcatgcaccaccagtcccagctaattttt

SEQ ID NO: 84479 - DNA, 72 bp, Artificial Sequence
  ENSG00000083844_32 (sequence is synthesized)
gctggtcttgaactcctgggctcaagcaacctgctacagcatgttcagtttttcatcatgaagtataatgta

SEQ ID NO: 84480 - DNA, 120 bp, Artificial Sequence
  ENSG00000083844_33 (sequence is synthesized)
tgcacagcatgttcagtttttcatcatgaagtataatgtaagttttataaaacatatgtcctctataagggtaaaaaatttcctctgttcccagttttctgagactctgtgttgctatga

SEQ ID NO: 84481 - DNA, 120 bp, Artificial Sequence
  ENSG00000083844_34 (sequence is synthesized)
ataagtgtggaattttgttcagtactttttctccaccagttgatgtcattatgctattttccttctacatcctattgatggaatgtattgctttgatcaagttttgaatattgagccagc

SEQ ID NO: 84482 - DNA, 120 bp, Artificial Sequence
  ENSG00000083844_35 (sequence is synthesized)
cttgcatccttagaataaaccatacttgtttgtagagtataattgtttttatatatcatttgacatcattccctttgtttgtattttgttgaggaaatattcctctaatttattggctaa

SEQ ID NO: 84483 - DNA, 120 bp, Artificial Sequence
  ENSG00000083844_36 (sequence is synthesized)
taatgtgtagttcttttttcttttgtttcttatgttctaaatgtcttatgtgtggttttgatgtctaggtgatcttgacctttcaacatgaattggaaggagttctcttctaatttttgg

SEQ ID NO: 84484 - DNA, 120 bp, Artificial Sequence
  ENSG00000083844_37 (sequence is synthesized)
aagactgtgtagaattggtgttatttgttcttgtcatgtttgatgacctctagtcaaccattgggccagagatttttcttctggaggcttttaaattacatatttattttattggatagg

SEQ ID NO: 84485 - DNA, 120 bp, Artificial Sequence
  ENSG00000083844_38 (sequence is synthesized)
tagaactattcgaagtatctatttcttgtgtaataaattttgatagtctgtcctgttgaaggaatatttcatctgtatttgtagcactcccttattcttttgatagcaggatctgcactt

SEQ ID NO: 84486 - DNA, 120 bp, Artificial Sequence
  ENSG00000083844_39 (sequence is synthesized)
ctttttatttttaatatttaaaatgtgcatactcattttatgattgagtcttcttagacatttatcagttttattgcgcatcatgctgaaagatgtaatttttgcttcatctctcacttc

SEQ ID NO: 84487 - DNA, 120 bp, Artificial Sequence
  ENSG00000083844_40 (sequence is synthesized)
agagaactagcactttatattaatgatttgtctctattcttgatttctttgatttctgctctgatcggtattatattccacttgctttggttgtatttggctctttctaacttttcaagg

SEQ ID NO: 84488 - DNA, 120 bp, Artificial Sequence
  ENSG00000083844_41 (sequence is synthesized)
tggggttttagattattgatttgagatttttttgcttttttaatgtaagcattacattgtataaatttacctcatatcactattggtttgatcccacaagttttaatgttttcattacat

SEQ ID NO: 84489 - DNA, 120 bp, Artificial Sequence
  ENSG00000083844_42 (sequence is synthesized)
tttaattctaatagtttttattttttgagacattctctcttagccatgaattatttaatagtatgcttaattttctggtgtttggcatatttgttactgatttctaatttgttccatgtt

SEQ ID NO: 84490 - DNA, 120 bp, Artificial Sequence
  ENSG00000083844_43 (sequence is synthesized)
tgatctgactgtttaaatgtgttaacatttttttatgacccaggatagggtctatcttgtttcgtatagctgcttgaaaagaatgggtgttctgctgttactgggtggagtttctataaa

SEQ ID NO: 84491 - DNA, 120 bp, Artificial Sequence
  ENSG00000083844_44 (sequence is synthesized)
tgtctctatgatcctgctcattgttattcaagtcagctatgtccttgctgattttctgtccagcatttctgtcagttgctgagaggggtgttgaagtcctgaacataggccgggtgcagt

SEQ ID NO: 84492 - DNA, 120 bp, Artificial Sequence
  ENSG00000083844_45 (sequence is synthesized)
gcgagactctgtctcaacaacaacaacaaaaagtcctgaacatgattgtggaagtgtgttgctctttcaagttctatcactttttgtttgcaaagttcaaagctgtattgtttggtacat

SEQ ID NO: 84493 - DNA, 120 bp, Artificial Sequence
  ENSG00000083844_46 (sequence is synthesized)
tgtttggtacatatacatgtaggtttgccaagtctttgtggtgaattgactcttctgtcattatgtgatgtcatttttttgccttttaatagtcttgtcaatactttacctgatgttctc

SEQ ID NO: 84494 - DNA, 120 bp, Artificial Sequence
  ENSG00000083844_47 (sequence is synthesized)
atagtgactcctgcatattttgattaatgtttgcatggttaatatttcttcattttattttaaagcttacctgtatcattacttatgaagtcagtttctttgaacagcatatactcaggc

SEQ ID NO: 84495 - DNA, 120 bp, Artificial Sequence
  ENSG00000083844_48 (sequence is synthesized)
atgttgaaatgatttacattaaaataattattgatattttagggcttaagtgtgcccttaaatgatttttgtgttcttttttattgttcctctgttatttggggttgtttactagtcttc

SEQ ID NO: 84496 - DNA, 120 bp, Artificial Sequence
  ENSG00000083844_49 (sequence is synthesized)
ctataggttacttcaccttttttttttttaataatttgatttgatacatatgtagtgttttttagtatagatcctccttgacttatgatggggttatgtcacaataaacccattgcaagt

SEQ ID NO: 84497 - DNA, 120 bp, Artificial Sequence
  ENSG00000083844_50 (sequence is synthesized)
tgaaaatactatgtcaaatatgcatttaatacacctaccctgctgaacatcatagccgatcttgccttcagaatgctcagaaaatttacattagcctgcagttgggcaaaatcatctaac

SEQ ID NO: 84498 - DNA, 120 bp, Artificial Sequence
  ENSG00000083844_51 (sequence is synthesized)
acaaggcctactttataataaagttactgcaaagaattttaaataaaaattcaagtgtggtttctactgaatgcatgtcgcattcgcaccattgtaaagtcaagtagtaagtcgaaccat

SEQ ID NO: 84499 - DNA, 120 bp, Artificial Sequence
  ENSG00000083844_52 (sequence is synthesized)
cctaagtcagggactgtctgtatatatctgcattttttagtgattgttctactattacagtgtaaatatataacttatgacagtttaataagttatcagcaatttagcactttacttcca

SEQ ID NO: 84500 - DNA, 120 bp, Artificial Sequence
  ENSG00000083844_53 (sequence is synthesized)
ttaggttcctttagcttacctactaatgtaactatcttaagtaatagtaattcctcttcaaaaattgagcgctatgttgcaagatgtaatttttcttttccttttttttgagaccaagtc

SEQ ID NO: 84501 - DNA, 75 bp, Artificial Sequence
  ENSG00000083844_54 (sequence is synthesized)
tcacccacgctggagtgctgtgatgaactgcctcagcttccctagtaatggattacaggcgcccgccaccacgcc

SEQ ID NO: 84502 - DNA, 90 bp, Artificial Sequence
  ENSG00000083844_55 (sequence is synthesized)
acaggtgtgagccactgcacccggccacaagatgtaatttttactttatctctcacacgtattttacaaaacgtcatgagaaacattgtc

SEQ ID NO: 84503 - DNA, 120 bp, Artificial Sequence
  ENSG00000083844_56 (sequence is synthesized)
tcgacctctttacccattccattgttcattcttctttcttgaaatcccaaaccttctattaacatttcttttcagttatacactgaactttactgtagcctttcttctagagtaacaaat

SEQ ID NO: 84504 - DNA, 120 bp, Artificial Sequence
  ENSG00000083844_57 (sequence is synthesized)
gttctttgttttccttcctctaaagatgtctttatgtttccttcattcccaaagaatatttttgtggaatataagattcagagttggcagttgttttcttttagacttcagagatgtatc

SEQ ID NO: 84505 - DNA, 120 bp, Artificial Sequence
  ENSG00000083844_58 (sequence is synthesized)
tctctgttctgtacattattgtttaatataagaaacctactagcattcaaataatcattccctattttacaatgcatcagttctgtcaagcttcattcaaagtgtttttcattgtctcta

SEQ ID NO: 84506 - DNA, 120 bp, Artificial Sequence
  ENSG00000083844_59 (sequence is synthesized)
gtgttcagaagtttggctgtgatgtgcgtggcatggaagtttttgggtgtattctatttggcgctccctggtgcttgcccagctttttgatctgtaggattatgccttttgcaaaatttg

SEQ ID NO: 84507 - DNA, 120 bp, Artificial Sequence
  ENSG00000083844_60 (sequence is synthesized)
gggaactttcaactattatttcttcaaatattttttcaccccccagtcttgtcttttttagggacttcaataacatgagtggcagatcttgttttacactcccatgggtccttcaggctc

SEQ ID NO: 84508 - DNA, 120 bp, Artificial Sequence
  ENSG00000083844_61 (sequence is synthesized)
tcatcttttttctttttccagtctattttctgtcttgttaatattgattaatttttattgaccttccatggtcctcactgattgttttctttgtcatacctaatctgttgagtttgtgca

SEQ ID NO: 84509 - DNA, 120 bp, Artificial Sequence
  ENSG00000083844_62 (sequence is synthesized)
gtgagttttcattttggttttgtattttccagttgtttaatttccattgggtgggttcttttgtacaccttctgtttctttgcttattttttaacgccaaagaaagactctcagagaata

SEQ ID NO: 84510 - DNA, 120 bp, Artificial Sequence
  ENSG00000083844_63 (sequence is synthesized)
gacaactatattccaaagtcatggttctctggtggtttgtcttgacatttgaatagaaatgttaaactatctgggggaatagaaagcccacagtcttctgagttgtgctacaccaatatt

SEQ ID NO: 84511 - DNA, 120 bp, Artificial Sequence
  ENSG00000083844_64 (sequence is synthesized)
tatttctatgaacagatcttacaactgagagtgatctgcagatttttcagagtcatgttctccatggaatgtttgtaaaattccctagctctctgcactgagctgagatcgtgccactgc

SEQ ID NO: 84512 - DNA, 120 bp, Artificial Sequence
  ENSG00000083844_65 (sequence is synthesized)
gactccatctcaaaaaaaaaaaaaattctctagctctctatgccttgttgtatcctcaggaaggagtcacctctcttccaggatcactcttgccttttgttattggacacattttcctac

SEQ ID NO: 84513 - DNA, 120 bp, Artificial Sequence
  ENSG00000083844_66 (sequence is synthesized)
tattggacacattttcctacctcctgcccagtcttttttaggctctctgtcatacttcctcgcctagtctttaacttgtctctgataaccagatttttcccccataatctgtatctgtat

SEQ ID NO: 84514 - DNA, 120 bp, Artificial Sequence
  ENSG00000083844_67 (sequence is synthesized)
tcaagtctctatcctcatccccaaatggatttcaccccgcttgtccatcagtctctgcccatttcttctgtctcccacagacatggtctgtgtagttgttctgcacactacccgtcctcg

SEQ ID NO: 84515 - DNA, 120 bp, Artificial Sequence
  ENSG00000083844_68 (sequence is synthesized)
ccccttctcatttccctcactccacggacagctacaggagggcttccatcatttgtcctcttacttccttgttagaactttgtgctgctgaccaccactctgaaccaaaacttctttctt

SEQ ID NO: 84516 - DNA, 120 bp, Artificial Sequence
  ENSG00000083844_69 (sequence is synthesized)
ggttcttgaaagttgctgtctttctcctccagagggtctgtgtcttccttccaactcttaaacatttttgtttcccagaatccatcattggccattgctttttcacttgccatgagctct

SEQ ID NO: 84517 - DNA, 120 bp, Artificial Sequence
  ENSG00000083844_70 (sequence is synthesized)
gtgaatgagatggttcctgctgaagacatttactttcaatgatctacagaatttcccaaatctatgtctccagactggatgtttctcacgtctgtggcccactgggcatcttctgcactt

SEQ ID NO: 84518 - DNA, 120 bp, Artificial Sequence
  ENSG00000083844_71 (sequence is synthesized)
tctctgcatttgtaaacactgagcctgtatgcgtgtctatgtggccatggccctggccgtggggatgcacccataattataatgagagcaggtgaatgtcatgtggctatgtatgagaca

SEQ ID NO: 84519 - DNA, 120 bp, Artificial Sequence
  ENSG00000083844_72 (sequence is synthesized)
ttgttgtgaatgttttacatgcatcagctctttcaacatttacagcatctgtgtgtggtaggtaatgttgtttccttcattttgcagagcagaatatagataggctcaggttaagaattt

SEQ ID NO: 84520 - DNA, 120 bp, Artificial Sequence
  ENSG00000083844_73 (sequence is synthesized)
gcccaaggttacacagttatgaagtttggatttaggaatgggaggccacgtagactggcttcagaattcatgtctttaaccactttattgcttctcatgttggggggtttgttttctggt

SEQ ID NO: 84521 - DNA, 120 bp, Artificial Sequence
  ENSG00000083844_74 (sequence is synthesized)
cactatttttactaaagttgattcaacaatgctataatctgttactctcattcgacaatacatcttgactgtttcttcaacttgaggaaggtaaaccaaagccactctttaatgggtgca

SEQ ID NO: 84522 - DNA, 120 bp, Artificial Sequence
  ENSG00000083844_75 (sequence is synthesized)
aatatctgttgtaactatgtagaagatacagtgtctgggtttgaggacaggggagtgggaaaactgagtagggaagcggtaagacatgcatctggctttaggagtgtttgaagtgcctaa

SEQ ID NO: 84523 - DNA, 120 bp, Artificial Sequence
  ENSG00000083844_76 (sequence is synthesized)
agatcagggtgaatttcccaaatttgaatcttgttgcccaagccacattgcaaccacctctttttctcttacctcgtccccacatccaggcactgccccattctgttcattccacctttt

SEQ ID NO: 84524 - DNA, 120 bp, Artificial Sequence
  ENSG00000083844_77 (sequence is synthesized)
tttttagtagaccctccatatatgtgtgtgttttggtgaatggccacacacagcaaagttatttttattgcaattttgttgttgttgtttgagacacagagtctcatactctgccaccca

SEQ ID NO: 84525 - DNA, 120 bp, Artificial Sequence
  ENSG00000083844_78 (sequence is synthesized)
agccaccacacccagcctttattgcaatttttggttccctcacagaatgtttaccatgaagctgtgcgtataggtggtaccatgtatgacataccttgacctcaaagataatctacctgg

SEQ ID NO: 84526 - DNA, 82 bp, Artificial Sequence
  ENSG00000083844_79 (sequence is synthesized)
tagctgggactacaggtgccagtgggatttcaccatgttggccaggatggcctccacctcctgacttcatgatccacccgcc

SEQ ID NO: 84527 - DNA, 120 bp, Artificial Sequence
  ENSG00000083844_80 (sequence is synthesized)
acaggcgtgagccaccgcacctggcctacctgggcttttttggacagatgtacatgattttagaaattgttatgaatgactgtcttgggatcctcaagaacacccccaggtttgacgatt

SEQ ID NO: 84528 - DNA, 120 bp, Artificial Sequence
  ENSG00000083844_81 (sequence is synthesized)
ttgggatcctcaagaacacccccaggtttgacgatttgctgagaagactcaggtctcagcattctgtcatactcaacagctatgatttactgcagcaaaaaaatacaaagcaaatagtaa

SEQ ID NO: 84529 - DNA, 120 bp, Artificial Sequence
  ENSG00000083844_82 (sequence is synthesized)
agggaaaaagccaaaattcagagaaaaccaggcacaatcttctgagtcttgtttcagtgaagtcacaggatgtgccttatttaagttccatctggtacttatgacaacacatgctatatg

SEQ ID NO: 84530 - DNA, 120 bp, Artificial Sequence
  ENSG00000083844_83 (sequence is synthesized)
tccactgggaagcttattagagactcagtgccagggtttttattgggcatgttttctagcacatcccacaattctggacttccagaaggttagcaggggttcagcttttcagctgaaaac

SEQ ID NO: 84531 - DNA, 120 bp, Artificial Sequence
  ENSG00000083844_84 (sequence is synthesized)
gttatccccctttcagctggggggaaaaaaaggcaccgaaaaacagggcagtgagctactcctgttttgggtgggtggagcagtagtaagcctcccaaaatctaaggtcccacactccag

SEQ ID NO: 84532 - DNA, 120 bp, Artificial Sequence
  ENSG00000083844_85 (sequence is synthesized)
caagggtgaaccttgcaaactcaaaaggatagcagtctccaacctgctgttttatacagtgacttaagtggtactaaaatgctatataagtcaaatttacgtaacattaagcaaataatt

SEQ ID NO: 84533 - DNA, 120 bp, Artificial Sequence
  ENSG00000083844_86 (sequence is synthesized)
ttttttcagcaaaaaaataatggtcatgactttgtggtgaaggcttatgtaatgattgtaataaattcaggtggctcacgcctgtgataccagcacttttgggaggctgaggcgggtgga

SEQ ID NO: 84534 - DNA, 62 bp, Artificial Sequence
  ENSG00000083844_87 (sequence is synthesized)
acatggtgaaatcccatctctacaaaaatgaaaaattagccgggcgtagtggtacatgcatt

SEQ ID NO: 84535 - DNA, 120 bp, Artificial Sequence
  ENSG00000083844_88 (sequence is synthesized)
aatgcctcagttttgttaagaggaaaaagcaaatcctaagttacagtggaacttatgaacaccctagcctagagatttaatttagtgatgaaaaggtacagagagagtctttcaagaaag

SEQ ID NO: 84536 - DNA, 120 bp, Artificial Sequence
  ENSG00000083844_89 (sequence is synthesized)
tctctctctctctctctatatatatatatgtatatgtgtgtgtacatatggaccacttcaagctacacacacacacacacatatacacgtgtatgaatatatatatatggctataagtgg

SEQ ID NO: 84537 - DNA, 120 bp, Artificial Sequence
  ENSG00000083844_90 (sequence is synthesized)
atatatatggctataagtggtgcgacttgcaggtactccctttgttcacctttgtaaagatgttattgccagttcagtgtgtatttctatagtatatatgtaaacaatttgtcatccttt

SEQ ID NO: 84538 - DNA, 120 bp, Artificial Sequence
  ENSG00000083844_91 (sequence is synthesized)
tgttgctgcttttgaaactagttcatggcttcagtgggggagagatttaaataatatgggtttataatttctgcattattaaatgcagataacttgtgattaaagagtatgttattggaa

SEQ ID NO: 84539 - DNA, 120 bp, Artificial Sequence
  ENSG00000083844_92 (sequence is synthesized)
acactgagcattgaatactttctctttaaatttaacgactgttactggtgggaagtattattgtattgatccagaaataaaggctcagagaaatgaaatgatgtttttgaggtaacagct

SEQ ID NO: 84540 - DNA, 120 bp, Artificial Sequence
  ENSG00000083844_93 (sequence is synthesized)
tcattccatcttctgactccaggcctggctgcacaagaaggcctctagaatctaccttgcctctttcccacagctttagtcattttccacagtaacctcttcctatctggtctcctatat

SEQ ID NO: 84541 - DNA, 120 bp, Artificial Sequence
  ENSG00000083845_0 (sequence is synthesized)
ctcttcctgtctgtaccagggcggcgcgtggtctacgccgagtgacagagacgctcaggctgtgttctcaggatgaccgagtgggagacagcagcaccagcggtggcagagaccccagac

SEQ ID NO: 84542 - DNA, 120 bp, Artificial Sequence
  ENSG00000083845_1 (sequence is synthesized)
atcaagctctttgggaagtggagcaccgatgatgtgcagatcaatgacatttccctgcaggattacattgcagtgaaggagaagtatgccaagtacctgcctcacagtgcagggcggtat

SEQ ID NO: 84543 - DNA, 120 bp, Artificial Sequence
  ENSG00000083845_2 (sequence is synthesized)
gccgccaaacgcttccgcaaagctcagtgtcccattgtggagcgcctcactaactccatgatgatgcacggccgcaacaacggcaagaagctcatgactgtgcgcatcgtcaagcatgcc

SEQ ID NO: 84544 - DNA, 120 bp, Artificial Sequence
  ENSG00000083845_3 (sequence is synthesized)
acaggcgagaaccctctgcaggtcctggtgaacgccatcatcaacagtggtccccgggaggactccacacgcattgggcgcgccgggactgtgagacgacaggctgtggatgtgtccccc

SEQ ID NO: 84545 - DNA, 120 bp, Artificial Sequence
  ENSG00000083845_4 (sequence is synthesized)
ctgcgccgtgtgaaccaggccatctggctgctgtgcacaggcgctcgtgaggctgccttccggaacattaagaccattgctgagtgcctggcagatgagctcatcaatgctgccaagggc

SEQ ID NO: 84546 - DNA, 120 bp, Artificial Sequence
  ENSG00000083845_5 (sequence is synthesized)
tcctcgaactcctatgccattaagaagaaggacgagctggagcgtgtggccaagtccaaccgctgattttcccagctgctgcccaataaacctgtctgccctttggggcagtcccagcca

SEQ ID NO: 84547 - DNA, 120 bp, Artificial Sequence
  ENSG00000083845_6 (sequence is synthesized)
gcggcgcgtggtctacgccgagtgacagagacgctcaggctgtgttctcaggtgagaccgccgcggggccggggatcctagggacggttcatggtctttcggggatagtgccccgcggcc

SEQ ID NO: 84548 - DNA, 120 bp, Artificial Sequence
  ENSG00000083845_7 (sequence is synthesized)
tgggccttttctcattaggtctcatttctgtctctggaaaagaaaatgtagaagaaacgggcgcgggccgagttactcttgacttctttctggtgctccgccgcttctagcttttcccca

SEQ ID NO: 84549 - DNA, 120 bp, Artificial Sequence
  ENSG00000083845_8 (sequence is synthesized)
tagcggggcttggggaacttggtttgaactatgcggttgtactctgagataggaagtttccatttcttagggacacgatgccctcttttgctctgtgtaactttccccccgtaatagcag

SEQ ID NO: 84550 - DNA, 120 bp, Artificial Sequence
  ENSG00000083845_9 (sequence is synthesized)
cccctagagccttcatactgtcggtcaagaatcgaaacctttgggttgattgtgccacacggtacctaccgtggtccttgatgtcatataacggtcccgcctcacggccaaagaaacagt

SEQ ID NO: 84551 - DNA, 120 bp, Artificial Sequence
  ENSG00000083845_10 (sequence is synthesized)
ccgagacggaacgttgacttgggtcaaagaccatgtaaatcgcgagattgtggtttgaattacagcccatgcagtgtgaggacgtatggcatctgctgagccattataccttggtcccag

SEQ ID NO: 84552 - DNA, 120 bp, Artificial Sequence
  ENSG00000083845_11 (sequence is synthesized)
tgcagcagctgttgactggtggctgccaagtcttgggcccaggggttctaggtgaaagacagatgcttcttgctgacagctgagtaatttttctagtgcttgaaaacacgttcacggcct

SEQ ID NO: 84553 - DNA, 120 bp, Artificial Sequence
  ENSG00000083845_12 (sequence is synthesized)
gggctgcaacccctcgcgcgggctccccggccgtggaggacacaaggacaaacacgaagggtccccgacctgccgaccccctcctcccggacaccgcgcgtagcctgtaggctacctccg

SEQ ID NO: 84554 - DNA, 120 bp, Artificial Sequence
  ENSG00000083845_13 (sequence is synthesized)
cgctccacccagagacgggtcgcgctgctcccgccgccgcaaccccgggccctcgtgccggcggtctcccctcttccacgggcgagattactgcatagcagaggcgcccacaagacaggg

SEQ ID NO: 84555 - DNA, 120 bp, Artificial Sequence
  ENSG00000083845_14 (sequence is synthesized)
caactacggggtagcggacatccgccaggcacgcttctagggccgcttctgcaactgcgcatgcgcttgggctgcacccattccgtctagcccaaaaggttcctctacaaccttcctccg

SEQ ID NO: 84556 - DNA, 120 bp, Artificial Sequence
  ENSG00000083845_15 (sequence is synthesized)
gccgtgtgaaccaggtgagcctggggcttatgcacgtggcagggtggacacagccacgggagtgggtggggtcttgcctggggcaggaaggctcctctctgtctgcatgttttacctgca

SEQ ID NO: 84557 - DNA, 120 bp, Artificial Sequence
  ENSG00000083845_16 (sequence is synthesized)
gcatcacttcctctaggaagccttcctggattcccaccctgcataggggctgatccaggctctgggtcctcttcgggaacacatttggcagaggtcttctttctttcctttgggtgtata

SEQ ID NO: 84558 - DNA, 120 bp, Artificial Sequence
  ENSG00000083845_17 (sequence is synthesized)
tttttacactgtgtgtatatgtactttttttttttttcttggacattttgagaatcagttgcagacattttgattgtgttttccctgaacactgcaggtgtctttaaaaacaaagatgac

SEQ ID NO: 84559 - DNA, 120 bp, Artificial Sequence
  ENSG00000083845_18 (sequence is synthesized)
ctacccccgtcgtcacccccaggaaggaatttatattcacagcaatagtcgttgttccatttagcatctgtccccagaatgccagaatgccctttatagtggcgcattgtcaattgggtc

SEQ ID NO: 84560 - DNA, 120 bp, Artificial Sequence
  ENSG00000083845_19 (sequence is synthesized)
atcaagctctttgggaagtggagcaccgatgatgtgcagatcaatgacatttccctgcagatgactacaacttctgtcatgagaggactccttcaccagaaggagcatcacatctcacat

SEQ ID NO: 84561 - DNA, 120 bp, Artificial Sequence
  ENSG00000083845_20 (sequence is synthesized)
taggctacctccgcgctccacccagagacgggtcgcgctgctcccgccgccgcaaccccgggccctcgtgccggcggtctcccctcttccacgggcgagattactgcatagcagaggatg

SEQ ID NO: 84562 - DNA, 120 bp, Artificial Sequence
  ENSG00000083845_21 (sequence is synthesized)
ctctttgggaagtggagcaccgatgatgtgcagatcaatgacatttccctgcaggtgaggggaacttggtgattggccttcctggctgggggcggacattattccaggaaggcacacatc

SEQ ID NO: 84563 - DNA, 120 bp, Artificial Sequence
  ENSG00000083845_22 (sequence is synthesized)
aggtaaagaagggatcccttgaccaccacatctaccacatctgctcttacgtcctgttcaaagatgactacaacttctgtcatgagaggactccttcaccagaaggagcatcacatctca

SEQ ID NO: 84564 - DNA, 120 bp, Artificial Sequence
  ENSG00000083845_23 (sequence is synthesized)
catatggtatttttgttactgtttttgtagtaaaatacataacatccagtgtcattcttttgcatgtgaatatccagttatccagtaccatctcctaaagagatgttttttttccctcaa

SEQ ID NO: 84565 - DNA, 120 bp, Artificial Sequence
  ENSG00000083845_24 (sequence is synthesized)
cacaggcgaggtagggctctgtggcctggtgagggcaggctgtgccctcagtacacccgaaagccccacggagtgtatgtcaggcttatcccctgtgtggtgtggtcactcttgttttag

SEQ ID NO: 84566 - DNA, 120 bp, Artificial Sequence
  ENSG00000083845_25 (sequence is synthesized)
aagttaaaagcaaatatattgccttgttttttagaaataattgagatggaatctcagggtgttcttgaattcctggtctcaaatgatcctgtcccctcagcctcccaaagtgctaggatt

SEQ ID NO: 84567 - DNA, 120 bp, Artificial Sequence
  ENSG00000083845_26 (sequence is synthesized)
gagccaccacacctggccgccttttttgttgtcgtcggtttttttgtttgtagaggtggggtttcaccaagttgctcaggctggtctcaaactccctgccaaagtgttcctcctgcctca

SEQ ID NO: 84568 - DNA, 120 bp, Artificial Sequence
  ENSG00000083845_27 (sequence is synthesized)
gcatcccgaagtgttacaggcgcaagccaccgtgcccggccgtctagcagtttgctgttgaggcaggtctcaatctcctgtcactggggacgcaacttcagcctgtgtgtgtgtgtgtct

SEQ ID NO: 84569 - DNA, 120 bp, Artificial Sequence
  ENSG00000083845_28 (sequence is synthesized)
ggacacttgctcttgtgaccctctatctgattgcaaatcaggcatgatgccaccacctcttgtctcagtgggcctatgggtgacaacgtggctggcagcatcagttgggagtggccccag

SEQ ID NO: 84570 - DNA, 120 bp, Artificial Sequence
  ENSG00000083845_29 (sequence is synthesized)
ggtgctggaggaccgcagtctgtccttctagcctgacccctgctgtcttcctaggccatctggctgctgtgcacaggcgctcgtgaggctgccttccggaacattaagaccattgctgag

SEQ ID NO: 84571 - DNA, 120 bp, Artificial Sequence
  ENSG00000083845_30 (sequence is synthesized)
tgcctggcagatgagctcatcaatgctgccaaggtgggtgagggcactccggttggggggtcttaagttgggcatttgtgggggtccttcagaattcagagctgtgtgtctccttgcagg

SEQ ID NO: 84572 - DNA, 80 bp, Artificial Sequence
  ENSG00000083857_0 (sequence is synthesized)
gagcgtgaggcgccggcgccgagctgggcggccgggcgcggggagagggcgcgggagcggctcgtgcggcaggtaccatg

SEQ ID NO: 84573 - DNA, 120 bp, Artificial Sequence
  ENSG00000083857_1 (sequence is synthesized)
cctgctcgggggcgcgctgagacggcgggtgagctccacgagagcgccgtcgccacttcgggccaactttgcgattcccgacagttaagcaatggggagacatttggctttgctcctgct

SEQ ID NO: 84574 - DNA, 120 bp, Artificial Sequence
  ENSG00000083857_2 (sequence is synthesized)
tctgctccttctcttccaacattttggagacagtgatggcagccaacgacttgaacagactcctctgcagtttacacacctcgagtacaacgtcaccgtgcaggagaactctgcagctaa

SEQ ID NO: 84575 - DNA, 120 bp, Artificial Sequence
  ENSG00000083857_3 (sequence is synthesized)
gacttatgtggggcatcctgtcaagatgggtgtttacattacacatccagcgtgggaagtaaggtacaaaattgtttccggagacagtgaaaacctgttcaaagctgaagagtacattct

SEQ ID NO: 84576 - DNA, 120 bp, Artificial Sequence
  ENSG00000083857_4 (sequence is synthesized)
cggagacttttgctttctaagaataaggaccaaaggaggaaatacagctattcttaatagagaagtgaaggatcactacacattgatagtgaaagcacttgaaaaaaatactaatgtgga

SEQ ID NO: 84577 - DNA, 120 bp, Artificial Sequence
  ENSG00000083857_5 (sequence is synthesized)
ggcgcgaacaaaggtcagggtgcaggtgctggatacaaatgacttgagaccgttattctcacccacctcatacagcgtttctttacctgaaaacacagctataaggaccagtatcgcaag

SEQ ID NO: 84578 - DNA, 120 bp, Artificial Sequence
  ENSG00000083857_6 (sequence is synthesized)
agtcagcgccacggatgcagacataggaaccaacggggaattttactacagttttaaagatcgaacagatatgtttgctattcacccaaccagtggtgtgatagtgttaactggtagact

SEQ ID NO: 84579 - DNA, 120 bp, Artificial Sequence
  ENSG00000083857_7 (sequence is synthesized)
tgattacctagagaccaagctctatgagatggaaatcctcgctgcggaccgtggcatgaagttgtatgggagcagtggcatcagcagcatggccaagctaacggtgcacatcgaacaggc

SEQ ID NO: 84580 - DNA, 120 bp, Artificial Sequence
  ENSG00000083857_8 (sequence is synthesized)
caatgaatgtgctccggtgataacagcagtgacattgtcaccatcagaactggacagggacccagcatatgcaattgtgacagtggatgactgcgatcagggtgccaatggtgacatagc

SEQ ID NO: 84581 - DNA, 120 bp, Artificial Sequence
  ENSG00000083857_9 (sequence is synthesized)
atctttaagcatcgtggcaggtgaccttctccagcagtttagaacagtgaggtcctttccagggagtaaggagtataaagtcaaagccatcggtggcattgattgggacagtcatccttt

SEQ ID NO: 84582 - DNA, 120 bp, Artificial Sequence
  ENSG00000083857_10 (sequence is synthesized)
cggctacaatctcacactacaggctaaagataaaggaactccgccccagttctcttctgttaaagtcattcacgtgacttctccacagttcaaagccgggccagtcaagtttgaaaagga

SEQ ID NO: 84583 - DNA, 120 bp, Artificial Sequence
  ENSG00000083857_11 (sequence is synthesized)
tgtttacagagcagaaataagtgaatttgctcctcccaacacacctgtggtcatggtaaaggccattcctgcttattcccatttgaggtatgtttttaaaagtacacctggaaaagctaa

SEQ ID NO: 84584 - DNA, 120 bp, Artificial Sequence
  ENSG00000083857_12 (sequence is synthesized)
attcagtttaaattacaacactggtctcatttctattttagaaccagttaaaagacagcaggcagcccattttgaacttgaagtaacaacaagtgacagaaaagcgtccaccaaggtctt

SEQ ID NO: 84585 - DNA, 120 bp, Artificial Sequence
  ENSG00000083857_13 (sequence is synthesized)
ggtgaaagtcttaggtgcaaatagcaatccccctgaatttacccagacagcgtacaaagctgcttttgatgagaacgtgcccattggtactactgtcatgagcctgagtgccgtagaccc

SEQ ID NO: 84586 - DNA, 120 bp, Artificial Sequence
  ENSG00000083857_14 (sequence is synthesized)
tgatgagggtgagaacgggtacgtgacatacagtatcgcaaatttaaatcatgtgccgtttgcgattgaccatttcactggtgccgtgagtacgtcagaaaacctggactacgaactgat

SEQ ID NO: 84587 - DNA, 120 bp, Artificial Sequence
  ENSG00000083857_15 (sequence is synthesized)
gcctcgggtttatactctgaggattcgtgcatcagactggggcttgccgtaccgccgggaagtcgaagtccttgctacaattactctcaataacttgaatgacaacacacctttgtttga

SEQ ID NO: 84588 - DNA, 120 bp, Artificial Sequence
  ENSG00000083857_16 (sequence is synthesized)
gaaaataaattgtgaagggacaattcccagagatctaggcgtgggagagcaaataaccactgtttctgctattgatgcagatgaacttcagttggtacagtatcagattgaagctggaaa

SEQ ID NO: 84589 - DNA, 120 bp, Artificial Sequence
  ENSG00000083857_17 (sequence is synthesized)
tgaactggatttctttagtttaaaccccaactcgggggtattgtcattaaagcgatcgctaatggatggcttaggtgcaaaggtgtctttccacagtctgagaatcacagctacagatgg

SEQ ID NO: 84590 - DNA, 120 bp, Artificial Sequence
  ENSG00000083857_18 (sequence is synthesized)
agaaaattttgccacaccattatatatcaacataacagtggctgccagtcacaagctggtaaacttgcagtgtgaagagactggtgttgccaaaatgctggcagagaagctcctgcaggc

SEQ ID NO: 84591 - DNA, 120 bp, Artificial Sequence
  ENSG00000083857_19 (sequence is synthesized)
aaataaattacacaaccagggagaggtggaggatattttcttcgattctcactctgtcaatgctcacataccgcagtttagaagcactcttccgactggtattcaggtaaaggaaaacca

SEQ ID NO: 84592 - DNA, 120 bp, Artificial Sequence
  ENSG00000083857_20 (sequence is synthesized)
gcctgtgggttccagtgtaattttcatgaactccactgaccttgacactggcttcaatggaaaactggtctatgctgtttctggaggaaatgaggatagttgcttcatgattgatatgga

SEQ ID NO: 84593 - DNA, 120 bp, Artificial Sequence
  ENSG00000083857_21 (sequence is synthesized)
aacaggaatgctgaaaattttatctcctcttgaccgtgaaacaacagacaaatacaccctgaatattaccgtctatgaccttgggataccccagaaggctgcgtggcgtcttctacatgt

SEQ ID NO: 84594 - DNA, 120 bp, Artificial Sequence
  ENSG00000083857_22 (sequence is synthesized)
cgtggttgtcgatgccaatgataatccacccgagtttttacaggagagctattttgtggaagtgagtgaagacaaggaggtacatagtgaaatcatccaggttgaagccacagataaaga

SEQ ID NO: 84595 - DNA, 120 bp, Artificial Sequence
  ENSG00000083857_23 (sequence is synthesized)
cctggggcccaacggacacgtgacgtactcaattgttacagacacagacacattttcaattgacagcgtgacgggtgttgttaacatcgcacgccctctggatcgagagctgcagcatga

SEQ ID NO: 84596 - DNA, 120 bp, Artificial Sequence
  ENSG00000083857_24 (sequence is synthesized)
gcactccttaaagattgaggccagggaccaagccagagaagagcctcagctgttctccactgtcgttgtgaaagtatcactagaagatgttaatgacaacccacctacatttattccacc

SEQ ID NO: 84597 - DNA, 120 bp, Artificial Sequence
  ENSG00000083857_25 (sequence is synthesized)
taattatcgtgtgaaagtccgagaggatcttccagaaggaaccgtcatcatgtggttagaagcccacgatcctgatttaggtcagtctggtcaggtgagatacagccttctggaccacgg

SEQ ID NO: 84598 - DNA, 120 bp, Artificial Sequence
  ENSG00000083857_26 (sequence is synthesized)
agaaggaaacttcgatgtggataaactcagtggagcagttaggatcgtccagcagttggactttgagaagaagcaagtgtataatctcactgtgagggccaaagacaagggaaagccagt

SEQ ID NO: 84599 - DNA, 120 bp, Artificial Sequence
  ENSG00000083857_27 (sequence is synthesized)
ttctctgtcttctacttgctatgttgaagttgaggtggttgatgtgaatgagaacctgcacccacccgtgttttccagctttgtggaaaaggggacagtgaaagaagatgcacctgttgg

SEQ ID NO: 84600 - DNA, 120 bp, Artificial Sequence
  ENSG00000083857_28 (sequence is synthesized)
ttcattggtaatgacggtgtcggctcatgatgaggacgccagaagagatggggagatccgatactccattagagatggctctggcgttggtgttttcaaaataggtgaagagacaggtgt

SEQ ID NO: 84601 - DNA, 120 bp, Artificial Sequence
  ENSG00000083857_29 (sequence is synthesized)
catagagacgtcagatcgactggaccgtgaatcgacctcccattattggctaacagtctttgcaaccgatcagggtgtcgtgcctctttcatcgttcatagagatctacatagaggttga

SEQ ID NO: 84602 - DNA, 120 bp, Artificial Sequence
  ENSG00000083857_30 (sequence is synthesized)
ggatgtcaatgacaatgcaccacagacatcagagcctgtttattacccagaaatcatggaaaattctcctaaagatgtatctgtggtccagatcgaggcatttgatccagattcgagctc

SEQ ID NO: 84603 - DNA, 120 bp, Artificial Sequence
  ENSG00000083857_31 (sequence is synthesized)
taatgacaagctcatgtacaaaattacaagtggaaatccacaaggattcttttcaatacatcctaaaacaggtctcatcacaactacgtcaaggaagctagaccgagaacagcaagatga

SEQ ID NO: 84604 - DNA, 120 bp, Artificial Sequence
  ENSG00000083857_32 (sequence is synthesized)
acacatattagaggttactgtgacagacaatggtagtccccccaaatcaaccattgcaagagtcattgtgaaaatccttgatgaaaatgacaacaaacctcagtttctgcaaaagttcta

SEQ ID NO: 84605 - DNA, 120 bp, Artificial Sequence
  ENSG00000083857_33 (sequence is synthesized)
caaaatcagactccctgagcgggaaaagccagaccgagaaagaaatgccagacgggagccgctctatcacgtcatagccaccgacaaggatgagggccccaatgcagaaatctcctacag

SEQ ID NO: 84606 - DNA, 120 bp, Artificial Sequence
  ENSG00000083857_34 (sequence is synthesized)
catcgaagacgggaatgagcatggcaaatttttcatcgaaccgaaaactggagtggtttcgtccaagaggttttcagcagctggagaatatgatattctttcaattaaggcagttgacaa

SEQ ID NO: 84607 - DNA, 120 bp, Artificial Sequence
  ENSG00000083857_35 (sequence is synthesized)
tggtcgccctcaaaagtcatcaaccaccagactccatattgaatggatctccaagcccaaaccgtccctggagcccatttcatttgaagaatcattttttacctttactgtgatggaaag

SEQ ID NO: 84608 - DNA, 120 bp, Artificial Sequence
  ENSG00000083857_36 (sequence is synthesized)
tgaccccgttgctcacatgattggagtaatatctgtggagcctcctggcatacccctttggtttgacatcactggtggcaactacgacagtcacttcgatgtggacaagggaactggaac

SEQ ID NO: 84609 - DNA, 120 bp, Artificial Sequence
  ENSG00000083857_37 (sequence is synthesized)
catcattgttgccaaacctcttgatgcagaacagaagtcaaactacaacctcacagtcgaggctacagatggaaccaccactatcctcactcaggtattcatcaaagtaatagacacaaa

SEQ ID NO: 84610 - DNA, 120 bp, Artificial Sequence
  ENSG00000083857_38 (sequence is synthesized)
tgaccatcgtcctcagttttctacatcaaagtatgaagttgttattcctgaagatacagcgccagaaacagaaattttgcaaatcagtgctgtggatcaggatgagaaaaacaaactaat

SEQ ID NO: 84611 - DNA, 120 bp, Artificial Sequence
  ENSG00000083857_39 (sequence is synthesized)
ctacactctgcagagcagtagagatccactgagtctcaagaaatttcgtcttgatcctgcaaccggctctctctatacttctgagaaactggatcatgaagctgttcaccagcacaccct

SEQ ID NO: 84612 - DNA, 120 bp, Artificial Sequence
  ENSG00000083857_40 (sequence is synthesized)
cacggtcatggtacgagatcaagatgtgcctgtaaaacgcaactttgcaaggattgtggtcaatgtcagcgacacgaatgaccacgccccgtggttcaccgcttcctcctacaaagggcg

SEQ ID NO: 84613 - DNA, 120 bp, Artificial Sequence
  ENSG00000083857_41 (sequence is synthesized)
ggtttatgaatcggcagccgttggctcagttgtgttgcaggtgacggctctggacaaggacaaagggaaaaatgctgaagtgctgtactcgatcgagtcaggaaatattggaaattcttt

SEQ ID NO: 84614 - DNA, 120 bp, Artificial Sequence
  ENSG00000083857_42 (sequence is synthesized)
tatgattgatcctgtcttgggctctattaaaactgccaaagaattagatcgaagtaaccaagcggagtatgatttaatggtaaaagctacagataagggcagtccaccaatgagtgaaat

SEQ ID NO: 84615 - DNA, 120 bp, Artificial Sequence
  ENSG00000083857_43 (sequence is synthesized)
aacttctgtgcgtatctttgtcacaattgctgacaacgcctctccgaagtttacatcaaaagaatattctgttgaacttagtgaaactgtcagcattgggagtttcgttgggatggttac

SEQ ID NO: 84616 - DNA, 120 bp, Artificial Sequence
  ENSG00000083857_44 (sequence is synthesized)
agcccatagtcaatcatcagtggtgtatgaaataaaagatggaaatacaggtgatgcttttgatattaatccacattctggaactatcatcactcagaaagccctggactttgaaacttt

SEQ ID NO: 84617 - DNA, 120 bp, Artificial Sequence
  ENSG00000083857_45 (sequence is synthesized)
gcccatttacacattgataatacaaggaactaacatggctggtttgtccactaatacaacggttctagttcacttgcaggatgagaatgacaacgcgccagtttttatgcaggcagaata

SEQ ID NO: 84618 - DNA, 120 bp, Artificial Sequence
  ENSG00000083857_46 (sequence is synthesized)
tacaggactcattagtgaatcagcctcaattaacagcgtggtcctaacagacaggaatgtcccactggtgattcgagcagctgatgctgataaagactcaaatgctttgcttgtatatca

SEQ ID NO: 84619 - DNA, 120 bp, Artificial Sequence
  ENSG00000083857_47 (sequence is synthesized)
cattgttgaaccatctgtacacacatattttgctattgattctagcactggtgctattcatacagtactaagtctggactatgaagaaacaagtatttttcactttaccgtccaagtgca

SEQ ID NO: 84620 - DNA, 120 bp, Artificial Sequence
  ENSG00000083857_48 (sequence is synthesized)
tgacatgggaaccccacgtttatttgctgagtatgcagcgaatgtaacagtacatgtaattgacattaatgactgcccccctgtgtttgccaagccattatatgaagcatctcttttgtt

SEQ ID NO: 84621 - DNA, 120 bp, Artificial Sequence
  ENSG00000083857_49 (sequence is synthesized)
accaacatacaaaggagtaaaagtcatcacagtaaatgctacagatgctgattcaagtgcattctcacagttgatttactccatcaccgaaggcaacatcggggagaagttttctatgga

SEQ ID NO: 84622 - DNA, 120 bp, Artificial Sequence
  ENSG00000083857_50 (sequence is synthesized)
ctacaagactggtgctctcactgtccaaaacacaactcagttaagaagccgctacgagctaaccgttagagcttccgatggcagatttgccggccttacctctgtcaaaattaatgtgaa

SEQ ID NO: 84623 - DNA, 120 bp, Artificial Sequence
  ENSG00000083857_51 (sequence is synthesized)
agaaagcaaagaaagtcacctaaagtttacccaggatgtctactctgcggtagtgaaagagaattccaccgaggccgaaacattagctgtcattactgctattgggaatccaatcaatga

SEQ ID NO: 84624 - DNA, 120 bp, Artificial Sequence
  ENSG00000083857_52 (sequence is synthesized)
gcctttgttttatcacatcctcaacccagatcgcagatttaaaataagccgcacttcaggagttctgtcaaccactggcacgcccttcgatcgtgagcagcaggaggcgtttgatgtggt

SEQ ID NO: 84625 - DNA, 120 bp, Artificial Sequence
  ENSG00000083857_53 (sequence is synthesized)
tgtagaagtgacagaggaacataagccttctgcagtggcccacgttgtcgtgaaggtcattgtagaagaccaaaatgataatgcgccggtgtttgtcaaccttccctactacgccgttgt

SEQ ID NO: 84626 - DNA, 120 bp, Artificial Sequence
  ENSG00000083857_54 (sequence is synthesized)
taaagtggacactgaggtgggccatgtcattcgctatgtcactgctgtagacagagacagtggcagaaacggggaagtgcattactacctcaaggaacatcatgaacactttcaaattgg

SEQ ID NO: 84627 - DNA, 120 bp, Artificial Sequence
  ENSG00000083857_55 (sequence is synthesized)
acccttgggtgaaatttcactgaaaaagcaatttgagcttgacaccttaaataaagaatatcttgttacagtggttgcaaaagatggagggaacccggccttttcagcggaagttatcgt

SEQ ID NO: 84628 - DNA, 120 bp, Artificial Sequence
  ENSG00000083857_56 (sequence is synthesized)
tccgatcactgtcatgaataaagccatgcctgtgtttgaaaaacctttctacagtgcagagattgcagagagcatccaggtgcacagccctgtggtccacgtgcaggctaacagcccgga

SEQ ID NO: 84629 - DNA, 120 bp, Artificial Sequence
  ENSG00000083857_57 (sequence is synthesized)
aggcctgaaagtgttctacagcatcacagacggagaccctttcagccagttcactattaacttcaatactggagttatcaatgtcatagctcctctggactttgaggcccacccggcata

SEQ ID NO: 84630 - DNA, 120 bp, Artificial Sequence
  ENSG00000083857_58 (sequence is synthesized)
taagctgagcatacgcgcaactgactccttgacgggcgctcatgctgaagtatttgtggacatcatagtagacgacatcaatgataaccctcctgtgtttgctcagcagtcttatgcggt

SEQ ID NO: 84631 - DNA, 120 bp, Artificial Sequence
  ENSG00000083857_59 (sequence is synthesized)
gaccctgtctgaggcatctgtaattggaacgtctgttgttcaagttagagccaccgattctgattcagaaccaaatagaggaatctcataccagatgtttgggaatcacagcaagagtca

SEQ ID NO: 84632 - DNA, 120 bp, Artificial Sequence
  ENSG00000083857_60 (sequence is synthesized)
tgatcattttcatgtagacagcagcactggcctcatctcactactcagaaccctggattacgagcagtcccggcagcacacgatttttgtgagggcagttgatggtggtatgcccacgct

SEQ ID NO: 84633 - DNA, 120 bp, Artificial Sequence
  ENSG00000083857_61 (sequence is synthesized)
gtcacggtggacgttaccgacctcaatgataatccaccactctttgaacaacagatttatgaagccagaattagcgagcacgcccctcatgggcatttcgtgacctgtgtaaaagcctat

SEQ ID NO: 84634 - DNA, 120 bp, Artificial Sequence
  ENSG00000083857_62 (sequence is synthesized)
gatgcagacagttcagacatagacaagttgcagtattccattctgtctggcaatgatcataaacattttgtcattgacagtgcaacagggattatcaccctctcaaacctgcaccggcac

SEQ ID NO: 84635 - DNA, 120 bp, Artificial Sequence
  ENSG00000083857_63 (sequence is synthesized)
gccctgaagccattttacagtcttaacctgtcagtgtctgatggagtttttagaagttccacccaggttcatgtaactgtaattggaggcaatttgcacagtcctgctttccttcagaac

SEQ ID NO: 84636 - DNA, 120 bp, Artificial Sequence
  ENSG00000083857_64 (sequence is synthesized)
gaatatgaagtggaactagctgaaaacgctcccctacataccctggtgatggaggtgaaaactacggatggggattctggtatttatggtcacgttacttaccatattgtaaatgacttt

SEQ ID NO: 84637 - DNA, 120 bp, Artificial Sequence
  ENSG00000083857_65 (sequence is synthesized)
gccaaagacagattttacataaatgagagaggacagatatttactttggaaaaacttgatcgagaaaccccggcggagaaagtgatctcagtccgtttaatggctaaggatgctggagga

SEQ ID NO: 84638 - DNA, 120 bp, Artificial Sequence
  ENSG00000083857_66 (sequence is synthesized)
aaagttgctttctgcaccgtgaatgtcatccttacagatgacaatgacaatgcaccacaatttcgagcaaccaaatacgaagtgaatatcgggtccagtgctgctaaagggacttcagtc

SEQ ID NO: 84639 - DNA, 120 bp, Artificial Sequence
  ENSG00000083857_67 (sequence is synthesized)
gttaaagttcttgcaagtgatgccgatgagggctccaatgccgacatcacctatgccattgaagcagactctgaaagtgtaaaagagaatttggaaattaacaaactgtccggcgtaatc

SEQ ID NO: 84640 - DNA, 120 bp, Artificial Sequence
  ENSG00000083857_68 (sequence is synthesized)
actacaaaggagagcctcattggcttggaaaatgaattcttcactttctttgttagagctgtggataatgggtctccatcaaaagaatctgttgttcttgtctatgttaaaatccttcca

SEQ ID NO: 84641 - DNA, 120 bp, Artificial Sequence
  ENSG00000083857_69 (sequence is synthesized)
ccggaaatgcagcttccaaaattttcagaacctttctatacctttacagtgtcagaggacgtgcctattggaacagagatagatctcatccgagcagaacatagtgggactgttctttac

SEQ ID NO: 84642 - DNA, 120 bp, Artificial Sequence
  ENSG00000083857_70 (sequence is synthesized)
agcctggtcaaagggaatactccagaaagcaatagggatgagtcctttgtgattgacagacagagcgggagactgaagttggagaagagtcttgatcatgagacaactaagtggtatcag

SEQ ID NO: 84643 - DNA, 120 bp, Artificial Sequence
  ENSG00000083857_71 (sequence is synthesized)
ttttccatactggccaggtgcactcaagatgaccatgagatggtggcttctgtagatgttagtatccaagtgaaagatgcaaatgacaacagcccggtctttgaatctagtccatatgag

SEQ ID NO: 84644 - DNA, 120 bp, Artificial Sequence
  ENSG00000083857_72 (sequence is synthesized)
gcattcattgttgaaaacctgccagggggaagtagagtaattcagatcagggcatctgatgctgactcaggaaccaacggccaagttatgtatagcctggatcagtcacaaagtgtggaa

SEQ ID NO: 84645 - DNA, 120 bp, Artificial Sequence
  ENSG00000083857_73 (sequence is synthesized)
gtcattgaatcctttgccattaacatggaaacaggctggattacaactttaaaggaacttgaccatgaaaagagagacaattaccagattaaagtggttgcatcagatcatggtgaaaag

SEQ ID NO: 84646 - DNA, 120 bp, Artificial Sequence
  ENSG00000083857_74 (sequence is synthesized)
atccagctatcctccacagccattgtggatgttaccgtcaccgatgtcaacgatagtccaccacgattcacggccgagatctataaagggactgtgagtgaggatgacccccaaggtggg

SEQ ID NO: 84647 - DNA, 120 bp, Artificial Sequence
  ENSG00000083857_75 (sequence is synthesized)
gtgattgccatcttaagtaccacggatgctgattctgaagagatcaacagacaagttacatatttcataacaggaggggatcctttaggacagtttgccgttgaaactatacagaatgaa

SEQ ID NO: 84648 - DNA, 120 bp, Artificial Sequence
  ENSG00000083857_76 (sequence is synthesized)
tggaaggtatatgtgaagaaacctctagacagggaaaaaagggacaattaccttcttactatcacggcaactgatggcaccttctcatcaaaagcgatagttgaagtgaaagttctggat

SEQ ID NO: 84649 - DNA, 120 bp, Artificial Sequence
  ENSG00000083857_77 (sequence is synthesized)
gcaaatgacaacagtccagtttgtgaaaagactttatattcagacactattcctgaagacgtccttcctggaaaattgatcatgcagatctctgctacagacgcagacatccgctctaac

SEQ ID NO: 84650 - DNA, 120 bp, Artificial Sequence
  ENSG00000083857_78 (sequence is synthesized)
gctgaaattacttacacgttattgggttcaggtgcagaaaaattcaaactaaatccagacacaggtgaactgaaaacgtcaaccccccttgatcgtgaggagcaagctgtttatcatctt

SEQ ID NO: 84651 - DNA, 120 bp, Artificial Sequence
  ENSG00000083857_79 (sequence is synthesized)
ctcgtcagggccacagatggaggaggaagattctgccaagccagtattgtgctcacgctagaagatgtgaacgataacgcccccgaattctctgccgatccttatgccatcaccgtgttt

SEQ ID NO: 84652 - DNA, 120 bp, Artificial Sequence
  ENSG00000083857_80 (sequence is synthesized)
gaaaacacagagccgggaacgctgctgacaagagtgcaggccacagatgccgacgcaggattaaatcggaagattttatactcactgattgactctgctgatgggcagttctccattaac

SEQ ID NO: 84653 - DNA, 120 bp, Artificial Sequence
  ENSG00000083857_81 (sequence is synthesized)
gaattatctggaattattcagttagaaaaacctttggacagagaactccaggcagtatacaccctctctttgaaagctgtggatcaaggcttgccaaggaggctgactgccactggcact

SEQ ID NO: 84654 - DNA, 120 bp, Artificial Sequence
  ENSG00000083857_82 (sequence is synthesized)
gtgattgtatcagttcttgacataaatgacaacccccctgtgtttgagtaccgtgaatatggtgccaccgtgtctgaggacattcttgttggaactgaagttcttcaagtgtatgcagca

SEQ ID NO: 84655 - DNA, 120 bp, Artificial Sequence
  ENSG00000083857_83 (sequence is synthesized)
agtcgggatattgaagcaaatgcagaaatcacctactcaataataagtggaaatgaacatgggaaattcagcatagattctaaaacaggggccgtatttatcattgagaatctggattat

SEQ ID NO: 84656 - DNA, 120 bp, Artificial Sequence
  ENSG00000083857_84 (sequence is synthesized)
gagagctctcatgagtattacctaacagtagaggccactgatggaggcacgccttcactgagcgacgttgccactgtgaacgttaatgtaacagatatcaacgataatacccctgtgttc

SEQ ID NO: 84657 - DNA, 120 bp, Artificial Sequence
  ENSG00000083857_85 (sequence is synthesized)
agccaagacacctacacgacagtcatcagtgaagatgccgttcttgagcagtctgtcatcacggttatggccgatgatgccgatggaccttccaacagccacatccactactcaattata

SEQ ID NO: 84658 - DNA, 120 bp, Artificial Sequence
  ENSG00000083857_86 (sequence is synthesized)
gatggcaaccaaggaagctcgttcacaattgaccccgtcaggggagaagtcaaagtgaccaaacttctcgaccgagaaacgatttcaggttacacgctcacggttcaagcttctgataat

SEQ ID NO: 84659 - DNA, 120 bp, Artificial Sequence
  ENSG00000083857_87 (sequence is synthesized)
ggcagtccacccagagtcaacacgacgaccgtgaacatcgatgtgtccgatgtcaatgacaacgcgcccgtcttctccaggggaaactacagtgtcattatccaggaaaataagccagtg

SEQ ID NO: 84660 - DNA, 120 bp, Artificial Sequence
  ENSG00000083857_88 (sequence is synthesized)
ggcttcagcgtgctgcagctggtagtaacagatgaggattcttcccataacggtccacccttcttctttactattgtaactggaaatgatgagaaggcttttgaagttaacccgcaagga

SEQ ID NO: 84661 - DNA, 120 bp, Artificial Sequence
  ENSG00000083857_89 (sequence is synthesized)
gtcctcctgacatcatctgccatcaagaggaaggagaaagatcattacttactgcaggtgaaggtggcagataatggaaagcctcagttgtcatctttgacatacattgacattagggta

SEQ ID NO: 84662 - DNA, 120 bp, Artificial Sequence
  ENSG00000083857_90 (sequence is synthesized)
attgaggagagcatctatccgcctgcgattttgcccctggagattttcatcacctcttctggagaagaatactcaggtggcgtcattgggaagatccatgccacagaccaggacgtgtat

SEQ ID NO: 84663 - DNA, 120 bp, Artificial Sequence
  ENSG00000083857_91 (sequence is synthesized)
gatactctaacctacagtctcgaccctcagatggacaacctgttctctgtttccagcacagggggcaagctgatagcacacaaaaagctagacatagggcaataccttctcaatgtcagc

SEQ ID NO: 84664 - DNA, 120 bp, Artificial Sequence
  ENSG00000083857_92 (sequence is synthesized)
gtaacagatgggaagttcacgacggtggccgacatcacagtgcatatcagacaagtcacacaggagatgttgaaccacaccatcgcgatccgctttgccaacctcactccggaagaattc

SEQ ID NO: 84665 - DNA, 120 bp, Artificial Sequence
  ENSG00000083857_93 (sequence is synthesized)
gttggtgactactggcgcaacttccagcgagctttacggaacatcctgggtgtgaggaggaacgacatacagattgttagtttgcagtcctctgaacctcacccacatctggacgtctta

SEQ ID NO: 84666 - DNA, 120 bp, Artificial Sequence
  ENSG00000083857_94 (sequence is synthesized)
ctttttgtagagaaaccaggtagtgctcagatctcaacaaaacaacttctgcacaagattaactcttccgtgactgacattgaggaaatcattggagttaggatactgaatgtattccag

SEQ ID NO: 84667 - DNA, 120 bp, Artificial Sequence
  ENSG00000083857_95 (sequence is synthesized)
aaactctgcgcgggactggactgcccctggaagttctgcgatgaaaaggtgtctgtggatgaaagtgtgatgtcaacacacagcacagccagactgagttttgtgactccccgccaccac

SEQ ID NO: 84668 - DNA, 120 bp, Artificial Sequence
  ENSG00000083857_96 (sequence is synthesized)
agggcagcggtgtgtctctgcaaagagggaaggtgcccacctgtccaccatggctgtgaagatgatccgtgccctgagggatccgaatgtgtgtctgatccctgggaggagaaacacacc

SEQ ID NO: 84669 - DNA, 120 bp, Artificial Sequence
  ENSG00000083857_97 (sequence is synthesized)
tgtgtctgtcccagcggcaggtttggtcagtgcccagggagttcatctatgacactgactggaaacagctacgtgaaataccgtctgacggaaaatgaaaacaaattagagatgaaactg

SEQ ID NO: 84670 - DNA, 120 bp, Artificial Sequence
  ENSG00000083857_98 (sequence is synthesized)
accatgaggctcagaacatattccacgcatgcggttgtcatgtatgctcgaggaactgactatagcatcttggagattcatcatggaaggctgcagtacaagtttgactgtggaagtggc

SEQ ID NO: 84671 - DNA, 120 bp, Artificial Sequence
  ENSG00000083857_99 (sequence is synthesized)
cctggaattgtctctgttcagagcattcaggtcaatgatgggcagtggcacgcagtggccctggaagtgaatggaaactatgctcgcttggttctagaccaagttcatactgcatcgggc

SEQ ID NO: 84672 - DNA, 120 bp, Artificial Sequence
  ENSG00000083857_100 (sequence is synthesized)
acagccccagggactctgaaaaccctgaacctggataactatgtgttttttggtggccacatccgtcagcagggaacaaggcatggaagaagtcctcaagttggtaatggtttcaggggt

SEQ ID NO: 84673 - DNA, 120 bp, Artificial Sequence
  ENSG00000083857_101 (sequence is synthesized)
tgtatggactccatttatttgaatgggcaggagctccctttaaacagcaaacccagaagctatgcacacatcgaagagtcggtggatgtatctccaggctgcttcctgacggccacggaa

SEQ ID NO: 84674 - DNA, 120 bp, Artificial Sequence
  ENSG00000083857_102 (sequence is synthesized)
gactgcgccagcaacccttgccagaatggaggcgtttgcaatccgtcacctgctggaggttattactgcaaatgcagtgccttgtacatagggacccactgtgagataagcgtcaatccg

SEQ ID NO: 84675 - DNA, 120 bp, Artificial Sequence
  ENSG00000083857_103 (sequence is synthesized)
tgttcctccaagccatgcctctatgggggcacgtgtgttgtcgacaacggaggctttgtttgccagtgtagaggattatatactggtcagaggtgtcagcttagtccatactgcaaagat

SEQ ID NO: 84676 - DNA, 120 bp, Artificial Sequence
  ENSG00000083857_104 (sequence is synthesized)
gaaccctgtaagaatggcggaacatgctttgacagtttggatggcgccgtttgtcagtgtgattcgggttttaggggagaaaggtgtcagagtgatatcgacgagtgctctggaaaccct

SEQ ID NO: 84677 - DNA, 120 bp, Artificial Sequence
  ENSG00000083857_105 (sequence is synthesized)
tgcctgcacggggccctctgtgagaacacgcacggctcctatcactgcaactgcagccacgagtacaggggacgtcactgcgaggatgctgcgcccaaccagtatgtgtccacgccgtgg

SEQ ID NO: 84678 - DNA, 120 bp, Artificial Sequence
  ENSG00000083857_106 (sequence is synthesized)
aacattgggttggcggaaggaattggaatcgttgtgtttgttgcagggatatttttactggtggtggtgtttgttctctgccgtaagatgattagtcggaaaaagaagcatcaggctgaa

SEQ ID NO: 84679 - DNA, 120 bp, Artificial Sequence
  ENSG00000083857_107 (sequence is synthesized)
cctaaagacaagcacctgggacccgctacggctttcttgcaaagaccgtattttgattccaagctaaataagaacatttactcagacataccaccccaggtgcctgtccggcctatttcc

SEQ ID NO: 84680 - DNA, 120 bp, Artificial Sequence
  ENSG00000083857_108 (sequence is synthesized)
tacaccccgagtattccaagtgactcaagaaacaatctggaccgaaattccttcgaaggatctgctatcccagagcatcccgaattcagcacttttaaccccgagtctgtgcacgggcac

SEQ ID NO: 84681 - DNA, 120 bp, Artificial Sequence
  ENSG00000083857_109 (sequence is synthesized)
cgaaaagcagtggcggtctgcagcgtggcgccaaacctgcctcccccacccccttcaaactccccttctgacagcgactccatccagaagcctagctgggactttgactatgacacaaaa

SEQ ID NO: 84682 - DNA, 120 bp, Artificial Sequence
  ENSG00000083857_110 (sequence is synthesized)
gtggtggatcttgatccctgtctttccaagaagcctctagaggaaaagccttcccagccatacagtgcccgggaaagcctgtctgaagtgcagtctctgagctccttccagtccgaatcg

SEQ ID NO: 84683 - DNA, 120 bp, Artificial Sequence
  ENSG00000083857_111 (sequence is synthesized)
tgcgatgacaatgggtatcactgggatacatcagattggatgccaagcgttcctctgccggacatacaagagttccccaactatgaggtgattgatgagcagacacccctgtactcagca

SEQ ID NO: 84684 - DNA, 120 bp, Artificial Sequence
  ENSG00000083857_112 (sequence is synthesized)
gatccaaacgccatcgatacggactattaccctggaggctacgacatcgaaagtgattttcctccacccccagaagacttccccgcagctgatgagctaccaccgttaccgcccgaattc

SEQ ID NO: 84685 - DNA, 120 bp, Artificial Sequence
  ENSG00000083857_113 (sequence is synthesized)
agcaatcagtttgaatccatccaccctcctagagacatgcctgccgcgggtagcttgggttcttcatcaagaaaccggcagaggttcaacttgaatcagtatttgcccaatttttatccc

SEQ ID NO: 84686 - DNA, 120 bp, Artificial Sequence
  ENSG00000083857_114 (sequence is synthesized)
ctcgatatgtctgaacctcaaacaaaaggcactggtgagaatagtacttgtagagaaccccatgccccttacccgccagggtatcaaagacacttcgaggcgcccgctgtcgagagcatg

SEQ ID NO: 84687 - DNA, 120 bp, Artificial Sequence
  ENSG00000083857_115 (sequence is synthesized)
cccatgtctgtgtacgcctccaccgcctcctgctctgacgtgtcagcctgctgcgaagtggagtccgaggtcatgatgagtgactatgagagcggggacgacggccacttcgaagaggtg

SEQ ID NO: 84688 - DNA, 120 bp, Artificial Sequence
  ENSG00000083857_116 (sequence is synthesized)
acgatcccgcccctggattcccagcagcacacggaagtctgactctcaactccccccaaagtgcctgactttagtgaacctagaggtgatgtgagtaatccgcgctgttctttgcagcag

SEQ ID NO: 84689 - DNA, 120 bp, Artificial Sequence
  ENSG00000083857_117 (sequence is synthesized)
tgcttccaagctttttttggtgagccgaatgggcatggctgcgctggatcctgcgcctctggacgtgctagccatttccagtgtcccaactactgtcatcgtgaggttttcatcggctgt

SEQ ID NO: 84690 - DNA, 120 bp, Artificial Sequence
  ENSG00000083857_118 (sequence is synthesized)
gccatttcccaacgtcttttgggatttacatctgtctgtgttaaaataatcaaacgaaaaatcagtcctgtgttgtcagcatgattcatgtatttatatagatttgattattttaatttt

SEQ ID NO: 84691 - DNA, 120 bp, Artificial Sequence
  ENSG00000083857_119 (sequence is synthesized)
cctgtctcttttttttgtaaattttatgtacagatttgatttttcatagttttaactagatttccaagatattttgtgcatttgtttcaactgaattttggtggtgtcagtgccattatc

SEQ ID NO: 84692 - DNA, 120 bp, Artificial Sequence
  ENSG00000083857_120 (sequence is synthesized)
tagcaccctgatttttttttttttactataaccagggtttcattctgtctttttccactgaagtgtgacattttgttagtacatttcagtgtagtcattcatttctagctgtacatagga

SEQ ID NO: 84693 - DNA, 120 bp, Artificial Sequence
  ENSG00000083857_121 (sequence is synthesized)
tgaaggagagatcagatacatgaacatgtcttacatgggttgctgtatttagaattataaacatttttcattattggaaagtgtaacggggaccttctgcatacctgtttagaaccaaaa

SEQ ID NO: 84694 - DNA, 120 bp, Artificial Sequence
  ENSG00000083857_122 (sequence is synthesized)
ccaccatgacacagtttttatagtgtctgtatatttgtgatgcaatggtcttgtaaaggtttttaatgaaaactaccattagccagtctttcttactgacaataaattattaataaaata

SEQ ID NO: 84695 - DNA, 90 bp, Artificial Sequence
  ENSG00000083857_123 (sequence is synthesized)
tagaagtgaggcagcctgggcgttacagggaaaccccatctctacaaaaacttaaaaaatcagccaggcatgtggcatgcctctagttcc

SEQ ID NO: 84696 - DNA, 80 bp, Artificial Sequence
  ENSG00000083857_124 (sequence is synthesized)
gcagcctgggcgttacagggaaaccccatctctacaaaaacttaaaaaatcagccaggcatgtggcatgcctcgagcccg

SEQ ID NO: 84697 - DNA, 120 bp, Artificial Sequence
  ENSG00000083857_125 (sequence is synthesized)
aattttatactgaacatttttatatttaatctttcattactttagaattcatttctctgtgatgcagtcgtcaaatttattctttccaaacagagagccagtcatgctgggcttttcatt

SEQ ID NO: 84698 - DNA, 120 bp, Artificial Sequence
  ENSG00000083857_126 (sequence is synthesized)
ctttccaagaagcctctagaggaaaagccttcccagccatacagtgcccgggaaagcctgtctgaagtgcagtctctgagctccttccagtccgaatcgtgcgatgacaatgcttccata

SEQ ID NO: 84699 - DNA, 120 bp, Artificial Sequence
  ENSG00000083857_127 (sequence is synthesized)
aagggggagggagtggggaaagaggcagcgagtcgccgcagccggcggccgcaactcctcaactcggcggctggctgcctgggcacgtcctgacaaacttggctgctcccgggccctcgt

SEQ ID NO: 84700 - DNA, 120 bp, Artificial Sequence
  ENSG00000083857_128 (sequence is synthesized)
tccggccccgcgcactctcttttcgcctgcgtttggtgcttaagtttgccctggtcggaagcctccggagatgcggccgcctgggtcccggcggcacggacgttggcactctggttaggg

SEQ ID NO: 84701 - DNA, 120 bp, Artificial Sequence
  ENSG00000083857_129 (sequence is synthesized)
acatgctgaagatcccggggaggcaaagttggtacttcaaacccggctcttaacacatatctacaccgcgaggggatcacggagctgccgaggactttagagcccagggccgaggactcg

SEQ ID NO: 84702 - DNA, 120 bp, Artificial Sequence
  ENSG00000083857_130 (sequence is synthesized)
gcctgtctgaagtgcagtctctgagctccttccagtccgaatcgtgcgatgacaatggctgtgattgtcagaaacaaggaaaagaaagtaatatttgagttttctggccaaatttctggt

SEQ ID NO: 84703 - DNA, 120 bp, Artificial Sequence
  ENSG00000083896_0 (sequence is synthesized)
tttcgggagcgggattgtttcgcgcaggaagcaggctccattttagcgccgcccgccgtcgccatctgtttcccttccctcccccatacctagcccgagtctgagccctaacgagaaggc

SEQ ID NO: 84704 - DNA, 120 bp, Artificial Sequence
  ENSG00000083896_1 (sequence is synthesized)
tgggcctaggccgctggatgctggagtgaaaggaagggagaaagggaaaaagcgggaagagtcgagaaggctgagtgttaagaggccaagtgcgacgcgcgtatccgggcagacggactg

SEQ ID NO: 84705 - DNA, 120 bp, Artificial Sequence
  ENSG00000083896_2 (sequence is synthesized)
acggacgggcccgtgcttctgccgcggctgcggcgcccgcgcgagtcgcgtctaagcggcggcggcggtggcagcggcggaaaccgaaggggagccatggcggctgacagtcgggaggag

SEQ ID NO: 84706 - DNA, 120 bp, Artificial Sequence
  ENSG00000083896_3 (sequence is synthesized)
aaagatggagaacttaatgttctggatgatattttaactgaagtaccagaacaagatgatgaactgtataatccagagagtgaacaagataaaaatgagaaaaagggatcaaaaagaaaa

SEQ ID NO: 84707 - DNA, 120 bp, Artificial Sequence
  ENSG00000083896_4 (sequence is synthesized)
agtgatcgaatggaatctactgataccaaacgacaaaagccttctgtccattctagacaactggtttctaagccactgagctcatctgttagcaataacaaaagaatagttagtacaaaa

SEQ ID NO: 84708 - DNA, 120 bp, Artificial Sequence
  ENSG00000083896_5 (sequence is synthesized)
ggaaagtcagccacagagtataaaaatgaggaatatcaaagatctgaaagaaacaagcgtctagatgctgatcggaaaattcgtctatcaagtagtgcctccagagaaccttataagaat

SEQ ID NO: 84709 - DNA, 120 bp, Artificial Sequence
  ENSG00000083896_6 (sequence is synthesized)
caacctgaaaaaacctgtgtccggaaaagggatcctgaaaggagggccaaatctcctacgccagatggttctgagagaattgggcttgaagtggatagacgtgcaagcagatccagccag

SEQ ID NO: 84710 - DNA, 120 bp, Artificial Sequence
  ENSG00000083896_7 (sequence is synthesized)
tcttctaaggaagaagtgaactctgaagaatatggctctgaccatgagactggcagcagtggttcttctgatgagcaagggaacaacactgagaatgaggaggaaggagtggaagaagat

SEQ ID NO: 84711 - DNA, 120 bp, Artificial Sequence
  ENSG00000083896_8 (sequence is synthesized)
ctgagaatgaggaggaaggagtggaagaagatgtggaggaagatgaagaagtagaagaagatgcagaagaagatgaagaggtggatgaagatggagaggaggaggaggaagaggaggagg

SEQ ID NO: 84712 - DNA, 120 bp, Artificial Sequence
  ENSG00000083896_9 (sequence is synthesized)
gaatatgaacaggatgagagagaccagaaagaggagggaaatgattatgacactcgaagtgaggccagtgactctggttctgaatctgtttccttcacagatgggtctgtcagatctggt

SEQ ID NO: 84713 - DNA, 120 bp, Artificial Sequence
  ENSG00000083896_10 (sequence is synthesized)
tcaggcacagatggatcagatgagaaaaagaaggaaaggaagagagctagaggcatatctccaattgtttttgatagaagtggaagctctgcatcagagtcatatgcagatcaaaccagt

SEQ ID NO: 84714 - DNA, 120 bp, Artificial Sequence
  ENSG00000083896_11 (sequence is synthesized)
aaactcaaatatgtgcttcaagatgcaagatttttcctcataaagagtaacaaccatgagaatgtgtctcttgccaaagcgaagggtgtatggtccacgctccctgtaaatgagaagaaa

SEQ ID NO: 84715 - DNA, 120 bp, Artificial Sequence
  ENSG00000083896_12 (sequence is synthesized)
ttaaatcttgcatttagatctgcaaggagtgttatcttaatattttctgtcagagagagtggaaaatttcaagggtttgcaagactttcttcagaatcacatcacggaggatctcctata

SEQ ID NO: 84716 - DNA, 120 bp, Artificial Sequence
  ENSG00000083896_13 (sequence is synthesized)
gggtgcttccagcaggaatgagtgctaaaatgctgggaggtgtctttaaaattgactggatttgcaggcgtgaattacccttcactaagtcggctcatctcaccaatccttggaatgaac

SEQ ID NO: 84717 - DNA, 120 bp, Artificial Sequence
  ENSG00000083896_14 (sequence is synthesized)
ataaaccagtaaagatcggacgtgatggacaggaaattgaacttgaatgtggaacccagctttgtcttctgtttccccccgatgaaagtattgacttgtatcaggtcattcataaaatgc

SEQ ID NO: 84718 - DNA, 120 bp, Artificial Sequence
  ENSG00000083896_15 (sequence is synthesized)
gtcacaagagaagaatgcattctcagccccgatcacgaggacgtccatcccgtcgagaaccagtccgggatgtgggaaggcgtcgaccagaagattatgatattcataacagcagaaaga

SEQ ID NO: 84719 - DNA, 120 bp, Artificial Sequence
  ENSG00000083896_16 (sequence is synthesized)
aaccaaggattgactatccccctgagtttcaccagagaccagggtatttaaaggatccacgataccaggaagtggacagacgattttcaggagttcgccgagatgtgtttttaaatgggt

SEQ ID NO: 84720 - DNA, 120 bp, Artificial Sequence
  ENSG00000083896_17 (sequence is synthesized)
cctacaatgattatgtgagggaatttcataacatgggaccaccaccaccttggcaaggaatgcccccttacccaggaatggaacaacctccacaccatccttactatcagcaccatgctc

SEQ ID NO: 84721 - DNA, 120 bp, Artificial Sequence
  ENSG00000083896_18 (sequence is synthesized)
cacctcctcaagctcatcccccttactcaggacatcatccagtaccacatgaagcaagatacagagataaacgagtacatgattatgatatgagggtggatgatttccttcgtcgcacac

SEQ ID NO: 84722 - DNA, 120 bp, Artificial Sequence
  ENSG00000083896_19 (sequence is synthesized)
aagctgttgtcagtggccggagaagtagaccccgtgaaagagaccgggaacgagagcgagaccgccctagagataacagacgagacagagagcgagatagaggacgtgatagagaaagag

SEQ ID NO: 84723 - DNA, 120 bp, Artificial Sequence
  ENSG00000083896_20 (sequence is synthesized)
aaagagagcgattatgtgatcgagacagagaccgaggggagagaggtcgatatagaagataatgggcttttggaagcactgattgtttaaagatacaaaaaatcttgtattttttttttg

SEQ ID NO: 84724 - DNA, 120 bp, Artificial Sequence
  ENSG00000083896_21 (sequence is synthesized)
tgtgtgtttacaagtagtaaatttattttcagctgtctgcctatgaagttcattgtgtagaaggatttattatgaccccctttgttccaagcatgcagtatcataagaactggaaaaact

SEQ ID NO: 84725 - DNA, 120 bp, Artificial Sequence
  ENSG00000083896_22 (sequence is synthesized)
caaatccgccaaaaatccacagctgacagttgaattgacacttttattggggcagaatggaacagtccaagaatgtagatactgattctttctccataaatgttcttatagtgtgttcat

SEQ ID NO: 84726 - DNA, 120 bp, Artificial Sequence
  ENSG00000083896_23 (sequence is synthesized)
cctagagttatttttttgtttgtttttttcctttttggatcttgattgataactgccatgatattttgctttgatgtgtttctacatgtagttgcacacggttcagtaaaaataatgctg

SEQ ID NO: 84727 - DNA, 120 bp, Artificial Sequence
  ENSG00000083896_24 (sequence is synthesized)
ctatcgagtatgcaaatattgaagtatgatggtttgactgtatggcagtgttgtagcagcctcttgtttttttccccattgcctctttttttaaaaaacttataaagtcactttttattt

SEQ ID NO: 84728 - DNA, 120 bp, Artificial Sequence
  ENSG00000083896_25 (sequence is synthesized)
ttcctcagtcttcaatgacgagagcaatattaagaagacattgctatctaatttttaatctttttaaatgaaaaattcctatgttcagtagcgtggttgatgctattgtttagccttccc

SEQ ID NO: 84729 - DNA, 120 bp, Artificial Sequence
  ENSG00000083896_26 (sequence is synthesized)
ctccaaattgtatacattggcttggaatgttcacaacttgcgtgcgtggcagcggaagacgattcccatattctacattgctactgttttgtataaaataaattggtaaagattgacggt

SEQ ID NO: 84730 - DNA, 120 bp, Artificial Sequence
  ENSG00000083896_27 (sequence is synthesized)
tggacataaaagcatgctttttgttcaggaattttaggaaccccatttgctttttttgaggcacactttagcagaaatgattgacctaggcctgttgcattaaaagcttacttctatttc

SEQ ID NO: 84731 - DNA, 120 bp, Artificial Sequence
  ENSG00000083896_28 (sequence is synthesized)
taacataagatacacagagttatgttaataatttggttaagtatttatacacctgataacattttgagtctactctgatcacagaatcgtttatttaggttttctatttgttgttttagt

SEQ ID NO: 84732 - DNA, 120 bp, Artificial Sequence
  ENSG00000083896_29 (sequence is synthesized)
cttctgtaagtgaacgactttgtacatgctttctactttacttcataaatggacttttaaccctcttgtattagttctgtattttaagttaactgtccagttctcccagtggtaaccaac

SEQ ID NO: 84733 - DNA, 120 bp, Artificial Sequence
  ENSG00000083896_30 (sequence is synthesized)
tataacatagaaatagagccgctcaagaaaacagtttatgaaataatttttttgaattttttcttgagttacacctggagttttggcctttggaatttggcctttataaacattaggaat

SEQ ID NO: 84734 - DNA, 120 bp, Artificial Sequence
  ENSG00000083896_31 (sequence is synthesized)
atttgaatgtttgatttttttatagtatcaacagttgtactgtgtaccagatcacatagtacagttttacatttaatctatattggcctgaaaagaacaacacaggcactttactcttaa

SEQ ID NO: 84735 - DNA, 120 bp, Artificial Sequence
  ENSG00000083896_32 (sequence is synthesized)
aggatataataaactatagttatactgcattcatattcataccagcatgtagtatctttccctgcattcacagaagttttatttacaatgacaaaactaaagcctgaggatttgttttaa

SEQ ID NO: 84736 - DNA, 120 bp, Artificial Sequence
  ENSG00000083896_33 (sequence is synthesized)
atctgcattgtggtagagaggaaaaagtacttttaaggaaacctgggttctagttttgtcattgtctttaattaaaccggttagtgatacatggtaagtcacttcattggcattttgtgt

SEQ ID NO: 84737 - DNA, 120 bp, Artificial Sequence
  ENSG00000083896_34 (sequence is synthesized)
attcatcagtaagctagacaagatgatagctacagtttaagaatttctgtaaccattatacaaaactggtaggtaatattaaaggtattttcctgaaataataggaataaatactgagca

SEQ ID NO: 84738 - DNA, 120 bp, Artificial Sequence
  ENSG00000083896_35 (sequence is synthesized)
ctttgtatgcaatagagactttgtgcttttatatacagactcatttaaatgggctcagagaggctagtaaacttgcccaagattagaaaggtagtaattgatgggccaagattttaccca

SEQ ID NO: 84739 - DNA, 120 bp, Artificial Sequence
  ENSG00000083896_36 (sequence is synthesized)
tgtttttatttggtgtttctaaaccacctcatcacttttgaaaaaacagtatataaattaataaatgttttggagatggagtctgtcgcccaggtggagggcagtggcatgatcttggct

SEQ ID NO: 84740 - DNA, 76 bp, Artificial Sequence
  ENSG00000083896_37 (sequence is synthesized)
gatttttaaacattaacatttccttcaggcttaagcagaggatttttctaaagtgccatccaattagatgttaagt

SEQ ID NO: 84741 - DNA, 120 bp, Artificial Sequence
  ENSG00000083896_38 (sequence is synthesized)
agaggatttttctaaagtgccatccaattagatgttaagttatgctttgtatgttgagcttagtattgagtcgatctattttaaaaagccaacattaagtttttaccaagtatctggcac

SEQ ID NO: 84742 - DNA, 120 bp, Artificial Sequence
  ENSG00000083896_39 (sequence is synthesized)
tattctaaacaattctgttggctcacataatcatcactgttttctcctttcctaatttttaaaataaacttaccggaacattgtataaaaaatgcaagatttttttctgtacagaagagt

SEQ ID NO: 84743 - DNA, 120 bp, Artificial Sequence
  ENSG00000083896_40 (sequence is synthesized)
cagtatataaaaatcagtatgttttatttaatattcgtacacatgacagcttttgtcactgtgagaagacatggtttctttcgtgtactccactgtgctgtgattctaacaatctacatt

SEQ ID NO: 84744 - DNA, 120 bp, Artificial Sequence
  ENSG00000083896_41 (sequence is synthesized)
agtatgatgtgttcagatgaaaaacagaaaattcagtcattccgagtttagaaatccggtcagggattttattggctggagtaatagttcaaaggagtgaaaattcaagcatgtaatttt

SEQ ID NO: 84745 - DNA, 120 bp, Artificial Sequence
  ENSG00000083896_42 (sequence is synthesized)
tggatttgatttcctccataatgatttcctccataatggctttttttcaagcatggtctaatttttcagaaaatggccattatctccaagcttccattgtccatgtagtttcagtggcag

SEQ ID NO: 84746 - DNA, 120 bp, Artificial Sequence
  ENSG00000083896_43 (sequence is synthesized)
gagagagactattttcctcccagtgtccatgtcagttccccaaaaggactgaatagccatgttggttttggagccagccgtaatccaatctgtatttccaaggaaatggggttctttgtc

SEQ ID NO: 84747 - DNA, 120 bp, Artificial Sequence
  ENSG00000083896_44 (sequence is synthesized)
tcccagcattgggaagcaagagaggcacatgttatggtcacctctgtgaggattacatcaggaaggacagtctccaaaagacatggacagaggaaatttagcagatgtccattaaatcag

SEQ ID NO: 84748 - DNA, 120 bp, Artificial Sequence
  ENSG00000083896_45 (sequence is synthesized)
gatctcatacaagttataacacctgaatgtttgacttttcagagtattttgccatcacaggtgtggcatcttgcccttggatatatctacattctgctgtagaatgtcgtggtctttctg

SEQ ID NO: 84749 - DNA, 120 bp, Artificial Sequence
  ENSG00000083896_46 (sequence is synthesized)
agggtcacatacatcctgtcttgtcataatgttaaccattaagagtcctcaggggcatggaattgaagaaggaactgttgccagcagttaactgaccaagctagagttccctgacccaac

SEQ ID NO: 84750 - DNA, 120 bp, Artificial Sequence
  ENSG00000083896_47 (sequence is synthesized)
gtaagggtgactgtgacacacatggataattttagcttcatgtttaagattttgttatttgggtaggaaacattccaaatgcagtttgaaacacatattaaaattgaggcacacaggaaa

SEQ ID NO: 84751 - DNA, 120 bp, Artificial Sequence
  ENSG00000083896_48 (sequence is synthesized)
gaactggctcaagtttagtccccaagttccttatagtaggaataggaatccttagagtataagcaatccatgcatagtattctgttatctatcatgtagatcatttaatctctaattttt

SEQ ID NO: 84752 - DNA, 120 bp, Artificial Sequence
  ENSG00000083896_49 (sequence is synthesized)
tggggtggggattctcttgtttctaaatcttacactttcagtttcttctgtgtcttaaatatagattattgactattgtcttaaatactaataaatacattaaatgtatcttaaatacta

SEQ ID NO: 84753 - DNA, 120 bp, Artificial Sequence
  ENSG00000083896_50 (sequence is synthesized)
gactgataataggcacatgtatcagaataacatgatggaggaatatgattcgtcaaaagtttgtcctgcggtaaagaagaaagagaaaatcctcaaatcaagctgcatggactagtttgt

SEQ ID NO: 84754 - DNA, 120 bp, Artificial Sequence
  ENSG00000083896_51 (sequence is synthesized)
ggcttcattgaggatttcacatggtcaccttggtctcagtcatttttcaagaggaaaatggggatctttccttatgcagaaaaaagtataaccagtgataaccagtttagattagataat

SEQ ID NO: 84755 - DNA, 120 bp, Artificial Sequence
  ENSG00000083896_52 (sequence is synthesized)
catattcttactgcagactgttttggaataattgtttgtttttattaaaaatgcctgattatgcccctttggattatatagatagaatatatttcttttactgatcaaatcacaaactgc

SEQ ID NO: 84756 - DNA, 120 bp, Artificial Sequence
  ENSG00000083896_53 (sequence is synthesized)
ttaaggcaaacgcctacaaatagaactccttttaggtagtacctaggctatgttctttccatattgagatcttaattatgctatgtaattaatattgttaatagatatttctgaactttt

SEQ ID NO: 84757 - DNA, 120 bp, Artificial Sequence
  ENSG00000083896_54 (sequence is synthesized)
tgtgtattcttactcaatttttctaggatagatcgtgtatattaagttagctgataagctgtaatctcatttagtcatttgtttttatttctaccaaatgttaaagctagtaactgataa

SEQ ID NO: 84758 - DNA, 120 bp, Artificial Sequence
  ENSG00000083937_0 (sequence is synthesized)
gttagttcccggtcacctgagctccgggtgacgcggctgcggtagctgcggatacaagccttccgcgggtcctgcctggcgaccccgacctcctcctgctgtctctccgctccgccaccc

SEQ ID NO: 84759 - DNA, 120 bp, Artificial Sequence
  ENSG00000083937_1 (sequence is synthesized)
cgaacccgccaaggtcctgtccttttcctcctgtcctttgccagcgttgggccggaccgggccgagccgggccgcccgggcgcagtctttaaccatggcgtccctcttcaagaagaaaac

SEQ ID NO: 84760 - DNA, 120 bp, Artificial Sequence
  ENSG00000083937_2 (sequence is synthesized)
cgtggatgatgtaataaaggaacagaatcgagagttacgaggtacacagagggctataatcagagatcgagcagctttagagaaacaagaaaaacagctggaattagaaattaagaaaat

SEQ ID NO: 84761 - DNA, 120 bp, Artificial Sequence
  ENSG00000083937_3 (sequence is synthesized)
ggccaagattggtaataaggaagcttgcaaagttttagccaaacaacttgtgcatctacggaaacagaagacgagaacttttgctgtaagttcaaaagttacttctatgtctacacaaac

SEQ ID NO: 84762 - DNA, 120 bp, Artificial Sequence
  ENSG00000083937_4 (sequence is synthesized)
aaaagtgatgaattcccaaatgaagatggctggagcaatgtctactacagcaaaaacaatgcaggcagttaacaagaagatggatccacaaaagacattacaaacaatgcagaatttcca

SEQ ID NO: 84763 - DNA, 120 bp, Artificial Sequence
  ENSG00000083937_5 (sequence is synthesized)
gaaggaaaacatgaaaatggaaatgactgaagaaatgatcaatgatacacttgatgacatctttgacggttctgatgacgaagaagaaagccaggatattgtgaatcaagttcttgatga

SEQ ID NO: 84764 - DNA, 120 bp, Artificial Sequence
  ENSG00000083937_6 (sequence is synthesized)
aattggaattgaaatttctggaaagatggccaaagctccatcagctgctcgaagcttaccatctgcctctacttcaaaggctacaatctcagatgaagagattgaacggcaactcaaggc

SEQ ID NO: 84765 - DNA, 120 bp, Artificial Sequence
  ENSG00000083937_7 (sequence is synthesized)
tttaggagtagattagtcaaaagaagtcatactattttgcttacttataattatgtagtataaaccaagcacagtgcagatttcttttacaaaacacatgtattttgcaaaaaaaaaaaa

SEQ ID NO: 84766 - DNA, 120 bp, Artificial Sequence
  ENSG00000083937_8 (sequence is synthesized)
aatgaagaccatgagtgaacagttgtttcctaacccatggctatttagaatcttttgccaaagaatgacaatgatgcaaaaatgggaacagtttggattttaattagaactgtttaggag

SEQ ID NO: 84767 - DNA, 120 bp, Artificial Sequence
  ENSG00000083937_9 (sequence is synthesized)
tgatgatgtgtaaaaagttgacttctcttttgcatggcacagagaaattatattccttacttcatgtcagtttatgttctaaatctttttcactgaatataaaaatcttgttaaatgcca

SEQ ID NO: 84768 - DNA, 120 bp, Artificial Sequence
  ENSG00000083937_10 (sequence is synthesized)
cttttgtaagtgattatgtgttatgaccataggtggttacagctgccaaattatttttaaatggtcaaaaagaagagtgctatttaaacatctgtcttaaacaaaaactgtcataacttt

SEQ ID NO: 84769 - DNA, 120 bp, Artificial Sequence
  ENSG00000083937_11 (sequence is synthesized)
tcttttttctttttccattaggagaacattctagttggtaaatttcaaaatgtgcttgacacctgccttaaatagcacagacctattgtgcacatctttaaattatttcagctggcagaa

SEQ ID NO: 84770 - DNA, 120 bp, Artificial Sequence
  ENSG00000083937_12 (sequence is synthesized)
aagaattacatttaaaactgaaatcaaggcctcaatacaaagattatcctggctcttttctatctctgtgggcctaattgaaatatgtactcttattttagacacgcctctgttaaaaca

SEQ ID NO: 84771 - DNA, 120 bp, Artificial Sequence
  ENSG00000083937_13 (sequence is synthesized)
gaccaggttttcctggtctcagacctatgatgacttgtccctttgatgtcactactgtgaattgaatataattagtaaaaatagacgatgaataaataacactttatagtaagaaaacaa

SEQ ID NO: 84772 - DNA, 120 bp, Artificial Sequence
  ENSG00000083937_14 (sequence is synthesized)
ttttggccatctaaaaatgagaattataattatatgaattataatttaaactgtttaattttgtttaatgtgtatattgaatcttccaaattgaagccattattctcaattaagtactac

SEQ ID NO: 84773 - DNA, 120 bp, Artificial Sequence
  ENSG00000083937_15 (sequence is synthesized)
ctacaactatgacaatgcttgacctacatttctaaaataaaaattcacattttttgataaataaactacagttttaccagaaattactatctaaatgtgtattagcagtattttttaagg

SEQ ID NO: 84774 - DNA, 120 bp, Artificial Sequence
  ENSG00000083937_16 (sequence is synthesized)
tgaaattgccttggtatctaatgaatgtgtagacagggagataaaatgaaggattgccagactagttagaatagaatttaggattaggttagttttgaaaaatgatgttgtaatatatgg

SEQ ID NO: 84775 - DNA, 120 bp, Artificial Sequence
  ENSG00000083937_17 (sequence is synthesized)
gttctaacacatcctaccataaaaactggaggagatatgtgtaacctggttaatttgggatggtggacattttgggctaatactgacaaaatacatcttaggactagtatacatgtgaca

SEQ ID NO: 84776 - DNA, 120 bp, Artificial Sequence
  ENSG00000083937_18 (sequence is synthesized)
cggattgctaggaggaatgaaaaactaaactgtatagtttatattccgtaaaccattttataatgttcaaagattaggttttgttattgatagtattaaatacacagtttctcttaacag

SEQ ID NO: 84777 - DNA, 120 bp, Artificial Sequence
  ENSG00000083937_19 (sequence is synthesized)
tgatgggtgaaaacattttaccggattatggaatgtttaccagaacatgttttgattcttgaatgtacataataatgccatctaacttatttacgttcttgtttacatgtgggagctttt

SEQ ID NO: 84778 - DNA, 120 bp, Artificial Sequence
  ENSG00000083937_20 (sequence is synthesized)
gttttcaaaaattattttgttaaaaaatctcaataaagatttattattgttgttcttttcttaccttttttgctctttttggttcctgctaaaattaaaaattttatgcatatttggtaa

SEQ ID NO: 84779 - DNA, 90 bp, Artificial Sequence
  ENSG00000083937_21 (sequence is synthesized)
tacgcaaccatcacctcccagattcaagcgattcttctacctcagcctaccgagtagctcggattacagatgtaataaaggaacagaatc

SEQ ID NO: 84780 - DNA, 120 bp, Artificial Sequence
  ENSG00000083937_22 (sequence is synthesized)
gcatattcttcctctactagcttaatggatacaatttgtgaaataatatttaaaaatcttaaacatgtagctgtgactatcacatttttttgtctattagaattaattttttaaaaaaga

SEQ ID NO: 84781 - DNA, 120 bp, Artificial Sequence
  ENSG00000083937_23 (sequence is synthesized)
gtagacttgtttgctataagataatttgtgttgaaatgaacattattccagatttaatggctcaaatatgtatttatcaatttacttcactgacattttgaaggatttttttagtttgtt

SEQ ID NO: 84782 - DNA, 120 bp, Artificial Sequence
  ENSG00000084070_0 (sequence is synthesized)
ggaggtggtagcggagctgacggcagctgccagggaaaccgaggcgcgggacgcaaggccagcagacaggccggccagagggtcatctgcgtccggcacccaggaggctcgtggtccgcc

SEQ ID NO: 84783 - DNA, 120 bp, Artificial Sequence
  ENSG00000084070_1 (sequence is synthesized)
tttgcctgggctgagggtctctggccccgcagcctctcttggaggcgggcctgtccctaagcccgccaaggggcgccgcgccgaggggctgcggagtgggggacggacgcccccgacccg

SEQ ID NO: 84784 - DNA, 120 bp, Artificial Sequence
  ENSG00000084070_2 (sequence is synthesized)
ggaaggggcgtccggcggggccggaggagagggctctccccgctcaggaggtgcccctgggcgggggaccgggagtcctcaaccccggactgaggcaggggtctctgggggcgaggaggg

SEQ ID NO: 84785 - DNA, 120 bp, Artificial Sequence
  ENSG00000084070_3 (sequence is synthesized)
cgcgtcgccctctgcccccgccggcaccctggccatgacaggcaagtcggtgaaggacgtggatcggtaccaggctgtcctggccaacctgctgctggaggaggataacaagttttgtgc

SEQ ID NO: 84786 - DNA, 120 bp, Artificial Sequence
  ENSG00000084070_4 (sequence is synthesized)
agattgccagtctaaagggccgcgatgggcctcttggaacattggtgtgttcatctgcattcgatgtgctggaatccacaggaatctgggggtgcacatatccagggtaaagtcagttaa

SEQ ID NO: 84787 - DNA, 120 bp, Artificial Sequence
  ENSG00000084070_5 (sequence is synthesized)
cctcgaccagtggactcaagaacagattcagtgcatgcaagagatgggaaatggaaaggcaaaccgactttatgaagcctatcttcctgagacctttcggcgacctcagatagacccagc

SEQ ID NO: 84788 - DNA, 120 bp, Artificial Sequence
  ENSG00000084070_6 (sequence is synthesized)
tgttgaaggatttattcgagacaaatatgagaagaagaaatacatggaccgaagtctggacatcaatgcctttaggaaagaaaaagatgacaagtggaaaagagggagcgaaccagttcc

SEQ ID NO: 84789 - DNA, 120 bp, Artificial Sequence
  ENSG00000084070_7 (sequence is synthesized)
agaaaaaaaattggaacctgttgtttttgagaaggtgaaaatgccacagaaaaaagaagacccacagctacctcggaaaagctccccgaaatccacagcgcctgtcatggatttgttggg

SEQ ID NO: 84790 - DNA, 120 bp, Artificial Sequence
  ENSG00000084070_8 (sequence is synthesized)
ccttgatgctcctgtggcctgctccattgcaaatagtaagaccagcaataccctagagaaggatttagatctgttggcctctgttccatccccttcttcttccggttccagaaaggttgt

SEQ ID NO: 84791 - DNA, 120 bp, Artificial Sequence
  ENSG00000084070_9 (sequence is synthesized)
aggttccatgccaactgcagggagtgccggctctgttcctgaaaatctgaacctgtttccggagccagggagcaaatcagaagaaataggcaagaaacagctctctaaagactccattct

SEQ ID NO: 84792 - DNA, 120 bp, Artificial Sequence
  ENSG00000084070_10 (sequence is synthesized)
ttcactgtatggatcccagacgcctcaaatgcctactcaagcaatgttcatggctcccgctcagatggcatatcccacagcctaccccagcttccccggggttacacctcctaacagcat

SEQ ID NO: 84793 - DNA, 120 bp, Artificial Sequence
  ENSG00000084070_11 (sequence is synthesized)
aatggggagcatgatgcctccaccagtaggcatggttgctcagccaggagcttctgggatggttgcccccatggccatgcctgcaggctatatgggtggcatgcaggcatcaatgatggg

SEQ ID NO: 84794 - DNA, 120 bp, Artificial Sequence
  ENSG00000084070_12 (sequence is synthesized)
cagcaggctggctacatggcaggcatggcagctatgccccagactgtgtatggggtccagccagctcagcagctgcaatggaaccttactcagatgacccagcagatggctgggatgaac

SEQ ID NO: 84795 - DNA, 120 bp, Artificial Sequence
  ENSG00000084070_13 (sequence is synthesized)
ttctatggagccaatggcatgatgaactatggacagtcaatgagtggcggaaatggacaggcagcaaatcagactctcagtcctcagatgtggaaataaaaacaaaacacctgtatggct

SEQ ID NO: 84796 - DNA, 120 bp, Artificial Sequence
  ENSG00000084070_14 (sequence is synthesized)
gccattctcttcagccctcgctctcccctttccacagcctccacccctgacccccatcctcttttcctacctctctgtttggtttagaaattgctcaataagtcatttggggtttggcat

SEQ ID NO: 84797 - DNA, 120 bp, Artificial Sequence
  ENSG00000084070_15 (sequence is synthesized)
cctgcccagccacttcccaaacatgaagacctctctgttgctttatgttgtacatgccccatagccatcccaacgtcctccccagtcctctcctggcaccagcaccttagaagttgttgg

SEQ ID NO: 84798 - DNA, 120 bp, Artificial Sequence
  ENSG00000084070_16 (sequence is synthesized)
cagaaggcacttaaactgtgggagaagtgtgcacacctttgagtcccttccctcaaggttaaagctcctgtcagactctcagaagggtctgtgggtgttgtatattaggcaaacagggga

SEQ ID NO: 84799 - DNA, 120 bp, Artificial Sequence
  ENSG00000084070_17 (sequence is synthesized)
aagcttagaggtccttctatatgtgttaataagctgtttctaagtgtttaaatttgaaaagcatcatgttctcatgatttatgggaatgaagcaagtactgaaatcaaattaaatactcc

SEQ ID NO: 84800 - DNA, 120 bp, Artificial Sequence
  ENSG00000084070_18 (sequence is synthesized)
ctgggtcctgggtcagtttgaccctagccctggggtgaggcaagccccctcctatgaggatgagcaaaaatactactctcttcgccctgagttgctttctggatctggggcttcaggact

SEQ ID NO: 84801 - DNA, 120 bp, Artificial Sequence
  ENSG00000084070_19 (sequence is synthesized)
tgctgcttcagtcagcctttattagcaccaaagactttatgaagatcccacacacagacacacatcccttcccgcctcccccctgccttcagtaggatctggctccgtggctggaggacc

SEQ ID NO: 84802 - DNA, 120 bp, Artificial Sequence
  ENSG00000084070_20 (sequence is synthesized)
aacccctatagtgggaatgcagagcttaacgtgtactgcttgtgtgtgtgcgtgagtgtgtgtgtgtgtatgagtgtgtgttccgcctcccaccctctccccatctgctctgggtatttt

SEQ ID NO: 84803 - DNA, 120 bp, Artificial Sequence
  ENSG00000084070_21 (sequence is synthesized)
tgtttttgtttagttttaggtttacaacagagaggaattaatttatcagcagcctaaaactgttgtgtttttcttatggtttaaaaaacgccatgtcattgataactccctttctccctt

SEQ ID NO: 84804 - DNA, 120 bp, Artificial Sequence
  ENSG00000084070_22 (sequence is synthesized)
cccttctcccggtctgctgatcactctttcatgcctgtgtatccagggtgctctgtttccccaccgttcccaggtgtacgaggcagagggccgggacagctttcctctcagtcattgttc

SEQ ID NO: 84805 - DNA, 120 bp, Artificial Sequence
  ENSG00000084070_23 (sequence is synthesized)
accccacttgaaaattcagacaagaaaactttgcttaaaagatttcatgtgtgggaaccacagttcctggctgcctttctcctgtgtatgtgtaaattccttaataaatattgcagggaa

SEQ ID NO: 84806 - DNA, 120 bp, Artificial Sequence
  ENSG00000084070_24 (sequence is synthesized)
gattccagttcattcctagctcagaaagcaacgttttgagccacaactgtcacaactccagctggtgtgcagagaagccaggttgatgccatctatcaaagttgtctcttagacctcaga

SEQ ID NO: 84807 - DNA, 120 bp, Artificial Sequence
  ENSG00000084070_25 (sequence is synthesized)
ttatgcacttctgcctcctgacttgattctttcacctaatacttcctgagttttgtttctttggtaactctctttgaataacagcagccctacccacaagaacaccgtggctttacagtg

SEQ ID NO: 84808 - DNA, 120 bp, Artificial Sequence
  ENSG00000084070_26 (sequence is synthesized)
acaaatgagtgagtgcagcaggagaggcagcagagcgccgtgggagttggaataggaaggagaaaaggcttcatggggaaagtgggcagagcaagatttgcacaaaaagatgttttgcaa

SEQ ID NO: 84809 - DNA, 120 bp, Artificial Sequence
  ENSG00000084072_0 (sequence is synthesized)
ggaaaagcgcgcgagcaagatggccaccaccaagcgcgtcttgtacgtgggtggactggcagaggaagtggacgacaaagttcttcatgctgcgttcattccttttggagacatcacaga

SEQ ID NO: 84810 - DNA, 120 bp, Artificial Sequence
  ENSG00000084072_1 (sequence is synthesized)
tattcagattcctctggattatgaaacagaaaagcaccgaggatttgcttttgttgaatttgagttggcagaggatgctgcagcagctatcgacaacatgaatgaatctgagctttttgg

SEQ ID NO: 84811 - DNA, 120 bp, Artificial Sequence
  ENSG00000084072_2 (sequence is synthesized)
acgtacaattcgtgtcaatttggccaaaccaatgagaattaaggaaggctcttccaggccagtttggtcagatgatgactggttgaagaagttttctgggaagacgcttgaagagaataa

SEQ ID NO: 84812 - DNA, 120 bp, Artificial Sequence
  ENSG00000084072_3 (sequence is synthesized)
agaggaagaagggtcagagcctcccaaagcagagacccaggagggagagcccattgctaaaaaggcccgctcaaatcctcaggtgtacatggacatcaagattgggaacaagccggctgg

SEQ ID NO: 84813 - DNA, 120 bp, Artificial Sequence
  ENSG00000084072_4 (sequence is synthesized)
ccgcatccagatgctcctgcgttctgatgtcgtgcccatgacagcagagaatttccgctgcctgtgcactcatgaaaagggctttggctttaagggaagcagcttccaccgcatcatccc

SEQ ID NO: 84814 - DNA, 120 bp, Artificial Sequence
  ENSG00000084072_5 (sequence is synthesized)
atgatgaaaactttatcctcaagcatacgggaccaggtctactatccatggccaactctggcccaaacaccaatggctctcagttcttcctgacatgtgacaagacagactggctggatg

SEQ ID NO: 84815 - DNA, 120 bp, Artificial Sequence
  ENSG00000084072_6 (sequence is synthesized)
gcaagcatgtggtgtttggagaggtcaccgaaggcctagatgtcttgcggcaaattgaggcccagggcagcaaggacgggaagccaaagcagaaggtgatcatcgccgactgtggggagt

SEQ ID NO: 84816 - DNA, 120 bp, Artificial Sequence
  ENSG00000084072_7 (sequence is synthesized)
acgtgtgaggcggcactctctctgcttccccctccgctcttgaccctgcatatccaggaaggaactgccagcctcagaggaggcagcaccgagggtgcctgtttgaagcaagcagcattt

SEQ ID NO: 84817 - DNA, 120 bp, Artificial Sequence
  ENSG00000084072_8 (sequence is synthesized)
gggatatgtgcccttcctcagggtctgcttggagcagctcctctgcaggcacagcctggactattcccaggcacagctgtgggcccaggagccagctcaggtgctcccctccaccatggg

SEQ ID NO: 84818 - DNA, 120 bp, Artificial Sequence
  ENSG00000084072_9 (sequence is synthesized)
caggctgtgcaaaaagccactggcttttctcagcatttgctgctgggcctctcctgggactaccagtgtggctcttacgtgttttctttgctaaaataaaccctagttcttatattgctc

SEQ ID NO: 84819 - DNA, 120 bp, Artificial Sequence
  ENSG00000084072_10 (sequence is synthesized)
atttggttaggtttttgggccttaggctgatgcttccagagagatcagaagtaagtgctgttctaaggaaagcgtctctcacataatcagactggactgtgaataacatgtcagacctgc

SEQ ID NO: 84820 - DNA, 120 bp, Artificial Sequence
  ENSG00000084072_11 (sequence is synthesized)
caggccctcccattcttgccctgcagaggagctagctcatgcacccctgttcattgagcattcttgcctggaagtagtgattatttcttgtgccttcaactagatggcaaattgttgcac

SEQ ID NO: 84821 - DNA, 120 bp, Artificial Sequence
  ENSG00000084072_12 (sequence is synthesized)
caccagctctaaaatcagccaggaagtgctctttgttagaaacacacaaaacctaggcaagaaatacagaggtggcatttttctggatttttgctactgagcatgtgtttagacaccata

SEQ ID NO: 84822 - DNA, 120 bp, Artificial Sequence
  ENSG00000084072_13 (sequence is synthesized)
cgtggggtgggacgcatctctgaaccaggaggacggcgagctgctgtcaaggccgggtctctggcggtagtgctggcgatagctctggctgtgcttaaactccttccaaggtttcccact

SEQ ID NO: 84823 - DNA, 120 bp, Artificial Sequence
  ENSG00000084072_14 (sequence is synthesized)
gtcctcaggaaaaagtgcagacttcttagcagtacgcacttctccagcttctttgctttgcttcccgattcgctgggtctcccgaaaaatgacccacttgcccccaaggttcaggttatt

SEQ ID NO: 84824 - DNA, 120 bp, Artificial Sequence
  ENSG00000084072_15 (sequence is synthesized)
ttgccccagataccaaggcatcaaaagccaggggatccagaaaaaacaaagatggccaagagagaaactgggggaaaagccaaaaggttgagagccacaccatctagaagcttcctgcct

SEQ ID NO: 84825 - DNA, 120 bp, Artificial Sequence
  ENSG00000084072_16 (sequence is synthesized)
gcggtgcggcacagaaacaagaagagtcagcaattaccagccagccgaggtcctggaagctgacgtagagctcgtgccgacggcagacctgccggccgtgggagccgtggacgtcatctg

SEQ ID NO: 84826 - DNA, 120 bp, Artificial Sequence
  ENSG00000084072_17 (sequence is synthesized)
cagggacagaaggggcaaggtcttttctggggttcctactgtgtgcagctactatggggtaccagggtgggggatgccctgatgagcacatttgtcaaataaatgaatgacaggaaacca

SEQ ID NO: 84827 - DNA, 120 bp, Artificial Sequence
  ENSG00000084072_18 (sequence is synthesized)
tgatgtcgtgcccatgacagcaggtgagcaggacgctgtggtcagaacggcgggacgctggtggctgagcagtgagcctttcccaggttcttactgcttcacttcttgtgtccttgatat

SEQ ID NO: 84828 - DNA, 120 bp, Artificial Sequence
  ENSG00000084072_19 (sequence is synthesized)
tgcttctgacctaagttgatttgaggcatctcagatcctgggatctagtaacagataagtcagagcaggtgtttttgaagctttataagtgctggcttactgttttttaatcgtttttta

SEQ ID NO: 84829 - DNA, 120 bp, Artificial Sequence
  ENSG00000084072_20 (sequence is synthesized)
aaaatacaagtaaataatgtattcttttttttaaagaatagcatatacatatattccaataatatttaagacaataaattgaaaattcattttcccctctctacatccagtcctcaattc

SEQ ID NO: 84830 - DNA, 120 bp, Artificial Sequence
  ENSG00000084072_21 (sequence is synthesized)
agtaactagtgcttttattgagtattctttgtaatttattaaatattgacttctattctctttttaatctaaattttattatctagacatataaagagtcaattcagtttcacaaagctt

SEQ ID NO: 84831 - DNA, 120 bp, Artificial Sequence
  ENSG00000084072_22 (sequence is synthesized)
gcttgttttgaaaaaacagtcgtcccctggtgctgtccctgtgccctgctgccaacaccatttgctgctcctcagaggagcggatttcaactcttaggtgttttggtttttatttccatg

SEQ ID NO: 84832 - DNA, 120 bp, Artificial Sequence
  ENSG00000084072_23 (sequence is synthesized)
ttgataacagttttatatttctacttcctgttttccattttaaacattatcttctgattttctacttcagagaacaaagaattagttttttaaaatccccttccctgccccctcatcttc

SEQ ID NO: 84833 - DNA, 120 bp, Artificial Sequence
  ENSG00000084072_24 (sequence is synthesized)
cctgtataggtaccataattttggttaggtcctaagttattttaacaatgtaagcatcatgtgataacctcctttcatgcacagcattttgttttgcctggaattgataattgccttgtt

SEQ ID NO: 84834 - DNA, 120 bp, Artificial Sequence
  ENSG00000084072_25 (sequence is synthesized)
tttgcatagttttctgtgtaatcattcctgattttctcccagaccatcctgctgggggttttgcatccaggtgtctgcatcttgttaaggggagatgagggcaaggctgaattcctcaac

SEQ ID NO: 84835 - DNA, 120 bp, Artificial Sequence
  ENSG00000084072_26 (sequence is synthesized)
attcagtatataaactttcacataatctccatttgtcattatggtacctcagccctcactatgcgtaggatgtcctagtccagagaccctctgctttaacctaccaaagactagaccccc

SEQ ID NO: 84836 - DNA, 120 bp, Artificial Sequence
  ENSG00000084072_27 (sequence is synthesized)
agctggctaccaggttggggaggggtggcccccagctgcagagtcagggaaaggatcccaaagattaaccactttcttaaatgggctttcagccaaacttactgtctccaggattacctg

SEQ ID NO: 84837 - DNA, 120 bp, Artificial Sequence
  ENSG00000084072_28 (sequence is synthesized)
caccctttcctctgagcttttggagtgcaaattgagttgcttcttggcttttaccagcttaagattcagctttctcgggtctgctatatcatttaggactcatctattttgttttctaac

SEQ ID NO: 84838 - DNA, 120 bp, Artificial Sequence
  ENSG00000084072_29 (sequence is synthesized)
ttcagaaattttgttgctgttgtctcttcctccctgctttttaagtttattttttggctattttagccactttaaagtgtttgttagcagtaattactctgttcgaaatttttgaatcat

SEQ ID NO: 84839 - DNA, 120 bp, Artificial Sequence
  ENSG00000084072_30 (sequence is synthesized)
cctaaacaaaaccacttattaaaggtacctattaaataataactccccattttctcctccccttagcttctgataacctctaatctttgtgtctatgaattggcctatcctagatttttc

SEQ ID NO: 84840 - DNA, 120 bp, Artificial Sequence
  ENSG00000084072_31 (sequence is synthesized)
atgtaagtggaatcatacaatagctgtccttttccacgccttgttgattttgcatagcataatgctttcaaggttcatccttgtaccatgtatcagtgcctcattcctttttgtggctga

SEQ ID NO: 84841 - DNA, 120 bp, Artificial Sequence
  ENSG00000084072_32 (sequence is synthesized)
gcctgtgtgaatatccacatgtaagtatatgtttaaattcctgttttcaattcttttggatatatatgcctaggaatggaaatgcttagtcatatggtaactctgtatttaactttttga

SEQ ID NO: 84842 - DNA, 120 bp, Artificial Sequence
  ENSG00000084072_33 (sequence is synthesized)
ttaactttttgaggaaatgccaaactattttccacagtggctggaccattttacatttctaccagcaatgtatgagtgtttcagtttttccacatcttctcttttttttttttttttttt

SEQ ID NO: 84843 - DNA, 120 bp, Artificial Sequence
  ENSG00000084072_34 (sequence is synthesized)
ggcgtgagccaccatgcctggcccacatcttctcttaacaggtgtgacatggcatctcattgtggtttttatttttattccctactgactaatgatgttgaacatcttttcatgtgcttg

SEQ ID NO: 84844 - DNA, 120 bp, Artificial Sequence
  ENSG00000084072_35 (sequence is synthesized)
tcttttcatgtgcttgttgaccatttgtatatcttctttggagaaacatcttttcaaatctttggcttatttattaactggattgtttgttttgttttttttaagagacagggtcttgct

SEQ ID NO: 84845 - DNA, 120 bp, Artificial Sequence
  ENSG00000084072_36 (sequence is synthesized)
ctgactcccaggctggagtgcagtggtgagaacatggcttactgtagctttgaacccttgacctccagtgatcctcctgccttgacctcccaaagcactgggattacaccgtgcctggcc

SEQ ID NO: 84846 - DNA, 120 bp, Artificial Sequence
  ENSG00000084072_37 (sequence is synthesized)
attttgttgttgaattataggagttcattatatattctggatattaaacccatgttaaatatgatttgcaaataagcattctcctgttctgtgggttgctttgccctctattggtacggt

SEQ ID NO: 84847 - DNA, 120 bp, Artificial Sequence
  ENSG00000084072_38 (sequence is synthesized)
tctttgatgcacgtcttaaattttgataaaatctaattatttttttctttcacctctgcttttggtgtgacatttaagaaaccatcaccaaatccagagtcatgaagatttgcccctatg

SEQ ID NO: 84848 - DNA, 120 bp, Artificial Sequence
  ENSG00000084072_39 (sequence is synthesized)
ttttcttctaagatcctttggtttttcttttaaaaaatcagtttcctaccaatttagtgtggttttaaaagggaacagagctcgaacatgtatattcaatcccccttcaacagaatctcc

SEQ ID NO: 84849 - DNA, 79 bp, Artificial Sequence
  ENSG00000084072_40 (sequence is synthesized)
atacaaaattagccaggtgtatggggaatgacttgaacccaagaggtggaagttgcagtgaactgagattgtgccattg

SEQ ID NO: 84850 - DNA, 120 bp, Artificial Sequence
  ENSG00000084072_41 (sequence is synthesized)
ggcaacaagagtgaaactccgtctcaaggaaaaagaatcccttatagtccttacaagagaatttccgctgcctgtgcactcatgaaaagggctttggctttaagggaagcagcttccacc

SEQ ID NO: 84851 - DNA, 120 bp, Artificial Sequence
  ENSG00000084072_42 (sequence is synthesized)
cctatgcctagccatggatcctccattccccaccctcccgttttcccgtcccgcagacggagccggtccccagccgccgccagtctccggcctcggatgttgacacaaacccgaggcggt

SEQ ID NO: 84852 - DNA, 120 bp, Artificial Sequence
  ENSG00000084072_43 (sequence is synthesized)
ttacactgagcgggtctggaagctttcagggccccggcaacacctcctccccgcacttgggggtctccccacagcccgggccggccgcctgggctgcactggcgtctgagagctcctgac

SEQ ID NO: 84853 - DNA, 120 bp, Artificial Sequence
  ENSG00000084072_44 (sequence is synthesized)
acaaggctgtgggaaggaacccttttaagccaaactgggggcaaaaggggagccagacatccccgggctgggccacgtgcggggcagggacttctaaggatctgtcgaaagtcggggcgg

SEQ ID NO: 84854 - DNA, 120 bp, Artificial Sequence
  ENSG00000084072_45 (sequence is synthesized)
cagcactttcccaagaacagaagcaggtgctgagtgagtgacccacgcgcctacgaaagaagagagggccagaagctggtgctgacgcagacaccaaggtggactggcagaggaagtgga

SEQ ID NO: 84855 - DNA, 120 bp, Artificial Sequence
  ENSG00000084072_46 (sequence is synthesized)
atggccaccaccaagcgcgtcttgtacgtggcatgctaactgggctgcaaggacttctgcaagagtatggagatcagtggctcagaaggcccttggcttatttgcaggtggactggcaga

SEQ ID NO: 84856 - DNA, 120 bp, Artificial Sequence
  ENSG00000084072_47 (sequence is synthesized)
ttttggtggtacagaggctccttattcatatatcagtgttctggacttccaaagttacaaggttgcatggggaggtaaaaattctcacatgaaaatattcactgtgaattgatcacttat

SEQ ID NO: 84857 - DNA, 120 bp, Artificial Sequence
  ENSG00000084072_48 (sequence is synthesized)
aaaattagttcttactcagactccttcgccatttcagaataatgtaagtcctcatcatccttgttgaccagtctctcactggctctcccatgtttaggataatttgcagacacagtgcaa

SEQ ID NO: 84858 - DNA, 120 bp, Artificial Sequence
  ENSG00000084072_49 (sequence is synthesized)
attgattgcacggtgtaactgcatattttgcaaaatagcaggatttcatgaagtgttagaccaatttacaattgagaagagaaatttaattatggcaggtgcaaatcactgatacaaatg

SEQ ID NO: 84859 - DNA, 120 bp, Artificial Sequence
  ENSG00000084072_50 (sequence is synthesized)
atttggatattctggaaaggtccttgggaaaaatgatgatgctctttagtatttgtgccttccttgagatccttttagttttcatgtctgataagaagtgcaaagataccatactgttga

SEQ ID NO: 84860 - DNA, 80 bp, Artificial Sequence
  ENSG00000084072_51 (sequence is synthesized)
atcttgaactcatgagttcaagacttctcagcttctcaagtagctggaattacaggctcaagccaacagggctacctggg

SEQ ID NO: 84861 - DNA, 120 bp, Artificial Sequence
  ENSG00000084072_52 (sequence is synthesized)
tagctggaattacaggctcaagccaacagggctacctgggctacctgttacatttctttctaccaagttacatttctttctaccgattagtgcatagttagtcctgaatattaatggtaa

SEQ ID NO: 84862 - DNA, 120 bp, Artificial Sequence
  ENSG00000084072_53 (sequence is synthesized)
gaaacttgtttttattatttttagtttcatcacagtaatttcccagtcagccttttaaaatttttcaattttaccacgaaatcttcatcaccacttcaagtggagtcaccttaaatgacc

SEQ ID NO: 84863 - DNA, 120 bp, Artificial Sequence
  ENSG00000084072_54 (sequence is synthesized)
tttcctggtaccgattatctttggataatgagatgttgttttatttgttgttctgttatccattcaccaaacatattcatcagctgtcagagatcatttttctttcatttcaaagcttat

SEQ ID NO: 84864 - DNA, 120 bp, Artificial Sequence
  ENSG00000084072_55 (sequence is synthesized)
tttttgtaattttggagtgttctgaacccagagttacttttggtaatacaggtctttgtgtgctgctatgaaagaaaggggtgtgagttccctgaaacccacaggtggctttggggtggc

SEQ ID NO: 84865 - DNA, 120 bp, Artificial Sequence
  ENSG00000084072_56 (sequence is synthesized)
tgcatagcttactggtagaggcccagggattaagggaggacaaatcatgagtgtgtctcagaagtatatggaaagctggctggccctcttttaacctaagagagtttaagcagctggatt

SEQ ID NO: 84866 - DNA, 120 bp, Artificial Sequence
  ENSG00000084072_57 (sequence is synthesized)
tggggcctcagcggaacatggagttcctcccgccctgacatcatagcccccgcctgggaggcctcctggatgactcctcttgcctcctcccttccctgggagcagcccctggctcaacct

SEQ ID NO: 84867 - DNA, 120 bp, Artificial Sequence
  ENSG00000084072_58 (sequence is synthesized)
ccacctccatgctgccttggaccacctgccccgtccagctgccatcacctgtcagggtgagccaccgcacctgatcaaggcatcaccgttgaacctcctaaggggaaaacataaggctgt

SEQ ID NO: 84868 - DNA, 120 bp, Artificial Sequence
  ENSG00000084072_59 (sequence is synthesized)
gcctagatgtcttgcggcaaattgaggtatgtggccaggaatgggcctcctccttacccaggccctaggagcacagccctgtgtgagggctggagagtctctgtggcctgagagagatgg

SEQ ID NO: 84869 - DNA, 120 bp, Artificial Sequence
  ENSG00000084072_60 (sequence is synthesized)
ccaggggctgtgtccagcgggaggggctgctgctgcccaggttccggggtggaagtgggcaaatgggcaggcaggggttggtatccctaaaccactgttagtctccggccttactccctc

SEQ ID NO: 84870 - DNA, 120 bp, Artificial Sequence
  ENSG00000084073_0 (sequence is synthesized)
ggtgcacgctgaaggagccggcggaaccgggtggccatggggatgtgggcatcgctggacgctttgtgggagatgccggccgagaagcgtatcttcggggccgtgctgctcttttcctgg

SEQ ID NO: 84871 - DNA, 120 bp, Artificial Sequence
  ENSG00000084073_1 (sequence is synthesized)
acagtgtatctttgggagaccttcctagcacagcggcagagaaggatatataaaacaacaactcatgtaccaccggagttaggacagatcatggattctgaaacatttgagaaatctcga

SEQ ID NO: 84872 - DNA, 120 bp, Artificial Sequence
  ENSG00000084073_2 (sequence is synthesized)
ctctatcaactggataaaagcactttcagcttctggtcaggactctattcagagactgaaggcactcttattcttctctttggaggaataccttatctctggagactttctggacggttc

SEQ ID NO: 84873 - DNA, 120 bp, Artificial Sequence
  ENSG00000084073_3 (sequence is synthesized)
tgtggttatgctggctttggaccagaatatgagatcactcagtccctggtgtttctgctgttggctacacttttcagtgcattgactggtttgccatggagtctttataatacttttgtg

SEQ ID NO: 84874 - DNA, 120 bp, Artificial Sequence
  ENSG00000084073_4 (sequence is synthesized)
atagaagaaaaacatggcttcaatcaacagactttggggttcttcatgaaagatgcaatcaagaaatttgttgtgactcagtgtattttgttgcctgtgtcttcacttctactttacatt

SEQ ID NO: 84875 - DNA, 120 bp, Artificial Sequence
  ENSG00000084073_5 (sequence is synthesized)
attaaaattgggggtgactatttttttatttatgcctggctgttcacattagttgtgtctctggttcttgtcacaatctatgctgattatattgcccctttatttgacaaattcacacct

SEQ ID NO: 84876 - DNA, 120 bp, Artificial Sequence
  ENSG00000084073_6 (sequence is synthesized)
ctgcctgagggaaagcttaaagaagaaattgaagtaatggcaaagagtattgactttcctttgacgaaggtgtatgttgtggaaggatctaaacgctcttcccacagcaatgcttatttt

SEQ ID NO: 84877 - DNA, 120 bp, Artificial Sequence
  ENSG00000084073_7 (sequence is synthesized)
tatggcttcttcaagaacaagcgaatagttttgtttgacactctactagaagagtactctgtactaaacaaagacatccaggaggattctggcatggaaccccgcaatgaggaagaaggg

SEQ ID NO: 84878 - DNA, 120 bp, Artificial Sequence
  ENSG00000084073_8 (sequence is synthesized)
aacagtgaagaaataaaagctaaagttaaaaataagaaacaaggatgtaaaaatgaggaggtactcgctgtactaggccatgaactggggcactggaagttgggacatacagtcaaaaat

SEQ ID NO: 84879 - DNA, 120 bp, Artificial Sequence
  ENSG00000084073_9 (sequence is synthesized)
atcattattagccagatgaattctttcctgtgtttttttttatttgctgtattaattggtcgaaaggagctttttgctgcatttggtttttatgatagccaacccactcttattggacta

SEQ ID NO: 84880 - DNA, 120 bp, Artificial Sequence
  ENSG00000084073_10 (sequence is synthesized)
ttgatcatcttccagtttattttttcaccttacaatgaggttctttctttttgcctaacagtcctaagccgcagatttgagtttcaagctgatgcatttgccaagaaacttgggaaggct

SEQ ID NO: 84881 - DNA, 120 bp, Artificial Sequence
  ENSG00000084073_11 (sequence is synthesized)
aaagacttatattctgctttaatcaaacttaacaaagataacttgggattccctgtttctgactggttgttctcaatgtggcattattctcatcctccactgctagagagacttcaagct

SEQ ID NO: 84882 - DNA, 120 bp, Artificial Sequence
  ENSG00000084073_12 (sequence is synthesized)
cagctcttgatgtttttaaacttttttttagaagaaaaattaagtacagaaaagcccagatttaaatacatttaatatgtcattttaaaaatgattttaataattcatttcttaaaacac

SEQ ID NO: 84883 - DNA, 120 bp, Artificial Sequence
  ENSG00000084073_13 (sequence is synthesized)
gaagcttaatgtttttaaaggcatagttttatctttgacatctaatttaccatcaagttgtaaaattatttggaaaaatacagaactcgttttatttgtatacttatatggaatctgcat

SEQ ID NO: 84884 - DNA, 120 bp, Artificial Sequence
  ENSG00000084073_14 (sequence is synthesized)
gtgaggtgtttgagggcatatgtttgaaagagggagcatcaccacaggaatcctttctgtgaggtggaaacagtggtcctgaatcattgtgctcacacctaacttgaaatctggtcttac

SEQ ID NO: 84885 - DNA, 120 bp, Artificial Sequence
  ENSG00000084073_15 (sequence is synthesized)
tttcatgctgttatgatttcacctggtgaatcagtgttttaaataagaaaggtaatagttggtaaggccaatgttatttaaatgaaagtagttagaaaaatgctctcctattctaccaaa

SEQ ID NO: 84886 - DNA, 120 bp, Artificial Sequence
  ENSG00000084073_16 (sequence is synthesized)
tttttaatttctttcttccctttcttgctacacagtgatcaagagtttctcatagtgctttgaagttagaaattatgtataggatattttaaatcattgagttttgtggggtttttttgt

SEQ ID NO: 84887 - DNA, 120 bp, Artificial Sequence
  ENSG00000084073_17 (sequence is synthesized)
ttgtttgtttcttttgttttttggaaaatccgtgtctttatctttttttcccacgtggtagatatgatcccattggaggtaaattgtagcttcttctcattcatgcagtaaataatacat

SEQ ID NO: 84888 - DNA, 120 bp, Artificial Sequence
  ENSG00000084073_18 (sequence is synthesized)
cctttcactcagcagagatggccatattaaacacgttttgctatgttaaaagtggcagaacaggaaagacgaattaaaaataacattttttaagcgacataaggatgaaatactgatgaa

SEQ ID NO: 84889 - DNA, 120 bp, Artificial Sequence
  ENSG00000084073_19 (sequence is synthesized)
tctctgtgacattacagggaaaaaaatatagttttctatctctttcaagggcagaagagttttcatttttatttttgtaattttatctgtaagtcataaatattacttaatcaggcctga

SEQ ID NO: 84890 - DNA, 120 bp, Artificial Sequence
  ENSG00000084073_20 (sequence is synthesized)
ttctacttttgaaaattacagttcttgaaatgcagataatgtttactttgaaaacaaatgtcatgaatgatttccagtttttaaagctatatgtttcactgcttcatatctctgtccact

SEQ ID NO: 84891 - DNA, 120 bp, Artificial Sequence
  ENSG00000084073_21 (sequence is synthesized)
ttctgaatgagaacttattttgtgcctagagctctcactcactgataatgcttattaccttctgggcatttattccaaagtgggatcaactgtacgcctttggtatctgaccataaagtc

SEQ ID NO: 84892 - DNA, 120 bp, Artificial Sequence
  ENSG00000084073_22 (sequence is synthesized)
ttttgctccgctgacatttgggtgatgtcttcacatggaaatataataaaaataaaaatctagtttaatactgcattatttattttcctaaggctaaagaggagcagtcctatgctttta

SEQ ID NO: 84893 - DNA, 120 bp, Artificial Sequence
  ENSG00000084073_23 (sequence is synthesized)
ttcagcatcctttatctgtgacttcatgctctgataactgcctttccttccttctgtgcctttgaatacaaatttcagttctgcaaaagtgaaacattaaacattgccaacgcaaatgta

SEQ ID NO: 84894 - DNA, 120 bp, Artificial Sequence
  ENSG00000084073_24 (sequence is synthesized)
agtctagctctgtcaccaggctggagtacagtggcgttatctcggctcactgcaagaaactaggagggacgagggagagtctgcaaggggaagagtgtgtctgtgacactgccagcagcg

SEQ ID NO: 84895 - DNA, 120 bp, Artificial Sequence
  ENSG00000084073_25 (sequence is synthesized)
agcactttcagcttctggtcaggactctattcagagactgaaggcactttccagagaattgttgaacaacttaacaacactacctgaagaagtaatactcaagagttcttgttctatact

SEQ ID NO: 84896 - DNA, 120 bp, Artificial Sequence
  ENSG00000084090_0 (sequence is synthesized)
gcggaaggcgcgggagcttgcgtgctgctgggcctgagctgtctgtctcgtttctgtccgcgcgccctgcatcccggccccgggcgcccgctggaggtcgccgaggagccacagggctga

SEQ ID NO: 84897 - DNA, 120 bp, Artificial Sequence
  ENSG00000084090_1 (sequence is synthesized)
ctggtctgctgcccgggcccaggagtgcctggtgtagcagtcgcggagccatcccggcgtctgctgccatgaccgactctcccctcagaggagactcttcctcagcggtggctgcagaga

SEQ ID NO: 84898 - DNA, 120 bp, Artificial Sequence
  ENSG00000084090_2 (sequence is synthesized)
cagatgagcggcggctcctggccgcgggaccgtgagacgggttcgtggccggccatttagggggacgctgcgaccaccgcctgcgcccctccggactggttccttgggccccggaagctc

SEQ ID NO: 84899 - DNA, 120 bp, Artificial Sequence
  ENSG00000084090_3 (sequence is synthesized)
tgctggccgcctggctggcggggacgcggggcgggggcctgctggcgcttctggccaatcagtgccgcttcgtcacgggcctgcgcgtgcggcgcgcgcagcagatcgcgcagctctacg

SEQ ID NO: 84900 - DNA, 120 bp, Artificial Sequence
  ENSG00000084090_4 (sequence is synthesized)
ctgcgcgtgcggcgcgcgcagcagatcgcgcagctctacggccgcctctactccgagagctcacgccgcgttctcctcggccgcctctggcgccggctgcacggccgtcctggccatgcc

SEQ ID NO: 84901 - DNA, 120 bp, Artificial Sequence
  ENSG00000084090_5 (sequence is synthesized)
tctgccttgatggcggcgttagccggcgtcttcgtttgggacgaggagaggatccaggaggaggagttgcagagatctattaatgagatgaagcggttggaagaaatgtcaaatatgttt

SEQ ID NO: 84902 - DNA, 120 bp, Artificial Sequence
  ENSG00000084090_6 (sequence is synthesized)
cagagctctggagtccagcaccaccctccagaaccaaaagcccaaacagaagggaatgaagattcagagggcaaagagcaacgttgggaaatggtgatggataagaaacactttaagctg

SEQ ID NO: 84903 - DNA, 120 bp, Artificial Sequence
  ENSG00000084090_7 (sequence is synthesized)
tggcggcgcccaattacaggcacccacctttaccagtaccgagtttttggaacctacacagatgtgacacctcggcagttcttcaatgttcagctggacacagagtatagaaaaaaatgg

SEQ ID NO: 84904 - DNA, 120 bp, Artificial Sequence
  ENSG00000084090_8 (sequence is synthesized)
gatgccctggtaatcaagctggaggtgattgagagggatgtggttagtggttccgaggttcttcactgggtaacccattttccttatccaatgtactcacgggattatgtttatgttcgg

SEQ ID NO: 84905 - DNA, 120 bp, Artificial Sequence
  ENSG00000084090_9 (sequence is synthesized)
cggtatagtgtggatcaggaaaacaacatgatggtgttggtgtcgcgtgctgtggagcatccgagtgtgccagagtctccagaattcgtcagggtcagatcatatgaatcccaaatggtt

SEQ ID NO: 84906 - DNA, 120 bp, Artificial Sequence
  ENSG00000084090_10 (sequence is synthesized)
atccgtccccacaagtcatttgatgagaatggctttgactacttactaacatacagtgacaatccccaaacggtgtttcctcgctactgtgttagttggatggtttccagtggcatgcca

SEQ ID NO: 84907 - DNA, 120 bp, Artificial Sequence
  ENSG00000084090_11 (sequence is synthesized)
gatttcctggagaagctgcacatggccactctgaaagccaagaatatggagattaaagtaaaggactacatctcagctaagcctctggaaatgagtagtgaagccaaggccaccagccag

SEQ ID NO: 84908 - DNA, 120 bp, Artificial Sequence
  ENSG00000084090_12 (sequence is synthesized)
tcctctgagcgaaagaacgagggcagctgtggccctgctcggattgagtatgcttgacaggctttgggataagaagggacaaggtgcttctagccctgtctcagtccgttatcactctgc

SEQ ID NO: 84909 - DNA, 120 bp, Artificial Sequence
  ENSG00000084090_13 (sequence is synthesized)
tgtagaagggggacatgccacatgtattagaaggcatctgctgtaacttccagtgcaagataattcaataactgatgtcccatttcattcagagcccttattgctcttatcaaaacagaa

SEQ ID NO: 84910 - DNA, 120 bp, Artificial Sequence
  ENSG00000084090_14 (sequence is synthesized)
catttgtgggagtgttgtcatattctcaggccaactgttttgaaattcggtatctcactgagctaatctggaacaaacctctcacctcaggccagaaggggatgacctccatttgcttct

SEQ ID NO: 84911 - DNA, 120 bp, Artificial Sequence
  ENSG00000084090_15 (sequence is synthesized)
ctgagtagtttcctctgctgacattccaaatcccaccatcgattgtgcagcgctttggatttccttcagttctccaggtccacctggaaagtatagttggccagttgagtctctcaaatg

SEQ ID NO: 84912 - DNA, 120 bp, Artificial Sequence
  ENSG00000084090_16 (sequence is synthesized)
aggggctactgggagtgctcttggtaacaatcatgatgtgaatgggtgtgaacgatacttggctatgttaagtgccttgtccgcaccttgcttttatctctagagacatgaagttattat

SEQ ID NO: 84913 - DNA, 90 bp, Artificial Sequence
  ENSG00000084090_17 (sequence is synthesized)
catgcctggccagggacatgaatttgtacaaagaaatttccctccctgcctgcacaatatcacccattgactcaccttatccaaagcaag

SEQ ID NO: 84914 - DNA, 120 bp, Artificial Sequence
  ENSG00000084090_18 (sequence is synthesized)
tgcacaatatcacccattgactcaccttatccaaagcaagtttcctgtgaatcggccagttcttctatattcattggatcattgcctccttcctaaccttccccatttaccaagaacact

SEQ ID NO: 84915 - DNA, 120 bp, Artificial Sequence
  ENSG00000084090_19 (sequence is synthesized)
gggagactaatccttttagatagtagctttttgatgctcaaaacatcacatttaaatttagtttaaaaattttttaacttttgtgtcaaataggagttgaggaattgagcaggattctac

SEQ ID NO: 84916 - DNA, 120 bp, Artificial Sequence
  ENSG00000084090_20 (sequence is synthesized)
cctagtccgattgtatagaaaacaccattttgattcaggtattatttttcatatttcaggtttgacttgttcttttcagaaggctaaagtcagaggaatgggggctgggccactcccttg

SEQ ID NO: 84917 - DNA, 120 bp, Artificial Sequence
  ENSG00000084090_21 (sequence is synthesized)
gagctctcagatctacagacaagctgtgtgaatgcatagatgtaatcttgtctcaaatactaatacagtggagatttggtttatgttaccattaagttcctctaaaaagtttttcttcct

SEQ ID NO: 84918 - DNA, 120 bp, Artificial Sequence
  ENSG00000084090_22 (sequence is synthesized)
ctcttcagagccaaaataaaagtgaactacactgttcagataaggtcacaatctgatgctgtcagtttgaccgagctggttttgcttatggtcatgctgcaatttgttagaataataggg

SEQ ID NO: 84919 - DNA, 120 bp, Artificial Sequence
  ENSG00000084090_23 (sequence is synthesized)
tttgcttatggtcatgctgcaatttgttagaataatagggatcaagttttaaatcctcctccttcccttttttctggagtcttgagggccagagtttttgtttttgtttttgtttttgtt

SEQ ID NO: 84920 - DNA, 120 bp, Artificial Sequence
  ENSG00000084090_24 (sequence is synthesized)
aaacctgagactaacttaaacacttccttgaccttcttgttgcctgttcatttttgtgccaaggaagtagctgccccagtgtatgtcttgccttctccgcgtcattgttggaagaggaga

SEQ ID NO: 84921 - DNA, 120 bp, Artificial Sequence
  ENSG00000084090_25 (sequence is synthesized)
gatgcatcgagcagtcccagctgcttttcatttattacttcttctttccaggacctgacagaagtcagggaagagtccctgggttatgtccaaacttagcacctgcaattgttgggatgt

SEQ ID NO: 84922 - DNA, 120 bp, Artificial Sequence
  ENSG00000084090_26 (sequence is synthesized)
ggatggatgtgtgcataagagagagagagaatatgtgtgtgtgtgtgtgcgtctgcgagcgcacacacatgcacaagtgcgaaggagttgcggttgctccatgttctgacttagggcaat

SEQ ID NO: 84923 - DNA, 120 bp, Artificial Sequence
  ENSG00000084090_27 (sequence is synthesized)
ttgattctgcacttggggtctgtctgtacagttactcatgtcattgtaatgatttcactcctaactgtgacatttttatcaaatgtgtgaataaatacataaagattggtacaaaaaaaa

SEQ ID NO: 84924 - DNA, 89 bp, Artificial Sequence
  ENSG00000084090_28 (sequence is synthesized)
tctcgaactctggtcctcaagtaatctgtaaggcatgagccaccacgcccagccaacacccaatttatttatttatttatttatttttt

SEQ ID NO: 84925 - DNA, 83 bp, Artificial Sequence
  ENSG00000084090_29 (sequence is synthesized)
tggcctaacacccaaaatttttattgggagctggtcacttagtaccgtctgcttagcacataccagaattccaaaccctgcaa

SEQ ID NO: 84926 - DNA, 120 bp, Artificial Sequence
  ENSG00000084090_30 (sequence is synthesized)
accgtctgcttagcacataccagaattccaaaccctgcaaagcaaagcctgtgttcagcataaaccacgttgtttgcatagtctatgcacagggagccacccatatcagctaactgttga

SEQ ID NO: 84927 - DNA, 120 bp, Artificial Sequence
  ENSG00000084090_31 (sequence is synthesized)
ctgggagcgaagttggccaagggtcaacattgcaaggagacctttctatagatagtagtctctcaggccttcagtgttaactcttttctgcacagggtgaaaaaagaaatgacactccct

SEQ ID NO: 84928 - DNA, 120 bp, Artificial Sequence
  ENSG00000084090_32 (sequence is synthesized)
cattttcctgtgagtatttttacttctgattttatttctgtccaggtttgtgtgatgcagaacactaatcctgctcctccatttctttagtatccaatgtactcacgggattatgtttat

SEQ ID NO: 84929 - DNA, 120 bp, Artificial Sequence
  ENSG00000084090_33 (sequence is synthesized)
tcttttgggttccatagttgcacaggtgcatgggatttctgttcttcatacttctctaaactgttctggttgtttctcagaaaatttgccgtagttttttgtttattgtttttcttctcc

SEQ ID NO: 84930 - DNA, 120 bp, Artificial Sequence
  ENSG00000084092_0 (sequence is synthesized)
cccctttggagctacttcctcatgctgcccgctcgcctaccgttcaggctgctgagccttttccttcgtggatccgctcccacggcagcgcgccatggcctccgggagccgctcctggag

SEQ ID NO: 84931 - DNA, 120 bp, Artificial Sequence
  ENSG00000084092_1 (sequence is synthesized)
aggaggtgcgctgccgcctcctccttccagcactcatcgagtctgggacgcgagcttccttatgaccccgtggacacggagggctttggagaaggtggtgacatgcaggagcgttttctg

SEQ ID NO: 84932 - DNA, 120 bp, Artificial Sequence
  ENSG00000084092_2 (sequence is synthesized)
ttcccggagtacatcctggatccggagccgcaacccacccgcgaaaagcagctgcaggagctccagcaacagcaggaggaggaggagcgacagaggcagcagcggcgggaggagcggcga

SEQ ID NO: 84933 - DNA, 120 bp, Artificial Sequence
  ENSG00000084092_3 (sequence is synthesized)
cagcaaaacctacgggccaggtcccgggagcacccggtcgtggggcacccggacccggcattgccgcccagcggcgtgaactgctcgggctgtggggcagagctgcactgccaggacgcc

SEQ ID NO: 84934 - DNA, 120 bp, Artificial Sequence
  ENSG00000084092_4 (sequence is synthesized)
ggagtgcccggctacctgccccgagagaagttcctccgcacggcggaggcagacggcgggctggcacggaccgtgtgccagcgctgctggctgctgtcgcaccaccggcgcgctctacgc

SEQ ID NO: 84935 - DNA, 120 bp, Artificial Sequence
  ENSG00000084092_5 (sequence is synthesized)
ctgcaggtgagccgcgagcagtacctggagctggtgagcgccgcgttgcggcggcccggcccctccctggtgctctacatggtggacctgctggacctgcccgacgccctgctgcccgac

SEQ ID NO: 84936 - DNA, 120 bp, Artificial Sequence
  ENSG00000084092_6 (sequence is synthesized)
ttgcccgcgctggtgggccccaagcagctgatcgtgctgggaaacaaagtggacctcctgccccaggatgctcctggctaccggcagaggctgcgggagcgactgtgggaggactgtgcc

SEQ ID NO: 84937 - DNA, 120 bp, Artificial Sequence
  ENSG00000084092_7 (sequence is synthesized)
cgcgccgggctcctgctggcccctggccaccaagggccacagcgccccgtcaaggacgagccacaggacggggagaatccgaatccgccgaactggtcccgcacagtggtcagggacgtg

SEQ ID NO: 84938 - DNA, 120 bp, Artificial Sequence
  ENSG00000084092_8 (sequence is synthesized)
cggctgatcagcgccaagaccggctatggagtggaagagttgatctctgcccttcagcgctcctggcgctaccgtggggacgtctacttagtgggcgccaccaacgccggcaaatccact

SEQ ID NO: 84939 - DNA, 120 bp, Artificial Sequence
  ENSG00000084092_9 (sequence is synthesized)
acagagccaccatctccccttggccaggtactacattaaaccttctgaagtttcctatttgcaacccaactccttacagaatgtttaaaaggcatcaaagacttaaaaaagattcaactc

SEQ ID NO: 84940 - DNA, 120 bp, Artificial Sequence
  ENSG00000084092_10 (sequence is synthesized)
aagctgaagaagatcttagtgagcaagaacaaaatcagcttaatgtcctcaaaaagcatggttatgtcgtaggaagagttggaaggacattcttgtattcagaagaacagaaggataaca

SEQ ID NO: 84941 - DNA, 120 bp, Artificial Sequence
  ENSG00000084092_11 (sequence is synthesized)
ttccctttgagtttgatgctgattcacttgcctttgacatggaaaatgaccctgttatgggtacacacaaatccaccaaacaagtagaattgactgcacaagatgtgaaagatgcccact

SEQ ID NO: 84942 - DNA, 120 bp, Artificial Sequence
  ENSG00000084092_12 (sequence is synthesized)
ggttttatgacacccctggaattacaaaagaaaattgtattttaaatcttctaacagaaaaagaagtaaatattgttttgccaacacagtccattgttccaagaacttttgtgcttaaac

SEQ ID NO: 84943 - DNA, 120 bp, Artificial Sequence
  ENSG00000084092_13 (sequence is synthesized)
caggaatggttctgtttttgggtgctataggccgcatagatttcctgcagggaaatcagtcagcttggtttacagtcgtggcttccaacatcctccctgtgcatatcacctccttggaca

SEQ ID NO: 84944 - DNA, 120 bp, Artificial Sequence
  ENSG00000084092_14 (sequence is synthesized)
gggcagacgctctgtatcagaagcatgcaggtcatacgttactccagattccaatgggtggaaaagaacgaatggcaggatttcctcctcttgttgctgaagacattatgttaaaagaag

SEQ ID NO: 84945 - DNA, 120 bp, Artificial Sequence
  ENSG00000084092_15 (sequence is synthesized)
gactgggggcatctgaagcagtggccgacatcaagttttcctctgcaggttgggtttcagtaacacctaattttaaggacagactgcatctccgaggctatacacctgaaggaacagttt

SEQ ID NO: 84946 - DNA, 120 bp, Artificial Sequence
  ENSG00000084092_16 (sequence is synthesized)
tgaccgtccggccccctctcttgccatatattgttaacatcaaaggacagcgcatcaagaaaagtgtggcctataaaaccaagaagcctccttcccttatgtacaacgtgaggaagaaga

SEQ ID NO: 84947 - DNA, 120 bp, Artificial Sequence
  ENSG00000084092_17 (sequence is synthesized)
aaggaaagataaatgtatgagaccgaccttgttcactccagatattaactgtattgaacacaacaaaatacattgaatttgtattaaacatataacgcataaataaagctcccattctta

SEQ ID NO: 84948 - DNA, 80 bp, Artificial Sequence
  ENSG00000084093_0 (sequence is synthesized)
gtgcgcggcgcagcgtcctgtgttggaatgtgcggctgccgcgagctcgcggcgcagcagcggagcgagcgccgccgagg

SEQ ID NO: 84949 - DNA, 120 bp, Artificial Sequence
  ENSG00000084093_1 (sequence is synthesized)
acggcagggcgaggcccggaggcctgagcaccctctgcagccccactcctgggccttcttggtccacgacggccccagcacccaactttaccaccctcccccacctctcccccgaaactc

SEQ ID NO: 84950 - DNA, 120 bp, Artificial Sequence
  ENSG00000084093_2 (sequence is synthesized)
cagcaacaaagaaaagtagtcggagaaggagcggcgactcagggtcgcccgcccctcctcaccgaggaaggccgaatacagttatggccacccaggtaatggggcagtcttctggaggag

SEQ ID NO: 84951 - DNA, 120 bp, Artificial Sequence
  ENSG00000084093_3 (sequence is synthesized)
gagggctgtttaccagcagtggcaacattggaatggccctgcctaacgacatgtatgacttgcatgacctttccaaagctgaactggccgcacctcagcttattatgctggcaaatgtgg

SEQ ID NO: 84952 - DNA, 120 bp, Artificial Sequence
  ENSG00000084093_4 (sequence is synthesized)
ccttaactggggaagtaaatggcagctgctgtgattacctggtcggtgaagaaagacagatggcagaactgatgccggttggggataacaacttttcagatagtgaagaaggagaaggac

SEQ ID NO: 84953 - DNA, 120 bp, Artificial Sequence
  ENSG00000084093_5 (sequence is synthesized)
ttgaagagtctgctgatataaaaggtgaacctcatggactggaaaacatggaactgagaagtttggaactcagcgtcgtagaacctcagcctgtatttgaggcatcaggtgctccagata

SEQ ID NO: 84954 - DNA, 120 bp, Artificial Sequence
  ENSG00000084093_6 (sequence is synthesized)
tttacagttcaaataaagatcttccccctgaaacacctggagcggaggacaaaggcaagagctcgaagaccaaaccctttcgctgtaagccatgccaatatgaagcagaatctgaagaac

SEQ ID NO: 84955 - DNA, 120 bp, Artificial Sequence
  ENSG00000084093_7 (sequence is synthesized)
agtttgtgcatcacatcagagttcacagtgctaagaaattttttgtggaagagagtgcagagaagcaggcaaaagccagggaatctggctcttccactgcagaagagggagatttctcca

SEQ ID NO: 84956 - DNA, 120 bp, Artificial Sequence
  ENSG00000084093_8 (sequence is synthesized)
agggccccattcgctgtgaccgctgcggctacaatactaatcgatatgatcactatacagcacacctgaaacaccacaccagagctggggataatgagcgagtctacaagtgtatcattt

SEQ ID NO: 84957 - DNA, 120 bp, Artificial Sequence
  ENSG00000084093_9 (sequence is synthesized)
gcacatacacaacagtgagcgagtatcactggaggaaacatttaagaaaccattttccaaggaaagtatacacatgtggaaaatgcaactatttttcagacagaaaaaacaattatgttc

SEQ ID NO: 84958 - DNA, 120 bp, Artificial Sequence
  ENSG00000084093_10 (sequence is synthesized)
agcatgttagaactcatacaggagaacgcccatataaatgtgaactttgtccttactcaagttctcagaagactcatctaactagacatatgcgtactcattcaggtgagaagccattta

SEQ ID NO: 84959 - DNA, 120 bp, Artificial Sequence
  ENSG00000084093_11 (sequence is synthesized)
aatgtgatcagtgcagttatgtggcctctaatcaacatgaagtaacccgccatgcaagacaggttcacaatgggcctaaacctcttaattgcccacactgtgattacaaaacagcagata

SEQ ID NO: 84960 - DNA, 120 bp, Artificial Sequence
  ENSG00000084093_12 (sequence is synthesized)
gaagcaacttcaaaaaacatgtagagctacatgtgaacccacggcagttcaattgccctgtatgtgactatgcagcttccaagaagtgtaatctacagtatcacttcaaatctaagcatc

SEQ ID NO: 84961 - DNA, 120 bp, Artificial Sequence
  ENSG00000084093_13 (sequence is synthesized)
ctacttgtcctaataaaacaatggatgtctcaaaagtgaaactaaagaaaaccaaaaaacgagaggctgacttgcctgataatattaccaatgaaaaaacagaaatagaacaaacaaaaa

SEQ ID NO: 84962 - DNA, 120 bp, Artificial Sequence
  ENSG00000084093_14 (sequence is synthesized)
taaaaggggatgtggctggaaagaaaaatgaaaagtccgtcaaagcagagaaaagagatgtctcaaaagagaaaaagccttctaataatgtgtcagtgatccaggtgactaccagaactc

SEQ ID NO: 84963 - DNA, 120 bp, Artificial Sequence
  ENSG00000084093_15 (sequence is synthesized)
gaaaatcagtaacagaggtgaaagagatggatgtgcatacaggaagcaattcagaaaaattcagtaaaactaagaaaagcaaaaggaagctggaagttgacagccattctttacatggtc

SEQ ID NO: 84964 - DNA, 120 bp, Artificial Sequence
  ENSG00000084093_16 (sequence is synthesized)
ctgtgaatgatgaggaatcttcaacaaaaaagaaaaagaaggtagaaagcaaatccaaaaataatagtcaggaagtgccaaagggtgacagcaaagtggaggagaataaaaagcaaaata

SEQ ID NO: 84965 - DNA, 120 bp, Artificial Sequence
  ENSG00000084093_17 (sequence is synthesized)
cttgcatgaaaaaaagtacaaagaagaaaactctgaaaaataaatcaagtaagaaaagcagtaagcctcctcagaaggaacctgttgagaagggatctgctcagatggaccctcctcaga

SEQ ID NO: 84966 - DNA, 120 bp, Artificial Sequence
  ENSG00000084093_18 (sequence is synthesized)
tggggcctgctcccacagaggcggttcagaaggggcccgttcaggtggagccgccacctcccatggagcatgctcagatggagggtgcccagatacggcctgctcctgacgagcctgttc

SEQ ID NO: 84967 - DNA, 120 bp, Artificial Sequence
  ENSG00000084093_19 (sequence is synthesized)
agatggaggtggttcaggaggggcctgctcagaaggagctgctgcctcccgtggagcctgctcagatggtgggtgcccaaattgtacttgctcacatggagctgcctcctcccatggaga

SEQ ID NO: 84968 - DNA, 120 bp, Artificial Sequence
  ENSG00000084093_20 (sequence is synthesized)
ctgctcagacggaggttgcccaaatggggcctgctcccatggaacctgctcagatggaggttgcccaggtagaatctgctcccatgcaggtggtccagaaggagcctgttcagatggagc

SEQ ID NO: 84969 - DNA, 120 bp, Artificial Sequence
  ENSG00000084093_21 (sequence is synthesized)
tgtctcctcccatggaggtggtccagaaggagcctgttcagatagagctgtctcctcccatggaggtggtccagaaggaacctgttaagatagagctgtctcctcccatagaggtggtcc

SEQ ID NO: 84970 - DNA, 120 bp, Artificial Sequence
  ENSG00000084093_22 (sequence is synthesized)
agaaggagcctgttcagatggagttgtctcctcccatgggggtggttcagaaggagcctgctcagagggagccacctcctcccagagagcctccccttcacatggagccaatttccaaaa

SEQ ID NO: 84971 - DNA, 120 bp, Artificial Sequence
  ENSG00000084093_23 (sequence is synthesized)
agcctcctctccgaaaagataaaaaggaaaagtctaacatgcagagtgaaagggcacggaaggagcaagtccttattgaagttggcttagtgcctgttaaagatagctggcttctaaagg

SEQ ID NO: 84972 - DNA, 120 bp, Artificial Sequence
  ENSG00000084093_24 (sequence is synthesized)
aaagtgtaagcacagaggatctctcaccaccatcaccaccactgccaaaggaaaatttaagagaagaggcatcaggagaccaaaaattactcaacacaggtgaaggaaataaagaagccc

SEQ ID NO: 84973 - DNA, 120 bp, Artificial Sequence
  ENSG00000084093_25 (sequence is synthesized)
ctcttcagaaagtaggagcagaagaggcagatgagagcctacctggtcttgctgctaatatcaacgaatctacccatatttcatcctctggacaaaacttgaatacgccagagggtgaaa

SEQ ID NO: 84974 - DNA, 120 bp, Artificial Sequence
  ENSG00000084093_26 (sequence is synthesized)
ctttaaatggtaaacatcagactgacagtatagtttgtgaaatgaaaatggacactgatcagaacacaagagagaatctcactggtataaattcaacagttgaagaaccagtttcaccaa

SEQ ID NO: 84975 - DNA, 120 bp, Artificial Sequence
  ENSG00000084093_27 (sequence is synthesized)
tgcttcccccttcagcagtagaagaacgtgaagcagtgtccaaaactgcactggcatcacctcctgctacaatggcagcaaatgagtctcaggaaattgatgaagatgaaggcatccaca

SEQ ID NO: 84976 - DNA, 120 bp, Artificial Sequence
  ENSG00000084093_28 (sequence is synthesized)
gccatgaaggaagtgacctaagtgacaacatgtcagagggtagtgatgattctggattgcatggggctcggccagttccacaagaatctagcagaaaaaatgcaaaggaagccttggcag

SEQ ID NO: 84977 - DNA, 120 bp, Artificial Sequence
  ENSG00000084093_29 (sequence is synthesized)
tcaaagcggctaagggagattttgtttgtatcttctgtgatcgttctttcagaaagggaaaagattacagcaaacacctcaatcgccatttggttaatgtgtactatcttgaagaagcag

SEQ ID NO: 84978 - DNA, 120 bp, Artificial Sequence
  ENSG00000084093_30 (sequence is synthesized)
taattagtatctgatgttgatttttaagtggcattcttttccttaggactttttatgtatacctgttgattgttgtgtaaattttagtaaatctaagagagtgtactaaaccagcaggta

SEQ ID NO: 84979 - DNA, 120 bp, Artificial Sequence
  ENSG00000084093_31 (sequence is synthesized)
tctgttagcttatgtgtttaattgaaattagaaggctaagatggtataacagcattttattgctttgtccagctacaacttgtcatttttttctccatgtcttatcttcctgtttcactt

SEQ ID NO: 84980 - DNA, 120 bp, Artificial Sequence
  ENSG00000084093_32 (sequence is synthesized)
tagtttattcttcgttttttattgagatctataaaaaattggcttacttaatagcaaattacttgaagaatttgcctgctttatataaagttagcactttaagatttttttttttagaga

SEQ ID NO: 84981 - DNA, 120 bp, Artificial Sequence
  ENSG00000084093_33 (sequence is synthesized)
tgagaagacatttaaattgaagaaaaattcccccagcaatagacagtctatcagtccaagtatttacttcctgagttttgatcaatattttttatttgtgtatgttaatcgtcataaaaa

SEQ ID NO: 84982 - DNA, 120 bp, Artificial Sequence
  ENSG00000084093_34 (sequence is synthesized)
cagtgattttggtgtgttttttattttggtgctttaatggcttaagatgttgcacattttttttttcttttggtttctgtttatgtttttttgcctatgcagttaaatttttcctagaaa

SEQ ID NO: 84983 - DNA, 120 bp, Artificial Sequence
  ENSG00000084093_35 (sequence is synthesized)
tagcatttgtgttgaacagtaacactttatacatatatatatgcatgtttattttgtttggcgtctttggagggatgcttttagacttgtttgcaaaagggcagttttctttttctttgc

SEQ ID NO: 84984 - DNA, 120 bp, Artificial Sequence
  ENSG00000084093_36 (sequence is synthesized)
tgcagttgtctattttgcagaataatagtgtgtgcaagtttgtgagcaaatgaaatatgcaggttcaatctattgattttgatttttacatcttatatctatgccagaatctgtatttca

SEQ ID NO: 84985 - DNA, 120 bp, Artificial Sequence
  ENSG00000084093_37 (sequence is synthesized)
tataacttatttatttcgaatggatgtagtaaattcacagctatcagttttgattttgcaataaataaaccactaggttgcatgtcgaacaaatttttatctcaaataccaaccatcagt

SEQ ID NO: 84986 - DNA, 120 bp, Artificial Sequence
  ENSG00000084093_38 (sequence is synthesized)
tttttttttcatgtgttttggtacagctaattcctaattgtagagtgttaaatgtttgaggagaaccttttctcatagatggttggtgttcatatggctactttacaataaagagaactg

SEQ ID NO: 84987 - DNA, 120 bp, Artificial Sequence
  ENSG00000084093_39 (sequence is synthesized)
taagtgatatttggaaactacaaacctggaattaggagatataattattccttcaagttttatagaatatcacttgggagattccaaagccatagctattacgcggcaaacctaggataa

SEQ ID NO: 84988 - DNA, 120 bp, Artificial Sequence
  ENSG00000084093_40 (sequence is synthesized)
gaaaggtagtatgagtgctggtagaccagctgcaactttcctatacagtgaaaaaggctggtgaaacaagtacagtccagattttttaaaatcatactttctcagggatctccacaaact

SEQ ID NO: 84989 - DNA, 120 bp, Artificial Sequence
  ENSG00000084093_41 (sequence is synthesized)
ggtgggtgtcctggctgtctgtgtgatagcctctttctataggtgaggcctcaaatgaattgcagctatcctggtgttcctatgagggcactttgtatgaaaaagggcatgtactccaaa

SEQ ID NO: 84990 - DNA, 120 bp, Artificial Sequence
  ENSG00000084093_42 (sequence is synthesized)
acatttttgtaggttctttggccagttgccaaagagtgtgaaagaatccaatagaggatttttcttactgatagcagtcattcattgcagtaaaataaaatatgatcccattagggaatc

SEQ ID NO: 84991 - DNA, 120 bp, Artificial Sequence
  ENSG00000084093_43 (sequence is synthesized)
ttgaattctgacctcccatactccgttttgaaataaccactttatatttcattttttaaaaatctgatgatctctttgaggcaggtttcagatttggcagtacaacatgaaagattagga

SEQ ID NO: 84992 - DNA, 120 bp, Artificial Sequence
  ENSG00000084093_44 (sequence is synthesized)
aaagcattaataacgtgtgggtggaaagcttgttaaaaatctgagagtgaagtttgagttaaaagttgtttgaacatggcattgactgggaggccaaagatttaaagaagcggaagattc

SEQ ID NO: 84993 - DNA, 120 bp, Artificial Sequence
  ENSG00000084093_45 (sequence is synthesized)
ttctcttaagacatgaggagtaagttgtgtgataatggtatgtgttttgtgtgcatgaatggacattgtaaatgttgaattctaggctccgacaatcattgtcaacagaagatcaagctg

SEQ ID NO: 84994 - DNA, 120 bp, Artificial Sequence
  ENSG00000084093_46 (sequence is synthesized)
caaatatttatgttttaaaacttaaattataaagctagttaagtctttctaatgactagttttaatgttcatgggtacattttacctaagttaccgtttacattgtatagaaaaagatac

SEQ ID NO: 84995 - DNA, 120 bp, Artificial Sequence
  ENSG00000084093_47 (sequence is synthesized)
atcttaagcacagattggttattaggaattagtttggggaagaggtttttttgtggattctttcatactgcaaagaaaaaccatttgccttttggggaattgagctaacttctaatctag

SEQ ID NO: 84996 - DNA, 120 bp, Artificial Sequence
  ENSG00000084093_48 (sequence is synthesized)
tcttaagactagaatgctaaaaacaaaaacatgaaggaaattaaaaccccttattattaaattgatttgtaaaaacattgttactggaaatttattggacttgaggccttcctccagaaa

SEQ ID NO: 84997 - DNA, 120 bp, Artificial Sequence
  ENSG00000084093_49 (sequence is synthesized)
ataaggacttgattgtcaggcctatattaggttctgaaccttaatgccatgtatttgtacttactaaaaattgtttcaatgaaaagtacattagcagtatgaacttctggtccagttgga

SEQ ID NO: 84998 - DNA, 120 bp, Artificial Sequence
  ENSG00000084093_50 (sequence is synthesized)
agtttttccatttgaaaaatgtgatgtttgcatggaactgtttgaaacttttttattttctagtccccctcccccacactggatagaatttagcctagaattttccctttggataaaaga

SEQ ID NO: 84999 - DNA, 120 bp, Artificial Sequence
  ENSG00000084093_51 (sequence is synthesized)
acaaaaattgaacatgttatttgtaaattgatgtttagtaattagtgataaacttgaaatactagcatatattataagccttaatcttaggtagtcttatgaaaatgaatctcttaacta

SEQ ID NO: 85000 - DNA, 120 bp, Artificial Sequence
  ENSG00000084093_52 (sequence is synthesized)
tcttttgaacctgtattcacattggttttcaagatattttaagttatattttttcctcttttcagagctgcttcttattctggggctacttttttttttagttgtgtaattcacaaaggg

SEQ ID NO: 85001 - DNA, 120 bp, Artificial Sequence
  ENSG00000084093_53 (sequence is synthesized)
ctgcatttttttttttttttaataaggcttataactatggctggatcttttgctctagtcttctaagaagggccattttattttttagagtcacttctaaagtcatgtggtaattaactt

SEQ ID NO: 85002 - DNA, 120 bp, Artificial Sequence
  ENSG00000084093_54 (sequence is synthesized)
tggagactgttttgcgtatgagtgctgatacaaattaaaacccaagtagacctcattgcatgtcaccctatgaatgttgacaatggaaggaataccttgcctgtagtatactgtcacttc

SEQ ID NO: 85003 - DNA, 120 bp, Artificial Sequence
  ENSG00000084093_55 (sequence is synthesized)
tggattgataagctgaggaagaaagttaagtttcttttttacataagtcagaaaaacttacagctggtgttcctagtttcctggttgacctcagcagatgaagtgaacagatagtgttaa

SEQ ID NO: 85004 - DNA, 120 bp, Artificial Sequence
  ENSG00000084093_56 (sequence is synthesized)
ttcagattgaagaaattatctgaatcttggtttgtgtagatttacaatctacatgcaatattaactaaatcagatagcttttacagtttcacatgtgtacataggttccctcccggtccc

SEQ ID NO: 85005 - DNA, 120 bp, Artificial Sequence
  ENSG00000084093_57 (sequence is synthesized)
ttccatatccattagttattgaactttctaaactggcattgaaacattacaacaatgttttgttgcaccaattttataaacttaagcagtgcaatacgtgttacttttctgaggcaaacc

SEQ ID NO: 85006 - DNA, 120 bp, Artificial Sequence
  ENSG00000084093_58 (sequence is synthesized)
aaaggtaaatttctcaaggttcttgctgccttctttagcagcatttgatggaagatcttttatacatttgtaatagataaaaataaaccagattgcaaatccttttttaaaatcctaaac

SEQ ID NO: 85007 - DNA, 120 bp, Artificial Sequence
  ENSG00000084093_59 (sequence is synthesized)
catgtaccaagtttttggtccaaattatgtaggataagttaaacttaaattgcattctattaaccaatatgagtgtatttctgtaagcatagttatgttgaaataaagttttaaaaacca

SEQ ID NO: 85008 - DNA, 120 bp, Artificial Sequence
  ENSG00000084093_60 (sequence is synthesized)
cccgcggagcctccccggccctgggcgttgggcgagccccggggcggtcggaggggcccgggggcggtcggagaagcccggacgccggctgcgcgaatacagttatggccacccaggtaa

SEQ ID NO: 85009 - DNA, 120 bp, Artificial Sequence
  ENSG00000084093_61 (sequence is synthesized)
gagtgtcggggcgactcccgcgagttggtgtgtaaatgtgtgcagtgagcgggccgaggcgagaggaagcgagagcgcccgagtttgcaaagagctgctttgtgtttggtattttgagaa

SEQ ID NO: 85010 - DNA, 120 bp, Artificial Sequence
  ENSG00000084093_62 (sequence is synthesized)
gctgtgcctggacggtcttcctaacaatcgttaaaattccatttggggtggcagttaggggttagggagcaattagaaaagtcgatgttgggccaaattacccaatagcttgggctgttc

SEQ ID NO: 85011 - DNA, 120 bp, Artificial Sequence
  ENSG00000084093_63 (sequence is synthesized)
agccccgggacagccttcgccctctgttttctgtgatggcatttgcttccaacttttgttgaatacagttatggccacccaggtaatggggcagtcttctggaggaggagggctgtttac

SEQ ID NO: 85012 - DNA, 120 bp, Artificial Sequence
  ENSG00000084110_0 (sequence is synthesized)
agataaagacaggaacatggtgtttataagctgcccttaatggcagagaacacagacagaaacgagggaagagagagaaattggggaccctgaagaaagggggccagcagcaggtaggtg

SEQ ID NO: 85013 - DNA, 120 bp, Artificial Sequence
  ENSG00000084110_1 (sequence is synthesized)
ccatcagggacaagaacagcacctcccagggtgggagaccccaggcctttctggcagcaggtctggatggaaagtggacaggaggctcacccgtctgcatcccctgctcctgcccctgct

SEQ ID NO: 85014 - DNA, 120 bp, Artificial Sequence
  ENSG00000084110_2 (sequence is synthesized)
cggctacaaaaaccaaagggacagcagctgaccacaccccggtagccactcctgcataaagctctcccctcctgtgaccagctgaggacctcaggctgcagcggagccatgcccagatac

SEQ ID NO: 85015 - DNA, 120 bp, Artificial Sequence
  ENSG00000084110_3 (sequence is synthesized)
acggtgcacgtacgtggggaatggctggcagtgccctgccaggacgcgcagctcactgtgggctggctgggccgggaggccgtgaggcgctatatcaagaataagcccgacaatggtggc

SEQ ID NO: 85016 - DNA, 120 bp, Artificial Sequence
  ENSG00000084110_4 (sequence is synthesized)
ttcacctccgtggatgacgcgcacttccttgtgcgccggtgcaagggcctgggcctgctggacaacgaggaccggctcgaggtggccctagagaacaacgagttcgtggaagtggttata

SEQ ID NO: 85017 - DNA, 120 bp, Artificial Sequence
  ENSG00000084110_5 (sequence is synthesized)
gagggtgatgccatgtctcctgacttcattccatctcaaccagaaggagtttatctatacagcaagtaccgggagcctgaaaagtacatcgagttagatggagaccgtctgaccacggag

SEQ ID NO: 85018 - DNA, 120 bp, Artificial Sequence
  ENSG00000084110_6 (sequence is synthesized)
gatctggtcaacttgggaaagggacgctacaaaataaagctcaccccaacagctgagaagagggtgcagaaatccagggaggtcatagatagcatcataaaagagaaaacagttgtttac

SEQ ID NO: 85019 - DNA, 120 bp, Artificial Sequence
  ENSG00000084110_7 (sequence is synthesized)
ggtattactacaggttttgggaaatttgccagaactgtaattcctatcaataagctacaggagcttcaggtcaacttagtacgctcacattcttcaggtgttgggaaaccactaagtcct

SEQ ID NO: 85020 - DNA, 120 bp, Artificial Sequence
  ENSG00000084110_8 (sequence is synthesized)
gagaggtgtcggatgctcttggctttaaggatcaatgtcttagccaaaggatacagtggcatttccctggagaccctcaaacaagtcatagaaatgtttaatgcctcctgcctgccctat

SEQ ID NO: 85021 - DNA, 120 bp, Artificial Sequence
  ENSG00000084110_9 (sequence is synthesized)
gtcccagagaaaggaaccgttggtgccagtggagaccttgccccactctctcatcttgctcttgggctagttggagaagggaagatgtggtctccgaagagtggctgggctgatgctaaa

SEQ ID NO: 85022 - DNA, 120 bp, Artificial Sequence
  ENSG00000084110_10 (sequence is synthesized)
tacgtgctagaagcccatggattgaaaccagttattttaaaaccaaaagagggcctggcactcatcaatgggacgcagatgatcacatccctgggctgtgaagctgtagagcgagccagt

SEQ ID NO: 85023 - DNA, 120 bp, Artificial Sequence
  ENSG00000084110_11 (sequence is synthesized)
gctattgcacggcaggctgacattgtggcagccctgacccttgaggtgctgaagggcaccaccaaagcctttgacactgacattcatgctcttcgacctcaccgtgggcaaattgaagtt

SEQ ID NO: 85024 - DNA, 120 bp, Artificial Sequence
  ENSG00000084110_12 (sequence is synthesized)
gcttttcggtttcggtcactcttggactcagatcaccacccatcagaaatagcagagagtcacaggttctgtgatcgcgtccaggatgcatacaccttgcgctgctgtccacaggtccat

SEQ ID NO: 85025 - DNA, 120 bp, Artificial Sequence
  ENSG00000084110_13 (sequence is synthesized)
ggtgtggtgaatgatacaatagcatttgtgaagaacatcattaccacagaactgaacagcgcaacagataatcctatggtctttgccaataggggagagacagtttctggaggaaacttc

SEQ ID NO: 85026 - DNA, 120 bp, Artificial Sequence
  ENSG00000084110_14 (sequence is synthesized)
catggtgaatacccagccaaagccctagactacttggccattggcatccatgaacttgctgcaatcagtgagagaagaatcgagcggctctgcaatccctccctcagtgagctgcctgcc

SEQ ID NO: 85027 - DNA, 120 bp, Artificial Sequence
  ENSG00000084110_15 (sequence is synthesized)
ttcctggtggctgaaggtggtctgaactctgggttcatgatagctcactgcacggcagcagcccttgtttctgagaacaaggctctgtgccatccctcgtctgttgactccctctccacc

SEQ ID NO: 85028 - DNA, 120 bp, Artificial Sequence
  ENSG00000084110_16 (sequence is synthesized)
ccctcagggtcatcgagcatgtggagcaagtgctggccatcgagctccttgcagcctgccagggcatagagtttctacgtcccctgaaaacaaccactccgctggagaaggtctatgacc

SEQ ID NO: 85029 - DNA, 120 bp, Artificial Sequence
  ENSG00000084110_17 (sequence is synthesized)
tggtgcgctctgttgtaaggccctggataaaagatcgcttcatggccccggacatcgaggcagcccacaggctgctcctggagcagaaggtttgggaagtagctgctccatacattgaaa

SEQ ID NO: 85030 - DNA, 120 bp, Artificial Sequence
  ENSG00000084110_18 (sequence is synthesized)
aatacagaatggagcatattccagaatcaagacctctttctccaacagccttttcactgcaatttctgcacaagaaatccaccaaaatcccggagtctgaggacctttaatgggctttgt

SEQ ID NO: 85031 - DNA, 120 bp, Artificial Sequence
  ENSG00000084110_19 (sequence is synthesized)
catgaagtagcagatgagagggcagtcagtttagcacaaagcaatactaggctgaaggagagacctgagaactttcctaggtagatcaatccattgtatcattcagttcttctaaagcct

SEQ ID NO: 85032 - DNA, 120 bp, Artificial Sequence
  ENSG00000084110_20 (sequence is synthesized)
acgttggttaggctgatggcagtattatagttgctaaattcagcactgtgttcctgttgtcgtggttcaagacccaccaggtattttcagattataaaacttttctttctttcttaacag

SEQ ID NO: 85033 - DNA, 120 bp, Artificial Sequence
  ENSG00000084110_21 (sequence is synthesized)
tttcaacaggccactcactcttaagggtgagaagaataaccacaattgtatgtgcctgttttttactcttagcattagatgaattcaaatttggaaacagattgatagcaattttttcta

SEQ ID NO: 85034 - DNA, 120 bp, Artificial Sequence
  ENSG00000084110_22 (sequence is synthesized)
aaaacattagacttttgttaacctttttttttttttttaaatttgcttcaacaagctctccaccagttgactttctttggctaattttactttgcatgatatgccttaatatgccttcat

SEQ ID NO: 85035 - DNA, 120 bp, Artificial Sequence
  ENSG00000084110_23 (sequence is synthesized)
aaataaccattttaagtcataatttgtccttaagctgcttttttcttctattaattggatcatagtaaagagtagtcaatagggtcttcagctattaattgtagaggtgattaaaaccaa

SEQ ID NO: 85036 - DNA, 120 bp, Artificial Sequence
  ENSG00000084110_24 (sequence is synthesized)
caaggagtttcatgtgcaaaggagataaggaatgaatataaagattgctatttgggtggctcttattaaactgtgtattttgtacttatcactacacgtatcccccaaatgcttacatgg

SEQ ID NO: 85037 - DNA, 120 bp, Artificial Sequence
  ENSG00000084110_25 (sequence is synthesized)
gagtttgaggttagtattttcacttccttggtgttagtactctattcacattcttattgtaaccttcctcatttcacagataaggaatctttggggattaaccaacctcctttctgtaat

SEQ ID NO: 85038 - DNA, 120 bp, Artificial Sequence
  ENSG00000084110_26 (sequence is synthesized)
ggtaatcattaaaataagtcctattgataaaggtcagatggagccctagagtgtattactgcatctatttttttccccgagaagataaaggaccttcagggatggcttaagtgtatctgt

SEQ ID NO: 85039 - DNA, 120 bp, Artificial Sequence
  ENSG00000084110_27 (sequence is synthesized)
ccagatgaaggatgggtcacatgacctcttggcttcccaagtctaagctctgtgactttgcaccagtgtgtgcatatatgtgcaaggcccttcaagtggtctgaaaccgtggctctaaaa

SEQ ID NO: 85040 - DNA, 120 bp, Artificial Sequence
  ENSG00000084110_28 (sequence is synthesized)
accacagctggtggagaggaggacagacacacttgccaccttgcctacctaattgccatctaaaatgggccgaacagtggatttcacaatagagttttcaccctttagatttacaacctg

SEQ ID NO: 85041 - DNA, 120 bp, Artificial Sequence
  ENSG00000084110_29 (sequence is synthesized)
tcaggtggaaactgaagtgaaaactgctgcacacagcaattcagggagcaaaaaatgtgctgaggagactgtttacctaaaggttgttcttggtgctattccttgtcaaaatgtgaacac

SEQ ID NO: 85042 - DNA, 120 bp, Artificial Sequence
  ENSG00000084110_30 (sequence is synthesized)
acacaaatgaggtttgtgcattgtcatccgtgggctgccattgagccagtaacccccagtggtctcatggtgctcttcgctccagtttggggaatgctggattctttcagcccctgcagc

SEQ ID NO: 85043 - DNA, 120 bp, Artificial Sequence
  ENSG00000084110_31 (sequence is synthesized)
cctccaggtcaaaatgacactttgtcactgagttttctacacagctctattagtaactgacagcacacgccttcaagggaacttcaagggaaacatggaataaactaagtctcaattgcc

SEQ ID NO: 85044 - DNA, 120 bp, Artificial Sequence
  ENSG00000084110_32 (sequence is synthesized)
tgttttctggccattccttgggaatgagcaaaaaggtatttgagcaacaacttgcagcaccactaagaagccatataataaacactaagtgcaccagggtgcagccaacggttgaatatc

SEQ ID NO: 85045 - DNA, 120 bp, Artificial Sequence
  ENSG00000084110_33 (sequence is synthesized)
taaggattagaaacagaaatggattttaaatggagttttgggacaatattcatggggaaaaaaataagatgtcaggttcattgatgcctccccacccctgcaagatgtcctctttgattc

SEQ ID NO: 85046 - DNA, 120 bp, Artificial Sequence
  ENSG00000084110_34 (sequence is synthesized)
gaaaggaaccgttggtgccagtggagaccttgccccactctctcatcttgctcttgggctagttggagaagggaagatgtggtctccgaagagtggctgggctgatgctaaataccataa

SEQ ID NO: 85047 - DNA, 120 bp, Artificial Sequence
  ENSG00000084110_35 (sequence is synthesized)
ctaaggaaatagataatccttttggggatgcagcttctagatcatctgtcttccgtgcaggcttgtctttgattatttcactatggacagcgttttcctccgaccaccctcatacagcaa

SEQ ID NO: 85048 - DNA, 120 bp, Artificial Sequence
  ENSG00000084110_36 (sequence is synthesized)
tcaccctgacctttctaaacagcaaattcaagcatgttctggtgaaaacttgtaatgcttcccattgtcctcaggataaaggctaaacttaaagtggctttcaagggtcttgtttgtcac

SEQ ID NO: 85049 - DNA, 120 bp, Artificial Sequence
  ENSG00000084110_37 (sequence is synthesized)
cagataatcctgtatcttttgattgtatactaacctgcaattatagaattgcagctggtaattttaggatctactgaaacaatcattttgtgtagcttctcagttccattgctccatttc

SEQ ID NO: 85050 - DNA, 120 bp, Artificial Sequence
  ENSG00000084110_38 (sequence is synthesized)
acagagtaaatgaatcagtacctgaggctcagaggttaactgactttctccaggtcagagctggtaagtggcagaggtgacctgtgaacttactctcaggttccaagtctaacatgctgt

SEQ ID NO: 85051 - DNA, 120 bp, Artificial Sequence
  ENSG00000084110_39 (sequence is synthesized)
ccctggtctctgccctgacacctacctttctgctttttgctctcctcctacataaagatgctaagaccacatgaaaccatctgaagcagttttaaagcagccatttctatagaattcatg

SEQ ID NO: 85052 - DNA, 120 bp, Artificial Sequence
  ENSG00000084110_40 (sequence is synthesized)
ggccaatgatgggccgttccttggtttaacagggggaacatggctgtacaatgtgatctgtaacgagtctcccgtgcattgttttagttatagagggtgatgccatgtctcctgacttca

SEQ ID NO: 85053 - DNA, 120 bp, Artificial Sequence
  ENSG00000084112_0 (sequence is synthesized)
cgggcggcggtggcggtggcggctctagctcgagacgtctgtggcgccctcgcaccgcgccgcagccatggccctggtgaccctgcagcgctcgcccacgcccagcgccgcctcctcctc

SEQ ID NO: 85054 - DNA, 120 bp, Artificial Sequence
  ENSG00000084112_1 (sequence is synthesized)
cccagcgccgcctcctcctcggccagcaacagcgagttggaggctggcagcgaagaagatcgaaaattaaacctcagcttaagtgagagctttttcatggtgaaaggcgcagccctcttc

SEQ ID NO: 85055 - DNA, 120 bp, Artificial Sequence
  ENSG00000084112_2 (sequence is synthesized)
ttacaacagggaagcagccctcaaggccagcggagtcttcagcacccccacaagcatgcaggtgatctgcctcaacatcttcaggtgatgatcaaccttctgcgttgcgaagacagaatc

SEQ ID NO: 85056 - DNA, 120 bp, Artificial Sequence
  ENSG00000084112_3 (sequence is synthesized)
aagctggcagtgcgcctggagagcgcctgggcggaccgggtccggtacatggtggtggtgtacagcagcgggcgccaggacaccgaggagaatatcttgctgggagtggacttttccagt

SEQ ID NO: 85057 - DNA, 120 bp, Artificial Sequence
  ENSG00000084112_4 (sequence is synthesized)
aaggaaagtaaaagctgcaccattgggatggttctccgactgtggagcgacacgaaaatccaccttgatggagatggtgggttcagcgtgagcacagcaggaaggatgcacatatttaag

SEQ ID NO: 85058 - DNA, 120 bp, Artificial Sequence
  ENSG00000084112_5 (sequence is synthesized)
cctgtgtctgtccaggccatgtggtctgccctgcaggtgcttcacaaggcctgcgaagtggcccggaggcacaactacttccccgggggtgtagctctcatctgggctacctactatgag

SEQ ID NO: 85059 - DNA, 120 bp, Artificial Sequence
  ENSG00000084112_6 (sequence is synthesized)
agctgcatcagctccgagcagagctgcatcaacgagtggaacgccatgcaggacctggagtctacgcggcccgactcccccgcgctatttgtggacaagcccactgaaggggaaaggacc

SEQ ID NO: 85060 - DNA, 120 bp, Artificial Sequence
  ENSG00000084112_7 (sequence is synthesized)
gagcgcctcatcaaagccaagctccgaagcatcatgatgagccaggatctagaaaatgtgacttccaaagagattcgtaatgaattagagaaacagatgaattgtaacttgaaggaactc

SEQ ID NO: 85061 - DNA, 120 bp, Artificial Sequence
  ENSG00000084112_8 (sequence is synthesized)
aaggaatttatagacaatgagatgctacttatcttgggacagatggacaagccctcccttatcttcgatcatctttatctcggctctgaatggaatgcatccaatctggaggaactgcag

SEQ ID NO: 85062 - DNA, 120 bp, Artificial Sequence
  ENSG00000084112_9 (sequence is synthesized)
ggctcaggggttgattacattttaaatgttaccagagaaatcgataatttttttcctggcttatttgcatatcataacatccgagtctacgatgaagagaccacagacctcctcgcccac

SEQ ID NO: 85063 - DNA, 120 bp, Artificial Sequence
  ENSG00000084112_10 (sequence is synthesized)
tggaatgaagcgtatcattttataaacaaagcgaagaggaaccattccaagtgcctggtgcattgcaaaatgggcgtgagtcgctcggcctccacagtcatagcctatgcaatgaaggaa

SEQ ID NO: 85064 - DNA, 120 bp, Artificial Sequence
  ENSG00000084112_11 (sequence is synthesized)
ttcggctggcctctggaaaaagcatataactatgtaaagcagaagcgcagcatcacgcgccccaacgcgggctttatgaggcagctgtctgagtatgaaggcatcttggatgcaagcaaa

SEQ ID NO: 85065 - DNA, 120 bp, Artificial Sequence
  ENSG00000084112_12 (sequence is synthesized)
cagcggcacaacaagctgtggcgtcagcagacagacagcagcctccagcagcctgtggatgaccctgcaggacctggcgacttcttgccagagaccccagatggcaccccggaaagccag

SEQ ID NO: 85066 - DNA, 120 bp, Artificial Sequence
  ENSG00000084112_13 (sequence is synthesized)
ctgcccttcttggatgatgccgcccagcccggcttagggccccccctcccctgctgtttccggcgactctcagacccccttctgccttcccctgaggatgaaactggcagcttggtccac

SEQ ID NO: 85067 - DNA, 120 bp, Artificial Sequence
  ENSG00000084112_14 (sequence is synthesized)
ctggaggatccggagagggaggctctgttggaggaagctgctccacctgcagaggtgcacaggccggccagacagccccagcaaggttccggactctgtgagaaggatgtgaagaagaaa

SEQ ID NO: 85068 - DNA, 120 bp, Artificial Sequence
  ENSG00000084112_15 (sequence is synthesized)
ctagagtttgggagtcccaaaggtcggagcggctccttgctgcaggtggaggagacggaaagggaggagggcctgggagcagggaggtgggggcagcttccaacccagctcgatcaaaac

SEQ ID NO: 85069 - DNA, 120 bp, Artificial Sequence
  ENSG00000084112_16 (sequence is synthesized)
ctgctcaactcggagaacctaaacaacaacagcaagaggagctgtcccaacggcatggaggatgatgctatatttgggatccttaacaaagtgaagccttcctataaatcctgtgccgac

SEQ ID NO: 85070 - DNA, 120 bp, Artificial Sequence
  ENSG00000084112_17 (sequence is synthesized)
tgcatgtaccctacagccagcggggctcctgaggcctccagggagcgatgtgaggaccccaatgctcccgccatctgcacccagccagccttcctaccccacatcacgtcctcccctgtg

SEQ ID NO: 85071 - DNA, 120 bp, Artificial Sequence
  ENSG00000084112_18 (sequence is synthesized)
gcccacttggccagcaggtcccgtgttccggagaagccagcctctggcccaaccgaacctcccccgttcctaccaccagcaggctccaggagggcagacaccagtggccctggggctgga

SEQ ID NO: 85072 - DNA, 120 bp, Artificial Sequence
  ENSG00000084112_19 (sequence is synthesized)
gctgccctagagccaccagccagccttttggaaccttccagagagaccccaaaagtcctgccaaagtccctccttttgaagaattctcactgtgataagaaccctcccagcacagaagtg

SEQ ID NO: 85073 - DNA, 120 bp, Artificial Sequence
  ENSG00000084112_20 (sequence is synthesized)
gtaataaaggaagaatcgtcacccaagaaagatatgaagccagccaaggacctgaggcttctgttcagtaatgaatctgagaagccgacaaccaacagctacctgatgcagcaccaggag

SEQ ID NO: 85074 - DNA, 120 bp, Artificial Sequence
  ENSG00000084112_21 (sequence is synthesized)
tccatcattcagctgcagaaggcaggcttggtccgcaagcacaccaaagagctagagcggctgaagagcgtgcctgcagacccagcacctccctccagggatggccctgccagcaggctg

SEQ ID NO: 85075 - DNA, 120 bp, Artificial Sequence
  ENSG00000084112_22 (sequence is synthesized)
gaggccagcatccccgaggagagccaggatccagccgcgctccacgagctgggccccctggttatgcccagccaggccgggagtgatgagaagtcagaggccgcccccgcttcattggaa

SEQ ID NO: 85076 - DNA, 120 bp, Artificial Sequence
  ENSG00000084112_23 (sequence is synthesized)
ggaggctcactgaagagcccccctcctttcttctaccgcctggaccacaccagtagtttctcaaaagactttctgaagaccatctgctacacccccacctcctcttccatgagctccaac

SEQ ID NO: 85077 - DNA, 120 bp, Artificial Sequence
  ENSG00000084112_24 (sequence is synthesized)
ctgacccggagctccagcagcgatagcatccacagtgtccgtgggaagcccgggctggtgaagcagcggacacaggagattgagacccggctccggctggcgggcctcaccgtctcttcc

SEQ ID NO: 85078 - DNA, 120 bp, Artificial Sequence
  ENSG00000084112_25 (sequence is synthesized)
ccactgaagcgctcacactctcttgccaagctggggagtctcaccttctcaacggaagacctgtccagtgaggctgacccgtccaccgtcgctgactcccaggacaccactttgagtgaa

SEQ ID NO: 85079 - DNA, 120 bp, Artificial Sequence
  ENSG00000084112_26 (sequence is synthesized)
tcttccttcttgcatgagccccagggaaccccgagggacccagctgcaacctccaaaccatcagggaaacccgccccagaaaacttaaagagcccttcgtggatgagcaaaagctgaccc

SEQ ID NO: 85080 - DNA, 120 bp, Artificial Sequence
  ENSG00000084112_27 (sequence is synthesized)
gccttttgctgcgtcaggctgggcggatattttcatatgatccctccctcactttcactgtggatttggatcgaccccttacatcttgatttcccttaaacgagtgaagtcatcctaact

SEQ ID NO: 85081 - DNA, 120 bp, Artificial Sequence
  ENSG00000084112_28 (sequence is synthesized)
tttcccctactcttgccatagagaggaggagaagaaactaaccaacatgcagcacaagaaggggagctgtcagtcgtgtggcctgggagaaccaggagccgccggccaggagacacaaaa

SEQ ID NO: 85082 - DNA, 120 bp, Artificial Sequence
  ENSG00000084112_29 (sequence is synthesized)
ctccgctcccaccgtgtcttcaagaagaaccatgttttaggaagaacgtgcacacataggcgcacacatccagactgttcccttcgcatcctgcagaagagtcctggtggtggcagcctc

SEQ ID NO: 85083 - DNA, 120 bp, Artificial Sequence
  ENSG00000084112_30 (sequence is synthesized)
accgcggcacacgttctagctcattcttggcctcgcagaaaactctcggatggcaacattaagtcctacctctgttctcgctgcgctttttatttttaaaacacacgaatgaccaaggct

SEQ ID NO: 85084 - DNA, 120 bp, Artificial Sequence
  ENSG00000084112_31 (sequence is synthesized)
tgttccagggaataatgctctgtctgaaagcgtttttccaaaaaaagaatttttcgttttgtgttttggttgggaccccagacgtgtcaagacttttaacccgacagccccaagcactgc

SEQ ID NO: 85085 - DNA, 120 bp, Artificial Sequence
  ENSG00000084112_32 (sequence is synthesized)
tgagtaaagtcatcagatgagtagtcccacgctgttgttgagctgactctgtgcccgaatggtggtgcaggcgccctgtcctggttgtgttgttacgtgtttgaccagcacaggggtccg

SEQ ID NO: 85086 - DNA, 120 bp, Artificial Sequence
  ENSG00000084112_33 (sequence is synthesized)
gtggggaaaatgtatgggttgttctcagttgttgctaatgctgaagtttaaatctcaaggggaagggcccacctgcattgttgagtgtctgctgctgaaacacatgattgtgtttaggtt

SEQ ID NO: 85087 - DNA, 120 bp, Artificial Sequence
  ENSG00000084112_34 (sequence is synthesized)
tgaaattgctcaagtgtctggctcaggtggtggttctgagacacatcgtcctgctgagagcccagatgcttaggtccactagggcccatctagggaagggaaaggagatttcagcggctt

SEQ ID NO: 85088 - DNA, 120 bp, Artificial Sequence
  ENSG00000084112_35 (sequence is synthesized)
ccccgaaaggaacgggactgtcgggatgcttcccggatgtctacagttgccccttcctgcagtgagattactgcttcctgtttccctccagctcttcccagcagcagtgagggagtataa

SEQ ID NO: 85089 - DNA, 120 bp, Artificial Sequence
  ENSG00000084112_36 (sequence is synthesized)
gagggatctgtagtcgctgcctggctctgtgggcggcccctttaagactcaggtgagctcagccagtcccgctgcgccaggcttgaatcaaaggtgtcagcaagctagatgtcaaaacat

SEQ ID NO: 85090 - DNA, 120 bp, Artificial Sequence
  ENSG00000084112_37 (sequence is synthesized)
ttcgagagagaggcagcttgcagaaaagcagaaaggttgaattcaggggtcagcaaactatggcatgtggccccgtgagctaggaatggtttttcctctttaagacagggcctggctctg

SEQ ID NO: 85091 - DNA, 120 bp, Artificial Sequence
  ENSG00000084112_38 (sequence is synthesized)
tcacctaggctggagtacagtagtgcaatcatgactcactgcagcatcaacctccctggctcaagcgatggcttttacctttttaaggagttgtaaaaaaaagaaataatatgtgacaga

SEQ ID NO: 85092 - DNA, 120 bp, Artificial Sequence
  ENSG00000084112_39 (sequence is synthesized)
attcatgtggcccacaaagcctgaggtacttactgtcaggccctttgtagaaaaagttgctgacccctggtttgatttgccacacagggctgctcatggccctgtaggaagaaactgggt

SEQ ID NO: 85093 - DNA, 120 bp, Artificial Sequence
  ENSG00000084112_40 (sequence is synthesized)
aaatgtgaagccctctgcctctctgacacctaaggccagacccttccctcctcccgaccacaagctttgccagccccgcactagcctcacctgtgcaggatggagtaggttgcgtacatg

SEQ ID NO: 85094 - DNA, 120 bp, Artificial Sequence
  ENSG00000084112_41 (sequence is synthesized)
ggggaaggcaggtgaacacagttggctgaagctcttccacaattccatcttgccctcagctgggtccgccagattaactcagtgaaaccagaaagccttcaaggaccagctgaattctga

SEQ ID NO: 85095 - DNA, 120 bp, Artificial Sequence
  ENSG00000084112_42 (sequence is synthesized)
aagtgagtgagtgagccatcatcttaacattggccagaactgtgttccccaaagctattctagaaagcaccccaggagggatctgcaggaacaaggctagttcatattttacctagtgag

SEQ ID NO: 85096 - DNA, 120 bp, Artificial Sequence
  ENSG00000084112_43 (sequence is synthesized)
cacagtttttgcaaaaatcctccctccaggactttgtctccttggagtgatttttaaaaatacatacattactttatagggagctgttttcccactagtgtcaattaaaatcaccttaaa

SEQ ID NO: 85097 - DNA, 120 bp, Artificial Sequence
  ENSG00000084112_44 (sequence is synthesized)
aggtgattatccacttattcctaaacccctgtgggttgttccccctttccctcagccaacaaaagcatagcctcaaaaaatatcaagttcggtatgttttgccaaatcaaatttcatgtg

SEQ ID NO: 85098 - DNA, 120 bp, Artificial Sequence
  ENSG00000084112_45 (sequence is synthesized)
gtagatcaatttttgtgtcaaaataatcttttaaatttagtgatgacaggcttttgttggttttttaaccacgtctatgtatgagaatgatatatttttgaaaactttaattttgaaagc

SEQ ID NO: 85099 - DNA, 120 bp, Artificial Sequence
  ENSG00000084112_46 (sequence is synthesized)
cataatttttcttatctaaagagttggggggtggggtgtggaatctggagagtacaagttggtctttggcttctggcaaacttacccattcatttttggaagcacagctagcatatcaac

SEQ ID NO: 85100 - DNA, 120 bp, Artificial Sequence
  ENSG00000084112_47 (sequence is synthesized)
atccagacgagagcgctggtcccgtccacagagcagagtgaagcattctggacttgatgcttaatagcctggcctggagaaaagggtaaggtttatttttggaaacccagatcagttgca

SEQ ID NO: 85101 - DNA, 79 bp, Artificial Sequence
  ENSG00000084112_48 (sequence is synthesized)
aaagggtaaggtttatttttggaaacccagatcagttgcatgtaaacagatggcacatggctatttaaaatgctgtatg

SEQ ID NO: 85102 - DNA, 120 bp, Artificial Sequence
  ENSG00000084112_49 (sequence is synthesized)
cgcgccactgcactccagcctgggtgcaatgaaactgggagtgaaactccgtctcaaaaaaataaaatgctgtatgaacaagatgagcattctgtcaggtgtcgggacacctgggcaaag

SEQ ID NO: 85103 - DNA, 120 bp, Artificial Sequence
  ENSG00000084112_50 (sequence is synthesized)
agatgagcattctgtcaggtgtcgggacacctgggcaaagacgaattcatgctgtctgtgaaaaggaagtttgcactgtaacatatgccatagcttggcccttgctttgtatgcaacctt

SEQ ID NO: 85104 - DNA, 120 bp, Artificial Sequence
  ENSG00000084112_51 (sequence is synthesized)
agctgatggggaaaattccaaacataagtggcacaggaaagaggcaggcagaggaggcaggggtctgtgctgtgcaagtcactggttttttatgactatcattttcattgaatgcatttg

SEQ ID NO: 85105 - DNA, 120 bp, Artificial Sequence
  ENSG00000084112_52 (sequence is synthesized)
ttgaattgggacaaaaggaacattttctaaatcagcttgatactctttataaaaaacagctgaatcttatcttctgcctcacattaattcatgtggcatgccaaaagttagactgaactt

SEQ ID NO: 85106 - DNA, 120 bp, Artificial Sequence
  ENSG00000084112_53 (sequence is synthesized)
tcacgggaagaggagaaccggggctgctctcggatggtaattgacaatgccgatttccatttctttgtcttacggctacttccgagccttctagcaaggtccctggttgcatgtatttcc

SEQ ID NO: 85107 - DNA, 120 bp, Artificial Sequence
  ENSG00000084112_54 (sequence is synthesized)
taagagcagagtttatttctctttacattccctgcttccttgctctccatgcagggaccccagccaacctctgggctgttgaatagctctctgctgggtggcaagcccttctccttggca

SEQ ID NO: 85108 - DNA, 120 bp, Artificial Sequence
  ENSG00000084112_55 (sequence is synthesized)
ccctgttgcttaagcatacagattgctcaccaggtgcacacagacagctgtactgtccaagcccattctgctccaccctgtcctcttcagctaaagagcattccagtaatctaaagccct

SEQ ID NO: 85109 - DNA, 120 bp, Artificial Sequence
  ENSG00000084112_56 (sequence is synthesized)
tttcccctggagaagtccagagtttgcagcagtgtggagctgagcttgaacagaacagaccctcagcacggccctggactaatgcactcttatctgagggcagtccattctagaaggttg

SEQ ID NO: 85110 - DNA, 120 bp, Artificial Sequence
  ENSG00000084112_57 (sequence is synthesized)
atgaatttccctaccactctcctggggaccttttctctctagtgggaacaaatgctacataatttagtcaagatcctattaagtcatctcacctgaggcatctggagagggagttgcctt

SEQ ID NO: 85111 - DNA, 120 bp, Artificial Sequence
  ENSG00000084112_58 (sequence is synthesized)
ccattggtgggaaattgttggtgccagaatacattttgcccaaaactcttctcattggctggccacctagcagggctcctctaaacacgcaactcagcgaggggacccccttcacctctg

SEQ ID NO: 85112 - DNA, 120 bp, Artificial Sequence
  ENSG00000084112_59 (sequence is synthesized)
gcaagagagctgggtagatcagaaacttggtgacacctggctagcacagagcaggctcacttgtcttggtcccactacccagattcctgcagacattgcaaaccaaatgaaggttgttga

SEQ ID NO: 85113 - DNA, 120 bp, Artificial Sequence
  ENSG00000084112_60 (sequence is synthesized)
atgacccctgtccccagccacttgttttgttatcatctgctctgcagtggaatgcctgtgtgtttgagttcactctgcatctgtatatttgagtatagaaaccgagtcaagtgatcatgt

SEQ ID NO: 85114 - DNA, 120 bp, Artificial Sequence
  ENSG00000084112_61 (sequence is synthesized)
gcatccagacacactgtgtcacctgagccacagagcaaatcaccttaacgatctggaatgaaactgtgaccagtgccgccctgggtggttctggagagactgccgtcttcttgtttggcc

SEQ ID NO: 85115 - DNA, 120 bp, Artificial Sequence
  ENSG00000084112_62 (sequence is synthesized)
ataggtgctggggccccggcttcagtcactgtctcagacaggagtcccgataagcagatcaccagtcctccactgtccttcctgtcggccttgctgcatgagaagatagctgcttcctcc

SEQ ID NO: 85116 - DNA, 120 bp, Artificial Sequence
  ENSG00000084112_63 (sequence is synthesized)
ctcttttcctacactgtaattattgttttacaattgagtgccttaataatagtttacaaatactatgtatttatgcaaaactgttaaagtctcatctgttatgattggatacttggtctt

SEQ ID NO: 85117 - DNA, 120 bp, Artificial Sequence
  ENSG00000084112_64 (sequence is synthesized)
gtcagtagtggtcagcattgggttgtgagcttgtcctactccatacgtgtttatcctgctatgcagttttacattgtgtgttcacatctattccaaggagccttgctagaaacaacactg

SEQ ID NO: 85118 - DNA, 120 bp, Artificial Sequence
  ENSG00000084112_65 (sequence is synthesized)
gcggttcctgcaggccaggcaggcattggcccatgctgtgtcccataggagccaatgaaagaacgtagcttggtctgctagccagccgtggggtggcgcaggccaggcagcctctgcacc

SEQ ID NO: 85119 - DNA, 120 bp, Artificial Sequence
  ENSG00000084112_66 (sequence is synthesized)
agagtccagcacctgcccattccccagtcacacaatcatactcttctttcatagagattttattaccacctagaccaccctagttttcctctctgttagtgtcctgagctcttttgcaac

SEQ ID NO: 85120 - DNA, 120 bp, Artificial Sequence
  ENSG00000084112_67 (sequence is synthesized)
aaaatgtaggtacagaccaatccctgtcccttccccaatcaggagctccacaccatgagttgtttggttttccagaagctgccagtgggttcccgtgaattgcgttaagatatcgatgat

SEQ ID NO: 85121 - DNA, 120 bp, Artificial Sequence
  ENSG00000084112_68 (sequence is synthesized)
tttattgtttttcttcttgtttttttaaataatatatttaaaggcagtatcttttgtactgtgaatttgcagtagaagatgcagaatgcactttttttttacttctgttggtgtgtattg

SEQ ID NO: 85122 - DNA, 120 bp, Artificial Sequence
  ENSG00000084112_69 (sequence is synthesized)
attgtatatagtgtgtgtgcttcttgtgatgaaaataaactttttctttataaattcctgatgactgagtttatataaaaggaaactgcttcctcagcccttgccaaaacagtctgatac

SEQ ID NO: 85123 - DNA, 120 bp, Artificial Sequence
  ENSG00000084112_70 (sequence is synthesized)
atcgtcatcatcatcgtcattgacatggccagtctttattgagcatctattacatgctcagttctttgctagaaaacctggacaagttacaccaaagaaaggaccacaggaagaaatgat

SEQ ID NO: 85124 - DNA, 120 bp, Artificial Sequence
  ENSG00000084112_71 (sequence is synthesized)
agttcctcctggaactagtctgttttctttctaattttgtcagtaagcaagaacaggcccacctgtgggtggtcctttgtgtaccaaaaaaaaaaagttacccaccaggaaaggatttgg

SEQ ID NO: 85125 - DNA, 120 bp, Artificial Sequence
  ENSG00000084112_72 (sequence is synthesized)
actttgggtgggttctcttcccgtacaagtaggaaatgtaaagccagaggtgtgcactaaagaacatctaacctgctcccaccagccctggtgggagagggaggaccctggaggctaagt

SEQ ID NO: 85126 - DNA, 120 bp, Artificial Sequence
  ENSG00000084112_73 (sequence is synthesized)
actgctggtttccaaggtgcatgctcatgtcccagtccacttcaccccaggcagcttttggtggctcttctcccttggacactcaggaggcagagctgcttccatttttttttttttaat

SEQ ID NO: 85127 - DNA, 120 bp, Artificial Sequence
  ENSG00000084112_74 (sequence is synthesized)
ttttttttttttttttttgagactgggtctggctctcttgctcaggctggagttcagtggtgccatcatagctcactgcaacctcgacttcctaggctaaagtgatcctcctgcctcaag

SEQ ID NO: 85128 - DNA, 120 bp, Artificial Sequence
  ENSG00000084112_75 (sequence is synthesized)
agtagctgggactacaggcgtgcaccaccttgccccgctaatttttacaatttattatagacatgaagtctcgctttgctgcccaggctggtctttaattcctgtcttcaagtgatcctc

SEQ ID NO: 85129 - DNA, 88 bp, Artificial Sequence
  ENSG00000084112_76 (sequence is synthesized)
acttccatcttaaaattctgcctccttagagttctttgctttctgctgtgtagtcagggaggagtcacattcactcagtctcctctgt

SEQ ID NO: 85130 - DNA, 120 bp, Artificial Sequence
  ENSG00000084112_77 (sequence is synthesized)
tgtagtcagggaggagtcacattcactcagtctcctctgtctggatgcgatacatcatttctacttgctttccagtgggcagggcccagtcacagggtcccaatgcaacagccagggaga

SEQ ID NO: 85131 - DNA, 120 bp, Artificial Sequence
  ENSG00000084112_78 (sequence is synthesized)
ctgggaaatgtatggggcacatgtatttggtgagcactaactgtcacaagtacctgggcgtgacccctaaattccagtgcctgcagagccaggaagtattttgttcagttcatctggact

SEQ ID NO: 85132 - DNA, 120 bp, Artificial Sequence
  ENSG00000084112_79 (sequence is synthesized)
tgctctgtctctcaactggactcaaaagactgatgaataaaccagaatgcaagtttattactttaccaaaagaattataatcatcaagcagaccagattgctcacatgctgattagcaca

SEQ ID NO: 85133 - DNA, 120 bp, Artificial Sequence
  ENSG00000084112_80 (sequence is synthesized)
tttagtcctgctaggtaagtctttctttttttgagacagcctggagtgcagtggcagtcatggctcactgaagtgttgatctcctgggctccagcaatcctgcctcagcctcccaagtag

SEQ ID NO: 85134 - DNA, 87 bp, Artificial Sequence
  ENSG00000084112_81 (sequence is synthesized)
agcagagccacacactgctgcacccagctaaatttatttatttatttatttaaaagatagggtctcactatgttgcccagactggtc

SEQ ID NO: 85135 - DNA, 120 bp, Artificial Sequence
  ENSG00000084112_82 (sequence is synthesized)
ataggcatgagccactgtgcccagccccttctaggtaaatctctatggggtgccaaattttggttaagaattgcttattgaatattaaaagtttagtgggatgcttcttttttttttttc

SEQ ID NO: 85136 - DNA, 85 bp, Artificial Sequence
  ENSG00000084112_83 (sequence is synthesized)
ccaaattttggttaagaattgcttattgaatattaaaagtttagtgggatgcttcttttttttttttcttttgagatggagttta

SEQ ID NO: 85137 - DNA, 90 bp, Artificial Sequence
  ENSG00000084112_84 (sequence is synthesized)
agccacaggatgcttctaatagtgttatcaagctataatgcagccctctctgtaaaatgttttaaaaacaaatcactgagggtcatggtt

SEQ ID NO: 85138 - DNA, 120 bp, Artificial Sequence
  ENSG00000084112_85 (sequence is synthesized)
tgtaaaatgttttaaaaacaaatcactgagggtcatggttcaagacactgttctctggcaaggttgaagatagctaacaaattctctttgggttccagccatgaatggggtgggatgggc

SEQ ID NO: 85139 - DNA, 120 bp, Artificial Sequence
  ENSG00000084112_86 (sequence is synthesized)
cccagcaatctgtatgtttctgagattccctgggaattctgatggccaagtttagaaaccatcaaaataagaatatgatgcaactgagtaggctcacgctttgctaattacattgcacac

SEQ ID NO: 85140 - DNA, 120 bp, Artificial Sequence
  ENSG00000084112_87 (sequence is synthesized)
atgctttttggagacaacacccacactaccctaacaatgtgtgttcataaaactcatccgatacttatttgttcaaggccctaggacaatattcctgtaatgggctgcttttgccctgat

SEQ ID NO: 85141 - DNA, 120 bp, Artificial Sequence
  ENSG00000084112_88 (sequence is synthesized)
ttcctcctcagagtaactgtctcgcggttgggcacgatcccagatcacatctacagtggaggtggttttgctggggaggatccgcatgcttgtttgtgtttatgcctggggaaccccctc

SEQ ID NO: 85142 - DNA, 120 bp, Artificial Sequence
  ENSG00000084112_89 (sequence is synthesized)
ttggcaagatgttcgggagaggctccaaaggcagcacagaggacggcttggaacttagggggattcactttatggtaaagaagccctttctaaaggagagctccacccaggaaacaccac

SEQ ID NO: 85143 - DNA, 120 bp, Artificial Sequence
  ENSG00000084112_90 (sequence is synthesized)
ccacccacgcatccttgcctcctaaaaccaggttatgtttatcacataccttctatgtgctttacataaagaatcccctggaattctccaaactgggcattgtggtctgtgatgcatatc

SEQ ID NO: 85144 - DNA, 70 bp, Artificial Sequence
  ENSG00000084112_91 (sequence is synthesized)
aagctcaagaccagcctggctcacatggtgaaacgccgtctcaactaaaaatacaaaaattagccgggca

SEQ ID NO: 85145 - DNA, 87 bp, Artificial Sequence
  ENSG00000084112_92 (sequence is synthesized)
gaaaaaaaaaggtagaggagagtcctttttctaactttcttgaactctttggactaccttgggatccttctattaactgccttgttg

SEQ ID NO: 85146 - DNA, 120 bp, Artificial Sequence
  ENSG00000084112_93 (sequence is synthesized)
tttggactaccttgggatccttctattaactgccttgttggcattattctcagtttatgaaaaaacaggcccacagagtggaagtaatttgcctacaggtacatctaaaaattgatgaag

SEQ ID NO: 85147 - DNA, 120 bp, Artificial Sequence
  ENSG00000084112_94 (sequence is synthesized)
ccagataggaactgctccctcatcatctgaaacccttcccagagctgtctctcccaccccagaagtagaaagaagccagacaaagatgcatcttgatctcccttgtggtttcagcaagga

SEQ ID NO: 85148 - DNA, 120 bp, Artificial Sequence
  ENSG00000084112_95 (sequence is synthesized)
agcagatgagttggagatgaagcccccagcccctgggaaattggacccacttcttgctccaaaggctattggggtgacacaaggtgtgtttctttcccgtagatcatattcaccatattt

SEQ ID NO: 85149 - DNA, 120 bp, Artificial Sequence
  ENSG00000084112_96 (sequence is synthesized)
tgcctttaaatggaaattgtgcatcctgaagtaccttgttaagagtccattttcaacctgaaattccttttttttgtaaaccacttcagcaaatacagtgtggcatttacattagcaacc

SEQ ID NO: 85150 - DNA, 120 bp, Artificial Sequence
  ENSG00000084112_97 (sequence is synthesized)
tcccagcctaggagaggatgctccagcatccgactctaaaagacaaatttgggcacggtggcttgacgcctgttatcccaacaccttgagaggccgaggcaggcagattgcttgagccca

SEQ ID NO: 85151 - DNA, 85 bp, Artificial Sequence
  ENSG00000084112_98 (sequence is synthesized)
acccccatctctacccagtggtcccagctacttgagtggctgaggtgaaggatctcctgagcctgggaggcagaggttgcagtga

SEQ ID NO: 85152 - DNA, 120 bp, Artificial Sequence
  ENSG00000084112_99 (sequence is synthesized)
gccgagatcgaaccactgcactccagcttatgcaacagagcaagaccgtgtctcaaaaacaaataaaaataaaagattttaaaaagacaaattatcccacaaatggtacattgtggtggt

SEQ ID NO: 85153 - DNA, 120 bp, Artificial Sequence
  ENSG00000084112_100 (sequence is synthesized)
aaattatcccacaaatggtacattgtggtggtggtggtggtggtggtggtagacctccctcttgctcttgaaattggatcagaacaaactgacaatgctacctacttcatggggtcattg

SEQ ID NO: 85154 - DNA, 120 bp, Artificial Sequence
  ENSG00000084112_101 (sequence is synthesized)
gtgaattcactgataatgcatgcaaatccccttctgcctggcacactacctaataaataaatggtggttgttattgttggaattggaggatatattcctagttgcaagggtttcacatgt

SEQ ID NO: 85155 - DNA, 120 bp, Artificial Sequence
  ENSG00000084112_102 (sequence is synthesized)
attaccaagttaatcctcaccgcagatatgattctgttttacagaggaagcagtggatgctcagagaggttaggtaacgtgggtcagggacacacagccaggaaggggcagaggctggga

SEQ ID NO: 85156 - DNA, 120 bp, Artificial Sequence
  ENSG00000084112_103 (sequence is synthesized)
gtgcctgactccaaattcatgcaatttctaccccaccatcttctccccaaggaaaatagtccctaatgcatgtgtgcaatgcttagagggcagtagatgctcaacagatgctgagagagt

SEQ ID NO: 85157 - DNA, 120 bp, Artificial Sequence
  ENSG00000084112_104 (sequence is synthesized)
gagggagtaaatgagatatgccatgaaaaggagcccctgtggacttatgcgtgcgtttgtttaacttgtgggcaagtacttatagacaggtgcaaacaataaatctccttttgcaactga

SEQ ID NO: 85158 - DNA, 120 bp, Artificial Sequence
  ENSG00000084112_105 (sequence is synthesized)
tttttcagccaaaatatcagaggaagacaagagttccacaagagccatttgcttttcgggtaggactctgaggaggagttggctccccagccctcgtggaagcactcggcagcctcctgg

SEQ ID NO: 85159 - DNA, 120 bp, Artificial Sequence
  ENSG00000084112_106 (sequence is synthesized)
cttttcctgatctccatagggagcagatggccagagctcggagggcagttgtagggagcgttagagatgtgagcactgcagccacgaacctcttttattttaccgacttctgcatcttcc

SEQ ID NO: 85160 - DNA, 120 bp, Artificial Sequence
  ENSG00000084112_107 (sequence is synthesized)
aacggcatggaggtaggcagagcccggcctgcagggtggcacaccccatcccttccatcccactctaattggcctacctcagcctctgtagtagggactacaggcacccgccaccacacc

SEQ ID NO: 85161 - DNA, 120 bp, Artificial Sequence
  ENSG00000084112_108 (sequence is synthesized)
ttctattgtctcctctgggcccccagctcccatctccagggacctgagggttctttcacagggtgattctgctggtgggtacgtagtgcataccttatatagcaaattgagaatctgttg

SEQ ID NO: 85162 - DNA, 120 bp, Artificial Sequence
  ENSG00000084112_109 (sequence is synthesized)
ggaataacacatatctctgcacaccatcttcaccccatgtaccttattcataccctgggcagggcttccaactcaatttctttttgtgtatgtaaaattaaaacatataatttatcagcc

SEQ ID NO: 85163 - DNA, 120 bp, Artificial Sequence
  ENSG00000084112_110 (sequence is synthesized)
aacatggaggaggaacagctggccttgtaagtgatcacagagtgaaaccagcctagtctgttgcattgttcctttttttttccaaaggaaatataagggaaaccaaggggaatttttgct

SEQ ID NO: 85164 - DNA, 80 bp, Artificial Sequence
  ENSG00000084112_111 (sequence is synthesized)
tgcccagccaagaattttctcttcatttttaactcccagagggaaaggtagaacactgaaagtgttgatcttgcattgga

SEQ ID NO: 85165 - DNA, 120 bp, Artificial Sequence
  ENSG00000084112_112 (sequence is synthesized)
ccaagtacacatgtggcctccgccagcagagcaccagccctgggcagctgcctccctgctgtagagtgggcgtgcggtcagcccacactgcacccaaaagcctcagctgagcacttacgg

SEQ ID NO: 85166 - DNA, 80 bp, Artificial Sequence
  ENSG00000084207_0 (sequence is synthesized)
tgggaaagagggaaaggcttccccggccagctgcgcggcgactccggggactccagggcgcccctctgcggccgacgccc

SEQ ID NO: 85167 - DNA, 120 bp, Artificial Sequence
  ENSG00000084207_1 (sequence is synthesized)
gcgggaccctccagaagagcggccggcgccgtgactcagcactggggcggagcggggcgggaccacccttataaggctcggaggccgcgaggccttcgctggagtttcgccgccgcagtc

SEQ ID NO: 85168 - DNA, 120 bp, Artificial Sequence
  ENSG00000084207_2 (sequence is synthesized)
ttcgccaccatgccgccctacaccgtggtctatttcccagttcgaggccgctgcgcggccctgcgcatgctgctggcagatcagggccagagctggaaggaggaggtggtgaccgtggag

SEQ ID NO: 85169 - DNA, 120 bp, Artificial Sequence
  ENSG00000084207_3 (sequence is synthesized)
ttgggctctatgggaaggaccagcaggaggcagccctggtggacatggtgaatgacggcgtggaggacctccgctgcaaatacatctccctcatctacaccaactatgaggcgggcaagg

SEQ ID NO: 85170 - DNA, 120 bp, Artificial Sequence
  ENSG00000084207_4 (sequence is synthesized)
atgactatgtgaaggcactgcccgggcaactgaagccttttgagaccctgctgtcccagaaccagggaggcaagaccttcattgtgggagaccagatctccttcgctgactacaacctgc

SEQ ID NO: 85171 - DNA, 120 bp, Artificial Sequence
  ENSG00000084207_5 (sequence is synthesized)
tggacttgctgctgatccatgaggtcctagcccctggctgcctggatgcgttccccctgctctcagcatatgtggggcgcctcagtgcccggcccaagctcaaggccttcctggcctccc

SEQ ID NO: 85172 - DNA, 120 bp, Artificial Sequence
  ENSG00000084207_6 (sequence is synthesized)
ctgagtacgtgaacctccccatcaatggcaacgggaaacagtgagggttggggggactctgagcgggaggcagagtttgccttcctttctccaggaccaataaaatttctaagagagcta

SEQ ID NO: 85173 - DNA, 120 bp, Artificial Sequence
  ENSG00000084207_7 (sequence is synthesized)
ccgcagtcttcgccaccatgccgccctacaccgtggtctatttcccagttcgagctatacgggcagctccccaagttccaggacggagacctcaccctgtaccagtccaataccatcctg

SEQ ID NO: 85174 - DNA, 120 bp, Artificial Sequence
  ENSG00000084207_8 (sequence is synthesized)
ggagcccttttgtttaaatcagctgccccgcagccctctggagtggaggaaactgagacccactgaggttacgtagtttgcccaaggtcaagcctgggtgcctgcaatccttgccctgtg

SEQ ID NO: 85175 - DNA, 120 bp, Artificial Sequence
  ENSG00000084207_9 (sequence is synthesized)
ccaggctgcctcccaggtgtcaggtgagctctgagcacctgctgtgtggcagtctctcatccttccacgcacatcctcttcccctcctcccaggctggggctcacagacagccccctggt

SEQ ID NO: 85176 - DNA, 120 bp, Artificial Sequence
  ENSG00000084207_10 (sequence is synthesized)
agaccaggtgagcatctggccccatgctgttccttcctcgccaccctctgcttccagatggacacaggtatctccttcgctgactacaacctgctggacttgctgctgatccatgaggtc

SEQ ID NO: 85177 - DNA, 120 bp, Artificial Sequence
  ENSG00000084207_11 (sequence is synthesized)
tccccaagttccaggacggagacctcaccctgtaccagtccaataccatcctgcgtcacctgggccgcacccttggctggggctcacagacagccccctggttggcccatccccagtgac

SEQ ID NO: 85178 - DNA, 120 bp, Artificial Sequence
  ENSG00000084207_12 (sequence is synthesized)
cgccgccgcagtcttcgccaccatgccgccctacaccgtggtctatttcccagttcgaggtaggagcatgtgtctggcagggaagggaggcaggggctggggctgcagcccacagcccct

SEQ ID NO: 85179 - DNA, 120 bp, Artificial Sequence
  ENSG00000084207_13 (sequence is synthesized)
cgcccacccggagagatccgaacccccttatccctccgtcgtgtggcttttaccccgggcctccttcctgttccccgcctctcccgccatgcctgctccccgccccagtgttgtgtgaaa

SEQ ID NO: 85180 - DNA, 120 bp, Artificial Sequence
  ENSG00000084207_14 (sequence is synthesized)
tcttcggaggaacctgtttccctgttccctccctgcactcctgacccctccccgggttgctgcgaggcggagtcggcccggtccccacatctcgtacttctccctccccgcaggccgctg

SEQ ID NO: 85181 - DNA, 120 bp, Artificial Sequence
  ENSG00000084207_15 (sequence is synthesized)
cgcggccctgcgcatgctgctggcagatcagggccagagctggaaggaggaggtggtgaccgtggagacgtggcaggagggctcactcaaagcctcctgcgtaagtgaccatgcccgggc

SEQ ID NO: 85182 - DNA, 120 bp, Artificial Sequence
  ENSG00000084207_16 (sequence is synthesized)
aaggggagggggtgctgggccttagggggctgtgactaggatcgggggacgcccaagctcagtgcccctccctgagccatgcctcccccaacagctatacgggcagctccccaagttcca

SEQ ID NO: 85183 - DNA, 120 bp, Artificial Sequence
  ENSG00000084207_17 (sequence is synthesized)
agcagagcagacctaggggatgggcttaggccctctgcccccaattcctccagcctgctcccgctggctgagtccctggcccccctgccctgcagatctccttcgctgactacaacctgc

SEQ ID NO: 85184 - DNA, 120 bp, Artificial Sequence
  ENSG00000084234_0 (sequence is synthesized)
gtcgcggtgtgctaagcgaggagtccgagtgtgtgagcttgagagccgcgcgctagagcgacccggcgagggatggcggccaccgggaccgcggccgccgcagccacgggcaggctcctg

SEQ ID NO: 85185 - DNA, 120 bp, Artificial Sequence
  ENSG00000084234_1 (sequence is synthesized)
cttctgctgctggtggggctcacggcgcctgccttggcgctggccggctacatcgaggctcttgcagccaatgccggaacaggatttgctgttgctgagcctcaaatcgcaatgttttgt

SEQ ID NO: 85186 - DNA, 120 bp, Artificial Sequence
  ENSG00000084234_2 (sequence is synthesized)
gggaagttaaatatgcatgtgaacattcagactgggaaatgggaacctgatccaacaggcaccaagagctgctttgaaacaaaagaagaagttcttcagtactgtcaggagatgtatcca

SEQ ID NO: 85187 - DNA, 120 bp, Artificial Sequence
  ENSG00000084234_3 (sequence is synthesized)
gagctacagatcacaaatgtgatggaggcaaaccagcgggttagtattgacaactggtgccggagggacaaaaagcaatgcaagagtcgctttgttacacctttcaagtgtctcgtgggt

SEQ ID NO: 85188 - DNA, 120 bp, Artificial Sequence
  ENSG00000084234_4 (sequence is synthesized)
gaatttgtaagtgatgtcctgctagttccagaaaagtgccagtttttccacaaagagcggatggaggtgtgtgagaatcaccagcactggcacacggtagtcaaagaggcatgtctgact

SEQ ID NO: 85189 - DNA, 120 bp, Artificial Sequence
  ENSG00000084234_5 (sequence is synthesized)
cagggaatgaccttatatagctacggcatgctgctcccatgtggggtagaccagttccatggcactgaatatgtgtgctgccctcagacaaagattattggatctgtgtcaaaagaagag

SEQ ID NO: 85190 - DNA, 120 bp, Artificial Sequence
  ENSG00000084234_6 (sequence is synthesized)
gaagaggaagatgaagaggaagaggaagaggaagatgaagaggaagactatgatgtttataaaagtgaatttcctactgaagcagatctggaagacttcacagaagcagctgtggatgag

SEQ ID NO: 85191 - DNA, 120 bp, Artificial Sequence
  ENSG00000084234_7 (sequence is synthesized)
gatgatgaggatgaggaagaaggggaggaagtggtggaggaccgagattactactatgacaccttcaaaggagatgactacaatgaggagaatcctactgaacccggcagcgacggcacc

SEQ ID NO: 85192 - DNA, 120 bp, Artificial Sequence
  ENSG00000084234_8 (sequence is synthesized)
atgtcagacaaggaaattactcatgatgtcaaagctgtctgctcccaggaggcgatgacggggccctgccgggccgtgatgcctcgttggtacttcgacctctccaagggaaagtgcgtg

SEQ ID NO: 85193 - DNA, 120 bp, Artificial Sequence
  ENSG00000084234_9 (sequence is synthesized)
cgctttatatatggtggctgcggcggcaacaggaacaattttgagtctgaggattattgtatggctgtgtgtaaagcgatgattcctccaactcctctgccaaccaatgatgttgatgtg

SEQ ID NO: 85194 - DNA, 120 bp, Artificial Sequence
  ENSG00000084234_10 (sequence is synthesized)
tatttcgagacctctgcagatgataatgagcatgctcgcttccagaaggctaaggagcagctggagattcggcaccgcaaccgaatggacagggtaaagaaggaatgggaagaggcagag

SEQ ID NO: 85195 - DNA, 120 bp, Artificial Sequence
  ENSG00000084234_11 (sequence is synthesized)
cttcaagctaagaacctccccaaagcagagaggcagactctgattcagcacttccaagccatggttaaagctttagagaaggaagcagccagtgagaagcagcagctggtggagacccac

SEQ ID NO: 85196 - DNA, 120 bp, Artificial Sequence
  ENSG00000084234_12 (sequence is synthesized)
ctggcccgagtggaagctatgctgaatgaccgccgtcggatggctctggagaactacctggctgccttgcagtctgacccgccacggcctcatcgcattctccaggccttacggcgttat

SEQ ID NO: 85197 - DNA, 120 bp, Artificial Sequence
  ENSG00000084234_13 (sequence is synthesized)
gtccgtgctgagaacaaagatcgcttacataccatccgtcattaccagcatgtgttggctgttgacccagaaaaggcggcccagatgaaatcccaggtgatgacacatctccacgtgatt

SEQ ID NO: 85198 - DNA, 120 bp, Artificial Sequence
  ENSG00000084234_14 (sequence is synthesized)
gaagaaaggaggaaccaaagcctctctctgctctacaaagtaccttatgtagcccaagaaattcaagaggaaattgatgagctccttcaggagcagcgtgcagatatggaccagttcact

SEQ ID NO: 85199 - DNA, 120 bp, Artificial Sequence
  ENSG00000084234_15 (sequence is synthesized)
tctcagagacccctgtggacgtccgggtgagctctgaggagagtgaggagatcccaccgttccaccccttccaccccttcccagccctacctgagaacgaagacactcagccggagttgt

SEQ ID NO: 85200 - DNA, 120 bp, Artificial Sequence
  ENSG00000084234_16 (sequence is synthesized)
accacccaatgaaaaaaggatctggagtgggagagcaggatgggggactgatcggtgccgaagagaaagtgattaacagtaagaataaagtggatgaaaacatggtcattgacgagactc

SEQ ID NO: 85201 - DNA, 120 bp, Artificial Sequence
  ENSG00000084234_17 (sequence is synthesized)
tggatgttaaggaaatgattttcaatgccgagagagttggaggcctcgaggaagagcgggaatccgtgggcccactgcgggaggacttcagtctgagtagcagtgctctcattggcctgc

SEQ ID NO: 85202 - DNA, 120 bp, Artificial Sequence
  ENSG00000084234_18 (sequence is synthesized)
tggtcatcgcagtggccattgccacggtcatcgtcatcagcctggtgatgctgaggaagaggcagtatggcaccatcagccacgggatcgtggaggttgatccaatgctcaccccagaag

SEQ ID NO: 85203 - DNA, 120 bp, Artificial Sequence
  ENSG00000084234_19 (sequence is synthesized)
agcgtcacctgaacaagatgcagaaccatggctatgagaaccccacctacaaatacctggagcagatgcagatttaggtggcagggagcgcggcagccctggcggagggatgcaggtggg

SEQ ID NO: 85204 - DNA, 120 bp, Artificial Sequence
  ENSG00000084234_20 (sequence is synthesized)
ccggaagatcccacgattccgatcgactgccaagcagcagccgctgccaggggctgcgtctgacatcctgacctcctggactgtaggactatataaagtactactgtagaactgcaattt

SEQ ID NO: 85205 - DNA, 120 bp, Artificial Sequence
  ENSG00000084234_21 (sequence is synthesized)
tcttttaaatgggtgaaaaatggtaatataacaatatatgatatataaaccttaaatgaaaaaaatgatctattgcagatatttgatgtagttttcttttttaaattaatcagaaacccc

SEQ ID NO: 85206 - DNA, 120 bp, Artificial Sequence
  ENSG00000084234_22 (sequence is synthesized)
ccccacttccattgtattgtctgacacatgctctcaatatataataaatgggaaatgtcgattttcaataatagacttatatgcaggctgtcgttccggttatgttgtgtaagtcaactc

SEQ ID NO: 85207 - DNA, 120 bp, Artificial Sequence
  ENSG00000084234_23 (sequence is synthesized)
ttcagcctcattcactgtcctggcttttatttaaagaaaaaaaaggcagtattccctttttaaatgagctttcaggaagttgctgagaaatggggtggaatagggaactgtaatggccac

SEQ ID NO: 85208 - DNA, 120 bp, Artificial Sequence
  ENSG00000084234_24 (sequence is synthesized)
tgaagcacgtgagagaccctcgcaaaatgatgtgaaaggaccagtttcttgaagtccagtgtttccacggctggatacctgtgtgtctccataaaagtcctgtcaccaaggacgttaaag

SEQ ID NO: 85209 - DNA, 120 bp, Artificial Sequence
  ENSG00000084234_25 (sequence is synthesized)
gcattttattccagcgtcttctagagagcttagtgtatacagatgagggtgtccgctgctgctttccttcggaatccagtgcttccacagagattagcctgtagcttatatttgacattc

SEQ ID NO: 85210 - DNA, 120 bp, Artificial Sequence
  ENSG00000084234_26 (sequence is synthesized)
ttcactgtctgttgtttacctaccgtagctttttaccgttcacttccccttccaactatgtccagatgtgcaggctcctcctctctggactttctccaaaggcactgaccctcggcctct

SEQ ID NO: 85211 - DNA, 120 bp, Artificial Sequence
  ENSG00000084234_27 (sequence is synthesized)
actttgtcccctcacctccaccccctcctgtcaccggccttgtgacattcactcagagaagaccacaccaaggaggcggccgctggcccaggagagaacacggggaggtttgtttgtgtg

SEQ ID NO: 85212 - DNA, 120 bp, Artificial Sequence
  ENSG00000084234_28 (sequence is synthesized)
aaaggaaagtagtccaggctgtccctgaaactgagtctgtggacactgtggaaagctttgaacaattgtgttttcgtcacaggagtctttgtaatgcttgtacagttgatgtcgatgctc

SEQ ID NO: 85213 - DNA, 120 bp, Artificial Sequence
  ENSG00000084234_29 (sequence is synthesized)
actgcttctgctttttctttctttttattttaaatctgaaggttctggtaacctgtggtgtatttttattttcctgtgactgtttttgttttgtttttttcctttttcctcccctttgac

SEQ ID NO: 85214 - DNA, 120 bp, Artificial Sequence
  ENSG00000084234_30 (sequence is synthesized)
cctattcatgtctctacccactatgcacagattaaacttcacctacaaactccttaatatgatctgtggagaatgtacacagtttaaacacatcaataaatactttaacttccaccgaga

SEQ ID NO: 85215 - DNA, 120 bp, Artificial Sequence
  ENSG00000084234_31 (sequence is synthesized)
cggccttcgcgcgcggcagggatgctgcgagccccgggggagctcccgcgccaggccgcccgctgctccctctgccgcctggggccgggtcgcggacgcgcattttttaagtggcgctgt

SEQ ID NO: 85216 - DNA, 120 bp, Artificial Sequence
  ENSG00000084234_32 (sequence is synthesized)
agtgctgagattataggcgtgagccatcgcgcccagcccgtgtgtttagaataatacacttttcaggctcttgcagccaatgccggaacaggatttgctgttgctgagcctcaaatcgca

SEQ ID NO: 85217 - DNA, 120 bp, Artificial Sequence
  ENSG00000084234_33 (sequence is synthesized)
accaagatgctaatgactggagccccaagccttttgtttctaaatgtgtggcatgactgagacctctcaaaggctttgcctgcgtgttctgtgagctctcagttctttaaggaagggata

SEQ ID NO: 85218 - DNA, 120 bp, Artificial Sequence
  ENSG00000084234_34 (sequence is synthesized)
cacgttgtgcacatgttccctagaacttaaaatataataaataaaataaataaaaaagttttttcctttgcctttcactttgatcatacacatccagaagtcactttttattctgttcta

SEQ ID NO: 85219 - DNA, 120 bp, Artificial Sequence
  ENSG00000084234_35 (sequence is synthesized)
gacagtagacctttagtttgctcagtgccacattgctttttgaataattcctgcctgtgtgacctttaaaattctgggagagagaaacatatatatggaaggagctcagaattacagttg

SEQ ID NO: 85220 - DNA, 120 bp, Artificial Sequence
  ENSG00000084234_36 (sequence is synthesized)
attgggcttggtcataagcatccttgctgaggcaatacccttccagatccctctttctcaaatagttggagtgcagtattgctatttcatgggcactttgagacaaaagctagctctgat

SEQ ID NO: 85221 - DNA, 120 bp, Artificial Sequence
  ENSG00000084234_37 (sequence is synthesized)
ttaactagaatctagtcgtgcaagtctttaaagttgaagctttagaaaaattgcatcatttttggctgcattgcatgagctagcctgcatgttcagcagctgtggaagctgttacaagtt

SEQ ID NO: 85222 - DNA, 120 bp, Artificial Sequence
  ENSG00000084234_38 (sequence is synthesized)
gctatgtgttaagaacaagtctagttgtgaggcagaagctctgctgtggttgtgccttgtgccattacctgcctttgacaagcccagggacagcagtgctttgcatgtcctcatgttgaa

SEQ ID NO: 85223 - DNA, 120 bp, Artificial Sequence
  ENSG00000084234_39 (sequence is synthesized)
atgaataaggaattcttatgatagctagaaatcacatgctttggaactaaaaatagaggacttcctctcacgttccctccctgggcctgtgctgcgtcgtcgtgctgcgtatttggatac

SEQ ID NO: 85224 - DNA, 120 bp, Artificial Sequence
  ENSG00000084234_40 (sequence is synthesized)
ttttcaatgccgagagagttggaggcctcgaggaagagcgggtacgtgtttagctccagaacctaaggtttcctgccaatcttaggtatttctcctctggaccttctcagttcaagtaga

SEQ ID NO: 85225 - DNA, 120 bp, Artificial Sequence
  ENSG00000084234_41 (sequence is synthesized)
aaacgggagagatgcctgagctaataagggtccctcatccccagctttccgtacttttggataagaaagctaaaattaaaatctccatggagattgggaagagtgggcgttctccacctg

SEQ ID NO: 85226 - DNA, 120 bp, Artificial Sequence
  ENSG00000084234_42 (sequence is synthesized)
tgggtggttccctgcaaagcaggatcttggtgctactttgggttttaggggctcgaccttccaggagcgtggccctcagtgagttacttgcctcacggctgccagatggtcactgggact

SEQ ID NO: 85227 - DNA, 120 bp, Artificial Sequence
  ENSG00000084234_43 (sequence is synthesized)
ctttcttctgcccaacacgctttacttttgagactcattagagcgagtgacctgatgtcagatgcttccaggtgcacgtctctgtgttcgttttccgcacagtagaaggttggagggctc

SEQ ID NO: 85228 - DNA, 120 bp, Artificial Sequence
  ENSG00000084234_44 (sequence is synthesized)
caacggctcccacagactggctgtggtgtttagcatctgggtatgaaaaggattaaaaagcccttttcagcagtagctcatctcttgctatagagtaggaaaatatatttacaactaaag

SEQ ID NO: 85229 - DNA, 120 bp, Artificial Sequence
  ENSG00000084234_45 (sequence is synthesized)
atatgaataacctgttagaggccattttcaagtgagtagagagttaataacttggattagagttgggttttgttcttatactgccttaggtttatacccccttttattcacctagtattt

SEQ ID NO: 85230 - DNA, 120 bp, Artificial Sequence
  ENSG00000084234_46 (sequence is synthesized)
ctgccttaggtttatacccccttttattcacctagtattttctgtcatttatagttctggattatcttcaactgagtttgatatttcaatgtggctttttttttttttttgaaatggagt

SEQ ID NO: 85231 - DNA, 120 bp, Artificial Sequence
  ENSG00000084234_47 (sequence is synthesized)
ttttggcagtctgttctgagatacgtctccacaacggttacttgaaggaaaatgcatacgggaccagctgccataatatagtcttccctccatacctgccccttcattaggggtttgggg

SEQ ID NO: 85232 - DNA, 120 bp, Artificial Sequence
  ENSG00000084234_48 (sequence is synthesized)
agtggatttggaaggctgtgacagaactggttggttaatgggggtcccacaggtacctgcttccttccatcaagcagcaggtagcagaggaaggaggcagtaaataccaaactccccgtt

SEQ ID NO: 85233 - DNA, 120 bp, Artificial Sequence
  ENSG00000084444_0 (sequence is synthesized)
gcacgcgcaccggggcctcagccatggcgaccgtgctgtccagggcgctcaagctgccggggaagaagagcccagacctaggggagtatgatccacttacccaggctgacagtgatgaga

SEQ ID NO: 85234 - DNA, 120 bp, Artificial Sequence
  ENSG00000084444_1 (sequence is synthesized)
gcgaagacgatctggtgcttaacctgcagaagaatggaggggtcaaaaatgggaagagtcctttgggagaagcgccagaacccgactcagatgctgaggttgcagaggctgcaaagccac

SEQ ID NO: 85235 - DNA, 120 bp, Artificial Sequence
  ENSG00000084444_2 (sequence is synthesized)
atctttcagaagtcaccacggagggctacccctcagaaccccttgggggcctggaacagaaggcggcctcctccctggtgtcatatgtgcgcacgtctgtcttcctgctgactttgggga

SEQ ID NO: 85236 - DNA, 120 bp, Artificial Sequence
  ENSG00000084444_3 (sequence is synthesized)
tctcgatgatcctggtgctcctgtgtgctttcctgatcccctgtcctcccagagatctgcacagcacctggagccgccacttgggctcccagggaggtggggacctgtctccattggaat

SEQ ID NO: 85237 - DNA, 120 bp, Artificial Sequence
  ENSG00000084444_4 (sequence is synthesized)
tggctgatgtgaatggagatggcctgcgtgatgtgcttctctcctttgtgatgtcaaggaacgggagtgcagtaggtgtctcaagaccagctgctaatcttgtatgcctttcggggatga

SEQ ID NO: 85238 - DNA, 120 bp, Artificial Sequence
  ENSG00000084444_5 (sequence is synthesized)
atggcagcacactgtggtctagtcttctccctgaggaggctcgagatatcacatgtttggagctgatgccaggaagcttggctgaaaccatctgccttgtgacagggacacacaagatgc

SEQ ID NO: 85239 - DNA, 120 bp, Artificial Sequence
  ENSG00000084444_6 (sequence is synthesized)
tcagcgcattcaatgcaacgtcagggaaagccatttggactttaaacccaaactacttgtccaacggtaccttggctgccccagttgtggtactgccagacttggatgaagacggtgttc

SEQ ID NO: 85240 - DNA, 120 bp, Artificial Sequence
  ENSG00000084444_7 (sequence is synthesized)
gagaccttgtggttctggccattggggaattgcagccagatctgtgctttctgctggtgtctggccggaccggaaatccagtgggtcgacctgtgaagtacaacatcgttggagttggga

SEQ ID NO: 85241 - DNA, 120 bp, Artificial Sequence
  ENSG00000084444_8 (sequence is synthesized)
atctgattggtcctcaggtttacatcaccacaaatggggctgtctacatcctgtttggctttggaaatatacaagctgtcgcactgcgggacatttttgttcaggcccaaaatcgagaca

SEQ ID NO: 85242 - DNA, 120 bp, Artificial Sequence
  ENSG00000084444_9 (sequence is synthesized)
gctcaccaccttctctgcagatagaagagccagaatgggaaaagcgaagatccatcaacctgtctgagctcattgatgtttacagtgatggtgttgaactactccagatggtgaaggcac

SEQ ID NO: 85243 - DNA, 120 bp, Artificial Sequence
  ENSG00000084444_10 (sequence is synthesized)
cagattccaactgcagcaaccttctgattacaaccagacaaagccttgtgctgcttcgggggcaaaatctgacaccttactgggcattgagacttcaaggcctgcgcagccagcctactc

SEQ ID NO: 85244 - DNA, 120 bp, Artificial Sequence
  ENSG00000084444_11 (sequence is synthesized)
ctggatatttcactgatgatcagacattagatttccttctgcagatacaggatggagttgggatgaaaaagatgatggttgtggatggtgactctggctccattgtttggagttaccgtg

SEQ ID NO: 85245 - DNA, 120 bp, Artificial Sequence
  ENSG00000084444_12 (sequence is synthesized)
ctccgtgtcacatgaaagaaacgccagccacctcagcagttacttcagaccagaagtctgtcttcctcttctgggccgaagggctgtcagctgcatctcccaattccgatatcatcctag

SEQ ID NO: 85246 - DNA, 120 bp, Artificial Sequence
  ENSG00000084444_13 (sequence is synthesized)
gaactgagccgcccagccttcaccacctttacctcctgcatcctgcgttcccctccatccttctggatctggccaacaccaccggcacagtgacggcttcagaggttggaattaacgacc

SEQ ID NO: 85247 - DNA, 120 bp, Artificial Sequence
  ENSG00000084444_14 (sequence is synthesized)
tctggaaagatgccttttatgttaccaggacaacagggccaagctccgaaggccatccagcagccctggtggtcagcaagcttagtctacggtgggcactaatggagggccagatggctc

SEQ ID NO: 85248 - DNA, 120 bp, Artificial Sequence
  ENSG00000084444_15 (sequence is synthesized)
agctacaggagtccacccccaaaattggccgtggggagctgcgaagatttctctctaggataaagtttgttgaagctccctacgagatctaatctgatggaatcttcagttgcagaagaa

SEQ ID NO: 85249 - DNA, 120 bp, Artificial Sequence
  ENSG00000084444_16 (sequence is synthesized)
gtgaacagagtggataccctctctactctcctgtcactgtaaaatcagttctatggagagaagacttcttcgtcctcatttaccacctccctgatggttgcaaaggcttgggaaggcatg

SEQ ID NO: 85250 - DNA, 120 bp, Artificial Sequence
  ENSG00000084444_17 (sequence is synthesized)
ttggagtctttgacggcagcatgatctatttggctggggcatcttacctaccttttcagtccctgcattaatcccctctaggaactctgcgtggatcgtttggaaatgtgaatctcttaa

SEQ ID NO: 85251 - DNA, 120 bp, Artificial Sequence
  ENSG00000084444_18 (sequence is synthesized)
gtatttaatttttttggtatgtctaatttatgaagtcttgctgggaaagccagtgaagtctatgactaggaaacattttgttgtacattgtgctgtgtgtgtgtatattttagtgttgtg

SEQ ID NO: 85252 - DNA, 120 bp, Artificial Sequence
  ENSG00000084444_19 (sequence is synthesized)
tcagggatccagtttcttgtccttctgaaatatatctggtttgtttggtcattttgagacttccagatgccctacctctgatgttgagggccacttatttctctccttattctttcccac

SEQ ID NO: 85253 - DNA, 120 bp, Artificial Sequence
  ENSG00000084444_20 (sequence is synthesized)
ctgtaccttggctacttccaaattgtagacagaatgagaaagatttatagtggaagactgagttagccatccaagcattttcatctctcttgttttatatcctatttccttagattttcc

SEQ ID NO: 85254 - DNA, 120 bp, Artificial Sequence
  ENSG00000084444_21 (sequence is synthesized)
atccatgtctattaagtgaccacaagaataactatattcctatcacaaggggagcaagaggatgtagtctcagtgacccatctctgaccaagtccacatgttgtgttatatgtggctctg

SEQ ID NO: 85255 - DNA, 120 bp, Artificial Sequence
  ENSG00000084444_22 (sequence is synthesized)
atggttctgccagtcatgatcttttttctgtggcgacatcagaagtgtatgtttgcatgctgtcttcaacttagaggagaactggaagtcaggagcctttgatgtccttatcctgctgta

SEQ ID NO: 85256 - DNA, 120 bp, Artificial Sequence
  ENSG00000084444_23 (sequence is synthesized)
tgtcttctctgcatctttttctatagggcaccctccttagctcccctcactctgttttctcttctattcagggatatgtttctggactttttcttctgctacttgagtccaggatgcaac

SEQ ID NO: 85257 - DNA, 120 bp, Artificial Sequence
  ENSG00000084444_24 (sequence is synthesized)
cattttgtcctgcatctcttctttcctgtagagcctttgaagcattgtattttgggaaaattcttctgtaaatactataacttttataaatggttaagttatttagaattatctccagtg

SEQ ID NO: 85258 - DNA, 120 bp, Artificial Sequence
  ENSG00000084444_25 (sequence is synthesized)
cttacttctcccttcttctgtataaatctgctacttcaattaagttctcctctaaacttttaggtcattgtttatatagcagaaaattcaatgttagcggatggaaaactgcttcttgaa

SEQ ID NO: 85259 - DNA, 120 bp, Artificial Sequence
  ENSG00000084444_26 (sequence is synthesized)
agaaaattcaatgttagcggatggaaaactgcttcttgaataaccttgataggtcatccctgagtgcacctcaggttctctctttacctgggcttgtatctttttttttttttttttttt

SEQ ID NO: 85260 - DNA, 120 bp, Artificial Sequence
  ENSG00000084444_27 (sequence is synthesized)
ccaccatgcccggctgggcttgtatcttttagcttgtgttagtaaaaggattctagaaaattatgaagtccagattcaaagggatctctgttaattacccactgacaggcattatgacct

SEQ ID NO: 85261 - DNA, 120 bp, Artificial Sequence
  ENSG00000084444_28 (sequence is synthesized)
aacaggaggttggtagcagtagatccaagcatgcatgttgcctggcctgtagattggccttatcaggtttctgggtgcctctgccttaagatcctgaaggcaaattttgtttcaacagtt

SEQ ID NO: 85262 - DNA, 120 bp, Artificial Sequence
  ENSG00000084444_29 (sequence is synthesized)
tggaagtcatctgtgggtccagcttgactttggaggaataagaagatacttctagagtatgggaatgattccagataatttctgggatttgaatctacttgagtttaagggcctgggacc

SEQ ID NO: 85263 - DNA, 120 bp, Artificial Sequence
  ENSG00000084444_30 (sequence is synthesized)
taatttggtttagtatagaatttgaagaattaatttataggcagctgaatacccaaaacttgggtggtggtcctgtggtttggctgagctgtccgggcataacctggttctctgttatgt

SEQ ID NO: 85264 - DNA, 120 bp, Artificial Sequence
  ENSG00000084444_31 (sequence is synthesized)
taaggctttctgggaagccagccactctgcgcaggagtgaaacatgaagttgttttctgaggacctgttttggtgggattgtttgggcagaggactgtgtttatgcagggcaaatcccag

SEQ ID NO: 85265 - DNA, 120 bp, Artificial Sequence
  ENSG00000084444_32 (sequence is synthesized)
aaagataagaggaagctagagaaacttaatgtacctgaattcttcatggtgtatttgcaaactaacttaacatagattcttttgactatggtaagtttgaatctctccttgccaaacaac

SEQ ID NO: 85266 - DNA, 120 bp, Artificial Sequence
  ENSG00000084444_33 (sequence is synthesized)
attataagtttagttttcttcttcctcttgcagccggtacagaaaggtgtaagtggtggctgaaaattgaggaagcttcatctgaccaatgtgggtgctggtttcttgtgaaatgtgtcc

SEQ ID NO: 85267 - DNA, 120 bp, Artificial Sequence
  ENSG00000084444_34 (sequence is synthesized)
ctaagcctccttctccttgcaggcagccacccacccaggtgtctaagataggacatgctcctttctttctctaatcccatcctgaggttgccggcaaagccaatatgaccactactgaga

SEQ ID NO: 85268 - DNA, 120 bp, Artificial Sequence
  ENSG00000084444_35 (sequence is synthesized)
aatagtaatgacttctacaaatgcaagggtcttaccctcctctttcccttaaacaccctcccttttccttagaccccgtttttgccatcccccaaatgtgtggtatggtgaaactaatcc

SEQ ID NO: 85269 - DNA, 120 bp, Artificial Sequence
  ENSG00000084444_36 (sequence is synthesized)
cctgaatgtgaattgctatccttattgccctattaaagaagagccagctggtatattgtcaggaagcactatttaaaatgtgaactgttatagagtaaataaataaatactctacaggaa

SEQ ID NO: 85270 - DNA, 120 bp, Artificial Sequence
  ENSG00000084444_37 (sequence is synthesized)
ttttagcttcttactgcattcagacatacatgacaaaagggaatgaaaaagaataacatgtcctgaaggctcttatagaatcctaagtatatggcccataggcttagtactgctgggccg

SEQ ID NO: 85271 - DNA, 120 bp, Artificial Sequence
  ENSG00000084444_38 (sequence is synthesized)
tgtgctcacgtggagcggaataaataacatccttcccaggtttagaggttggagtttggtcgcggggtgcttctgagtgaaaaaaactgggatttgagttaactgtagaactgaagccat

SEQ ID NO: 85272 - DNA, 120 bp, Artificial Sequence
  ENSG00000084444_39 (sequence is synthesized)
agttgttataatctctaacagacagttccctcaccccaggcaagtgagcccttctttgttggaaaggatttagcacctccattttatctaaaaaaatctaggtgagaaatcattgcatgg

SEQ ID NO: 85273 - DNA, 120 bp, Artificial Sequence
  ENSG00000084444_40 (sequence is synthesized)
atttgtttgccagatactttaggattcggatcacactgcctgcttcctcctcctcagtaagacaaaaacgaaaggcaataagtagggaaagccatttggactttaaacccaaactacttg

SEQ ID NO: 85274 - DNA, 120 bp, Artificial Sequence
  ENSG00000084444_41 (sequence is synthesized)
atttgtgatgaggccttccttgtgagacagggtgaaagctcaggaactcctgacaccagccttcccatagccttctaatgcaggggcctcttactgtcccccaccgatcacaggctatta

SEQ ID NO: 85275 - DNA, 120 bp, Artificial Sequence
  ENSG00000084444_42 (sequence is synthesized)
actctgccttcccttgctgcctcctctgaagggaagactcttgtccagcacccacttaatcacctccccacttgttccgtgttgtccagtctgggcgggctctgttagacccatctggtc

SEQ ID NO: 85276 - DNA, 120 bp, Artificial Sequence
  ENSG00000084444_43 (sequence is synthesized)
cctccactaagttctggccgatgtgctgtaagcagaagtaacgtgtagcacttccaggaaatctctttataagacagttgtcagatgccagtttttttccccttccactgcattattact

SEQ ID NO: 85277 - DNA, 120 bp, Artificial Sequence
  ENSG00000084444_44 (sequence is synthesized)
gccaggttcatagccattctgaggatttcagaaggctgatctctggagaactgaggggttcgaaagattgacttctcaggagcagggctgagaatggaatgggcccttaatacctgacag

SEQ ID NO: 85278 - DNA, 120 bp, Artificial Sequence
  ENSG00000084444_45 (sequence is synthesized)
tttcccaagccctgatgacacaaagccagtgtaattaattcagaacataaggcttctgattccattactgactcatcatcagtagtggcagcagcagcagaagtcacttaagcttcttgt

SEQ ID NO: 85279 - DNA, 120 bp, Artificial Sequence
  ENSG00000084444_46 (sequence is synthesized)
gatcatggcaccgtgatgggcatcttgcatgctcctgtctgctgacaatggcacatatctgcagtgacgtgggccgctttggaaagtgagtagcttgggttaggtgtcttcagagatggg

SEQ ID NO: 85280 - DNA, 120 bp, Artificial Sequence
  ENSG00000084444_47 (sequence is synthesized)
gttggatgacagtttgcaaaggctgtggtagaggtacgctgggtgaaacagcttccttcagattctgactatggtacagccagtgggaaacactggaatcattcaacttttcttccaaca

SEQ ID NO: 85281 - DNA, 120 bp, Artificial Sequence
  ENSG00000084444_48 (sequence is synthesized)
aacatttcttgaacactaattgcgagcttggcactgtgctaggcccagaagatccccaggtaaatatcaccagttcctgcccttccgaagctcacagctgagaaaagggagacactccaa

SEQ ID NO: 85282 - DNA, 120 bp, Artificial Sequence
  ENSG00000084444_49 (sequence is synthesized)
aaagccatccccggatgctgtgcagaggagtcacgtcgtgttcagactcagtccaaagtcagcacagaaaaggagatgacaaacagcccagaaaactcctccctcaaaaatcccataaat

SEQ ID NO: 85283 - DNA, 120 bp, Artificial Sequence
  ENSG00000084444_50 (sequence is synthesized)
cgattctaaatagcttcctttgtttttagctagaacctccttttaaaaagttttttataaaaatgatgtataaggttgattttttagaggatggggaataaagagatctctttctctttc

SEQ ID NO: 85284 - DNA, 120 bp, Artificial Sequence
  ENSG00000084453_0 (sequence is synthesized)
tgttcctatttggccatcttggctcctctccccttgttcctgattttaatgggactaccttggttatttcacagcacacttacggtgctttgtgaagtgcctgctatgttactatcatca

SEQ ID NO: 85285 - DNA, 120 bp, Artificial Sequence
  ENSG00000084453_1 (sequence is synthesized)
gtgctttgtgaagtgcctgctatgttactatcatcatcttcctgacaagatggtgctgtagaaatctttgcatattgctatgggcttccaagaaaaactacctcgaaggaaaacaaagac

SEQ ID NO: 85286 - DNA, 120 bp, Artificial Sequence
  ENSG00000084453_2 (sequence is synthesized)
aagatgacgatcattctaatgagaagaattataatatgacatgcacactctttacaaagggtagaagtaagacatatcaagatttaaaacataaatagcttggaacaccctgaagagcaa

SEQ ID NO: 85287 - DNA, 120 bp, Artificial Sequence
  ENSG00000084453_3 (sequence is synthesized)
catgggagaaactgagaaaagaattgaaacccatagaataagatgtctttccaagttgaagatgtttctgttggcaataacatgtgcatttgtatccaaaacactgtctggatcttatat

SEQ ID NO: 85288 - DNA, 120 bp, Artificial Sequence
  ENSG00000084453_4 (sequence is synthesized)
gaattccatgctcacacaaatagagagacaattcaacatcccaacatctctagttggattcattaatggaagctttgagattggaaatcttttgttgattatatttgtgagttattttgg

SEQ ID NO: 85289 - DNA, 120 bp, Artificial Sequence
  ENSG00000084453_5 (sequence is synthesized)
aaccaaactgcatagacctataatgattggcattggatgtgtggttatgggcttaggctgtttcttaaaatcactacctcatttcctcatgaaccaatatgaatatgaatctacagtttc

SEQ ID NO: 85290 - DNA, 120 bp, Artificial Sequence
  ENSG00000084453_6 (sequence is synthesized)
agtttcaggcaacttgtcctcaaacagtttcttgtgtatggaaaatggaacccagattttaagaccaacgcaggatccatcagagtgtacaaaggaagttaaatcattaatgtgggtgta

SEQ ID NO: 85291 - DNA, 120 bp, Artificial Sequence
  ENSG00000084453_7 (sequence is synthesized)
cgtcctagtaggcaatattgtacgtggaatgggtgaaactcccatcctgcctttgggtatttcctatatagaagattttgccaaatttgaaaattctcctttatatattgggcttgtaga

SEQ ID NO: 85292 - DNA, 120 bp, Artificial Sequence
  ENSG00000084453_8 (sequence is synthesized)
aacaggagctattattggtcctttgattggacttttgttggcatcattctgtgcaaatgtttatgttgacactggatttgtgaacacagatgatctgatcataactcccactgacactcg

SEQ ID NO: 85293 - DNA, 120 bp, Artificial Sequence
  ENSG00000084453_9 (sequence is synthesized)
ttgggtcggtgcatggtggtttggctttctgatttgtgcaggagttaacgtgctcactgccattccttttttctttttgcccaacacacttccaaaggaaggactagagactaatgctga

SEQ ID NO: 85294 - DNA, 120 bp, Artificial Sequence
  ENSG00000084453_10 (sequence is synthesized)
catcattaaaaatgaaaatgaagacaaacaaaaagaagaggtcaagaaggaaaaatatggaatcactaaagattttctacctttcatgaaaagtctttcctgcaatccaatttatatgct

SEQ ID NO: 85295 - DNA, 120 bp, Artificial Sequence
  ENSG00000084453_11 (sequence is synthesized)
tttcatacttgtaagtgtgatacagttcaatgcattcgttaacatgatctccttcatgcctaaatacctagaacagcaatatggaatatcatcttcagatgcaatctttctaatgggtat

SEQ ID NO: 85296 - DNA, 120 bp, Artificial Sequence
  ENSG00000084453_12 (sequence is synthesized)
ttataacttacctccaatatgtattggatatataattggtggtttaattatgaagaagttcaagattactgtcaaacaagctgcccacataggatgttggttatccttacttgagtatct

SEQ ID NO: 85297 - DNA, 120 bp, Artificial Sequence
  ENSG00000084453_13 (sequence is synthesized)
tctctattttttatcttttctcatgacttgtgaaaattcttcagttgttggaataaatacctcttatgaaggaattccacaagatttatatgtggaaaatgacatctttgctgattgcaa

SEQ ID NO: 85298 - DNA, 120 bp, Artificial Sequence
  ENSG00000084453_14 (sequence is synthesized)
tgtggattgcaactgtccatctaaaatatgggatcctgtgtgtggaaacaatggcttgtcatatctgtcagcttgtcttgctggttgtgagacatccattggaacgggaataaacatggt

SEQ ID NO: 85299 - DNA, 120 bp, Artificial Sequence
  ENSG00000084453_15 (sequence is synthesized)
gttccaaaattgcagctgtattcaaacatcaggaaattcatctgcagttcttgggctgtgcgacaaaggacctgactgttccttgatgctccagtacttcctaatcttgtcagcgatgag

SEQ ID NO: 85300 - DNA, 120 bp, Artificial Sequence
  ENSG00000084453_16 (sequence is synthesized)
cagtttcatttattctttggctgccatacctggatatatggttctcttgaggtgtatgaaatctgaagagaagtcccttggtgtgggattacatacattttgcacaagagtatttgctgg

SEQ ID NO: 85301 - DNA, 120 bp, Artificial Sequence
  ENSG00000084453_17 (sequence is synthesized)
cattcctgcacctatatattttggcgctttaatggattccacatgtttacactggggaactttgaaatgtggtgagtcaggggcatgcaggatatatgattccaccaccttcagatacat

SEQ ID NO: 85302 - DNA, 120 bp, Artificial Sequence
  ENSG00000084453_18 (sequence is synthesized)
ctacctcggattgccggcagcactaagaggatcaagctttgttccagccttaatcatcttaattcttttgaggaagtgtcatctacctggtgaaaatgcctcttcaggaacagagcttat

SEQ ID NO: 85303 - DNA, 120 bp, Artificial Sequence
  ENSG00000084453_19 (sequence is synthesized)
agagacaaaagtcaaagggaaggaaaatgagtgcaaagatatataccaaaagtccacggttttgaaagatgatgaattgaaaactaaattgtaattgtcctattatattacttttttcag

SEQ ID NO: 85304 - DNA, 120 bp, Artificial Sequence
  ENSG00000084453_20 (sequence is synthesized)
aattagagaacatgctgtacaacttaattgttttaaaaatcagtagagatataatagataactttttcttgtctttaagaacctaaaaaacctcttaactcaaaataataaaatgttcac

SEQ ID NO: 85305 - DNA, 120 bp, Artificial Sequence
  ENSG00000084453_21 (sequence is synthesized)
taatgatatttctaaggtatcagtgacacttgagttttcctaggagggacatcaataacagccccctaaagaagattcttagagccagctttatttttatgttgaaacagcaatttccct

SEQ ID NO: 85306 - DNA, 120 bp, Artificial Sequence
  ENSG00000084453_22 (sequence is synthesized)
taattcatcgaagtaagggtgtacttcctacatctccttctactaatacttctaaaaattttctgttatgaaaacctatttaattccactaaatttgttctttgatattggaattattca

SEQ ID NO: 85307 - DNA, 120 bp, Artificial Sequence
  ENSG00000084453_23 (sequence is synthesized)
gatgcctaaattctcattctgttatgtgaagatttaaatattttattcaagtttatcgcttccatgtgagagaagcctacatcttcttattctatttaggaatcgttctttaactcttct

SEQ ID NO: 85308 - DNA, 120 bp, Artificial Sequence
  ENSG00000084453_24 (sequence is synthesized)
tattcattctaggcatgactcctatataatagattactcataaatataccctcctactttcaattttttcttttctttattactcatacatttgctcaatttgtacagaatactgacaaa

SEQ ID NO: 85309 - DNA, 120 bp, Artificial Sequence
  ENSG00000084453_25 (sequence is synthesized)
cttaagcaggttattaaacatcatgaggcaaagattgttggattttttttcagtaattcaaatccagtgactaaagtttttcttacaaacaagtgtctgaatcaaaggatgaaaggacaa

SEQ ID NO: 85310 - DNA, 120 bp, Artificial Sequence
  ENSG00000084453_26 (sequence is synthesized)
tattataaaaactccagttcttaaaggctgtttgtaatgtcagatattgtcaaagaaccactttctaagattcaggactctttagaccgatgtttatatcacccattgtgtcctaaggta

SEQ ID NO: 85311 - DNA, 120 bp, Artificial Sequence
  ENSG00000084453_27 (sequence is synthesized)
gaacacaaacactaattttcccaaaataatcttagacaatagcttctgttatgaaacagaggttagtaaaggctaaggtacatattaaaagctaaatctacttatattattattttgtaa

SEQ ID NO: 85312 - DNA, 120 bp, Artificial Sequence
  ENSG00000084453_28 (sequence is synthesized)
attatggataaaattaaaaattgaaggattttagacatagaagaggacttattgattaatatagggcttctggtaaaagagaatagaatgaacagacaaatacctgtttgtctactcctt

SEQ ID NO: 85313 - DNA, 120 bp, Artificial Sequence
  ENSG00000084453_29 (sequence is synthesized)
tctccttcctgttgaaatgacagtcaatatataagaatgacataaatccctaatggatgaagagaatggagtaaggaagggtgggagaagtgggtgtcaatacactatggttatttatgt

SEQ ID NO: 85314 - DNA, 120 bp, Artificial Sequence
  ENSG00000084453_30 (sequence is synthesized)
gtactataaatggagtgagagtgtctgcagggatacaacagagtggaggaagctgaaatacagaatatacctagaaggagcctggaatggaagtgtgaaactgagttgccagttcaaagt

SEQ ID NO: 85315 - DNA, 120 bp, Artificial Sequence
  ENSG00000084453_31 (sequence is synthesized)
gtgagttggtagctggacagaaagcaggccagttaactgaaggactttgtacagatgctttacaggttaatatgatttcctaaatgatcagatgcatcatatgaaaaaagaaagcaaatg

SEQ ID NO: 85316 - DNA, 120 bp, Artificial Sequence
  ENSG00000084453_32 (sequence is synthesized)
agaagagaaaggctgtatagaacaggtttagggggaaggatgaaaagttaagtttcagtttcatgaagtttgagacttcaactctgggcatataaaaaataaccaaggttcaaaccaaga

SEQ ID NO: 85317 - DNA, 120 bp, Artificial Sequence
  ENSG00000084453_33 (sequence is synthesized)
ctggctttgaaacaagagagaggaactaaaatcattggaaagggggagtttaactttgatgtaggtatgactgcagcagtgagatatcgtattaagatctgatgacatgaaatttggagc

SEQ ID NO: 85318 - DNA, 120 bp, Artificial Sequence
  ENSG00000084453_34 (sequence is synthesized)
cacttcctttgtggtgggaggaagtgaggagaatggcctggaaactaaaacaaggagaagagacttacctatattcacagagcagcaagaaaaagtaaacagccactgcatgagaaggtt

SEQ ID NO: 85319 - DNA, 120 bp, Artificial Sequence
  ENSG00000084453_35 (sequence is synthesized)
tcaggggaatcagattttgctgagtgtgcgatggtgaagagaatgctcatttctgaactggaatctgagctaaaaagaagcaaataggatatatatggaagttagacttatggaaattag

SEQ ID NO: 85320 - DNA, 120 bp, Artificial Sequence
  ENSG00000084453_36 (sequence is synthesized)
aagaaggggaatgagagatagtttggaattctgtggctatttaggtgactgacataaatgggggcagaggacataatgaggttagttcttacggattcaaggcagatagtgttggtgaaa

SEQ ID NO: 85321 - DNA, 120 bp, Artificial Sequence
  ENSG00000084453_37 (sequence is synthesized)
cagtgagtgtcaaaattaggcgaggtggtgactgggctccctgatgacctcttgtcgtggagcaaaactgaataagcaaaaacttactcaagctcctgaggcccattcatcatccctatt

SEQ ID NO: 85322 - DNA, 120 bp, Artificial Sequence
  ENSG00000084453_38 (sequence is synthesized)
gatagatttgaggtgatctgagaaagctgagtcttgctttgtggacaattcacccacttgaactccctcaatggagcatcataggcccagagagacatggctatggacttagtaccttgg

SEQ ID NO: 85323 - DNA, 120 bp, Artificial Sequence
  ENSG00000084453_39 (sequence is synthesized)
catcacttttatcccctcatggaggagatggcattttactctgaaaacatagggttctcctttgacacttcttggtgggagaaagcaggtcagagaaagtgggtgttggagtgctttggg

SEQ ID NO: 85324 - DNA, 120 bp, Artificial Sequence
  ENSG00000084453_40 (sequence is synthesized)
atccctcatgacctcttttgttggtatacatgaagcctgggagtttagttcttattctgagcacttgtactactctcatgagggtagagataatggcatagcggacagacatggagaaga

SEQ ID NO: 85325 - DNA, 120 bp, Artificial Sequence
  ENSG00000084453_41 (sequence is synthesized)
gaaacaagagaacaggtagtgagaagtcgagagtcagtaattttcttacttaatattgtggggatcttacttaatacataaagttaatgaaactagaaatagtggtttaatatattactt

SEQ ID NO: 85326 - DNA, 120 bp, Artificial Sequence
  ENSG00000084453_42 (sequence is synthesized)
ataattcaaaaattaacctatatttacagatgcttacacagtttctttgtgaatccacctatggttttattttaattaattttttattgcaaagcaatgaaatgttgctttgtggagcca

SEQ ID NO: 85327 - DNA, 120 bp, Artificial Sequence
  ENSG00000084453_43 (sequence is synthesized)
gatagcattacagcaggtaaatgggtttctgctagatctccacattattggggagatgctcgaagacctcagaatatacacacccttaaggttcaagggctggggttgagctctccataa

SEQ ID NO: 85328 - DNA, 120 bp, Artificial Sequence
  ENSG00000084453_44 (sequence is synthesized)
ggaacttttcctcctcccagaagggcgatcattgtgtatatagacatggagacagaaccagaatgacttctgtgggtggaaatagtgccatcagaatcatttattattatgaaataaata

SEQ ID NO: 85329 - DNA, 120 bp, Artificial Sequence
  ENSG00000084453_45 (sequence is synthesized)
ttatttatctacattgaaaaaatactactcctcctaaaatcattaacttttcctcagatgattttaagaaatttgagtaatagcacacgaagtggtaaagacccttagtctttctggtat

SEQ ID NO: 85330 - DNA, 120 bp, Artificial Sequence
  ENSG00000084453_46 (sequence is synthesized)
attagaaaagccttttaatcagtctctggaaggacactagggattgcagctgaataaatatattaagaataacaaatcagttcaacaaggagtagagtctgaagtgggattttccgtgga

SEQ ID NO: 85331 - DNA, 120 bp, Artificial Sequence
  ENSG00000084453_47 (sequence is synthesized)
aattctcttatgtctgtactaacaataagaaagacaagacaaagactaagtaattaaagaaaagctcgaaatgttttgtaaccaaaagcttgaaatgttatgtaaccagaatgttatgta

SEQ ID NO: 85332 - DNA, 120 bp, Artificial Sequence
  ENSG00000084453_48 (sequence is synthesized)
accagagctgttagatcagatactggctgattcataggtgaacgtcctctttgtgggtcctctcatgcatccccattttcagaatgtaaataatttggctttgtagcccttccaaaaagg

SEQ ID NO: 85333 - DNA, 120 bp, Artificial Sequence
  ENSG00000084453_49 (sequence is synthesized)
gtactatcccacttctcctggcataaatcatacattgactgaacgttcaccatctaaaaatcactcatgctccttgaaccaaggtgattatcagagacagctcctggtagaagaggttgt

SEQ ID NO: 85334 - DNA, 120 bp, Artificial Sequence
  ENSG00000084453_50 (sequence is synthesized)
agatgttaaaagagtatgatttctatataagaaaatatagaaattgacagaatggttcttatttactgggcctggagaattcctgttctggcattcttagatccctcaaatttattacca

SEQ ID NO: 85335 - DNA, 120 bp, Artificial Sequence
  ENSG00000084453_51 (sequence is synthesized)
aggggaaaaggaaaaagaggcaagtaggcagtagggtaagctgttgtttgcttgccaaggaactggagagtgcaggtttcaagacaccttgaggaaattctcctgagcccttagccaaga

SEQ ID NO: 85336 - DNA, 120 bp, Artificial Sequence
  ENSG00000084453_52 (sequence is synthesized)
gaagagagcagaaaatgcttttctgtagaatcccaagaggcataaaagaggatgagtaactgggtcctgtgccaagttcccaacccctaagccttcccaacatggagaaactacaccagt

SEQ ID NO: 85337 - DNA, 120 bp, Artificial Sequence
  ENSG00000084453_53 (sequence is synthesized)
gtttaaaagtttctaggttggaggaacaaacttgagcatcaagggcagatgatttgttaacacagtcctgtgcagagggctccttcagaaggcatcccctgtgacccaaacacagtgagc

SEQ ID NO: 85338 - DNA, 120 bp, Artificial Sequence
  ENSG00000084453_54 (sequence is synthesized)
accttctactttctggccttatgccatcaatgcatccagctgcaatctatcctcaaacctggaatccatctcttgacttcccagccagaccaccttccatcccttcactgtgtcccaccc

SEQ ID NO: 85339 - DNA, 120 bp, Artificial Sequence
  ENSG00000084453_55 (sequence is synthesized)
tgcccagaatgcatgctgttctcccagagtctcatggaaataaggccttgcactgaaataggctgtgggaaacaaaaggataagcaggtctggaccagtctgtaatggtagcaggtgaaa

SEQ ID NO: 85340 - DNA, 120 bp, Artificial Sequence
  ENSG00000084453_56 (sequence is synthesized)
acaacttacggaaaaacacatgaattcattaggaaataaggtgacagatccccagctgctgaagaactagaatgtctattacactcatacaattgatgttttattttaatacaccagagc

SEQ ID NO: 85341 - DNA, 120 bp, Artificial Sequence
  ENSG00000084453_57 (sequence is synthesized)
taccacacaaaacttccttccatgtgaaaggctccagataaaattctgccatccctcctctcctcatgtcctcctgctcagacccaccttcatgcccctaaaccaatctgcatcatgcct

SEQ ID NO: 85342 - DNA, 120 bp, Artificial Sequence
  ENSG00000084453_58 (sequence is synthesized)
gtttcagagagtcatgggaagatgggcagtgcctccattgtcaccattccccacacctctgcacacttctgccccttcccctctagacgccacaacttcacagtcttactgttgtaaata

SEQ ID NO: 85343 - DNA, 120 bp, Artificial Sequence
  ENSG00000084453_59 (sequence is synthesized)
ttcctgcacagttagtaatgatcaaatgatcctgtggtcagaggcctctttggcagtgtcttcttacccttaagaaaggtcatgaaatccagaaggggcaacctttccaggagagctttg

SEQ ID NO: 85344 - DNA, 120 bp, Artificial Sequence
  ENSG00000084453_60 (sequence is synthesized)
gagtcatttctgtgtgagacactattgcataatcctgtaagattgcttttatatttaaggaatgatgttacttaacaaatgaacaaaaaaaattgcaaataaattttttaacaatgttta

SEQ ID NO: 85345 - DNA, 120 bp, Artificial Sequence
  ENSG00000084453_61 (sequence is synthesized)
gttgtttggaaggctgatgctctggttaaagagtcaagagaatctttttcttttaaattatttattctttagagcaattgggtgaagtatgtttttatgagcaaatttacctttctctcc

SEQ ID NO: 85346 - DNA, 120 bp, Artificial Sequence
  ENSG00000084453_62 (sequence is synthesized)
aagttctcccaaatttggaaaccctgagaaaccctgaaaatactctgtcctgggcttatatgccttagacacaactgggattgctgagctcaagggttgcagagcatcctactatgggaa

SEQ ID NO: 85347 - DNA, 120 bp, Artificial Sequence
  ENSG00000084453_63 (sequence is synthesized)
gaatgaggacataactcagattgttctggatatttccctcattgctgagaatgcagaatgtttctgaccaagaattgcaagcaagaacaggaaagagtggagtcggccaagatgtttctg

SEQ ID NO: 85348 - DNA, 120 bp, Artificial Sequence
  ENSG00000084453_64 (sequence is synthesized)
atgttccccttcctgtgtccatgtgcagaacaatattaaatactagataaacaaggtaatattatttcagaaaagcagtctagcaaatgtcccttctgtatgtaaaaagcacgttataaa

SEQ ID NO: 85349 - DNA, 120 bp, Artificial Sequence
  ENSG00000084453_65 (sequence is synthesized)
gcacgttataaatatgagaatgcagcacacaaagagatagagaatctcttttacttgaaaaggccctgtctgaccttaattacactattctttgtttgaagatttgaaaataaaatgaaa

SEQ ID NO: 85350 - DNA, 120 bp, Artificial Sequence
  ENSG00000084453_66 (sequence is synthesized)
gaaatagaaaaccaacaactaaatcttctctaacaccatgattttctaatctgtattaaagcgttccagggtagaagtaagacatatcaagatttaaaacataaatagcttggaacaccc

SEQ ID NO: 85351 - DNA, 120 bp, Artificial Sequence
  ENSG00000084453_67 (sequence is synthesized)
gatgtaccttttgaaatagaaaaccaacaactaaatcttctctaacaccatgattttctaatctgtattaaagcgttccagaagtaagacatatcaagatttaaaacataaatagcttgg

SEQ ID NO: 85352 - DNA, 120 bp, Artificial Sequence
  ENSG00000084453_68 (sequence is synthesized)
aattatttattctttagagcaattgggtgaagtatgtttttatgagcaaatttacctttctctccaagttctcccaaatttggaaaccatgtttctgttggcaataacatgtgcatttgt

SEQ ID NO: 85353 - DNA, 120 bp, Artificial Sequence
  ENSG00000084453_69 (sequence is synthesized)
gtgagaatctttcaacaaatggttaatatgatattttttacaatggcaatgcacgatcagatcattttcttattggagttaatgatagtaatccatgcttttcctgtatctttcctccat

SEQ ID NO: 85354 - DNA, 120 bp, Artificial Sequence
  ENSG00000084453_70 (sequence is synthesized)
ctgtcaatcaagccaatctatccaagctctaggcttattaatgaggttgggaacatatcacagggtgagtgaatttatgattgtatgtgcatgtgggtgtgtgtgcatgattgtctttgt

SEQ ID NO: 85355 - DNA, 120 bp, Artificial Sequence
  ENSG00000084453_71 (sequence is synthesized)
gatatccgagtagacattatcctatgaaagaaactacctacagtttcaggttgtattaaaatatgttatccatatatcttatactcccataactgagtaaaactaagagttgattataca

SEQ ID NO: 85356 - DNA, 120 bp, Artificial Sequence
  ENSG00000084453_72 (sequence is synthesized)
gtcaaaatggcctttatatgtttccccaatgggcttaagtttggcataactaaatcataatacatgataaattaattaatacataattcatatatttcatttatattgctatgtctaaaa

SEQ ID NO: 85357 - DNA, 120 bp, Artificial Sequence
  ENSG00000084453_73 (sequence is synthesized)
aataaagaacatcctaaaatgttttttcaaaattatcaaggtttattagattgaaataatttcaaatgtaaaatagtaatataattttacatatgctatttgatttgagactcatgagct

SEQ ID NO: 85358 - DNA, 120 bp, Artificial Sequence
  ENSG00000084453_74 (sequence is synthesized)
ttgagactcatgagcttcatctaagataagcattattatctccactttacagattaaattgagattcagagaaatttaatgataaaagcagttcatttcaaatctcttcaactacatcaa

SEQ ID NO: 85359 - DNA, 120 bp, Artificial Sequence
  ENSG00000084453_75 (sequence is synthesized)
tatagaaatggattttaaaattggaataaattttaaagattgcctccatctccaatgatgctgattcccagacagaatgtgtagaaagtcgcactgtgatctagtctgaatgcagtctct

SEQ ID NO: 85360 - DNA, 120 bp, Artificial Sequence
  ENSG00000084453_76 (sequence is synthesized)
aaactgctatgcaagtgctctttcaatcatattacaagcactggtcactttttatattagtagaatgcacttctttaattcaaatacctatgtttctggagctaaatgtattatctatat

SEQ ID NO: 85361 - DNA, 120 bp, Artificial Sequence
  ENSG00000084453_77 (sequence is synthesized)
tacaaatggaactttcagatttttatcttcatgctagtcctgtcttgctatttgctacctaatggatgaatcacagagattagttcatcttcatctttcgagatctaatagtatgtgaaa

SEQ ID NO: 85362 - DNA, 120 bp, Artificial Sequence
  ENSG00000084453_78 (sequence is synthesized)
acatgactccacatggtaggtgctcaattaatgcttgtttattgcctatatattcttctgagataaatcattgaaggagtggctatgtggtcatcaaagcaggtctcttttataccaaag

SEQ ID NO: 85363 - DNA, 120 bp, Artificial Sequence
  ENSG00000084453_79 (sequence is synthesized)
ctatagtaaacaggtcacacattgatgactggaaaatttctctttctattcatgggaggagaggaaatctaactggggattgagatgaaaagaagaaaaaaaggattgaatcctctttta

SEQ ID NO: 85364 - DNA, 120 bp, Artificial Sequence
  ENSG00000084453_80 (sequence is synthesized)
cataacgcagcaccattcacacgtaactttttctttgtcaagtgaaaagaatacttttgtggttatttccagcagagatactgatgttatatctccattccttatttgcatactagaatt

SEQ ID NO: 85365 - DNA, 120 bp, Artificial Sequence
  ENSG00000084453_81 (sequence is synthesized)
gtattttcccattatttctcaagtgcttggtaaatataagcatacatggcttccctaaccttggctttcaaagtgttgttcgttaaattcttagcagtcaacacaatattgaaggtaatg

SEQ ID NO: 85366 - DNA, 120 bp, Artificial Sequence
  ENSG00000084453_82 (sequence is synthesized)
gttgtacactgatacctatccaatttatattgctctctaaaggctctcattttatcctgcatgatttcatcatctcacgagtctgaagcctcacttcctctcaccaccagtctctggtct

SEQ ID NO: 85367 - DNA, 120 bp, Artificial Sequence
  ENSG00000084453_83 (sequence is synthesized)
ccaaaatcatatattttctccctctttacattttgctgaaacaatcttcttcatgtctcctaatgccttctctttggtaaatacaaatctaattttgaataaaactctttgttatttcta

SEQ ID NO: 85368 - DNA, 120 bp, Artificial Sequence
  ENSG00000084453_84 (sequence is synthesized)
aggatatttttagacctcccctacctcaatagagacccatggtgtgttgtaaaagtgtgttttctttacagaagctgtgttctttagtgggaaagtcttgcagaactcccctctgaacta

SEQ ID NO: 85369 - DNA, 89 bp, Artificial Sequence
  ENSG00000084453_85 (sequence is synthesized)
agagccaggtgcgggatatagtctcgtgctgcaccattttttaagcccgtcagaaaagcagggtattcgggtgggagtgacccgatttt

SEQ ID NO: 85370 - DNA, 120 bp, Artificial Sequence
  ENSG00000084453_86 (sequence is synthesized)
aagattataacctgctttatgcaaccatcagagccaaagaaacttaaccaaaggtttaaaacttacataaacaaagattcttttatttacaactctgcttctctgatgaacaagaagctg

SEQ ID NO: 85371 - DNA, 120 bp, Artificial Sequence
  ENSG00000084453_87 (sequence is synthesized)
cagcttacacgtttgaggtgccttattcatactggctactcaatatgtaattttttaaaaaatctgttggtcttacagtatggaagcaaaaatgaatggtgatgttggtgaatgctaaga

SEQ ID NO: 85372 - DNA, 76 bp, Artificial Sequence
  ENSG00000084453_88 (sequence is synthesized)
gagccaggtgcgggatataatcttgtggcgcgccgttttttaagcctgttggaagagaaatctttgcatattgcta

SEQ ID NO: 85373 - DNA, 120 bp, Artificial Sequence
  ENSG00000084453_89 (sequence is synthesized)
cctattcggccatcttgggggagctcgagattattaaccaaaaaatttcctgtccaaaagctgtgttctttagtgggaaagtcttgcagaactcccctctgaactaatactggaagcaaa

SEQ ID NO: 85374 - DNA, 120 bp, Artificial Sequence
  ENSG00000084463_0 (sequence is synthesized)
gcgaggtttcaagatggcggtagctgaggggttgaccgagagacccagttgaaggcctttacgaagtgaaagaggccgggagtcgccccctacccgcttctcgtagtcctgggagcacag

SEQ ID NO: 85375 - DNA, 120 bp, Artificial Sequence
  ENSG00000084463_1 (sequence is synthesized)
cagaagtgtttttctttttttaatgaacaagtaaaccatacaaattgtcaacatgggacggagatctacatcatccaccaagagtggaaaatttatgaaccccacagaccaagcccgaaa

SEQ ID NO: 85376 - DNA, 120 bp, Artificial Sequence
  ENSG00000084463_2 (sequence is synthesized)
ggaagcccggaagagagaattaaagaagaacaaaaaacagcgcatgatggttcgagctgcagttttaaagatgaaggatccaaaacagataatccgagacatggagaaattggatgaaat

SEQ ID NO: 85377 - DNA, 120 bp, Artificial Sequence
  ENSG00000084463_3 (sequence is synthesized)
ggagtttaacccagtgcaacagccacaattaaatgagaaagtactgaaagacaagcgtaaaaagctgcgtgaaacctttgaacgtattctacgactctatgaaaaagagaatccagatat

SEQ ID NO: 85378 - DNA, 120 bp, Artificial Sequence
  ENSG00000084463_4 (sequence is synthesized)
ttacaaagaattgagaaagctagaagtagaatatgaacagaagagggctcaacttagccaatattttgatgctgtcaagaatgctcagcatgtggaagtggagagtattcctttgccaga

SEQ ID NO: 85379 - DNA, 120 bp, Artificial Sequence
  ENSG00000084463_5 (sequence is synthesized)
tatgccacatgctccttccaacattttgatccaggacattccacttcctggtgcccagccaccctctatcctaaagaaaacctcagcctatggacctccaactcgggcagtttctatcct

SEQ ID NO: 85380 - DNA, 120 bp, Artificial Sequence
  ENSG00000084463_6 (sequence is synthesized)
tcctcttcttggacatggtgttccacgtttgccccctggcagaaaacctcctggccctccccctggtccacctcctcctcaagtcgtgcagatgtatggccgtaaagtgggttttgccct

SEQ ID NO: 85381 - DNA, 120 bp, Artificial Sequence
  ENSG00000084463_7 (sequence is synthesized)
agatcttccccctcgtaggcgagatgaagacatgttatatagtcctgaacttgcccagcgaggtcatgatgatgatgtttctagcaccagtgaagatgatggctatcctgaggacatgga

SEQ ID NO: 85382 - DNA, 120 bp, Artificial Sequence
  ENSG00000084463_8 (sequence is synthesized)
tcaagataagcatgatgacagtactgatgacagtgacaccgacaaatcagatggagaaagtgacggggatgaatttgtgcaccgtgataatggtgagagagacaacaatgaagaaaagaa

SEQ ID NO: 85383 - DNA, 120 bp, Artificial Sequence
  ENSG00000084463_9 (sequence is synthesized)
gtcaggtctgagtgtacggtttgcagatatgcctggaaaatcaaggaagaaaaagaagaacatgaaggaactgactcctcttcaagccatgatgcttcgtatggcaggtcaagaaatccc

SEQ ID NO: 85384 - DNA, 120 bp, Artificial Sequence
  ENSG00000084463_10 (sequence is synthesized)
tgaggagggacgggaagtagaggaattttcagaggacgatgatgaagatgattctgatgactctgaagcagaaaagcaatcacaaaagcagcataaagaggaatcccattctgatggcac

SEQ ID NO: 85385 - DNA, 120 bp, Artificial Sequence
  ENSG00000084463_11 (sequence is synthesized)
atccactgcttcttcacagcagcaggctccgccgcagtctgttcctccttctcagatacaagcacctcccatgccaggaccaccacctcttggaccaccacctgctccaccattacggcc

SEQ ID NO: 85386 - DNA, 120 bp, Artificial Sequence
  ENSG00000084463_12 (sequence is synthesized)
tcctgggccacctacaggccttcctcctggtccacctccaggagctcctccattcctgagaccacctggaatgccaggactccgagggcccttaccccgacttttacctccaggaccacc

SEQ ID NO: 85387 - DNA, 120 bp, Artificial Sequence
  ENSG00000084463_13 (sequence is synthesized)
accaggccgaccccctggccctcccccaggtccacctccaggtctgcctcctggtccccctcctcgtggacccccaccaaggctacctccccctgcacctccaggtattcctccacctcg

SEQ ID NO: 85388 - DNA, 120 bp, Artificial Sequence
  ENSG00000084463_14 (sequence is synthesized)
tcctggcatgatgcgcccacctttggtgcctccccttggacctgccccccctgggctgttcccaccagctcccttgccaaaccctggggttttaagtgccccacccaacttgattcagcg

SEQ ID NO: 85389 - DNA, 120 bp, Artificial Sequence
  ENSG00000084463_15 (sequence is synthesized)
acccaaggcggatgatacaagtgcagccaccattgagaagaaagccacagcaaccatcagtgccaagccacagatcactaatcccaaggcagagattactcgatttgtgcccactgcact

SEQ ID NO: 85390 - DNA, 120 bp, Artificial Sequence
  ENSG00000084463_16 (sequence is synthesized)
gagagtacgtcgggagaataaaggggctactgctgctccccaaagaaagtcagaggatgattctgctgtgcctcttgccaaagcagcacccaaatctggtccttctgttcctgtctcagt

SEQ ID NO: 85391 - DNA, 120 bp, Artificial Sequence
  ENSG00000084463_17 (sequence is synthesized)
acaaactaaggatgatgtctatgaggctttcatgaaagagatggaagggctactgtgacagcttttgatgccagaaaaggcttctgttcacaacagtggcccatggagaaagaggctctt

SEQ ID NO: 85392 - DNA, 120 bp, Artificial Sequence
  ENSG00000084463_18 (sequence is synthesized)
attaaacttagatgaaagagctgcttccattgtcagggtattttctaatttcagttcaaggaatatcctaaaatttagccttgttcagaatttactgcacataaaaaagggtatttcatc

SEQ ID NO: 85393 - DNA, 120 bp, Artificial Sequence
  ENSG00000084463_19 (sequence is synthesized)
gcagtgctgctaacatccattccctttcataccaccattttcaccctgtttcttcccctcctccagttctttggaaatttgtgatcgggggatcttagttgcttatttgttttgactctt

SEQ ID NO: 85394 - DNA, 120 bp, Artificial Sequence
  ENSG00000084463_20 (sequence is synthesized)
gtgtgctgtgggcactggagtagagatttctggagaaaaaaaaacagtttatttcatcttgccttttgtgtttgagttatttttaatattttcctgtaaatattttgtaatattttactt

SEQ ID NO: 85395 - DNA, 120 bp, Artificial Sequence
  ENSG00000084463_21 (sequence is synthesized)
gtaatgaaatggatcacaatgtcatttcctaatacaaggcaggatatgtgggaagaatatgtacaattatttgattaaaattatttcccactgacctaaactttcagtgatttgtgggaa

SEQ ID NO: 85396 - DNA, 120 bp, Artificial Sequence
  ENSG00000084463_22 (sequence is synthesized)
aaataaataaatgttctacaccaagatactctgtgttactgataatatgtaaacataatacctattttatggacagaaaaagttaaatatttaaaacttgggtctttaaggaactgcctt

SEQ ID NO: 85397 - DNA, 120 bp, Artificial Sequence
  ENSG00000084463_23 (sequence is synthesized)
tctggtacagaatgagaatcttactgaaaacatggtaaaaactacattttaaattttaagggataaaaaggagtaattatttcccttttttaagattgtcatactggctttagagaaact

SEQ ID NO: 85398 - DNA, 120 bp, Artificial Sequence
  ENSG00000084463_24 (sequence is synthesized)
gagaggtgttaagaatagtatggtttggcttttattatttaaaagatgtcttaccttcagtggttacttattccagagcttcttgaactgatacgagttgaatggcaaaagtcattttaa

SEQ ID NO: 85399 - DNA, 120 bp, Artificial Sequence
  ENSG00000084463_25 (sequence is synthesized)
accatttttaagctataaaagaatcagaagaggttagctttttttcctttctgaattggtgggtttggtgtgcttttatattaaaatatgaatgaataagagtgcttaacattaatttgc

SEQ ID NO: 85400 - DNA, 120 bp, Artificial Sequence
  ENSG00000084463_26 (sequence is synthesized)
atttataccattttctttacaaagtgctttaatgtaaactcatctaccaatttagactaactcttagtaagtttaatgttaatttaatgactaactcatctaccaattaaccctatagat

SEQ ID NO: 85401 - DNA, 120 bp, Artificial Sequence
  ENSG00000084463_27 (sequence is synthesized)
aacttttctgggtattttccccattttacattagagagtattgaaacttaaaaaggactcgtgatttatccagtgatccaaagtgtgtatttcataaacacatacacacagtgcgtgcat

SEQ ID NO: 85402 - DNA, 120 bp, Artificial Sequence
  ENSG00000084463_28 (sequence is synthesized)
tgtttaggcatacgttactttccacagtatctcaaatgccttttacatgaatcccatactatcaaaaattggtgataacctaaaatgtagtgcaataatacaataaggcatttattttct

SEQ ID NO: 85403 - DNA, 120 bp, Artificial Sequence
  ENSG00000084463_29 (sequence is synthesized)
tagagttgagttgatggatttttagatttttattcaagatcttttgtttgtttggctttgcttggaagatactgatttattctttcatattaaagcaaatcctgccaaagcactaaatag

SEQ ID NO: 85404 - DNA, 120 bp, Artificial Sequence
  ENSG00000084463_30 (sequence is synthesized)
accgttttgggttggttttttagtgtaatattaatacgggtccacaggtgaattgagtctgttcagatgtaaggattgaaccttatgttatcaatccttgacaccatccttgataactta

SEQ ID NO: 85405 - DNA, 120 bp, Artificial Sequence
  ENSG00000084463_31 (sequence is synthesized)
cggatatcaaggatcaaaccatatggtatcaatattgttagttattcagcataaacagaattatttcccaatacttgatctgaaatatttttaatggtcttacttgaaacttatattctt

SEQ ID NO: 85406 - DNA, 120 bp, Artificial Sequence
  ENSG00000084463_32 (sequence is synthesized)
aatggtcttacttgaaacttatattctttctgggagtgatgtttttatcatttttccatggagacaggttctaactctgttgcccaggctgcagtgcagtgatgtgatcatagctcactg

SEQ ID NO: 85407 - DNA, 120 bp, Artificial Sequence
  ENSG00000084463_33 (sequence is synthesized)
ctctggcctcagcctcccaagtagttggaacttcagatacgtgccaccacaaccagctaatttattttttagagatgaggtctcgctatgttgcccagtctggtctcctagcctcaagtg

SEQ ID NO: 85408 - DNA, 120 bp, Artificial Sequence
  ENSG00000084463_34 (sequence is synthesized)
atcttcccatctcagccttcagttggagatttctgatttatgttaatataagaaagctgttgatagtttatcataaaggcatttccttatattgctagtataattttctgaaaattagtg

SEQ ID NO: 85409 - DNA, 120 bp, Artificial Sequence
  ENSG00000084463_35 (sequence is synthesized)
gtgtgacaatacatcagctgcatccacaggaaaggggaattaattagcagttctgattctgggtacacttgttatgatcataatttacataatattttcatgaaaatggtcagctcacag

SEQ ID NO: 85410 - DNA, 120 bp, Artificial Sequence
  ENSG00000084463_36 (sequence is synthesized)
ctatgaaatgtaaatgatagaaatctttaatcatgtatatggatagacttgttactatttccttatcaaagtgtcactttagggacagcagttgcccctttaaattaaggatcaccacaa

SEQ ID NO: 85411 - DNA, 120 bp, Artificial Sequence
  ENSG00000084463_37 (sequence is synthesized)
taatactctgccatgtcatggaatcagcatgaagccctggatgctatccaagattctgtttcagttctcattttgtatattcttgtttgtgctcttgattaaaatatctccttatatata

SEQ ID NO: 85412 - DNA, 120 bp, Artificial Sequence
  ENSG00000084463_38 (sequence is synthesized)
aggcgtaagtaaaacagaacagcatgatggcatttgatgcttggatttaatgttagtttcagggagacaaaatggagtgctagagggctgttgcaaactggagaccccagataccagaat

SEQ ID NO: 85413 - DNA, 120 bp, Artificial Sequence
  ENSG00000084463_39 (sequence is synthesized)
ttaattacaagaccagcagtgataggaggaataaattatatattcagggtttgtatgggcacattaagactttaaatatgcaaagaaattagtacccgtattttatttttcaaatttgat

SEQ ID NO: 85414 - DNA, 120 bp, Artificial Sequence
  ENSG00000084463_40 (sequence is synthesized)
tgacttgcaaagtagaattggctgaaatctttctttttatattggaaattttgagcaaattagttttgcgagcccttgtttcgcgttttatgttatgtttttccttcagattcatagttg

SEQ ID NO: 85415 - DNA, 120 bp, Artificial Sequence
  ENSG00000084623_0 (sequence is synthesized)
ataatccggaagtgacctcgaaaccttttccggtcttactcacgttgcggccttcctcgcgtcacagccgggatgaagccgatcctactgcagggccatgagcggtccattacgcagatt

SEQ ID NO: 85416 - DNA, 120 bp, Artificial Sequence
  ENSG00000084623_1 (sequence is synthesized)
aagtataaccgcgaaggagacctcctctttactgtggccaaggaccctatcgtcaatgtatggtactctgtgaatggtgagaggctgggcacctacatgggccataccggagctgtgtgg

SEQ ID NO: 85417 - DNA, 120 bp, Artificial Sequence
  ENSG00000084623_2 (sequence is synthesized)
tgtgtggacgctgactgggacaccaagcatgtcctcactggctcagctgacaacagctgtcgtctctgggactgtgaaacaggaaagcagctggcccttctcaagaccaattcggctgtc

SEQ ID NO: 85418 - DNA, 120 bp, Artificial Sequence
  ENSG00000084623_3 (sequence is synthesized)
cggacctgcggttttgactttgggggcaacatcatcatgttctccacggacaagcagatgggctaccagtgctttgtgagcttttttgacctgcgggatccgagccagattgacaacaat

SEQ ID NO: 85419 - DNA, 120 bp, Artificial Sequence
  ENSG00000084623_4 (sequence is synthesized)
gagccctacatgaagatcccttgcaatgactctaaaatcaccagtgctgtttggggacccctgggggagtgcatcatcgctggccatgagagtggagagctcaaccagtatagtgccaag

SEQ ID NO: 85420 - DNA, 120 bp, Artificial Sequence
  ENSG00000084623_5 (sequence is synthesized)
tctggagaggtgttggtgaatgttaaggagcactcccggcagatcaacgacatccagttatccagggacatgaccatgtttgtgaccgcgtccaaggacaacacagccaagctttttgac

SEQ ID NO: 85421 - DNA, 120 bp, Artificial Sequence
  ENSG00000084623_6 (sequence is synthesized)
cagaagactttccggacagaacgtcctgtcaactcagctgccctctcccccaactatgaccatgtggtcctgggcggtggtcaggaagccatggatgtaaccacaacctccaccaggatt

SEQ ID NO: 85422 - DNA, 120 bp, Artificial Sequence
  ENSG00000084623_7 (sequence is synthesized)
ggcaagtttgaggccaggttcttccatttggcctttgaagaagagtttggaagagtcaagggtcactttggacctatcaacagtgttgccttccatcctgatggcaagagctacagcagc

SEQ ID NO: 85423 - DNA, 120 bp, Artificial Sequence
  ENSG00000084623_8 (sequence is synthesized)
cagcggcggcgaagatggttacgtccgtatccattacttcgacccacagtacttcgaatttgagtttgaggcttaagaagctggatctcctgccgggcgtggtggctcatgcctgtaatc

SEQ ID NO: 85424 - DNA, 120 bp, Artificial Sequence
  ENSG00000084623_9 (sequence is synthesized)
ccgtctcaaaaaaaaaaaagaagaaggtggatctccaaccaggccagagaagattctcacagaaggttttgaactctaagaaataaattggtttggtaataaatggcttctggtcagata

SEQ ID NO: 85425 - DNA, 120 bp, Artificial Sequence
  ENSG00000084623_10 (sequence is synthesized)
ggatggtgagtttcagagttaggggtattgcagtgggggtcctgggctgaggctggggcccaattccgagcactgacgttactgtcttgtccccacagaagccgatcctactgcagggcc

SEQ ID NO: 85426 - DNA, 120 bp, Artificial Sequence
  ENSG00000084628_0 (sequence is synthesized)
agtgctgctctgcgctgcgccgcgctcggggctcgctctccttgctccgcgctccccgccagccgccccggggcaggaggcgcgcctgacggacggcccgctagacaaaggaggcgcggc

SEQ ID NO: 85427 - DNA, 120 bp, Artificial Sequence
  ENSG00000084628_1 (sequence is synthesized)
ctagacaaaggaggcgcggctcggcggggccagcgcgcggacggacggaccatggactcggagcgcgggcggccggccccagccttggggaccggacactcccgggcccggccctaggcg

SEQ ID NO: 85428 - DNA, 80 bp, Artificial Sequence
  ENSG00000084628_2 (sequence is synthesized)
ccgcggagcaagaagggcgccgcggcgtgcggcccgcgcagcccccggagccatgggcaagtgcagcgggcgctgcacgc

SEQ ID NO: 85429 - DNA, 120 bp, Artificial Sequence
  ENSG00000084628_3 (sequence is synthesized)
ctgcacgctggtcgccttctgctgcctgcagctggtggctgcgctggagcggcagatctttgacttcctgggctaccagtgggctcccatcctagccaacttcctgcacatcatggcagt

SEQ ID NO: 85430 - DNA, 120 bp, Artificial Sequence
  ENSG00000084628_4 (sequence is synthesized)
catcctgggcatctttggcaccgtgcagtaccgctcccggtacctcatcctgtatgcagcctggctggtgctctgggttggctggaatgcatttatcatctgcttctacttggaggttgg

SEQ ID NO: 85431 - DNA, 120 bp, Artificial Sequence
  ENSG00000084628_5 (sequence is synthesized)
acagctgtcccaggaccgggacttcatcatgaccttcaacacatccctgcaccgctcctggtggatggagaatgggccaggctgcctggtgacacctgttctgaactcccgcctggctct

SEQ ID NO: 85432 - DNA, 120 bp, Artificial Sequence
  ENSG00000084628_6 (sequence is synthesized)
ggaggaccaccatgtcatctctgtcactggctgcctgcttgactacccctacattgaagccctcagcagcgccctgcagatcttcctggcactgttcggcttcgtgttcgcctgctacgt

SEQ ID NO: 85433 - DNA, 120 bp, Artificial Sequence
  ENSG00000084628_7 (sequence is synthesized)
gagcaaagtgttcctggaggaggaggacagctttgacttcatcggcggctttgactcctacggataccaggcgccccagaagacgtcgcatttacagctgcagcctctgtacacgtcggg

SEQ ID NO: 85434 - DNA, 120 bp, Artificial Sequence
  ENSG00000084628_8 (sequence is synthesized)
cagcctctgtacacgtcggggtagcctctgccccgcgcccaccccggcgcctcgccctgggctgaccgcagctgccgcgagctcgggccaaggcgcaggcgtgtccccctggtggcccgc

SEQ ID NO: 85435 - DNA, 120 bp, Artificial Sequence
  ENSG00000084628_9 (sequence is synthesized)
ccaaccccgcgtctgcatctggagatgcggacttggacgtggacttggacttggacttggatttgagcttggctcttcgcagcccggacttcggaggagtggggcggggcgggggagggg

SEQ ID NO: 85436 - DNA, 120 bp, Artificial Sequence
  ENSG00000084628_10 (sequence is synthesized)
caccacgggttttttgttttttgtttgtttgtttttaatctcagccttggcgtgagctggggccttcctctcttctccagcctctccctttcactcttcacccagcatcctgcccccctg

SEQ ID NO: 85437 - DNA, 120 bp, Artificial Sequence
  ENSG00000084628_11 (sequence is synthesized)
tccaaaaacagcaggacatcagacccatcccatcccaccacactcactcaccagctctggggaaagctactgtgaactaggagcaggattcctgggttctaatcgcaggtccatcactga

SEQ ID NO: 85438 - DNA, 120 bp, Artificial Sequence
  ENSG00000084628_12 (sequence is synthesized)
ttccgcacctcaagtaattaatcccttagcaaatggactcttttagacttctcatttaactcaattccctgagctagactgggattaaaattctcattttgcagtacattaaaactgagg

SEQ ID NO: 85439 - DNA, 120 bp, Artificial Sequence
  ENSG00000084628_13 (sequence is synthesized)
cccagagatgtgatttgcttgaggccacacagctagatttttggtggaagtgggccttgaacacagtgtactttctgcagtttctgactgtaaaacccagtgtctgctctctgagttcca

SEQ ID NO: 85440 - DNA, 120 bp, Artificial Sequence
  ENSG00000084628_14 (sequence is synthesized)
tttccaagcccccctccatcttggacctatgtggtctccaccatattcacacaccaccaccaccacttgccaatgcctctcttaaagcaatatacccattcgttctcttattgggaactg

SEQ ID NO: 85441 - DNA, 120 bp, Artificial Sequence
  ENSG00000084628_15 (sequence is synthesized)
gatggatgaagccccaaattcagccccacccacagagaagccttcctacactcagcctctgtccacccttggcaaatctttcaagctctctcctccaggaaagtggggccccaactcagt

SEQ ID NO: 85442 - DNA, 120 bp, Artificial Sequence
  ENSG00000084628_16 (sequence is synthesized)
cactccacccccttccaggtccctgaggctggttctactgtatccccatcacctccacaactccactcacccctgacggctccatccacctcaccagttggaaggcttgtggtttcagag

SEQ ID NO: 85443 - DNA, 120 bp, Artificial Sequence
  ENSG00000084628_17 (sequence is synthesized)
aggagcaatgctggtcagcgctgcccagactccagtgtttacagatcaccagcatttacaaccaatccaatggccagaagcctcctctaacaagcccagaaggagttctgaaggggcaga

SEQ ID NO: 85444 - DNA, 120 bp, Artificial Sequence
  ENSG00000084628_18 (sequence is synthesized)
tgggggtgtgagtagtcggggagtcgggattgccagcaccctcacccttccttgggggcaagtagaggtgagaacactttccccacctccctccacagacactcctgaggacgctgcatc

SEQ ID NO: 85445 - DNA, 120 bp, Artificial Sequence
  ENSG00000084628_19 (sequence is synthesized)
ccacgcactgcctggtgcgtccatagagagaggatcaggtctcagcatttcatctgtgaaagaggcatggccctgggttagaaaggagggcaggagacatggaggaactggggggcaccc

SEQ ID NO: 85446 - DNA, 120 bp, Artificial Sequence
  ENSG00000084628_20 (sequence is synthesized)
agatggtgcagatggtttgcacacctgagcctgtctgtggtgaccattccgctcctctcccactaccctccaatctatcattccctactctctaaggccaaaatatcctgagcaaggctg

SEQ ID NO: 85447 - DNA, 120 bp, Artificial Sequence
  ENSG00000084628_21 (sequence is synthesized)
gcaaccccaccccaccatcccaaatgcaagcagccaggcccaggagttcctctggcccccacaggcatggagctcccagctggtgggtacagcttgagaggggggcagctccctcaggct

SEQ ID NO: 85448 - DNA, 120 bp, Artificial Sequence
  ENSG00000084628_22 (sequence is synthesized)
aagctactgcccttcactgggccagccctgcctccagccctcacctctctcaccccaactctcccccaagcccctttctactcaacgggtgtagccactggtgctttgaagccttttgtt

SEQ ID NO: 85449 - DNA, 120 bp, Artificial Sequence
  ENSG00000084628_23 (sequence is synthesized)
tttataagatggtttttgcaaggggaccaggttctcttttcactgggaccttgcaaggaggggagtgctctcctggtttctgtgcaggcgggttgattaaagatggtgttttcttctcta

SEQ ID NO: 85450 - DNA, 120 bp, Artificial Sequence
  ENSG00000084628_24 (sequence is synthesized)
tcactcctatcacctttcagcccaccccaaagtgatgatcaggcttaaggaccccccagcatccctttggtagtgaaggactggattgttctgaggcttatgcctcatcaccatggtaac

SEQ ID NO: 85451 - DNA, 120 bp, Artificial Sequence
  ENSG00000084628_25 (sequence is synthesized)
tggtgccacctgctccccaaggtcaagcaggaatccctgtccttccctttcaggggggtgacagtggcctcagcctgtctcttccacaggtggctgcgctggagcggcagatctttgact

SEQ ID NO: 85452 - DNA, 120 bp, Artificial Sequence
  ENSG00000084628_26 (sequence is synthesized)
ctctgcacagttcctgccttctaagtaacaaagacacagcaaggccggttatgatttacaatcaccacagccctcagattagtgtttcggagctgacgcaaccaggtggctgcgctggag

SEQ ID NO: 85453 - DNA, 120 bp, Artificial Sequence
  ENSG00000084636_0 (sequence is synthesized)
agtccccggcaggcgtgcgccgggcagcagacagccgggagagctcgagcgccaggaagctggggacccgtgaccgtcacggagagatagagaacccctagcggacctgaggaacctggg

SEQ ID NO: 85454 - DNA, 120 bp, Artificial Sequence
  ENSG00000084636_1 (sequence is synthesized)
ctctgcttcctccgcctgctgcctggactgctcagtgaggtggggggatccccggccaccggtgctgtggctgtagctgacctctttggaccgggatgtgggtatcctgggctcctggcc

SEQ ID NO: 85455 - DNA, 120 bp, Artificial Sequence
  ENSG00000084636_2 (sequence is synthesized)
tgtggctgctcggtctttgggctaccttcggccatggggcaaatacaggtgcacaatgcccaccttcacagcaggaaggactcaaattggaacacagtagtagcctgccagccaacgtga

SEQ ID NO: 85456 - DNA, 120 bp, Artificial Sequence
  ENSG00000084636_3 (sequence is synthesized)
ctggcttcaacctcatccaccgactcagcctcatgaagacgtctgccatcaagaagatccgcaaccccaaggggcctctcatcctgcgcctgggggcggcccccgtgacccagcccacgc

SEQ ID NO: 85457 - DNA, 120 bp, Artificial Sequence
  ENSG00000084636_4 (sequence is synthesized)
gaagagtattccctcggggtctcccggaggagtttgccctggtgctgacactactgctgaagaaacacacccaccagaagacgtggtatctgtttcaagtgaccgatgcaaatgggtatc

SEQ ID NO: 85458 - DNA, 120 bp, Artificial Sequence
  ENSG00000084636_5 (sequence is synthesized)
cacagatatccctggaagtcaacagccaagagcggagcctggagctcagggcccagggccaggatggcgactttgtgtcctgcatcttcccagtgccccagctcttcgacttgcgttggc

SEQ ID NO: 85459 - DNA, 120 bp, Artificial Sequence
  ENSG00000084636_6 (sequence is synthesized)
acaagctgatgctgagtgtggctggacgtgtggcctctgtgcacgtggactgcagctcagcctcctcccagcctctggggccccgacgacccatgaggcctgtgggccatgtatttctag

SEQ ID NO: 85460 - DNA, 120 bp, Artificial Sequence
  ENSG00000084636_7 (sequence is synthesized)
gcttggatgctgagcagggcaagcctgtctcgtttgaccttcagcaggtgcacatctactgtgacccggagctcgtgctggaggagggctgctgtgagattttaccagcagggtgccccc

SEQ ID NO: 85461 - DNA, 120 bp, Artificial Sequence
  ENSG00000084636_8 (sequence is synthesized)
cagagacctccaaggcccgccgggacacccagagcaatgagctcattgagatcaatccacagtctgaaggcaaggtctacacccgctgcttctgcctggaggagcctcaaaacagcgagg

SEQ ID NO: 85462 - DNA, 120 bp, Artificial Sequence
  ENSG00000084636_9 (sequence is synthesized)
tggatgcccagctgacgggaagaatcagccagaaggcagaaaggggagcaaaggtccatcaggagacagcagccgatgagtgtccgccctgtgtccatggtgcccgggacagcaatgtca

SEQ ID NO: 85463 - DNA, 120 bp, Artificial Sequence
  ENSG00000084636_10 (sequence is synthesized)
cacttgctccctctggccccaagggagggaaaggtgagcggggcctgcctggtccaccaggctccaagggagagaagggagcacggggcaatgactgtgttcgaatctccccggatgccc

SEQ ID NO: 85464 - DNA, 120 bp, Artificial Sequence
  ENSG00000084636_11 (sequence is synthesized)
cacttcagtgtgcagaaggcccgaagggagagaagggggagtcaggagctctgggaccctcaggactcccaggctcaacaggcgagaagggccagaaaggcgagaagggcgacggaggca

SEQ ID NO: 85465 - DNA, 120 bp, Artificial Sequence
  ENSG00000084636_12 (sequence is synthesized)
tcaagggcgtgccgggaaagccaggccgggacggccggccaggagagatctgtgtcattgggcccaaagggcagaagggagaccctggctttgttgggcctgaggggctggcaggagagc

SEQ ID NO: 85466 - DNA, 120 bp, Artificial Sequence
  ENSG00000084636_13 (sequence is synthesized)
ctgggccccccggcctccctggaccccctgggataggactgcctgggaccccgggggatccaggtggcccaccaggccccaagggagacaagggcagctcggggatcccaggaaaggaag

SEQ ID NO: 85467 - DNA, 120 bp, Artificial Sequence
  ENSG00000084636_14 (sequence is synthesized)
gccctggtgggaaacctgggaagccaggtgtgaagggagagaagggtgacccctgtgaagtgtgcccaacactgcctgaagggttccagaactttgttggacttcctggaaagccagggc

SEQ ID NO: 85468 - DNA, 120 bp, Artificial Sequence
  ENSG00000084636_15 (sequence is synthesized)
ccaaaggggagcctggtgatcctgtaccagccaggggagaccctggcatccaaggcatcaaaggagagaagggggagccctgcttgtcctgcagctcggttgtaggggcccagcatcttg

SEQ ID NO: 85469 - DNA, 120 bp, Artificial Sequence
  ENSG00000084636_16 (sequence is synthesized)
tgtcctccacaggggccagtggagatgtgggttcccctggctttggtctgcctggccttccgggtagagctggggttccagggctgaaaggagagaagggtaacttcggggaggcagggc

SEQ ID NO: 85470 - DNA, 120 bp, Artificial Sequence
  ENSG00000084636_17 (sequence is synthesized)
cagctggcagtccagggccaccaggaccagtggggccagcaggcatcaaaggggcgaagggggagccctgtgagccgtgcccagccctgtccaaccttcaggatggggatgtccgtgtgg

SEQ ID NO: 85471 - DNA, 120 bp, Artificial Sequence
  ENSG00000084636_18 (sequence is synthesized)
tggccttgcctggcccatccggagagaagggggaacctgggcctccaggctttggcttgccaggaaaacagggcaaggctggagagcgtggactgaaggggcagaagggtgatgctggga

SEQ ID NO: 85472 - DNA, 120 bp, Artificial Sequence
  ENSG00000084636_19 (sequence is synthesized)
atcctggagaccctggaacgccgggcaccacagggcggccaggactgtcaggagagcctggagttcagggccccgcggggccaaaaggagaaaagggtgatggctgcactgcctgcccca

SEQ ID NO: 85473 - DNA, 120 bp, Artificial Sequence
  ENSG00000084636_20 (sequence is synthesized)
gcctgcaggggacagtgacagacatggcaggacggcctgggcagcccggccccaaaggagagcagggccccgaaggcgtgggccgacctggtaaacccggccaacccggtctaccaggag

SEQ ID NO: 85474 - DNA, 120 bp, Artificial Sequence
  ENSG00000084636_21 (sequence is synthesized)
ttcaagggcccccaggactgaagggcgtgcagggagagccagggcctccaggaaggggagtccagggaccccagggggagcctggagccccgggtttgcctggcattcagggacttccgg

SEQ ID NO: 85475 - DNA, 120 bp, Artificial Sequence
  ENSG00000084636_22 (sequence is synthesized)
gccccactggagagaagggtgcccagggatctccaggggtgaaaggagccaccggacctgtgggacctcctggggccagtgtctctgggcctccgggccgtgatgggcagcaaggacaga

SEQ ID NO: 85476 - DNA, 120 bp, Artificial Sequence
  ENSG00000084636_23 (sequence is synthesized)
cgggactcagaggaacaccaggtgaaaaaggaccacgaggagagaagggtgagccaggggagtgctcctgcccctctcaaggagacctcatcttctctggcatgccgggtgctccgggac

SEQ ID NO: 85477 - DNA, 120 bp, Artificial Sequence
  ENSG00000084636_24 (sequence is synthesized)
tttggatgggcagctcctggcagccgggcccgcagggtccaccaggtattcccggaccaccaggcccccctggagtacctgggctgcagggagtgcctggaaacaacggtttgccaggac

SEQ ID NO: 85478 - DNA, 120 bp, Artificial Sequence
  ENSG00000084636_25 (sequence is synthesized)
agcctgggctcactgcagaactgggatccttaccaattgaacagcacctccttaagagtatctgcggggactgtgtccaggggcagagggcccacccagggtacctcgtggagaagggag

SEQ ID NO: 85479 - DNA, 120 bp, Artificial Sequence
  ENSG00000084636_26 (sequence is synthesized)
agaagggagaccagggcatccctggtgtgccaggcctcgacaactgcgcccagtgctttttgtcactggagcgcccaagagccgaggaggcccggggtgacaacagtgagggagatcctg

SEQ ID NO: 85480 - DNA, 120 bp, Artificial Sequence
  ENSG00000084636_27 (sequence is synthesized)
gctgtgttgggagcccaggcctacctggtcctccgggattgccaggccagagaggagaagagggtccgcctggcatgaggggctccccgggtcctccaggccctatcggccccccaggtt

SEQ ID NO: 85481 - DNA, 120 bp, Artificial Sequence
  ENSG00000084636_28 (sequence is synthesized)
ttcctggtgctgttggctcccccggattgcctggccttcaaggagagcgaggtctcacgggcctgactggagacaagggggagccgggtcctccagggcaaccaggttacccaggtgcca

SEQ ID NO: 85482 - DNA, 120 bp, Artificial Sequence
  ENSG00000084636_29 (sequence is synthesized)
cgggccccccaggactgcctggcatcaagggggagcgtggctacaccgggtcagcgggagagaaaggagagccgggccccccaggatctgaaggcctcccaggccccccaggcccagcgg

SEQ ID NO: 85483 - DNA, 120 bp, Artificial Sequence
  ENSG00000084636_30 (sequence is synthesized)
gtcccagaggagagcgaggaccccaaggtaactccggtgagaagggcgaccagggatttcaaggccagccaggctttccgggcccaccgggtccccctggattcccaggcaaagttggat

SEQ ID NO: 85484 - DNA, 120 bp, Artificial Sequence
  ENSG00000084636_31 (sequence is synthesized)
cacctggcccacctggccctcaagcagagaagggcagcgaagggattcgaggcccatcaggcctgcctggctcccctgggccaccgggacctcctgggattcagggccccgccggtctgg

SEQ ID NO: 85485 - DNA, 120 bp, Artificial Sequence
  ENSG00000084636_32 (sequence is synthesized)
atggtttggatgggaaggacggcaagcctggcttgaggggggaccctggtcctgctggcccccctggactcatgggaccaccgggctttaaggggaaaacaggacatcctggcctcccag

SEQ ID NO: 85486 - DNA, 120 bp, Artificial Sequence
  ENSG00000084636_33 (sequence is synthesized)
gacctaagggtgactgtggcaaaccaggtccccctggcagcactggccggcctggcgcagagggtgaacctggtgccatgggaccccagggaagacccggtcccccgggacacgttgggc

SEQ ID NO: 85487 - DNA, 120 bp, Artificial Sequence
  ENSG00000084636_34 (sequence is synthesized)
caccagggcctccaggccagccaggaccagctgggatctctgcagtgggtctgaaaggagaccgaggagccaccggagaaaggggccttgcaggcctcccaggccagcccggcccccctg

SEQ ID NO: 85488 - DNA, 120 bp, Artificial Sequence
  ENSG00000084636_35 (sequence is synthesized)
gacaccctggccccccaggcgaacctggtacggatggtgcagctggcaaagagggaccccctggaaagcagggattctatggacctcctggtcccaagggtgatccaggagctgcaggac

SEQ ID NO: 85489 - DNA, 120 bp, Artificial Sequence
  ENSG00000084636_36 (sequence is synthesized)
agaagggccaggcaggagagaaggggagagccggcatgcctggtggacctggcaagagtggttccatggggcctgttgggccaccgggccctgcaggagagagaggccaccctggagctc

SEQ ID NO: 85490 - DNA, 120 bp, Artificial Sequence
  ENSG00000084636_37 (sequence is synthesized)
cggggccttcggggagccctggcttgcctggtgtgcctggctccatgggagacatggtgaattatgatgaaatcaagaggttcatcagacaagagatcattaaaatgtttgatgagagaa

SEQ ID NO: 85491 - DNA, 120 bp, Artificial Sequence
  ENSG00000084636_38 (sequence is synthesized)
tggcttactacacctccaggatgcagttccccatggagatggcggcagctccgggacgaccagggcctccagggaaggatggtgctccgggcaggccaggtgctccagggtcacctgggc

SEQ ID NO: 85492 - DNA, 120 bp, Artificial Sequence
  ENSG00000084636_39 (sequence is synthesized)
tccctggtcagattggcagagaaggacggcagggcttgccaggagtaagaggattgcctggtaccaaaggtgaaaaaggggacattggtattggcattgcaggagaaaatggtcttcccg

SEQ ID NO: 85493 - DNA, 120 bp, Artificial Sequence
  ENSG00000084636_40 (sequence is synthesized)
gccccccaggtcctcaaggtcctccaggctatggcaagatgggtgcaacaggaccaatgggccagcaaggcatccctggcatccctgggcccccgggtcccatgggccagccaggcaagg

SEQ ID NO: 85494 - DNA, 120 bp, Artificial Sequence
  ENSG00000084636_41 (sequence is synthesized)
ctggccactgtaatccctctgactgctttggggccatgccgatggagcagcagtacccacccatgaaaaccatgaaggggccttttggctgaaattccccacctgcctttggatgaaaga

SEQ ID NO: 85495 - DNA, 120 bp, Artificial Sequence
  ENSG00000084636_42 (sequence is synthesized)
ctccgttgggaataaatggccaaagcttataggactctgtgacaggttgtgaatgttttttttgttgttgttgttgtttttaattgctgttaatattttttaaataataaagaaacaaaa

SEQ ID NO: 85496 - DNA, 120 bp, Artificial Sequence
  ENSG00000084636_43 (sequence is synthesized)
ctatctgccctttcccttccagtgggttcctctggtgctgcagccagagctccctgttgccctccttttcccgtttagtcccaggaacaaaaaagggcattttgggtacaggggcatata

SEQ ID NO: 85497 - DNA, 89 bp, Artificial Sequence
  ENSG00000084636_44 (sequence is synthesized)
ccaggaacaaaaaagggcattttgggtacaggggcatatacctgtaatcctagctattcaaggggctgaggtgggatctaagcaacata

SEQ ID NO: 85498 - DNA, 120 bp, Artificial Sequence
  ENSG00000084636_45 (sequence is synthesized)
gagaagctggcgttcggagccagcctttccagcctcactcctcgtggcttgtcctcgcagtgggtgcaggttgcaggaacagccgggacagatggtccctctgcgggcccctcgcctcca

SEQ ID NO: 85499 - DNA, 120 bp, Artificial Sequence
  ENSG00000084636_46 (sequence is synthesized)
cccacatgcctgtctggaaagtggctttggcttagctgtaccagagcttcttcctggaggaaactcaaagccaattgttgggaagtatctgcggggactgtgtccaggggcagagggccc

SEQ ID NO: 85500 - DNA, 120 bp, Artificial Sequence
  ENSG00000084636_47 (sequence is synthesized)
agtcccctgtcacatccccctacctcatccttcacctccccaggaggagtgactgattctgttcctttgtatccttagggccccccaggatctgaaggcctcccaggccccccaggccca

SEQ ID NO: 85501 - DNA, 120 bp, Artificial Sequence
  ENSG00000084636_48 (sequence is synthesized)
tgtaagaacctagcgctgctcgacctcccctcccccccgtcagccaggtctctgtggcttttgcttgtctccctcctgtcgtgccttcacctccgtcctccgtgtttgttgtcccccttc

SEQ ID NO: 85502 - DNA, 120 bp, Artificial Sequence
  ENSG00000084636_49 (sequence is synthesized)
aggcacggtagctaacgacacgggttctctgaggtcccggcagcttggacatcctcccagtctctgactcctttccgttttctcctctccctcctctcctgcgttctttctctcctcttc

SEQ ID NO: 85503 - DNA, 120 bp, Artificial Sequence
  ENSG00000084636_50 (sequence is synthesized)
tctctcttaccccgttctgtcttccttctccatttctcgcaccatcttgcagcactcccccaagtcctcctgagctcgtgaaccttcctcttaagctggtgcctctagggggcccctcca

SEQ ID NO: 85504 - DNA, 120 bp, Artificial Sequence
  ENSG00000084636_51 (sequence is synthesized)
ttcctgccttctcgctctgcctcctgcttctcaccaccttcggcgttgcctgaagatttgctgaaagtagttcttggggccctgccaggcacctggctcagagcccagcagagatgccaa

SEQ ID NO: 85505 - DNA, 120 bp, Artificial Sequence
  ENSG00000084636_52 (sequence is synthesized)
agctttagggcttcacattgcaggctggcacaggtttgctgccctgctgcttggcagggctgtccagaggcacccagggatttaaaggcagcccttcctgcgccttttccgtcgtcctag

SEQ ID NO: 85506 - DNA, 120 bp, Artificial Sequence
  ENSG00000084636_53 (sequence is synthesized)
aggaaactctcagctgcctcctcttcgcttcctcttccttggctccagtcccagtctgctccaaggcggggcatgtgatatcagccagttgggtttctgggtgtcgtgcggccctgcccc

SEQ ID NO: 85507 - DNA, 120 bp, Artificial Sequence
  ENSG00000084636_54 (sequence is synthesized)
cacagagaggagacacaggaaggccagtgggcagggggcaaaaatgcagaacttggagcaggatagtgtctgaaaatttctcacatggggtcattagctgtggttggggggaaggaaatc

SEQ ID NO: 85508 - DNA, 120 bp, Artificial Sequence
  ENSG00000084636_55 (sequence is synthesized)
tccagttcatttactcactgattgactgattgattcattcattgtttccatttcccgagcactcccttgctcctgctcacattccaggcccttgtcctggcctcagggtgatccaggagc

SEQ ID NO: 85509 - DNA, 120 bp, Artificial Sequence
  ENSG00000084636_56 (sequence is synthesized)
atcatcaccagtgaggtctggtgggaggcagagggtggggagaggaggctgaggaaggaacgatcaggaccacataatgaatggccttgcatgcccggccaacgaatgagtgctttatcc

SEQ ID NO: 85510 - DNA, 120 bp, Artificial Sequence
  ENSG00000084636_57 (sequence is synthesized)
tgaggacatttgggagccatcagaatttctaagcagggagtaacaccaggagaactgtcttctagaaggaccactctggggcagtgaggtggagtgacctgtcaggatgctgtggccaca

SEQ ID NO: 85511 - DNA, 120 bp, Artificial Sequence
  ENSG00000084636_58 (sequence is synthesized)
gtctagagggagacgctgggggcctggtgggagggtggagagaaaagagcagattggtgagacatcatgatgtaaatttgacagcactaagtatctatctttgtagggtgatccaggagc

SEQ ID NO: 85512 - DNA, 120 bp, Artificial Sequence
  ENSG00000084636_59 (sequence is synthesized)
gttgggggtggggctctggtggacccaatgtctagggctggtctgcgcaagaggccccttgccttccctggggtctcagccccaccctgtccacatactgcctctcccttctgctagggt

SEQ ID NO: 85513 - DNA, 120 bp, Artificial Sequence
  ENSG00000084636_60 (sequence is synthesized)
cctgactcttaaagggcccgcaggagcccccttccagggcagctctgggcacgtagggtcccgcctagctcgaggatcgctcacctggcggtgaggcaggaggggcgggcctgggagctc

SEQ ID NO: 85514 - DNA, 120 bp, Artificial Sequence
  ENSG00000084636_61 (sequence is synthesized)
ggccagacccggggcggggctgtgcaccccgcagtctagccgcctctggtgccgctggagccccctctaggccctcctcctcctcctccctggcgggccggtccagctgtgttccattag

SEQ ID NO: 85515 - DNA, 120 bp, Artificial Sequence
  ENSG00000084636_62 (sequence is synthesized)
catgggtcaggatggctgctcccggctggaccccaaggatgctgctcccccaccccaaaaacacagacatgccatttctcactcctctgtttacctgcctcccagggtggcaaggagggc

SEQ ID NO: 85516 - DNA, 120 bp, Artificial Sequence
  ENSG00000084636_63 (sequence is synthesized)
ccactgagcctctaggccaggctctgcactcccagcactgtttcaagcaatgcactgttgcgtcagctgtcaggcacccacaatctgggtcagataaaaatcccttaccctggtacagag

SEQ ID NO: 85517 - DNA, 120 bp, Artificial Sequence
  ENSG00000084636_64 (sequence is synthesized)
cccggcccactgttttggagtagcattcaacactcattcatgcaacatgtgtttttgcacatttgctattttctggcactgctttaactgctgtgaatacagtagtggctaaaaataaaa

SEQ ID NO: 85518 - DNA, 120 bp, Artificial Sequence
  ENSG00000084636_65 (sequence is synthesized)
gggagccgcataaggtgtttgagcaagagagtgacataatcagagctatgctggaggagaagagggcagccatttgctggctggcttgcagtgagccaggaggtggcaggacgagttagg

SEQ ID NO: 85519 - DNA, 120 bp, Artificial Sequence
  ENSG00000084636_66 (sequence is synthesized)
cacaggctcccccagatgccctggccaggccaggcatgtgcccacttgcaagtctttatccttctcttaggttccctctggcatgcacttttctcctccacctgcccaatcccagacatc

SEQ ID NO: 85520 - DNA, 120 bp, Artificial Sequence
  ENSG00000084636_67 (sequence is synthesized)
ctcagagtctagcatctggtgacacttctgtgacactttccctgatccccagccagagggaactgctccccgctcctgagctccctgagcccctttccacacagaacacttagactgttg

SEQ ID NO: 85521 - DNA, 120 bp, Artificial Sequence
  ENSG00000084636_68 (sequence is synthesized)
tattgcccctggttgtgttgggcccatgaccctcactggactgtgagctccttgaggacaggggcacccactttttcatcttggggaatcagagcccacatggtgctgcgtgcgctgttg

SEQ ID NO: 85522 - DNA, 120 bp, Artificial Sequence
  ENSG00000084636_69 (sequence is synthesized)
aggcctctgtgcagcccgggcccatgtctgctgggatggggggaaaggtagggaggtaggtggggaggaggcagggggtctgatggagtagaatacaacaggcagctttcacagtggatt

SEQ ID NO: 85523 - DNA, 120 bp, Artificial Sequence
  ENSG00000084636_70 (sequence is synthesized)
gaagctgtgctttcagttcagcacatgctactgagcccctgccatgccagcccctgggtcagcactggagaagatgccctgtcccttcctcatggggcagcaaggaaaggggatgctttg

SEQ ID NO: 85524 - DNA, 120 bp, Artificial Sequence
  ENSG00000084636_71 (sequence is synthesized)
cagatgaagacagatcctcctggggaggcgacgtgtggcacatatgcagttagacagggacagattgggcccagaagccagctgtcctgtttccagcagtcaccaggacccttgacccag

SEQ ID NO: 85525 - DNA, 120 bp, Artificial Sequence
  ENSG00000084636_72 (sequence is synthesized)
agggctgggctagagtgccacctccggtctccatggcaacctcccagggctttccaggagactctagggtgccttttgggcaagctgggctggagcccacccttactgagcacctgggag

SEQ ID NO: 85526 - DNA, 120 bp, Artificial Sequence
  ENSG00000084652_0 (sequence is synthesized)
gtgccgggaagtggctccagggagaagaggcctcttccctcacccgctgtgggagctgcgccccgaaagcctgccccggcacgtcgggctctcctgacccgccaagaccagagagccgtt

SEQ ID NO: 85527 - DNA, 120 bp, Artificial Sequence
  ENSG00000084652_1 (sequence is synthesized)
ggcgccctccgcccgggcctgccggtccgtttattttaagaagctttgtgcgcctgctgtggggatttctgatccaggctgcgaagaatttcgaagtctggaaaatagcaactgtgtttg

SEQ ID NO: 85528 - DNA, 120 bp, Artificial Sequence
  ENSG00000084652_2 (sequence is synthesized)
tttctaaaggatcttctcctgacccagcatcgctcatcacaatgaagaaccaagacaaaaagaacggggctgccaaacaatccaatccaaaaagcagcccaggacaaccggaagcaggac

SEQ ID NO: 85529 - DNA, 120 bp, Artificial Sequence
  ENSG00000084652_3 (sequence is synthesized)
ccgagggagcccaggagcggcccagccaggcggctcctgcagtagaagcagaaggtcccggcagcagccaggctcctcggaagccggagggggctcaagccagaacggctcagtctgggg

SEQ ID NO: 85530 - DNA, 120 bp, Artificial Sequence
  ENSG00000084652_4 (sequence is synthesized)
cccttcgtgatgtctctgaggagctgagccgccaactggaagacatactgagcacatactgtgtggacaataaccaggggggccccggcgaggatggggcacagggtgagccggctgaac

SEQ ID NO: 85531 - DNA, 120 bp, Artificial Sequence
  ENSG00000084652_5 (sequence is synthesized)
ccgaagatgcagagaagtcccggacctatgtggcaaggaatggggagcctgaaccaactccagtagtcaatggagagaaggaaccctccaagggggatccaaacacagaagagatccggc

SEQ ID NO: 85532 - DNA, 120 bp, Artificial Sequence
  ENSG00000084652_6 (sequence is synthesized)
agagtgacgaggtcggagaccgagaccatcgaaggccacaggagaagaaaaaagccaagggtttggggaaggagatcacgttgctgatgcagacattgaatactctgagtaccccagagg

SEQ ID NO: 85533 - DNA, 120 bp, Artificial Sequence
  ENSG00000084652_7 (sequence is synthesized)
agaagctggctgctctgtgcaagaagtatgctgaactgctggaggagcaccggaattcacagaagcagatgaagctcctacagaaaaagcagagccagctggtgcaagagaaggaccacc

SEQ ID NO: 85534 - DNA, 120 bp, Artificial Sequence
  ENSG00000084652_8 (sequence is synthesized)
tgcgcggtgagcacagcaaggccgtcctggcccgcagcaagcttgagagcctatgccgtgagctgcagcggcacaaccgctccctcaaggaagaaggtgtgcagcgggcccgggaggagg

SEQ ID NO: 85535 - DNA, 120 bp, Artificial Sequence
  ENSG00000084652_9 (sequence is synthesized)
aggagaagcgcaaggaggtgacctcgcacttccaggtgacactgaatgacattcagctgcagatggaacagcacaatgagcgcaactccaagctgcgccaagagaacatggagctggctg

SEQ ID NO: 85536 - DNA, 120 bp, Artificial Sequence
  ENSG00000084652_10 (sequence is synthesized)
agaggctcaagaagctgattgagcagtatgagctgcgcgaggagcatatcgacaaagtcttcaaacacaaggacctacaacagcagctggtggatgccaagctccagcaggcccaggaga

SEQ ID NO: 85537 - DNA, 120 bp, Artificial Sequence
  ENSG00000084652_11 (sequence is synthesized)
tgctaaaggaggcagaagagcggcaccagcgggagaaggattttctcctgaaagaggcagtagagtcccagaggatgtgtgagctgatgaagcagcaagagacccacctgaagcaacagc

SEQ ID NO: 85538 - DNA, 120 bp, Artificial Sequence
  ENSG00000084652_12 (sequence is synthesized)
ttgccctatacacagagaagtttgaggagttccagaacacactttccaaaagcagcgaggtattcaccacattcaagcaggagatggaaaagatgactaagaagatcaagaagctggaga

SEQ ID NO: 85539 - DNA, 120 bp, Artificial Sequence
  ENSG00000084652_13 (sequence is synthesized)
aagaaaccaccatgtaccggtcccggtgggagagcagcaacaaggccctgcttgagatggctgaggagaaaacagtccgggataaagaactggagggcctgcaggtaaaaatccaacggc

SEQ ID NO: 85540 - DNA, 120 bp, Artificial Sequence
  ENSG00000084652_14 (sequence is synthesized)
tggagaagctgtgccgggcactgcagacagagcgcaatgacctgaacaagagggtacaggacctgagtgctggtggccagggctccctcactgacagtggccctgagaggaggccagagg

SEQ ID NO: 85541 - DNA, 120 bp, Artificial Sequence
  ENSG00000084652_15 (sequence is synthesized)
ggcctggggctcaagcacccagctcccccagggtcacagaagcgccttgctacccaggagcaccgagcacagaagcatcaggccagactgggcctcaagagcccacctccgccagggcct

SEQ ID NO: 85542 - DNA, 120 bp, Artificial Sequence
  ENSG00000084652_16 (sequence is synthesized)
agagagcctggtgttgggtcatgctgggaagggagcggcagcccagccaggcctggcccataaaaggctcccatgctgagcagcccattgctgaagccaggatgttctgacctggctggc

SEQ ID NO: 85543 - DNA, 120 bp, Artificial Sequence
  ENSG00000084652_17 (sequence is synthesized)
atctggcacttgcaattttggattttgtgggtcagttttacgtacatagggcattttgcaaggccttgcaaatgcatttatacctgtaagtgtacagtgggcttgcattggggatggggg

SEQ ID NO: 85544 - DNA, 120 bp, Artificial Sequence
  ENSG00000084652_18 (sequence is synthesized)
tgtgtacagatgaagtcagtggcttgtctgtgagctgaagagtcttgagaggggctgtcatctgtagctgccatcacagtgagttggcagaagtgacttgagcatttctctgtctgattt

SEQ ID NO: 85545 - DNA, 120 bp, Artificial Sequence
  ENSG00000084652_19 (sequence is synthesized)
gaggctcagacccctccctgcccttcagagctcaagacaagtaatacacccaggtcttgactgcatttgtcttgtgagcagggcttgcttggtcagctcaggccctcctagctgctctgg

SEQ ID NO: 85546 - DNA, 120 bp, Artificial Sequence
  ENSG00000084652_20 (sequence is synthesized)
ggacctggagaatgtttttgcgtgggatgatgtgctggtcaggagccccttgggcatcgcttcccctgccctttggtagtgccaggaccaggccaatgatgcttctcagtagccttatca

SEQ ID NO: 85547 - DNA, 120 bp, Artificial Sequence
  ENSG00000084652_21 (sequence is synthesized)
tgatgcttctcagtagccttatcattcacaggtgcctctctagcctgcacaaatgattgacaagagatcacccaaaggattatttctgaaggtgtttttttctttatttctttttctttt

SEQ ID NO: 85548 - DNA, 120 bp, Artificial Sequence
  ENSG00000084652_22 (sequence is synthesized)
ttttgcacatgacagtgtttgtattgaggaccttccaaggaagagggatgctgtagcagtggtgcctgggtgcctggcctccagtgtcccacctccttcaccaccccacttggctccttt

SEQ ID NO: 85549 - DNA, 120 bp, Artificial Sequence
  ENSG00000084652_23 (sequence is synthesized)
gccatcttgatgctgaggtttcctgtttggtgagatcaggttgtttgtggtaaaagaaaggaaagggcttctgatggctttgccacaagcttacctgtgggtttcagtcctgagaggcca

SEQ ID NO: 85550 - DNA, 120 bp, Artificial Sequence
  ENSG00000084652_24 (sequence is synthesized)
ccaccagttcccatcagcactgtctccatgcagcagttgctgggtcccatgtccagctgcctctttggcttcatgggtttttctgcttcctgcccccacccccacatgtgcaatcctcaa

SEQ ID NO: 85551 - DNA, 120 bp, Artificial Sequence
  ENSG00000084652_25 (sequence is synthesized)
gatttgtcctgattctatttcctggcacctccctgcctgtccttggggattctacttcttcctgtgtgggagcccatagctgttgtctaacaggtaagaaatgaaattgaactattgact

SEQ ID NO: 85552 - DNA, 120 bp, Artificial Sequence
  ENSG00000084652_26 (sequence is synthesized)
gggccccagaaatccataaaatggctgcagacagttgtttctgtgtcctgttctacccccactccagtacataactactatgtactgtgtagagccattctatatgctgaatgttctgct

SEQ ID NO: 85553 - DNA, 120 bp, Artificial Sequence
  ENSG00000084652_27 (sequence is synthesized)
gttgcaaacttgccagggtattagccagtgtttgtgccaagcagttttctgggacaacagaatgactcagaccaagatggataggatggttagggctttgcttcttgctgtttttctttg

SEQ ID NO: 85554 - DNA, 120 bp, Artificial Sequence
  ENSG00000084652_28 (sequence is synthesized)
aagctagttcattgtcctgcaggtcccttcatcttccatacctagcccactcttttagcccttaccttaaatctctcagataagttggttcacaaagaatgttaagtactgaatcatgtg

SEQ ID NO: 85555 - DNA, 120 bp, Artificial Sequence
  ENSG00000084652_29 (sequence is synthesized)
tgactgagaccagagatggcaaatgaatggcacaccatttctccttctcctgccccagggcaggtaccactgatctgcatcagagttgcctgctattctctggtgtatccttcacatcta

SEQ ID NO: 85556 - DNA, 120 bp, Artificial Sequence
  ENSG00000084652_30 (sequence is synthesized)
ggtgccctcaagcagctgtgtgagtgttgagatctctgccatctctggctgagatactgctgtcctgtgaagtgtttcccatgacctttttcttcccctttgaatccctctgtctggagt

SEQ ID NO: 85557 - DNA, 120 bp, Artificial Sequence
  ENSG00000084652_31 (sequence is synthesized)
agtccttgcctcttcctgctccagtagggccttttccctaccccagcccctgtgccaggctaagctggtacaagagctgccaacctcacagagtgtttgctaggcgagagaggtgcaggg

SEQ ID NO: 85558 - DNA, 120 bp, Artificial Sequence
  ENSG00000084652_32 (sequence is synthesized)
aagaggcagaggtatgcaccttcccccttgaagagaggggaaaggcctacagtggcccacataattgcctgactcacacttcagctacctcttaatgcctgtggagggactggagctgct

SEQ ID NO: 85559 - DNA, 120 bp, Artificial Sequence
  ENSG00000084652_33 (sequence is synthesized)
ggatcccagtgtggtggtgtaggaggccacagtgagcaggtggccccagctgggtttcccaggtcaggaatgtgggccccaggcaaggtgcagcctttgctcacagctccatccatgtct

SEQ ID NO: 85560 - DNA, 120 bp, Artificial Sequence
  ENSG00000084652_34 (sequence is synthesized)
agaccttcaggccagtctgcagatgaggttccctacctttttcttctcttcattgaccaaatcaaccaatcactacagctgctctgcttctgctttccaaagtagcccaggtcctgggcc

SEQ ID NO: 85561 - DNA, 120 bp, Artificial Sequence
  ENSG00000084652_35 (sequence is synthesized)
agatgcaggggaggtgcctatccatgagtgaaggccagtgtcttcctcacctgggtgggtcccacacttgtgacctcagttttaggaccaagatctgtgttggtttcttagattgctagc

SEQ ID NO: 85562 - DNA, 120 bp, Artificial Sequence
  ENSG00000084652_36 (sequence is synthesized)
ttttcctccaggggaccacagcaggtgaagctcaagagcgcatggctctgctaatagtaaattgttttcagggccttgtccagctgagagcttcatgtccaccagattctgagaggtgtc

SEQ ID NO: 85563 - DNA, 120 bp, Artificial Sequence
  ENSG00000084652_37 (sequence is synthesized)
agcagcactttttttttttatttgttgtttgttttccatgaggttatcggaccatgggctgagctcaggcactttctgtaggagactgttatttctgtaaagatggttatttaaccctcc

SEQ ID NO: 85564 - DNA, 120 bp, Artificial Sequence
  ENSG00000084652_38 (sequence is synthesized)
tccaccccatcacggtggccctgagggctgacccggaggccagtggagctgcctggtgtccacgggggagggccaaggcctgctgagctgattctccagctgctgccccagcctttccgc

SEQ ID NO: 85565 - DNA, 120 bp, Artificial Sequence
  ENSG00000084652_39 (sequence is synthesized)
cttgcacagcacagaggtggtcaccccagggacagccaggcacctgctcctcttgcccttcctgggggaagggagctgccttctgtccctgtaactgctttccttatggcccagcccggc

SEQ ID NO: 85566 - DNA, 120 bp, Artificial Sequence
  ENSG00000084652_40 (sequence is synthesized)
cactcagacttgtttgaagctgcactggcagcttttttgtctcctttgggtattcacaacagccagggacttgattttgatgtattttaaaccacattaaataaagagtctgttgcctta

SEQ ID NO: 85567 - DNA, 120 bp, Artificial Sequence
  ENSG00000084674_0 (sequence is synthesized)
gagtgcccttctcggttgctgccgctgaggagcccgcccagccagccagggccgcgaggccgaggccaggccgcagcccaggagccgccccaccgcagctggcgatggacccgccgaggc

SEQ ID NO: 85568 - DNA, 120 bp, Artificial Sequence
  ENSG00000084674_1 (sequence is synthesized)
agctggcgatggacccgccgaggcccgcgctgctggcgctgctggcgctgcctgcgctgctgctgctgctgctggcgggcgccagggccgaagaggaaatgctggaaaatgtcagcctgg

SEQ ID NO: 85569 - DNA, 120 bp, Artificial Sequence
  ENSG00000084674_2 (sequence is synthesized)
tctgtccaaaagatgcgacccgattcaagcacctccggaagtacacatacaactatgaggctgagagttccagtggagtccctgggactgctgattcaagaagtgccaccaggatcaact

SEQ ID NO: 85570 - DNA, 120 bp, Artificial Sequence
  ENSG00000084674_3 (sequence is synthesized)
gcaaggttgagctggaggttccccagctctgcagcttcatcctgaagaccagccagtgcaccctgaaagaggtgtatggcttcaaccctgagggcaaagccttgctgaagaaaaccaaga

SEQ ID NO: 85571 - DNA, 120 bp, Artificial Sequence
  ENSG00000084674_4 (sequence is synthesized)
actctgaggagtttgctgcagccatgtccaggtatgagctcaagctggccattccagaagggaagcaggttttcctttacccggagaaagatgaacctacttacatcctgaacatcaaga

SEQ ID NO: 85572 - DNA, 120 bp, Artificial Sequence
  ENSG00000084674_5 (sequence is synthesized)
ggggcatcatttctgccctcctggttcccccagagacagaagaagccaagcaagtgttgtttctggataccgtgtatggaaactgctccactcactttaccgtcaagacgaggaagggca

SEQ ID NO: 85573 - DNA, 120 bp, Artificial Sequence
  ENSG00000084674_6 (sequence is synthesized)
atgtggcaacagaaatatccactgaaagagacctggggcagtgtgatcgcttcaagcccatccgcacaggcatcagcccacttgctctcatcaaaggcatgacccgccccttgtcaactc

SEQ ID NO: 85574 - DNA, 120 bp, Artificial Sequence
  ENSG00000084674_7 (sequence is synthesized)
tgatcagcagcagccagtcctgtcagtacacactggacgctaagaggaagcatgtggcagaagccatctgcaaggagcaacacctcttcctgcctttctcctacaagaataagtatggga

SEQ ID NO: 85575 - DNA, 120 bp, Artificial Sequence
  ENSG00000084674_8 (sequence is synthesized)
tggtagcacaagtgacacagactttgaaacttgaagacacaccaaagatcaacagccgcttctttggtgaaggtactaagaagatgggcctcgcatttgagagcaccaaatccacatcac

SEQ ID NO: 85576 - DNA, 120 bp, Artificial Sequence
  ENSG00000084674_9 (sequence is synthesized)
ctccaaagcaggccgaagctgttttgaagactctccaggaactgaaaaaactaaccatctctgagcaaaatatccagagagctaatctcttcaataagctggttactgagctgagaggcc

SEQ ID NO: 85577 - DNA, 120 bp, Artificial Sequence
  ENSG00000084674_10 (sequence is synthesized)
tcagtgatgaagcagtcacatctctcttgccacagctgattgaggtgtccagccccatcactttacaagccttggttcagtgtggacagcctcagtgctccactcacatcctccagtggc

SEQ ID NO: 85578 - DNA, 120 bp, Artificial Sequence
  ENSG00000084674_11 (sequence is synthesized)
tgaaacgtgtgcatgccaacccccttctgatagatgtggtcacctacctggtggccctgatccccgagccctcagcacagcagctgcgagagatcttcaacatggcgagggatcagcgca

SEQ ID NO: 85579 - DNA, 120 bp, Artificial Sequence
  ENSG00000084674_12 (sequence is synthesized)
gccgagccaccttgtatgcgctgagccacgcggtcaacaactatcataagacaaaccctacagggacccaggagctgctggacattgctaattacctgatggaacagattcaagatgact

SEQ ID NO: 85580 - DNA, 120 bp, Artificial Sequence
  ENSG00000084674_13 (sequence is synthesized)
gcactggggatgaagattacacctatttgattctgcgggtcattggaaatatgggccaaaccatggagcagttaactccagaactcaagtcttcaatcctgaaatgtgtccaaagtacaa

SEQ ID NO: 85581 - DNA, 120 bp, Artificial Sequence
  ENSG00000084674_14 (sequence is synthesized)
agccatcactgatgatccagaaagctgccatccaggctctgcggaaaatggagcctaaagacaaggaccaggaggttcttcttcagactttccttgatgatgcttctccgggagataagc

SEQ ID NO: 85582 - DNA, 120 bp, Artificial Sequence
  ENSG00000084674_15 (sequence is synthesized)
gactggctgcctatcttatgttgatgaggagtccttcacaggcagatattaacaaaattgtccaaattctaccatgggaacagaatgagcaagtgaagaactttgtggcttcccatattg

SEQ ID NO: 85583 - DNA, 120 bp, Artificial Sequence
  ENSG00000084674_16 (sequence is synthesized)
ccaatatcttgaactcagaagaattggatatccaagatctgaaaaagttagtgaaagaagctctgaaagaatctcaacttccaactgtcatggacttcagaaaattctctcggaactatc

SEQ ID NO: 85584 - DNA, 120 bp, Artificial Sequence
  ENSG00000084674_17 (sequence is synthesized)
aactctacaaatctgtttctcttccatcacttgacccagcctcagccaaaatagaagggaatcttatatttgatccaaataactaccttcctaaagaaagcatgctgaaaactaccctca

SEQ ID NO: 85585 - DNA, 120 bp, Artificial Sequence
  ENSG00000084674_18 (sequence is synthesized)
ctgcctttggatttgcttcagctgacctcatcgagattggcttggaaggaaaaggctttgagccaacattggaagctctttttgggaagcaaggatttttcccagacagtgtcaacaaag

SEQ ID NO: 85586 - DNA, 120 bp, Artificial Sequence
  ENSG00000084674_19 (sequence is synthesized)
ctttgtactgggttaatggtcaagttcctgatggtgtctctaaggtcttagtggaccactttggctataccaaagatgataaacatgagcaggatatggtaaatggaataatgctcagtg

SEQ ID NO: 85587 - DNA, 120 bp, Artificial Sequence
  ENSG00000084674_20 (sequence is synthesized)
ttgagaagctgattaaagatttgaaatccaaagaagtcccggaagccagagcctacctccgcatcttgggagaggagcttggttttgccagtctccatgacctccagctcctgggaaagc

SEQ ID NO: 85588 - DNA, 120 bp, Artificial Sequence
  ENSG00000084674_21 (sequence is synthesized)
tgcttctgatgggtgcccgcactctgcaggggatcccccagatgattggagaggtcatcaggaagggctcaaagaatgacttttttcttcactacatcttcatggagaatgcctttgaac

SEQ ID NO: 85589 - DNA, 120 bp, Artificial Sequence
  ENSG00000084674_22 (sequence is synthesized)
tccccactggagctggattacagttgcaaatatcttcatctggagtcattgctcccggagccaaggctggagtaaaactggaagtagccaacatgcaggctgaactggtggcaaaaccct

SEQ ID NO: 85590 - DNA, 120 bp, Artificial Sequence
  ENSG00000084674_23 (sequence is synthesized)
ccgtgtctgtggagtttgtgacaaatatgggcatcatcattccggacttcgctaggagtggggtccagatgaacaccaacttcttccacgagtcgggtctggaggctcatgttgccctaa

SEQ ID NO: 85591 - DNA, 120 bp, Artificial Sequence
  ENSG00000084674_24 (sequence is synthesized)
aagctgggaagctgaagtttatcattccttccccaaagagaccagtcaagctgctcagtggaggcaacacattacatttggtctctaccaccaaaacggaggtgatcccacctctcattg

SEQ ID NO: 85592 - DNA, 120 bp, Artificial Sequence
  ENSG00000084674_25 (sequence is synthesized)
agaacaggcagtcctggtcagtttgcaagcaagtctttcctggcctgaattactgcacctcaggcgcttactccaacgccagctccacagactccgcctcctactatccgctgaccgggg

SEQ ID NO: 85593 - DNA, 120 bp, Artificial Sequence
  ENSG00000084674_26 (sequence is synthesized)
acaccagattagagctggaactgaggcctacaggagagattgagcagtattctgtcagcgcaacctatgagctccagagagaggacagagccttggtggataccctgaagtttgtaactc

SEQ ID NO: 85594 - DNA, 120 bp, Artificial Sequence
  ENSG00000084674_27 (sequence is synthesized)
aagcagaaggtgcgaagcagactgaggctaccatgacattcaaatataatcggcagagtatgaccttgtccagtgaagtccaaattccggattttgatgttgacctcggaacaatcctca

SEQ ID NO: 85595 - DNA, 120 bp, Artificial Sequence
  ENSG00000084674_28 (sequence is synthesized)
gagttaatgatgaatctactgagggcaaaacgtcttacagactcaccctggacattcagaacaagaaaattactgaggtcgccctcatgggccacctaagttgtgacacaaaggaagaaa

SEQ ID NO: 85596 - DNA, 120 bp, Artificial Sequence
  ENSG00000084674_29 (sequence is synthesized)
gaaaaatcaagggtgttatttccataccccgtttgcaagcagaagccagaagtgagatcctcgcccactggtcgcctgccaaactgcttctccaaatggactcatctgctacagcttatg

SEQ ID NO: 85597 - DNA, 120 bp, Artificial Sequence
  ENSG00000084674_30 (sequence is synthesized)
gctccacagtttccaagagggtggcatggcattatgatgaagagaagattgaatttgaatggaacacaggcaccaatgtagataccaaaaaaatgacttccaatttccctgtggatctct

SEQ ID NO: 85598 - DNA, 120 bp, Artificial Sequence
  ENSG00000084674_31 (sequence is synthesized)
ccgattatcctaagagcttgcatatgtatgctaatagactcctggatcacagagtccctcaaacagacatgactttccggcacgtgggttccaaattaatagttgcaatgagctcatggc

SEQ ID NO: 85599 - DNA, 120 bp, Artificial Sequence
  ENSG00000084674_32 (sequence is synthesized)
ttcagaaggcatctgggagtcttccttatacccagactttgcaagaccacctcaatagcctgaaggagttcaacctccagaacatgggattgccagacttccacatcccagaaaacctct

SEQ ID NO: 85600 - DNA, 120 bp, Artificial Sequence
  ENSG00000084674_33 (sequence is synthesized)
tcttaaaaagcgatggccgggtcaaatataccttgaacaagaacagtttgaaaattgagattcctttgccttttggtggcaaatcctccagagatctaaagatgttagagactgttagga

SEQ ID NO: 85601 - DNA, 120 bp, Artificial Sequence
  ENSG00000084674_34 (sequence is synthesized)
caccagccctccacttcaagtctgtgggattccatctgccatctcgagagttccaagtccctacttttaccattcccaagttgtatcaactgcaagtgcctctcctgggtgttctagacc

SEQ ID NO: 85602 - DNA, 120 bp, Artificial Sequence
  ENSG00000084674_35 (sequence is synthesized)
tctccacgaatgtctacagcaacttgtacaactggtccgcctcctacagtggtggcaacaccagcacagaccatttcagccttcgggctcgttaccacatgaaggctgactctgtggttg

SEQ ID NO: 85603 - DNA, 120 bp, Artificial Sequence
  ENSG00000084674_36 (sequence is synthesized)
acctgctttcctacaatgtgcaaggatctggagaaacaacatatgaccacaagaatacgttcacactatcatgtgatgggtctctacgccacaaatttctagattcgaatatcaaattca

SEQ ID NO: 85604 - DNA, 120 bp, Artificial Sequence
  ENSG00000084674_37 (sequence is synthesized)
gtcatgtagaaaaacttggaaacaacccagtctcaaaaggtttactaatattcgatgcatctagttcctggggaccacagatgtctgcttcagttcatttggactccaaaaagaaacagc

SEQ ID NO: 85605 - DNA, 120 bp, Artificial Sequence
  ENSG00000084674_38 (sequence is synthesized)
atttgtttgtcaaagaagtcaagattgatgggcagttcagagtctcttcgttctatgctaaaggcacatatggcctgtcttgtcagagggatcctaacactggccggctcaatggagagt

SEQ ID NO: 85606 - DNA, 120 bp, Artificial Sequence
  ENSG00000084674_39 (sequence is synthesized)
ccaacctgaggtttaactcctcctacctccaaggcaccaaccagataacaggaagatatgaagatggaaccctctccctcacctccacctctgatctgcaaagtggcatcattaaaaata

SEQ ID NO: 85607 - DNA, 120 bp, Artificial Sequence
  ENSG00000084674_40 (sequence is synthesized)
ctgcttccctaaagtatgagaactacgagctgactttaaaatctgacaccaatgggaagtataagaactttgccacttctaacaagatggatatgaccttctctaagcaaaatgcactgc

SEQ ID NO: 85608 - DNA, 120 bp, Artificial Sequence
  ENSG00000084674_41 (sequence is synthesized)
tgcgttctgaatatcaggctgattacgagtcattgaggttcttcagcctgctttctggatcactaaattcccatggtcttgagttaaatgctgacatcttaggcactgacaaaattaata

SEQ ID NO: 85609 - DNA, 120 bp, Artificial Sequence
  ENSG00000084674_42 (sequence is synthesized)
gtggtgctcacaaggcgacactaaggattggccaagatggaatatctaccagtgcaacgaccaacttgaagtgtagtctcctggtgctggagaatgagctgaatgcagagcttggcctct

SEQ ID NO: 85610 - DNA, 120 bp, Artificial Sequence
  ENSG00000084674_43 (sequence is synthesized)
ctggggcatctatgaaattaacaacaaatggccgcttcagggaacacaatgcaaaattcagtctggatgggaaagccgccctcacagagctatcactgggaagtgcttatcaggccatga

SEQ ID NO: 85611 - DNA, 120 bp, Artificial Sequence
  ENSG00000084674_44 (sequence is synthesized)
ttctgggtgtcgacagcaaaaacattttcaacttcaaggtcagtcaagaaggacttaagctctcaaatgacatgatgggctcatatgctgaaatgaaatttgaccacacaaacagtctga

SEQ ID NO: 85612 - DNA, 120 bp, Artificial Sequence
  ENSG00000084674_45 (sequence is synthesized)
acattgcaggcttatcactggacttctcttcaaaacttgacaacatttacagctctgacaagttttataagcaaactgttaatttacagctacagccctattctctggtaactactttaa

SEQ ID NO: 85613 - DNA, 120 bp, Artificial Sequence
  ENSG00000084674_46 (sequence is synthesized)
acagtgacctgaaatacaatgctctggatctcaccaacaatgggaaactacggctagaacccctgaagctgcatgtggctggtaacctaaaaggagcctaccaaaataatgaaataaaac

SEQ ID NO: 85614 - DNA, 120 bp, Artificial Sequence
  ENSG00000084674_47 (sequence is synthesized)
acatctatgccatctcttctgctgccttatcagcaagctataaagcagacactgttgctaaggttcagggtgtggagtttagccatcggctcaacacagacatcgctgggctggcttcag

SEQ ID NO: 85615 - DNA, 120 bp, Artificial Sequence
  ENSG00000084674_48 (sequence is synthesized)
ccattgacatgagcacaaactataattcagactcactgcatttcagcaatgtcttccgttctgtaatggccccgtttaccatgaccatcgatgcacatacaaatggcaatgggaaactcg

SEQ ID NO: 85616 - DNA, 120 bp, Artificial Sequence
  ENSG00000084674_49 (sequence is synthesized)
ctctctggggagaacatactgggcagctgtatagcaaattcctgttgaaagcagaacctctggcatttactttctctcatgattacaaaggctccacaagtcatcatctcgtgtctagga

SEQ ID NO: 85617 - DNA, 120 bp, Artificial Sequence
  ENSG00000084674_50 (sequence is synthesized)
aaagcatcagtgcagctcttgaacacaaagtcagtgccctgcttactccagctgagcagacaggcacctggaaactcaagacccaatttaacaacaatgaatacagccaggacttggatg

SEQ ID NO: 85618 - DNA, 120 bp, Artificial Sequence
  ENSG00000084674_51 (sequence is synthesized)
cttacaacactaaagataaaattggcgtggagcttactggacgaactctggctgacctaactctactagactccccaattaaagtgccacttttactcagtgagcccatcaatatcattg

SEQ ID NO: 85619 - DNA, 120 bp, Artificial Sequence
  ENSG00000084674_52 (sequence is synthesized)
atgctttagagatgagagatgccgttgagaagccccaagaatttacaattgttgcttttgtaaagtatgataaaaaccaagatgttcactccattaacctcccattttttgagaccttgc

SEQ ID NO: 85620 - DNA, 120 bp, Artificial Sequence
  ENSG00000084674_53 (sequence is synthesized)
aagaatattttgagaggaatcgacaaaccattatagttgtactggaaaacgtacagagaaacctgaagcacatcaatattgatcaatttgtaagaaaatacagagcagccctgggaaaac

SEQ ID NO: 85621 - DNA, 120 bp, Artificial Sequence
  ENSG00000084674_54 (sequence is synthesized)
tcccacagcaagctaatgattatctgaattcattcaattgggagagacaagtttcacatgccaaggagaaactgactgctctcacaaaaaagtatagaattacagaaaatgatatacaaa

SEQ ID NO: 85622 - DNA, 120 bp, Artificial Sequence
  ENSG00000084674_55 (sequence is synthesized)
ttgcattagatgatgccaaaatcaactttaatgaaaaactatctcaactgcagacatatatgatacaatttgatcagtatattaaagatagttatgatttacatgatttgaaaatagcta

SEQ ID NO: 85623 - DNA, 120 bp, Artificial Sequence
  ENSG00000084674_56 (sequence is synthesized)
ttgctaatattattgatgaaatcattgaaaaattaaaaagtcttgatgagcactatcatatccgtgtaaatttagtaaaaacaatccatgatctacatttgtttattgaaaatattgatt

SEQ ID NO: 85624 - DNA, 120 bp, Artificial Sequence
  ENSG00000084674_57 (sequence is synthesized)
ttaacaaaagtggaagtagtactgcatcctggattcaaaatgtggatactaagtaccaaatcagaatccagatacaagaaaaactgcagcagcttaagagacacatacagaatatagaca

SEQ ID NO: 85625 - DNA, 120 bp, Artificial Sequence
  ENSG00000084674_58 (sequence is synthesized)
tttcatttgaaagaataaatgacattcttgagcatgtcaaacactttgttataaatcttattggggattttgaagtagctgagaaaatcaatgccttcagagccaaagtccatgagttaa

SEQ ID NO: 85626 - DNA, 120 bp, Artificial Sequence
  ENSG00000084674_59 (sequence is synthesized)
tcgagaggtatgaagtagaccaacaaatccaggttttaatggataaattagtagagttggcccaccaatacaagttgaaggagactattcagaagctaagcaatgtcctacaacaagtta

SEQ ID NO: 85627 - DNA, 120 bp, Artificial Sequence
  ENSG00000084674_60 (sequence is synthesized)
agataaaagattactttgagaaattggttggatttattgatgatgctgtcaagaagcttaatgaattatcttttaaaacattcattgaagatgttaacaaattccttgacatgttgataa

SEQ ID NO: 85628 - DNA, 120 bp, Artificial Sequence
  ENSG00000084674_61 (sequence is synthesized)
agaaattaaagtcatttgattaccaccagtttgtagatgaaaccaatgacaaaatccgtgaggtgactcagagactcaatggtgaaattcaggctctggaactaccacaaaaagctgaag

SEQ ID NO: 85629 - DNA, 120 bp, Artificial Sequence
  ENSG00000084674_62 (sequence is synthesized)
cattaaaactgtttttagaggaaaccaaggccacagttgcagtgtatctggaaagcctacaggacaccaaaataaccttaatcatcaattggttacaggaggctttaagttcagcatctt

SEQ ID NO: 85630 - DNA, 120 bp, Artificial Sequence
  ENSG00000084674_63 (sequence is synthesized)
tggctcacatgaaggccaaattccgagagaccctagaagatacacgagaccgaatgtatcaaatggacattcagcaggaacttcaacgatacctgtctctggtaggccaggtttatagca

SEQ ID NO: 85631 - DNA, 120 bp, Artificial Sequence
  ENSG00000084674_64 (sequence is synthesized)
cacttgtcacctacatttctgattggtggactcttgctgctaagaaccttactgactttgcagagcaatattctatccaagattgggctaaacgtatgaaagcattggtagagcaagggt

SEQ ID NO: 85632 - DNA, 120 bp, Artificial Sequence
  ENSG00000084674_65 (sequence is synthesized)
tcactgttcctgaaatcaagaccatccttgggaccatgcctgcctttgaagtcagtcttcaggctcttcagaaagctaccttccagacacctgattttatagtccccctaacagatttga

SEQ ID NO: 85633 - DNA, 120 bp, Artificial Sequence
  ENSG00000084674_66 (sequence is synthesized)
ggattccatcagttcagataaacttcaaagacttaaaaaatataaaaatcccatccaggttttccacaccagaatttaccatccttaacaccttccacattccttcctttacaattgact

SEQ ID NO: 85634 - DNA, 120 bp, Artificial Sequence
  ENSG00000084674_67 (sequence is synthesized)
ttgtagaaatgaaagtaaagatcatcagaaccattgaccagatgctgaacagtgagctgcagtggcccgttccagatatatatctcagggatctgaaggtggaggacattcctctagcga

SEQ ID NO: 85635 - DNA, 120 bp, Artificial Sequence
  ENSG00000084674_68 (sequence is synthesized)
gaatcaccctgccagacttccgtttaccagaaatcgcaattccagaattcataatcccaactctcaaccttaatgattttcaagttcctgaccttcacataccagaattccagcttcccc

SEQ ID NO: 85636 - DNA, 120 bp, Artificial Sequence
  ENSG00000084674_69 (sequence is synthesized)
acatctcacacacaattgaagtacctacttttggcaagctatacagtattctgaaaatccaatctcctcttttcacattagatgcaaatgctgacatagggaatggaaccacctcagcaa

SEQ ID NO: 85637 - DNA, 120 bp, Artificial Sequence
  ENSG00000084674_70 (sequence is synthesized)
acgaagcaggtatcgcagcttccatcactgccaaaggagagtccaaattagaagttctcaattttgattttcaagcaaatgcacaactctcaaaccctaagattaatccgctggctctga

SEQ ID NO: 85638 - DNA, 120 bp, Artificial Sequence
  ENSG00000084674_71 (sequence is synthesized)
aggagtcagtgaagttctccagcaagtacctgagaacggagcatgggagtgaaatgctgttttttggaaatgctattgagggaaaatcaaacacagtggcaagtttacacacagaaaaaa

SEQ ID NO: 85639 - DNA, 120 bp, Artificial Sequence
  ENSG00000084674_72 (sequence is synthesized)
atacactggagcttagtaatggagtgattgtcaagataaacaatcagcttaccctggatagcaacactaaatacttccacaaattgaacatccccaaactggacttctctagtcaggctg

SEQ ID NO: 85640 - DNA, 120 bp, Artificial Sequence
  ENSG00000084674_73 (sequence is synthesized)
acctgcgcaacgagatcaagacactgttgaaagctggccacatagcatggacttcttctggaaaagggtcatggaaatgggcctgccccagattctcagatgagggaacacatgaatcac

SEQ ID NO: 85641 - DNA, 120 bp, Artificial Sequence
  ENSG00000084674_74 (sequence is synthesized)
aaattagtttcaccatagaaggacccctcacttcctttggactgtccaataagatcaatagcaaacacctaagagtaaaccaaaacttggtttatgaatctggctccctcaacttttcta

SEQ ID NO: 85642 - DNA, 120 bp, Artificial Sequence
  ENSG00000084674_75 (sequence is synthesized)
aacttgaaattcaatcacaagtcgattcccagcatgtgggccacagtgttctaactgctaaaggcatggcactgtttggagaagggaaggcagagtttactgggaggcatgatgctcatt

SEQ ID NO: 85643 - DNA, 120 bp, Artificial Sequence
  ENSG00000084674_76 (sequence is synthesized)
taaatggaaaggttattggaactttgaaaaattctcttttcttttcagcccagccatttgagatcacggcatccacaaacaatgaagggaatttgaaagttcgttttccattaaggttaa

SEQ ID NO: 85644 - DNA, 120 bp, Artificial Sequence
  ENSG00000084674_77 (sequence is synthesized)
cagggaagatagacttcctgaataactatgcactgtttctgagtcccagtgcccagcaagcaagttggcaagtaagtgctaggttcaatcagtataagtacaaccaaaatttctctgctg

SEQ ID NO: 85645 - DNA, 120 bp, Artificial Sequence
  ENSG00000084674_78 (sequence is synthesized)
gaaacaacgagaacattatggaggcccatgtaggaataaatggagaagcaaatctggatttcttaaacattcctttaacaattcctgaaatgcgtctaccttacacaataatcacaactc

SEQ ID NO: 85646 - DNA, 120 bp, Artificial Sequence
  ENSG00000084674_79 (sequence is synthesized)
ctccactgaaagatttctctctatgggaaaaaacaggcttgaaggaattcttgaaaacgacaaagcaatcatttgatttaagtgtaaaagctcagtataagaaaaacaaacacaggcatt

SEQ ID NO: 85647 - DNA, 120 bp, Artificial Sequence
  ENSG00000084674_80 (sequence is synthesized)
ccatcacaaatcctttggctgtgctttgtgagtttatcagtcagagcatcaaatcctttgacaggcattttgaaaaaaacagaaacaatgcattagattttgtcaccaaatcctataatg

SEQ ID NO: 85648 - DNA, 120 bp, Artificial Sequence
  ENSG00000084674_81 (sequence is synthesized)
aaacaaaaattaagtttgataagtacaaagctgaaaaatctcacgacgagctccccaggacctttcaaattcctggatacactgttccagttgtcaatgttgaagtgtctccattcacca

SEQ ID NO: 85649 - DNA, 120 bp, Artificial Sequence
  ENSG00000084674_82 (sequence is synthesized)
tagagatgtcggcattcggctatgtgttcccaaaagcagtcagcatgcctagtttctccatcctaggttctgacgtccgtgtgccttcatacacattaatcctgccatcattagagctgc

SEQ ID NO: 85650 - DNA, 120 bp, Artificial Sequence
  ENSG00000084674_83 (sequence is synthesized)
cagtccttcatgtccctagaaatctcaagctttctcttccagatttcaaggaattgtgtaccataagccatatttttattcctgccatgggcaatattacctatgatttctcctttaaat

SEQ ID NO: 85651 - DNA, 120 bp, Artificial Sequence
  ENSG00000084674_84 (sequence is synthesized)
caagtgtcatcacactgaataccaatgctgaactttttaaccagtcagatattgttgctcatctcctttcttcatcttcatctgtcattgatgcactgcagtacaaattagagggcacca

SEQ ID NO: 85652 - DNA, 120 bp, Artificial Sequence
  ENSG00000084674_85 (sequence is synthesized)
caagattgacaagaaaaaggggattgaagttagccacagctctgtctctgagcaacaaatttgtggagggtagtcataacagtactgtgagcttaaccacgaaaaatatggaagtgtcag

SEQ ID NO: 85653 - DNA, 120 bp, Artificial Sequence
  ENSG00000084674_86 (sequence is synthesized)
tggcaacaaccacaaaagcccaaattccaattttgagaatgaatttcaagcaagaacttaatggaaataccaagtcaaaacctactgtctcttcctccatggaatttaagtatgatttca

SEQ ID NO: 85654 - DNA, 120 bp, Artificial Sequence
  ENSG00000084674_87 (sequence is synthesized)
attcttcaatgctgtactctaccgctaaaggagcagttgaccacaagcttagcttggaaagcctcacctcttacttttccattgagtcatctaccaaaggagatgtcaagggttcggttc

SEQ ID NO: 85655 - DNA, 120 bp, Artificial Sequence
  ENSG00000084674_88 (sequence is synthesized)
tttctcgggaatattcaggaactattgctagtgaggccaacacttacttgaattccaagagcacacggtcttcagtgaagctgcagggcacttccaaaattgatgatatctggaaccttg

SEQ ID NO: 85656 - DNA, 120 bp, Artificial Sequence
  ENSG00000084674_89 (sequence is synthesized)
aagtaaaagaaaattttgctggagaagccacactccaacgcatatattccctctgggagcacagtacgaaaaaccacttacagctagagggcctctttttcaccaacggagaacatacaa

SEQ ID NO: 85657 - DNA, 120 bp, Artificial Sequence
  ENSG00000084674_90 (sequence is synthesized)
gcaaagccaccctggaactctctccatggcaaatgtcagctcttgttcaggtccatgcaagtcagcccagttccttccatgatttccctgaccttggccaggaagtggccctgaatgcta

SEQ ID NO: 85658 - DNA, 120 bp, Artificial Sequence
  ENSG00000084674_91 (sequence is synthesized)
acactaagaaccagaagatcagatggaaaaatgaagtccggattcattctgggtctttccagagccaggtcgagctttccaatgaccaagaaaaggcacaccttgacattgcaggatcct

SEQ ID NO: 85659 - DNA, 120 bp, Artificial Sequence
  ENSG00000084674_92 (sequence is synthesized)
tagaaggacacctaaggttcctcaaaaatatcatcctaccagtctatgacaagagcttatgggatttcctaaagctggatgtaaccaccagcattggtaggagacagcatcttcgtgttt

SEQ ID NO: 85660 - DNA, 120 bp, Artificial Sequence
  ENSG00000084674_93 (sequence is synthesized)
caactgcctttgtgtacaccaaaaaccccaatggctattcattctccatccctgtaaaagttttggctgataaattcattattcctgggctgaaactaaatgatctaaattcagttcttg

SEQ ID NO: 85661 - DNA, 120 bp, Artificial Sequence
  ENSG00000084674_94 (sequence is synthesized)
tcatgcctacgttccatgtcccatttacagatcttcaggttccatcgtgcaaacttgacttcagagaaatacaaatctataagaagctgagaacttcatcatttgccctcaacctaccaa

SEQ ID NO: 85662 - DNA, 120 bp, Artificial Sequence
  ENSG00000084674_95 (sequence is synthesized)
cactccccgaggtaaaattccctgaagttgatgtgttaacaaaatattctcaaccagaagactccttgattcccttttttgagataaccgtgcctgaatctcagttaactgtgtcccagt

SEQ ID NO: 85663 - DNA, 120 bp, Artificial Sequence
  ENSG00000084674_96 (sequence is synthesized)
tcacgcttccaaaaagtgtttcagatggcattgctgctttggatctaaatgcagtagccaacaagatcgcagactttgagttgcccaccatcatcgtgcctgagcagaccattgagattc

SEQ ID NO: 85664 - DNA, 120 bp, Artificial Sequence
  ENSG00000084674_97 (sequence is synthesized)
cctccattaagttctctgtacctgctggaattgtcattccttcctttcaagcactgactgcacgctttgaggtagactctcccgtgtataatgccacttggagtgccagtttgaaaaaca

SEQ ID NO: 85665 - DNA, 120 bp, Artificial Sequence
  ENSG00000084674_98 (sequence is synthesized)
aagcagattatgttgaaacagtcctggattccacatgcagctcaaccgtacagttcctagaatatgaactaaatgttttgggaacacacaaaatcgaagatggtacgttagcctctaaga

SEQ ID NO: 85666 - DNA, 120 bp, Artificial Sequence
  ENSG00000084674_99 (sequence is synthesized)
ctaaaggaacatttgcacaccgtgacttcagtgcagaatatgaagaagatggcaaatatgaaggacttcaggaatgggaaggaaaagcgcacctcaatatcaaaagcccagcgttcaccg

SEQ ID NO: 85667 - DNA, 120 bp, Artificial Sequence
  ENSG00000084674_100 (sequence is synthesized)
atctccatctgcgctaccagaaagacaagaaaggcatctccacctcagcagcctccccagccgtaggcaccgtgggcatggatatggatgaagatgacgacttttctaaatggaacttct

SEQ ID NO: 85668 - DNA, 120 bp, Artificial Sequence
  ENSG00000084674_101 (sequence is synthesized)
actacagccctcagtcctctccagataaaaaactcaccatattcaaaactgagttgagggtccgggaatctgatgaggaaactcagatcaaagttaattgggaagaagaggcagcttctg

SEQ ID NO: 85669 - DNA, 120 bp, Artificial Sequence
  ENSG00000084674_102 (sequence is synthesized)
gcttgctaacctctctgaaagacaacgtgcccaaggccacaggggtcctttatgattatgtcaacaagtaccactgggaacacacagggctcaccctgagagaagtgtcttcaaagctga

SEQ ID NO: 85670 - DNA, 120 bp, Artificial Sequence
  ENSG00000084674_103 (sequence is synthesized)
gaagaaatctgcagaacaatgctgagtgggtttatcaaggggccattaggcaaattgatgatatcgacgtgaggttccagaaagcagccagtggcaccactgggacctaccaagagtgga

SEQ ID NO: 85671 - DNA, 120 bp, Artificial Sequence
  ENSG00000084674_104 (sequence is synthesized)
aggacaaggcccagaatctgtaccaggaactgttgactcaggaaggccaagccagtttccagggactcaaggataacgtgtttgatggcttggtacgagttactcaagaattccatatga

SEQ ID NO: 85672 - DNA, 120 bp, Artificial Sequence
  ENSG00000084674_105 (sequence is synthesized)
aagtcaagcatctgattgactcactcattgattttctgaacttccccagattccagtttccggggaaacctgggatatacactagggaggaactttgcactatgttcataagggaggtag

SEQ ID NO: 85673 - DNA, 120 bp, Artificial Sequence
  ENSG00000084674_106 (sequence is synthesized)
ggacggtactgtcccaggtatattcgaaagtccataatggttcagaaatactgttttcctatttccaagacctagtgattacacttcctttcgagttaaggaaacataaactaatagatg

SEQ ID NO: 85674 - DNA, 120 bp, Artificial Sequence
  ENSG00000084674_107 (sequence is synthesized)
taatctcgatgtatagggaactgttgaaagatttatcaaaagaagcccaagaggtatttaaagccattcagtctctcaagaccacagaggtgctacgtaatcttcaggaccttttacaat

SEQ ID NO: 85675 - DNA, 120 bp, Artificial Sequence
  ENSG00000084674_108 (sequence is synthesized)
tcattttccaactaatagaagataacattaaacagctgaaagagatgaaatttacttatcttattaattatatccaagatgagatcaacacaatcttcagtgattatatcccatatgttt

SEQ ID NO: 85676 - DNA, 120 bp, Artificial Sequence
  ENSG00000084674_109 (sequence is synthesized)
ttaaattgttgaaagaaaacctatgccttaatcttcataagttcaatgaatttattcaaaacgagcttcaggaagcttctcaagagttacagcagatccatcaatacattatggcccttc

SEQ ID NO: 85677 - DNA, 120 bp, Artificial Sequence
  ENSG00000084674_110 (sequence is synthesized)
gtgaagaatattttgatccaagtatagttggctggacagtgaaatattatgaacttgaagaaaagatagtcagtctgatcaagaacctgttagttgctcttaaggacttccattctgaat

SEQ ID NO: 85678 - DNA, 120 bp, Artificial Sequence
  ENSG00000084674_111 (sequence is synthesized)
atattgtcagtgcctctaactttacttcccaactctcaagtcaagttgagcaatttctgcacagaaatattcaggaatatcttagcatccttaccgatccagatggaaaagggaaagaga

SEQ ID NO: 85679 - DNA, 120 bp, Artificial Sequence
  ENSG00000084674_112 (sequence is synthesized)
agattgcagagctttctgccactgctcaggaaataattaaaagccaggccattgcgacgaagaaaataatttctgattaccaccagcagtttagatataaactgcaagatttttcagacc

SEQ ID NO: 85680 - DNA, 120 bp, Artificial Sequence
  ENSG00000084674_113 (sequence is synthesized)
aactctctgattactatgaaaaatttattgctgaatccaaaagattgattgacctgtccattcaaaactaccacacatttctgatatacatcacggagttactgaaaaagctgcaatcaa

SEQ ID NO: 85681 - DNA, 120 bp, Artificial Sequence
  ENSG00000084674_114 (sequence is synthesized)
ccacagtcatgaacccctacatgaagcttgctccaggagaacttactatcatcctctaattttttaaaagaaatcttcatttattcttcttttccaattgaactttcacatagcacagaa

SEQ ID NO: 85682 - DNA, 120 bp, Artificial Sequence
  ENSG00000084674_115 (sequence is synthesized)
aaaattcaaactgcctatattgataaaaccatacagtgagccagccttgcagtaggcagtagactataagcagaagcacatatgaactggacctgcaccaaagctggcaccagggctcgg

SEQ ID NO: 85683 - DNA, 120 bp, Artificial Sequence
  ENSG00000084674_116 (sequence is synthesized)
aaggtctctgaactcagaaggatggcattttttgcaagttaaagaaaatcaggatctgagttattttgctaaacttgggggaggaggaacaaataaatggagtctttattgtgtatcata

SEQ ID NO: 85684 - DNA, 120 bp, Artificial Sequence
  ENSG00000084674_117 (sequence is synthesized)
tcacatggaaatgttaacatttagaaattaagctattcataatgttagctgtatttttaagagcattaatttattcatctggaaaacaatgttcggtataccttcctctacctttgctga

SEQ ID NO: 85685 - DNA, 88 bp, Artificial Sequence
  ENSG00000084674_118 (sequence is synthesized)
ggaaaacaatgttcggtataccttcctctacctttgctgaaggtccgagatggagtcttgctcccaggctggagtgcagtgatacaat

SEQ ID NO: 85686 - DNA, 120 bp, Artificial Sequence
  ENSG00000084674_119 (sequence is synthesized)
tgcctcagcctcccaagtagctgggactgtggacgtgcaccagcatgcccggctaatttgtgtatctttagtagagacaagcctgttgacaaccatgtcaggctggtttcgaactcctga

SEQ ID NO: 85687 - DNA, 120 bp, Artificial Sequence
  ENSG00000084674_120 (sequence is synthesized)
ctgacctcaagtgatcctccagcctgggcctcccacagtgctggaataacaggtgtgagccactgcacctgacctgaaggtccttttaagattgaaatgatacaatgattataaaagaaa

SEQ ID NO: 85688 - DNA, 120 bp, Artificial Sequence
  ENSG00000084676_0 (sequence is synthesized)
ttccagttacagctatatcagagaatgagttaatctcctcagaaatcactaaatactactctgaggggcttagaaattaacaggttgtttatataattggccttaaatgaggtgagagtg

SEQ ID NO: 85689 - DNA, 120 bp, Artificial Sequence
  ENSG00000084676_1 (sequence is synthesized)
aagagactagagccatctctggaaaacatcattatcccattccccgggaagctaccctctggaactcaagatttgaccatatctgttttgaggattcattatgaacaaagaagtctccca

SEQ ID NO: 85690 - DNA, 120 bp, Artificial Sequence
  ENSG00000084676_2 (sequence is synthesized)
ggtgtgaagtttttcaacatgagtggcctcggggacagttcatccgaccctgctaacccagactcacataagaggaaaggatcgccatgtgacacactggcatcaagcacggaaaagagg

SEQ ID NO: 85691 - DNA, 120 bp, Artificial Sequence
  ENSG00000084676_3 (sequence is synthesized)
cgcagggagcaagaaaataaatatttagaagaactagctgagttactgtctgccaacattagtgacattgacagcttgagtgtaaaaccagacaaatgcaagattttgaagaaaacagtc

SEQ ID NO: 85692 - DNA, 120 bp, Artificial Sequence
  ENSG00000084676_4 (sequence is synthesized)
gatcagatacagctaatgaagagaatggaacaagagaaatcaacaactgatgacgatgtacagaaatcagacatctcatcaagtagtcaaggagtgatagaaaaggaatccttgggacct

SEQ ID NO: 85693 - DNA, 120 bp, Artificial Sequence
  ENSG00000084676_5 (sequence is synthesized)
cttcttttggaggctttggatggatttttctttgttgtgaactgtgaagggagaattgtatttgtgtcagagaatgtaaccagctacttaggttacaatcaggaggaattaatgaatacg

SEQ ID NO: 85694 - DNA, 120 bp, Artificial Sequence
  ENSG00000084676_6 (sequence is synthesized)
agcgtctacagcatactgcacgtgggggatcatgcagaatttgtgaagaatctgctaccaaaatcactagtaaatggagttccttggcctcaagaggcaacacgacgaaatagccatacc

SEQ ID NO: 85695 - DNA, 120 bp, Artificial Sequence
  ENSG00000084676_7 (sequence is synthesized)
tttaactgcaggatgctaattcaccctccagatgagccagggaccgagaaccaagaagcttgccagcgttatgaagtaatgcagtgtttcactgtgtcacagccaaaatcaattcaagag

SEQ ID NO: 85696 - DNA, 120 bp, Artificial Sequence
  ENSG00000084676_8 (sequence is synthesized)
gatggagaagatttccagtcatgtctgatttgtattgcacggcgattacctcggcctccagctattacgggtgtagaatcctttatgaccaagcaagatactacaggtaaaatcatctct

SEQ ID NO: 85697 - DNA, 120 bp, Artificial Sequence
  ENSG00000084676_9 (sequence is synthesized)
attgatactagttccctgagagctgctggcagaactggttgggaagatttagtgaggaagtgcatttatgcttttttccaacctcagggcagagaaccatcttatgccagacagctgttc

SEQ ID NO: 85698 - DNA, 120 bp, Artificial Sequence
  ENSG00000084676_10 (sequence is synthesized)
caagaagtgatgactcgtggcactgcctccagcccctcctatagattcatattgaatgatgggacaatgcttagcgcccacaccaagtgtaaactttgctaccctcaaagtccagacatg

SEQ ID NO: 85699 - DNA, 120 bp, Artificial Sequence
  ENSG00000084676_11 (sequence is synthesized)
caacctttcatcatgggaattcatatcatcgacagggagcacagtgggctttctcctcaagatgacactaattctggaatgtcaattccccgagtaaatccctcggtcaatcctagtatc

SEQ ID NO: 85700 - DNA, 120 bp, Artificial Sequence
  ENSG00000084676_12 (sequence is synthesized)
tctccagctcatggtgtggctcgttcatccacattgccaccatccaacagcaacatggtatccaccagaataaaccgccagcagagctcagaccttcatagcagcagtcatagtaattct

SEQ ID NO: 85701 - DNA, 120 bp, Artificial Sequence
  ENSG00000084676_13 (sequence is synthesized)
agcaacagccaaggaagtttcggatgctcacccggaagtcagattgtagccaatgttgccttaaaccaaggacaggccagttcacagagcagtaatccctctttaaacctcaataattct

SEQ ID NO: 85702 - DNA, 120 bp, Artificial Sequence
  ENSG00000084676_14 (sequence is synthesized)
cctatggaaggtacaggaatatccctagcacagttcatgtctccaaggagacaggttacttctggattggcaacaaggcccaggatgccaaacaattcctttcctcctaatatttcgaca

SEQ ID NO: 85703 - DNA, 120 bp, Artificial Sequence
  ENSG00000084676_15 (sequence is synthesized)
ttaagctctcccgttggcatgacaagtagtgcctgtaataataataaccgatcttattcaaacatcccagtaacatctttacagggtatgaatgaaggacccaataactccgttggcttc

SEQ ID NO: 85704 - DNA, 120 bp, Artificial Sequence
  ENSG00000084676_16 (sequence is synthesized)
tctgccagttctccagtcctcaggcagatgagctcacagaattcacctagcagattaaatatacaaccagcaaaagctgagtccaaagataacaaagagattgcctcaattttaaatgaa

SEQ ID NO: 85705 - DNA, 120 bp, Artificial Sequence
  ENSG00000084676_17 (sequence is synthesized)
atgattcaatctgacaacagctctagtgatggcaaacctctggattcagggcttctgcataacaatgacagactttcagatggagacagtaaatactctcaaaccagtcacaaactagtg

SEQ ID NO: 85706 - DNA, 120 bp, Artificial Sequence
  ENSG00000084676_18 (sequence is synthesized)
cagcttttgacaacaactgccgaacagcagttacggcatgctgatatagacacaagctgcaaagatgtcctgtcttgcacaggcacttccaactctgcctctgctaactcttcaggaggt

SEQ ID NO: 85707 - DNA, 120 bp, Artificial Sequence
  ENSG00000084676_19 (sequence is synthesized)
tcttgtccctcttctcatagctcattgacagaacggcataaaattctacaccggctcttacaggagggtagcccctcagatatcaccactttgtctgtcgagcctgataaaaaggacagt

SEQ ID NO: 85708 - DNA, 120 bp, Artificial Sequence
  ENSG00000084676_20 (sequence is synthesized)
gcatctacttctgtgtcagtgactggacaggtacaaggaaactccagtataaaactagaactggatgcttcaaagaaaaaagaatcaaaagaccatcagctcctacgctatcttttagat

SEQ ID NO: 85709 - DNA, 120 bp, Artificial Sequence
  ENSG00000084676_21 (sequence is synthesized)
aaagatgagaaagatttaagatcaactccaaacctgagcctggatgatgtaaaggtgaaagtggaaaagaaagaacagatggatccatgtaatacaaacccaaccccaatgaccaaaccc

SEQ ID NO: 85710 - DNA, 120 bp, Artificial Sequence
  ENSG00000084676_22 (sequence is synthesized)
actcctgaggaaataaaactggaggcccagagccagtttacagctgaccttgaccagtttgatcagttactgcccacgctggagaaggcagcacagttgccaggcttatgtgagacagac

SEQ ID NO: 85711 - DNA, 120 bp, Artificial Sequence
  ENSG00000084676_23 (sequence is synthesized)
aggatggatggtgcggtcaccagtgtaaccatcaaatcggagatcctgccagcttcacttcagtccgccactgccagacccacttccaggctaaatagattacctgagctggaattggaa

SEQ ID NO: 85712 - DNA, 120 bp, Artificial Sequence
  ENSG00000084676_24 (sequence is synthesized)
gcaattgataaccaatttggacaaccaggaacaggcgatcagattccatggacaaataatacagtgacagctataaatcagagtaaatcagaagaccagtgtattagctcacaattagat

SEQ ID NO: 85713 - DNA, 120 bp, Artificial Sequence
  ENSG00000084676_25 (sequence is synthesized)
gagcttctctgtccacccacaacagtagaagggagaaatgatgagaaggctcttcttgaacagctggtatccttccttagtggcaaagatgaaactgagctagctgaactagacagagct

SEQ ID NO: 85714 - DNA, 120 bp, Artificial Sequence
  ENSG00000084676_26 (sequence is synthesized)
ctgggaattgacaaacttgttcaggggggtggattagatgtattatcagagagatttccaccacaacaagcaacgccacctttgatcatggaagaaagacccaacctttattcccagcct

SEQ ID NO: 85715 - DNA, 120 bp, Artificial Sequence
  ENSG00000084676_27 (sequence is synthesized)
tactcttctccttctcctactgccaatctccctagccctttccaaggcatggtcaggcaaaaaccttcactggggacgatgcctgttcaagtaacacctccccgaggtgctttttcacct

SEQ ID NO: 85716 - DNA, 120 bp, Artificial Sequence
  ENSG00000084676_28 (sequence is synthesized)
atcggcaagctatcttaaaccagtttgcagcaactgctcctgttggcatcaatatgagatcaggcatgcaacagcaaattacacctcagccacccctgaatgctcaaatgttggcacaac

SEQ ID NO: 85717 - DNA, 120 bp, Artificial Sequence
  ENSG00000084676_29 (sequence is synthesized)
gtcagcgggaactgtacagtcaacagcaccgacagaggcagctaatacagcagcaaagagccatgcttatgaggcagcaaagctttgggaacaacctccctccctcatctggactaccag

SEQ ID NO: 85718 - DNA, 120 bp, Artificial Sequence
  ENSG00000084676_30 (sequence is synthesized)
ttcaaatggggaacccccgtcttcctcagggtgctccacagcaattcccctatccaccaaactatggtacaaatccaggaaccccacctgcttctaccagcccgttttcacaactagcag

SEQ ID NO: 85719 - DNA, 120 bp, Artificial Sequence
  ENSG00000084676_31 (sequence is synthesized)
caaatcctgaagcatccttggccaaccgcaacagcatggtgagcagaggcatgacaggaaacataggaggacagtttggcactggaatcaatcctcagatgcagcagaatgtcttccagt

SEQ ID NO: 85720 - DNA, 120 bp, Artificial Sequence
  ENSG00000084676_32 (sequence is synthesized)
atccaggagcaggaatggttccccaaggtgaggccaactttgctccatctctaagccctgggagctccatggtgccgatgccaatccctcctcctcagagttctcttctccagcaaactc

SEQ ID NO: 85721 - DNA, 120 bp, Artificial Sequence
  ENSG00000084676_33 (sequence is synthesized)
cacctgcctccgggtatcagtcaccagacatgaaggcctggcagcaaggagcgataggaaacaacaatgtgttcagtcaagctgtccagaaccagcccacgcctgcacagccaggagtat

SEQ ID NO: 85722 - DNA, 120 bp, Artificial Sequence
  ENSG00000084676_34 (sequence is synthesized)
acaacaacatgagcatcaccgtttccatggcaggtggaaatacgaatgttcagaacatgaacccaatgatggcccagatgcagatgagctctttgcagatgccaggaatgaacactgtgt

SEQ ID NO: 85723 - DNA, 120 bp, Artificial Sequence
  ENSG00000084676_35 (sequence is synthesized)
gccctgagcagataaatgatcccgcactgagacacacaggcctctactgcaaccagctctcatccactgaccttctcaaaacagaagcagatggaacccaggacaagaagacagaagagt

SEQ ID NO: 85724 - DNA, 120 bp, Artificial Sequence
  ENSG00000084676_36 (sequence is synthesized)
tcttctctgtggtgactacagactagaggaatgctctacaggtgcaacaggttcaggtgtttgctgacgtccagtgtacagtgaatctggtaggcggggacccttacctgaaccagcctg

SEQ ID NO: 85725 - DNA, 120 bp, Artificial Sequence
  ENSG00000084676_37 (sequence is synthesized)
gtccactgggaactcaaaagcccacgtcaggaccacagaccccccaggcccagcagaagagcctccttcagcagctactgactgaataaccacttttaaaggaatgtgaaatttaaataa

SEQ ID NO: 85726 - DNA, 120 bp, Artificial Sequence
  ENSG00000084676_38 (sequence is synthesized)
ataatagacatacagagatatacaaatatattatatatttttctgagatttttgatatctcaatctgcagccattcttcaggtcgtagcatttggagcaaaaaaaaaaaaaaaaaaaaaa

SEQ ID NO: 85727 - DNA, 120 bp, Artificial Sequence
  ENSG00000084676_39 (sequence is synthesized)
gagtttgcttttgtcgggagattgaaagatgtttttgtttctttctttgtaaaggccttggatattgaaaaaataccaaggcagaacagttggacaatctatttcttgagccaaatttaa

SEQ ID NO: 85728 - DNA, 120 bp, Artificial Sequence
  ENSG00000084676_40 (sequence is synthesized)
ttattcttatttttgtaatcagtcattggcttcttatctggatgaaggcttttggaggagaaccaaaacgacaagttccaagaagaagatgaagctccgcctccgccgcttagtcccaac

SEQ ID NO: 85729 - DNA, 120 bp, Artificial Sequence
  ENSG00000084676_41 (sequence is synthesized)
cctgcccaggaagaagggcccgtggggctttgcctgtgcccgtccaccaaaggctgtcatgtgtctcgaaatcagcagccctccccatcccaatcccaggcagcttgtgtgtacaatcag

SEQ ID NO: 85730 - DNA, 120 bp, Artificial Sequence
  ENSG00000084676_42 (sequence is synthesized)
cttctctagcaactctgtatctgttggcttcaagagaatattttgcctccacatatgtaccccttctcctttttttaaagatggatttaaaccaagatgcctccaggaaagaggacgaaa

SEQ ID NO: 85731 - DNA, 120 bp, Artificial Sequence
  ENSG00000084676_43 (sequence is synthesized)
tgagtatattcacagaggaatccaaaaaatacagtttgggggaaaatgcaataatttttgatgagatgggtgaaggacaagaagtgagttgtgtcaattattgtagatacaattttctga

SEQ ID NO: 85732 - DNA, 120 bp, Artificial Sequence
  ENSG00000084676_44 (sequence is synthesized)
ttaaatctggaaaaataaaaggcagcctgttttttctgcttttattgtattaacagctgaggtagctaaagttatttaaaataaaattaaatttatgatccaagtagcttatttttccct

SEQ ID NO: 85733 - DNA, 120 bp, Artificial Sequence
  ENSG00000084676_45 (sequence is synthesized)
ccctttaaatctcattgtaaatatatttgatttcttgtagaaattgatttccttctgtttaattttatgcttttattatactcttgatttttctaaatttgtgtgtgaaatataacattg

SEQ ID NO: 85734 - DNA, 120 bp, Artificial Sequence
  ENSG00000084676_46 (sequence is synthesized)
aattgcagttacatttggttagtaatatttcattattttaataactgtgatgtcatgtatggatttactttggggttcaaatcaaaatgtcactgccagaaagagctgttccagctgatc

SEQ ID NO: 85735 - DNA, 120 bp, Artificial Sequence
  ENSG00000084676_47 (sequence is synthesized)
tagagcatactgccctagagtgtccctgggatcatctgaacagaagtgcacaggctacttgtacagagaaaaaattaatactcaaaggaaatcttcattttttagattgactttgggaat

SEQ ID NO: 85736 - DNA, 120 bp, Artificial Sequence
  ENSG00000084676_48 (sequence is synthesized)
ttgaattttcatcagtgcaaatataaatttctctatcctgctctgaggctaattggtaccatattttccctttgtgtcttgtgactctgccacatcccatctcatcctggcctctgagtc

SEQ ID NO: 85737 - DNA, 120 bp, Artificial Sequence
  ENSG00000084676_49 (sequence is synthesized)
aagaacccagtgaactgactttctagttctagaagttccgctgcaaggccaggaaagcttgagaaaggtattgtggaagaagcaaaggtagacccccatcactcacctttgtctgcatcc

SEQ ID NO: 85738 - DNA, 120 bp, Artificial Sequence
  ENSG00000084676_50 (sequence is synthesized)
ctgggcctgtgaatgatgacagcacctgacattctgcaccagctacctctgcctccatggcagagaaaaggccataagaacagtggaagaggagcatggactcagacttcaaggaagaag

SEQ ID NO: 85739 - DNA, 120 bp, Artificial Sequence
  ENSG00000084676_51 (sequence is synthesized)
ccatttccccaggtccttccttctgcatctcaccacccctagttacaaataactccattgaacagcatctattcagaaactatgccgaataaaaagattggtggaagggctcatgtggtt

SEQ ID NO: 85740 - DNA, 120 bp, Artificial Sequence
  ENSG00000084676_52 (sequence is synthesized)
agcaactatgaaacagaaataggacactcagttacaaacattatctcctttagtttttcagaaaatgcatccctgatttcattcatttccagcttgaaagccagccatattactctagtc

SEQ ID NO: 85741 - DNA, 120 bp, Artificial Sequence
  ENSG00000084676_53 (sequence is synthesized)
cctaccaaactgctctagaaggtcatttccattttgtttgtgatatttagacgcgcagacttcaggaagttcacctttaacttcagcattccagatgaagtttcctgactcagtgctttt

SEQ ID NO: 85742 - DNA, 120 bp, Artificial Sequence
  ENSG00000084676_54 (sequence is synthesized)
gcataaggaactagaaaaaaaaagtaaggaaaattggagatgctaacatcctcccccatcccaactgcaccttaaaatatgcatgtcaccttcaaggttttataattgcactgtttgttt

SEQ ID NO: 85743 - DNA, 120 bp, Artificial Sequence
  ENSG00000084676_55 (sequence is synthesized)
tatgtatgtacagattaaaattattgctacatttgaggaaaataaaattgcttgcttctatgtaattcctgtcattccacaggaaattcacttttccagctactgaatagaatttgttta

SEQ ID NO: 85744 - DNA, 120 bp, Artificial Sequence
  ENSG00000084676_56 (sequence is synthesized)
acaacctcatgggttgcctcttcatttacagggaagaaatgaaatgtacatctgcagaaattgccaaagcccaaattaacgagtattataaaaggataataaagcatccctgaagccaaa

SEQ ID NO: 85745 - DNA, 120 bp, Artificial Sequence
  ENSG00000084676_57 (sequence is synthesized)
gaatctcgcctgccgggaccgcgaaatgggggcgaccgcggcgtccctctccgtcggcgcagccctcgacggcgcttgggtttgaccccggcgcgcttgctcgccccttctcccgagaag

SEQ ID NO: 85746 - DNA, 120 bp, Artificial Sequence
  ENSG00000084676_58 (sequence is synthesized)
gggtttcggaggagcagaggtttaataggcaagagaaagagaaaggaaaacagctctctctctaatgagagagaggggacttcggagaggaaaagaggacaggagatacggcaatcgtgg

SEQ ID NO: 85747 - DNA, 120 bp, Artificial Sequence
  ENSG00000084676_59 (sequence is synthesized)
ataggaaaggaggaaattacgatagaaaagttggagatccttttgctaacacccctttgggcagttggatgctgagatctatccatactaatggaaatgtaactggaactgactctgatg

SEQ ID NO: 85748 - DNA, 120 bp, Artificial Sequence
  ENSG00000084676_60 (sequence is synthesized)
ctaatactggttgaaagccctttaatttttcagtgacatcataaagattttttatcctactgaaatcatccatagaatggttttaaaccagttttctaaatatcatgtattttttaaaac

SEQ ID NO: 85749 - DNA, 120 bp, Artificial Sequence
  ENSG00000084676_61 (sequence is synthesized)
ctaccactggatacccagactctgaaactgggcttctcccaatcttggcaacattagcaatgatactcactttcagtattgatggcaaccctataggaggcgtgaccattccaattttga

SEQ ID NO: 85750 - DNA, 80 bp, Artificial Sequence
  ENSG00000084676_62 (sequence is synthesized)
ccgccgccgagagggggagccggaagtcggcgcgggcgcccctcggccccgacgacgccgtgaccttggccggcccgctc

SEQ ID NO: 85751 - DNA, 120 bp, Artificial Sequence
  ENSG00000084676_63 (sequence is synthesized)
ccaacatttagaatttctacttattctgagttgtttatataattggccttaaatgaggtgagagtgaagagactagagccatctctggaaaacatcattatcccattccccgggaagcta

SEQ ID NO: 85752 - DNA, 120 bp, Artificial Sequence
  ENSG00000084676_64 (sequence is synthesized)
ggaacactcctcttagtctatttttggcagagctgctttattactttcactgccacttcagagcttttgtttaatctactccaagttcagtggctttctttgagtctttcatactcacca

SEQ ID NO: 85753 - DNA, 120 bp, Artificial Sequence
  ENSG00000084676_65 (sequence is synthesized)
tgttgtcttccttcccccagggtctttgcacatgtttctccctcaatccagcttgcttcctcttgatttcctttagttaacacctactcatccttcagatgccagcttagtcattacata

SEQ ID NO: 85754 - DNA, 120 bp, Artificial Sequence
  ENSG00000084676_66 (sequence is synthesized)
cttaaagagagccttctcttccttccataactgttagatcaagttcctccattcatgtatctgtctcagatgtttttatagccatgatccataattgcagatttttactagtgtgattat

SEQ ID NO: 85755 - DNA, 120 bp, Artificial Sequence
  ENSG00000084676_67 (sequence is synthesized)
gacaacacctcattttaaacgtttagtgataatgtggattagcattttgtctctcaccagtattacacagatcctttgcttaagagtgaaatatctttttattaatgccactataaataa

SEQ ID NO: 85756 - DNA, 120 bp, Artificial Sequence
  ENSG00000084676_68 (sequence is synthesized)
taaaacagttatatttaggcatgtgaacatcattcatcatgtgtattttaaattatgacctctatccttttgtaattaatgttaaggtgagcaattgatgttaaggagaacaattttgtc

SEQ ID NO: 85757 - DNA, 120 bp, Artificial Sequence
  ENSG00000084676_69 (sequence is synthesized)
gtctcacccaaaacaccccataacaggactttcagaaatacagtattgggtcagattgtttccagatatcttccttgaaaactaatcctgtgagttgcagaaataaaagattctgtacta

SEQ ID NO: 85758 - DNA, 120 bp, Artificial Sequence
  ENSG00000084693_0 (sequence is synthesized)
gtcccggcaccgcggcgctcgggtgtttttgggggcccgggtggagggcccgggtgccggggcccaaggtgcggcctcgctagcgggagagggagcgggatcaccggcccggagagagct

SEQ ID NO: 85759 - DNA, 120 bp, Artificial Sequence
  ENSG00000084693_1 (sequence is synthesized)
agagagctctcagggccagagcggggcaggaggatgctttcccagccccaccatggagctgcgctgtgggggattgctgttcagttctcgctttgattcagggaatctagcccacgtgga

SEQ ID NO: 85760 - DNA, 120 bp, Artificial Sequence
  ENSG00000084693_2 (sequence is synthesized)
gaaggtggaatctttgtccagtgatggggaaggggtaggaggtggggcgtcagccctgaccagtggcattgcctcttcccctgactatgaattcaacgtgtggacccgaccagactgtgc

SEQ ID NO: 85761 - DNA, 120 bp, Artificial Sequence
  ENSG00000084693_3 (sequence is synthesized)
tgaaacggaatttgagaatgggaacaggtcatggttctacttcagcgtccggggaggaatgccaggaaaactcatcaagatcaacattatgaacatgaacaagcagagcaagctgtattc

SEQ ID NO: 85762 - DNA, 120 bp, Artificial Sequence
  ENSG00000084693_4 (sequence is synthesized)
ccagggcatggccccctttgtgcgcacactgcccacccggccacgctgggaacgcattcgagaccggcccacctttgagatgacagagacgcagtttgtgttatcctttgttcatcgttt

SEQ ID NO: 85763 - DNA, 120 bp, Artificial Sequence
  ENSG00000084693_5 (sequence is synthesized)
cgtggagggccgtggggccaccaccttcttcgccttctgctaccccttctcctacagtgactgccaggaactgctaaaccagctagaccagcgctttccggagaaccaccctacccatag

SEQ ID NO: 85764 - DNA, 120 bp, Artificial Sequence
  ENSG00000084693_6 (sequence is synthesized)
cagccccctggataccatctattaccatcgggagctcctttgctattctctggatggacttcgtgtagatctgctgacgatcacttcctgccatgggcttcgagaagatcgagagccccg

SEQ ID NO: 85765 - DNA, 120 bp, Artificial Sequence
  ENSG00000084693_7 (sequence is synthesized)
tctagagcagctatttcctgataccagcacccctcgaccattccgtttcgcaggcaagaggatattcttcttaagcagtagagtacacccaggggagactccatctagctttgtcttcaa

SEQ ID NO: 85766 - DNA, 120 bp, Artificial Sequence
  ENSG00000084693_8 (sequence is synthesized)
tggctttctggacttcatcctccgacctgatgatccccgggcccaaaccctccgtcgcctcttcgtctttaagctgattcccatgttgaaccccgatggtgtggtccggggacactaccg

SEQ ID NO: 85767 - DNA, 120 bp, Artificial Sequence
  ENSG00000084693_9 (sequence is synthesized)
cacagactcacgtggagtgaatctgaaccgtcagtacctgaagcctgatgccgtcctgcacccggccatctatggggccaaagctgtgcttctctaccaccatgtgcactctcgtctgaa

SEQ ID NO: 85768 - DNA, 120 bp, Artificial Sequence
  ENSG00000084693_10 (sequence is synthesized)
ctcccagagttcctctgagcaccagcccagttcctgtctccctcctgatgctcctgtttctgacctggagaaagccaacaatctccaaaatgaagctcagtgtgggcactcagctgacag

SEQ ID NO: 85769 - DNA, 120 bp, Artificial Sequence
  ENSG00000084693_11 (sequence is synthesized)
gcataacgctgaagcctggaaacaaacagagccagcagaacagaagctcaacagtgtgtggattatgccacaacagtctgcggggcttgaagagtcagcccctgataccatcccccccaa

SEQ ID NO: 85770 - DNA, 120 bp, Artificial Sequence
  ENSG00000084693_12 (sequence is synthesized)
agagagtggcgttgcttactatgtggacctgcatggacatgcttccaaaaggggctgcttcatgtacggaaacagctttagtgatgagagcacccaggtggaaaacatgctatatccaaa

SEQ ID NO: 85771 - DNA, 120 bp, Artificial Sequence
  ENSG00000084693_13 (sequence is synthesized)
cccgagaccgtagagatggccagtctaaagagggaagcggccgtgttgcaatctacaaagcctcagggataatccacagctacacacttgaatgcaactacaacactggacgctcagtaa

SEQ ID NO: 85772 - DNA, 120 bp, Artificial Sequence
  ENSG00000084693_14 (sequence is synthesized)
acagcatccctgctgcctgccatgacaatgggcgtgccagcccccctcccccgccggctttcccctccagatacactgtggaactatttgagcaggtgggacgagctatggccattgcag

SEQ ID NO: 85773 - DNA, 120 bp, Artificial Sequence
  ENSG00000084693_15 (sequence is synthesized)
ccctggacatggcggaatgtaatccgtggccccgaattgtactgtcagagcacagcagccttactaatctacgggcctggatgctgaaacatgtacgcaacagccgaggcctaagcagca

SEQ ID NO: 85774 - DNA, 120 bp, Artificial Sequence
  ENSG00000084693_16 (sequence is synthesized)
ctctgaatgtgggtgtcaacaagaagaggggccttcgaactccacccaaaagtcacaatgggttgcctgtctcctgctccgaaaacaccttgagtcgggcacgaagttttagcaccggca

SEQ ID NO: 85775 - DNA, 120 bp, Artificial Sequence
  ENSG00000084693_17 (sequence is synthesized)
caagtgccggtggtagcagcagcagccaacaaaattctccacagatgaagaattcccccagctttccttttcatggcagtcggcctgcagggctgccaggcctgggctctagtacccaaa

SEQ ID NO: 85776 - DNA, 120 bp, Artificial Sequence
  ENSG00000084693_18 (sequence is synthesized)
aggtcacccaccgggtgctgggccccgtcagagagccccgaagccaggacaggagacggcagcagcagcccctgaaccatcgtcctgcaggcagcctcgctccatccccagctcctacta

SEQ ID NO: 85777 - DNA, 120 bp, Artificial Sequence
  ENSG00000084693_19 (sequence is synthesized)
gttctggcccagcctcctcacacaagctgggctcctgtctactgcctgattcattcaacataccagggagcagttgctcactcttgtcctctggagacaaaccagaggctgtcatggtaa

SEQ ID NO: 85778 - DNA, 120 bp, Artificial Sequence
  ENSG00000084693_20 (sequence is synthesized)
tcgggaaaggtctgctagggactggagctcggatgccctgcatcaagactcgattgcaggctaggcccaggttgggccggggctcaccgccgactcgcagagggatgaaaggctcttcag

SEQ ID NO: 85779 - DNA, 120 bp, Artificial Sequence
  ENSG00000084693_21 (sequence is synthesized)
gccccacatcccctaccccccggaccagggagagcagtgagctggagctgggatcctgctctgctacaccagggctgcctcaggccaggcccccacggccccgctctgcccctgcctttt

SEQ ID NO: 85780 - DNA, 120 bp, Artificial Sequence
  ENSG00000084693_22 (sequence is synthesized)
ctcctatatcctgtagtctatctgactccccatcctggaattgttacagcaggggtcccttgggccaacctgaggtttgttttgtccctaaatctcccccactgactgtttctccccggg

SEQ ID NO: 85781 - DNA, 120 bp, Artificial Sequence
  ENSG00000084693_23 (sequence is synthesized)
tctgataatgcctttatgttcaagcccaggatatagccccaagatggggtaacagtgggaaatatgctagttcccctccaggccgctgattccatgtgacagccgttaagtccttggaat

SEQ ID NO: 85782 - DNA, 120 bp, Artificial Sequence
  ENSG00000084693_24 (sequence is synthesized)
gccagccacgctgtccaaggcattacagagtatcaccttgagacagaacaaaacagggacctgccaccccttccctccctccgcagcacaagattttgggaccacaaaaaaaagtctata

SEQ ID NO: 85783 - DNA, 120 bp, Artificial Sequence
  ENSG00000084693_25 (sequence is synthesized)
tttttatattggggggagggagtagaaaagcaagcccctatactgggccctattcagtggcagcttcttgttccataggattaaggaagactctgaggaaataaaagttgtttggaaaaa

SEQ ID NO: 85784 - DNA, 120 bp, Artificial Sequence
  ENSG00000084693_26 (sequence is synthesized)
tgggagcccctgcaacatgtgttcggttgtctggggcattgctgggggaagtaagagcttgaagatatactgttggcccaggaccaaggggtgaatcaataaaattagtttgtagcagaa

SEQ ID NO: 85785 - DNA, 120 bp, Artificial Sequence
  ENSG00000084693_27 (sequence is synthesized)
tttctgcgttcaatgtacatgtgttgagtcccagtttctgccgctttatctttcccgcctcccggcaggcaggccgttaaccgtcttccggaagacgctgctagaaccctccggccgctc

SEQ ID NO: 85786 - DNA, 120 bp, Artificial Sequence
  ENSG00000084693_28 (sequence is synthesized)
agagaggcataaggtaggaacaaaaaaggaagaaccagcccttccagggctcaggggagcaacaccagaatgtccgctcagtacttgtgaggacagaggctggagagaggactacccatt

SEQ ID NO: 85787 - DNA, 120 bp, Artificial Sequence
  ENSG00000084693_29 (sequence is synthesized)
tggcttccccagcctgtctggactgttcccatttcccctcatgccctgcatctcagtgaaattctgtcagccttctggcttctgtgttcccagtcctcttgcaccctaataaaggcaagc

SEQ ID NO: 85788 - DNA, 120 bp, Artificial Sequence
  ENSG00000084693_30 (sequence is synthesized)
ccatctcatcttcctgagaaagcatgagatcatatctagtggcactcccagaaaggaaccaaactaggatgactgcaggcccatctgggtggaggcagctaccctgaggaagctccttag

SEQ ID NO: 85789 - DNA, 120 bp, Artificial Sequence
  ENSG00000084693_31 (sequence is synthesized)
gccgtgttgcaatctacaaagcctcagggataatccacaggttgggtggaagctgagatatagttgatgaaatagcttccctaaagaaaacaccgtagctgggtgtggtggtgcatgctt

SEQ ID NO: 85790 - DNA, 120 bp, Artificial Sequence
  ENSG00000084693_32 (sequence is synthesized)
ccccgctcccgacctggcttacgcggtcccgaccccgcccagctccgtggcctcacctctgactcctaggccctccctgcctaatcccctgccgcgggagcccgtctcgaccccttccat

SEQ ID NO: 85791 - DNA, 120 bp, Artificial Sequence
  ENSG00000084693_33 (sequence is synthesized)
gcctcccagtcccaccctgcccagggcaagcccgctcggtgtgacggttccccgcgagtcgagggtggagaagccagcctccttcccccgagtgggactctagcagcccacctcttttag

SEQ ID NO: 85792 - DNA, 120 bp, Artificial Sequence
  ENSG00000084693_34 (sequence is synthesized)
gaacacccattactcatccacagctactagggtagctttctcagggtgcagtgcttacggggcggagggggatggaaacagacccatgccctggctggaagggagctccagtcgctagct

SEQ ID NO: 85793 - DNA, 120 bp, Artificial Sequence
  ENSG00000084693_35 (sequence is synthesized)
ttaggtagctttctggaaggaaggcctgtgtagactacctctgaaaaagctttgaagggccaagaagagatggcacagggggataatgtctcaattgttacatcatgaccttttattaag

SEQ ID NO: 85794 - DNA, 120 bp, Artificial Sequence
  ENSG00000084693_36 (sequence is synthesized)
gaaagctaactgcattatagtctgctagagtctgggaatccagagaaggaaaattttgcattgttggagggaggaagctaaaagcttaaaaaaaaaagaattgcttcccaacacctagaa

SEQ ID NO: 85795 - DNA, 120 bp, Artificial Sequence
  ENSG00000084693_37 (sequence is synthesized)
cctcacacaagctgggctcctgtctactgcctgattcattcaacataccaggtctgtacccactgccactgaaatctgggtttgccagcctcctccatggccaggccaggttctttaagc

SEQ ID NO: 85796 - DNA, 120 bp, Artificial Sequence
  ENSG00000084693_38 (sequence is synthesized)
ctagttgggagaccaggggcatcacttatcctcttggtatcctaaacctctaacactggtgcctttgtataggaagctggaatttattaatgtgtctgtgtaataaaacaatagttaaca

SEQ ID NO: 85797 - DNA, 120 bp, Artificial Sequence
  ENSG00000084693_39 (sequence is synthesized)
aaagtgaggtcatgaatacaacagcatctcgtgttcgctacgtttcctctggaattagcccacaagcagaccccttgctctcctagtggcaattaaccatgaccatcttcctggagaaga

SEQ ID NO: 85798 - DNA, 80 bp, Artificial Sequence
  ENSG00000084710_0 (sequence is synthesized)
agcagtgcccagcaacccgagcggaggcggccgctgcagcccggcgctgaatgggctggcggcgcccggctccgtcctgc

SEQ ID NO: 85799 - DNA, 120 bp, Artificial Sequence
  ENSG00000084710_1 (sequence is synthesized)
ccctgtcggccgccgccagtccccgccccgactgtgaatgaaaggcgggcgccgccgagggctggctgggaacgccgcagcgacgccggcctctcgagaggcgcgcgccccgccgagatg

SEQ ID NO: 85800 - DNA, 120 bp, Artificial Sequence
  ENSG00000084710_2 (sequence is synthesized)
tacggtgtgtgtggctgctgtggtgccctacgccccaggtacaaaaggctggttgacaacatcttccctgaggatcccgaggatggtctggtgaagaccaacatggagaagctgaccttc

SEQ ID NO: 85801 - DNA, 120 bp, Artificial Sequence
  ENSG00000084710_3 (sequence is synthesized)
tatgccctctcagctccagaaaaacttgatcgtattggcgcctacctctctgagaggctcatccgtgacgtgggtcgccatcgatatgggtacgtgtgcattgctatggaggctttggac

SEQ ID NO: 85802 - DNA, 120 bp, Artificial Sequence
  ENSG00000084710_4 (sequence is synthesized)
cagctgctcatggcctgccactgccagagcatcaacctcttcgtggagagcttcctcaagatggtggccaagctgctggagtcagagaaacccaacctgcagatcctcggcaccaactcg

SEQ ID NO: 85803 - DNA, 120 bp, Artificial Sequence
  ENSG00000084710_5 (sequence is synthesized)
tttgtgaagtttgccaacatcgaggaggacaccccgtcctatcaccggagctatgacttctttgtgtcccgattcagtgaaatgtgccactcgagccatgatgacttagaaatcaagacc

SEQ ID NO: 85804 - DNA, 120 bp, Artificial Sequence
  ENSG00000084710_6 (sequence is synthesized)
aaaattcgaatgtcaggcatcaaaggcctgcaaggggtggtgaggaagacggtgaatgatgaactgcaggccaatatctgggacccacagcacatggataagatcgttccatcactgctt

SEQ ID NO: 85805 - DNA, 120 bp, Artificial Sequence
  ENSG00000084710_7 (sequence is synthesized)
ttcaatctacagcatgtagaggaggcagagagccggtctccctcacccctccaagcacctgagaaggagaaagagagccccgcggagctggctgagaggtgtcttcgggagctgctgggc

SEQ ID NO: 85806 - DNA, 120 bp, Artificial Sequence
  ENSG00000084710_8 (sequence is synthesized)
cgggctgcctttggcaacatcaaaaacgccatcaagcctgttctcatccatctggataaccattctctttgggaacccaaggtgtttgccatccgttgctttaaaatcatcatgtactca

SEQ ID NO: 85807 - DNA, 120 bp, Artificial Sequence
  ENSG00000084710_9 (sequence is synthesized)
attcagccgcagcactcacacctggtcatccagcagctcctgggccacctggacgccaacagccgcagcgctgcgacggtgcgcgcgggcatcgtggaagtcttgtcggaagccgcggtc

SEQ ID NO: 85808 - DNA, 120 bp, Artificial Sequence
  ENSG00000084710_10 (sequence is synthesized)
atcgctgccaccggctctgtggggcccacagtactggagatgttcaacacgctgctgaggcagctgcggctcagcatcgactacgcgctgaccgggagctacgacggggcggtcagcctc

SEQ ID NO: 85809 - DNA, 120 bp, Artificial Sequence
  ENSG00000084710_11 (sequence is synthesized)
ggcaccaagatcatcaaggagcacgaggagcgcatgttccaggaggccgtcatcaagaccgtgggctcctttgccagcacgctgcccacctaccagcgctccgaggtgatcctcttcatc

SEQ ID NO: 85810 - DNA, 120 bp, Artificial Sequence
  ENSG00000084710_12 (sequence is synthesized)
atgagcaaggtcccgcggccatccctgcaccaggcggtggacacaggcaggacgggggagaataggaaccgtctgacccagattatgctgctaaaatccctcctgcaggtatccacaggt

SEQ ID NO: 85811 - DNA, 120 bp, Artificial Sequence
  ENSG00000084710_13 (sequence is synthesized)
ttccagtgcaacaacatgatgtcagccctgcctagcaacttcctggaccgccttctctccaccgccctcatggaggatgcagaaattcgactctttgttctagagattctcatcagtttc

SEQ ID NO: 85812 - DNA, 120 bp, Artificial Sequence
  ENSG00000084710_14 (sequence is synthesized)
attgatcgtcatggcaaccgccacaagttctctaccatcagtaccctcagtgacatctctgtcctgaagctgaaagtggacaagtgctctcgacaggacaccgtcttcatgaagaagcac

SEQ ID NO: 85813 - DNA, 120 bp, Artificial Sequence
  ENSG00000084710_15 (sequence is synthesized)
tcccagcagctctacagacacatctacctgagctgcaaggaggaaacaaacgtgcagaaacactacgaggcgctctatggcttgctggccctcatcagcatcgagctggctaacgaggag

SEQ ID NO: 85814 - DNA, 120 bp, Artificial Sequence
  ENSG00000084710_16 (sequence is synthesized)
gtggtggtggacctcatccgtctggtgctggctgttcaggacgtggcccaagtcaatgaggagaacttgcctgtctacaaccgctgtgccctctatgctctgggcgcagcctacctgaac

SEQ ID NO: 85815 - DNA, 120 bp, Artificial Sequence
  ENSG00000084710_17 (sequence is synthesized)
ctcatcagtcagctcacaacagtgcctgccttctgccagcacatccatgaggtgatagagaccaggaagaaagaggctccatacatgctccccgaggatgtgtttgtggagaggcccagg

SEQ ID NO: 85816 - DNA, 120 bp, Artificial Sequence
  ENSG00000084710_18 (sequence is synthesized)
ctgtctcagaatcttgatggggtggtcattgagctcctcttccgccagagcaagatcagtgaagtcctgggaggcagtggctacaactcggaccggctctgcctgccctacattcctcag

SEQ ID NO: 85817 - DNA, 120 bp, Artificial Sequence
  ENSG00000084710_19 (sequence is synthesized)
ctgacagatgaggatcgtttatccaagaggaggagcattggagagaccatctccctgcaggtggaggtagaatcgaggaacagtccggagaaggaggagcgagtgcctgccgaggagatc

SEQ ID NO: 85818 - DNA, 120 bp, Artificial Sequence
  ENSG00000084710_20 (sequence is synthesized)
acctatgagacactgaagaaagccattgtggacagcgtagcagtggaggagcaggagcgtgagcggcggcggcaggtggtggagaagttccagaaggcacccttcgaggagattgctgca

SEQ ID NO: 85819 - DNA, 120 bp, Artificial Sequence
  ENSG00000084710_21 (sequence is synthesized)
cactgcggggcccgggcatcgctgctccagagcaaactcaatcagatctttgaaatcaccatccggcccccaccaagcccatcaggaaccatcactgcagcctacggtcagccgcagaac

SEQ ID NO: 85820 - DNA, 120 bp, Artificial Sequence
  ENSG00000084710_22 (sequence is synthesized)
cactccatccccgtctatgaaatgaagtttcccgatctgtgtgtatactgaattccaagagcctgagctcctcaaggagatggggtctgaggaggggctcacctcacgcccaccccgacc

SEQ ID NO: 85821 - DNA, 120 bp, Artificial Sequence
  ENSG00000084710_23 (sequence is synthesized)
acatggagatctggctgtgatctctgagaaaacatcaccttagatggcagcgcctcccaggctaagccaaggtggagactctctggtccttcttggccctcctacctcctcctcgtcttc

SEQ ID NO: 85822 - DNA, 120 bp, Artificial Sequence
  ENSG00000084710_24 (sequence is synthesized)
cctgagggaggtctcaccaatcagcatctcacctgtgccctctttgtcttctcttgtgtcagccaggggcagagaatcatggggtgtctctcaggagaagccggggggagggggctgaga

SEQ ID NO: 85823 - DNA, 120 bp, Artificial Sequence
  ENSG00000084710_25 (sequence is synthesized)
agctcctacttggtgttttgagtgaagggcatgtcctccccagaggacggagctggatggagacttggttggtgagaggaagctaaggactctactcccctggggaaggaagctgagatg

SEQ ID NO: 85824 - DNA, 120 bp, Artificial Sequence
  ENSG00000084710_26 (sequence is synthesized)
gggatggctctctcctccccagcactccccctgctccccgcccatgtccctgctgtgtctctcactctcttgctcatctcccagttgtctgttcatgtttctttctactattaatgaatg

SEQ ID NO: 85825 - DNA, 120 bp, Artificial Sequence
  ENSG00000084710_27 (sequence is synthesized)
ctgagcccttataacaggagctggggtggagacatcacgaggggtcgggggacagcaaagggcaggaagcaggatgcagggctggcaggaggtgggcctgtggcatcagcaggcccagcg

SEQ ID NO: 85826 - DNA, 120 bp, Artificial Sequence
  ENSG00000084710_28 (sequence is synthesized)
ggcgagtgtggtccctgcagcagcttcccacctcctttgttcataaggagcttgtgttggcctcccacagtcctgtctgctggacgtttttcagagttgggttctctctctttgatgtct

SEQ ID NO: 85827 - DNA, 120 bp, Artificial Sequence
  ENSG00000084710_29 (sequence is synthesized)
ttcttctgagggtcccaaggtgttcctggagcttctgggttgaggaaaggcagagcaagataatcttggaggggaactacagggtccccaagatttgcccacatcacctcctatggaaaa

SEQ ID NO: 85828 - DNA, 120 bp, Artificial Sequence
  ENSG00000084710_30 (sequence is synthesized)
ggctcccagcctgacctgggttgtaggagagtggggagggtgggatgagtggtgttttggggctcaaggatatcagaagccaactttttggatgttccgtttgaagaaagaaggatctaa

SEQ ID NO: 85829 - DNA, 120 bp, Artificial Sequence
  ENSG00000084710_31 (sequence is synthesized)
acatcagcaccacctggcaacgcttgtggcttgggaggagccatggagacccctttgggttctgggttcctgttttcctggtgtgccgtctgtgtctctgtgtaatgaggatgtgcagag

SEQ ID NO: 85830 - DNA, 120 bp, Artificial Sequence
  ENSG00000084710_32 (sequence is synthesized)
aggagctaacgcggagccgggcagagccacccaggaggcagtttgttgccttctttgccaattccccttcccggcccctcctccaggtgcctttgtgtctcccggggtgccactgacaga

SEQ ID NO: 85831 - DNA, 120 bp, Artificial Sequence
  ENSG00000084710_33 (sequence is synthesized)
acctcacctggggctcctcccatggcagtgccatgtggtccaaaattgccctttccttctccgttagtcacatttcccataactcctccgagccaacataacctacagtaagatgtgagt

SEQ ID NO: 85832 - DNA, 120 bp, Artificial Sequence
  ENSG00000084710_34 (sequence is synthesized)
gtcagacgttctctccctggagtctgctttccaaaggaggcagggtgagtagatttcttgatccaaaggaatccgtttttaatttttttttttttctagagatgggggtctcactatgtt

SEQ ID NO: 85833 - DNA, 120 bp, Artificial Sequence
  ENSG00000084710_35 (sequence is synthesized)
ccacctcagcctcctgagtagctgagaatccctttttagggtacaatttcaggcagtgtggcatggagtcagaagcaggctgtttctcctcaggggagggcaggcttctcaggacggcct

SEQ ID NO: 85834 - DNA, 120 bp, Artificial Sequence
  ENSG00000084710_36 (sequence is synthesized)
tgtttctcctcaggggagggcaggcttctcaggacggcctcagctcatagccccacgtgtggtgtgcacggatgtgcagggagagcctgattgttaggtggatgtattttccagaatcgg

SEQ ID NO: 85835 - DNA, 120 bp, Artificial Sequence
  ENSG00000084710_37 (sequence is synthesized)
ggagggactgaacacgagcatttcccattaatatgtgcaataaatgtcttggggaaggggctatttgaccctcattcccatagttttggcacttcaaatgaagctcttccttgtggtcac

SEQ ID NO: 85836 - DNA, 74 bp, Artificial Sequence
  ENSG00000084710_38 (sequence is synthesized)
tagttttggcacttcaaatgaagctcttccttgtggtcaccatctctgctgtgggcacacacgtctcgctctgt

SEQ ID NO: 85837 - DNA, 61 bp, Artificial Sequence
  ENSG00000084710_39 (sequence is synthesized)
ttggcacgtggcttctgaatggcctgagtgagggcagggcccaggcatggaggctcctgca

SEQ ID NO: 85838 - DNA, 120 bp, Artificial Sequence
  ENSG00000084710_40 (sequence is synthesized)
gcctgagtgagggcagggcccaggcatggaggctcctgcacccccaaggctttttggctgtgctttatggcctctggcttatactcaacccaattttacaagcatgaacttagacttctc

SEQ ID NO: 85839 - DNA, 120 bp, Artificial Sequence
  ENSG00000084710_41 (sequence is synthesized)
tttagtatttatatatttaaaaaccaagtttaaattaactcaaacttgacagcaactaacctctgaaagaaactttaaagaaaattgaaatcttgagccacaaacatgttctttcctcac

SEQ ID NO: 85840 - DNA, 120 bp, Artificial Sequence
  ENSG00000084710_42 (sequence is synthesized)
tagctcctcccaggttttatcctgcacccagcttggatgagagacccactgtttcttgtgcctacttaacattagggttccccgtggcagcttcatcctgagcactgcctgtgagccctg

SEQ ID NO: 85841 - DNA, 120 bp, Artificial Sequence
  ENSG00000084710_43 (sequence is synthesized)
gttctgggacttggcagtcgcctccctggagcatctttccagagccagcattagaacctgagatccccagatgtttctgcccctcatccccatcctgtgaatagagagacagaaaaggtg

SEQ ID NO: 85842 - DNA, 120 bp, Artificial Sequence
  ENSG00000084710_44 (sequence is synthesized)
caggttcccattctgcatagattctgctgtttcctctccaccggtcccaggcagcttttcctttccatcactgccgcttagcaaaaatgtgcttcttttgaagaactggtcatttttttt

SEQ ID NO: 85843 - DNA, 120 bp, Artificial Sequence
  ENSG00000084710_45 (sequence is synthesized)
gagtgccctcttctcagttttgtttaaacttacactcagtagagtgttgggttgtctgctgacatggagtagaacctggattctggccaaataggccagaatcggaaaggtgaaggtgag

SEQ ID NO: 85844 - DNA, 120 bp, Artificial Sequence
  ENSG00000084710_46 (sequence is synthesized)
tgtgatagtaggtaatctcctcaccccagcacaggccctgggagagaggcaaagcagtttgatgggatctggaggggagggaggtaccctggcccttggtctagcatcagtgagtcctgc

SEQ ID NO: 85845 - DNA, 120 bp, Artificial Sequence
  ENSG00000084710_47 (sequence is synthesized)
ccttccaagcccctggaggctagtggcattgcattgtgcccctttttgccacccttctctgatgtgattttgagcgaagaggagtcagtaagcccattgagaccggctgctcccaaagcc

SEQ ID NO: 85846 - DNA, 120 bp, Artificial Sequence
  ENSG00000084710_48 (sequence is synthesized)
cgaggactctagctgtgtggggaagggctagcattggtcaggactctgctgacagcactgagtaggcaggaatgtatttgagatttggaagtactgttaatttggtggagtcaggtgaat

SEQ ID NO: 85847 - DNA, 120 bp, Artificial Sequence
  ENSG00000084710_49 (sequence is synthesized)
ggataagaggcagatcggcagaaagcatcagtgtggtcccgaggctccctctgttttccttgccatggagtccccagcgccttgtgcctgtttccatttccctctctctttgaaaagtag

SEQ ID NO: 85848 - DNA, 120 bp, Artificial Sequence
  ENSG00000084710_50 (sequence is synthesized)
aaatcagtggtttcttgactcctaaacagcctcctcactatagaaggagcctgagcaggtcagaagaactagaaaagtcctcagatacccccctctgtccagccccctttcccatacaca

SEQ ID NO: 85849 - DNA, 120 bp, Artificial Sequence
  ENSG00000084710_51 (sequence is synthesized)
gatatcaatggatgagcaggaaaagaggaggcctggactcactgaagtacttgaagaagcacaagtgtcatagatgtgccgccctttgccctgggtgttctagatcacacagaacacgtt

SEQ ID NO: 85850 - DNA, 120 bp, Artificial Sequence
  ENSG00000084710_52 (sequence is synthesized)
tcagctggactaagaatcagactagccaggggttcttctgaacagctcaggccagacctctgggctcctctgggggccctgggacatgatgccttgcagtttccattccattgtccccag

SEQ ID NO: 85851 - DNA, 120 bp, Artificial Sequence
  ENSG00000084710_53 (sequence is synthesized)
gcctcctgacctggtgacagagagtgccctgcagaagtgagtctatttttcccaattcctcttcatgaccagaaaatggcagctggccggttggggtcctgtgggaaagggctaacctgg

SEQ ID NO: 85852 - DNA, 120 bp, Artificial Sequence
  ENSG00000084710_54 (sequence is synthesized)
gctgttaggtagacactaggtttaaaggtagacagggagatggcatcatcagggcaggccaggcccacttcctgtgaccccagaccttggcaggcgggtcgtgctgaaaccaggcatctc

SEQ ID NO: 85853 - DNA, 120 bp, Artificial Sequence
  ENSG00000084710_55 (sequence is synthesized)
cctcacacctggggaaaggtttagggcaacatgttgcctcttcatcccattaaccctagaaatcttctggttagagtggccccttaccccaaatctggcctaggtctgaagactgcagga

SEQ ID NO: 85854 - DNA, 120 bp, Artificial Sequence
  ENSG00000084710_56 (sequence is synthesized)
tagtcatgatgggcccatcctagagcctggctagctggaagacgcggtatggcagggacaggagggcggcaggaagggctttgtggccctgctggggccaaaggcagttttctgtgctcc

SEQ ID NO: 85855 - DNA, 120 bp, Artificial Sequence
  ENSG00000084710_57 (sequence is synthesized)
ctttagccccagcctggctggccaggtctcctgtacttcaggggaccatggggccgcccaagccagtcaccttccccttccaagctctccccccatgactgttgatttctggcgcgtgga

SEQ ID NO: 85856 - DNA, 120 bp, Artificial Sequence
  ENSG00000084710_58 (sequence is synthesized)
ggcagagttgtgaatccacaaatgctgtagcccatatctcgtaatgtgtctgtgtccacttagagcctcacgacctggctgtgtgtgtgcatgtgtgtgtagtatagtttgtagttgaca

SEQ ID NO: 85857 - DNA, 120 bp, Artificial Sequence
  ENSG00000084710_59 (sequence is synthesized)
atatgtgtatataatagctggtgtatttatatgtgagtgcagaattagtgcccgtggcggttttctgtattttaaacccattgaattggttagttttattttagggaagtgggaaaggcg

SEQ ID NO: 85858 - DNA, 120 bp, Artificial Sequence
  ENSG00000084710_60 (sequence is synthesized)
gagtggggggaagtataggaagaaggattcttagcaaaatcattctctaggactattagtcgcgatctcccagtgagccatcacgatgcccttttcaaataaatgttaatgttgtcacca

SEQ ID NO: 85859 - DNA, 120 bp, Artificial Sequence
  ENSG00000084710_61 (sequence is synthesized)
gtgcgcgcgcgtctgcgctgcgaggacaaagatgcctcgggccggggaccctggggtcctctccaggcccggcgcgtgccggtgctgggcggtggtccttcggggggcggaggctcaggg

SEQ ID NO: 85860 - DNA, 120 bp, Artificial Sequence
  ENSG00000084710_62 (sequence is synthesized)
tgcatagtgggcttaaggctgcatggaaagcaagtttctcgagtaattccacacttgtactgactctccccacgtatgcgtcatagatacttcccttcggaaaaattgttagggtcctcc

SEQ ID NO: 85861 - DNA, 120 bp, Artificial Sequence
  ENSG00000084710_63 (sequence is synthesized)
agggtcctccctgctcccatgaggatatcataaaactcactcttgaaaggcctggctggggatggtggctcacacctgtgatcccaacattttggaggctgaggcaggaggactgcttga

SEQ ID NO: 85862 - DNA, 120 bp, Artificial Sequence
  ENSG00000084710_64 (sequence is synthesized)
gagatgatctggggcaatataaggagaccccatctctacaaaaaataattgaaaaatcagccaggcatggtgacgtgcacctgtggtcccaggtactcaggatgctgaggtgggagaatc

SEQ ID NO: 85863 - DNA, 120 bp, Artificial Sequence
  ENSG00000084710_65 (sequence is synthesized)
acctgagcctgggaggtcaaggctgctgtaagccatgatggcagcacggcacttcagcctaggtgacagagtgagacctcgtctcaaaaaattaaaaagaaaggcatgctggtcatcatt

SEQ ID NO: 85864 - DNA, 120 bp, Artificial Sequence
  ENSG00000084710_66 (sequence is synthesized)
ccccactcacagggggaccgatatgctctgggttggaaactagaagacttaactggagagataagggtgagaacagctttcatagtgttgcttccgtatgtatcaataaagaatcttttt

SEQ ID NO: 85865 - DNA, 120 bp, Artificial Sequence
  ENSG00000084710_67 (sequence is synthesized)
ttaaatttacactatttttaaagcaattttagttacagcaaaattgagaggaaggtacagagatcgccctttgccccctcccctcccctgacacatgcacagcctcccctcctatccata

SEQ ID NO: 85866 - DNA, 120 bp, Artificial Sequence
  ENSG00000084710_68 (sequence is synthesized)
tcccccagcagagtggtgcatttcttacagttcaacctgccttaacacaacagtatcatctgaagtctgtcgtttacactggggttcgccctcagcgttgtacattctgtgggtttggac

SEQ ID NO: 85867 - DNA, 120 bp, Artificial Sequence
  ENSG00000084710_69 (sequence is synthesized)
aaatgcgtaatgacatgcatcccccaccagagtaccatacagagtcatttcctgccctaaaaccccctgtgctccacctcttcatctctcccctaaccactgacagccaagatgtttttt

SEQ ID NO: 85868 - DNA, 120 bp, Artificial Sequence
  ENSG00000084710_70 (sequence is synthesized)
ttttttttttttttaatgctgactgttacagttcacaagaagtacggaggacacacatctgggtgggaccgggacagaaagacttacatggtcctcaggcatggacaggctggcattccc

SEQ ID NO: 85869 - DNA, 120 bp, Artificial Sequence
  ENSG00000084710_71 (sequence is synthesized)
cagcctctctgcccattagggctgatatagacatggaggacagctttgacatcaagcctttccccagatgcaatcagaggtaggagaagtctctaggggtcaggatcaagcctcccccta

SEQ ID NO: 85870 - DNA, 120 bp, Artificial Sequence
  ENSG00000084710_72 (sequence is synthesized)
actgtgccctcgaccacttcatttattggggcagatctctaccccagggccctcaaagcttatccagaaccttcccacggaaggaagctctgacttgggctaattggacaagtaaaatga

SEQ ID NO: 85871 - DNA, 120 bp, Artificial Sequence
  ENSG00000084710_73 (sequence is synthesized)
ggttgaacgaggcatcctccatggcccttccagctccaaggactgggaacctccaatgcgttaggcatcggggtgagttggctgctctctccccatagtggcgattctcccttcccaaga

SEQ ID NO: 85872 - DNA, 120 bp, Artificial Sequence
  ENSG00000084710_74 (sequence is synthesized)
ggtaagagaccctcgggaattgaggagtgaagtgactcagaagcgcaaggcgaaatgcttacacagctacagagccacctcctcactagtggcctcctgggccaccagtatcagttcctt

SEQ ID NO: 85873 - DNA, 120 bp, Artificial Sequence
  ENSG00000084710_75 (sequence is synthesized)
cctcccttcaagagtcagcttagcccagaggtagcttggtggcaaagcaggggtgcaggggccttcatcctgtgcccttctgccatgccacaactctctccactctcagccatcagtgcc

SEQ ID NO: 85874 - DNA, 120 bp, Artificial Sequence
  ENSG00000084710_76 (sequence is synthesized)
agtccagagtcccacggtggttcctagggccgtactgcccagccttgccgcaggggtgaataaatgcttgtttggtcaaatctgaatcctggtgcctggcattcccagccatgcatagtc

SEQ ID NO: 85875 - DNA, 120 bp, Artificial Sequence
  ENSG00000084710_77 (sequence is synthesized)
tgggctctgccatttcatttttccccacctgctctggcccgtatccactgtcccactctggtggggctgctctcgatctctcccacgctgcgctccgccatctccaggcctttgctagtg

SEQ ID NO: 85876 - DNA, 120 bp, Artificial Sequence
  ENSG00000084710_78 (sequence is synthesized)
cagaatgccacatctgaaccacccttccctccacactggtgcagctgagcgcctgtgaactgtctgttctccagcgcccggcccctgttcagtttcctcataaacttctctctccctgct

SEQ ID NO: 85877 - DNA, 120 bp, Artificial Sequence
  ENSG00000084710_79 (sequence is synthesized)
cttgcccagggagcatcccttctctcttgcccagagagcggcattttctttgactgttgccaccacacagttccctagcaccctgcaggtgaatatccaatgttgctcggtgctgacagt

SEQ ID NO: 85878 - DNA, 120 bp, Artificial Sequence
  ENSG00000084710_80 (sequence is synthesized)
ggatgaatggatggacgtacagaggataagtcctcagagcgagttaaagccgagcatagctctctcttgcatgtaattcctatgctagcaaattgtgcagtttctatagactcacctaca

SEQ ID NO: 85879 - DNA, 120 bp, Artificial Sequence
  ENSG00000084710_81 (sequence is synthesized)
gtcctgcatgtagttggtgctcacttaatgtttgttaaatgactttatctcatacatatacttctgtcctctcctactcaaacaaaaatgccaaacaaatcaaaaaatgcacgactcagt

SEQ ID NO: 85880 - DNA, 120 bp, Artificial Sequence
  ENSG00000084710_82 (sequence is synthesized)
gaattttcataaagtgtgtatgcccacgcaaccacgcctggatgagagagtggaacactgtcatcatccaggggccctgcctctgtgccccctcccctaagggagctcccagcctgagtt

SEQ ID NO: 85881 - DNA, 120 bp, Artificial Sequence
  ENSG00000084710_83 (sequence is synthesized)
cctgagttgcgttacttctggaactttatatcaatgaaatcattctgttctgtgtctgctgcttttgcttaagattatgtttaaatgatagagcatgaggctgggcgtggtggctcatgc

SEQ ID NO: 85882 - DNA, 120 bp, Artificial Sequence
  ENSG00000084731_0 (sequence is synthesized)
gtttttctctctcattctccagtggcggcggcggggaaggcggaggcagaggcagcagcagccgcgctggctgcaatgaatgatcccccagcttggggggaggactccaggtgagcctct

SEQ ID NO: 85883 - DNA, 120 bp, Artificial Sequence
  ENSG00000084731_1 (sequence is synthesized)
gccctcgggaggcccgggacccccggccgcccacgaccggcagcccacgctatggatccctagaggaaggaggagaagacagctcgccgcccacccccatcccattttcctcttccttta

SEQ ID NO: 85884 - DNA, 120 bp, Artificial Sequence
  ENSG00000084731_2 (sequence is synthesized)
tctcattgttgccgaagctgtttacggcagcgctccctctgctcctgcatggggcgggctccgggcacggctgctcggcaggcgctgctcccgcggcgactgggggattctgcctaattc

SEQ ID NO: 85885 - DNA, 120 bp, Artificial Sequence
  ENSG00000084731_3 (sequence is synthesized)
acctcccagccggtgcagagaggaccggagagcggtggaggcccggactgcagcagcgttggggccacctcccagcgtccccaccctaggaggctgcatgcggattgaagagctgcgcct

SEQ ID NO: 85886 - DNA, 120 bp, Artificial Sequence
  ENSG00000084731_4 (sequence is synthesized)
gggggctgggccggccccgctgatcccgacctagcgagcaggatagcaggaccgcccaggctgcggaggggctcgggggcaggaaggtcagagcagcaagatggccagtaagaccaaggc

SEQ ID NO: 85887 - DNA, 120 bp, Artificial Sequence
  ENSG00000084731_5 (sequence is synthesized)
cagcgaggccctcaaggtggtggcccggtgccgccccctcagcaggaaggaggaggctgctggtcacgagcagatcctgaccatggacgtgaaactgggccaggtgaccctgcggaaccc

SEQ ID NO: 85888 - DNA, 120 bp, Artificial Sequence
  ENSG00000084731_6 (sequence is synthesized)
ccgcgccgccccgggggagctgcccaagaccttcacctttgacgccgtgtatgatgccagctccaagcaggccgacctgtatgacgaaaccgtgaggcccctgatagactccgtgctcca

SEQ ID NO: 85889 - DNA, 120 bp, Artificial Sequence
  ENSG00000084731_7 (sequence is synthesized)
gggtttcaatggcacggtgtttgcctatggccagacgggcactggcaagacctataccatgcaggggacctgggtggagcccgagctgcgcggggtcatcccgaatgcctttgagcacat

SEQ ID NO: 85890 - DNA, 120 bp, Artificial Sequence
  ENSG00000084731_8 (sequence is synthesized)
cttcacccacatctcccgctcccagaaccaacagtacctggtccgggcctcctatttggagatctaccaggaagagattcgagacctgctctccaaggagccgggcaagaggctagagct

SEQ ID NO: 85891 - DNA, 120 bp, Artificial Sequence
  ENSG00000084731_9 (sequence is synthesized)
gaaagagaaccccgagactggcgtctacatcaaggacctctcctccttcgtcaccaagaatgtcaaggagattgagcatgtgatgaacctggggaaccagacccgggctgtgggcagcac

SEQ ID NO: 85892 - DNA, 120 bp, Artificial Sequence
  ENSG00000084731_10 (sequence is synthesized)
ccacatgaatgaggtcagctcccgctcccatgccatcttcatcatcactgtggagtgcagcgaacgtggctctgatggccaggaccacatccgagtgggcaagctcaacctcgtggacct

SEQ ID NO: 85893 - DNA, 120 bp, Artificial Sequence
  ENSG00000084731_11 (sequence is synthesized)
ggctggcagcgagaggcagaacaaggcaggccccaacacagcgggaggggcagccacaccatcctcgggtggcggtggtggcggtggaggcagtggtggtggtgctggtggagagaggcc

SEQ ID NO: 85894 - DNA, 120 bp, Artificial Sequence
  ENSG00000084731_12 (sequence is synthesized)
taaggaagcctccaaaatcaacctctcattatctgccctgggcaacgtgattgctgccctggcgggcaacaggagcacccacattccctaccgggactccaagctgacccggctgctcca

SEQ ID NO: 85895 - DNA, 120 bp, Artificial Sequence
  ENSG00000084731_13 (sequence is synthesized)
ggactccctgggggggaatgccaagaccatcatggtagccacactggggccagcttctcacagctacgatgagagcctctccaccttgcgctttgccaaccgagccaagaacatcaagaa

SEQ ID NO: 85896 - DNA, 120 bp, Artificial Sequence
  ENSG00000084731_14 (sequence is synthesized)
caagccccgggtgaacgaggaccccaaggacacactgctgcgggaattccaagaggagattgcccgcctgaaggcccagctggagaagagggggatgctggggaagcggccccggaggaa

SEQ ID NO: 85897 - DNA, 120 bp, Artificial Sequence
  ENSG00000084731_15 (sequence is synthesized)
gagcagccgcaggaagaaggccgtgtccgccccgcctgggtaccctgagggcccagtgattgaggcctgggtggcagaagaggaggatgacaacaacaacaaccaccgcccgccccagcc

SEQ ID NO: 85898 - DNA, 120 bp, Artificial Sequence
  ENSG00000084731_16 (sequence is synthesized)
catcctggagtcagccttggagaagaacatggagaattacctgcaggaacagaaggagcggctggaggaggagaaggcagccatccaggatgaccgcagcctggtgagcgaggagaagca

SEQ ID NO: 85899 - DNA, 120 bp, Artificial Sequence
  ENSG00000084731_17 (sequence is synthesized)
gaagctgctggaggagaaggagaagatgctggaggacctgcggcgggaacagcaggccacagagctgcttgcggccaagtacaaggccatggagagcaagctcctcatcgggggcaggaa

SEQ ID NO: 85900 - DNA, 120 bp, Artificial Sequence
  ENSG00000084731_18 (sequence is synthesized)
catcatggatcacaccaacgaacagcagaagatgttggaactgaagaggcaggagattgccgagcagaaacgtcgtgagcgggagatgcagcaggagatgatgctccgggacgaggagac

SEQ ID NO: 85901 - DNA, 120 bp, Artificial Sequence
  ENSG00000084731_19 (sequence is synthesized)
tatggagctccggggcacctacacatccctgcagcaggaggtggaggtcaaaaccaagaaactcaagaagctctacgccaagctgcaggcggtgaaggcggagatccaggaccagcatga

SEQ ID NO: 85902 - DNA, 120 bp, Artificial Sequence
  ENSG00000084731_20 (sequence is synthesized)
tgagtatatccgcgtgcggcaggacctggaggaggcgcagaacgagcagacccgcgaactcaagctcaagtacctaatcatcgagaacttcatcccgccggaggagaagaacaagatcat

SEQ ID NO: 85903 - DNA, 120 bp, Artificial Sequence
  ENSG00000084731_21 (sequence is synthesized)
gaaccggcttttcctggactgtgaggaggagcagtggaagttccagccactggtgccagccggcgtcagtagcagccagatgaagaagcggccaacatctgcagtgggctacaagaggcc

SEQ ID NO: 85904 - DNA, 120 bp, Artificial Sequence
  ENSG00000084731_22 (sequence is synthesized)
acataatgtttctggagttggatgtgtcccctccagctgtctttgagatggaattctctcacgaccaagaacaagaccctcgtgcgctacacatggagaggctcatgcgattggacagct

SEQ ID NO: 85905 - DNA, 120 bp, Artificial Sequence
  ENSG00000084731_23 (sequence is synthesized)
ttctggaaagaccttccacgtctaaagtccgaaagtccagatcctggtgccagagtcctcagcggcctccaccttccaccacacatgcctccctggcctctgcttctctgcgccctgcaa

SEQ ID NO: 85906 - DNA, 120 bp, Artificial Sequence
  ENSG00000084731_24 (sequence is synthesized)
cagtggcggaccatgagtgacaaccatcacgtcaggctgcccatccaatagactcctgggatggggcagccaaccctggctcatctcatctgccgcttggtgcgtgtgcgtgtgcgtgca

SEQ ID NO: 85907 - DNA, 120 bp, Artificial Sequence
  ENSG00000084731_25 (sequence is synthesized)
tgtgcgtgtgcgtgtgtgcaggggtgagaatctggcagatggtgcctctgcctgctcttcttcgcctcctttatttaattcatgttatttattcgcggagctctgttcgtgttggggaga

SEQ ID NO: 85908 - DNA, 120 bp, Artificial Sequence
  ENSG00000084731_26 (sequence is synthesized)
tgccctcgcctgagccgtctgggcctaccgtggtcactgcgtagcctctttttcttctgacttgagagctcccccagtcagatctcaggcttgtccccctgtcagctgcctccagaaggg

SEQ ID NO: 85909 - DNA, 120 bp, Artificial Sequence
  ENSG00000084731_27 (sequence is synthesized)
aaggtagccagtgcctgagaagacagtcccttttctacccaccgcactccataacctccatcttctcccacactgatggcgagcagcccctgagcactttctgggactgggagactgctt

SEQ ID NO: 85910 - DNA, 120 bp, Artificial Sequence
  ENSG00000084731_28 (sequence is synthesized)
ggtgttccctgaggacaagagacatcctgacagtgttgggcatctgctccccgtggacacagccccactctccactttctgagcctcagacaacctcattcagcctcttgggctcctttt

SEQ ID NO: 85911 - DNA, 120 bp, Artificial Sequence
  ENSG00000084731_29 (sequence is synthesized)
caaggacattaataacctcaccaacatagctcatgcccttcagctttgacaagaactcacagcttcccaaactctgctttctgcccaccttggatgggaactgtggaccaagcaattacc

SEQ ID NO: 85912 - DNA, 120 bp, Artificial Sequence
  ENSG00000084731_30 (sequence is synthesized)
atcgccttggaacctgcaggaaatggaacagcaattgagacaacttgaacagtcatcaacggaagtccctccactggattcctttgtttctgtcccctccgaggagtcattttggtcgac

SEQ ID NO: 85913 - DNA, 120 bp, Artificial Sequence
  ENSG00000084731_31 (sequence is synthesized)
aggctctcaaggcaactccccattttcaagaggctgctcctgcctgcttcgatcatttctccctgcagctgcctagaccccgttcacagtgggaggagtcaatgtcattctacccctcgc

SEQ ID NO: 85914 - DNA, 120 bp, Artificial Sequence
  ENSG00000084731_32 (sequence is synthesized)
taaacgaagatattaacatctattgctttttcccttcatctgtcacaggaaacagaagcccaggcacaatcttttccagctttgcctgttacccctgtttctgaattgcatctttaaggt

SEQ ID NO: 85915 - DNA, 120 bp, Artificial Sequence
  ENSG00000084731_33 (sequence is synthesized)
attattttgttgaaaatagatcctttattcactagttacgcaaattggttcctagggggatactccttaccttcctttgtgatggcccaaaatgtctctaggtatctcaagtgataagta

SEQ ID NO: 85916 - DNA, 120 bp, Artificial Sequence
  ENSG00000084731_34 (sequence is synthesized)
aatttctacaaaaaaaaatggttaatgttcattgactggctttttaagtgtatattttggaggacgggtgaagaggtcataacgaaagcaagcgagtgaattaggatttcaaagtgccct

SEQ ID NO: 85917 - DNA, 120 bp, Artificial Sequence
  ENSG00000084731_35 (sequence is synthesized)
aatagtgtgagtctccagttcctagaatatgaagagtgctgtcgttggggtgaaaccatgagactgacagatctgcctgaaatggggggtgtgggaggtggtggcgggggttattctctt

SEQ ID NO: 85918 - DNA, 120 bp, Artificial Sequence
  ENSG00000084731_36 (sequence is synthesized)
tccttcaggaaatgaacccttcttacatcattcaagttctgctctgaggatcaagcttgggtctgatttaactcagcgacactgtcatttctgcttcattactggactagagggttgagc

SEQ ID NO: 85919 - DNA, 120 bp, Artificial Sequence
  ENSG00000084731_37 (sequence is synthesized)
cacccacttgccatttgctcctgtccttccaggaaatcacaattttcatcagagcccaagagattatttgagactcaggattcagatcagaggttcgactgtggctgggacaggagttgt

SEQ ID NO: 85920 - DNA, 120 bp, Artificial Sequence
  ENSG00000084731_38 (sequence is synthesized)
gtgtagaaattcaccaggtggcctgagcgcagggggacctccagggctgcgttgagcagcctctcccactgacctctttctcgtttgtggacaaagcagcacgtatcacctcattcatca

SEQ ID NO: 85921 - DNA, 120 bp, Artificial Sequence
  ENSG00000084731_39 (sequence is synthesized)
cttggacacatcgcctttgcattgtcttgtcacacctccctcacagtcttatagcacaatatacccaaatcagcccccccagtccgagggctgggcccgaggtatggtcggaggaggagc

SEQ ID NO: 85922 - DNA, 120 bp, Artificial Sequence
  ENSG00000084731_40 (sequence is synthesized)
tcctgcctgcggttttgtgtatgtgtgtatgtgtgtgcgtgtttgtgtgcgtgtttacctccacaggggacactctacactcagtgtaagatctgctgggaacagggccaccaggagtgg

SEQ ID NO: 85923 - DNA, 120 bp, Artificial Sequence
  ENSG00000084731_41 (sequence is synthesized)
ctggatctcagtctctctgtctctctttctctccttttccttttggtgtatcaaatatttgattgacaaagtaagggccttgattaggaccaaattctcgtgtgttgctatggtctttat

SEQ ID NO: 85924 - DNA, 120 bp, Artificial Sequence
  ENSG00000084731_42 (sequence is synthesized)
ttaggacaacaattaacaatgcagtggcccattcttgtcactctacacatatgactatacgggacatatgtaatatataaatatatatataaaacattcccctctgtccccttggcttcg

SEQ ID NO: 85925 - DNA, 120 bp, Artificial Sequence
  ENSG00000084731_43 (sequence is synthesized)
gatggaggcctttctgttgagctgaaatgcacctgcagctgggtgctgccagcagcttgcaggccccagccctgttccaatcaatgcagttgacaataaaggaatgagtatcgtcacgga

SEQ ID NO: 85926 - DNA, 120 bp, Artificial Sequence
  ENSG00000084731_44 (sequence is synthesized)
ggcggtggctgcgctgcacccgactggtgggcgcaggacctgggtcggcaccggagcctgtcatcccggagcggtcggcgggggtgcagagacggcgatgcgcccctgtcccccgcaccc

SEQ ID NO: 85927 - DNA, 120 bp, Artificial Sequence
  ENSG00000084731_45 (sequence is synthesized)
gcgcctcccgccccgcggccccgccccctgccccaccccagtcgggaggcttagctggggccgcagcgcggcggcaacatcactctcgctgccgctgctccgccccatccccttctgttt

SEQ ID NO: 85928 - DNA, 120 bp, Artificial Sequence
  ENSG00000084731_46 (sequence is synthesized)
ccatccccttctgtttttctctctcattctccagtggcggcggcggggaaggcggaggcagaggcagcagcagccgcgctggctgcaatgaatgatcccccagcttggggggaggactcc

SEQ ID NO: 85929 - DNA, 120 bp, Artificial Sequence
  ENSG00000084731_47 (sequence is synthesized)
attcctgctcccaggtacctaatcatcgagaacttcatcccgccggaggagaagaacaagatcatgaaccggcttttcctggactgtgaggaggagcagtggaagttccagccactggtg

SEQ ID NO: 85930 - DNA, 120 bp, Artificial Sequence
  ENSG00000084731_48 (sequence is synthesized)
ctggtgaggggcctgaggccttgcctgcagggagacagatgttttgtggattggggaaaagatggggaggatgccgatgggggatgaatttctcaggatctaattgtaggggtctctatg

SEQ ID NO: 85931 - DNA, 120 bp, Artificial Sequence
  ENSG00000084731_49 (sequence is synthesized)
atggaagggtgttctgggaaaaaaagtgtctcattggcctgggatgcagaaaataccttgtgagggatctcgggagggaggaagagcatctcagcctcttgacaatcctagcgaatgcta

SEQ ID NO: 85932 - DNA, 120 bp, Artificial Sequence
  ENSG00000084731_50 (sequence is synthesized)
acatctggccaggtctggtgaatattcatttgtcagatgcccgaaatagcaaccacagttaatatttgccaagcgctactgtgtgccggatgctgtgcaagactcaggagacagaagata

SEQ ID NO: 85933 - DNA, 120 bp, Artificial Sequence
  ENSG00000084731_51 (sequence is synthesized)
ttttcatcccgggtccccacagccagccatcattactcaggcctctcctcccctaaggcctcatcctgactgtctcctctcccatgagtcctttaggaataaaatgcgtctgagggctga

SEQ ID NO: 85934 - DNA, 120 bp, Artificial Sequence
  ENSG00000084733_0 (sequence is synthesized)
gtctcaggcagcgcgcacgccggcgtgagagggcacggggaaaaggtggctctggccggggtggctcggtttcctggggctatgtaactgagctcgtcgacttaggggtccttcttcgct

SEQ ID NO: 85935 - DNA, 120 bp, Artificial Sequence
  ENSG00000084733_1 (sequence is synthesized)
gccctcgccgcgtgctagcagggagtttccgctcgggagagagactgtcctcacgcccgctgcgcctcctcgacggcagagcaggcttgctcgcccgtgggagcgtcccggccgagaagc

SEQ ID NO: 85936 - DNA, 120 bp, Artificial Sequence
  ENSG00000084733_2 (sequence is synthesized)
cctgaggggggaggggaggccattttgtcccgaccgactccccggaaccgggcggacgggctgggagaggctgcggagccgcggtcgccgccctcggaggcactggacgccgccactgtc

SEQ ID NO: 85937 - DNA, 120 bp, Artificial Sequence
  ENSG00000084733_3 (sequence is synthesized)
ggggcttcctcaaagctgttcgtaggtcgcccgcgccgtctcgagcctttttcccacgcttccccggtcctccggcctgagaacgcccgagtgaggagttggccgtagtgagagggaccg

SEQ ID NO: 85938 - DNA, 120 bp, Artificial Sequence
  ENSG00000084733_4 (sequence is synthesized)
atcccttggggccgccggcggcgagagcccgagccgctcctcccaatggcgaagaagacgtacgacctgcttttcaagctgctcctgatcggggattccggagtggggaagacctgcgtc

SEQ ID NO: 85939 - DNA, 120 bp, Artificial Sequence
  ENSG00000084733_5 (sequence is synthesized)
ctttttcgtttttcggatgatgccttcaatactacctttatttccaccataggaatagacttcaagatcaaaacagttgaattacaaggaaagaagatcaagctacagatatgggataca

SEQ ID NO: 85940 - DNA, 120 bp, Artificial Sequence
  ENSG00000084733_6 (sequence is synthesized)
gcaggccaggagcgatttcacaccatcacaacctcctactacagaggcgcaatgggtatcatgctagtatatgacatcaccaatggtaaaagttttgaaaacatcagcaaatggcttaga

SEQ ID NO: 85941 - DNA, 120 bp, Artificial Sequence
  ENSG00000084733_7 (sequence is synthesized)
aacatagatgagcatgccaatgaagatgtggaaagaatgttactaggaaacaagtgtgatatggacgacaaaagagttgtacctaaaggaaaaggagaacagattgcaagggagcatggt

SEQ ID NO: 85942 - DNA, 120 bp, Artificial Sequence
  ENSG00000084733_8 (sequence is synthesized)
attaggttttttgagactagtgcaaaagcaaatataaacatcgaaaaggcgttcctcacgttagctgaagatatccttcgaaagacccctgtaaaagagcccaacagtgaaaatgtagat

SEQ ID NO: 85943 - DNA, 120 bp, Artificial Sequence
  ENSG00000084733_9 (sequence is synthesized)
atcagcagtggaggaggcgtgacaggctggaagagcaaatgctgctgagcattctcctgttccatcagttgccatccactaccccgttttctcttcttgctgcaaaataaaccactctgt

SEQ ID NO: 85944 - DNA, 120 bp, Artificial Sequence
  ENSG00000084733_10 (sequence is synthesized)
ccatttttaactctaaacagatatttttgtttctcatcttaactatccaagccacctattttatttgttctttcatctgtgactgcttgctgactttatcataattttcttcaaacaaaa

SEQ ID NO: 85945 - DNA, 120 bp, Artificial Sequence
  ENSG00000084733_11 (sequence is synthesized)
aaatgtatagaaaaatcatgtctgtgagttcatttttaaatgtacttgctcagctcaactgcatttcagttgtattatagtccagttcttatcaacattaaaacctatagcaatcatttc

SEQ ID NO: 85946 - DNA, 120 bp, Artificial Sequence
  ENSG00000084733_12 (sequence is synthesized)
aaatctattctgcaaattgtataagaataaagttagaattaacaattttattttgtacaacagtggaattttctgtcatggataatgtgcttgagtccctataatctatagacatgtgat

SEQ ID NO: 85947 - DNA, 120 bp, Artificial Sequence
  ENSG00000084733_13 (sequence is synthesized)
agcaaaagaaacaaacaaaagccaggaaaacactcattttcgccttgaatatgtaaatgggattaattttgtcctgtgccttatgtggaaaggaacttctttggttttccttttttgttc

SEQ ID NO: 85948 - DNA, 120 bp, Artificial Sequence
  ENSG00000084733_14 (sequence is synthesized)
agtagttaattgaggacaaagggtaatgcagaagtgatagctttggtttgctgagtcttgttttaagtggccttgatatttaaaactattcctgccaccatttcttctccttggccactt

SEQ ID NO: 85949 - DNA, 120 bp, Artificial Sequence
  ENSG00000084733_15 (sequence is synthesized)
cttccttgcgtctccctgcatgctgctttatttgcttctccctccccaaccacctcatggtatatttaagagtgaaagggacaaactagtaggtttgtcaagtttaatataaagcactga

SEQ ID NO: 85950 - DNA, 120 bp, Artificial Sequence
  ENSG00000084733_16 (sequence is synthesized)
tgtaacttgctaggtaaacggaaagataagttctaactgcctactatccaatgtcagttaattggtgtcttcccccctcatttgctctcttccctaaaatgtgtcccagatgccttcatt

SEQ ID NO: 85951 - DNA, 120 bp, Artificial Sequence
  ENSG00000084733_17 (sequence is synthesized)
tgctgttttacttctatgttctgcttttcctcctctctttgttcccttcctgtctatccattgagtttatgaaatggaagagttaactgcatgcactagtgtttggagggtgttgtggtt

SEQ ID NO: 85952 - DNA, 120 bp, Artificial Sequence
  ENSG00000084733_18 (sequence is synthesized)
tgtctttctaattaggtgtatagcctattcactttcctagaataaatctcttaacctaaatttgagtagtctgcattttggcaactcctctagcagcttggtagcctagtacaggttgtt

SEQ ID NO: 85953 - DNA, 120 bp, Artificial Sequence
  ENSG00000084733_19 (sequence is synthesized)
tttttaaaaaaggaaaagcaggaaggaggagtgaattttattaacatgtttgccaaatgtattgagatttggcctctgaagaacactttttcagtgttaagtttctttaccttaagattc

SEQ ID NO: 85954 - DNA, 120 bp, Artificial Sequence
  ENSG00000084733_20 (sequence is synthesized)
agaaatactttagaatattattaattttaagtcctgtctttacatccttttggaaaacttgtattaccatgggtttggaaaaaggacaacgaaaggcttttcatgtaaagataagatctt

SEQ ID NO: 85955 - DNA, 120 bp, Artificial Sequence
  ENSG00000084733_21 (sequence is synthesized)
tagctatctctaaccctgtccttttttcactgcattttttctagttttgcttcattgcttatcattaggatagggtaagtgaagtttgctatgctgctagcatcctaagatgataccttt

SEQ ID NO: 85956 - DNA, 120 bp, Artificial Sequence
  ENSG00000084733_22 (sequence is synthesized)
gttgaaagaattgtgaatagcatgattcatttctagcagaggctgagtttaggacagcagcttccattgagaagtctttctgtgtcgtgaatagcattttaatgacctcttggctcacat

SEQ ID NO: 85957 - DNA, 120 bp, Artificial Sequence
  ENSG00000084733_23 (sequence is synthesized)
aagcaaacaacatagggacgtatctgctatgaaaatccacaaatttttcagatagtgccctaaaaacaattttatatgcctcactggttgttattcttaggttattcccacacttgactt

SEQ ID NO: 85958 - DNA, 120 bp, Artificial Sequence
  ENSG00000084733_24 (sequence is synthesized)
tatcattgtttactactagtaaaaagcagcattgccaaataatccctaattttccactaaaaatataatgaaatgatgttaagctttttgaaaagtttaggttaaacctactgttgttag

SEQ ID NO: 85959 - DNA, 120 bp, Artificial Sequence
  ENSG00000084733_25 (sequence is synthesized)
attaatgtatttgttgcttccctttatctggaatgtggcattagcttttttattttaaccctctttaattcttattcaattccatgacttaaggttggagagctaaacactgggattttt

SEQ ID NO: 85960 - DNA, 120 bp, Artificial Sequence
  ENSG00000084733_26 (sequence is synthesized)
ggataacagactgacagttttgcataattataatcggcattgtacatagaaaggatatggctaccttttgttaaatctgcactttctaaatatcaaaaaagggaaatgaagtataaatca

SEQ ID NO: 85961 - DNA, 120 bp, Artificial Sequence
  ENSG00000084733_27 (sequence is synthesized)
atttttgtataatctgtttgaaacatgagttttatttgcttaatattagggctttgccccttttctgtaagtctcttgggatcctgtgtagaagctgttctcattaaacaccaaacagtt

SEQ ID NO: 85962 - DNA, 120 bp, Artificial Sequence
  ENSG00000084733_28 (sequence is synthesized)
aagtccattctctggtactagctacaaattcggtttcatattctacttaacaatttaaataaactgaaatatttctagatggtctacttctgttcatataaaaacaaaacttgatttcca

SEQ ID NO: 85963 - DNA, 120 bp, Artificial Sequence
  ENSG00000084734_0 (sequence is synthesized)
attgtgaccagaggggtttgtgtggctgaagaggcaggaggaacagtgtatccacagcgtgggaccatgccaggcacaaaacggtttcaacatgtcattgagaccccggagcctggcaag

SEQ ID NO: 85964 - DNA, 120 bp, Artificial Sequence
  ENSG00000084734_1 (sequence is synthesized)
tgggagttgtctgggtacgaggcagctgtgccaatcacggagaagtcaaacccactgacccaggatctagacaaagcagatgctgagaacattgttcgactgctagggcaatgtgatgct

SEQ ID NO: 85965 - DNA, 120 bp, Artificial Sequence
  ENSG00000084734_2 (sequence is synthesized)
gagatcttccaggaggaggggcaagccctgtccacataccagagactctacagcgaatccattctgaccaccatggtacaggtggctgggaaagttcaggaagtgctgaaggagccagat

SEQ ID NO: 85966 - DNA, 120 bp, Artificial Sequence
  ENSG00000084734_3 (sequence is synthesized)
ggggggctggttgtgctgagtggagggggcacctctggccggatggcattcctcatgtcggtgtcctttaatcagctgatgaaaggtctgggacagaaacctctttacacctacctcatt

SEQ ID NO: 85967 - DNA, 120 bp, Artificial Sequence
  ENSG00000084734_4 (sequence is synthesized)
gcaggtggtgacaggtctgtggtggcctctagggaggggacagaagatagtgccttgcacgggattgaggaactgaagaaggtggctgccgggaagaagagagtgattgtcattggcatt

SEQ ID NO: 85968 - DNA, 120 bp, Artificial Sequence
  ENSG00000084734_5 (sequence is synthesized)
tctgtgggactctctgctccctttgtggcaggccagatggactgctgcatgaacaacacagctgtcttcttgccagtcctggttggcttcaatccagtgagcatggccagaaatgacccc

SEQ ID NO: 85969 - DNA, 120 bp, Artificial Sequence
  ENSG00000084734_6 (sequence is synthesized)
attgaagactggagttcaacattccgacaagtagcagagcggatgcagaaaatgcaggagaaacagaaagcttttgtgctcaatcctgccatcgggcccgagggtctcagcggctcctcc

SEQ ID NO: 85970 - DNA, 120 bp, Artificial Sequence
  ENSG00000084734_7 (sequence is synthesized)
cggatgaaaggtggaagtgccaccaagattctgctggaaaccctgttattagcagcccataagactgtggaccagggcattgcagcatctcaaagatgcctcctggaaatcttgcggaca

SEQ ID NO: 85971 - DNA, 120 bp, Artificial Sequence
  ENSG00000084734_8 (sequence is synthesized)
tttgagcgagctcatcaggtgacctacagccaaagccccaagattgccaccctgatgaagagtgtcagcaccagtctggagaagaaaggccacgtgtacctggttggctggcagaccctg

SEQ ID NO: 85972 - DNA, 120 bp, Artificial Sequence
  ENSG00000084734_9 (sequence is synthesized)
gtgcatccacacctttggtgctgatttccgagatgtccgtggctttctcattggtgatcacagtgacatgtttaaccagaaggctgagctcaccaaccagggtccccagttcaccttctc

SEQ ID NO: 85973 - DNA, 120 bp, Artificial Sequence
  ENSG00000084734_10 (sequence is synthesized)
ccaggaggacttcctgacttccatccttccctctctcacggaaatcgatactgtggtcttcattttcaccctggatgacaacctcacggaggtgcagactatagtggagcaggtgaaaga

SEQ ID NO: 85974 - DNA, 120 bp, Artificial Sequence
  ENSG00000084734_11 (sequence is synthesized)
gaagaccaaccacatccaggccctggcacacagcaccgtgggtcagaccttgctgatccctctgaagaagctctttccctccatcatcagcatcacatggccactgcttttctttgaata

SEQ ID NO: 85975 - DNA, 120 bp, Artificial Sequence
  ENSG00000084734_12 (sequence is synthesized)
tgaagggaacttcatccagaagttccagcgtgagctaagcaccaaatgggtgctgaatacagtgagtacaggtgctcatgtgcttcttggtaagatcctacaaaaccacatgttggacct

SEQ ID NO: 85976 - DNA, 120 bp, Artificial Sequence
  ENSG00000084734_13 (sequence is synthesized)
tcggattagcaactccaagctcttctggcgggcgctggccatgctgcagcggttctctggacagtccaaggctcgatgcatcgagagcctcctccgagcgatccactttccccagccact

SEQ ID NO: 85977 - DNA, 120 bp, Artificial Sequence
  ENSG00000084734_14 (sequence is synthesized)
gtcagatgatattcgggctgctcccatctcctgccatgtccaggttgcacatgagaaggaacaggtgatacccatcgccttgctgagcctcctattccggtgctcgatcactgaggctca

SEQ ID NO: 85978 - DNA, 120 bp, Artificial Sequence
  ENSG00000084734_15 (sequence is synthesized)
ggcacacctggctgcagctccttctgtctgtgaggctgtcaggagtgctcttgctgggccaggtcagaagcgcactgcggaccccctcgagatcctagagcctgacgttcagtgaaccca

SEQ ID NO: 85979 - DNA, 120 bp, Artificial Sequence
  ENSG00000084734_16 (sequence is synthesized)
tgtttctgggtgggtgaaaggggcccaaccctgcccacttcagcccagcccgcccaaggggacttgtgccagcagaacatgtgggaggaagaagccccgtttccagggcatccgcagccc

SEQ ID NO: 85980 - DNA, 120 bp, Artificial Sequence
  ENSG00000084734_17 (sequence is synthesized)
agggtagggagaaatattctctccactttgggggagagttcttgctctcgacctagtggtttctactctcaccgacttattctgatttcagaaataaaatgaaatgtcttattttggaaa

SEQ ID NO: 85981 - DNA, 120 bp, Artificial Sequence
  ENSG00000084734_18 (sequence is synthesized)
ggggagaccactagtgtgctgagggtggaagaaaaggggaaggcggagctaggtgggaagttcattggaatagacggtccagagaagagaatatgggtcagaagtcatgaggctttggct

SEQ ID NO: 85982 - DNA, 120 bp, Artificial Sequence
  ENSG00000084734_19 (sequence is synthesized)
tagcatgggcagtgtggaaagctctagatccagtccccaaacttggccctagtccactgacttgttacataatcttgggcaaaacactgtaccttttgaacttcagctctttcacctgtg

SEQ ID NO: 85983 - DNA, 120 bp, Artificial Sequence
  ENSG00000084734_20 (sequence is synthesized)
gacatgttaacacggtatgggcgataggattgcatgttgaagggtcatggtttgttgactcctgtgttcttctgtggacatctctggcctctttgcacggtgatctctcatgtcctgacc

SEQ ID NO: 85984 - DNA, 120 bp, Artificial Sequence
  ENSG00000084734_21 (sequence is synthesized)
tctgacccattctcagtctggagaagaaaggccacgtgtacctggttggctggcagaccctgggcatcattgccatcatggatggagtagagtgcatccacacctttggtgctggtggga

SEQ ID NO: 85985 - DNA, 120 bp, Artificial Sequence
  ENSG00000084734_22 (sequence is synthesized)
gatcctcagatctctcactgtcttcccttccctgagagcccctcattaccaaatcacctccctcttattctctatgtcagtggtcactcttatttcagaataaatcaacatattaaacca

SEQ ID NO: 85986 - DNA, 120 bp, Artificial Sequence
  ENSG00000084734_23 (sequence is synthesized)
cacccgccttagcctcccaaagtgctgagattgcaggcgtgagccactacgcctagccaaaacactgtatttttaaagaaaaatgttcattttaacagccatacattttttatagataca

SEQ ID NO: 85987 - DNA, 120 bp, Artificial Sequence
  ENSG00000084734_24 (sequence is synthesized)
attttaacagccatacattttttatagatacattttttatagtaaagacgttacaaattacagaaatgcaaaaaagaaaaaatcactccaaatctaccatcttcaaaaaaaaaaaaaaaa

SEQ ID NO: 85988 - DNA, 120 bp, Artificial Sequence
  ENSG00000084754_0 (sequence is synthesized)
agaggcgctctccactgctgtcctcttcagctcaagatggtggcctgccgggcgattggcatcctcagccgcttttctgccttcaggatcctccgctcccgaggttatatatgccgcaat

SEQ ID NO: 85989 - DNA, 120 bp, Artificial Sequence
  ENSG00000084754_1 (sequence is synthesized)
tttacagggtcttctgctttgctgaccagaacccatattaactatggagtcaaaggggatgtggcagttgttcgaattaactctcccaattcaaaggtaaatacactgagtaaagagcta

SEQ ID NO: 85990 - DNA, 120 bp, Artificial Sequence
  ENSG00000084754_2 (sequence is synthesized)
cattcagagttctcagaagttatgaatgaaatctgggctagtgatcaaatcagaagtgccgtccttatctcatcaaagccaggctgctttattgcaggtgctgatatcaacatgttagcc

SEQ ID NO: 85991 - DNA, 120 bp, Artificial Sequence
  ENSG00000084754_3 (sequence is synthesized)
gcttgcaagacccttcaagaagtaacacagctatcacaagaagcacagagaatagttgagaaacttgaaaagtccacaaagcctattgtggctgccatcaatggatcctgcctgggagga

SEQ ID NO: 85992 - DNA, 120 bp, Artificial Sequence
  ENSG00000084754_4 (sequence is synthesized)
ggacttgaggttgccatttcatgccaatacagaatagcaacaaaagacagaaaaacagtattaggtacccctgaagttttgctgggggccttaccaggagcaggaggcacacaaaggctg

SEQ ID NO: 85993 - DNA, 120 bp, Artificial Sequence
  ENSG00000084754_5 (sequence is synthesized)
cccaaaatggtgggtgtgcctgctgctttggacatgatgctgactggtagaagcattcgtgcagacagggcaaagaaaatgggactggttgaccaactggtggaacccctgggaccagga

SEQ ID NO: 85994 - DNA, 120 bp, Artificial Sequence
  ENSG00000084754_6 (sequence is synthesized)
ctaaaacctccagaggaacggacaatagaatacctagaagaagttgcaattacttttgccaaaggactagctgataagaagatctctccaaagagagacaagggattggtggaaaaattg

SEQ ID NO: 85995 - DNA, 120 bp, Artificial Sequence
  ENSG00000084754_7 (sequence is synthesized)
acagcgtatgccatgactattccatttgtcaggcaacaggtttacaaaaaagtggaagaaaaagtgcgaaagcagactaaaggcctttatcctgcacctctgaaaataattgatgtggta

SEQ ID NO: 85996 - DNA, 120 bp, Artificial Sequence
  ENSG00000084754_8 (sequence is synthesized)
aagactggaattgagcaagggagtgatgccggttatctctgtgaatctcagaaatttggagagcttgtaatgaccaaagaatcaaaggccttgatgggactctaccatggtcaggtcctg

SEQ ID NO: 85997 - DNA, 120 bp, Artificial Sequence
  ENSG00000084754_9 (sequence is synthesized)
tgcaagaagaataaatttggagctccacagaaggatgttaagcatctggctattcttggtgcagggctgatgggagcaggcatcgcccaagtctccgtggataaggggctaaagactata

SEQ ID NO: 85998 - DNA, 120 bp, Artificial Sequence
  ENSG00000084754_10 (sequence is synthesized)
cttaaagatgccaccctcactgcgctagaccgaggacagcaacaagtgttcaaaggattgaatgacaaagtgaagaagaaagctctaacatcatttgaaagggattccatcttcagcaac

SEQ ID NO: 85999 - DNA, 120 bp, Artificial Sequence
  ENSG00000084754_11 (sequence is synthesized)
ttgactgggcagcttgattaccaaggttttgaaaaggccgacatggtgattgaagctgtgtttgaggaccttagtcttaagcacagagtgctaaaggaagtagaagcggtgattccagat

SEQ ID NO: 86000 - DNA, 120 bp, Artificial Sequence
  ENSG00000084754_12 (sequence is synthesized)
agacctgagaaggtgattggcatgcactacttctctcccgtggacaagatgcagctgctggagattatcacgaccgagaaaacttccaaagacaccagtgcttcagctgtagcagttggt

SEQ ID NO: 86001 - DNA, 120 bp, Artificial Sequence
  ENSG00000084754_13 (sequence is synthesized)
ctcaagcaggggaaggtcatcattgtggttaaggatggacctggcttctatactaccaggtgtcttgcgcccatgatgtctgaagtcatccgaatcctccaggaaggagttgacccgaag

SEQ ID NO: 86002 - DNA, 120 bp, Artificial Sequence
  ENSG00000084754_14 (sequence is synthesized)
aagctggattccctgaccacaagctttggctttcctgtgggtgccgccacactggtggatgaagttggtgtggatgtagcgaaacatgtggcggaagatctgggcaaagtctttggggag

SEQ ID NO: 86003 - DNA, 120 bp, Artificial Sequence
  ENSG00000084754_15 (sequence is synthesized)
cggtttggaggtggaaacccagaactgctgacacagatggtgtccaagggcttcctaggtcgtaaatctgggaagggcttttacatctatcaggagggtgtgaagaggaaggatttgaat

SEQ ID NO: 86004 - DNA, 120 bp, Artificial Sequence
  ENSG00000084754_16 (sequence is synthesized)
tctgacatggatagtattttagcgagtctgaagctgcctcctaagtctgaagtctcatcagacgaagacatccagttccgcctggtgacaagatttgtgaatgaggcagtcatgtgcctg

SEQ ID NO: 86005 - DNA, 120 bp, Artificial Sequence
  ENSG00000084754_17 (sequence is synthesized)
caagaggggatcttggccacacctgcagagggagacatcggagccgtctttgggcttggcttcccgccttgtctgggagggcctttccgctttgtggatctgtatggcgcccagaagata

SEQ ID NO: 86006 - DNA, 120 bp, Artificial Sequence
  ENSG00000084754_18 (sequence is synthesized)
gtggaccggctcaagaaatatgaagctgcctatggaaaacagttcaccccatgccagctgctagctgaccatgctaacagccctaacaagaagttctaccagtgagcaggcctcatgcct

SEQ ID NO: 86007 - DNA, 120 bp, Artificial Sequence
  ENSG00000084754_19 (sequence is synthesized)
cgctcagtcagtgcactaaccccagctgccggcagtgctggttctccaacagagtggtgtctagatttatcagagtaacgagaagacaaactccggcactgggtttgctccctgattaaa

SEQ ID NO: 86008 - DNA, 120 bp, Artificial Sequence
  ENSG00000084754_20 (sequence is synthesized)
gtgccttcagccaagaccatctctccctcctggtgaagtgtgacttcgaattagtttgcacttcctgttggaaggtagagcccactgctcattgtataagccccgaggcctagagtggca

SEQ ID NO: 86009 - DNA, 120 bp, Artificial Sequence
  ENSG00000084754_21 (sequence is synthesized)
gccaagagccatctgaagccacctctctgcctgttcctcccaagaggccagggtggccaggggtggtgagggcagttctgcacccagccaaacacataacaataaaaaccaaactctgtg

SEQ ID NO: 86010 - DNA, 120 bp, Artificial Sequence
  ENSG00000084754_22 (sequence is synthesized)
tcagcatctttgcccttctggtttaaacgcctccttcaaaaagcaatctggaagaaagccctgtgctttgggggagtaagaatgtgtgtgcagaattctaggcagcaccttagggaggga

SEQ ID NO: 86011 - DNA, 120 bp, Artificial Sequence
  ENSG00000084754_23 (sequence is synthesized)
ctgggatgagagaaagtgggacctggtgggctcaaccacacacacctgtctgtgcagatgctttgcccaggcttctcaccacggtgtaccgggatattaaacctctttccccagcctgga

SEQ ID NO: 86012 - DNA, 120 bp, Artificial Sequence
  ENSG00000084754_24 (sequence is synthesized)
gggcttggcttcccgccttgtctgggaggttggtctcgcaggttgggaaggaagctcactttagcctggagcccgtgttgcgtctccttcaacgaagtcctctttctctattcagggcct

SEQ ID NO: 86013 - DNA, 120 bp, Artificial Sequence
  ENSG00000084754_25 (sequence is synthesized)
gttaaaggaaaactaaagatccaatcctctgtataaagctgaaaaaggaaaaaaatatccaaagcctagtaaaaatttttttcttccagtgcttatcatctcttatgattaatctcagtg

SEQ ID NO: 86014 - DNA, 120 bp, Artificial Sequence
  ENSG00000084754_26 (sequence is synthesized)
agcaagtggatgctaagaataccctaatggggccaggcgtggtggtttacccctgtaatcccaacattctgggaggccgaggtgggcagatcgtttgagctcaggagttcaagaccagca

SEQ ID NO: 86015 - DNA, 120 bp, Artificial Sequence
  ENSG00000084754_27 (sequence is synthesized)
acaaaagttagccaggcatggtggcatgcacccacagtcccagctacttgcagggctgaggcaggagaattgtttgagtccaggaggtcagggctgcagtgagctaagtaagatcgcacc

SEQ ID NO: 86016 - DNA, 84 bp, Artificial Sequence
  ENSG00000084754_28 (sequence is synthesized)
caaaaaaaaagaaaaaaaagaaaaaaccctatggtctgcagatgtttgaacttacttttagtaataaggttgtctctacgaagg

SEQ ID NO: 86017 - DNA, 120 bp, Artificial Sequence
  ENSG00000084754_29 (sequence is synthesized)
tttgaacttacttttagtaataaggttgtctctacgaagggcaggaacagagttctaatcctttcaaaacaagtcacttgggtgttttttgttccgcacttgggcaggttttattgagac

SEQ ID NO: 86018 - DNA, 120 bp, Artificial Sequence
  ENSG00000084754_30 (sequence is synthesized)
atattatgcctttaaccaccaagttgagactttttctccataaattaagctacttttaaaagtggtaagtcccacgtgggcagcctgctacagtggaaaaagaaccggagttcgaggcga

SEQ ID NO: 86019 - DNA, 65 bp, Artificial Sequence
  ENSG00000084754_31 (sequence is synthesized)
aatttggagagcttgtaatgaccaaagaatcaaaggccttgatgggactctaccatggtcaggtc

SEQ ID NO: 86020 - DNA, 120 bp, Artificial Sequence
  ENSG00000084754_32 (sequence is synthesized)
taaccttgaactcctgggctcaagcgagcctctcacttcagcctcctgagtaactaggactatgggtgattccagatcactgtatctttgccagtaacacatctgctctcccaatcagtg

SEQ ID NO: 86021 - DNA, 120 bp, Artificial Sequence
  ENSG00000084764_0 (sequence is synthesized)
cgtcccccgcagtctctgtgcgttgaagccggagaccgcggcggcctcagcgaggaccctccgccccggagccgccggccggagccgcagcctctgccgcagcgcccccgccacctgtcc

SEQ ID NO: 86022 - DNA, 120 bp, Artificial Sequence
  ENSG00000084764_1 (sequence is synthesized)
acctgtcccctccccctccgcctccgccggagccgcctcgtgcactctggggtatggccgtcaatgtgtactccacatctgtgaccagtgaaaatctgagtcgccatgatatgcttgcat

SEQ ID NO: 86023 - DNA, 120 bp, Artificial Sequence
  ENSG00000084764_2 (sequence is synthesized)
gggtcaacgactccctgcacctcaactataccaagatagaacagctttgttcaggggcagcctactgccagttcatggacatgctcttccccggctgtgtgcacttgaggaaagtgaagt

SEQ ID NO: 86024 - DNA, 120 bp, Artificial Sequence
  ENSG00000084764_3 (sequence is synthesized)
tccaggccaaactagagcacgaatacatccacaacttcaaggtgctgcaagcagctttcaagaagatgggtgttgacaaaatcattcctgtagagaaattagtgaaaggaaaattccaag

SEQ ID NO: 86025 - DNA, 120 bp, Artificial Sequence
  ENSG00000084764_4 (sequence is synthesized)
ataattttgagtttattcagtggtttaagaaattctttgacgcaaactatgatggaaaggattacaaccctctgctggcgcggcagggccaggacgtagcgccacctcctaacccaggtg

SEQ ID NO: 86026 - DNA, 120 bp, Artificial Sequence
  ENSG00000084764_5 (sequence is synthesized)
atcagatcttcaacaaatccaagaaactcattggcacagcagttccacagaggacgtcccccacaggcccaaaaaacatgcagacctctggccggctgagcaatgtggcccccccctgca

SEQ ID NO: 86027 - DNA, 120 bp, Artificial Sequence
  ENSG00000084764_6 (sequence is synthesized)
ttctccggaagaatcctccatcagcccgaaatggcggccatgagactgatgcccaaattcttgaactcaaccaacagctggtggacttgaagctgacagtggatgggctggagaaggaac

SEQ ID NO: 86028 - DNA, 120 bp, Artificial Sequence
  ENSG00000084764_7 (sequence is synthesized)
gcatcctctatgccacagaggaaggattcgcaccccctgaggacgatgagattgaagagcatcaacaagaagaccaggacgagtactgagggcggccgcagccctggctgactgcacagc

SEQ ID NO: 86029 - DNA, 120 bp, Artificial Sequence
  ENSG00000084764_8 (sequence is synthesized)
ttccccgtgcctccctccctgctccactcccacattatagtcctttcctaacacggtcggccgggtgctttgtgtcagtgctgcagcactggggagccaggcgaggggggcttgggggca

SEQ ID NO: 86030 - DNA, 120 bp, Artificial Sequence
  ENSG00000084764_9 (sequence is synthesized)
tggggccggaaagcaggcagaagcccgtcctgggtggtgctggcccagttggtgggacccctgtccacacccaccctatttatttccgttgtctctctgctgtgtcgcccaacacttccc

SEQ ID NO: 86031 - DNA, 120 bp, Artificial Sequence
  ENSG00000084764_10 (sequence is synthesized)
agggtgctgctgccacccgccccagccagccacctgctcctgacagccagcagctgtgtatttgacaaagtcattggtatatttttacttactggattctccttgcactttacctgttct

SEQ ID NO: 86032 - DNA, 120 bp, Artificial Sequence
  ENSG00000084764_11 (sequence is synthesized)
tttccagagctgacagcacgggctccggcgcagtgtgcctggcttggcttcccttccccatggctgggggctggggtaggactcacccattctaatttattttgtcttttggcttctcag

SEQ ID NO: 86033 - DNA, 120 bp, Artificial Sequence
  ENSG00000084764_12 (sequence is synthesized)
tagctaaggggaaggctgatgtcaggagagggagagggggctgaggaggtagtgctgtaggcccagggggtcagggaaagggaggggggcatgtgagggatggaaatgacctcctggcac

SEQ ID NO: 86034 - DNA, 120 bp, Artificial Sequence
  ENSG00000084764_13 (sequence is synthesized)
caggctcacccacccaaggccccctgccccagcactgaatcccagcgctgccctgaggcccccagccactccctccagcagcctggttcaccacacaaactctgcctggaccccattgtc

SEQ ID NO: 86035 - DNA, 120 bp, Artificial Sequence
  ENSG00000084764_14 (sequence is synthesized)
tgtctgcttcccacctgccctccccaccccctgcccctcgggcaccagcctgcatatgtgttcacttttatttaaataaacttgtgtggtaaaagtacatgccatgtgtccctcaactga

SEQ ID NO: 86036 - DNA, 120 bp, Artificial Sequence
  ENSG00000084764_15 (sequence is synthesized)
caggggtaggggtagcaattttgcagattttccaaacaggtgacttcagcccccgggcctgggcaggaaggggtagcccagtgacaatgggcatagtcccacttcaggaacgggaaacgt

SEQ ID NO: 86037 - DNA, 120 bp, Artificial Sequence
  ENSG00000084764_16 (sequence is synthesized)
gtggtgattaattgctggtgatgacattcactgggataatgaatacaggagccagaagcatattctaaggaaaggttgtggacaagcagaatttagatgcctctgcatcagccacaggaa

SEQ ID NO: 86038 - DNA, 120 bp, Artificial Sequence
  ENSG00000084764_17 (sequence is synthesized)
aaaggaaagaaaggtcggaaggcagagcagccacaacagggaatatacagtcatgcatggctgaatgactgatgtggccagagaaatgcatccttaggcgatgttgttgttgtgtgaaca

SEQ ID NO: 86039 - DNA, 120 bp, Artificial Sequence
  ENSG00000084764_18 (sequence is synthesized)
tcacagagtgtatttacacaaacctggatggtgtagcctactacacacctcggctatatggtatagcctactactcctaggctaaaaacatggacagcatgtttctgtactaaatactgc

SEQ ID NO: 86040 - DNA, 120 bp, Artificial Sequence
  ENSG00000084764_19 (sequence is synthesized)
gtgttgctttacggtctcaaggtggctcttaactctcagggaggctgagaaagcaggcattttgtgttactggcctctctattggagacagctggggtatggccgtcaatgtgtactcca

SEQ ID NO: 86041 - DNA, 120 bp, Artificial Sequence
  ENSG00000084764_20 (sequence is synthesized)
cctccctccacctcccgactctccagagggaattttccccctgctcaaggcacaatggaaaagcccacaacacttgccatgccatcatgacaacattcctttcccttcctcctctctgga

SEQ ID NO: 86042 - DNA, 120 bp, Artificial Sequence
  ENSG00000084764_21 (sequence is synthesized)
ccctgcccaccccaacactgagctctgtgcaccgctcctgtgaagttccacctctctctgtctctgtagggcccaagaaagtgtctctgctcactctactgcctcggtggctgcagaccc

SEQ ID NO: 86043 - DNA, 120 bp, Artificial Sequence
  ENSG00000084764_22 (sequence is synthesized)
ccagcccacacgcaggcagtagagccaagggacgcctccccacacagttcttccacacggtgcctgtagagaagggatgcctctggatctgacactagggcctaccagcctacctgtctg

SEQ ID NO: 86044 - DNA, 120 bp, Artificial Sequence
  ENSG00000084764_23 (sequence is synthesized)
agattgagatgcacctgggaactggcctctttcgatacagtgcaccccacatcctcactcgttgctcttactggcctacctcaggtataatggccttacaggtctgtgtcatcatctgta

SEQ ID NO: 86045 - DNA, 120 bp, Artificial Sequence
  ENSG00000084764_24 (sequence is synthesized)
acagagaaggctgagaagatggtgtcagtagattctggggacattttaatctattaagctgcttttgagacgtactacagtttcctgaggaggtggccaaaagactggggtatggccgtc

SEQ ID NO: 86046 - DNA, 120 bp, Artificial Sequence
  ENSG00000084764_25 (sequence is synthesized)
atgtggttcatcgttgaccaaaccatcgttatgcagcccatagctgtagcttgtgattagattaaggaggagagctggaggccctgaactagtcagactgtctggagctgaagtcaagaa

SEQ ID NO: 86047 - DNA, 120 bp, Artificial Sequence
  ENSG00000084764_26 (sequence is synthesized)
ggaggacgctgcagcccaggggctggctttcctgagagcagtggccctcagcagaggaaggcggtcctacagcagcaggtggctaaagtactctgcttatgtggtctatttcagatcatt

SEQ ID NO: 86048 - DNA, 120 bp, Artificial Sequence
  ENSG00000084774_0 (sequence is synthesized)
agtctctgctgctgccgccaagcgcgcccgaggctcctacgctgccgcgcccggcttctctccagcgccccgcgccgttagccacgtggaccgactccggcgcgccgtcctcacgtggtt

SEQ ID NO: 86049 - DNA, 120 bp, Artificial Sequence
  ENSG00000084774_1 (sequence is synthesized)
ccagtggagtttgcagtccttcccgcttctccgtactcgcccccgcctctgagctcccttcccatggcggccctagtgttggaggacgggtcggtcctgcggggccagccctttggggcc

SEQ ID NO: 86050 - DNA, 120 bp, Artificial Sequence
  ENSG00000084774_2 (sequence is synthesized)
gccgtgtcgactgccggggaagtggtgtttcaaaccggcatggtcggctaccccgaggccctcactgatccctcctacaaggcacagatcttagtgctcacctatcctctgatcggcaac

SEQ ID NO: 86051 - DNA, 120 bp, Artificial Sequence
  ENSG00000084774_3 (sequence is synthesized)
tatggcatccccccagatgaaatggatgagttcggtctctgcaagtggtttgaatcctcgggcatccacgtagcagcactggtagtgggagagtgctgtcctactcccagccactggagt

SEQ ID NO: 86052 - DNA, 120 bp, Artificial Sequence
  ENSG00000084774_4 (sequence is synthesized)
gccacccgcaccctgcatgagtggctgcagcagcatggcatccctggcttgcaaggagtagacactcgggagctgaccaagaagttgcgggaacaggggtctctgctggggaagctggtc

SEQ ID NO: 86053 - DNA, 120 bp, Artificial Sequence
  ENSG00000084774_5 (sequence is synthesized)
cagaatggaacagaaccttcatccctgccattcttggaccccaatgcccgccccctggtaccagaggtctccattaagactccacgggtattcaatacagggggtgcccctcggatcctt

SEQ ID NO: 86054 - DNA, 120 bp, Artificial Sequence
  ENSG00000084774_6 (sequence is synthesized)
gctttggactgtggcctcaagtataatcagatccgatgcctctgccagcgtggggctgaggtcactgtggtaccctgggaccatgcactagacagccaagagtatgagggtctcttctta

SEQ ID NO: 86055 - DNA, 120 bp, Artificial Sequence
  ENSG00000084774_7 (sequence is synthesized)
agtaatgggcctggtgaccctgcctcctatcccagtgtcgtatccacactgagccgtgttttatctgagcctaatccccgacctgtctttgggatctgcctgggacaccagctattggcc

SEQ ID NO: 86056 - DNA, 120 bp, Artificial Sequence
  ENSG00000084774_8 (sequence is synthesized)
ttagccattggggccaagacttacaagatgagatatgggaaccgaggccataaccagccctgcttgttggtgggctctgggcgctgctttctgacatcccagaaccatgggtttgctgtg

SEQ ID NO: 86057 - DNA, 120 bp, Artificial Sequence
  ENSG00000084774_9 (sequence is synthesized)
gagacagactcactgccagcagactgggctcctctcttcaccaacgccaatgatggttccaatgaaggcattgtgcacaacagcttgcctttcttcagtgtccagtttcacccagagcac

SEQ ID NO: 86058 - DNA, 120 bp, Artificial Sequence
  ENSG00000084774_10 (sequence is synthesized)
caagctggcccttcagatatggaactgcttttcgatatctttctggaaactgtgaaagaggccacagctgggaaccctgggggccagacagttagagagcggctgactgagcgcctctgt

SEQ ID NO: 86059 - DNA, 120 bp, Artificial Sequence
  ENSG00000084774_11 (sequence is synthesized)
ccccctgggattcccactcccggctctggacttccaccaccacgaaaggttctgatcctgggctcagggggcctctccattggccaagctggagaatttgactactcgggctctcaggca

SEQ ID NO: 86060 - DNA, 120 bp, Artificial Sequence
  ENSG00000084774_12 (sequence is synthesized)
attaaggccctgaaggaggaaaacatccagacgttgctgatcaaccccaatattgccacagtgcagacctcccaggggctggccgacaaggtctattttcttcccataacacctcattat

SEQ ID NO: 86061 - DNA, 120 bp, Artificial Sequence
  ENSG00000084774_13 (sequence is synthesized)
gtaacccaggtgatacgtaatgaacgccccgatggtgtgttactgacttttgggggccagactgctctgaactgtggtgtggagctgaccaaggccggggtgctggctcggtatggggtc

SEQ ID NO: 86062 - DNA, 120 bp, Artificial Sequence
  ENSG00000084774_14 (sequence is synthesized)
cgggtcctgggcacaccagtggagaccattgagctgaccgaggatcgacgggcctttgctgccagaatggcagagatcggagagcatgtggccccgagcgaggcagcaaattctcttgaa

SEQ ID NO: 86063 - DNA, 120 bp, Artificial Sequence
  ENSG00000084774_15 (sequence is synthesized)
caggcccaggcagccgctgaacggctggggtaccctgtgctagtgcgtgcagcctttgccctgggtggcctgggctctggctttgcctctaacagggaggagctctctgctctcgtggcc

SEQ ID NO: 86064 - DNA, 120 bp, Artificial Sequence
  ENSG00000084774_16 (sequence is synthesized)
ccagcttttgcccataccagccaagtgctagtagacaagtctctgaagggatggaaggagattgagtacgaggtggtgagagacgcctatggcaactgtgtcacggtgtgtaacatggag

SEQ ID NO: 86065 - DNA, 120 bp, Artificial Sequence
  ENSG00000084774_17 (sequence is synthesized)
aacttggacccactgggcatccacactggtgagtccatagtggtggcccctagccagacactgaatgacagggagtatcagctcctgaggcagacagctatcaaggtgacccagcacctg

SEQ ID NO: 86066 - DNA, 120 bp, Artificial Sequence
  ENSG00000084774_18 (sequence is synthesized)
ggaattgttggggagtgcaatgtgcagtatgccttgaaccctgagtctgagcagtattacatcattgaagtgaatgccaggctctctcgcagctctgccctggccagtaaggccacaggt

SEQ ID NO: 86067 - DNA, 120 bp, Artificial Sequence
  ENSG00000084774_19 (sequence is synthesized)
tatccactggcttatgtggcagccaagctagcattgggcatccctttgcctgagctcaggaactctgtgacagggggtacagcagcctttgaacccagcgtggattattgtgtggtgaag

SEQ ID NO: 86068 - DNA, 120 bp, Artificial Sequence
  ENSG00000084774_20 (sequence is synthesized)
attcctcgatgggaccttagcaagttcctgcgagtcagcacaaagattgggagctgcatgaagagcgttggtgaagtcatgggcattgggcgttcatttgaggaggccttccagaaggcc

SEQ ID NO: 86069 - DNA, 120 bp, Artificial Sequence
  ENSG00000084774_21 (sequence is synthesized)
ctgcgcatggtggatgagaactgtgtgggctttgatcacacagtgaaaccagtcagcgatatggagttggagactccaacagataagcggatttttgtggtggcagctgctttgtgggct

SEQ ID NO: 86070 - DNA, 120 bp, Artificial Sequence
  ENSG00000084774_22 (sequence is synthesized)
ggttattcagtggaccgcctgtatgagctcacacgcatcgaccgctggttcctgcaccgaatgaagcgtatcatcgcacatgcccagctgctagaacaacaccgtggacagcctttgccg

SEQ ID NO: 86071 - DNA, 120 bp, Artificial Sequence
  ENSG00000084774_23 (sequence is synthesized)
ccagacctgctgcaacaggccaagtgtcttggcttctcagacaaacagattgcccttgcagttctgagcacagagctggctgttcgcaagctgcgtcaggaactggggatctgtccagca

SEQ ID NO: 86072 - DNA, 120 bp, Artificial Sequence
  ENSG00000084774_24 (sequence is synthesized)
gtgaaacagattgacacagttgcagctgagtggccagcccagacaaattacctatacctaacgtattggggcaccacccatgacctcacctttcgaacacctcatgtcctagtccttggc

SEQ ID NO: 86073 - DNA, 120 bp, Artificial Sequence
  ENSG00000084774_25 (sequence is synthesized)
tctggcgtctaccgtattggctctagcgttgaatttgactggtgtgctgtaggctgcatccagcagctccgaaagatgggatataagaccatcatggtgaactataacccagagacagtc

SEQ ID NO: 86074 - DNA, 120 bp, Artificial Sequence
  ENSG00000084774_26 (sequence is synthesized)
agcaccgactatgacatgtgtgatcgactctactttgatgagatctcttttgaggtggtgatggacatctatgagctcgagaaccctgaaggtgtgatcctatccatgggtggacagctg

SEQ ID NO: 86075 - DNA, 120 bp, Artificial Sequence
  ENSG00000084774_27 (sequence is synthesized)
cccaacaacatggccatggcgttgcatcggcagcagtgccgggtgctgggcacctcccctgaagccattgactcggctgagaaccgtttcaagttttcccggctccttgacaccattggt

SEQ ID NO: 86076 - DNA, 120 bp, Artificial Sequence
  ENSG00000084774_28 (sequence is synthesized)
atcagccagcctcagtggagggagctcagtgacctcgagtctgctcgccaattctgccagaccgtggggtacccctgtgtggtgcgcccctcctatgtgctgagcggtgctgctatgaat

SEQ ID NO: 86077 - DNA, 120 bp, Artificial Sequence
  ENSG00000084774_29 (sequence is synthesized)
gtggcctacacggatggagacctggagcgcttcctgagcagcgcagcagccgtctccaaagagcatcccgtggtcatctccaagttcatccaggaggctaaggagattgacgtggatgcc

SEQ ID NO: 86078 - DNA, 120 bp, Artificial Sequence
  ENSG00000084774_30 (sequence is synthesized)
gacccccccacaagatatcactgccaaaaccctggagcggatcaaagccattgtgcatgctgtgggccaggagctacaggtcacaggacccttcaatctgcagctcattgccaaggatga

SEQ ID NO: 86079 - DNA, 120 bp, Artificial Sequence
  ENSG00000084774_31 (sequence is synthesized)
ccagctgaaagttattgaatgcaacgtacgtgtctctcgctccttccccttcgtttccaagacactgggtgtggacctagtagccttggccacgcgggtcatcatgggggaagaagtgga

SEQ ID NO: 86080 - DNA, 120 bp, Artificial Sequence
  ENSG00000084774_32 (sequence is synthesized)
acctgtggggctaatgactggttctggagtcgtgggagtaaaggtgcctcagttctccttctcccgcttggcgggtgctgacgtggtgttgggtgtggaaatgaccagtactggggaggt

SEQ ID NO: 86081 - DNA, 120 bp, Artificial Sequence
  ENSG00000084774_33 (sequence is synthesized)
ggccggctttggggagagccgctgtgaggcatacctcaaggccatgctaagcactggctttaagatccccaagaagaatatcctgctgaccattggcagctataagaacaaaagcgagct

SEQ ID NO: 86082 - DNA, 120 bp, Artificial Sequence
  ENSG00000084774_34 (sequence is synthesized)
gctcccaactgtgcggctactggagagcctgggctacagcctctatgccagtctcggcacagctgacttctacactgagcatggcgtcaaggtaacagctgtggactggcactttgagga

SEQ ID NO: 86083 - DNA, 120 bp, Artificial Sequence
  ENSG00000084774_35 (sequence is synthesized)
ggctgtggatggtgagtgcccaccacagcggagcatcctggagcagctagctgagaaaaactttgagctggtgattaacctgtcaatgcgtggagctgggggccggcgtctctcttcctt

SEQ ID NO: 86084 - DNA, 120 bp, Artificial Sequence
  ENSG00000084774_36 (sequence is synthesized)
tgtcaccaagggctaccgcacccgacgcttggccgctgacttctccgtgcccctaatcatcgatatcaagtgcaccaaactctttgtggaggccctaggccagatcgggccagcccctcc

SEQ ID NO: 86085 - DNA, 120 bp, Artificial Sequence
  ENSG00000084774_37 (sequence is synthesized)
tttgaaggtgcatgttgactgtatgacctcccaaaagcttgtgcgactgccgggattgattgatgtccatgtgcacctgcgggaaccaggtgggacacataaggaggactttgcttcagg

SEQ ID NO: 86086 - DNA, 120 bp, Artificial Sequence
  ENSG00000084774_38 (sequence is synthesized)
cacagccgctgccctggctgggggtatcaccatggtgtgtgccatgcctaatacccggccccccatcattgacgcccctgctctggccctggcccagaagctggcagaggctggcgcccg

SEQ ID NO: 86087 - DNA, 120 bp, Artificial Sequence
  ENSG00000084774_39 (sequence is synthesized)
gtgcgactttgcgctattccttggggcctcgtctgaaaatgcaggaaccttgggcaccgtggccgggtctgcagccgggctgaagctttacctcaatgagaccttctctgagctgcggct

SEQ ID NO: 86088 - DNA, 120 bp, Artificial Sequence
  ENSG00000084774_40 (sequence is synthesized)
ggacagcgtggtccagtggatggagcatttcgagacatggccctcccacctccccattgtggctcacgcagagcagcaaaccgtggctgctgtcctcatggtggctcagctcactcagcg

SEQ ID NO: 86089 - DNA, 120 bp, Artificial Sequence
  ENSG00000084774_41 (sequence is synthesized)
ctcagtgcacatatgtcacgtggcacggaaggaggagatcctgctaattaaagctgcaaaggcacggggcttgccagtgacctgcgaggtggctccccaccacctgttcctaagccatga

SEQ ID NO: 86090 - DNA, 120 bp, Artificial Sequence
  ENSG00000084774_42 (sequence is synthesized)
tgacctggagcgcctggggcctgggaagggggaggtccggcctgagcttggctcccgccaggatgtggaagccctgtgggagaacatggctgtcatcgactgctttgcctcagaccatgc

SEQ ID NO: 86091 - DNA, 120 bp, Artificial Sequence
  ENSG00000084774_43 (sequence is synthesized)
tccccataccttggaggagaagtgtgggtccaggcccccacctgggttcccagggttagagaccatgctgccactactcctgacggctgtaagcgagggccggctcagcctggacgacct

SEQ ID NO: 86092 - DNA, 120 bp, Artificial Sequence
  ENSG00000084774_44 (sequence is synthesized)
gctgcagcgattgcaccacaatcctcggcgcatctttcacctgcccccgcaggaggacacctatgtggaggtggatctggagcatgagtggacaattcccagccacatgcccttctccaa

SEQ ID NO: 86093 - DNA, 120 bp, Artificial Sequence
  ENSG00000084774_45 (sequence is synthesized)
ggcccactggacaccttttgaagggcagaaagtgaagggcaccgtccgccgtgtggtcctgcgaggggaggttgcctatatcgatgggcaggttctggtacccccgggctatggacagga

SEQ ID NO: 86094 - DNA, 120 bp, Artificial Sequence
  ENSG00000084774_46 (sequence is synthesized)
tgtacggaagtggccacagggggctgttcctcagctcccaccctcagcccctgccactagtgagatgaccacgacacctgaaagaccccgccgtggcatcccagggcttcctgatggccg

SEQ ID NO: 86095 - DNA, 120 bp, Artificial Sequence
  ENSG00000084774_47 (sequence is synthesized)
cttccatctgccgccccgaatccatcgagcctccgacccaggtttgccagctgaggagccaaaggagaagtcctctcggaaggtagccgagccagagctgatgggaacccctgatggcac

SEQ ID NO: 86096 - DNA, 120 bp, Artificial Sequence
  ENSG00000084774_48 (sequence is synthesized)
ctgctaccctccaccaccagtaccgagacaggcatctccccagaacctggggacccctggcttgctgcacccccagacctcacccctgctgcactcattagtgggccaacatatcctgtc

SEQ ID NO: 86097 - DNA, 120 bp, Artificial Sequence
  ENSG00000084774_49 (sequence is synthesized)
cgtccagcagttcaccaaggatcagatgtctcacctgttcaatgtggcacacacactgcgtatgatggtgcagaaggagcggagcctcgacatcctgaaggggaaggtcatggcctccat

SEQ ID NO: 86098 - DNA, 120 bp, Artificial Sequence
  ENSG00000084774_50 (sequence is synthesized)
gttctatgaagtgagcacacggaccagcagctcctttgcagcagccatggcccggctgggaggtgctgtgctcagcttctcggaagccacatcgtccgtccagaagggcgaatccctggc

SEQ ID NO: 86099 - DNA, 120 bp, Artificial Sequence
  ENSG00000084774_51 (sequence is synthesized)
tgactccgtgcagaccatgagctgctatgccgacgtcgtcgtgctccggcacccccagcctggagcagtggagctggccgccaagcactgccggaggccagtgatcaatgctggggatgg

SEQ ID NO: 86100 - DNA, 120 bp, Artificial Sequence
  ENSG00000084774_52 (sequence is synthesized)
ggtcggagagcaccccacccaggccctgctggacatcttcaccatccgtgaggagctgggaactgtcaatggcatgacgatcacgatggtgggtgacctgaagcacggacgcacagtaca

SEQ ID NO: 86101 - DNA, 120 bp, Artificial Sequence
  ENSG00000084774_53 (sequence is synthesized)
ttccctggcctgcctgctcacccagtatcgtgtcagcctgcgctacgtggcacctcccagcctgcgcatgccacccactgtgcgggccttcgtggcctcccgcggcaccaagcaggagga

SEQ ID NO: 86102 - DNA, 120 bp, Artificial Sequence
  ENSG00000084774_54 (sequence is synthesized)
attcgagagcattgaggaggcgctgcctgacactgatgtgctctacatgactcgaatccagaaggaacgatttggctctacccaggagtacgaagcttgctttggtcagttcatcctcac

SEQ ID NO: 86103 - DNA, 120 bp, Artificial Sequence
  ENSG00000084774_55 (sequence is synthesized)
tccccacatcatgacccgggccaagaagaagatggtggtgatgcacccgatgccccgtgtcaacgagataagcgtggaagtggactcggatccccgcgcagcctacttccgccaggctga

SEQ ID NO: 86104 - DNA, 120 bp, Artificial Sequence
  ENSG00000084774_56 (sequence is synthesized)
gaacggcatgtacatccgcatggctctgttagccaccgtgctgggccgtttctagggcctggcttcctcagcctcttctctttaggcccagctgctgggcaaggaattccagtgcctcct

SEQ ID NO: 86105 - DNA, 120 bp, Artificial Sequence
  ENSG00000084774_57 (sequence is synthesized)
acgggggcagcacacttagatattcctggacatccagatagctcacatgtgctgaccacacttcaggctctggactggagctctctggcatgggggtggggcctcagatgctggggccca

SEQ ID NO: 86106 - DNA, 120 bp, Artificial Sequence
  ENSG00000084774_58 (sequence is synthesized)
gtctgccccatcttcattcctgcaccttaaacctgtacagtcatttttctactgacttaataaacagccgagctgtcccttgatgctgagtgtagtagaacagagctttcttttagaaaa

SEQ ID NO: 86107 - DNA, 120 bp, Artificial Sequence
  ENSG00000084774_59 (sequence is synthesized)
ttgagcagattcccaaattataagagcagcctcaccaggcagggctctggctagggctgcgtgcccacactcggcattttcacactcgtgactctttgggactcggcaggagcgtgttaa

SEQ ID NO: 86108 - DNA, 120 bp, Artificial Sequence
  ENSG00000084774_60 (sequence is synthesized)
caaggtgcaggaactctggcaacctaccccactgctgcccttccccaagggggtgaaaatactgcaccaaagaattatctgggctgggcacggtggcatatacctgtagtcccagatact

SEQ ID NO: 86109 - DNA, 88 bp, Artificial Sequence
  ENSG00000084774_61 (sequence is synthesized)
caggaggctaaggcaggagaatcttgcgagtgtgcagtgagtgcaccactgcactccagcttgggaaacagtgagatgctgtctcaaa

SEQ ID NO: 86110 - DNA, 120 bp, Artificial Sequence
  ENSG00000084774_62 (sequence is synthesized)
acattttcattggtggttcaggaacaattggggttttcttgagggactgaatttgaagtggggttgggtcaattatttttttaaaatgctgggccaggccagatgtggtggctcacactt

SEQ ID NO: 86111 - DNA, 120 bp, Artificial Sequence
  ENSG00000084774_63 (sequence is synthesized)
cagctcctgaggcagacagctatcaaggtgacccagcacctgggaattgttggggagtgcaatgtgcagtatgccttgaaccctgagtctgagcaggtaagctctaggccctggaactga

SEQ ID NO: 86112 - DNA, 120 bp, Artificial Sequence
  ENSG00000084774_64 (sequence is synthesized)
tagtctagttgttaccccctcttcttgtataatttttggcccttgaggttgaggtcttttgggcttacagtccctggagtacaagctggaatcttctttactaggttacttttctctcct

SEQ ID NO: 86113 - DNA, 120 bp, Artificial Sequence
  ENSG00000085063_0 (sequence is synthesized)
ggggccggggggcggagccttgcgggctggagcgaaagaatgcgggggctgagcgcagaagcggctcgaggctggaagaggatcttgggcgccgccagtctttagcaccagttggtgtag

SEQ ID NO: 86114 - DNA, 120 bp, Artificial Sequence
  ENSG00000085063_1 (sequence is synthesized)
gagttgagacctacttcacagtagttctgtggacaatcacaatgggaatccaaggagggtctgtcctgttcgggctgctgctcgtcctggctgtcttctgccattcaggtcatagcctgc

SEQ ID NO: 86115 - DNA, 120 bp, Artificial Sequence
  ENSG00000085063_2 (sequence is synthesized)
ttaccaaagctgggttacaagtgtataacaagtgttggaagtttgagcattgcaatttcaacgacgtcacaacccgcttgagggaaaatgagctaacgtactactgctgcaagaaggacc

SEQ ID NO: 86116 - DNA, 120 bp, Artificial Sequence
  ENSG00000085063_3 (sequence is synthesized)
tgtgtaactttaacgaacagcttgaaaatggtgggacatccttatcagagaaaacagttcttctgctggtgactccatttctggcagcagcctggagccttcatccctaagtcaacacca

SEQ ID NO: 86117 - DNA, 120 bp, Artificial Sequence
  ENSG00000085063_4 (sequence is synthesized)
ggagagcttctcccaaactccccgttcctgcgtagtccgctttctcttgctgccacattctaaaggcttgatattttccaaatggatcctgttgggaaagaataaaattagcttgagcaa

SEQ ID NO: 86118 - DNA, 120 bp, Artificial Sequence
  ENSG00000085063_5 (sequence is synthesized)
gaagcggctcgaggctggaagaggatcttgggcgccgccaggcattcacgtaatggaaacttacaaagttgctcaatacctctcttcatgtccccaaagagagcaagcaagtgtccccat

SEQ ID NO: 86119 - DNA, 120 bp, Artificial Sequence
  ENSG00000085063_6 (sequence is synthesized)
ttgaagaccagtcctgtttgcagggaagccccacttgaaggaagaagtctaagagtgaagtaggtgtgacttgaactagattgcatgcttcctcctttgctcttgggaagaccagctttg

SEQ ID NO: 86120 - DNA, 120 bp, Artificial Sequence
  ENSG00000085063_7 (sequence is synthesized)
cagtgacagcttgagtgggttctctgcagccctcagattatttttcctctggctccttggatgtagtcagttagcatcattagtacatctttggagggtggggcaggagtatatgagcat

SEQ ID NO: 86121 - DNA, 120 bp, Artificial Sequence
  ENSG00000085063_8 (sequence is synthesized)
tggaggcatgccaaatgttccatatgtgggtgtcagtcagggacaacaagatccttaatgcagagctagaggacttctggcagggaagtggggaagtgttccagatagcagggcatgaaa

SEQ ID NO: 86122 - DNA, 120 bp, Artificial Sequence
  ENSG00000085063_9 (sequence is synthesized)
acttagagaggtacaagtggctgaaaatcgagtttttcctctgtctttaaattttatatgggctttgttatcttccactggaaaagtgtaatagcatacatcaatggtgtgttaaagcta

SEQ ID NO: 86123 - DNA, 120 bp, Artificial Sequence
  ENSG00000085063_10 (sequence is synthesized)
tttccttgccttttttttattggaatggtaggatatcttggctttgccacacacagttacagagtgaacactctactacatgtgactggcagtattaagtgtgcttattttaaatgttac

SEQ ID NO: 86124 - DNA, 120 bp, Artificial Sequence
  ENSG00000085063_11 (sequence is synthesized)
tggtagaaaggcagttcaggtatgtgtgtatatagtatgaatgcagtggggacaccctttgtggttacagtttgagacttccaaaggtcatccttaataacaacagatctgcaggggtat

SEQ ID NO: 86125 - DNA, 120 bp, Artificial Sequence
  ENSG00000085063_12 (sequence is synthesized)
gttttaccatctgcatccagcctcctgctaactcctagctgactcagcatagattgtataaaatacctttgtaacggctcttagcacactcacagatgtttgaggctttcagaagctctt

SEQ ID NO: 86126 - DNA, 120 bp, Artificial Sequence
  ENSG00000085063_13 (sequence is synthesized)
ctaaaaaatgatacacacctttcacaagggcaaactttttccttttccctgtgtattctagtgaatgaatctcaagattcagtagacctaatgacatttgtattttatgatcttggctgt

SEQ ID NO: 86127 - DNA, 120 bp, Artificial Sequence
  ENSG00000085063_14 (sequence is synthesized)
atttaatggcataggctgacttttgcagatggaggaatttcttgattaatgttgaaaaaaaacccttgattatactctgttggacaaaccgagtgcaatgaatgatgcttttctgaaaat

SEQ ID NO: 86128 - DNA, 120 bp, Artificial Sequence
  ENSG00000085063_15 (sequence is synthesized)
gaaatataacaagtgggtgaatgtggttatggccgaaaaggatatgcagtatgcttaatggtagcaactgaaagaagacatcctgagcagtgccagctttcttctgttgatgccgttccc

SEQ ID NO: 86129 - DNA, 120 bp, Artificial Sequence
  ENSG00000085063_16 (sequence is synthesized)
tgatggggaagatagtgttattcccacagtgtggtagtacacactggggcttatagggactgagcctactcaagggtatatggtgctgtgggtcagagctggggcatggcccagggattc

SEQ ID NO: 86130 - DNA, 120 bp, Artificial Sequence
  ENSG00000085063_17 (sequence is synthesized)
agtgtgccttgactccccctgtaaatgttcctctcagaagccttcttggccttccagcccttggtttttgagacaaccagcagtcatttgttcgttcctgacattccttcctgtcccttc

SEQ ID NO: 86131 - DNA, 120 bp, Artificial Sequence
  ENSG00000085063_18 (sequence is synthesized)
atcctgaggggcggggccggggggcggagccttgcgggctggagcgaaagaatgcgggggctgagcgcagaagcggctcgaggctggaagaggatcttgggcgccgccaggttctgtgga

SEQ ID NO: 86132 - DNA, 120 bp, Artificial Sequence
  ENSG00000085063_19 (sequence is synthesized)
ggcctgaggaagtactgaccatgcccacagccaccggctgagcaaagaagctcatttcatgtgagttctaaggaatgagaaacaattttgatgaatttaagcagaaaatgaatttctggg

SEQ ID NO: 86133 - DNA, 120 bp, Artificial Sequence
  ENSG00000085063_20 (sequence is synthesized)
aacttttttgggggcgggggggtggggaattcagccacactccagaaagccaggagtcgacagttttggaagcctctctcaggattgagattctaggatgagattggcttactgctatct

SEQ ID NO: 86134 - DNA, 120 bp, Artificial Sequence
  ENSG00000085063_21 (sequence is synthesized)
tgtgtcatgtacccactttttggccagactacactgggaagaaggtagtcctctaaagcaaaatctgagtgccactaaatggggagatggggctgttaagctgtccaaatcaacaagggt

SEQ ID NO: 86135 - DNA, 120 bp, Artificial Sequence
  ENSG00000085063_22 (sequence is synthesized)
catataaatggccttaaactttggggttgctttctgcaaaaagttgctgtgactcatgccatagacaaggttgagtgcctggacccaaaggcaatactgtaatgtaaagacatttatagt

SEQ ID NO: 86136 - DNA, 120 bp, Artificial Sequence
  ENSG00000085063_23 (sequence is synthesized)
actaggcaaacagcaccccaggtactccaggccctcctggctggagagggctgtggcaatagaaaattagtgccaactgcagtgagtcagcctaggttaaatagagagtgtaagagtgct

SEQ ID NO: 86137 - DNA, 120 bp, Artificial Sequence
  ENSG00000085063_24 (sequence is synthesized)
ggacaggaacctccaccctcatgtcacatttcttcaatgtgacccttctggcccctctcctcctgacagcggaacaatgactgccccgataggtgaggctggaggaagaatcagtcctgt

SEQ ID NO: 86138 - DNA, 120 bp, Artificial Sequence
  ENSG00000085063_25 (sequence is synthesized)
ccttggcaagctcttcactatgacagtaaaggctctctgcctgctgccaaggcctgtgactttctaacctggcctcacgctgggtaagcttaaggtagaggtgcaggattagcaagccca

SEQ ID NO: 86139 - DNA, 120 bp, Artificial Sequence
  ENSG00000085063_26 (sequence is synthesized)
cctggctaccaggccgacagctacatcctccaactgaccctgatcaacgaagagggattcatgtgtctgtctcagttggttccaaatgaaaccagggagcaggggagttaggaatcgaac

SEQ ID NO: 86140 - DNA, 120 bp, Artificial Sequence
  ENSG00000085063_27 (sequence is synthesized)
accagtcatgcctactggctctctgctcgagagccaataccctgtgccctccactcatctggatttacaggaactgtcatagtgttcagtattgggtggtgataagcccattggattgtc

SEQ ID NO: 86141 - DNA, 120 bp, Artificial Sequence
  ENSG00000085063_28 (sequence is synthesized)
cccttggggggatgagctaggggtgcaaggaacacctgatgagtagataagtggagctcatggtatttcctgaaagatgctaatctatttgccaaacttggtcttgaatgtactgggggc

SEQ ID NO: 86142 - DNA, 120 bp, Artificial Sequence
  ENSG00000085063_29 (sequence is synthesized)
ttcaaggtatgggtatatttttcttgtgtccttgcagttagcccccatgtcttatgtgtgtcctgaaaaaataagagcctgcccaagactttgggcctcttgacagaattaaccactttt

SEQ ID NO: 86143 - DNA, 120 bp, Artificial Sequence
  ENSG00000085063_30 (sequence is synthesized)
atacatctgagttctcttggtaagttctttagcagtgttcaaagtctactagctcgcattagtttctgttgctgccaacagatctgaactaatgctaacagatccccctgagggattctt

SEQ ID NO: 86144 - DNA, 120 bp, Artificial Sequence
  ENSG00000085063_31 (sequence is synthesized)
gatgggctgagcagctggctggagctagtactgactgacattcattgtgatgagggcagctttctggtacaggattctaagctctatgttttatatacattttcatctgtacttgcacct

SEQ ID NO: 86145 - DNA, 120 bp, Artificial Sequence
  ENSG00000085063_32 (sequence is synthesized)
cactttacacaagaggaaactatgcaaagttagctggatcgctcaaggtcacttaggtaagttggcaagtccatgcttcccactcagctcctcaggtcagcaagtctacttctctgccta

SEQ ID NO: 86146 - DNA, 120 bp, Artificial Sequence
  ENSG00000085063_33 (sequence is synthesized)
tgaagaaatcagtttctgcctctttttggaaaagaaaacaaagtgcaattgttttttactggaaagttacccaatagcatgaggtgaacaggacgtagttaggccttcctgtaaacagaa

SEQ ID NO: 86147 - DNA, 120 bp, Artificial Sequence
  ENSG00000085063_34 (sequence is synthesized)
aatcatatcaaaacactatcttcccatctgtttctcaatgcctgctacttcttgtagatatttcatttcaggagagcagcagttaaacccgtggattttgtagttaggaacctgggttca

SEQ ID NO: 86148 - DNA, 120 bp, Artificial Sequence
  ENSG00000085063_35 (sequence is synthesized)
aaccctcttccactaattggctatgtctctggacaagtttttttttttttttttttttaaaccctttctgaactttcactttctatgtctacctcaaagaattgttgtgaggcttgagat

SEQ ID NO: 86149 - DNA, 120 bp, Artificial Sequence
  ENSG00000085063_36 (sequence is synthesized)
aatgcatttgtaaagggtctgccagataggaagatgctagttatggatttacaaggttgttaaggctgtaagagtctaaaacctacagtgaatcacaatgcatttacccccactgacttg

SEQ ID NO: 86150 - DNA, 120 bp, Artificial Sequence
  ENSG00000085063_37 (sequence is synthesized)
gacataagtgaaaactagccagaagtctctttttcaaattacttacaggttattcaatataaaatttttgtaatggataatcttatttatctaaactaaagcttcctgtttatacacact

SEQ ID NO: 86151 - DNA, 120 bp, Artificial Sequence
  ENSG00000085063_38 (sequence is synthesized)
cctgttattctgggataagataaatgaccacagtaccttaatttctaggtgggtgcctgtgatggttcattgtaggtaaggacattttctctttttcagcagctgtgtaggtccagagcc

SEQ ID NO: 86152 - DNA, 120 bp, Artificial Sequence
  ENSG00000085063_39 (sequence is synthesized)
tctgggagaggaggggggtagcatgcacccagcaggggactgaactgggaaactcaaggttctttttactgtggggtagtgagctgcctttctgtgatcggtttccctagggatgttgct

SEQ ID NO: 86153 - DNA, 120 bp, Artificial Sequence
  ENSG00000085063_40 (sequence is synthesized)
gttcccctccttgctattcgcagctacatacaacgtggccaaccccagtaggctgatcctatatatgatcagtgctggtgctgactctcaatagccccacccaagctggctataggttta

SEQ ID NO: 86154 - DNA, 120 bp, Artificial Sequence
  ENSG00000085063_41 (sequence is synthesized)
cagatacattaattaggcaacctaaaatattgatgctggtgttggtgtgacataatgctatggccagaactgaaacttagagttataattcatgtattagggttctccagagggacagaa

SEQ ID NO: 86155 - DNA, 120 bp, Artificial Sequence
  ENSG00000085063_42 (sequence is synthesized)
ttagtaggatatatgtatatatgaaagggaggttattagggagaactggctcccacagttagaaggcgaagtcgcacaataggccgtctgcaagctgggttagagagaagccagtagtgg

SEQ ID NO: 86156 - DNA, 88 bp, Artificial Sequence
  ENSG00000085063_43 (sequence is synthesized)
aggccgtctgcaagctgggttagagagaagccagtagtggctcagcctgagttcaaaaacctcaaaactggggaagctgacagtgcag

SEQ ID NO: 86157 - DNA, 120 bp, Artificial Sequence
  ENSG00000085063_44 (sequence is synthesized)
aaaggctgaagaacctggagtctgatgtccaagagcaggaagagtggaagaaagccagaagactcagcaaacaaggtagacagtgtctaccaccatagtggccataccaaagaggctacc

SEQ ID NO: 86158 - DNA, 120 bp, Artificial Sequence
  ENSG00000085063_45 (sequence is synthesized)
gattccttcctgctacctggatccctgaagttgccctggtctctgcaccttctaaacctagttcttaagagctttccattacatgagctgtctcaaagccctccaataaattctcagtgt

SEQ ID NO: 86159 - DNA, 120 bp, Artificial Sequence
  ENSG00000085063_46 (sequence is synthesized)
aagcttctgttgcttgtggacagaaaattctgacagacctaccctataagtgttactgtcaggataacatgagaacgcacaacagtaagtggtcactaagtgttagctacggttattttg

SEQ ID NO: 86160 - DNA, 120 bp, Artificial Sequence
  ENSG00000085063_47 (sequence is synthesized)
cccaaggtagcatggctagttgatgccggttgatggggcttaaacccagctccctcatcttccaggcctctgtactccctattccactaaactacctctcaggtttatttttttaaattc

SEQ ID NO: 86161 - DNA, 120 bp, Artificial Sequence
  ENSG00000085063_48 (sequence is synthesized)
ttactctgcaagtacataggaccacatttacctgggaaaacaagaataaaggctgctctgcattttttagaaacttttttgaaagggagatgggaatgcctgcacccccaagtccagacc

SEQ ID NO: 86162 - DNA, 120 bp, Artificial Sequence
  ENSG00000085063_49 (sequence is synthesized)
aacacaatggttaattgagatgaataataaaggaaagactgttctgggcttcccagaatagcttggtccttaaattgtggcacaaacaacctcctgtcagagccagcctcctgccaggaa

SEQ ID NO: 86163 - DNA, 120 bp, Artificial Sequence
  ENSG00000085063_50 (sequence is synthesized)
gaggggtaggagactagaggccgtgtgtgcagccttgccctgaaggctagggtgacaatttggaggctgtccaaacaccctggcctctagagctggcctgtctatttgaaatgccggctc

SEQ ID NO: 86164 - DNA, 120 bp, Artificial Sequence
  ENSG00000085063_51 (sequence is synthesized)
tgatgctaatcggcgaccctcaggcaagttacttaaccttacatgcctcagttttctcatctggaaaatgagaaccctaggtttagggttgttagaaaagttaaatgagttaagacaagt

SEQ ID NO: 86165 - DNA, 120 bp, Artificial Sequence
  ENSG00000085063_52 (sequence is synthesized)
gcctgggacacagtagcctcttgtgtgtgtttatcattatgtcctcagcaggtcgtagaagcagcttctcaggtgtgaggctggcgcgattatctggagtgggttgggttttctaggatg

SEQ ID NO: 86166 - DNA, 120 bp, Artificial Sequence
  ENSG00000085063_53 (sequence is synthesized)
gaccccctgctgcattttcctcattcatccaccagggcttaatggggaatcaaggaatccatgtgtaactgtataataactgtagccacactccaatgaccacctactagttgtccctgg

SEQ ID NO: 86167 - DNA, 120 bp, Artificial Sequence
  ENSG00000085063_54 (sequence is synthesized)
cactgcttatacatatgtccatcaaatcaatcctatgaagtagatactgtcttcattttatagatcagagacaattggggttcagagagctgatgtgattttcccagggtcacagagagt

SEQ ID NO: 86168 - DNA, 120 bp, Artificial Sequence
  ENSG00000085063_55 (sequence is synthesized)
cccagattcaggcacaactcttgtattccaagacacaaccactacatgtccaaaggctgcccagagccaccgggcacggcaaattgtgacatatccctaaagaggctgagcacctggtca

SEQ ID NO: 86169 - DNA, 120 bp, Artificial Sequence
  ENSG00000085063_56 (sequence is synthesized)
ggatctgatggctgacagtgtgtccagatgcagagctggagtgggggaggggaaggggggctccttgggacagagaaggctttctgtgctttctctgaagggagcagtctgaggaccaag

SEQ ID NO: 86170 - DNA, 120 bp, Artificial Sequence
  ENSG00000085063_57 (sequence is synthesized)
ggaacccggcaaacagcacctcaggtactccaggccctcctggctggagagggctgtggcaatggaaaattagtgccaactgcaatgagtcagcctcggttaaatagagagtgaagaatg

SEQ ID NO: 86171 - DNA, 120 bp, Artificial Sequence
  ENSG00000085063_58 (sequence is synthesized)
ctggacaggaacctccaccctcatgtcacatttcttcagtgtgacccttctggcccctctcctcctgacagcggaacaatgactgccccgataggtgaggctggaggaagaatcagtcct

SEQ ID NO: 86172 - DNA, 120 bp, Artificial Sequence
  ENSG00000085063_59 (sequence is synthesized)
gtccttggcaagctcttcactatgacagtaaaggctctctgcctgctgccaaggcctgtgactttctaacctggcctcacgctgggtaagcttaaggtagaggtgcaggattagcaagcc

SEQ ID NO: 86173 - DNA, 120 bp, Artificial Sequence
  ENSG00000085063_60 (sequence is synthesized)
cacctggctaccaggccgacagctacatctttcaactgaccctgatcaacgaagagggacttgtgtctctcagttggttccaaatgaaaccagggagcaggggcgttaggaagctccaac

SEQ ID NO: 86174 - DNA, 120 bp, Artificial Sequence
  ENSG00000085063_61 (sequence is synthesized)
aggatggtacttaatggggcatttgagtggagaggtaggtgacatagtgctttggagcccagggagggaaaggttctgctgaagttgaattcaagactgttctttcatcacaaacttgag

SEQ ID NO: 86175 - DNA, 120 bp, Artificial Sequence
  ENSG00000085063_62 (sequence is synthesized)
tttcctggacatttgtttgcagaaacaaccgtagggttttgccttaacctcgtgggtttattattacctcatagggactttgcctcctgacagcagtttatgggtgttcattgtggcact

SEQ ID NO: 86176 - DNA, 120 bp, Artificial Sequence
  ENSG00000085063_63 (sequence is synthesized)
tgagttttcttgcatacttgttagagaaaccaagtttgtcatcaacttcttatttaaccccctggctataacttcatggattatgttataattaagccatccagagtaaaatctgtttag

SEQ ID NO: 86177 - DNA, 120 bp, Artificial Sequence
  ENSG00000085063_64 (sequence is synthesized)
attatcttggagtaagggggaaaaaatctgtaattttttctcctcaactagatatatacataaaaaatgattgtattgcttcatttaaaaaatataacgcaaaatctcttttccttctaa

SEQ ID NO: 86178 - DNA, 63 bp, Artificial Sequence
  ENSG00000085063_65 (sequence is synthesized)
tgcagtggtgcaagcttggctcactgcaccctccacctcccaagctcaaatgattctcacttt

SEQ ID NO: 86179 - DNA, 70 bp, Artificial Sequence
  ENSG00000085063_66 (sequence is synthesized)
caggcatgtaccaccatgcccggctaatctttgtatatttttacaagtgatccacccacctcggcctccc

SEQ ID NO: 86180 - DNA, 120 bp, Artificial Sequence
  ENSG00000085063_67 (sequence is synthesized)
gggattgtaggtgtgagccgccacacctggcctagtttgttgttgttttttaaaactaatatttcaaggcattaatctgtaaccttcacaagtcagaggatcctctattgggtaggattt

SEQ ID NO: 86181 - DNA, 120 bp, Artificial Sequence
  ENSG00000085063_68 (sequence is synthesized)
cacacctgtgagggcagacatggccatttcagatgctctagagaactgggttcctgtgtgtgctcagaaagtgaggacccaccttgcttccactggactttccactgaaaaatctatttc

SEQ ID NO: 86182 - DNA, 120 bp, Artificial Sequence
  ENSG00000085063_69 (sequence is synthesized)
catggtgataaacctagccttcagccttagaactagaagtcagctgttgggctctaaaacccacacttggtttaaccatgacattcttttgtgagattttacgtgtttcatctttgaaaa

SEQ ID NO: 86183 - DNA, 120 bp, Artificial Sequence
  ENSG00000085063_70 (sequence is synthesized)
tgtcttttcacagaggtaggtacttccaaatactgattacatggtagaagtcatatggcatgaagatagtttatctctgatgatggaaaagggggtatccatacaaaccaggaagatttc

SEQ ID NO: 86184 - DNA, 120 bp, Artificial Sequence
  ENSG00000085063_71 (sequence is synthesized)
cttccaactcttgcttcctcagtctctccccatcacacgtgtggactgtaactcatctttttgttgtcactgttgttacaaaaatggagaaggaaaaataacccagcaaaaactgacagc

SEQ ID NO: 86185 - DNA, 120 bp, Artificial Sequence
  ENSG00000085063_72 (sequence is synthesized)
tagcaaggatgagtcttaagaattgactgggagcaataattgtttttcaaactagggaactggaggcaatttgcttctgatgtaagatgaccctcacgttgtgtctgctggtacccagct

SEQ ID NO: 86186 - DNA, 120 bp, Artificial Sequence
  ENSG00000085063_73 (sequence is synthesized)
gtcctatgcccatgggtttaaagtgcacagctgttgtcttgtctttgacagtgtgtactcctggcattcggtcagtcccttagaagggggtagttcagtaatgataccctgtcccagagg

SEQ ID NO: 86187 - DNA, 120 bp, Artificial Sequence
  ENSG00000085063_74 (sequence is synthesized)
ggtagttcagtaatgataccctgtcccagaggttaccaaactttttctgtacaggaccagatagcaatttttttttttttttaaacagagttttgctctgtcacccaagctggagtgcag

SEQ ID NO: 86188 - DNA, 71 bp, Artificial Sequence
  ENSG00000085063_75 (sequence is synthesized)
ctcggctagtaaatattttaagctttgcagaccaagaggcaaaatcaagggtattatgagacttacctcaa

SEQ ID NO: 86189 - DNA, 120 bp, Artificial Sequence
  ENSG00000085063_76 (sequence is synthesized)
ccaagaggcaaaatcaagggtattatgagacttacctcaataataagaaacaaaattttcacagatttttttattgacaaaattcataacataattattgagtccagcataataatacac

SEQ ID NO: 86190 - DNA, 120 bp, Artificial Sequence
  ENSG00000085063_77 (sequence is synthesized)
atctactaatgaggggaatagaattctttttagggggataaccatttgcttaattggggttcaaaattagtgttccctcgcatcaaatcaattgcagatgttcatctattaatactaatc

SEQ ID NO: 86191 - DNA, 120 bp, Artificial Sequence
  ENSG00000085063_78 (sequence is synthesized)
tgtgatgacattttacatatttcattttgaaaatgtattttcacgcagataggtattgccagacattgatcatcaacccacgaggatgtgatttaattgggcatattcattgcttggaag

SEQ ID NO: 86192 - DNA, 120 bp, Artificial Sequence
  ENSG00000085063_79 (sequence is synthesized)
tggatattcaaatgtggatatttcctttgtgcttgcatcagggtccaaaaaatgttgctggaactgtagtttgaatttggaaagatataactgctatacatttgtgcgggagtggaagta

SEQ ID NO: 86193 - DNA, 120 bp, Artificial Sequence
  ENSG00000085063_80 (sequence is synthesized)
taccacaagttgctgactttgggcccatattaatggagatggtgggctgccaggggacaagtcagtgctgctttaagagatcctgactttcttcctgattctaggtcatagcctgcagtg

SEQ ID NO: 86194 - DNA, 81 bp, Artificial Sequence
  ENSG00000085063_81 (sequence is synthesized)
ctgattttgatgcgtgtctcattaccaaagctgagttgggatatcactatgttgcccaggctggccgcaggcaatcctctc

SEQ ID NO: 86195 - DNA, 120 bp, Artificial Sequence
  ENSG00000085063_82 (sequence is synthesized)
aactgctgactgcaaaacagccgtcaattgttcatctgattttgatgcgtgtctcattaccaaagctgagtcctgaggagactcaagctgagctcaaaggacacgtaggagggttacaag

SEQ ID NO: 86196 - DNA, 120 bp, Artificial Sequence
  ENSG00000085117_0 (sequence is synthesized)
gcagtccgacgccgactgaggcacgagcgggtgacgctgggcctgcagcgcggagcagaaagcagaacccgcagagtcctccctgctgctgtgtggacgacacgtgggcacaggcagaag

SEQ ID NO: 86197 - DNA, 120 bp, Artificial Sequence
  ENSG00000085117_1 (sequence is synthesized)
tgggccctgtgaccagctgcactggtttcgtggaaggaagctccaggactggcgggatgggctcagcctgtatcaaagtcaccaaatactttctcttcctcttcaacttgatcttcttta

SEQ ID NO: 86198 - DNA, 120 bp, Artificial Sequence
  ENSG00000085117_2 (sequence is synthesized)
tcctgggcgcagtgatcctgggcttcggggtgtggatcctggccgacaagagcagtttcatctctgtcctgcaaacctcctccagctcgcttaggatgggggcctatgtcttcatcggcg

SEQ ID NO: 86199 - DNA, 120 bp, Artificial Sequence
  ENSG00000085117_3 (sequence is synthesized)
tgggggcagtcactatgctcatgggcttcctgggctgcatcggcgccgtcaacgaggtccgctgcctgctggggctgtactttgctttcctgctcctgatcctcattgcccaggtgacgg

SEQ ID NO: 86200 - DNA, 120 bp, Artificial Sequence
  ENSG00000085117_4 (sequence is synthesized)
ccggggccctcttctacttcaacatgggcaagctgaagcaggagatgggcggcatcgtgactgagctcattcgagactacaacagcagtcgcgaggacagcctgcaggatgcctgggact

SEQ ID NO: 86201 - DNA, 120 bp, Artificial Sequence
  ENSG00000085117_5 (sequence is synthesized)
acgtgcaggctcaggtgaagtgctgcggctgggtcagcttctacaactggacagacaacgctgagctcatgaatcgccctgaggtcacctacccctgttcctgcgaagtcaagggggaag

SEQ ID NO: 86202 - DNA, 120 bp, Artificial Sequence
  ENSG00000085117_6 (sequence is synthesized)
aggacaacagcctttctgtgaggaagggcttctgcgaggcccccggcaacaggacccagagtggcaaccaccctgaggactggcctgtgtaccaggagggctgcatggagaaggtgcagg

SEQ ID NO: 86203 - DNA, 120 bp, Artificial Sequence
  ENSG00000085117_7 (sequence is synthesized)
cgtggctgcaggagaacctgggcatcatcctcggcgtgggcgtgggtgtggccatcatcgagctcctggggatggtcctgtccatctgcttgtgccggcacgtccattccgaagactaca

SEQ ID NO: 86204 - DNA, 120 bp, Artificial Sequence
  ENSG00000085117_8 (sequence is synthesized)
gcaaggtccccaagtactgaggcagctgctatccccatctccctgcctggcccccaacctcagggctcccaggggtctccctggctccctcctccaggcctgcctcccacttcactgcga

SEQ ID NO: 86205 - DNA, 120 bp, Artificial Sequence
  ENSG00000085117_9 (sequence is synthesized)
atctctcctggcctatccgctgccagccttgagccctggctgttctgtggttcctctgctcaccgcccatcagggttctcttagcaactcagagaaaaatgctccccacagcgtccctgg

SEQ ID NO: 86206 - DNA, 120 bp, Artificial Sequence
  ENSG00000085117_10 (sequence is synthesized)
cccacagcgtccctggcgcaggtgggctggacttctacctgccctcaagggtgtgtatattgtataggggcaactgtatgaaaaattggggaggagggggccgggcgcggtggctcacgc

SEQ ID NO: 86207 - DNA, 120 bp, Artificial Sequence
  ENSG00000085117_11 (sequence is synthesized)
aaaaaaaaaaaaaaaaaaaaaaattggggagggaagggcgttagataaggcactctgggctgtcaggagactgcctactgggtgggtcaacttatttcccactatgacatttatatcttt

SEQ ID NO: 86208 - DNA, 120 bp, Artificial Sequence
  ENSG00000085117_12 (sequence is synthesized)
atatctttatttttcacaattatattgaaggcagtgggagaggggagagggtgggttttacctgatattaaggggtggcaccccttccccaggcctgatgcaggtccatctagacagctc

SEQ ID NO: 86209 - DNA, 120 bp, Artificial Sequence
  ENSG00000085117_13 (sequence is synthesized)
agattagcctaggccatgccctagggacacggcctaggggagctgggctggagggggtctgcctgggtaaggggatctggcttggccctgagctgcttagggacaggtgagtccttgggg

SEQ ID NO: 86210 - DNA, 120 bp, Artificial Sequence
  ENSG00000085117_14 (sequence is synthesized)
gcatggcacagagctggtcctgtattctccagggtccggagctggccaggggcggggaggaggaggatggcttctcctgggagaaggtgggctggcctttcttggcaagcggtcctctgg

SEQ ID NO: 86211 - DNA, 120 bp, Artificial Sequence
  ENSG00000085117_15 (sequence is synthesized)
cccctggggagtggggtgggtgaggctgtgccttgtagggggagaggggagggggctttgtgtgcaccattctgtaaaacacactcaagattctaagactattaaagaggatttataaca

SEQ ID NO: 86212 - DNA, 120 bp, Artificial Sequence
  ENSG00000085117_16 (sequence is synthesized)
gccgagtgcagcctgaccgcggcgctggccgtaacatcgggtggagagcatctctcggggcacgcaggctgggtgcacctggtcggggaccctcagctgactttgtgcctgctctgtgtc

SEQ ID NO: 86213 - DNA, 120 bp, Artificial Sequence
  ENSG00000085117_17 (sequence is synthesized)
gacaacagcctttctgtgaggaagggcttctgcgaggcccccggcaacaggacccagagtggcaaccaccctgaggactggcctgtgtaccaggagctcctggggatggtcctgtccatc

SEQ ID NO: 86214 - DNA, 120 bp, Artificial Sequence
  ENSG00000085117_18 (sequence is synthesized)
tctggcagagaaacccttttgcaaaggccctcaggtaggtataaggacctggggcctgatataccaggacaacaggaaagaggctacatgagcctgtggggggaagaggacagaggaatg

SEQ ID NO: 86215 - DNA, 120 bp, Artificial Sequence
  ENSG00000085117_19 (sequence is synthesized)
gcaaccctggcggggccccgccggccacacggggagcctggatttaaagtgagtatgtcttcagccacattgcctttggagagtcacagacaggagtgacgagatctgggtcgtgttttt

SEQ ID NO: 86216 - DNA, 120 bp, Artificial Sequence
  ENSG00000085117_20 (sequence is synthesized)
ccgaaaagattctccttccaggggcatcccagcctgagcctttccagagccgaccgggccggggattggggggatttggtgggtagggactgaggacgaactatctccaacggaacctag

SEQ ID NO: 86217 - DNA, 120 bp, Artificial Sequence
  ENSG00000085117_21 (sequence is synthesized)
ttggggtggtgaggagattccctgccattcccagctggtcctttgaccaagcactggattcctgacccggccttcccctctcctagatcacccaaagcctgggctggcggtgggtatggg

SEQ ID NO: 86218 - DNA, 120 bp, Artificial Sequence
  ENSG00000085117_22 (sequence is synthesized)
gttgagcacctgacacacccccaacctgccctgcgggcaaggacagaagaggcctgagaaccgtctcttcggactcaggggcagtggaactcagactgccttcaggaagctccaggactg

SEQ ID NO: 86219 - DNA, 120 bp, Artificial Sequence
  ENSG00000085117_23 (sequence is synthesized)
aagcctcccagggcgtggcgtgaagcggggatttggtaggggagcgcagagcgaggcctgaggtgtttccctggcagaggtccctccactgggaaacaaacggagaggggagtatgtgtt

SEQ ID NO: 86220 - DNA, 120 bp, Artificial Sequence
  ENSG00000085117_24 (sequence is synthesized)
gtgagaggacattgtgataatggaagtgaaagagctttgtcagctgcacaggtgaatgcccctggtcattaaccagagtcctccctgctgctgtgtggacgacacgtgggcacaggcaga

SEQ ID NO: 86221 - DNA, 120 bp, Artificial Sequence
  ENSG00000085117_25 (sequence is synthesized)
atggccatgctagtgcctgccaggcagggtgatgtcagagttggagacggcgtgtggaaagcccatgaggcacaaaacctcctccagctcgcttaggatgggggcctatgtcttcatcgg

SEQ ID NO: 86222 - DNA, 120 bp, Artificial Sequence
  ENSG00000085117_26 (sequence is synthesized)
agcagaacccgcaggtgagcaagggggcagcgggccggggtagcctgccggacaaccataggcaaagttagttttagcccccgcttctgcggtccggctcggacaactttcctcggaact

SEQ ID NO: 86223 - DNA, 120 bp, Artificial Sequence
  ENSG00000085117_27 (sequence is synthesized)
agtgacaggtcggggcagctggtgggtgaaaaggagctttagccaccagtcctgaacccccagttctcacactcggccgtgcacagctgcgtgatcctgggtccgtccctctacctggct

SEQ ID NO: 86224 - DNA, 120 bp, Artificial Sequence
  ENSG00000085117_28 (sequence is synthesized)
gagtgactgagccccgggctgtgcagtccgacgccgactgaggcacgagcgggtgacgctgggcctgcagcgcggagcagaaagcagaacccgcagttcaactgagccggaccccctaag

SEQ ID NO: 86225 - DNA, 120 bp, Artificial Sequence
  ENSG00000085117_29 (sequence is synthesized)
gaggcacgagcgggtgacgctgggcctgcagcgcggagcagaaagcagaacccgcagccccttacccaggagcagcagtggtcatcttctggcacggagcctctccaggatgggcacatg

SEQ ID NO: 86226 - DNA, 120 bp, Artificial Sequence
  ENSG00000085117_30 (sequence is synthesized)
gctagagactggatcaggcctcagagggcttcagactgttggtcaggaaagcaacaacttttccagatcatcatcatcatcatcataagtcctccctgctgctgtgtggacgacacgtgg

SEQ ID NO: 86227 - DNA, 120 bp, Artificial Sequence
  ENSG00000085185_0 (sequence is synthesized)
acacacacacaccgctctccccctcactctttcgctcgccgcggctgctgccagtgtgtggctctgtctctcctccgctttgctgagccctcccttcttcctctcagttcctagagtccg

SEQ ID NO: 86228 - DNA, 120 bp, Artificial Sequence
  ENSG00000085185_1 (sequence is synthesized)
accgccgccgccgccgagagagaggagaaggagggggagtggccacagcaggtcctatctggtggtgagtggctgtcatgatctctacagcaccgctctacagcggcgtgcacaactgga

SEQ ID NO: 86229 - DNA, 120 bp, Artificial Sequence
  ENSG00000085185_2 (sequence is synthesized)
ccagttctgaccggattcgcatgtgtggcatcaacgaggagagaagagcacctctttctgatgaggagtcaacgacaggcgactgccagcactttggatctcaggagttttgtgtcagca

SEQ ID NO: 86230 - DNA, 120 bp, Artificial Sequence
  ENSG00000085185_3 (sequence is synthesized)
gcagtttttccaaggtggagctcacggcagttggaagtggcagcaatgcccggggggcagacccagatggcagtgctacagaaaaacttgggcacaagtcagaagacaagcctgacgatc

SEQ ID NO: 86231 - DNA, 120 bp, Artificial Sequence
  ENSG00000085185_4 (sequence is synthesized)
cccagccaaaaatggactacgctgggaacgtggcagaggctgagggcctcttggtgcccctgagcagcccaggagacgggctcaagcttcccgcatctgacagcgccgaggccagcaaca

SEQ ID NO: 86232 - DNA, 120 bp, Artificial Sequence
  ENSG00000085185_5 (sequence is synthesized)
gcagggccgactgctcctggactccactcaacacccaaatgagcaaacaggttgactgctcacccgccggagtaaaggctttggactctcggcaaggtgttggagagaagaatactttca

SEQ ID NO: 86233 - DNA, 120 bp, Artificial Sequence
  ENSG00000085185_6 (sequence is synthesized)
ttttggcaactctgggaactggagtccctgtggaggggaccctgcccctggttaccactaacttcagtcctctgccagcccctatctgtccccctgctcccggttcggcctctgtgcccc

SEQ ID NO: 86234 - DNA, 120 bp, Artificial Sequence
  ENSG00000085185_7 (sequence is synthesized)
actctgttccagatgcattccaggttcccctctccgtccctgccccagtcccccattcagggcttgttccagtccaagttgccacttcggttccagctccttcccctcccttagcacctg

SEQ ID NO: 86235 - DNA, 120 bp, Artificial Sequence
  ENSG00000085185_8 (sequence is synthesized)
tcccggctctggctccagcgccaccgtcagtgcccacgctcatctctgactcgaaccccctttctgtttcggcctcagtcttggtgcctgtgccagcttctgctcccccttcaggcccgg

SEQ ID NO: 86236 - DNA, 120 bp, Artificial Sequence
  ENSG00000085185_9 (sequence is synthesized)
ttcccttgtcggctccagctcctgccccgctttcagtcccagtttcagctcctcccttggctctcatccaggctcctgtgcccccttcagctccgaccttggttctcgctcccgtcccca

SEQ ID NO: 86237 - DNA, 120 bp, Artificial Sequence
  ENSG00000085185_10 (sequence is synthesized)
ctccggttctggctcccatgccagcatccacgcctccagcggcccctgcccctccgtctgtgcccatgcccactccaaccccatcttccggcccaccttctacccccaccctcatccccg

SEQ ID NO: 86238 - DNA, 120 bp, Artificial Sequence
  ENSG00000085185_11 (sequence is synthesized)
cctttgctcctacaccggtgcctgcacccaccccagcccccatctttactccagcccctacacccatgcctgctgccacgccagctgccattcccacctctgcacccatcccggcctcct

SEQ ID NO: 86239 - DNA, 120 bp, Artificial Sequence
  ENSG00000085185_12 (sequence is synthesized)
tcagtttgagtagagtgtgctttcctgcagctcaggcaccagctatgcaaaaagtccccctgtcctttcagccagggacagtgctgaccccgagccagccgctggtatatatcccgcctc

SEQ ID NO: 86240 - DNA, 120 bp, Artificial Sequence
  ENSG00000085185_13 (sequence is synthesized)
caagctgtgggcagccactcagtgtggccacactgccaaccactctaggggtttcctccactcttacgctccctgtcctgccgtcctacctgcaggacaggtgtctcccaggcgtgctag

SEQ ID NO: 86241 - DNA, 120 bp, Artificial Sequence
  ENSG00000085185_14 (sequence is synthesized)
cctcccccgagctccgttcttacccgtatgcattttctgtggcccggcctctgacttcggattccaagctggtatctctggaggtgaacaggctcccctgcacttccccatccggtagca

SEQ ID NO: 86242 - DNA, 120 bp, Artificial Sequence
  ENSG00000085185_15 (sequence is synthesized)
ccaccacccagcctgcacccgatggggtccctgggcctttggcagatacctcccttgttactgcttctgccaaggtgcttccaactccacagcctctgctgccagcccccagtgggagct

SEQ ID NO: 86243 - DNA, 120 bp, Artificial Sequence
  ENSG00000085185_16 (sequence is synthesized)
cagccccaccgcaccccgccaagatgcccagtggcaccgagcagcaaacagaagggacttccgttaccttctctcctcttaagtcaccgccacagctggaacgagagatggcctctccac

SEQ ID NO: 86244 - DNA, 120 bp, Artificial Sequence
  ENSG00000085185_17 (sequence is synthesized)
ctgagtgcagcgagatgccccttgatctgtcctccaagtccaaccgccagaagcttccattgccgaaccagcgcaagacaccccccatgcctgtgttgacccccgtgcacaccagcagca

SEQ ID NO: 86245 - DNA, 120 bp, Artificial Sequence
  ENSG00000085185_18 (sequence is synthesized)
aggccctcctctccacagtcctgtctaggtctcagcgcacaacccaggctgccggtggcaatgtcacctcctgcctgggctccacttcctcgccctttgtcatctttcccgagatcgtga

SEQ ID NO: 86246 - DNA, 120 bp, Artificial Sequence
  ENSG00000085185_19 (sequence is synthesized)
ggaatggggacccgagcacctgggtgaagaactcaactgcactgatcagcaccattcctggcacctacgtgggagtggccaacccagtgcctgcatccctgctgctgaacaaagacccca

SEQ ID NO: 86247 - DNA, 120 bp, Artificial Sequence
  ENSG00000085185_20 (sequence is synthesized)
acctgggcctcaaccgtgacccccgccatctccccaagcaggagcccatctccatcattgatcaaggagagcctaagggcactggtgccacgtgtggcaaaaagggcagccaggctggtg

SEQ ID NO: 86248 - DNA, 120 bp, Artificial Sequence
  ENSG00000085185_21 (sequence is synthesized)
ctgagggacagccaagcacagtgaaacgatatactccagcccgcattgcccctgggctgccagggtgccaaaccaaggaactctctttgtggaaacccacggggccggcaaatatttatc

SEQ ID NO: 86249 - DNA, 120 bp, Artificial Sequence
  ENSG00000085185_22 (sequence is synthesized)
cccggtgttcagtcaatgggaaacctaccagcacccaggtcctgcctgttggctggtccccgtaccaccaggcgtctctgctttccattggcatttccagtgccgggcagctgaccccca

SEQ ID NO: 86250 - DNA, 120 bp, Artificial Sequence
  ENSG00000085185_23 (sequence is synthesized)
gtcagggggcgcccatcaggcccaccagcgttgtttcggagttttctggtgtgccatctctcagctccagcgaagccgtgcacggacttcctgaggggcaaccacggcctgggggctcct

SEQ ID NO: 86251 - DNA, 120 bp, Artificial Sequence
  ENSG00000085185_24 (sequence is synthesized)
tcgttccagagcaggaccctgttacaaagaacaaaacttgccggattgctgccaagccttatgaagaacaagtcaatcctgtcctcttgaccctcagccctcagactgggaccctggcac

SEQ ID NO: 86252 - DNA, 120 bp, Artificial Sequence
  ENSG00000085185_25 (sequence is synthesized)
tgtctgttcagcctagcggtggggacattcgaatgaatcaggggcctgaggaatcagagagccacctctgctctgacagcactcctaagatggaaggcccccagggggcttgtggcctga

SEQ ID NO: 86253 - DNA, 120 bp, Artificial Sequence
  ENSG00000085185_26 (sequence is synthesized)
agctggcaggagacacgaagcctaagaaccaagtgctggccacctacatgtcccatgagctggtcctggccaccccccagaacctgcctaagatgcctgagctgcctttgctacctcacg

SEQ ID NO: 86254 - DNA, 120 bp, Artificial Sequence
  ENSG00000085185_27 (sequence is synthesized)
acagccaccccaaggaacttatattggacgtggttccgagcagcaggaggggctccagcacagagcgcccacagcttggaagccaggtggatctggggcgagtgaaaatggagaaggtgg

SEQ ID NO: 86255 - DNA, 120 bp, Artificial Sequence
  ENSG00000085185_28 (sequence is synthesized)
ttagccacctgcttccgggctgatggcctcccagtggctccccagaggggccaagctgaagttcgggctaaggccgggcaggctcgagtgaaacaggaaagcgtaggggtctttgcttgc

SEQ ID NO: 86256 - DNA, 120 bp, Artificial Sequence
  ENSG00000085185_29 (sequence is synthesized)
aagaacaagtggcagccagatgatgtgacggaatctctgccgcccaagaagatgaagtgcggcaaagagaaggacagtgaagagcagcagctccagccacaagccaaggccgtggtccgg

SEQ ID NO: 86257 - DNA, 120 bp, Artificial Sequence
  ENSG00000085185_30 (sequence is synthesized)
agttcccacagacccaagtgccggaagctgcccagtgacccccaggaatccaccaagaaaagccccaggggggcttcagattcaggaaaagagcacaatggagtcaggggaaagcacaag

SEQ ID NO: 86258 - DNA, 120 bp, Artificial Sequence
  ENSG00000085185_31 (sequence is synthesized)
caccggaagccgacaaagccggagtcccagtctccaggaaaacgagccgacagccacgaggaaggttccttggaaaagaaagcaaagagcagtttccgtgactttattcctgtggttctg

SEQ ID NO: 86259 - DNA, 120 bp, Artificial Sequence
  ENSG00000085185_32 (sequence is synthesized)
agcacccgcacgcgcagtcagtctggaagcatctgtagctcctttgctggcatggcagacagtgacatgggaagccaggaagtcttccccacagaagaagaagaggaggtaacccccacc

SEQ ID NO: 86260 - DNA, 120 bp, Artificial Sequence
  ENSG00000085185_33 (sequence is synthesized)
ccagctaagcgtcgaaaggtgagaaagacccaacgggacacccagtatcgcagccaccatgcccaggacaagtctctgctgagccagggccgaaggcacctgtggcgagcccgagaaatg

SEQ ID NO: 86261 - DNA, 120 bp, Artificial Sequence
  ENSG00000085185_34 (sequence is synthesized)
ccctggaggacagaggctgcccggcaaatgtgggacaccaatgaggaggaggaggaagaagaggaggagggcctgctgaagaggaagaaacgaagacggcagaagagccgaaaatatcag

SEQ ID NO: 86262 - DNA, 120 bp, Artificial Sequence
  ENSG00000085185_35 (sequence is synthesized)
actggggagtacctgacagagcaagaagacgagcagcggcggaaagggagagcagatttaaaggcccgtaagcagaagacttcctcctcccaaagtttggagcaccgcctcaggaacagg

SEQ ID NO: 86263 - DNA, 120 bp, Artificial Sequence
  ENSG00000085185_36 (sequence is synthesized)
aaccttctcttgcccaacaaagtccaggggatctcggattcaccaaacggtttcctcccaaataacctggaagagccagcctgccttgaaaattcagaaaagccatcaggaaaacgaaag

SEQ ID NO: 86264 - DNA, 120 bp, Artificial Sequence
  ENSG00000085185_37 (sequence is synthesized)
tgcaagaccaagcacatggcaaccgtctcagaagaggcaaaggatgttgttctctactgcctccagaaagacagtgaagatgtgaatcaccgtgacaatgctggctacacagccctgcat

SEQ ID NO: 86265 - DNA, 120 bp, Artificial Sequence
  ENSG00000085185_38 (sequence is synthesized)
gaggcttgttcccggggctggaccgacatcctgaacatcctgctggagcacggggccaacgtgaactgcagtgcgcaggacggcacgaggccagttcatgatgcggtggtcaatgacaac

SEQ ID NO: 86266 - DNA, 120 bp, Artificial Sequence
  ENSG00000085185_39 (sequence is synthesized)
ctggagaccatctggctcctgctgtcctatggggccgatcccacactggctacctactcgggtcagacagccatgaagctggccagcagcgacaccatgaagcgctttctcagtgatcac

SEQ ID NO: 86267 - DNA, 120 bp, Artificial Sequence
  ENSG00000085185_40 (sequence is synthesized)
ctctcggatcttcagggccgggcagagggtgatcccggtgtatcctgggatttttacagcagttctgtgttggaggaaaaagacgggtttgcctgtgacctcctacataatcctcctggg

SEQ ID NO: 86268 - DNA, 120 bp, Artificial Sequence
  ENSG00000085185_41 (sequence is synthesized)
agctcagatcaagaaggagacgatccgatggaggaggatgatttcatgtttgaactctcagacaagcctcttctcccttgctacaacctccaagtgtcagtgtcccgcgggccctgcaac

SEQ ID NO: 86269 - DNA, 120 bp, Artificial Sequence
  ENSG00000085185_42 (sequence is synthesized)
tggttcctcttttccgatgtcttgaagaggctgaagctttcctcgaggatctttcaggcccggttcccgcactttgaaatcaccaccatgcccaaggccgagttctacaggcaggtggcc

SEQ ID NO: 86270 - DNA, 120 bp, Artificial Sequence
  ENSG00000085185_43 (sequence is synthesized)
tccagtcagctgctgacccctgccgagaggcctggaggcttggacgacagatcccccccaggctcctctgagactgtggagctggtgcggtacgagccagacctacttcggctcctaggg

SEQ ID NO: 86271 - DNA, 120 bp, Artificial Sequence
  ENSG00000085185_44 (sequence is synthesized)
tccgaggtggaattccagtcttgcaacagttgaccgggaaaacagcccctcctcttctttctccttccgagttcgcccttcccccacctccttgtctttccccgaccgagcaccagactg

SEQ ID NO: 86272 - DNA, 120 bp, Artificial Sequence
  ENSG00000085185_45 (sequence is synthesized)
cagaatgaggcaataatacggaccaacaagaagccgccttatcaatgccagcattagcgactggactgtttttgtttttttggttacaattagttctcatctccctgtcgtcgtcattgt

SEQ ID NO: 86273 - DNA, 120 bp, Artificial Sequence
  ENSG00000085185_46 (sequence is synthesized)
tatcgtggttgctgatgggggtggaaagttgaactccatgtctgaggacaagaggtcccgggggtggtgggaggtggcgccggggtcccttggactggcctccttgttcatgaccaagac

SEQ ID NO: 86274 - DNA, 120 bp, Artificial Sequence
  ENSG00000085185_47 (sequence is synthesized)
caaacctgggccctggatggccttggcctgtcccgaggagaaatgagaaaatcccagatctctgagcgccccccaactccattcccctgtgttcttctgtcttctgtagtatttatttta

SEQ ID NO: 86275 - DNA, 120 bp, Artificial Sequence
  ENSG00000085185_48 (sequence is synthesized)
ttagtatttaatttgtattgtttcattggtttctgataagtctgtatcactgtgacgatttgagacaacttgttgtattgagggactttctgtacctccttttctttttctttgttgatg

SEQ ID NO: 86276 - DNA, 120 bp, Artificial Sequence
  ENSG00000085185_49 (sequence is synthesized)
agctctgacaaagctattccctggtgtttttttcccccactggggagggggtgaggtggaatggggtgggggaacatggacttgtgactaacgaagctggttgctgctggcccagggctg

SEQ ID NO: 86277 - DNA, 120 bp, Artificial Sequence
  ENSG00000085185_50 (sequence is synthesized)
ggggcttgggggtaaatcctgaggctttggtgctcccccacccacccattcccgccctttgcagcagccccgctatcttgagattagtgttgacagggaggggaggattgtgaggtgagg

SEQ ID NO: 86278 - DNA, 120 bp, Artificial Sequence
  ENSG00000085185_51 (sequence is synthesized)
ggttaataagttactctaataaaggagcgtggagaagggatctgaggggtgagggtggcccccctcctcacgccttcttcactgcccccctcagagtgcacaatacgagtttgttcctgc

SEQ ID NO: 86279 - DNA, 120 bp, Artificial Sequence
  ENSG00000085185_52 (sequence is synthesized)
ctccactctcccaccccgttctggcctccctgtctcaagatactgagcctctcacctcccagccctcagccacccccatccctgccccttctgagactcacagcacccctttccttcctc

SEQ ID NO: 86280 - DNA, 120 bp, Artificial Sequence
  ENSG00000085185_53 (sequence is synthesized)
tcctcccacctcctccctcagcccctcattctccttgggaatctgcagagggctctgggactcactgccggatgtgaaatccaggcgtcagctgtttcctaggcaagggcaggaaagtgg

SEQ ID NO: 86281 - DNA, 120 bp, Artificial Sequence
  ENSG00000085185_54 (sequence is synthesized)
tctccagcccttgctccactcatgcctgggggcctggggctgagtggtatccctacctggcctccccctggcctctgggcctccagcgctgggtttgtcgagtgagagagagagaggagc

SEQ ID NO: 86282 - DNA, 120 bp, Artificial Sequence
  ENSG00000085185_55 (sequence is synthesized)
ttgggttgcttccctgtccccgccccctctgtggcattgtccctcccactcttatttttctaccaattgctatttttccgaacaatccttgtagagtatgtaccatccaaaggcaggagg

SEQ ID NO: 86283 - DNA, 120 bp, Artificial Sequence
  ENSG00000085185_56 (sequence is synthesized)
gcaggagggcctcgccgtggccggctctggttggagatggtacagttttattgtacaggtgctaaaacaacaacaacaaaaaagaaaatggaaaaaaaaaagattaaaaaaaaaaggaaa

SEQ ID NO: 86284 - DNA, 120 bp, Artificial Sequence
  ENSG00000085185_57 (sequence is synthesized)
gtggttattttctttgtattgtgtttgttctttgttcctgggggggaagttctcggcccccttctgtaggactgctccccacccccaccatactgcccagttggttttgaacagttgttt

SEQ ID NO: 86285 - DNA, 120 bp, Artificial Sequence
  ENSG00000085185_58 (sequence is synthesized)
tccctttttaagaaaaaaaaatacatatatatatacatatatatatataaagttgaggggttttggactttaatttgttggttttgttggggttcctggtattgtgtagtttatttcatg

SEQ ID NO: 86286 - DNA, 120 bp, Artificial Sequence
  ENSG00000085185_59 (sequence is synthesized)
ttctgtttgcctttccttttttcgcatttgggtgtatattctggctgccctttatgtttcattttaagcaactggctgtggagtcaaaaacacttgcatactgaaaaacctgtgtcaggg

SEQ ID NO: 86287 - DNA, 120 bp, Artificial Sequence
  ENSG00000085185_60 (sequence is synthesized)
ggaaaagcgaggaaagacacagtctgcgattgtgccgcaccccccacccacctcttagcatctggattctgctctcgtagtgggggccgcggaccctccccgccacagtccttttactct

SEQ ID NO: 86288 - DNA, 120 bp, Artificial Sequence
  ENSG00000085185_61 (sequence is synthesized)
ccagcactcccaccgccttcccccttcttcagccatctgactctcctagggggtcggcgtggcgaaggacggctagccttggagggaaagtagccaccagtccaactcgggtcgccccca

SEQ ID NO: 86289 - DNA, 120 bp, Artificial Sequence
  ENSG00000085185_62 (sequence is synthesized)
agagtcacttccagcagtggagccctcccacttctgccagtccaactgccttttaaagggaacaagcctttccccctcggttagccccttctggatccctgaaaagatggggagaggccc

SEQ ID NO: 86290 - DNA, 120 bp, Artificial Sequence
  ENSG00000085185_63 (sequence is synthesized)
gaagacacgatctcccaaatctcccaccccagtgaaacccacagaaccatgtacaccctctaagtcccgaagtgccagctcagaggaggcctcagagtcacctacagcccggcagatccc

SEQ ID NO: 86291 - DNA, 120 bp, Artificial Sequence
  ENSG00000085224_0 (sequence is synthesized)
ctcggcccaacaaaatggcggcggcagcggtgtcgctttgtttccgcggctcctgcggcggtggcagtggtagcggcctttgagctgtggggaggttccagcagcagctacagtgacgac

SEQ ID NO: 86292 - DNA, 120 bp, Artificial Sequence
  ENSG00000085224_1 (sequence is synthesized)
taagactccagtgcatttctatcgtaaccgggcgcgggggagcgcagatcggcgcccagcaatcacagaagccgacaaggcgttcaagcgaaaacatgaccgctgagcccatgagtgaaa

SEQ ID NO: 86293 - DNA, 120 bp, Artificial Sequence
  ENSG00000085224_2 (sequence is synthesized)
gcaagttgaatacattggtgcagaagcttcatgacttccttgcacactcatcagaagaatctgaagaaacaagttctcctccacgacttgcaatgaatcaaaacacagataaaatcagtg

SEQ ID NO: 86294 - DNA, 120 bp, Artificial Sequence
  ENSG00000085224_3 (sequence is synthesized)
gttctggaagtaactctgatatgatggaaaacagcaaggaagagggaactagctcttcagaaaaatccaagtcttcaggatcgtcacgatcaaagaggaaaccttcaattgtaacaaagt

SEQ ID NO: 86295 - DNA, 120 bp, Artificial Sequence
  ENSG00000085224_4 (sequence is synthesized)
atgtagaatcagatgatgaaaaacctttggatgatgaaactgtaaatgaagatgcgtctaatgaaaattcagaaaatgatattactatgcagagcttgccaaaaggtacagtgattgtac

SEQ ID NO: 86296 - DNA, 120 bp, Artificial Sequence
  ENSG00000085224_5 (sequence is synthesized)
agccagagccagtgctgaatgaagacaaagatgattttaaagggcctgaatttagaagcagaagtaaaatgaaaactgaaaatctcaaaaaacgcggagaagatgggcttcatgggattg

SEQ ID NO: 86297 - DNA, 120 bp, Artificial Sequence
  ENSG00000085224_6 (sequence is synthesized)
tgagctgcactgcttgtggacaacaggtcaatcattttcaaaaagattccatttatagacacccttcattgcaagttcttatttgtaagaattgctttaagtattacatgagtgatgata

SEQ ID NO: 86298 - DNA, 120 bp, Artificial Sequence
  ENSG00000085224_7 (sequence is synthesized)
ttagccgtgactcagatggaatggatgaacaatgtaggtggtgtgcggaaggtggaaacttgatttgttgtgacttttgccataatgctttctgcaagaaatgcattctacgcaaccttg

SEQ ID NO: 86299 - DNA, 120 bp, Artificial Sequence
  ENSG00000085224_8 (sequence is synthesized)
gtcgaaaggagttgtccacaataatggatgaaaacaaccaatggtattgctacatttgtcacccagagcctttgttggacttggtcactgcatgtaacagcgtatttgagaatttagaac

SEQ ID NO: 86300 - DNA, 120 bp, Artificial Sequence
  ENSG00000085224_9 (sequence is synthesized)
agttgttgcagcaaaataagaagaagataaaagttgacagtgaaaagagtaataaagtatatgaacatacatccagattttctccaaagaagactagttcaaattgtaatggagaagaaa

SEQ ID NO: 86301 - DNA, 120 bp, Artificial Sequence
  ENSG00000085224_10 (sequence is synthesized)
agaaattagatgattcctgttctggctctgtaacctactcttattccgcactaattgtgcccaaagagatgattaagaaggcaaaaaaactgattgagaccacagccaacatgaactcca

SEQ ID NO: 86302 - DNA, 120 bp, Artificial Sequence
  ENSG00000085224_11 (sequence is synthesized)
gttatgttaaatttttaaagcaggcaacagataattcagaaatcagttctgctacaaaattacgtcagcttaaggcttttaagtctgtgttggctgatattaagaaggctcatcttgcat

SEQ ID NO: 86303 - DNA, 120 bp, Artificial Sequence
  ENSG00000085224_12 (sequence is synthesized)
tggaagaagacttaaattccgagtttcgagcgatggatgctgtaaacaaagagaaaaataccaaagagcataaagtcatagatgctaagtttgaaacaaaagcacgaaaaggagaaaaac

SEQ ID NO: 86304 - DNA, 120 bp, Artificial Sequence
  ENSG00000085224_13 (sequence is synthesized)
cttgtgctttggaaaagaaggatatttcaaagtcagaagctaaactttcaagaaaacaggtagatagtgagcacatgcatcagaatgttccaacagaggaacaaagaacaaataaaagta

SEQ ID NO: 86305 - DNA, 120 bp, Artificial Sequence
  ENSG00000085224_14 (sequence is synthesized)
ccggtggtgaacataagaaatctgatagaaaagaagaacctcaatatgaacctgccaacacttctgaagatttagacatggatattgtgtctgttccttcctcagttccagaagacattt

SEQ ID NO: 86306 - DNA, 120 bp, Artificial Sequence
  ENSG00000085224_15 (sequence is synthesized)
ttgagaatcttgagactgctatggaagttcagagttcagttgatcatcaaggggatggcagcagtggaactgaacaagaagtggagagttcatctgtaaaattaaatatttcttcaaaag

SEQ ID NO: 86307 - DNA, 120 bp, Artificial Sequence
  ENSG00000085224_16 (sequence is synthesized)
acaacagaggaggtattaaatcaaaaactacagctaaagtaacaaaagaattatatgttaaactcactcctgtttccctttctaattccccaattaaaggtgctgattgtcaggaagttc

SEQ ID NO: 86308 - DNA, 120 bp, Artificial Sequence
  ENSG00000085224_17 (sequence is synthesized)
cacaagataaagatggctataaaagttgtggtctgaaccccaagttagagaaatgtggacttggacaggaaaacagtgataatgagcatttggttgaaaatgaagtttcattacttttag

SEQ ID NO: 86309 - DNA, 120 bp, Artificial Sequence
  ENSG00000085224_18 (sequence is synthesized)
aggaatctgatcttcgaagatccccacgtgtaaagactacacccttgaggcgaccgacagaaactaaccctgtaacatctaattcagatgaagaatgtaatgaaacagttaaggagaaac

SEQ ID NO: 86310 - DNA, 120 bp, Artificial Sequence
  ENSG00000085224_19 (sequence is synthesized)
aaaaactatcagttccagtgagaaaaaaggataagcgtaattcttctgacagtgctatagataatcctaagcctaataaattgccaaaatctaagcaatcagagactgtggatcaaaatt

SEQ ID NO: 86311 - DNA, 120 bp, Artificial Sequence
  ENSG00000085224_20 (sequence is synthesized)
cagattctgatgaaatgctagcaatcctcaaagaggtgagcaggatgagtcacagttcttcttcagatactgatattaatgaaattcatacaaaccataagactttgtatgatttaaaga

SEQ ID NO: 86312 - DNA, 120 bp, Artificial Sequence
  ENSG00000085224_21 (sequence is synthesized)
ctcaggcggggaaagatgataaaggaaaaaggaaacgaaaaagttctacatctggctcagattttgatactaaaaagggcaaatcagctaagagctctataatttctaaaaagaaacgac

SEQ ID NO: 86313 - DNA, 120 bp, Artificial Sequence
  ENSG00000085224_22 (sequence is synthesized)
aaacccagtctgagtcttctaattatgactcagaattagaaaaagagataaagagcatgagtaaaattggtgctgccagaaccaccaaaaaaagaattccaaatacaaaagattttgact

SEQ ID NO: 86314 - DNA, 120 bp, Artificial Sequence
  ENSG00000085224_23 (sequence is synthesized)
cttctgaagatgagaaacacagcaaaaaaggaatggataatcaagggcacaaaaatttgaagacctcacaagaaggatcatctgatgatgctgaaagaaaacaagagagagagactttct

SEQ ID NO: 86315 - DNA, 120 bp, Artificial Sequence
  ENSG00000085224_24 (sequence is synthesized)
cttcagcagaaggcacagttgataaagacacgaccatcatggaattaagagatcgacttcctaagaagcagcaagcaagtgcttccactgatggtgtcgataagctttctgggaaagagg

SEQ ID NO: 86316 - DNA, 120 bp, Artificial Sequence
  ENSG00000085224_25 (sequence is synthesized)
agagttttacttctttggaagttagaaaagttgctgaaactaaagaaaagagcaagcatctcaaaaccaaaacatgtaaaaaagtacaggatggcttatctgatattgcagagaaattcc

SEQ ID NO: 86317 - DNA, 120 bp, Artificial Sequence
  ENSG00000085224_26 (sequence is synthesized)
taaagaaagaccagagcgatgaaacttctgaagatgataaaaagcagagcaaaaagggaactgaagaaaaaaagaaaccttcagactttaagaaaaaagtaattaaaatggaacaacagt

SEQ ID NO: 86318 - DNA, 120 bp, Artificial Sequence
  ENSG00000085224_27 (sequence is synthesized)
atgaatcttcatctgatggcactgaaaagttacctgagcgagaagaaatttgtcattttcctaagggcataaaacaaattaagaatggaacaactgatggagaaaagaaaagtaaaaaaa

SEQ ID NO: 86319 - DNA, 120 bp, Artificial Sequence
  ENSG00000085224_28 (sequence is synthesized)
taagagataaaacttctaaaaagaaggatgaattatctgattatgctgagaagtcaacagggaaaggagatagttgtgactcttcagaggataaaaagagtaagaatggagcatatggta

SEQ ID NO: 86320 - DNA, 120 bp, Artificial Sequence
  ENSG00000085224_29 (sequence is synthesized)
gagagaagaaaaggtgcaagttgcttggaaagagttcaaggaagagacaagattgttcatcatctgatactgagaaatattccatgaaagaagatggttgtaactcttctgataagagac

SEQ ID NO: 86321 - DNA, 120 bp, Artificial Sequence
  ENSG00000085224_30 (sequence is synthesized)
tgaaaagaatagaattgagggaaagaagaaatttaagttcaaagagaaatactaaggaaatacaaagtggctcatcatcatctgatgctgaggaaagttctgaagataataaaaagaaga

SEQ ID NO: 86322 - DNA, 120 bp, Artificial Sequence
  ENSG00000085224_31 (sequence is synthesized)
agcaaagaacttcatctaaaaagaaggcagtcattgtcaaggagaaaaagagaaactccctaagaacaagcactaaaaggaagcaagctgacattacatcctcatcttcttctgatatag

SEQ ID NO: 86323 - DNA, 120 bp, Artificial Sequence
  ENSG00000085224_32 (sequence is synthesized)
aagatgatgatcagaattctataggtgagggaagcagcgatgaacagaaaattaagcctgtgactgaaaatttagtgctgtcttcacatactggattttgccaatcttcaggagatgaag

SEQ ID NO: 86324 - DNA, 120 bp, Artificial Sequence
  ENSG00000085224_33 (sequence is synthesized)
ccttatctaaatcagtgcctgtcacagtggatgatgatgatgacgacaatgatcctgagaatagaattgccaagaagatgcttttagaagaaattaaagccaatctttcctctgatgagg

SEQ ID NO: 86325 - DNA, 120 bp, Artificial Sequence
  ENSG00000085224_34 (sequence is synthesized)
atggatcttcagatgatgagccagaagaagggaaaaaaagaactggaaaacaaaatgaagaaaacccaggagatgaggaagcaaaaaatcaagtcaattctgaatcagattcagattctg

SEQ ID NO: 86326 - DNA, 120 bp, Artificial Sequence
  ENSG00000085224_35 (sequence is synthesized)
aagaatctaagaagccaagatacagacataggcttttgcggcacaaattgactgtgagtgacggagaatctggagaagaaaaaaagacaaagcctaaagagcataaagaagtcaaaggca

SEQ ID NO: 86327 - DNA, 120 bp, Artificial Sequence
  ENSG00000085224_36 (sequence is synthesized)
gaaacagaagaaaggtgagcagtgaagattcagaagattctgattttcaggaatcaggagttagtgaagaagttagtgaatccgaagatgaacagcggcccagaacaaggtctgcaaaga

SEQ ID NO: 86328 - DNA, 120 bp, Artificial Sequence
  ENSG00000085224_37 (sequence is synthesized)
aagcagagttggaagaaaatcagcggagctataaacagaaaaagaaaaggcgacgtattaaggttcaagaagattcatccagtgaaaacaagagtaattctgaggaagaagaggaggaaa

SEQ ID NO: 86329 - DNA, 120 bp, Artificial Sequence
  ENSG00000085224_38 (sequence is synthesized)
gaggaggaggaggaagaggaggaggaagatgaaaatgatgattccaagtctcctggaaaaggcagaaagaaaattcggaagattcttaaagatgataaactgagaacagaaacacaaaat

SEQ ID NO: 86330 - DNA, 120 bp, Artificial Sequence
  ENSG00000085224_39 (sequence is synthesized)
tgagaacagaaacacaaaatgctcttaaggaagaggaagagagacgaaaacgtattgctgagagggagcgtgagcgagaaaaattgagagaggtgatagaaattgaagatgcttcaccca

SEQ ID NO: 86331 - DNA, 120 bp, Artificial Sequence
  ENSG00000085224_40 (sequence is synthesized)
ccaagtgtccaataacaaccaagttggttttagatgaagatgaagaaaccaaagaacctttagtgcaggttcatagaaatatggttatcaaattgaaaccccatcaagtagatggtgttc

SEQ ID NO: 86332 - DNA, 120 bp, Artificial Sequence
  ENSG00000085224_41 (sequence is synthesized)
agtttatgtgggattgctgctgtgagtctgtgaaaaaaacaaagaaatctccaggttcaggatgcattcttgcccactgtatgggccttggtaagactttacaggtggtaagttttcttc

SEQ ID NO: 86333 - DNA, 120 bp, Artificial Sequence
  ENSG00000085224_42 (sequence is synthesized)
atacagttcttttgtgtgacaaactggatttcagcacggcgttagtggtttgtcctcttaatactgctttgaattggatgaatgaatttgagaagtggcaagagggattaaaagatgatg

SEQ ID NO: 86334 - DNA, 120 bp, Artificial Sequence
  ENSG00000085224_43 (sequence is synthesized)
agaagcttgaggtttctgaattagcaactgtgaaacgtcctcaggagagaagctacatgctgcagaggtggcaagaagatggtggtgttatgatcataggctatgagatgtatagaaatc

SEQ ID NO: 86335 - DNA, 120 bp, Artificial Sequence
  ENSG00000085224_44 (sequence is synthesized)
ttgctcaaggaaggaatgtgaagagtcggaaacttaaagaaatatttaacaaagctttggttgatccaggccctgattttgttgtttgtgatgaaggccatattctaaaaaatgaagcat

SEQ ID NO: 86336 - DNA, 120 bp, Artificial Sequence
  ENSG00000085224_45 (sequence is synthesized)
ctgctgtttctaaagctatgaattctatacgatcaaggaggaggattattttaacaggaacaccacttcaaaataacctaattgagtatcattgtatggttaattttatcaaggaaaatt

SEQ ID NO: 86337 - DNA, 120 bp, Artificial Sequence
  ENSG00000085224_46 (sequence is synthesized)
atccattaaggagttcaggaatagatttataaatccaattcaaaatggtcagtgtgcagattctaccatggtagatgtcagagtgatgaaaaaacgtgctcacattctctatgagatgtt

SEQ ID NO: 86338 - DNA, 120 bp, Artificial Sequence
  ENSG00000085224_47 (sequence is synthesized)
agctggatgtgttcagaggaaagattatacagcattaacaaaattcttgcctccaaaacacgaatatgtgttagctgtgagaatgacttctattcagtgcaagctctatcagtactactt

SEQ ID NO: 86339 - DNA, 120 bp, Artificial Sequence
  ENSG00000085224_48 (sequence is synthesized)
agatcacttaacaggtgtgggcaataatagtgaaggtggaagaggaaaggcaggtgcaaagcttttccaagattttcagatgttaagtagaatatggactcatccttggtgtttgcagct

SEQ ID NO: 86340 - DNA, 120 bp, Artificial Sequence
  ENSG00000085224_49 (sequence is synthesized)
agactacattagcaaagaaaataagggttattttgatgaagacagtatggatgaatttatagcctcagattctgatgaaacctccatgagtttaagctccgatgattatacaaaaaagaa

SEQ ID NO: 86341 - DNA, 120 bp, Artificial Sequence
  ENSG00000085224_50 (sequence is synthesized)
gaaaaaagggaaaaaggggaaaaaagatagtagctcaagtggaagtggcagtgacaatgatgttgaagtgattaaggtctggaattcaagatctcggggaggtggtgaaggaaatgtgga

SEQ ID NO: 86342 - DNA, 120 bp, Artificial Sequence
  ENSG00000085224_51 (sequence is synthesized)
tgaaacaggaaacaatccttctgtttctttaaaactggaagaaagtaaagctacttcttcttctaatccaagcagcccagctccagactggtacaaagattttgttacagatgctgatgc

SEQ ID NO: 86343 - DNA, 120 bp, Artificial Sequence
  ENSG00000085224_52 (sequence is synthesized)
tgaggttttagagcattctgggaaaatggtacttctctttgaaattcttcgaatggcagaggaaattggggataaagtccttgttttcagccagtccctcatatctctggacttgattga

SEQ ID NO: 86344 - DNA, 120 bp, Artificial Sequence
  ENSG00000085224_53 (sequence is synthesized)
agattttcttgaattagctagtagggagaagacagaagataaagataaaccccttatttataaaggtgaggggaagtggcttcgaaacattgactattaccgtttagatggttccactac

SEQ ID NO: 86345 - DNA, 120 bp, Artificial Sequence
  ENSG00000085224_54 (sequence is synthesized)
tgcacagtcaaggaagaagtgggctgaagaatttaatgatgaaactaatgtgagaggacgattatttatcatttctactaaagcaggatctctaggaattaatctggtagctgctaatcg

SEQ ID NO: 86346 - DNA, 120 bp, Artificial Sequence
  ENSG00000085224_55 (sequence is synthesized)
agtaattatattcgacgcttcttggaatccatcttatgacatccagagtatattcagagtttatcgctttggacaaactaagcctgtttatgtatataggttcttagctcagggaaccat

SEQ ID NO: 86347 - DNA, 120 bp, Artificial Sequence
  ENSG00000085224_56 (sequence is synthesized)
ggaagataagatttatgatcggcaagtaactaagcagtcactgtcttttcgagttgttgatcagcagcaggtggagcgtcattttactatgaatgagcttactgaactttatacttttga

SEQ ID NO: 86348 - DNA, 120 bp, Artificial Sequence
  ENSG00000085224_57 (sequence is synthesized)
gccagacttattagatgaccctaattcagaaaagaagaagaagagggatactcccatgctgccaaaggataccatacttgcagagctccttcagatacataaagaacacattgtaggata

SEQ ID NO: 86349 - DNA, 120 bp, Artificial Sequence
  ENSG00000085224_58 (sequence is synthesized)
ccatgaacatgattctcttttggaccacaaagaagaagaagagttgactgaagaagaaagaaaagcagcttgggctgagtatgaagcagagaagaagggactgaccatgcgtttcaacat

SEQ ID NO: 86350 - DNA, 120 bp, Artificial Sequence
  ENSG00000085224_59 (sequence is synthesized)
accaactgggaccaatttaccccctgtcagtttcaactctcaaactccttatattcctttcaatttgggagccctgtcagcaatgagtaatcaacagctggaggacctcattaatcaagg

SEQ ID NO: 86351 - DNA, 120 bp, Artificial Sequence
  ENSG00000085224_60 (sequence is synthesized)
aagagaaaaagttgtagaagcaacaaacagtgtgacagcagtgaggattcaacctcttgaggatataatttcagctgtatggaaggagaacatgaatctctcagaggcccaagtacaggc

SEQ ID NO: 86352 - DNA, 120 bp, Artificial Sequence
  ENSG00000085224_61 (sequence is synthesized)
gttagcattaagtagacaagccagccaggagcttgatgttaaacgaagagaagcaatctacaatgatgtattgacaaaacaacagatgttaatcagctgtgttcagcgaatacttatgaa

SEQ ID NO: 86353 - DNA, 120 bp, Artificial Sequence
  ENSG00000085224_62 (sequence is synthesized)
cagaaggctccagcagcagtacaatcagcagcaacagcaacaaatgacttatcaacaagcaacactgggtcacctcatgatgccaaagcccccaaatttgatcatgaatccttctaacta

SEQ ID NO: 86354 - DNA, 120 bp, Artificial Sequence
  ENSG00000085224_63 (sequence is synthesized)
ccagcagattgatatgagaggaatgtatcagccagtggctggtggtatgcagccaccaccattacagcgtgcaccacccccaatgagaagcaaaaatccaggaccttcccaagggaaatc

SEQ ID NO: 86355 - DNA, 120 bp, Artificial Sequence
  ENSG00000085224_64 (sequence is synthesized)
aatgtgattttgcactaaaagcttaatggattgttaaaatcatagaaagatcttttatttttttaggaatcaatgacttaacagaactcaactgtataaatagtttggtccccttaaatg

SEQ ID NO: 86356 - DNA, 120 bp, Artificial Sequence
  ENSG00000085224_65 (sequence is synthesized)
ccaatcttccatattagttttactttttttttttttaaatagggcataccatttcttcctgacatttgtcagtgatgttgcctagaatcttcttacacacgctgagtacagaagatattt

SEQ ID NO: 86357 - DNA, 120 bp, Artificial Sequence
  ENSG00000085224_66 (sequence is synthesized)
caaattgttttcagtgaaaacaagtccttccataatagtaacaactccacagatttcctctctaaatttttatgcctgcttttagcaaccataaaattgtcataaaattaataaatttag

SEQ ID NO: 86358 - DNA, 120 bp, Artificial Sequence
  ENSG00000085224_67 (sequence is synthesized)
gaaagaataaagatttatatattcattctttacatataaaaacacacagctgagttcttagagttgattcctcaagttatgaaatacttttgtacttaatccatttcttgattaaagtga

SEQ ID NO: 86359 - DNA, 120 bp, Artificial Sequence
  ENSG00000085224_68 (sequence is synthesized)
ttgaaatggttttaatgttcttttgactgaagtctgaaactgggctcctgctttattgtctctgtgactgaaagttagaaactgagggttatctttgacacagaattgtgtgcaatattc

SEQ ID NO: 86360 - DNA, 120 bp, Artificial Sequence
  ENSG00000085224_69 (sequence is synthesized)
ttaaatactactgctctaaaagttggagaagtcttgcagttatcttagcattgtataaacagccttaagtatagcctaagaagagaattcctttttcttctttagtccttctgccatttt

SEQ ID NO: 86361 - DNA, 120 bp, Artificial Sequence
  ENSG00000085224_70 (sequence is synthesized)
ttattttcagttatatgtgctgaaataattactggtaaaatttcagggttgtggattatcttccacacatgaattttctctctcctggcacgaatataaagcacatctcttaactgcatg

SEQ ID NO: 86362 - DNA, 120 bp, Artificial Sequence
  ENSG00000085224_71 (sequence is synthesized)
gtgccagtgctaatgcttcatcctgttgctggcagtgggatgtggacttagaaaatcaagttctagcattttagtaggttaacactgaagttgtggttgttaggttcacaccctgtttta

SEQ ID NO: 86363 - DNA, 120 bp, Artificial Sequence
  ENSG00000085224_72 (sequence is synthesized)
taaacaacatcaaaatggcagaaccattgctgactttaggttcacatgaggaatgtacttttaacaattcccagtactatcagtattgtgaaataattcctctgaaagataagaatcact

SEQ ID NO: 86364 - DNA, 120 bp, Artificial Sequence
  ENSG00000085224_73 (sequence is synthesized)
ggcttctatgcgcttcttttctctcatcatcatgttcttttaccccagtttccttacatttttttaaattgtttcagagtttgttttttttttagtttagattgtgaggcaattattaaa

SEQ ID NO: 86365 - DNA, 120 bp, Artificial Sequence
  ENSG00000085224_74 (sequence is synthesized)
tcaaaattaattcatccaatacccctttactagaagttttactagaaaatgtattacattttattttttcttaatccagttctgcaaaaatgacctataaatttattcatgtacaatttt

SEQ ID NO: 86366 - DNA, 120 bp, Artificial Sequence
  ENSG00000085224_75 (sequence is synthesized)
ggttacttgaattgttaaagaaaacattgtttttgactatgggagtcaactcaacatggcagaaccatttttgagatgatgatacaacaggtagtgaaacagcttaagaattccaaaaaa

SEQ ID NO: 86367 - DNA, 120 bp, Artificial Sequence
  ENSG00000085224_76 (sequence is synthesized)
aaaaaaaaaaaaaaaaaaaagaaaactgggtttgggctttgctttaggtatcactggattagaatgagtttaacattagctaaaactgctttgagttgtttggatgattaagagattgcc

SEQ ID NO: 86368 - DNA, 120 bp, Artificial Sequence
  ENSG00000085224_77 (sequence is synthesized)
atttttatcttggaagaactagtggtaaaacatccaagagcactaggattgtgatacagaatttgtgaggtttggtggatccacgcccctctcccccactttcccatgatgaaatatcac

SEQ ID NO: 86369 - DNA, 120 bp, Artificial Sequence
  ENSG00000085224_78 (sequence is synthesized)
taataaatcctgtatatttagatattatgctagccatgtaatcagatttatttaattgggtggggcaggtgtgtatttactttagaaaaaatgaaaaagacaagatttatgagaaatatt

SEQ ID NO: 86370 - DNA, 120 bp, Artificial Sequence
  ENSG00000085224_79 (sequence is synthesized)
tgaaggcagtacactctggccaactgttaccagttggtatttctacaagttcagaatattttaaacctgatttactagacctgggaattttcaacatggtctaattatttactcaaagac

SEQ ID NO: 86371 - DNA, 120 bp, Artificial Sequence
  ENSG00000085224_80 (sequence is synthesized)
atagatgtgaaaattttaggcaaccttctaaatctttttcaccatggatgaaactataacttaaagaataatacttagaagggttaattggaaatcagagtttgaaataaaacttggacc

SEQ ID NO: 86372 - DNA, 120 bp, Artificial Sequence
  ENSG00000085224_81 (sequence is synthesized)
actttgtatacactcttctcacttgacattttagctatataatatgtactttgagtataacatcaagctttaacaaatatttaaagacaaaaaaatcacgtcagtaaaatactaaaaggc

SEQ ID NO: 86373 - DNA, 120 bp, Artificial Sequence
  ENSG00000085224_82 (sequence is synthesized)
tcatttttatatttgttttagatgttttaaatagttgcaatggattaaaaatgatgatttaaaatgttgcttgtaatacagttttgcctgctaaattctccacattttgtaacctgtttt

SEQ ID NO: 86374 - DNA, 120 bp, Artificial Sequence
  ENSG00000085224_83 (sequence is synthesized)
atttctttgggtgtaaagcgtttttgcttagtattgtgatattgtatatgttttgtcccagttgtatagtaatgtttcagtccatcatccagctttggctgctgaaatcatacagctgtg

SEQ ID NO: 86375 - DNA, 120 bp, Artificial Sequence
  ENSG00000085224_84 (sequence is synthesized)
aagacttgcctttgtttctgttagactgcttttcagttctgtattgagtatcttaagtactgtagaaaagatgtcacttcttcctttaaggctgttttgtaatatatataaggactggaa

SEQ ID NO: 86376 - DNA, 120 bp, Artificial Sequence
  ENSG00000085224_85 (sequence is synthesized)
ttgtgtttttaaagaaaagcattcaagtatgacaatatactatctgtgttttcaccattcaaagtgctgtttagtagttgaaacttaaactatttaatgtcatttaataaagtgaccaaa

SEQ ID NO: 86377 - DNA, 120 bp, Artificial Sequence
  ENSG00000085224_86 (sequence is synthesized)
atgtgttgtgctctttattgtattttcacagctttgaaaatctgtgcacatactgtttcatagaaaatgtatagcttttgttgtcctatataatggtggttcttttgcacatttagttat

SEQ ID NO: 86378 - DNA, 120 bp, Artificial Sequence
  ENSG00000085224_87 (sequence is synthesized)
ttaatattgagaggtcacgaagtttggttattgaatctgttatatactaaattctgtaaagggagatctctcatctcaaaaagaatttacataccaggaagtccatgtgtgtttgtgtta

SEQ ID NO: 86379 - DNA, 120 bp, Artificial Sequence
  ENSG00000085224_88 (sequence is synthesized)
gttttggatgtctttgtgtaatccagccccatttcctgtttcccaacagctgtaacactcattttaagtcaagcagggctaccaacccacacttgatagaaaagctgcttaccattcaga

SEQ ID NO: 86380 - DNA, 120 bp, Artificial Sequence
  ENSG00000085224_89 (sequence is synthesized)
agcttccttattacctggcctccaaatgagctgaatattttgtagccttcccttagctatgttcattttccctccattatcataaaatcagatcgatatttatgtgccccaaacaaaact

SEQ ID NO: 86381 - DNA, 120 bp, Artificial Sequence
  ENSG00000085224_90 (sequence is synthesized)
ttaagagcagttacattctgtcccagtagcccttgtttcctttgagagtagcatgttgtgaggctatagagacttattctaccagtaaaacaggtcaatccttttacatgtttattatac

SEQ ID NO: 86382 - DNA, 120 bp, Artificial Sequence
  ENSG00000085224_91 (sequence is synthesized)
taaaaattatgttcagggtatttactactttatttcaccagactcagtctcaagtgacttggctatctccaaatcagatctacccttagagaataaacatttttctaccgttattttttt

SEQ ID NO: 86383 - DNA, 120 bp, Artificial Sequence
  ENSG00000085224_92 (sequence is synthesized)
tcaagtctataatctgagccagtcccaaaggagtgatcaagtttcagaaatgctttcatcttcacaacattttatatatactattatatggggtgaataaagttttaaatccgaaatata

SEQ ID NO: 86384 - DNA, 120 bp, Artificial Sequence
  ENSG00000085224_93 (sequence is synthesized)
attttactatctctttccctgtgccttgcctggtttggaaattctggccgtttattgtttaagcaaaacaaagctataatattgtaagattgcttaatttattaaatttttttgtggata

SEQ ID NO: 86385 - DNA, 120 bp, Artificial Sequence
  ENSG00000085224_94 (sequence is synthesized)
taaatgggttacgtaagagtatactgagattttttttttaaagtgtactgagatattgatcctttgtcacttgggaatacaattagaatctgaggcagctggtttgcctccgtaaatgag

SEQ ID NO: 86386 - DNA, 120 bp, Artificial Sequence
  ENSG00000085224_95 (sequence is synthesized)
tagtctcttctctttttcctggtatgctatataagcattaacgttttttacatatgccataatgtgaatgggttggaaagcactgggggcagaatgtaggaggctacatgttgtgagccc

SEQ ID NO: 86387 - DNA, 120 bp, Artificial Sequence
  ENSG00000085224_96 (sequence is synthesized)
aaaaacacacagggaaggccatcagttccaaaagacaaattttgaccacttgtctaggatttttgtttcattttagttgtgtgcagtcaaatataagtcatttgtatatggatatatttt

SEQ ID NO: 86388 - DNA, 120 bp, Artificial Sequence
  ENSG00000085224_97 (sequence is synthesized)
tatatacgtgtatagtatattagaagcattctccagaactaatagataataaaaatttatttttttctttgcatctaaattaactccatataaaatggagtatatcataatgtatggaca

SEQ ID NO: 86389 - DNA, 120 bp, Artificial Sequence
  ENSG00000085224_98 (sequence is synthesized)
tcataatgtatggacatacgtagctggtattgtataactttaaaaaaaatgactttcttacagtaaatataagaaaatctgaataggaagtattaaggggctagtctgcctccttagcgc

SEQ ID NO: 86390 - DNA, 120 bp, Artificial Sequence
  ENSG00000085224_99 (sequence is synthesized)
agtaggcagcacatcggtctcataatctgaaggaagtattaaagggttaacaatgttgtacctggaatttgaaatggatattaaataattaattacctataattgagctacaatatgatt

SEQ ID NO: 86391 - DNA, 120 bp, Artificial Sequence
  ENSG00000085224_100 (sequence is synthesized)
tttgccacatattttattttcacgtcaaagagttactgtttgctttaatccttttgtagtagctgtctcgtttttctgagaagcagcatcttgaatgagtcatttaagtttagcttacat

SEQ ID NO: 86392 - DNA, 120 bp, Artificial Sequence
  ENSG00000085224_101 (sequence is synthesized)
catccccatttctgtgttttaaatgttttttattagaaggagagttcatgatcacgaaatgactatgtaaattacttcaaagtgttagatttattattacttaagtatttttagagtaag

SEQ ID NO: 86393 - DNA, 120 bp, Artificial Sequence
  ENSG00000085224_102 (sequence is synthesized)
cttcattggtaagcatttgcattttaaaacgtatgtaattgtatggatataaagttttgtgacagaatccttgtatatgatgtagagccgtaatattagtactaatataccatatttatt

SEQ ID NO: 86394 - DNA, 120 bp, Artificial Sequence
  ENSG00000085224_103 (sequence is synthesized)
cactcaacagatatttataaagtgcttactatatgcccagacataaggagggaactgataagcctaaatggtaaattgaagaaggtatgctatggaaatcctagggagatgctagtcttg

SEQ ID NO: 86395 - DNA, 120 bp, Artificial Sequence
  ENSG00000085224_104 (sequence is synthesized)
agactagcagctttgattttcatttatccagggacaggatttgagacttcgagccctctataagttggagagttctgtgaccccttctcaaagctgaatccctttaaagtttacaatccc

SEQ ID NO: 86396 - DNA, 120 bp, Artificial Sequence
  ENSG00000085224_105 (sequence is synthesized)
atcgacaatccagggagttgacaaggaagcttatctatttcagccagggctcttggttgggaaaaatagttacattgaatttacggtcatggccttcacctcacatactttatggtttga

SEQ ID NO: 86397 - DNA, 120 bp, Artificial Sequence
  ENSG00000085224_106 (sequence is synthesized)
atttatattactcatatagtctaaaagatccgaaactgaaatattaacttcacaagtaattctgagttggtgattccctggagacctggtagaagcaaatgtagaatcactctggagata

SEQ ID NO: 86398 - DNA, 120 bp, Artificial Sequence
  ENSG00000085224_107 (sequence is synthesized)
tatgaccttaaccaaggctacccagaaatttcacagattgtagctacacctgagaaaataaccttaggaaaagctaggaacagaaagtattagtagtcaacctgaggaaagttagcatac

SEQ ID NO: 86399 - DNA, 120 bp, Artificial Sequence
  ENSG00000085224_108 (sequence is synthesized)
aaaataaatggcatgattagattctcaagaacttctgataatagaagtatttgataaagactataagtatgtctaaaatgatatttttaaaattcctaatcataactttatgccagaaaa

SEQ ID NO: 86400 - DNA, 120 bp, Artificial Sequence
  ENSG00000085224_109 (sequence is synthesized)
tttaaaacttaaaatacacaatatttaagaaaaatatactcagcaatgagcattcgttgcagttatttcatattagccaaaaacaagaaacaatctagatgtctatgaggagaactaata

SEQ ID NO: 86401 - DNA, 120 bp, Artificial Sequence
  ENSG00000085224_110 (sequence is synthesized)
aatgatagtgtattcatgcagtggaatactacatggtagttagaatgattgaacgggagctccatgtcaagcatgagtaaatctcgctttgagtgaaaaagtaatttgtaggattttaca

SEQ ID NO: 86402 - DNA, 120 bp, Artificial Sequence
  ENSG00000085224_111 (sequence is synthesized)
aacagtatagccatttgtacagtttagtgatacacatgcagtaaaaaacataaaacactgcaaaaaatggtaaatatataatttaggggtttagttacctattggaaaggaaggaaggaa

SEQ ID NO: 86403 - DNA, 120 bp, Artificial Sequence
  ENSG00000085224_112 (sequence is synthesized)
agagaatgggatcatgtaggatcatatattaggcttcagcttcatccgaagttttaacagtgttaaaatttgatgaagatggaatgtggaagcacatttgtttcttatatcttatatact

SEQ ID NO: 86404 - DNA, 120 bp, Artificial Sequence
  ENSG00000085224_113 (sequence is synthesized)
tttctgagcatttaaatttttgtaacaaaaatatattttaaaatactttgcattaaaaagcaattgagaaagtgtataaacatgctaaacctgcatatttcttattttgaatcaaactat

SEQ ID NO: 86405 - DNA, 120 bp, Artificial Sequence
  ENSG00000085224_114 (sequence is synthesized)
gtttaaatcttttaataaattattttatgctactttctccttccacctttcatagtcaaagtttgtggggaaaatatataagaacgaaatcatttaatatgatatgctgattctggggtc

SEQ ID NO: 86406 - DNA, 120 bp, Artificial Sequence
  ENSG00000085224_115 (sequence is synthesized)
aattcttgttggcggtttccagatcctagtagcacagtgaaatgttttctacccccaaggtcttttctctcgtggtaactgagcctttccatctctgttgattcctgtctcatggagtat

SEQ ID NO: 86407 - DNA, 120 bp, Artificial Sequence
  ENSG00000085224_116 (sequence is synthesized)
gtttgggggcattttactctcttagggcctggtgggaaggggatggtttctcttctctttgggtctctgtctttctgagctccactcctaccccgagggtttgtctcttacacttgcact

SEQ ID NO: 86408 - DNA, 120 bp, Artificial Sequence
  ENSG00000085224_117 (sequence is synthesized)
ctctcagagtcaatctcttgcttgttctcttatttggcatctccttcctttctctttttctatctagagctcactcttctgggatagtctctgtccttctgtgctgtatgtgcgtgtgcc

SEQ ID NO: 86409 - DNA, 120 bp, Artificial Sequence
  ENSG00000085224_118 (sequence is synthesized)
tgcctttctcttttttccctcccctctcccaagtccccatcagtttctttcttactctccccatgggtaggtctttttctgtctctcttgctctctttccatttcttttctaatttacct
